United States Patent Application Publication US 2004/0123343 A1 - sequence listing, part 11

SEQ ID NO: 28847 - DNA, 2343 bp, Oryza sativa
  Clone ID: PAT_MRT4530_33405C.1
atgaaggcgacgtcggagggggcgtggcagggggacaacccgctgcggttctcgctgccgctgctgatcgtgcagatctgcctcgtcgtcgtcttcacccgcggcctcgcctacgccctccgccctctccgccagcctcgcgtcatcgccgagatcatcggcggcatcctcctgggcccgtcggcgcttgggcggaacaagcgattcctcgacaatgtcttccccaaggacagcctcaccgtgctcgacacgctcgccaacgtcggcttgctcttcttcctcttcctcgtcggcctcgagctcgacccggcctcgctccgccgcaccggccgcaccgccctcgccgtcgccgccgccgggatctcgctcccgtttgctctcggcgtcggcgcctcgctcgtgctccgcgccgccatcgcccccgacgccccccgtggcccgctcatcgtgttcatgggcgtcgcgctgtcgatcaccgcgttccccgtcctcgcgcgcatcctcgccgagctcaagctcctcaccaccgacatcggacgcatggccatgtcggccgcggctgtcaacgacatcaccgcgtgggtgctgcttgccctcgccatcgcgctctcgggatccgggtcgccgctcgtgtccatctacgtcctgctctgcggcgtcgcgttcgtcggcttcgccacggtcgccgtgcggcccgtgctcgtcttcatggcacggcggtcgccggagggcgagccggtgaaagaatcgttcgtctgcgccattctagtcatcgttctcgccgccggcttcgccacggacgccatcggcatccacgcgctgttcggcgcgttcgtcatcggcgtgctcgtccccaaggaaggcgcctgcgccggcgcgctgacggagaaggtcgaggacctggtgtcgtcgctgttccttcccctctacttcgtgtcgagcggtctgaagacggacgtcaccaccatctccggcgccaagtcgtgggggctcctcgtgctcgtcatgacgacggcctgcgccggcaagatcggcggcacggtggcggcgtcgctgctgatgcgtgtgccgctgcgtgaggcgctcgcgctggggatgctgatgaacaccaaggggctcgtggagctcatcgtgctcaacatcggacgcgaccggaaggtgctcaacgaggaggccttcgccatcctcgtgctcatggcgctcgtcaccaccttcatgaccacgccggccgtcaccgccgtgtacaagccggcgcggcggcaggcgtcgtacaagcaccgcacggtggagcgcgccgacgccgacagcgagctgcgcgtgctcgcgtgcttccacgccagccgcggcatcccgacgctgatcaacctcgtggaggcgtcgcgcggcacgaggaggagcaagctcaccatgtacgccatgcacctcgtcgagctgtcggagcgctcgtcggccatctccatggtgcagcgcgcgcgccgcaacgggctcccgttcgcgagccggcgcggccacgaaggcggcggcggcggcggggaggtggtggtggcgttcgaggcgttccagcggctcaccgccgtgacggtgaagccgatgacggccatctccgacctcgacaccatccacgacgacatcgtcgcgtcggcgctggacaagcgatccgccatcatcctgctcccgttccacaagatgctctgccatgacggcacgctcgagcccgtggaccgggcgttccaccaggtgaacgtccgggtgctccgcgacgcgccatgctccgtcgccgtcctcgtcgaccgcgcgctcggtggcgcggcgcaggtctcggcgccggacgtctcctactcggtcctcctcctcttcttcggcggcgccgacgaccgcgaggcgctcgcgtacgcctcacgcatgggcgagcaccctggcatcgcgctcaccgtggcccgtttcacggccgccgccgacgacgccgccgaagacgacgacgccatacaaaagcacatctccaacgtgcgcaaggccggaaacgacggagcgttcaagtacgacgaggtgtcggcccatggccggcaagaagtggcgttcgccatcaagacactgggtagaggcaagaacctggtggtggccgggcggtcggcggcggtggcgacgccgctggtggacaagacggactgcccggagctcggccacgtcgggagctacctggcgacgccggagttctcgacgacgtcctccgtgctcgtggtgcagaagtacgactcgagaggtgacactggcacatcgtcgtcgagccaagccggaggagaggcgaccgtggaggaatccggcgtgccaatccgccggccatag

SEQ ID NO: 28848 - DNA, 1194 bp, Oryza sativa
  Clone ID: PAT_MRT4530_33406C.1
atgaaggcgaagcatcggagggagcgccgcgtcacggcggcggcgtcgggttcgacgaccgcgcgcgacggcggcgccggcgccggcatccccgacgcgctcctcgaacggatcttcctccggcaggactcggccctaagcctcatccgcgcggcggccgcgtgcaggcggtggcgctggcgccgcgtcatcggcggcagaatcttcctcctccggttccggggacaacatagttggaccaggacggaggcctacaccgtcggcagctaccacgtcgccgacaaccccaactaccggtggccgcggcggcgccacggcagcgacgacgacggcgccgccatcgtcgacccgtccaccgacttcgacaggcggcacttctcctccctcgacttcatccccgacgccaagtcgtggcatgtcgtcgacggcgtctccagcgtcgtccttctcgccaagaagaggatcgggtggaagcgccgctgcttccccgacctcatggtgtgcgagcccctcacgcggcggcgccgggcgatcacgccgttgccggagatgaggtcccaccgctgcctcggcgcgttcctgaagcacgagcgcgacgtccgcgtcaacatgtcgaggttcaccgtgatctgcgcgctctacgagcggtacgacggcggcgtgcccgacgacgtgggcaccgccatgggctactcgttctgccggttctcgctcgacgccctcccggccggcctccggtggtcgtcctcgccgcagcacgacgacgagccaccgttccatgtcgtcgatcacggaggcgaaccttacccgcccttcattgacagcctcgccgcgcgcatcgtcggcttgtccggcggcgagctcagggtgttctcgcgctggcgagacgaggacgggtgggagctcctgaatcgcgtcagcttgccggagatcacccgcgcgccgccgccacatgccgatcggaacgacgacgataggttctcctccctctccggcaacggcgtcaccgccattcttgcatgccggcggccgtgttgggcaagtggtcctgtggccggcgcaggggaggtgggtgttcaccgtcgagctcgacaccacgacgatagaacgcaagcacgccatggacgaacacgtaggtggtttggtatacaagcacgagatgccatggccaactcaccttcaaagcttgcgtag

SEQ ID NO: 28849 - DNA, 348 bp, Oryza sativa
  Clone ID: PAT_MRT4530_33407C.1
ccaacaacgaggacatgtcattgccagatcaaagtatggaaaacccctatacgatgcttcaggctaaatttgtgtacatgcatcttaatctaacatttttttaagacaatgatctaaatctaacatataaatcaggaaaagaaatatataaatatcatctttgcttccattaattgcttgaagtcacaaggagttgcacctacctaggattcaaagactgataacagttggcagctataccgtacgcacgagtactgctgtactggtagtacagtactaacttactgcactgcactgtcacggggagggagtggtgactctcaccctgcgtgacattgtcgagagtac

SEQ ID NO: 28850 - DNA, 1401 bp, Oryza sativa
  Clone ID: PAT_MRT4530_33408C.1
atgcccgagctccacctccgccgctccgcgtggacgagctccccgacctcggccgtctccctcgtcgacggcgccctcgcgggctactccgccccgacgctccgcctcctcgacatcgacgtccccggcgcccgcctcgccgtcgccacccacgtcgcgccgtggctgcgcttcgccgcggaacgcgtcgccggggagctctccatccgtctgcggagcgggaggtacggtgacggggcgggggaggaggaggtgctcgacctgcccgtctgcggcgcggcgacggcgatccacctccgcctcgtctctcacctccatctccggccacctcccggcggcgcgttcgccgcgctcgccaccgcgacgatacaaagctgccgcgtggacggcggcgagctgggccgcctcgtgtcgtcgccgcagtgccctcgcctggaggagctctacctcatcaacgtcgcgctcgtcgccgccgccgcctccgacgtcgccatctcctccgcctcgctccggcggctgcggtttggcgtctgcgacacccgccgcctcgacgtcgacgcgccggagctccggttcctaagcgtgtcgaacgccggcgaagcgcgcgtcaccgccgggaaggtggaggaggtggcgcacaccggcgacatggaccggtacgagtacacccagctgggacgccatctccggcggctggagatcgacttgacctctccaatggcggcgtttcttgggcggctcgacaccgtcggcgaattgagccttcatcttgcatttcaatcggagctaagtgattggtcgcagcaattcgagaagttagtcgaggaaatgagcaagcttcctgagtgtgaggcattggagatatgcccagcattcaatcattctcatggatttctaccaattgcgatgcatcttcttaggagatttgctggtatcagaaaactttcggtcaatttgtggtgggtgaagcctccatgtccacccgagctagtatcttattgcccttgcagaacgttgacagatgatctctttactgacaacaacatcatcatgctttgtcatcttgaagagattgaaatcgatgagttcagagaaagagatgagcaagtggaatttgtgaaccaattgctgagatgcaatgtgccgctgcttgaaagggttgtgttcaacgtaccaagctgttgtttcccagaaagcgaggagatcatacgcgagaagatccatggcaagcttcgtggagacaagatcaagtctataatttcagcaaagagggtgactactccaatttttttcttcagtctaaatgagactctgcatctttcattgatgataccaatggaaaacagagtcctctgctttcattgctctgtctactatactgcaagtctagagttggcctaa

SEQ ID NO: 28851 - DNA, 263 bp, Oryza sativa
  Clone ID: PAT_MRT4530_33409C.1
ctccaaactgcgtgatcggcctctcctcgatgccgcacgtcggggctgcaggaccgtttcggtcccgcacctgctggcacagccgcgccgtaggaccaactcggttccgcactttcaatccgcgcgaccgagtaggtcccgcaatgccaatccgcgccaccgcgttcccgcgctgccgctccgcgttaccatcttgttcccgcatatccaacgtgcggggaagaaaatacatcgttttaatagtctgggaaccgcatgtgtag

SEQ ID NO: 28852 - DNA, 167 bp, Oryza sativa
  Clone ID: PAT_MRT4530_3340C.1
agcggggaccctagtagtgtgggcgccctttttttttttttatagatgtaccaccaacagctttcaccgatgaatagtaggacattgacaaaacatgcagacatgcaactgcatctggaagacgcgtatatcccattgtactaagcagcggttcaagaccaaaaaca

SEQ ID NO: 28853 - DNA, 211 bp, Oryza sativa
  Clone ID: PAT_MRT4530_33410C.1
tttgtttcggtggctaaccaacaggttgggtgcttgtgatgggtcaacttatcggctgcgggatagcacgggaccacaaacgggctgtgagtgtgccttgctaaagctcgcgagttatcttggtgagagcgggacattggactgaagctacgagtgtggactattgttgaggagtcatgaaaacctactgtctatcttgtcaaaggtgctc

SEQ ID NO: 28854 - DNA, 844 bp, Oryza sativa
  Clone ID: PAT_MRT4530_33411C.1
aaacattcacacccctaatgcccttctcttgaagaatctgcataagttctataatagatatcctgttccctgggtcagtttgatttggaatacttactacactgcagaacctcctcatgttgttactcctaaaggatcgaattcaaatctcttagttctgatgttctttacttctgatctacctcagctctttgccttgccactatcagagcaagcttttcaggaatatttggcaatgtcagctgcagataccttggagcatcttaatgatgagagtgatcgttggacatatgtttggggcaacggtatcttttcctcacagaaaatttatgccatgaatttttctcatgtccatgtgcctgtttatattaaatggatttggaagagcagttgtactatgaaagtcaaggtgtttggttggctactcttgattaatcggttaaatacttatgacatgttagacagaaggcattgctcccctcaaaatgcttccttgctctgtgtactttgttcaacaggatcaagggaaacaactctccacttatttttccagtgtccttttagcactcaatgttgggcgcaatttggtgtggtttggaatctttctttaagctttggtgaaatgttggtcatggccagaaattcatataactctacccattttgttgagaaggtgctttatgctgcttggaccatttggaagcagaggaatagtttaatttttgaaaacattgtttcctctgttccctcttggagagttctctttaggaatgatctctcccttttagttcatagagtcaaaaattctgagagatatacattgttacagtggttaaatttgttg

SEQ ID NO: 28855 - DNA, 217 bp, Oryza sativa
  Clone ID: PAT_MRT4530_33412C.1
tggtgcatggcgggcattcctgccttgagttcgactccctcctccaatcacgtacatcaccaaggttccgaggttgtatcaaacacctttggtgaattttttgtttggtgtcgtttcgagatctgtttggaaaatacggaaccggcataaattcaacagtccatttttgtatagttctaattttgggtttgaacttttacatttgagtccctataaa

SEQ ID NO: 28856 - DNA, 1138 bp, Oryza sativa
  Clone ID: PAT_MRT4530_33413C.1
atggccaccggcgccgccgctgccaaccacggccgctgctccctcctcctcttcgccgccatcgccatggtgctgctggtgttcgtggcgacgacgacggccgcggcggcgcgagatgttcgtcgtcccgccgccgtggagaagaagatggcggctgtgatgaggcacgatgtccccagcagcgggccgagccccgtgcacaacggcgcgccgactcctccggccgccgccgacgagcccacggtggccgtgacggagcgtctggttcccaccggatcgaacccgttgcacaacatgcccagtcctctacaaggccgcacaccgaccaagaagacggggttctctggtgttgagagtattaatatcctttataactctagtccctaagaagtcttctcctgaaaagagtgtggctctaaaacttcttactaaggtgctggctgataggctacaatctgtcatcattgaattgatccaccaaaaccaatatggtttcattaaggctagaaatattcaggactgtttggcttggtcttttgaatatctgcatcagtgccagcattctaagagggaaatagttcttttaaaattggattttgagaaagcttttgatactattgaacattcagttatattggacatcatgaggcagaaaggctttgatcctaaatggataagctggatttctcagattttttcttcagcctcttcttcagttatcctaaatggtgttcctggcaaatccttctattgcaaaaggggtatttggaaaaagttgatcatctctcaaaattgtttggttgctctattgctctttgccttgccactttcagagcaagcttttcaggaatatttggcaatgtcatctgcagataccttggagcatcttaatgatgagagtgatcgttggacatatgtttggggcaacggatcaagggaaacaactctccacttatttttccagtgtccttttagcactcaatgttgggcgcaatttggtgtagtttggaatctttctttaagctttggtgaaatgttggtcacggccagaaattcatataactctacccattttgttgagaaggtgctttatgctgcttggaatatttggaagcagaggaatagtttaattttttaa

SEQ ID NO: 28857 - DNA, 1326 bp, Oryza sativa
  Clone ID: PAT_MRT4530_33414C.1
agataaagtaatccagaacgtatttaagccatcgcaaagattctactatttggctagaaatattcaggactgtttggcttggtcttttgaatatctgcatcagtgccaacattctaagagggaaatagttcttttaaaattggattttgagaaagcttttgatactattgaacattcagttatattaaacatcatgaggcagaaaggcttagatcctaaatggataagctggatttctcagattttttcttcagcctcttcttcagttatcctgaatggtgttcctggcaaatccttctattgcaaaaggggtgtaagacagggtgatccactttcacccttattatttgttcttggagctgacttgttacaatctatagtcaataaagcttgttctcagtgagtttttacaatgccaatcccaacacctggtaatgaatttccgattgtccagtatgcagatgatactctacttttttttgactgcttccaaaaagagcttttctgtctcaaggcaattttgaatacttttgcctcttcaactggccttaagattaactatagtaagtcatgcatgattcctctgaatgtagatttggaaaaggttgatcatctctcaaaattgtttggttgctctattggtaagttaccttttacttatctgtgtcttcctcttggaaccacaagaccaagagttatagattttgctcctctagttgatagagtagagagaagactctcatcaaccactgctttgttatcttatggggacagattgaccattgtgaatgcagttctttcctcccttcccacttactacatgtgctctctttcacttccaaagacagttatagaaagtattgatagagctaggagacattgcctgtggaggggatctgatattaattctagtaagaagtctttggttctctgggcaaaagtttaatagaccttagattgcaaaataattcccttctcttgaagaatctgcataagttctataatagatatcctgttccctgggtcagtttgatttggaatacttactacactgcagaacctcctcatgctgttactcctaaaggatctttttggtggagggatgttttacaatttgtggatatttttagaggcatctcggcctgtactgtgcaagatggaaaatcttgtttgttttgggaagatttgtggaacaataaagtcagggccttggtttatcccaaaatatattcttttgccaggaattcaaatctctcagttatgatgttctctacttctgatctacctcagctctttgccttgccactttcagagcaagcttttcag

SEQ ID NO: 28858 - DNA, 1869 bp, Oryza sativa
  Clone ID: PAT_MRT4530_33415C.1
gcagagtacacagatgacaatttgatacagttccacgcaagcgagcctcacgagataacgactcaacgagtcaattctacgtgacaggggatcacccaaataatcaaccgaaaccggagaatggaaccggcggctttgaatggctcaaaactaaagaacgactcaggacggacaaacgaatgaaccacaggggaacacctcgttcgaatgaacgagcgaatgactcaacaacggctgcggcaaaaccggcgggctattgtcaacaaaatgccaattgatagatctccagggcctgatggattcaatggttgcttcattaaggcctgttggcctataattaaacatgacttttataatctttatgctcaattttgtgagggttctctggtgcttgagagtattaatagatcctttttaactctagtccctaagaagtcttctcctgaaaaggtaattgacttcaggccaatttctttacagagtgtggctctaaaacttcttactaaggtgctagtagataggctgcaatctgtcatcattgaattgatccaccaaaaccaatatggtttcattaaggctagaaatattctagaaagtttggcttggtcttttgagtatctgcatcagtgccagcattctaagagagaaatagttcttttaaaattggattttgagaaagcttttgatactattgaacattcagttatcttggacatcatgaggcagaaaggctttgatccttaatgaataagctggatttcttatattttttcttcagcctcttcttcagttatcctaaatggtgttcctggtaaattcttctattgcaaaaggggtgttagactgggtgatccacttttacccttattatttgttcttggagctgacttgttgcaatctatagtcaataaagcttgttcttagggagttcttacaatgccaatcccaacatctggtaatgaatttcctattgtccagtatgcagatgacactctcctatttttgactgcttctcaaaaagagcttttctgtctcaaggcaattttgaacacttttgcctcttcaactggccttaagattaactatagtaagtcacgcatgattcctctaaatgtagattagtgatcatctctcaaaattgtttgctcaattggtaagttaccttttacttatctgggtcttcctcttggaaccacaagaccaagagttatagattttgctcatctagttgatagagtagagagaagactctcagcaaccactgctttgttatcttatggggatagattgaccattgtgaatgcagttctttcctccgttcccacttactacatgtgctctctttcactcccaaagacagttattgaaagtattgatagagctaggagacattgtctatggaggggatctgatattaattctagtaagaagtctttggttctttaggatagagtttgtcagccaaaagagagaggtggtttgggtgtaatataccttagattgcagaataatgcccttctcttgaagaatctacataagttctacaatagatatcctattccctgggtcagtttggtttggaatgcttactacactgcagaacctcctcatgctgttactcctaaagaatccttttggtggagagatgttttgcaatttgtggatatttttggaggcatctcggcctgtactgtgcagtatggaaaatcttgcttgttttgggaagatgtgtggaacaataaagtcagggccttggtttatcccagaatctattcttttgccaggaatacaaatctctcagttcttatgttctctacttctgatctacctcagctctttgccttgccactttcagagcaagcttttcag

SEQ ID NO: 28859 - DNA, 621 bp, Oryza sativa
  Clone ID: PAT_MRT4530_33416C.1
atgcgcgcccgtccaaagccgccgccgagtccgattttgattctacccatggtgaatcacgccaattcttgccgcacggttggattgaagatagacggtggtatcccctctcacaattcaaaccattcacccccgagtcggccgttttcaccctcgccgccactgcgcatcgcgcccggattggcgccaacacgtcgccagccgatttcgcacgcggtcaagccaatccttcgctgtatattagaccctaacccaagccctgcgtcgagttttacctcgccgcgccaagccaagcaccgccgccctcgcactgctctgttcttcgcccccgagaagtttttccggccgcaatcctccgtttcaaccgatctcgccgttagctcaaccacaaaccaaattaacccctccgccgccgctcgccgtcgccggagaaccctagctccctcccctcctcggccgcaaccactttccccctccatcgcccgatttggggaatggccggaggtagaagaagagaagagagagagagagagactgacaggtcttgaggattcttctgactcaatagataatatcaatgaatctcaggacatcgagcaaggcaagttaccatataacttt

SEQ ID NO: 28860 - DNA, 1278 bp, Oryza sativa
  Clone ID: PAT_MRT4530_33417C.1
atgtctatggccaggaatcagccacaggatgaagaaattgatttgcagaaacacaaaaatgtcatctccttctatgagaatcctttgcttcgaagccatctggctctagcctttgttgataaattggaggagctcagagacttgaccttggctgagtggaattttagactctttatgaaaaaaaaggcagaaattatttttcaaacctttcagcaaaggatgggagtttcttcttctccagtcatgcacttcagtttggcagatctcatttctgctgctcctgatcttcagtcattgtctcttggctttacaaccatggaaattgatgaagttgtcaacaaaatgccaattgatagatctccaaggcctgatggattcaatggttgcttcattaaggcctgttggcctataattaaacaggacttctataatctttgtgctcaattttgtgagggttctctggtgcttgagagtattaatagatcctttataactctagtccctaagaagtcttctccagaaaaggtaaatgacttcaggccaatttctttacagagtgtggctctaaaacttcttactaaggtgctggctgataggctacaatctgtcatcattgaattgatccaccaaaaccaatatggtttcattaaggctagaaatattcaggactgtttggcttggtcttttgaatatctgcatcagtgccagcattctaagagggaaatagttcttttaaaattggattttgagaaagcttttgatactattgaacattcggttatattggacatcatgaggcagaaaggctttgatcctaaatggataagctggatttctcatattttttcttcagcctcttcttcagttatcctaaatggtgttcttggcaaatccttctattgcaaaaggggtgtaagacagggtgatccactttcacccttattatttgttcttggagctgacttgttacaatctatagtcaataaagcttgttctcagggagttcttacaatgccaatcccaacacctggtaatgaatttctgattgtccagtatgcagatgatactcttatttttttgactgcttcccaaaaagagcttttctgtctcaaggcaattttgaacacttttgcctcttcaactggccttaagattaactataatttggaaaaggttgatcatctctcaaaattgtttggttgctctattgagcaagcttttcaagaatatttagcaatgtcagctgcagataccttggagcatcttaatgataagtga

SEQ ID NO: 28861 - DNA, 426 bp, Oryza sativa
  Clone ID: PAT_MRT4530_33418C.1
atggcgaacgacgagtacgacgcactccatgccgctgccaacgcgagaggcggaaccgtagggtgtccctgtgctttaccttcgtacggcttctgccacggcaggggtttcagtgacttccgaggtgtgcggctgacttgctaccaacacatccttggctacggctcctccaccgccggcattgatcccccacgacgcctcatcctcgacaggtgggagacctcctcgtcgtcctgcgctgaccgagtggtggagagccacagcgccaacccctccccgtcgaggcagtacatggcagtgaacgatgatgatgtgctccaaatcgacgccatcaccaatgggggtgggcgaagcctagacggtggtagcgccctctcacacgtttgcagggagataaaagctcctggctcccatcactggtggtga

SEQ ID NO: 28862 - DNA, 1572 bp, Oryza sativa
  Clone ID: PAT_MRT4530_33419C.1
gtctcctccactgcaatttcctcaaaacatattcttatctacttgctgtttccagatgatactctactttttttgactgtttcccaaaaagagcttttctgtctcaaggcaattttgaacacttttgcctcttcaactggccttaagattaactatagtaagtcatgcatgattcctctggatgtagatttggaaaaggttgatcatctctcaaaattgtttggttgctctattggtaagttaccttttacttatctgggtcttcctcttggaaccacaagaccaagagttatagattttgctcctctagttgatagagtagagagaagactctcagcaaccattgctttgttatcttatggggacagattgaccattgtgaatgtagttctttcctcccttcccacttactacatgtgctctctttcacttccaaagacagttatagaaagtattgatagagctaggagacattgcctgtggaggggatctgatattaattctaataagaagtctttggttctctgggaaagagtttgtcagccgaaagatagaggtggtttgggtgtaatagaccttacattgtaaaataatgcccttctcttgaagaatctgcataagttctataatagatatcctattccctgggtcagtttaatttggaatacttactacattgcagaacctcctcatgctgttactcctaaaggatctttttggtggagggatgttttgcaatttgtggatatttttagaggcatctcggcctgtactgtgcaagatggaaaatcttgtttgttttgggaatatttgtggaacaataaagtcagggccttggtttatcccagaatatattcttttgccaggaattcaaatctctcagttctgatgttctctacttctgatctacctcagctctttgccttgccactttcagagcaagcttttcaggaatatttggcaatgtcagctgcagataccttggagcatcttaatgatgagagtgatcgttggacatatgtttggggcaacggtattttttcttcacagaaaatttatgccatgaatttttctcatgtctatgtgcctgtttatattaaatggatttggaagagcagttgtactatgaaagtcaaggtgtttggttggctcctcttgattgatcggttaaatacttatgacatgttagacagaaggcgttgctcccctcaaaatgcttccttgctctgtgtactttgttcaacaggatcaagggaaacaactctccacttatttttccagtgtccttttagcactcaatgttgggtgcaatttggtgtggtttggaatctttctttaagctttggtgaaatgttgatcacggccagaaattcatataactctacccattttgttgagaaggtgctttatgctgcttggaacatttggaagcagaggaatagtttaatttttgaaaacattgttccctctgttccctcttggagagttctctttaggaatgatctctcccttttagttcatagagtcaaaaattctgagagagatacattattacagtggttaaatttgttg

SEQ ID NO: 28863 - DNA, 327 bp, Oryza sativa
  Clone ID: PAT_MRT4530_3341C.1
atgaccggcgatgaccacgaaggtcccttggaggacgcattggaagcggcggtgctggaggaagtctgcaagatcactaggaatggcggcggaggtggagatggcagcaaaggcggcggaggaggaggcggtggaggcgtcatcaaatccatggcggcagcggctagggttcaagccgcaacagcgacgaacttgttcgttcccctcctctttctgatgctccctcgattcctgtcccgtgaggcggacaagaaggcgtgggggcctgatctggcccctgagcttgggacctccatagcggcgaggaggaggtctggtgaggagtag

SEQ ID NO: 28864 - DNA, 594 bp, Oryza sativa
  Clone ID: PAT_MRT4530_33420C.1
atggggctctccctcttcttcctctccgctcttcctcgtcctcacggcggagcggcggtgggcagaacggaggggcgggcggagcggcggtgcgcggggaccggcggggagggggggagcggcgcgggtgccagcgggagagggtcggcggcgcacgccggccgacgggtgggcggcagcggagagggcggccgacggagggtggatgaggagcagcggctcgccggcctctccacccttgtcggcatccccgtctcctccctctccgcgcgcgctcgccggccggcgaggaaggatggccaggagggagggagagaaggaggcgctggtgcggcggtccctcgtctcctgttgttcgcggcgtggatagagaggagggtgggagtagatggtggcatcgatgttcagaatgggcgagcgagacggggcggcgagccgccgctcctcttccgccctcccaccgccgtggcgccatcgctccgcccaccgcccgccgccgctccacttccacccgcgacccctttgctccgcccaccgcccgccatccttccgcccgcagcccctttgctcgccgcccgccgcccgccggggtag

SEQ ID NO: 28865 - DNA, 288 bp, Oryza sativa
  Clone ID: PAT_MRT4530_33421C.1
atggcatggcgatgcgatgcttccccgaggccaggatgtgagacggagatgcggaggctggcgctccccctgccgactcccgttcgccggcgaggtcgccgccgcgtcctcttcgttgcctggctcgcccgtgtgcaggggattcagctgcattggccggtaaggcccgcagggtatctccctgtgccgtctccgtcgccgatcttcgggtgcggtaaccggcataaaaaggggtcatcagcagaagttggtgtcacagaaagaaccccaggtgatgagccattttga

SEQ ID NO: 28866 - DNA, 367 bp, Oryza sativa
  unsure (1)..(367): unsure at all n locations
  Clone ID: PAT_MRT4530_33422C.1
atgctcaaaagtccttttcaggtaggccaataccatccagcatctggcatctgctccaatcaacaagtgacgtgcaccgncgtttcagagcctaaatccggncttcttcctcaacggtgcacgttactggaaaggttaactcgttgtcatgtcaggctaatagaggatgggtgaaagcataaccagtttcaagaatcaatatcagctttcatttcaagtactccctgggagttacagaggtggttttctatgaggccctaaaagtaaggaccatctttcagaattttntnggacttccgtggcaattcgnttcgancagcgagatgctttgncctcaattgtttagctttgatcggggntcgnttca

SEQ ID NO: 28867 - DNA, 444 bp, Oryza sativa
  Clone ID: PAT_MRT4530_33423C.1
atgtcgagcatgaggtggtcccagataaggaacaatatgggctcgttctacgtgatgttggggcgcccgcataggttgtcgttgtcatcgctgctaccgccgctgtcgaaccacaacaaggagatgtggagaaggcgacatcctttgagcgcggtgttgagtatcaccagggcgccacggaagacaacggcgtgcggcggcacgcggctggcggcaggagaggagggagcaacgtgcaaagaccggcgaggcgggcagggaggaaggacgcagggaggccggcgatggccgagcgccatgggcgggggcttgatggcgacggacgaagggagaggtgcgcagccgacggcaacccgtgggagagggagcggcgaccgccctccgccgcaacccgcctccaccatcgagctcgtcagcgaccgcccaccgaagcgaggaggatga

SEQ ID NO: 28868 - DNA, 306 bp, Oryza sativa
  Clone ID: PAT_MRT4530_33424C.1
atggtgggcccacgtgggccccacatatcattccctttctccctcttcttcctcgttgcgtcttctgactccgcgggcgcgccgcgccgctcaaccaccagcacgcggccgccgccgcccaaggccgtgctgcccgtcgtcttcgtcgacggcgaccaaaccgtcgacctcggcaccgtcaccgtacagcccttcctcggcgtccgcaagctgcgggtcgtcgtcgccgaccgggtgggcctcgtgcggcagcagatcttggcctcgctcgcgcgcccatgccgtgcgcgccacgtccccctctag

SEQ ID NO: 28869 - DNA, 1161 bp, Oryza sativa
  Clone ID: PAT_MRT4530_33425C.1
atggccggccaacttcaagcccatgggcatcaacaagtatacgacggcaagaccgaccccagcgcatggctttccgtctactctaccaccatccaagctgccgggggcgaccaactagtcatggcaaactgcctgctagtcatgctgaccacagccgcccaggcatgggtgacggggctaccgaggtacaccatcaacagttggttcgaactgaaggggcagttcatcgtcaacttccagggcacctttccccacccgggcactcagtgggatctataccagatcgttcaaggcaacgacgaacgcttctccaattacattcgccgcttcacggaacgtcgcaacaccattctgcatgtcactaacacggagcatgttttagcggctttgccgccggcgtacacgggcgtgctgtacctgcaccaccacaagaaggaggaggaggcggcggccgcggcggcgctggggcagttgaacgaggcgaagaagaagcgggagaagtggctcaaggagatgagcggctggctgatggtgctcgccgtgctcgccgcctccgtcacctaccatgccggactcaaccctcccggcggcttctggcagcacaacgacggtgagagtcacgtcgccggcacgccggtgctccagtccaacttcccacaaaggtacaccgtgttcttctacttcaacgcgacagcgttcgtgacgtcggtggtgatcatcatcctgctgatgaacgagtcgttctaccactcggaggcgaaggtggtggcgctggagatcatcgcggtgctcgacatggtgtgcctcatgggtgcctacatcgccggcagcacgcacgcggcgccctgctccatctacgtcaccgtcctcaccgtcgtcgtcttcctctacgtcgtgtacgcggcggagctcctgcgcaagatctggtggctcatcatccacgcgcccgtgcacgacaccgccgccaccggcggcggcaagctgcccgccgtgccacaacacatcgtcgagcaggcctcgccgcaccaccgctgccacgccgacgacgttgatagctccatgtcggcgccgccacggtggtgcatgcagaagttctgcactcctttttctttcatgcatgtcggagtgaggaatctttatttcgtctacttggatcactga

SEQ ID NO: 28870 - DNA, 226 bp, Oryza sativa
  Clone ID: PAT_MRT4530_33426C.1
acaaataatgaaaataactagacaaaagacaactaacaagacaagagagactggaagacgaataagaatgatccagtaccacgacaagagtggcaggtcatataagagagtatgtttaccggaatctttctgtttctttggcggcttctcctcctgcttgcgggtctccccgttcggcgctccttgtctgtccgtgtggctggctgccgtgtcgtgtgatattaag

SEQ ID NO: 28871 - DNA, 243 bp, Oryza sativa
  Clone ID: PAT_MRT4530_33427C.1
atgcctatccctgaagtcgatatccagcggcgtgtcttggcgtatgttagcttgtattggcttctgttgttccgtatattgtggtggttgctgattgaggtggatctcgatcgtggtgaccgtgtgatcatgttgatcgtgttgatcgtctcatatcatgaatccgacaaggccttatcggctatgggcgtccccagccgaagatcacttatgttcctcggaggccttgtcagcacggcgtaa

SEQ ID NO: 28872 - DNA, 1766 bp, Oryza sativa
  Clone ID: PAT_MRT4530_33428C.1
acattaaatgtgtgtccgtatatccgatgtgacacacccaaacttatccgatgtgacaccaaaactttacactcatacatctaagcacccccatactacagaggaaactcaatcaaagtatggtgaagatgagtgtagtagaaactgaaccaagaaaaggtgacgctgccaccggtgttgttgcttttatcgtaaggaaaaaacaattacagtagacacattttttctatgattggttgctcgaatctccagttcaaaacacacgcagagaacctaacagttaagtttgtccaggttgcactgacgatttcactgctagtacgaaacggacaaacaacaattgaaaattgcatgcgtattgtagtgtttcatgtctttccctggtaatacttgttcaccaatctttctgaatactccccgaatgtaagagttccattcggtgggatcaactcttgatgatacggaatttcacttggaaacttgagcttttcatcccaatctggttgcatgaacatcgcgaaggtcgaacgatcaacattcgaggcgttttcactgctgggggccttcacacagtgtggagttgcacatagacgacctcttgatagtatttcagtggtttctccaacttggtaagccaattcattctcctcaaatgtaaccttatgcagtaaaatttcaattagtgcagaccacataaccctctcctgtataatatgcttaacaactttatcatcacgagtccttatatacaatccagcagcactatcaggacaggggatctccattgaatttttcgtaaacaaggcacatgtaagtcctgttaaagatccatggtcagtatgccatccacaccacgatgaaacagaaccaccttcctcttgtttactaaattgccgggggtagtaatacagaaggcggcccttgtgacaccttgagctggcaattgtctgctcaaggctttcaccatcatatggtcccactccttgctgcattacatagcgatcacaatgatgagccaacatcaagccaacttccaacatcagctttccaagagctttaaatgatttagcaccttgagatacaagacagccagtaaggtaaatggagtacaaccttctcacaagtacatcatcagtggttggagcatccaaaattgggttggcataaaaggagcctttgaatgtgtcgagtttccctgactcaagtttctctttcccatgactccatccaaagttaaacctgctgtctgggtcttcaagttctttcttcacatcttcaggaaggtttgcaaattttggtgccaggcgcagcaacgttttccttagcacgggaaaaccaggcacgtcagcaatggagatgatcccgagcccgttgggcccgagcccttcctcgatcttcccgctcaggtccctatccctctccttgaggtcggagaaggggatggagaccgtgcgcacggacggcggcggcggcgaagtctgcatggcggcgaggcagcggcaccgcaccggacgacgggacgagagccgcccgagcgcgagagcgagtggtcgtcgtcttcctcctcctcgggtggttggtgcccagcctggctgcgtctgcttccgcacgagacgaccaatctccatctcccccgtcacttatctcggcgtcggattcgtctgggactcgaatgccgggaggagtgtaacaacttctttttttttgagaccgagacgtcagtgtgtgtagcgtcgcagtcgcagcctcgcaggtgagaggattca

SEQ ID NO: 28873 - DNA, 441 bp, Oryza sativa
  Clone ID: PAT_MRT4530_33429C.1
atggagatgatcccgagcccgttgggcccgagcccttcctcgatcttcccgctcaggtccctatccctctcctgcatcagcagcagagaaaacggcgtcgcaactctgatggaatcaagaaccatacgacgctatgcagcgggttcctctcttaccttgaggtcggagaaggggatggagaccgtgcgcacggacggcggcggcggcgaagtctgcatggcggcgaggcagcggcaccgcaccggacgacgggacgagagccgcccgagcgcgagagcgagtggtcgtcgtcttcctcctcctcgggtggttggtgcccagcctggctgcgtctgcttccgcacgagacgaccaatctccatctcccccgtcacttatctcggcgtcggattcgtctgggactcgaatgccgggaggagtgtaacaactacttttttttga

SEQ ID NO: 28874 - DNA, 540 bp, Oryza sativa
  Clone ID: PAT_MRT4530_3342C.1
atggaggtcccaagctcaggggccagatcaggcccccacgccttcttgtccgcctcacgggacaggactagggacatgagaggagagggaggggcgagtaggacggaggaggaagacacggccgtctccgccgtcacgctggggaggcacagcccccagtcccccatcgtgccagtgaccgctgctgcgccggtgagacacggccccgctgtgccgttggccgccgccgccatgtcaaggtctcgaggagctgctgacccgctgctgcgctggggagatatgcctaaggctggcagtggcaaagaggaggggaacgaacaagttcgtcgctgttgcggcttgaaccctagccgctgccgccatggatttgatgacgcctccaccgcctcctcctccgccgcctttgctgccatctccacctccgccgccattcctagtgatcttgcagacttcctccagcaccgccgcttccaatgcgtcctccaagggaccttcgtggtcatcgccggtcatgggctcatggcggcgcactcatcgtag

SEQ ID NO: 28875 - DNA, 294 bp, Oryza sativa
  Clone ID: PAT_MRT4530_33430C.1
atgtcatcctctctctccaatccttcttcctcctcccttcctctctctctcccctttctctcccccttccccatctgcggccgaggacgctggagacgagagcggcggcggcgggcgggcgagggcgtagacgatgaggaaggcgaagaggaggttggcggcgacgcctgcggagacgacgaggaggcggtcggggacggggcagttgcagaggaggtccgggtcgtcgggcgcgaagccggagtccaggtcgtcatcggggaggtggcggcaaggaagtggcccgactcgtga

SEQ ID NO: 28876 - DNA, 353 bp, Oryza sativa
  Clone ID: PAT_MRT4530_33431C.1
atggcacgtatctcatcaatgctctttggccgaagcttcgggacatcggacggcagctatcaacttatcaagccacttgccattgccccgaggggccgaggggctcccacgcgggacgggacgaccacgcccgtccgaccgtctgtttcgtccccgcagctcgctccactcgaagaccgaggcgtccaccaccaccaccaccactcgagttcccccacgatccccaacccttcctcctccgattcgccgccgggtgacttgtgctgtgctcgatcgcggtcgtcgcttgctgttgatcgaccggtccagatccgcgtcgtttacacggtgcgtggctgttcctcaatctacgg

SEQ ID NO: 28877 - DNA, 705 bp, Oryza sativa
  Clone ID: PAT_MRT4530_33432C.1
tcaagccacttgccattgccccgaggggccgaggggctcccacgcgggacgggacgaccacgcccgtccgaccgtctgtttcgtccccgcagtaggaagaacggagacgggctcgtagccgtccgcttcccaaccgtcgcagtcgcagtcgcagcatccacgccacgccacgccacgccacgcgtttgtgtgtttcactcgaaggctcgctccactcgaagaccgaggcgtccaccaccaccaccaccactcgagttcccccacgatccccaacccttcctcctccgattcgccgccggtagctgccagcgtctgctccccggctcgccgcgcgccggccggcgagtgcaccgcgcgcgggcgcttggtcgacgctatctccggagtactccgcgtggatttgggtgaatagtggctcgtttcgacagggtgacttgtgctgtgctcgatcgcggtcgtcgcttgctgttgatcgaccggtccagatccgcgtcgtttacacggtgcgtggctgttcctcaatctacgggtgagtgttttctgaacgaatcgatcctacctgttcgggattgcttgtagaagagacaaaaagagagtgatgttgtttcacgccaccgagaattaattaattaaatcgtctggcatggtagattttgctgcgtgcgtagaaaagagatttcctaaatttggggatactagtggacg

SEQ ID NO: 28878 - DNA, 356 bp, Oryza sativa
  Clone ID: PAT_MRT4530_33433C.1
ctaggggacgggataccgttgctctaacgggatagcttcccctccacctccatcagccgcaagagcacaaggcacaaggcccgagccagcgacggggggagagcggtggtggtggccggagccgccgggggagggagcaacggcggtggccgaagccgggggagggaacgacaacggtggccgaagccgggggaggaaggggcaacggtggtggtagccggatccaggggatgggaggggatggcggcgttggctggagccagggtagggggcggcgacgggagtggcggcgatggccggagctagggaggaaggggcactagggcggcagtggtcgtcagcgtcgatgtcgggta

SEQ ID NO: 28879 - DNA, 1017 bp, Oryza sativa
  Clone ID: PAT_MRT4530_33434C.1
atggggaagaggcagggaggtggcgatggaagcgaggaggcgatgcaccgcgggtggcgcagctcgaccggggcgggcaaggaggtcgtgctcctcatccaggccacacccgcgcgtgggggagacgggaaggggccgacagcgacggagtgcgcactggctgcggcggacctcaccacaggtgagtggcggcgcgtggaggtctcgacggacgacacgtcgtcgtcgtcggggctgtgtgccggccgcgccatgcctgaccagcgacgtctgcgtgctggacgtccacgtagaagtgtggtggcgcgacgagtgaggaagcgccatgatgccgccgggcagccgcgtggggttagggagcggggcaaagaagagctgggcgtgggggcggcggttgtctacggtcgccgcgagacgcatcggccgctattccaccttcccgccgccctctgccgcgtcgccggccgcccgtatcgagtgccgccctacgccgcatggtcaccgcgagccgcgccggccgctactccaccttcccgctgccctctgccgcgtcgccggcagcggggcagagaagagctgggcgtaggggcggcggtcgtctacggtcaccgcgagccgcgtcaaccgctactgtaccttcccgccgccctctgccgcgtcgccggccgcctgtatcgcgcgccgccctgcgccgcacggtcaccgcgagccgcgccgtcgagggagagagagaggacgtcgccagccgcctgcatcgcgtcgcacggtcaccgcgagccgcgccggctgctactccaccttcccgctgccctctgccgcgtcgccggccgcccgtatcgcgcgcgcgctgtgccgttgcccgtccctgcccctcgcagccgccggccacccaaccgacctgaccgccttagcttggcgaagtgtcgggcaccgcccgccgtggcaatggcctccccctccgtggtagcacggtccagctcccgccgccgattgccgtctcgccgcgccaccacctag

SEQ ID NO: 28880 - DNA, 718 bp, Oryza sativa
  Clone ID: PAT_MRT4530_33435C.1
ccgggctgcaggctctatgttgctttctcacgagtgacatccccagatggtttgcgtgttctgatagataacaaccctcctgaacatgcagaaagcactcaaaatgttgtctacaaagaaattttcgatggttttacatgcttctactaactgcaagcatttcccttttggtttcatgtacaactactgcccactgtttactgaatgactttcttcctcagttaatgatgcttttattgattcactgcttattcagactccatgcagtccaacctatgaaatgtgcctcatcgcgctgttccacgcgcaccaatacgcgtacaccacgcgttcgtcttgacgttgggaaacaacagcgttttggctcaatcattcactttccttctctctagggtgcatcttgaactactagaatatttaccgtgtgatgtgcctcattttgtgcgcgcacgtgtggatcataacatgatattgctatatatatgcatgactgatacgtctatgtgctttgcccgtgtatacttggcttcgatagtttctcagacctatgaatatgttctttaaatattgttataccattctacagtcaatctgttaatcagttcttatatgttattcgaaccccacctctacaatcgtatattagtaaatgtttgtcctcaattgttttaatgaaatatgtatatccatcttatatgcaaaaaaaaaaaaggggcgt

SEQ ID NO: 28881 - DNA, 381 bp, Oryza sativa
  Clone ID: PAT_MRT4530_33436C.1
caaaacattgcattcttcattctttgggaagagcactatttggctggctgcaacacagccacggtgcggtcctacttgttttgaggccagccatctaaacctagttctggccgttggctaaaatgctacccttctggggctcaacccgggacataaacggcagttgtgcctagtactggctggccctgtggagactcacgcgggttataccctgctgctgctggtgatcgccctattagtcctcctacgacgaccccttgccagattaaccctgcttcgacgacgaaccctcttcgcctaaaaactgctaccactactacaaccaaccttgctccaggggcataggcatgctttcctggtaggtacttaccatccggccga

SEQ ID NO: 28882 - DNA, 375 bp, Oryza sativa
  Clone ID: PAT_MRT4530_33437C.1
aaaaaaagaaccacagcactttacaattactggggcccgatctacattacaaccaccctaacggaaattatgggggggggggcctgggacgtattttttttatgggggcaggcttgcagcaagatcttgtatattaacattggagaggggccccccccccacatcatatcgacgggttactacacaagacactcccaacacacaaatttacagacggggcatatatggcccaagccccaacaggggccaaaccaaggcaaggacccaagattcaggcatatggggggaggggagaggccaacactcccaagtcaggttccagcgggataggggggttcatttctaggtcggcttcttatctttggcgggacccct

SEQ ID NO: 28883 - DNA, 472 bp, Oryza sativa
  Clone ID: PAT_MRT4530_33438C.1
ctcttcgctccctcgcgccgccgccgccgccgccgccgcggggaagagctagccctagaggagaagtgggggtgagttgggagagaggagagggggctagatgttccggtacgagaagggcggtgacgccaaggcggggacctagggcggtgcgagggagctctacccggggatgacggagccgcctgagatgcggagggcgcttattcggaagatctacgagattctctccatgcaggttctgctcaccgccgccgttgccgacgtcgtcgacaaggtcccggccatgtcccactattttttattcttccaccccggcctcggaccttacatgttactcatcattcttccctttatcgtgctctgcccgctggtctacttaccaccagaagcaacctttcaacctgaatcctgctcggtcctctttaccgttatcataaactatgtggttgggatgacatgcgcctttacc

SEQ ID NO: 28884 - DNA, 2411 bp, Oryza sativa
  Clone ID: PAT_MRT4530_33439C.1
ctgcaggaattcggcacgagggagagagagagagagaactagtctcgagtttttccgggctgctggtttcaatgattggaaccacaagcagagtggtaattaaaatcaatagatttttttttttttttttttattagggcaggggaaaggcattccaagaacttgtacatgtagcaaacaggttaacgaatagtaatacataccagcaaaggctatactacagagtctgatgagaaggggaaatagtacagctgagggaactaatcaaaagttgaactccacttactccacagaagcaaaagatcctgcctgaaggatggacgttatataattactcctcgctacaaacacaatacattatatagccacaaatcaatggaaacatcagaaactgtcctctctttatctaatataccataaggttaaagatcatggtgtgctcggaaccggatcggtgccagaaatgtgtgaggatgcatcttccttagcagctgctacattcccgggggaagctgtcttggcagagtccctcttgccatcctttcctccagaccttccgttctggtgaccgctgaccgaaagtctcctattcggaggagtgccattagcactgccatttgattttgcaccaggtaccttctttgcactgactggtctgttagggctcacacgtgaaccaaatggcccttcatggtcggtgttcagttgttgctcgatgtagcgcttttgttccctcattcttttcttatcttcttccctttcctgccttagcatgacatattcatccaacatagctagaagaggtacaccatcatacataaaggacagaccacggctctcctcccatgccctggtctttgccaccagagtttcaacaagtgctggaatcttgttgacaagaatccgagccttttcagcacgtttgagattcaggtgggcacctcggcttgagttatatctgttgtcatcccggttataatcttcaagccagctttcttcttcacaagcagacatccatctttcaactttgtctaatatttcttttctactcaatgcttcttcctttgcttttgatatctggctttccatatctgcaatcaattctgatggttctatgttccctgcctcaatcagcgccaatattttttcatgggcagcagctgtatctattaccatgtgagcaccagcatagatgtcttccaactcagtttgcttcttgaaagctatttccttcatcttgctgtattttagctggtctagcctttgaacctctacctcagcttgctcaatgagatccagggcaagagctccaggtgcagtgactttgtctacagaggctgatctgttgcaggtgacatgatcaaacatgctcctttcttgcatgggggcatccatgagatcccaaagatcgtagagttgaccagcaagctcttgaagcttgcttagtcttgactttttgtcttcattaagtgtggctacagtcttgtcaagttttgacagtgtatcattgctaatgctcttgcagttgtcaccaatagagtcatccaaactgggatgaacttcagtcactgtgctaagaaaatccatccctaagacagtacagagattatgtatcatgctcacataatcaagaaccttctccaacctattgctcttctctttttcgagctcctgtagttgtgaacgaaattcttcaagcctctcaagtgtcaaatcatcctcattaacttgtggcgttgccaccttctcacccacctccgtagtgccagcaatctcaccacatatttgatcaatttgtgactgaacattaacaaattcccgcactctttcgtttttctgcttgttcaacttctcgagtgttggcgctatagcagcaagttgttgcttgattgtcccagacgtcttctcaggagttcttgctatggccttctctcctagagcagataaaagtctggccagctcaatcttcgagtcatccagcgcctggataaggagatccctagagtcggtggcctggtcaactttcctcttgtaaacatccaggcactcctgatctaactggtacaggaccttgtcgcggtcctcgtcgctctcaccaacttcatcccatatcaactgcagtttctgcagcaaggatccacacgtaatgtcgccagccatctcagaacagatgaacccagatcgaaggagcggaatgcgagcgcgcagctcgaggcagagtgatccgcggcgcccccgacacacccagcgacagacgagcacgagccccctcctcccctagtgctccgccgctcgccgccacggcgccgccggcaggagagagacgagagagagagggaggagtctggagtgagagtgagtcactgtactggactgggagggcgaccgtctctctctcgtctcggatccac

SEQ ID NO: 28885 - DNA, 140 bp, Oryza sativa
  Clone ID: PAT_MRT4530_3343C.1
catcagaaatccaccccacaggtcactattagtacaggtgtgcaagggtgacaaagataggttgatacaatagcatactactactagtatatggaaaactgcaactgaggacagaggggggggggggcatcctttttttt

SEQ ID NO: 28886 - DNA, 3297 bp, Oryza sativa
  Clone ID: PAT_MRT4530_33440C.1
atggcctcgtcttcctcctcctcctcgtcgtcgctcgcctcctcctcgggtggaggcgacgctgcttctgcttctgcttctgcctctgctgctgcggcggcgggcgcgatcgtcgtggcggtggcggtgcgcggggacgggcgcgccagccgccgcgcggcgaggtgggcggccgccaacctcgccgcccacggcgccggggccgggcgcgtcgcgctcgtccacgtcatcccccccgtctccttcgtcccctccccctcgggggagagggtgccggtggagaagatggacgcggagacggtggagatgtacgcggaggaccgccgcgcgcgtgcgcaggaggaggtcttcctccccctgcgccgcctcttcgcccgcacaaccgtggagacggtgattctggaggagccgagcgtcacggcggcgctggtcaggtacgcggcggactccggcgtccgcaacctcgtggttggatccacctccctcaactggttcaaaaggatattacggctccgagatgtgccctctactgtcctgaaagctatgccatgttcgtgcaatgtatttgttgtgtccaggcacagattgactattaagtttgcaaatcaggctcgaacaagcaagtcaagcgcttgtgtaaggactcagtcaatcagtcataaatcattttcccgaatacagaagaactggctgctagacaaacaatctttgcatgaccaccctgaggatggaacaccaaaatcttctggagatacgagttatgcaggctctcatacctgcagctctcgtagcacttctactaatgctggtaaaagttcaggaagtcatggaagaagcctttttggaagcttagggcgaaaaacaccgggcagagatgtgaacacggatcccgatgctattggccgattgaaggaaatcccttatgttgccttgagctcaattgatgaggatctgcagtctcaaccagtagatgaagtagcaaaactgagaaaggaattgcaggatacgttagtgatgtatgataaagcttgtgaagatctcgtccatgccaagaaaaagattaaggttctttctagtgagtgtactgaggaagcgaagaaggtgcaagatgcactacatagggaggaattgttgaagcagaaggttgcagatgagaagaccagacatctagaagctgttacagaagttgagatggcaaaaactttgttcgctcaggaggctttttccaagcataaggctgaaatagtagctgatatggtgattgctgagaagacaaaggttatggatgctcttctgtcaactggcaaaagttgcaggcggtactcaaaacgtgaaatacagcttgccaccgataacttctccgatgcaaagaagattggtgaggggggctatgggaatgtgtacaggtgtacccttgatcatactgaagtagctgtcaaggttattcagcaagattccagtgacaagattgatgagttcttgagagaggtcgagatcctcagccaacttcaccatcccaacttagttcttctgcttggtttctgccctgaaattggatgcctcgtgtatgaatacatggagaatggaagtctagaagatcaacttattaacaacaaaggtcagcaatcactacattggttcctgcgcatccaaatcatctttgaggtggcttgtgggcttgctttcttgcatgcaacgaaaccagagcccattgtccatcgtgacctgaagcctggaaacatattgctcgacaagaactacgtcagcaaaattggtgatgtaggtcttgccaagctcatatcagatattgtgccggaagggctcacagagtacagagatactgcagttgccggcacactgtattacatggatccggaataccagttaactgggacaattcgtccgaaatctgatgtttatgctctggggatcatcattcttcaactactgactggcaagcgcccacacgggctgatacttagtgcagaagaagcgataaaaaaagactcaatttccgatgttcttgacagttctcagattgattggccaatcgctgaggcagagatcttggcaaaattggcggtgcggtgtacagctttaaaatgtagagacaggcctagccttgaatcggaggtgctgccagagatcgagagcattctgagcagaattactgcttctcccacattaagaagtccaaacgcagctgtgccgagccacttcatctgcccaatattgcaggaggtaatggatgacccttatgttgctgctgatgggcacacctacgagcacagggcaataaaagcttggctcaagaaacacaagacatcccctgtcacaaaacaaaggctccaatatttatccataattcccaaccattccttgcgtgtggcgatacaacaatggaaatcgcagtcatcttgagatgtagtgcatgggatgttgactgactttgctttgtgggcttatgcacgtttgggttagttgagaatgtgttttgatggttgccactgagatagctgtacatcatggtagcacagggacatggttttgttagcttaagggttggtcacgttcagagaagcctaaagcctaacatggcttcttgctattcatagacttaaaacagctgctgaattcaatcccccccctaatgctagtgtggtttggtggcaaccaaaattccttttcttttagttctttgtatgctgttaattaattgttcagctctggtctaaaaaataattgttcagtatctttgttcctcaggaacacaatcaaaaaaaaaaaaaaaaaaaaaaaaaaaaaaaaaaaaaaaaaaaaaaaaaaaaaaaaaaaaaaaaaaaaaaaaaaaaaaaaaaaaaaaaaaaaaaaaaaaaaaaaaaaaaaaaaaaaaaaaggggggggccgttttaaaggacccaagtttacttccccgtgcttgcaacgtaaaagtttttttatggggcccccaaaattaaattcacgggccggggtttaaaaacgtcgggacgggaaaaacccgggcgtacccaaactaaatcgctttgaaaaaaatccccttttcgccagttggcgaaaaaccaaaaaggcccgaaccgatcgcctttccaaacagttgcccaccctaaatggcaaatgggacccccccctttagcggcccattaagcccgggggttgtggggtttccccccagggtgccctttacatttgcaaggcccttaggccccgttcttttggtttttttcctttcttttttagcaactttggccggttttccccgtaaagctttaaatgggg

SEQ ID NO: 28887 - DNA, 258 bp, Oryza sativa
  Clone ID: PAT_MRT4530_33441C.1
atgaaccatgctatacaaaaggtctacggcggctcacggcaaacggaccctgatgacatcagcggtgacgtcatctccggcggcggctcggcggctcaggcgcgcaagctcgccggcgaacgacggcgcttcggcacgaacggagggcaccaggacgtagagcacgacgcggcgaacttaccgatgaccaaagcaacggcggaggagcaacggacggcgtcggcgacgaggtcgaagcggcggagaccttcggcttga

SEQ ID NO: 28888 - DNA, 429 bp, Oryza sativa
  Clone ID: PAT_MRT4530_33442C.1
gttgtggaactgtggaccgatcgataattagattgctgatagcatacttaggtaccgaatcaaatatcgtttcaaattcctacggtgaaatcaaacaccacttctattcaaacccatcgaactaaaattgctgcacacatgcatggactgatcctctgtccgtgaccaacacaaaattcaggccatttaggatatcaggatactgttttccccccttttgagtttagcatatcgcattgttgaaatgagatctacttcgtatatcagtttcacccaactcacctcgtcgtctggtaccggtggtggtggccggcggcgtgacgtttacggccgccggagatggcgccggcggcgctcccagtgatgccgccgggagctgcagcagcgagaccccgtcgaagaaaggatatatctcgtacctgtagttgc

SEQ ID NO: 28889 - DNA, 177 bp, Oryza sativa
  Clone ID: PAT_MRT4530_33443C.1
atggatttgcaacataagtcacccaaattgatcggtctagaagtgttcagatactatgcaaggaatcgagaggagacagccgagcttcagatgaatggactgtttgaggactgcatgttggctgcagccgttgcttcctatttgatatggcttcggtattgcttccatgcattctga

SEQ ID NO: 28890 - DNA, 462 bp, Oryza sativa
  Clone ID: PAT_MRT4530_33444C.1
ataaaaattgttcctccttattaaatctccccatttaaaaatttttttccccccgttttgccccgtagggatctgggcctcttaaacccaaaagggggggccaggccccttttcccactcagggaaaaagaaaaaaaacgaaaaaagggggggtttttaattggcccccgggggcccccacttaccccaccccccaaaagaaattaaaaaaagggggactagagtcacccccaaggggggctttttcccccctttattcccaaaagcccggcccctggggtggggttccgggggagagaaaacaggaaccggggaaatctctaaaatacatacacgcgccccactaattagaagaaggggcattgggctccctaaaaaaagaaaaagtcacccccggcggacacccgcgcgggggaaaaatcttaaacttggacaaaaaaaacagggggcaaaaacaaaatg

SEQ ID NO: 28891 - DNA, 181 bp, Oryza sativa
  unsure (1)..(181): unsure at all n locations
  Clone ID: PAT_MRT4530_33445C.1
cgatatcccccacaggtccggacactgggtgcctgtctgtccccacagagggaccccncaaatgtgagngagggacctgggtgcacgctgtctgggctgtgacatagtgctgggtctgtctgtgtaaagccactgaggtgtgtgncggccgangtgagtgtgggtgctactgtgagtgtga

SEQ ID NO: 28892 - DNA, 273 bp, Oryza sativa
  Clone ID: PAT_MRT4530_33446C.1
atgtcgtcctctctccttcccttcttcctacctctctctctctcatctctttctcctcctttctcttcggactgggagcaacgaaagcggcttgcggtgagggccgaagtgcggcggcgcagcccgaggagcggcaagtggtccacggggtgccctggtgaggcttcctcacgaccaacgacttcggtccggcaaacgaaccggctagcacgtgctagagcgtggttcgccggagaagaggatgacgtcgtaggggcggaacccggcggctag

SEQ ID NO: 28893 - DNA, 207 bp, Oryza sativa
  Clone ID: PAT_MRT4530_33447C.1
aaaatatttggatagaggagaaaatacgaattattacatcataggcccgcccgcaggcatagtcttaaatcatcggaccgagaggtccggaatacatccaaaaacagaaatagataaggcagcggaattcaggcagcggcatgccattgccacaggcaacgactgtactaagacctactggacgccatcgtcttcatctccctcctg

SEQ ID NO: 28894 - DNA, 826 bp, Oryza sativa
  Clone ID: PAT_MRT4530_33448C.1
atggcgccggcgaaggtgtacgggccggcgatgtcgacgaacgtgatgcgcatcctggtgtgcctggaggaggtcggcgccgagtacgaggtcgtgcccgtcgacatgtccaccggcgagcacaagcgcccgcctcatatctcccgtaacccctttgggcaggttccagcgttcgaggatggcgacctgactctgttcgagtcccgcgcaatttcaaagtacatacttcgcaaacatggatctgacctactaagggagagcaacctctctgagtctgcaatggtggatgtttggctggaagtcgagtcgagccatttcgacggcgcgatgtcgccgatcatcttccagtgcttcatcgtccccatgttcatgggtggagcaactgacattggagtggtcaatgagagcttagagaagctgaagaaagcccttgaagtctacgaggcgcagctgtccaaatccaagtacttagccggggatttcattagcttggcagatatcagccatttcccgacggtttattacctgctggcatctgcccatgcttctgtgctcgaagcctatccgcgtgtgaaggcttggatcgatgatgtgatgcagaggccgagcgtgaagaaggtgacagaggctctgaagatgccgtctgcttaataaaaactgaagctatacagtttgtagtaatgaactcaatttcagcgttgcgtgacatgatgcagcagtttgcatcatctgtatgactatattcgtctagaaaaaacgtgttgtttgttcattaataagcagtgtagcgcctatatttatgagatgcatgcacattatcttcaat

SEQ ID NO: 28895 - DNA, 1720 bp, Oryza sativa
  unsure (1)..(1720): unsure at all n locations
  Clone ID: PAT_MRT4530_33449C.1
cccacgcgtccgcccacgcgtccgcccacgcgtccgcggacgcgtgggttaaaatcctataacttgtactttatagtaactacatgtggagaagttaaatcgggtagaaatacttggaaaggaaattggtgccttggttctttggttgcttcatacctcacggacaaaatggccatgggtgggtacatagctagntctttggacacatggggagtggatcttctgattctttgttgagatgatagcattatatggtataaattacatgttctctcagaaatttgtattttgccaggctgctcgctctaggcaggcagctggtgcatgttcaaactgaaacaaacagaaactgttctgatgaaactaaaaatttctctgaacttgttcatgacactgtttgcatcacaacatctgcattcctttcattttgtatatcaagggagttctttttttttcccctctttctatattttacatcctacattgctggggatttgctcggccggttaggccgcagaggaagccgccggcggcgccttgccgcggcggctcaggcgacactgggctgtccgccgcagcggcggcggcgctgtcggtgcaggccgccggcggggtaatgctcgccctgtcctggcggtggctgcggcggtcgagccaggcgacgatgtcggagaagacgaggtggacgttgtggtccggctcgccggcggtgaggccgtgccacatccccgggtagagcttgatggtcttgtcggcgctggcggcgcgctcgtacagcgcacggctcacctccgggtccgtcaccttgtcggcctcgccgtgcaggatgaagaacggcatgctcacctgtgacaagctttgctcgacgctgatgctggttcgcagcagctccagcgccgtcttcagcctgggcttgtcctggtagatcagcttgttcttcctgatcttttcgcgcttgatggggtctttgaaggcagagtcgatgacgtccttggtggggacgatcttccacttggggatgatctcctccacctgcgtcaggagcgtcaccaccaacggatgcggcttcaccttctccgatatcttgcacatcggcgcgacgaggacggcgccgtcccagaaggttggcggatgcgtgtgcagcagcagcgcaaccgcgccgcccatcgactccccgtacaggaaccggctcttgtctctgtactcctccagctctgaaaaaagtatctttgataatctaattgacatctaatttgggagtttttattccggtcaaaggtaaaagcacaccggtttaccagtatcaagtagaagtaaaaaggaacgcagggagtactttttgatatgacacttaataaatgtagtgccaccctaaagaccatcagaaagtttgttatagattttgatatatgtattcttttttagataatttggtcaaagactcaagttatggaagtttgacttagaacaaaactaaaacattttgctatactagatttcaatatgatacactgaaacttcattcttggaaacacctttttttttttgacatgtcattcttgaaaacatttgaagctttgaattgaaacacagcgccatctgctctttccagtgactactggtaatttacttgtgatggtaacagttcagaggcaaaatggagtaccaacagatgaagatcagaagaggttttttttttctttaccaccggacgcaaaag

SEQ ID NO: 28896 - DNA, 480 bp, Oryza sativa
  Clone ID: PAT_MRT4530_3344C.1
gatcataaagggcatttcccactctaaaagctagccattgcggtgaggggttctcccacttatatcttaggtcctttgcctttccacaaccaatatgggactattcaacaatctcccccttcacacattggtgtccctcagccccttcaccttatccgggccccaccggcccacggtccatcaggatcgtaaagtgtctttcccactccaaaagctagccatagaggtgaggggtttccccacttatatcttaggtcctttgcccttccacaaccaatgtgggactattcaacaatctctcccttcacaccaatttggtgtccctcagcccttcaccgtatccgggccccaccagcctacggtccatcaggatcgtaaagggcctttcccatcccaaaagctagctgttgaggtgggaggctcccccacttatatctttggttctttaaccttccacaaccaatgtggaactattcaaca

SEQ ID NO: 28897 - DNA, 436 bp, Oryza sativa
  Clone ID: PAT_MRT4530_33450C.1
ctaaaaaaaaaattccaggataggagataatccaacatcacagaggaggaaggaggggtgagcgggaggcttctgctgctcctcacccaacttcctcctcgccacctcaccgtcgtggaggtcccgagccatgggggagccgctgcgccggggagccactgagcaggcagcgacgacgaggccgaggaggcacggcctagccaaggagccgccactgcaccgaggagccgcggcgccgccgctgcatgtgcagtggagctgccgcgccaccaccgcgccgaggagccgccgctgcggctcctgtgcccacaccaactcgctgcacgggagagatgccgagagggaggacgaaggcgacgacgacaaggttgaggaggcacggccacgcggcgaggattgtgtgtggtttcattggtcgtttattggacgtttttag

SEQ ID NO: 28898 - DNA, 309 bp, Oryza sativa
  Clone ID: PAT_MRT4530_33451C.1
tcacgttgtgtcagcggtcgccggtcggacggtgtccagggcgaacagtcgacagacaaaggcacaaagctgtgaagggctgaatgctgaagggatcgccggcggcccagcgtggggcgaacttgcagaggcgccgtggagggcgcagggcgctggaggcggattggcggagactaggtcttctgggcccctacttttcctgggccctaggccatcgcacttcttgccgtagcccagagccggcccttgctcaaaaggtatccagattgtgccactttgcgtgacatccaaggaagaactttcttccat

SEQ ID NO: 28899 - DNA, 258 bp, Oryza sativa
  Clone ID: PAT_MRT4530_33452C.1
atgagaggcggatgcgacagcggagctcgatccggcgtcggtggtgccggccacggcctccgtctccgggctctcgaagaggcggcaaaggcgggcgagaggcagcggaggtcgaagcaccaccggatgtggcagcagcgctgtggagggggaggtggtaaccccaccgaggctggagctcgccgcgacgacgataggacgcgctgcctcccctttcctcagctcgatgagtggccaaaaagagaagagctgagctag

SEQ ID NO: 28900 - DNA, 371 bp, Oryza sativa
  unsure (1)..(371): unsure at all n locations
  Clone ID: PAT_MRT4530_33453C.1
ttgggctgcaggatccggcncgagtcgactcnacgacgngctgaganttctcnggatacatatttcangnacntccantnagctgctagtatgggagcaagtctggcgttggcgntgaccaaatctctttatccaagggttgatatagatgccattgatggcattgcagacgggacgagcgaagaagctgctcttgacctcatcagcgatgcgcagaaagctgctgacaagattgctgctgatgtagttgagagattccaggacaccgatcttcgaccgactggtcctgataattctgatgatgaaaagactgactgactaatgttccaatgattttgatgattaatgatgatggaagcncaatttgnttc

SEQ ID NO: 28901 - DNA, 567 bp, Oryza sativa
  Clone ID: PAT_MRT4530_33454C.1
atggcccctgagtcttcccagccggccaagaaacgccgcacctacaggtgcaggcgctgcgggttccccaagaaaggccatgtctgtgtcgccgccgctgctgctggtggtgttctgccgctgcttcccttgccagaggaggaggagaagatcgacggaatcagcgctctacccgacgatgtcctccacacaatcatctcccttctcccgaccattggtggtgccaagacgcaagtcatatcctcagatgtttcccaaggtctttttgttccagatatccataatggtcttgtagatgatgctgctgctattgaatgtctcgatctccatctcaaggaaatagtggtgagaaactacagaggccagaaatcacatgctgcttttgcaaaattctttattctaaatgccagcgtgctcaaggtgatgacatttcgagtcgtgttagaggtggtcagagatgaggaccaagtgatgaacaggaacccaatgagcagcaaggatccttccagcgatgccaatttgattgcactcatctacggagagcgcgttcatgtccaggttgagtga

SEQ ID NO: 28902 - DNA, 1122 bp, Oryza sativa
  Clone ID: PAT_MRT4530_33455C.1
atgccactgccgtcaccttttccatccatcctcttcctttccgtctccatcttcttcgcggcgtcacggagggatgggggcggcggcgccgacttcggcactcagaggaaggagggggtggcggtgcaggcgagcagagggagggaggcggcgacagcgctatccgacgtgcggagggagaggatggcagtgacaacgccgaagcgcgaagggagggggcggcgtcggtgccgacgcaaggagggaggggacggcgcgtggaaggagcaagggcgccgagggagccaggcggcggtgccgacccggcgtgcggaaggagccgtggcgctgggggatggggcggcggcgccggctctagcgctcagaggaaggatggggcggcaagtcggagagaggggacggcggcggcgccgccagcttgcgcggggcgttggtgctgacgcgaggagggaggagacggcgcggaaggggaggaggcacaaaaatctggttgtgcagaagcagctcttctctttttggccactcatcgagctgaggaaaggggaggcagcgcgtcctatcgtcgtcgcggcgagctccagcctcggtggggttaccacctccccctccacagctgcagccgagggcggcaatgttgcctcgcagccgctgtgcccgcctcagccccggccccacaccacccacccccaactatggtgtccgtcggttggccatgggggtctagctccagcgccgccaccgctgctgccacatccggtggtgcttcgacctccgctgcctctcgcccgcctttgccgcctcttcgagagcccggagacggaggccgtggccggcaccaccgacgccggatcgagctccgctgtcgcatccgcctctcatggccgcttcctcagctcaacaagtggccaaggagagagaagggttgagctagaagaaggagcccaaaggggtattttggtcagcccgggtacaaaaattgatgaaaatggagcgaaatggcgaatatggcaaaacaaatgcttggcatcgcttagaggtggcattttaacgaatccaatcggcggaatggcattacagagaaaccctcttttggaagtggcacaatatccaatttctcgttga

SEQ ID NO: 28903 - DNA, 433 bp, Oryza sativa
  Clone ID: PAT_MRT4530_33456C.1
agccgatcgaatttagatccggcaaggaggggaggccccagcctgatcctttttatttacatatatagattgattcagacggcggacgcccccatcgaccatcttctcctcgccgcaggtacctccccctccttccatccatcctcttcctctccggcgaaagcaccgcctcccggagacaagttcgcgccgccgcaactgaagctaccgcgccgtctcctccctcctcgcgtcagcaccaacgccccgcgcaagctggcggcgccgccgccgtcccctctctccgacttgccgccccatccttcctctgagcgctagagccggcgccgccgccccatcccccagcgccacggctccttccgcacgccgggtcggcaccgccgcctggctccctcggcgcccttgctccttccacgcgccgtcccctccctcc

SEQ ID NO: 28904 - DNA, 255 bp, Oryza sativa
  Clone ID: PAT_MRT4530_33457C.1
atggagggcgccgtccttgttctccaccaggtcgccatcctagcgctgccagcggcggagacggaggcggccattgctgctgcgccaaggaggaggttttgcgaacggtgtgagctccatatccatatccaagggcggggctgtagtgaggagcaagatcatagagatgagaagcaattgactagaagctacggctcgctatctggcagcttgcgcagacaaattcccatatgcatgctggcagagtggcagtaa

SEQ ID NO: 28905 - DNA, 1266 bp, Oryza sativa
  Clone ID: PAT_MRT4530_33458C.1
atggctctgatgaagagatgcttctgtggatcccaagaagatatcaaagagcttctgaacttgaaaaatgtccagctattctcctatagagagatcagagcagcaacaaacaacttcgacgatggcaacaagataggccgaggtggatttggaactgtgtacaagggaacttttgaagatggtactgcatttgctgcaaaggttctgtctgctgaatctgaacaagggatcaacgaattcctgaccgaaatcgagagcattactgaagctaagcacgcaaaccttgtcaggttgctgggctgctgtgttcagaggcaaaacaggatcctgatttacgagtacgtcgagaacaacagccttgacaatgcattgcagggttcagctgctggagtaactgacctcagctggagcacaagatcggacatctgtatgggagtggccaagggactgagctatcttcacgaagagcacgagccaagcattgtgcacagagacatcaaggctagcaacgttctccttgacagaaactacatcccaaaaatcggagactttggaattgccaagctgttcccggacaatgttagtcatgttagcacacgtgtgattgggacaactggctacatggcacctgaatacgtcgtgcacggacagctgacgaagaaggcagatgtctacagcttcggagtgctcattcttgagatcatcagtggaaggaggatgtcgcagaccattcgatcaggcatgtttctcgtgcggcaggcgtggatgctgcacgaacagggcagcctgctggacatggtggatccgagcatgaagggaggttacccggaggaggaggcgctcaagttcatcaaggtggcgctggcctgcacgcaggcgaagccgtgcagccggccgacgatgcggcaggtggtgaagctgctgtcgcggccggtgtgcttggaagagctggagatgctctgcccgggcttcgtcggtgacggccacacccacgacgctgcggcggcggacaccgtcggtagcccaggcgtgatggtcgtctcgccggctctctcgccgaaggtgaggtggccgacggggaccgcaacgaccactactaccgaacactagtgtgtgctggttctgggaatcttacataggttctggattttccaactgtcatcatattagcggtacctatggggagaaacaacgaatcgactcatttgaggttgcaagaatgataaaaaaaaaagttaagcttcgaacccaaaaaaaaaaaaaaaa

SEQ ID NO: 28906 - DNA, 450 bp, Oryza sativa
  Clone ID: PAT_MRT4530_33459C.1
agccgacgtcgaggctgagggcgaggcagagacggaggctgacactgaggccgacgccgagtcggaggtggaggctgatgcggaggccggcgtggagggcaagcgccgcggtctgccgatcaactgtatggacgccaaagtgcgcaaattccgcaacgcttcgggcacgcgcggttcgggtgtgtaccgcgtcaaaccgctggacggcggtgaggcgttcgacatcttctgcgacatgaagacggccggcggtggttggaacgtgttcagccgtcgcttcaacggcaaagtcaatttctaccgcccgtgggccgactacaagaacgggttcggcgacgcgtcgggcgagtattggttgggtctggacaaagtgaaccgcctgtccaagaccatgccgcaccgcctgcgcatcgacctgacgtcgttcgacggcgcttaagaagttcggca

SEQ ID NO: 28907 - DNA, 1481 bp, Oryza sativa
  Clone ID: PAT_MRT4530_3345C.1
aacttattgtaagccatccttgaaattgttatccatattccttactgcctgagtctattatttataggatcgtaaagggccttttccaccccaaaagctagccattaaagtgaggggctcccccacttatatcttaagtcctttgcccttccacaaccaatgtgagactattcaacaatctcccccttcacacattggtgtccctcagcccttcaccgccccttcactgtattcgggccccaccgcccacggtccatcaggatcgtaaagggcctttcccaccccaaaagctagccattgaggtgaggggctcccccacttatatcttaggtcctttgcccttccacaaccaatgtgggactattcaacaatctcccccttcacacattggtgtccctcagtccttcaccgccccttcaccgtatccgggcccccaccggcccacggtccatcaggatcgtaaagggcctttcccaccccaaaagctagccattgagattgaaccagaaataaatttcttgaaaaatcttggttgttctttacccaaaaactatctcgatacagctgttgatacagccgttgagtttatggaagacatccatgaaagaatgtttgctccttcccctagtgatgaagcactgaataaagcaaatgaaatactgaaggattcattctatgacaatgtaatcactggatcatcggcaacatccgttagaatggagttcgtagcttctaacaaggaactatctagtcccagtacttccactgttactgctgaagacagttttgcaggctcagttgttgctgatgctcccgaaactgaatcaattttaacgaaaagtccagaaagcgattcttctgaagggggtaatatagaagtgaatgaacagtgcatgttgcccgtggacacctcagcagctgaaatatcaggtgggaaatctattgatgtcgatgaggaagttctttcaggcaattcagagaagccctcggattcctgcacatctgaagacccaatttcaattgggaaggaattaattttatggaggaaacctttagaaccgcaatcacctgaatcttctgcttttgatgacgcaattattcctgaagggactattgtaaattgtgaagagccagaacacagtacaaaggacactgaagaatcaggaaagcatggtgacttatcaaaattttccggcgtgactatctcgcatgatttgaccacagacatgtccaacgatgacgattcaaatgtgtggcttgatatagacctccaggatgatcaggagcagacagaggcagatgtctccccggttcgtcaaccaaagaagacatcattcaagaaaaaaatgatgagaagcttagcgaataaattccggtggtcgaagaaggagaggaatttgaaccaggcagaagcaggaaatgtcaggtatcaagcagtttcatcctcggatgatctggaggatgattgggaactcttgtaa

SEQ ID NO: 28908 - DNA, 361 bp, Oryza sativa
  unsure (1)..(361): unsure at all n locations
  Clone ID: PAT_MRT4530_33460C.1
tcttgtactgctgggtatggggcttcgtcgtcgcgctcctggctgtggcggcggcggcggatggggaggaggaggaggggaagtggnatccnctgattnctatgccgtctgaggaaggggacgacgctgatgctgctgttcctgctcctgctcctgcggttgcgtattactgcgggacgagcatggccatcctcgtatcctgcttccttcacctactggaactacctgcaccagaccgatgtgtgccatgcgtaccagattctgcagaagggagcagtgaaggataacaacatcttcctgtttatgaatcgtgaccttctccataacaatctctctccaaggcctgttaccatcattcaac

SEQ ID NO: 28909 - DNA, 308 bp, Oryza sativa
  Clone ID: PAT_MRT4530_33461C.1
agcggataagctgccggctgaattatgcctacttatactgaacaaagccaaattcaagcatgcaggttttgagatcacagtgcatatatttattgagcacgcactaaattatatacttacacgcttgcggtacataatcccgggctgataagataagggctctgcgactggccctaccaccatgtgtggcattaggccgcctctgtgaagccaaccttcaggttgccatagccagacccgattgtgtcaggctcacataaggacatctcccaagatccacagaggaccacgcggaggaggacggccca

SEQ ID NO: 28910 - DNA, 741 bp, Oryza sativa
  Clone ID: PAT_MRT4530_33462C.1
ccggccgggacctgtcgtcccgtccccaagagagattcgtctcgtcgccgtctagggttttagccgccgccgccgccgccgcgaaaccttcgccgcctcgcctcgcctcgcagcggagtcaggatgttcctcggcgcgatcccgcggcggccgagcaaggaggtggcgtacaagcagctgcgctcccacctcatcgtcatggcctcctgcgttgccgccatccgcgccgccccctacatcctccacttcctcaaccgcgacgcggaccgcctcgagctcaccctggagctctaggccgtaaccgtcccccgtcccccgctaggtgctgcagcgatggacgaatcatcttcgccttagtgttccatggatggttgcaaagctatgtttggataggatttttgcagaccttataaaacttaatcctattatttttgcttgagaggcatttagctttctgtacgataactcaatggcagcactcctcgacttatctgttctttaagtttgcagtctttgcaataggcattgtgtttcctattgtgcttatattttaactggctatggagtgatttctgctattttacttgaggatagtttagaaaaacaagactgagccatggttaaacaagcaagttaagatacatggttcggaaaagctttctaagcaatttcataattgttttgagggaagttcactaaacgttttggaaattacggtgagcgtaaaatgcatgtgctggc

SEQ ID NO: 28911 - DNA, 501 bp, Oryza sativa
  unsure (1)..(501): unsure at all n locations
  Clone ID: PAT_MRT4530_33463C.1
ggcggtcncttgctagggatcaatagncggattattcctgtgccgttgcaacagaaatagaattggcaaagagattgaaggagttctttctgaaggaaacagggtaagtatatttgttacaccaaataattttcatgcgtggaacatgatgacaaaggctccattcgaagtagatagtagcttatagattatagattattctgattttgtttatagcttttcgagggcacaaataaattttaaaaaatatttaaaaagttgaaaaatgaacttttaaatgtatcataagcaattttttctatgtagatttttttccaaaaatataacgtttaggagtaactagtagctgaaaagaacagggccaaaaaagatgttccatttccagtccactgtcaataaatattagctatgttgctaacattttcctgtactattggaatgaaactgtctgaagtccaagtatagcttaattgtgtattaaggtgtccatactgtcttacc

SEQ ID NO: 28912 - DNA, 968 bp, Oryza sativa
  Clone ID: PAT_MRT4530_33464C.1
ttttttttttttttttttttggggcatgcttaatgtgccatttggcaccaggccgtcaatataactctttaaacatgacacaaagcacacagaaagattgtgccaagaagatgatgtttcccagcaaattaatggagtgtacataaataacgattgcttcctaagaaactgaatcaagaaccaaaagggagtacatgttggtacaatctggtcgtctaatcagacattagaatgtaatcagggaggcgcccttaaaaaaaatccggtaaaaatgggtcaggatcaagggatgctttcagaattaaagcatgcacaagcacaaatgccatatcctcaaatgctagctgtggagtttctcccagatgagagccatcccctggcaccagcaattaggcaaacaatgtagcttcagacgttcagaatctttaggtcgactttggtttaggggccttcttcctgttgggctgcctcttagggatggagttcttcatggcaaggaagaagaggagcgccccaacaagtgcgcaattctgtgcaaacttggtgaagagctgtacaaactctgcactctcaatgtcatagttgtagaagtcgtggacaacaggtgtaataaaagcaaggtgaaacaacaagagataagcacccaatgaactgctgaggataaagaggagacctccaagacccttcaaagaaatcattgcagcaacaatatgctttaattcaatatgaggcaccactaatccagtacgggtagaaatatttgcaacaatagtgttgaacttcggctggagagcttttgcggccggcccaccatcaactccaaattcactaaactcttggtaggcggagaggaggaaggcggcggcgaagaggaccctcccggcgaaggacaggaagcccatctctctctctctctctctgccgctgcggcgggaggggcgtgacttccgaggcaggcggaggcggcc

SEQ ID NO: 28913 - DNA, 195 bp, Oryza sativa
  unsure (1)..(195): unsure at all n locations
  Clone ID: PAT_MRT4530_33465C.1
ggccgctntttttttttctttttttaaaggggccaaaagggagacaaatgaggcgcaaatgaagaggtgtttacacgtttcgagcaacgcgaccaccattacagaaagatccgggtcatgaaggatgataggatttgcaagagaaactacgacgacgaagatgacaagataacaatgnaaaatgagggggggggg

SEQ ID NO: 28914 - DNA, 1358 bp, Oryza sativa
  Clone ID: PAT_MRT4530_33466C.1
cgaaaccctattccccgccacccgtcgtcttcctcctcctcctccccggttcgccggcgacgccctcaccaccggtggccggtgggcggtggcgccaacccccatccatggaccctccacggaggcaacgccgcgtgtctaggagggctcggatggccccgccccctctgcacgtcgaactgcccttcatggatcggcaaatactagtctcacgcaattctcgcgggtatttcgccttgggatacagtcttcccggcgagccgttcccaagcttgcatgagctcttgggcgcaatctatgaccactatcacccccagagggagtcccgtgatccagccccgccgcccctgcttccacagtgtgaggagcatgttgaaggcaatactcagctttcattagaacaaacgcttgaagaaccagaagttgcaaccatggaggagtcgcctgaacctacaacattaggagatccatttactgctactacctcttccttaccatccgcaccacatggcactagcgaggtctcaccatcatcaaggctccgccatcacacttctcctgaatcaaccatttggacaagagaccctgctgactggccatggatatatcacattaggatggatcgtggaggatcttttcacacatatcctgctctagatggaccatttctgaacttatatgaagctgaggatgctatcaatcgtcatcttgagagcctgaagtgtccaatgttcaaggagcaagatggagtttctcctgtggagaggatgatacaaaaatcactttattggcctgatggtactagaaagaaatattccagatcacaagctagtcaaaacgttgataagagaagacgtcaaatggttcaagtgctattagacaagtataatgatgatcatgaccttgttgaggatcttgcttatgagcttcaagatgttgttcactatcaattgattgttgagggaattaagtggttcaatcacttcaatttcacagcaaagaccagtggagctgatattgacaatttattttttgctgaagtgatgtcttcgcaaggggaggaagattgggtagtgacttgttgctgcttgattaaatctgctgataatggtatctgctatggttgcaagaacgatcgaaatctggatatgaagcacccaaatgatagcgatacatatgtgggcggtcacaaggacatagttatgccatttgaaactgaaaattggactgaatctgaatctgatgatgatgaggatgaggaagaggaagtgaaggcgagtaggataagaaggatgattgagggtcttgatgattcagatgaaccagaagatatttttgatccagttttcaagccatga

SEQ ID NO: 28915 - DNA, 4335 bp, Oryza sativa
  Clone ID: PAT_MRT4530_33467C.1
actgaaaaccaactctatactgtgctatcatatatgaagagtttgagatcactggctggcaaaccacgtagaaaccatgaagcagaaaaactttttacaccggcacagcacagatgacaatcatcgctaccgtagaacacaagaggcacagagatcagctacgtttcagcactcttgatttggcagacttgtgggggaatttatttttgtggcagctggtgcacagccactctcctccatcacctggggtagcttcagcttcagcttcaaggggaatatgcatccgggttccattctcctcgtcactgccactgccacagatcagcatcagtcctccttcccggtcgttggatccacaagccgaacaagttggttcagctgcatcgcctcagttgcctctccaagcacgtcgtcaagctggcccttgagtagcttcgcatgggacttgtctgccagatcgtgcatgttgaagaggacatgcttgtttagggactgacctggcttgcagatgtactccacaagataatctgcgctgatgcatggaatgccctgcctcttaaactcctctacccatgcatctgcgcttggcgtcccagcagatacaacagcgaagtcgacgtgatcaggtttcttcaagaaccgggtgtaaggtggggaggttgccaagatggtgccatcgccagctctcaccgcgcgcttcagtgtatccagtgatggagaaatgcactccccgtatataattatctgcatcccgtagaaagcgccatggccagtatgctgccttagttggcgccatttccgaggagcatccaaacttatagtatcaccattgttaaggccattaccatgccactcaaatggttcttcctctaagaacttcccagcctcattacaagcagtcaaataatcagactttagtatccacctgccagcggcagctgccgcaaagaatttttcagttctgcggagctcaggggagataaaatgagttgcttggaaagaccattgatgcgaatccctacaaactcttcccttcaggcgtctaagtatcaacttatactcctttctcagaaggcgatgcccactcaaaataaataatctgggctccagcacagttaacattccacaatcgttttcttctaccacaccgcggtcagcaagcctgtctttgccacttcctgcagcttgaataaaactgttcagactcgtacaactgtttccatattttgatttggaaatattatgattccctggtaggttctccttgtcatgatcagtagaaccatccattaaatctgctgccttttgtcttttgctgcttcttgcttgcgaattttgcaatattttcgatctatctcgcatgtcatcttcagaaaatgatacaccggcatctctggccccatcctcattggaactctgaagattctgatccattgttttcttgctaccatttctaggaccctctgaagctctcttatacacaaatttaaattcagacacaacagcactgctgttcttgcaaggcacatcaccaaagctgttttgctggacagcagatactttcctcttggctgctgcctttcgtactctgttgtttggtacaatactgggggtgcatgtttcagggccacccatatttgtgttggttgagagtctcttagggcaagatcctgcattttctggaggaaacacttccttaaaacctgactttgaaaacatggctccagtgctatcaacaattggagcatcaggcatctcgacatcagctgtttgagataccttctcacatgaactctttcgatattcatcagcacttgcactgccaggatttttctctgctaactcagtcttggaaagtgctagtgctgtgttcatctgtaaagcatcccgcgagttgttggtagctgcattatttgctttactatttgggatttcttcaggaatgaatactgtacattcagcaccatttggtctagcatgattcttttctggttgcacctcaactttatcaccatcagacttgaaagatacaatctcatctttgttctttacagatctagtggctgctttatttgaggcattcccaaacctcttgacactggcattcttcactttagaagtaggttcttcctggggaaatgtttcgcattcactgatggttgcagtaacttggatcgatttaggaaccacttccatgttttgatgagaaaccacaattgcaaaatccgtgttaggagctacaacttcagttttgtcaacctgaggcacatcactcatctcagtgtccctgttttgaagagatgaactagaacttcttttgtcaacttcagaatcggcagatgagtttgcagcacaacctttttcagaccttagaccattttcagaactagaacctcctttgtcaacctcatgcagtgcaagtgtattttctctcagtgatttcttactcttagtagagttttcagaaagcttttctccttcaacaggccttgcaagtttcaaggccctcctatagctcaacaggttgcttttagattggccagacttttcttttgcagttaaaatcacagattcagcagagtttctactgggatcagaaaacgttgctgcttcagatgcactttccctgcttgagaaaggactatttgcagttccagtttctgagcttacggatggcttcatactgattgaagaaagcttacttgccctcttctgagcgagtgcaccacttgatttattcaccttctttactatctcaacgtctctcaggctttcagcatcagtaatgtcactaattttgtgatcacttttcattgatggagagatagtaaagtcaacccttggggtaactccctcaaaactttgtggtgatcctgttggttttaaattagcttctggtgacacagacttccggcaacgtcttctgttgtaacttaagacttggctattcttctttgatgctgcattgcctgttaatctcaaattagcctcacacaaagttagctcccgtgcagtatttgactgatcaactgcagtattaagatcaggtgtagatccaccatccttctggcctacatttccacttatacctgatggccgtaatgttttctctgagaaagtttctttggaaggggttgaccaaagtgcaatgttcacattgttctgattactgctatccaaacaatttccaccaatggtctctgttttgtccaccaacatagcaggtgcagtagttgattgatgcacatgatgatcagaacaaactgtggtcccagctatgttggaaatacaatgtgcaccaggactagcatcaactgccattttaacatcatctttggcttcagctctgtggacctgagctgcaggagcctcttccttgccattaagaggaaaatgggcagattcataagcatcagaatcagcagatattggagtattccgtatgtctgatttaatgttgagtgatctactggttgaacctcctgctttcgtaatccgctctggagtgctcatgtgtcctccagcagtaatttctgcactgcaagaggagatagtaggatctctagtgggtgcttgactatgaggatcaacaagagtagccattctaatatctttagtgcgtgcgcttctagttgcacgtttactatgagatgagcttctaccagcttcttcttcatcatcttcggagtccttggcttgtgctgccattatctctatttcccaaccgcttttcgtataatcatcagctggaagaattttccatgccattaagcaatcttccagccactgatgattaaccagactgacatttgcccgtttggcggtattttcccgttttgcaactttgtacttctcaccttcaaatttatagcaaatgagatgggtgtctttgagcgcatcaaaactcttggagaactctgctcccatcaaagaagccattttcataatatcgtcacgccaattcttttggtaccctgtcaagcaaatgcgtagtgattgactacccggtatgccgctgaaatctctcactggtctatatagtacccgatcagcatcagccatctctccgagatccaagctatcgtccacccattgctcggatacgaccttggtgccgtccttgcgcgccgccacgcagattgggttatcgtataggaggtcgcagacgatgaggtgggtgcagcctgcgccgtaggccccggcgtccacgccgccgcgctgcaccatctcggagcgatactgggactcggagacggggtcgaagccaaggagcgcgaagcggacgccggcgaagaggcgccggttgtcggcatcttggccgccgtgtgcgggcat

SEQ ID NO: 28916 - DNA, 224 bp, Oryza sativa
  Clone ID: PAT_MRT4530_33468C.1
actgggcccctatttattgtgtttcgagcaagggaggggtgggccagcacaggattctttcaaagtacttggtcctagcgaagaaaccatactttctaacatagcacatgcggattggtttaacacacaactgattggagtggccgttcaaccaaactgtgaaaaaaaaaaatttcagcgttgtacgtaacaaatataatctacaatatcttgggaggaccgga

SEQ ID NO: 28917 - DNA, 537 bp, Oryza sativa
  Clone ID: PAT_MRT4530_33469C.1
atgtcgacagggaacatgcttgcagatctctcttccgtcaatggctaccacgagggtcttcccatggtgcttgcccacattgccacctacgccgcgcttgctcttcccccaactgtcgacgcccggcaccatagctgccgaggccaagaagatctggaccatctggtcatctttggcgccatgaatccggccacttccgccaacggggctgctgccatcatcgacccgccgtctcacacggttcaatgggcatcatcacacgcctatgcttcatgtccttctttactagcaggaattctcggcagccatcatggcccagggagtataaagttgaatagagcggttgcgatgacggcagctcagctcaacaatggcactgggcgtgcactgggaggccagtctgctccccagtttggcactccttgtggtaagggaaacgaggagaaagaaatgaccgaccaacaggttgtgaaagacaccaacgacctgcatcacgcaaataaacagatattaattaaggccaggggtaggggttga

SEQ ID NO: 28918 - DNA, 270 bp, Oryza sativa
  Clone ID: PAT_MRT4530_3346C.1
atgaggaggttctccaagcagcacctggtccctttcattctgctcctgctacttgtcatgtctcacttgccaatctcaagccttggttcaaggagagcattcagagaagaagctgtcagtggtttcagaagccatgagcttgctccaaccatggctccttctcaagagaaagaagcaggcgtcgtcgccggcgccggtagcatctgtggccagaagtatgctgtctcaagaagaatggttcctcagggaccaaaccctctccacaactga

SEQ ID NO: 28919 - DNA, 1153 bp, Oryza sativa
  Clone ID: PAT_MRT4530_33470C.1
ctacgccgcgccatagccggagccgccgcggccgtcctccttcttccccaccgctgcgccccgctcttccccacctccttcttcccagatcgtgcttctcccactcggatcagccgacggagccgactttggccccttctccgccgccggaaccgacatcgacctcagcccgcggccgtccttcttcttccccaccgccgcggctgtcctcctcacgggcttctcctccgtcccgcttgatagcatgtggcgggagaggatcggcggtggcgccacgagggtcttcccatggtgcttgcccacattgccacctacgccgcgcttgctcttcccccaactgtcgacgcccggcaccatagctgccgaggccaagaagatctggaccatctggtcatctttggcgccatgaatccggccacttccgccaacggggctgctgccatcatcgacccgccgtctagcacggttcaatgggcatcatcacacgcctatgcttcatgtccttctttactagcaggtcatcaggtggagaagccatccatatgctaaataggtctcaagataggagtgagcagcaagttcggttttcattgggccatactcctcatctgaacaaacagccatcatggcccagggagtataaagttgaatagagcggttgcgatgacggcagctcagctcaacaatggcactgggcgtgcactgggaggtatgcttaaaggagagtgttgtagcatttgcatttttggcagccagtctgctccccagtttggcactccttgtggtaagggaaaccgaggagaaagaaatgaccgaccaacaggttgtgaaagacaccaacgacctgcatcacgcaaataaacaggtattattattttggttagtttggtttgttgtgcagatattaattaaggccaggggtaggggttgaagacttatggatgaatccggtaccgtaaccttcacatttgaccgttcattagtagctaaatggacagctaccatgcatctgatacatcaatctgtaggctaatgacatattttgagttatagcgatactttctttaaacaattgctatctttttatgtactgaaatttgcataatccttatgatgtgtgtttctttaatcatatttatgtaattcatacatg

SEQ ID NO: 28920 - DNA, 691 bp, Oryza sativa
  Clone ID: PAT_MRT4530_33471C.1
ctgattagttcatgttggttcctaatcctgatcaaattacactggaaaggctttttagagttgatgatatcagggttggcgcaacttccagaaaatctattcctcttcttgttgacctactcaaacccattccagaaagacctggtgctcctttcttggcgttgggtcttctgacacaattagctattgattgccccccaaacatgatgctaatggctgaagctggaatcctagaggcacttaccaaatacttgtcacttagcccacaagatgcaacagaagaagctacaactgatttgttaggcattctttttagttgcgcagaaataaggcacaatgaagcagcacttggtactgttaaccaacttgtggcagtccttcgtctaggaggaagaaattcacgctacagtgctgcgaaggcattagagagcttatttattgcagaccatgtcaggaacagtgagtcagctcgccaggctattcaaccacttgtagaaattctgagtactggcatggagagggagcagcatgcagctacatcagcacttgttaggctgctttctgacaatccatcaagagcacttacggttgcagatgttgagatgaatgcagtggatgtcctgtgccggattctttcttcggattcttcagctgagttgaaaggagatgctgctgaactatgctgtgtgct

SEQ ID NO: 28921 - DNA, 503 bp, Oryza sativa
  unsure (1)..(503): unsure at all n locations
  Clone ID: PAT_MRT4530_33472C.1
ggatcccccgggctgcaggttatgatcattctgatcatgataccttttgttgtgacataatcatactacacagcataaaggtatcatgattcagacatgatcataaataaagtactaacggaagaattagtcaaagccgaagcatgattatgtcacaacaaaagataaccatgtcctatatgactgttaattgcgtgctcttaactctgtgagaggattgcaggagatatgtctgatcagataaagacctctctgtttcaccaaacacatgcaaaattaggctctggcccttgcttcaataggcaaacctaattttactcngcgcgataatctcctgagtctcctgagctttctagaatcttagaatgttttcgtgaagggaaacaaaccagtactgcctctttatttttggtaatggcgtaattgccgcattaggatgctgcggtaaccgtagtcgtgttgcgcatgtattctcagttaaggaggtagtagtaacacttatt

SEQ ID NO: 28922 - DNA, 390 bp, Oryza sativa
  Clone ID: PAT_MRT4530_33473C.1
atgcccttggatggtgacggttcaatccccattcccatggtcttcgacggcggcacggtgggagtacgaaggggagggacatggtggacgggggtagggagcagcaccagcggcaacaacagctccacgttctgccgcaatcgctccaccgtcgacctacaaaatacacgcacaaatagctccttcaccatctccccagcaagaaccaccaccgtcgccgacaaggaagagaagggggcagtgttgctagcactggtgaaggggcaggaggaggcggcggcgttgtgggaggttttggcgccgcccgagcccacacacaccggtctcaccttcatcagtcaaagggagttttcgtctgatcaccacaaagaagaggcaaaaagattttga

SEQ ID NO: 28923 - DNA, 250 bp, Oryza sativa
  Clone ID: PAT_MRT4530_33474C.1
atcggcggccgggtgcgccgcctcgtcgcctcctacacgccgtcaaccgtcacctccacgcctgcagccgtgccgtaccggatccgccgacgtcgcgcccgccgccgctcggcagtggaggtggcgctcgacgtcgcgccgccagtcgtgccgtgccggatccgcccaatgccggcaccgccagccgccacgcccgctcgccgctctcatcttcgaaaaaataggatctggatatgtgattggttacggg

SEQ ID NO: 28924 - DNA, 2148 bp, Oryza sativa
  Clone ID: PAT_MRT4530_33475C.1
atggccatggctcctgtaagcttcctcctcatcttcttcctcaccaccgctggtctcaccctccaaacctgctgtttcgacagcccaggacactccgcgaacctgtccaccatctggacctgcacttccccaacaaccgatgttctcgtcgctaaccctctactcagccggcccgtaccagacaatcacaaccttcattttgctgcaggcttctacaattaccccctggttaacacctacatctttggagtctacactgttactgacgccggtgaatttgcagacatgacctcttggcgcccagaacccgtggcagatgtatggtcggccaacagggaccagttgatccggcagaactccaccctaagcttcacggctgagggggacctggttcttcagcatccggatggcagccttgtctggtctaccaacacttccggccagtctgttgcaggaatgaccctcacagagtccggcaacctggtgctgtataatcacaacaacttaccggtctggcagtcattcgaccacccaacggattccttgctccctggacagagattggtgcaaggaatgagattgaagcctaacgcattggcagtaaatctgattgccagcgacctgtattatttaactgttcattcggatgggctctatgcatttgcaggatctagcaactcccagccctactatgagttcacagtgtcaactggaaacaagtcacagaatcctccagcgtatttaactctggcgaacaggagcttggacatatttgttccatcctcttcatctgcaaatctggaacacttgtcccttcaatcaccggctctgtctctccagtacattagatttgaatctgatgggcaactcaggttgtatgaatggcaagcagaccaaaatggtagatggctatatgtgcaggacgttttcccatttcagtactgtgattacccaactgtctgcggggagtatgggatctgcttgaatggactgtgctcctgtccaactgcaactgaaagtcacattcgatacttcagaccggtcgatgacaggagaccacatcttggctgcacactggagaccccgatctcctgccagtttgtacaagatcaccaactcatatctctacctaatgtttcatacttatactacgatagctccagagtttcagaactaactgatgaggagagctgtaagcaagcatgcttgaccacttgctcttgcaaggctgccttgttttggtttagttttcagatgttaaaacttgcaaccaaggatttcagcaacaaactaggtgaaggaggatttggttcagttttcagtggacagttaggtgaggagaagattgcagtgaagtgtttggatcaagcaagtcaaggaaaaagggaattctttgcagaagtcgagacaattggaagaattcatcacatcaatttggtcaggttgattggcttctgtctagagaaatcacacaggctcctagtgtatgagtttatgcccaagggatcactagaccaatggatctactacaaagacagcaatgatactcttgactggcgcacacggcgcaatatcatcaccgacattgctagggcccttgcttatcttcatgaggagtgcacacataagattgctcatctggatatcaaaccacaaaatatcctcttagatgataacttcaatgccaaagtttgtgattttggattgtctaggctgatacatagggaccagagtcacgtgacaaccagaatgagaggaacacctggatatttgtcccctgaatggttaacatctcatatcaccgagaaggttgatgtctatagttatggagttgtgatgattgaaatcatcaatggaaggccaaaccttgaccattccaatcttggagggggtattcagctccttaaattactgcaagagaaggcacagaacagtcacctggaagatatgattgacaggaagtgcaatgacatgtccttacaccaacaggatgtgataaagataatgaagcttgcaatgtggtgcttgcagagtgattgcaacagaaggccttccatgtcattggtgatgaaggtccttgaaggagaaagtgatgttgaagccaacttgaactataacttctttgattgccgccagcgttcatcctga

SEQ ID NO: 28925 - DNA, 403 bp, Oryza sativa
  Clone ID: PAT_MRT4530_33476C.1
atggtggtcgaaatatttgagatcagcgtcgatcagagcctttgcatgcgctcgaaaggccgcagccatggcgtcgagctcaacgtcggcagcggccagcaaaaccctccgtggactgcttcccggaggagtccgacctccaccgccgctaacttcccttcgtgcgggccctcgcccgtcggcctccaggcgcgccagcttgcagcgccgccttttcgctccgaccactccggcgtcctccgtgagtccaccgcgacggcaagcggctccccgcgcggtacctcgtcctactcccgcatctccgccgcgccgccgccttctgcactgcaatccagccgccgcgccgctgcctaccggctacctccacgccagatcggtcgccacaatcagaccgatggtttag

SEQ ID NO: 28926 - DNA, 4355 bp, Oryza sativa
  Clone ID: PAT_MRT4530_33477C.1
atggggtggtattatagccccccgccggccatccggctgcagttggacccccgcgccgcgtggttcagcaagggccccctcgagaggttcgtgcggttcgtgagcacgccggaggtgctggagatggctaaccccttcgacgcggagatgtcgcagctggaaggggctaggaagatttatgcacagggagttgccggaggcgctgatggagctgaatcagcagcagctgcagatattacgaagaaggaacttcttagagcgattgatgttcgtctaagtgctcttaaacaagaccttgtcacggcttgtgcccgggcatcatctgcagggttcaaccctgacagtgtttctgagcttgttctttttgcagatcattttggtgccaaccggctgagtgaagcatgcaacaaattcatgtcactttgccagcggcgtccagacatctgtcctcattactcggtgtcatcaacttcgtcacaatggaagagctttgatgatggaaatgtccgtggctcctccagttcagacatgtcactagacgagacacaagctgatcaaggtgcatccagcaacaaatctataattggtggtagtgtctctcatattcacagaagcaacagccaaaactcagtagatgttccaccagaacccagcgcagttcaacaccctaaaccaactatacagcagtcagtagagaaacaagaaaaggaaacagatgctcttcctgcccctgccccagctggagggggttcaagacggttgagtgtgcaagacaggataaacatgtttgagagtaagcagaaggaacaaacctcaagttctggtaatagtgctgcatgtactagtaaggtggttccaacgaaaggtgagcaccgcagggtgccttctggtgcgtccatggacaagttggtaaggaggtggagcaatgtaagtgatatgagcattgatctaagcaacaacgatagcagcagcttaaatgaaaagagggaaattggaacccctgttggaaccccaacatctgccaatttggaggttaattctaaggcaagagctgacggggacgctaatgggctgaagcatgcagttacatcatgccaaaaagatacatctgatgccttacccttggattctaccactgcagatgctttctcatcctcaactttgaatactacctcaccatcccccttatcagccatcgcttcttcttctcctcagaaacagaccgcacctcgtgtggaagatgacatggttataacctctagcattgagagtgagtcatccttcagaaaggaggtaggggctagtcaaggaaaaggtgacgtgaggatgtcagggcaagctgtttcaagtgtttccactcgagcccgagtaaaaacatctccaaggccaacatggccagaaaacaatgtaactttaagtagcccaccattgtcacaggagcatgtacagatgaccgatgaggaaactattcccattgttcatgaagtagcagttaaaaaggaacagattgtacagaaagataatagaggttctcgtctccgttctaaagagattcatgctgaagcagatgtggttggaaggaaggaccgaccctctcgaacaactggaaagatatctgataccagaacaagggccacctccaacccacgtgctaattttaggggttcatctgtcagggatgaagctgcctctacagaagctgaagttcatgatgttaacttgcaacggaaaagtctagcgcggaaggtagaggattctgggagaaaggttgcagctggctctgaaatactgcctcaatcagattgttctattcatcagggaactaatttgagcagacaatcatccagtgctgaacaggaattgagtttgcatggaggtaaagtcaaattaattagtgatggaaatgctgttcctttggagcagactaagagaccgacaaaaggtagtcaagatcggcatgatgaactgcaaaagaaagccaatgaattggagaagctatttgctgcacagaagctaacctcttctaggagaggcaagtcaactgatgtgcaggttgagaacacacccagggtgaatgaggtaaagcctccactggttcttccagagaggatttatacaaagcaaattgtaaaggagagtataaccaatgagttcgatgccaatgagcttttaaagatggtggatactgaagggtataacaataacgtaccacaaagcattattagcttagaagagtcaaggggaaagttctatgatcaatatatgcagaagagggatgcaaaactaaaggaagattggaagctgcaaggagaacagaaggaagcaacaataaaggcaatgcgtgatagcctagaacgaagcaatgctgagatgcgggccaaattctctcggtcttcaagtgttcctgattcaacatatatttctcgttgcgctcataagtttcctcctttgcaatcagttataaaggataaggatcaggggatagattccttcttggtagaagaagaaatgaatagtgactatctatctggtgatggttcatccaggagtgctgattccaggaagcatttttcaaataaagttgcctgcaatcaaaagaagtctattgctcctgttcataggcattcatcaaggaccgtaagctctggttatgcaaaccgtaggaatctaccagataatcctcttgcacagtctgtccccaatttcgcggacttaagaaaagaaaatacaaagccctcagctggtctgagcagagctgctccaaggacccagccaaaaagttttatccgtagtaagagcatcattgaagagagtaagaatatatcaaaagatcaatcgaggaaatcacagtccatgaggaagaacttaagtcctggtgaattaagggacgctacatccatgaatgacgtcatatacaattgggctccctcaaaaatttccaatgatcaagttgagggagtttttgcttatatcacccatacagctggttcaaccaagtcttttctcaggaaaggcaatgaggctcaccctgctgtcggtatagctggatttgctcctcctatgtttgcaaatacctaccagaatggagatgatgacgattttctagatcaggaagaagactccccagatgagaccaaagatgaagaatatgaaagcattgaagagaatcttagggagagcgattttcctgctgactcagacagtgagaatccaggaataagtcatgaatttggaaattcagatgacccaggatcagaaaatggtgatgtttcttttccaagtgacgcacccactcttggtggttccaagttcaatgcttttgcaggaaacatgcatgatacacctggtgaagtaccagcatcatggagcacacgcccacacctattcgcttatgcaaatgataactcagatggtgatgcttttgctgattcaccaaatggaagtccatcaccatggaattctcatactttagatcaaataacagatgctgatgtttcccggatgaggaagaagtggggcagcgctcagatgcctttcgttggtcccaatgcatctcaacagccgcggaaagatgttacaaaaggatttaagaagctattgaaatttgggaggaagacacgaggtgctgatggtttaaatgattgggtatccgcttcaactgcctcggaatgtgacgatgatatggaagatggacgagatttggccatgggatcttctgatgatttcaggaagtcaagaatgggttatccttctgcatatgatggttttgttgataccgatgtttttgctgaacaagaccaatcacttcgcagctccattccaaatccccctgcaaatttcagattgagggaggatcaactcactggaagctcacttaaagaattggacctctagttctccctctcaacgtttcgtagcaaggggggtgatgcaaggctcaggtgacaatgtgacatacccttaagcaccagagctggagtatataaaatatctcccgaaattaggtaccggtatcaaattttcatggatggtacgcggacactgctagcttgtcttataaatacaatatattctgtatctatagtaattcatataagctgccagttgagcgtttcctctgttgtttgattattctttttcctatcacttgtgtagaattggacctctagatttttttttctttcttttgcggtatttgatttcaattggcccagagacactgtattcattttgttgtttttgtgatatgcttgtatcttccacccccatttgttcattcacatatatcacaaattcgcggtatatgacaatcttgccaacatgagcctagaaatttctgaaaaaaaaaaaaaaaa

SEQ ID NO: 28927 - DNA, 560 bp, Oryza sativa
  unsure (1)..(560): unsure at all n locations
  Clone ID: PAT_MRT4530_33478C.1
ggaacaaaaaaaataggggcgctttactactaatggaaaaactcaattacaattttacaattgcacatacccatcataaaatcaaattaattaacccaacacaaacactttcttacacttgcagcaaaattttcatgcagctgcactaccgttctcttgtagcatacaaaatttgaacccatggatctcatttcatacttcacagctacccaaaaaaccagctatttcaatcaggtccgcttgacggggtcaaaattttggaaacgggaaaaaaggggccaacaaatngnnaaaaacacaaccccnccggaaccaatntnaacanaaatttnttnacaaagggaaaagcccccgggcccctccnccnccttngggcnccnncccccnngggggggnnnnncccccccgggtttccccccccccnggganatttnaaggttccccnnccnccnggncccaaaaaaacngnaaaaaaaaaaangccccctccccggggaaaaaggntttttcgccccgggnaaaaaaaacaggtnccaaccccngcngaaaaaacccngggg

SEQ ID NO: 28928 - DNA, 774 bp, Oryza sativa
  Clone ID: PAT_MRT4530_33479C.1
acggcacgaggccgtgctccctcccctagaccctaatcgccgccgcaccgccactgatacgctccgccggccgccgaacaccaacgcccgccgcgctcccctcacccaagcccgcggcaccaccgatccgcgccgccggaacacccgtgcccctcgctatccccccaccctcgtccgtgccgccccagatcaccgtcgccctgagttgtcgtcgcccgcctcgtcgatctcctctgcaccaccataactccgtgcgcgaacctcgccgatctccgtgccaccagagctccgtcgcctgcctcgccgatctgctccaacccatatcccatccgccgccaagagcatcttaaggtggtttatgtctattttgatcgagcagtttggcgagtggagatgtggaattataccatagtagttcaggaggattgatatagttggtggctcttcctttctcgatcatatatggtgtttgctgcatgcctacatctcttcagatcattcgttcacaaagaaaaaacatctcatcagatccaacctccaccagtgacgccgatctagaggcgccgtcaactgcaagtcagtaccagttatatgaactttctcatgccatggctaatcatcaaccttttcattgtgcctaatcttcaagtgttagttctgtctctaggattgtacatatttggcagtacttgacagaatgagcgatggtaagagatcattagactataattgttcatttcggttatggaattatatttcaccttgaatatccca

SEQ ID NO: 28929 - DNA, 336 bp, Oryza sativa
  Clone ID: PAT_MRT4530_3347C.1
atgggaaagaggatgtgctcaccaggatgcggcggaagcagcagcagggcgaacgacggcgtccctgctcgctcgcgggatggatggggatcggcgcaggcggcggcggcggccgaggatgtgctcaccaggatgcggcggaagcagcaggacgaacaacagcgcccctgctcgctcgcgggatggatggggatcggcgcagacggcggtggaggcagaggatgtgcccaccaggatgccgcggaagcagcaggacgaacgacggcgcccatgcccgctcgcgggatggatgggggatggcggcggcggcgggcgaactcacgactaggtcaccgg

SEQ ID NO: 28930 - DNA, 608 bp, Oryza sativa
  unsure (1)..(608): unsure at all n locations
  Clone ID: PAT_MRT4530_33480C.1
cgtaagnncttggnnnatcctctagaagncggcccccgcccttttgttgttttctttctcttttattttctttctttttcttttctttttctttttctttttttactttttttttatttttttttttttttttttttttttaaaaaaaaaacggggaaaagaaaaaacatcccatgggcaaaaaaaaatttttttttggccggaacaagggaccgggcattaggagttcattccgcaaaaaacaaaaaacccaaccgggaaaaaaaaaaaaaggggcccccaacttccaatttttgggcccaaaaaaaaagggggagggttaaattaaaaaagggaaaaaaaggggggccaactcaacccccaaacaggacgggcattaagggggggggaaaaagggatttggtcaggggagggaaaaaaaaacttttccggccactggggccaaaacaccccttcccggggggggggggaggtttccccccttggggggaaaaaaaagggggcccattttttgcaactgctgaaggagggtgcggaaaaaaaccccgctgtttttgaaaaaagggggggggggggagccgttccttggggggccaccaaaaattttt

SEQ ID NO: 28931 - DNA, 105 bp, Oryza sativa
  Clone ID: PAT_MRT4530_33481C.1
ggttaaaacggcgggttacggtctgtactatagtggcctaaatcattctggccactgtgctcctgtctatgacactggctggacatctttgacagaacgaccaca

SEQ ID NO: 28932 - DNA, 1257 bp, Oryza sativa
  Clone ID: PAT_MRT4530_33482C.1
tttgttttttttatctggggggattatgttactcgtgcgatgccacattcagataaatttggagtacaaatttactaaaaataacaaatccccaaattgtacttgcactaacaccaagatattacaaaaagtaaaaaaatcaagcctcacactccaaagaagactcctccctcgcatcacttgtcggcgtggtcgcttcttccctccccccagccaaatttcgtcaaattcaaacagaaaccattttttttacagcatccgacggttgattttggtctgaatttctactacactccaacgtgaagaagaagaaaaaaaagaagtaaagcaacttttctttttgccccccgaaaattttgcaatgcggcccctaggatttgggcgacgtcactagaaggtccacttccagatcttgactcggatcctgacctggcacacgcgcgcgacggtggtcgccggcggcggcgagggggtggtgtcgtcgacggacgcggcgggagacggcgcgtcggcgacggagagcttgacgccgcccttcttcttcttcgccggcggcggcggcggcgccggggcggccaccttgatgccctcgcagtggacgagcacgccgattttcttggtcttgaggccgccgaccttgacgccggccttggtctcgaggtcgagggtgatggtgaactcgccggacttcttgatgtcggtggcggcggtggtggggtcgacgccgagggcggaggcggagacggtggccttgatgacggtgatgttgccggcgtcgtggacgaagccagggacggatccctccccgagcgggacggcgttggcggcggtggcggcggtgacggcgaagtcgtcgtagaggtagacgagcttcttgttggggttcttggcggtgagcgtgacgtcgatggagtcggtgagcgtgggcgcggtggcggaggaggagaggctgagcttgtcgacgcgggcgacggagagggtgaacgccgggcggtgcggccggtagaggaggtagaacgcgccgccggcgacggcggcgacgaaggcgaggaggagcacgacgagtaccgcgtagaagaagcagcagcagcagctgaagcggcaggacgacctcccgccgcggcggcgcttggcggcgggcgcctgggggcggtagatgggtcgctggtacatcttgggcgggccaccggcgccgttgccagccgccgccgccgcagaagcagcagggggagggttgggcttgccgttggaagacat

SEQ ID NO: 28933 - DNA, 402 bp, Oryza sativa
  Clone ID: PAT_MRT4530_33483C.1
atggccaggcttcgtgaccgccacagctacaccttccgcagcacggcataccgcttccaccctcgccgagcagatgatgacgacttcagtaccttccacccgacggctggcgagaacgacaccaccttcagccacatttgtgccgtgatgaaggggatggacaggatgcactctgacctggacaaggcatccaaggccttgaatgatggaaaacttatggtctacaccaggaatggcggccgcacagcgggtgagggcagcagtggcgaagaacgcgccgatggtggacaccccaacagcgcctccggcaatggttcgccaccgctccccgagaacccaatgcttgcacaagtgatggcccatcagacccagatgatggcggccatgatgcagcagatgtag

SEQ ID NO: 28934 - DNA, 1863 bp, Oryza sativa
  Clone ID: PAT_MRT4530_33484C.1
attggactcccgcctcctctttctttcctcttctacttttcttcttttacataatagtattagtattacaatataactctttgttcctcttgttggcattgcatgtttgtattggtaaggttgttcaaatcaatcaagtctagtgtagtagctaattaagccgccgccgcgagtcgacctcgccaccatccatggccccgcgcctcctcctcgccctcgccctcgtcctgctcgcctccggcgcaagcgcggcgagcgtgggggacacgtgctcgtcggagggagactgcggcgcggggctgcactgcagcgactgcggcggcggcggcggcggacaagacgtgcacgcgcgccaagcccatcgacccgctcacgcacggcacggatctccccttcaacaactactcatggctgacgacgcacaactcgtacgccctcgccggctcctcctccgccaccggctccgccctcatcacccaaaccaaccaggaggacaccatcaccgcccagctcaagaatggtgttaggggcttgatgcttgacacttacgacttcaataatgatgtctggctgtgccactcatttcaagggaaatgctttaacttcacagcctttcaacctgccatcaatgtgttgaaagaaatccggacgttccttgacggtaacccttcagaagtaatcacaattttcttggaagattatactgcttctgggtctctgccaaaagtattcaatgcttctggactcatgaagtattggttcccagtggctaaaatgcccaagagcggtggcgactggcctctactcaaggacatgatcagccagaacgagcgcctgctagtcttcacatcaaagaaatcaaaagaagcaagcgaggggatcgcttacgagtggagttacgtcgtggaaaaccaatatggaaatgaagggatggtagagggtaaatgcccgaatcgtgcagagtctccagccatggattccaaaagccagtctcttgtcctgatgaacttcttcacaacagacccaagtcaaacaggggtttgcgcaaacaactcagcgccacttgttagcatgctgaaaacctgccatgatctctcgggcaatcggtggcccaattacatcgctgttgatttctacatgaggagcgatggtggaggagctcccttagctgctgacatcgcaaatggtcatctagtatgtgggtgtcacaacatcgcatactgcaaggcgaattcgacattcgggacatgtgtgatacctccaccttcaccgccgccgtcgcctcggaaggcacccagcggcggcaagggcacaagtgcaggcggcagctccagttccagcggcgcaatggctcgggttgtactaccaaagctgagcttcttcttcggagtggcacttctgatcctggtcatactctcttattaagagcagacccattcacttgagcttgtgctgtctttgtgctctgctggtacaagcacatactgtactgccattctgaggcaaaattttctgctctttttttagccacctgttccattggtttgtaacttctttttcttttttgttaatgagagctgtagatgccagattagctggagaaattgttcatgtgccgagctgtagatcattccttttatttgaggcaatatttttctgcatatcaagtaaaaaaaatgctcataaaataactgcaatcgcattgtaaaaaaatgttgtggtaagaccttttacaggtgcaaaatatgcctattatgcatagccagcaaatggaacagattctgcatatgtcatcaggattattcttgatcttatgcactttatgttccaagaaaaaaaaaaaaaaaaaaaaaaaaaaaaaaa

SEQ ID NO: 28935 - DNA, 758 bp, Oryza sativa
  Clone ID: PAT_MRT4530_33485C.1
gcacggggaggacgtgaagagggaggtggccatcatgcggcgcatgtcgtcggcgtcgtcgtcgcgcgggggcggcgccgcgtcgtccgccgccgtggtgcggctccgcgaggcatgcgaggacgccgccgacggctccgtccacctcgtcatggagctctgcgagggcggcgagctgttcgaccgcatcgtggcgcgcggacactactccgagcgcgccgccgccaacatcttccgcaccatcgtcgacgtcgtccagctgtgccactcgaacggggtgatacaccgcgatctgaagccggagaacttcctgttcgcgaacaaatcggaggactcgccgctcaaggtcatcgacttcggcctctcggtgttcttcaagccaggcgaccggttcacggaggtggtggggagcgcgtactacatggcgccggaggtattgcggcggagctacgggccggaggtggacgtgtggagcgccggcgtcatcctctacatcctcctctgcggcgtccctccattctggggagacaacgacgagaagatcgcgcaggcgatcctccgcggcgccatcgacttcaacagggagccattgccgagggtctccgccaacgccaaggacctcgtcaggaggatgcttgatcctaacccatccacccgcctgacggccaaacaagttcttgagcatccatggctgaagaacgcggacacggcgccgaacgtgtcgctgggcgacgccgtgcgggcgaggctgcagcagt

SEQ ID NO: 28936 - DNA, 1990 bp, Oryza sativa
  unsure (1)..(1990): unsure at all n locations
  Clone ID: PAT_MRT4530_33486C.1
cggacgngtgntntntttttcaaaanaaaaataccctttttttttttttttagcaaaaccggtacgatccccatttcagttccatttctcatttcacaatccaagcgcagatcgcatcgtgttgccactccaatacatttctctaagttggtcttgtatctctctctagttatccctgtctggtgaaggtgaaagatgtgcagtttataagccttgatgaaacaaagttgatgagattgttgggcatcatcgatcatcagggagtaagagtatccttgcagagcctcctgctgagggtgctgaagttggccctggagaagtgcctggaggcgttcctccagtcggcgccggacttcatcatgagctcgaactcctggtagctgatgcggccgtccttgtcggtgtcgacgtcgcggaggatctccaggatggcctgctcgtttgggcccacctcctcccgcagctcgtccagctcgatgaacccgctgccgtccttgtcgaagtagttgaacgccgccgccaggtactcgtcgttgctcatcttcttcaggtgcaccgacaccgtcacgaactcgtcgcagtccagcgtcccgttcccgtccgtgtccgcggcttcgagtagcatcctgatctcgggctcggggacgggctggccgttgatgtggaggccttccaagagttcgtcgagcgacaggtgcccgttcttgtccttgtccatgtggtggaacatctgcacgtacttgtccacctcctcccccggcaggttccgcgccaccactccgagagccttcttcttgaacttgttcatggcggagaactgctgcagcctcgcccgcacggcgtcgcccagcgacacgttcggcgccgtgtccgcgttcttcagccatggatgctcaagaacttgtttggccgtcaggcgggtggatgggttaggatcaagcatcctcctgacgaggtccttggcgttggcggagaccctcggcaatggctccctgttgaagtcgatggcgccgcggaggatcgcctgcgcgatcttctcgtcgttgtctccccagaatggagggacgccgcagaggaggatgtagaggatgacgccggcgctccacacgtccacctccggcccgtagctccgccgcaatacctccggcgccatgtagtacgcgctccccaccacctccgtgaaccggtcgcgatgagaggtggaaattttgctgaagatcgacgtgcctggcttgaagaacaccgagaggccgaagtcgatgaccttgagcggcgagtcctccgatttgttcgcgaacaggaagttctccggcttcagatcgcggtgtatcaccccgttcgagtggcacagctggacgacgtcgacgatggtgcggaagatgttggcggcggcgcgctcggagtagtgtccgcgcgccacgatgcggtcgaacagctcgccgccctcgcagagctccatgacgaggtggacggagccgtcggcggcgtcctcgcatgcctcgcggagccgcaccacggcggcggacgacgcggcgccgcccccgcgcgacgacgacgccgacgacatgcgccgcatgatggccacctccctcttcacgtcctccccgtgcgcggccgccgccttcgccgcggtcacccgcggcggcgccaggcgcctgtgcttccggatcgtcttgcacgccagcgcctccccggtcgccgcgtcgctgcaccgccgcgtcaccccgaactccccgcgccccagctccttccccagcacgtaccgccgcgcgaactcgtccgccgtcgtcgtcgcgatggcgacgacgtcaccgccatcgtcacagccaccaccaccacccctcacgtcgtcgccgtcgccatcgacgccgtccttgcgcggcgaggcggcctcggcgtcggggaccgggtcggggatgacgagggagatcttgctgatgcggccgcgcagcttgcgcgaggaggcgtaggcggagtagcagccccccat

SEQ ID NO: 28937 - DNA, 575 bp, Oryza sativa
  unsure (1)..(575): unsure at all n locations
  Clone ID: PAT_MRT4530_33487C.1
gcaaacgcgacggtcctcggcgagtgagaggaggaagcaaaccctagccgccgtcgcaaccctactctcgttcgtccgtacgncngtggcatggcggctatggcgctgcgctctctcgtgaggaaggtcatgcccgtcccggctgctctncgncggatggctaagcaagtgcaagatgttacagttcataaggataagctgcgtggcacgacatctcccaagactacagctcctcctggcaatggcaggggcagctatttcaaagacaatcatccgacttttgctgaattggttcaacgagatacagatcggaggagcttcaacaggatgttggtggcaggtgctgcttcaggctatgctgttgcccttgtcattatgttatctcttcgccgtagtgtgaaggaagatcttcgcaataacatctacgactagcagctttacccacctgtctaggggctatttatttctatttttgtgtgtgactctgcctataatggcatgtgtttaatgtggcatgcatgtgacatgtctttatgtaagactaattatcggtgtaatgtattgttgttgcactc

SEQ ID NO: 28938 - DNA, 3609 bp, Oryza sativa
  Clone ID: PAT_MRT4530_33488C.1
atggcgcggtgcgggcaccgggtcaggatcacggcgagcggcggcagcgggaggtcggtggtggcgaaggtggtggacgagtgcgactccgtgcacggctgcgacggcgagcacaactacgagccgccgtgcgacaacaacatcgtggacgcgtcgccggcggtgtgggacgccctcggcctcgacaagagcgtcgggatggagcacatcacctggtccgacgatggcgatgaatccaaagtcagatcgaagaagatagacatggagagcgaaaagaaaaaggcaaagaagaaaagagaagaagaagaaccaaaatccaagatcaaatctgaagaaaaaatcaaaacatcaagatccaaacaaggaatgaaatttaccgaaccagttcgcattggacccctggagaaaaaagaattgaactcaatttcagaacataaacagaaagttagcttcgagacacagggaaataaacaaaaccatatgaaacaaaatgcaggaataaggataatgccatatgctgaaccaaatgagaatagcaagagtataacccaaggaagcaaagagggtaacaacaaaacaatacagtcaggtacaaatattcatcaactacaagatggagaaagaagtttaaaagaatcagagagaaacaaaatagatacaaagcatactgaagaaacaagttctagtatcacacaaattacaggaatcggcacaacccaatcgccacaaagcccagcattactacatgatgagttaaccatgcttaagtcacatactacaccggtagcacagttgtcgtacacaagtctaatgcaccaagtaataaatagtccaaggattaacatagaaccaaatatgggaggaagaggactagaaagtttcacaagtatgcttcaaacaccatcagcatataataattcaatgatactaactacgagcagagtttgtgaacaagacatgctgctggaagacagaaacaatgacctattaatcccaagcaaacattacagttaccaagaatttgatgaaatctacaacagtgcaaggatcacaccagagattccagttgacaaaactatggaggaattgtacaaattacaaaacacacatttgaaatcacaggctacatatcaaaaatttattgtaagagatatctgcagggaattcctacaagctgggccactcagaacagagatcaagaggactttgaaaccatacaatgaaaactttcatgagcaagatattgaagagcaacaaacaagacctgaagcaacagaaatttcagggatacaacagcagcaaacagaggctgaaatgaatgataatttaaattcagctactaacaacggggaggaattaagtgaggaagacattgacaatttcttacaaaatgaagaggagagcagtttaccaatagatgataaacacatacctaagctaggaatgaagttcaaatcacatacagaagctagaggcttcttcaacttctatgcatacctagccggtttttctgttgtgattgcgcaccactacaagacaacaagcaagaaaagacaaggtgaaattacaaagtacacatacaaatgcaacttgcaaggcaaaaatgaaccagcaaacaagaagaagagcaatgaacaagttactgaacagcagagggaaacagtagtcctagtcaaaacaaattgcaaatgtacaatggtagcaaaagaagttggacagttttggcaaatatcaaggcttgatctgaatcataaccatgcactttgcccaagaagagaagctaaatttctgaggtctcataaggatatgacagaggaagaaaagagactaataaggacattaaaagagtgcaacataccaactaggagcatgattgtgatattatcatttctccgaggtggcttggcagcactaccctacaccaagaaggataaaaaggaacaagatgaccctggaatgtactacaaattcaagctagatgaagaaaacaaggtgacaagcatgttttggactgatggtagatcgactcagctatatgaggaatatggtgactgtatcagttttgacacaacgtatagaacaaacagatacaatatgccatttgcaccgtttgttggtgttacaggacatgggtcaacttgcttgtttggttgtgcatttttaggagatgaaacggcagagacattcaagtgggtttttgaaacatttataacagcaatgggagggaaacatcccaagactataattacagatcaagataatgccatgagatcagcaattgcacaggtttttcaaaacacaaagcacagaaactgtctatttcacatcaagaaaaattgcagagaaaagataggaagcatgttctctgcaaaagcaaatagaaacctgtatgaggaatatgatgacatactaaacaattgcctaacagaagaagaatttgaagtgctttggcctcagatgattgaaaagttcagtttgcaaaatataaaatacttgcaactaatgtggaagaatagagctcagtttgtgcctgtctacttcaaatatgatttctgcccttttatacaaagcacagcgctgagtgagggaacaaatagcagattcaaaagaggagttggaccacaacacagtgtgatgagttttatgaaggaatatgagaacataaatgatactatctttgatactgagtacagcaaagatttccaatcaaggacaaaaatgccaaaaacactatggttcaactatctcattgaagagcaggcatcggaactatataatctagacatattcagaaaattccaaaatgaattaaaggatactttaaggttgcaagtatctgtgatacaacagggcaaagtgtatgaagtgtttgtgtcacctaatagcatccagcaagaatatagacaaaggaaacatatagtgatcattgacttaccaaatgaaaacttcggttgcatttgtgggaagttctctaaggatggaatgctatgttcacatatcctgaaagtgatgttggaactcaatgtgagaaaaattccagaaaaatacattattgatagatggagaaaaaaagaaaagaaggagaaagtgaaaggcagcatacatacagatgcaacagacaactctgttctgatgtttaatgttctatcaaggaaaggtgctgacatagcatcaaaagcatcaaaaagaaaaagaacatatcagttcatgatggaggaacttgagaaattagaaatgaatgtgcaattgatgattgaacaggaggccgaaacacacctgtcacaagatgaaagcaacacagtacaaaatgatactgtgcagcatgcagaagaagagataatagaagaagtggaaatagaagacccagatttggccaatactaaaggaagaaaaccaaaaagatatagaagaatagtggagaagatgatagaaacttcaaaaaggaaaagtaaagatgagcaacacacaacagaaacaagaacaagtgagataaccaatatagggaacaagcaagaagagatgaaaacatcaaaaactacaaaaagaagaaagaaaaacaatactcaagaggaaactcctaaagagaagttgcatgcaaagacaagctga

SEQ ID NO: 28939 - DNA, 588 bp, Oryza sativa
  Clone ID: PAT_MRT4530_33489C.1
ggaataatccagccctttttttcttagtagttttgattctgtttgagcaataattttgatgtaaaaatctcttaataacatgagaaaagctgttcttgatctctgtactgtttggtttggttttcagagtcgacatcttacccctagaaactcacctttgttagctttcttggttcctacaaaaagaactcatttgatactacaaaaggctttggagaagattgtgatggaagccaaagatctgtgaaggataattttacagtgaacaaagggagattgttactagcaatagttattactactactattgcaaacgcagacattttgttcggagatctagctctgtccggacaccaacagttagaaatgaacaaactaaggataagatgatcagtcgacttccagttaatacaagtatagttctgaagtactgtagtaaaagaacacattttttgccattgttaagggagtggtcatcaccatcaccagatgaacaagctttgtttacatcaccaaaatccatacaagaaactagtattaaggcaaaagcaaacttctaatactagctactactattttctatgcaat

SEQ ID NO: 28940 - DNA, 222 bp, Oryza sativa
  Clone ID: PAT_MRT4530_3348C.1
atggcccgagagacgcgggagcggggcgcggcggcgccggctggaggaatgggacgggcccgacagggtgtgacactgggcgagcaactcgcggaacgcgaggaggccgtcaccgggcgcgaggctcggcatctggagagcgctcgtgccgagcgcgcggcgatggcggcgagggcttctaagctggaaggccgggagaaggacctggcggcgggcgggtag

SEQ ID NO: 28941 - DNA, 1688 bp, Oryza sativa
  Clone ID: PAT_MRT4530_33490C.1
actcagctatatgaggaatatggtgactgtatcagttttgacacaacgtatagaacaaacagatacaatatgccatttgcaccgtttgttggtgttacaggacatgggtcaacttgcttgtttggttgtgcatttttaggagatgaaacggcagagacattcaagtgggtttttgaaacatttataacagcaatgggagggaaacatcccaagactataattacagatcaagataatgccatgagatcagcaattgcacaggtttttcaaaacacaaagcacagaaactgtctatttcacatcaagaaaaattgcagagaaaagataggaagcatgttctctgcaaaagcaaatagaaacctgtatgaggaatatgatgacatactaaacaattgcctaacagaagaagaatttgaagtgctttggcctcagatgattgaaaagttcagtttgcaaaatataaaatacttgcaactaatgtggaagaatagagctcagtttgtgcctgtctacttcaaatatgatttctgcccttttatacaaagcacagcgctgagtgagggaacaaatagcagattcaaaagaggagttggaccacaacacagtgtgatgagttttatgaaggaatatgagaacataaatgatactatctttgatactgagtacagcaaagatttccaatcaaggacaaaaatgccaaaaacactatggttcaactatctcattgaagagcaggcatcggaactatataatctagacatattcagaaaattccaaaatgaattaaaggatactttaaggttgcaagtatctgagatacaacagggcaaagtgtatgaagtgtttgtgtcacctaatagcatccagcaagaatatagacaaaggaaacatatagtgatcattgacttaccaaatgaaaacttcggttgcatttgtgggaagttctctaaggatggaatgctatgttcacatatcctgaaagtgatgttggaactcaatgtgagaaaaattccagaaaaatacattattgatagatggagaaaaaaagaaaagaaggagaaagtgaaaggcagcatacatacagatgcaacagacaactctgttctgatgtttaatgttctatcaaggaaaggtgctgacatagcatcaaaagcatcaaaaagaaaaagaacatatcagttcatgatggaggaacttgagaaattagaaatgaatgtgcaattgatgattgaacaggaggccgaaacacacctgtcacaagatgaaagcaacacagtacaaaatgatactgtgcagcatgcagaagaagagataatagaagaagtggaaatagaagacccagatttggccaatactaaaggaagaaaaccaaaaagatatagaagaatagtggagaagatgatagaaacttcaaaaaggaaaagtaaagatgagcaacacacaacagaaacaagtaagtgtagcaagatcaagaatccacatataactataaattgtagaaataacaagttttttttgcaggaacaagtgagataaccaatatagggaacaagcaagaagagatgaaaacatcaaaaactacaaaaagaagtaataaacaaatcacagaatccgcactatgaaacaaaaaagaaaaaaataagctaacatcaaaacagaacaaaaaactacaaacaaatcagagaaaa

SEQ ID NO: 28942 - DNA, 879 bp, Oryza sativa
  Clone ID: PAT_MRT4530_33491C.1
atggcgcggtgcgggcaccgggtcaggatcacggcgagcggcggcagcgggagatccaaagtcagatcgaagaagatagacatggagagcgaaaagaaaaaggcaaagaagaaaagagaagaagaagaaccaaaatccaagatcaaatctgaagaaaaaatcaaaacatcaagatccaaacaaggaatgaaatttaccgaaccagttcgcattggacccctggagaaaaaagaattgaactcaatttcagaacataaacagaaagttagcttcgagacacagggaaataaacaaaaccatatgaaacaaaatgcaggaataaggataatgccatatgctgaaccaaatgagaatagcaagagtataacccaaggaagcaaagagggtaacaacaaaacaatacagtcaggtacaaatattcatcaactacaagatggagaaagaagtttaaaagaatcagagagaaacaaaatagatacaaagcatactgaagaaacaagttctagtatcacacaaattacaggaatcggcacaacccaatcgccacaaagcccagcattactacatgatgagttaaccatgcttaagtcacatactacaccggtagcacagttgtcgtacacaagtctaatgcaccaagtaataaatagtccaaggattaacatagaaccaaatatgggaggaagaggactagaaagtttcacaagtatgcttcaaacaccatcagcatataataattcaatgatactaactacgagcagagtttgtgaacaagacatgctgctggaagacagaaacaatgacctattaatcccaagcaaacattacagttaccaagaatttgatgaaatctacaacagtgcaaggatcacaccagag

SEQ ID NO: 28943 - DNA, 1881 bp, Oryza sativa
  Clone ID: PAT_MRT4530_33492C.1
ttttttttttttttttttttttttttaaccgtactgaacaggtcgtcttagttattagccgtactgaacaggtcgtcttagttattcttctgcagatgtcacagttaaaagcgatgtggcacaggcatatatctaagtttgaaatacggatctatgaatacaagaaaatgccatcaatagagcaaactcgatggtcgacggatggtagaaacaccaggaagaggaagatgcggatacgacggtaaattttcctcactccgaaagcgtggacttcagctctccactcttctccagctcaagaacgatgtcacagcctccaatcagttctgatttgtagtacagctgagggaacgtgggccagttggagtacgtcttcaagccttgcctaacctcctcgtcggataggatgtcgaacgctccgaagctgactcctgcttgcttcagtgcattcacaaccttcgaactgaagccgcagcggggggcatctggggtgcccttcatgaagagcatcactggggcagaggaaatcagggccttcaggcggtcttctagactttctttcgcaacgatccctttctcagatagaaccttcttaagctccccactcttatgcatctccataacaatgtctgatccgccaaccagttcaccgtttatgtacagttgagggtaactaggccagtttgagagaagctttagaccctgcctaacctcatcatccgtaagaatgtcaaaacttgagaaagggatcttctcttgcttaagaatatgcactagttttccactgaatccacacttgggctcctcaggtgtaccttttataaatgccatcactgtgctgaaattaacaaggctttccaagcgttccttctgagctgcagtaagcaaagctggttcagaaactgcaccactcttctcagtatcaggcttggctttcactgcctcctcgtttttgcttccctgtggctgcagcggaatgttgtgctccttaaaaacatccttcagttcaccgctttcatgcatagcaatcacaatatcacatccaccaagcagctcacctttgcagtagagctgaggaaaagtcggccagtttgagaactttttcattccttcacgtacatcgttatctgttaggatgtcaaagctcccaaattcaactccttcctgcttcaaaacgtcaactacttttcgactgaaaccacaccttggttgctcaggggttcccttcataaataagaagacgggatgggaattgacaagctgctccaatctcttgttcaatgcatcttctgcactactagtggaagaagctccattttgctgtgccatctcttgaaccttttcaagtacagcaggcccagcagccacacccaggctagcaggcacagcagactcagcaacgctggcaggcccagctaactttgcaaccttattggccaagctggctggatttgcaccctccagagtatcaacagttttaccttccttcaagaaaacaaaatatggcactgctgtaactccatatgcctctgaaatttcgggttgttcctcagcttcaacccggaggaagacggcgtgggggaagtcgacggcgaggtgcgcgaagacctcgtccatctgcttggacgcctcgcaccacgccgcccagaagtgcaccgcggcggcccgcgcccctcccgccgccgcctccagctccgccttcgaccccacctccctcaccgccgccatcacgccctcccccctcccctcccttccctcaccggcgacgacgagagatgcagcagcaggcggcggcggcggaggagagatgagaagacgactcgcggcgggggggcttgcggcttggggttttcccctcgtgccgaattcctgcagcccggg

SEQ ID NO: 28944 - DNA, 394 bp, Oryza sativa
  Clone ID: PAT_MRT4530_33493C.1
atcgaagatttgaccaaggaaaaatatattgttatatgaaaattccagcgataccacaaagatttgaccaaccaaataataccacaagattctttcatctccactcaataccacagtgcaacaacgtttcttttaagaataccacatatttcaacagacgttacccaatctcatacaaactaatttgtctccgttacctgtgtttgaaaagaagagtactgaggtaccctgtgtgaacaagatttaggagttctccaatcccatcgtggccttcagctttaggagttcttcaattcaaagtgggatgatgcataactgccttttggtgatagctggtggagctcacaaccatccaggaccttgctcaagcatgtaaactgatgaagcagtccgt

SEQ ID NO: 28945 - DNA, 156 bp, Oryza sativa
  Clone ID: PAT_MRT4530_33494C.1
atgatggcattctcagccttggcccttggggaaacaattggcttcaagaaggaaagcacgagggaccacctggggacgtggtgcaacagttgtgctgtgagtttgatcaaccatcattgctgggactcgtcgtaccagctctccaccatccggtga

SEQ ID NO: 28946 - DNA, 285 bp, Oryza sativa
  Clone ID: PAT_MRT4530_33495C.1
gacgagtagccacatcaaggctgctcccatcctcttcttctagttcgcttccgccttattaaccatagggtaaggagaagacgcacctacacattgcggcccttggaacacgtcgactccggcaagaaatccctcacgggctatctgatgtaaaccatctggaggtaacgaccaccatgtgattgacaggctctgagaagctaaacgctgaaatgaaccagaggccctcccagtccccgcgggtgattgccaagatccccgccgagcgtgacagaggcaacacaa

SEQ ID NO: 28947 - DNA, 285 bp, Oryza sativa
  Clone ID: PAT_MRT4530_33496C.1
atggtggcggtggtgagagggaaggccatcgttgcaccgccgtccctcccgccaccgccttcgcctcccttccgctgccaccctcaactgcgcatggggaaagctgccagacctgctcctccagcgacgttgccgtcgcaaccccgacggccaccctactccgtctcatcgtgcactacctcctcgcgccgctcatccctccttcccgccaccgcctccacctcccctctgctgccgcccatcgtggccgattttgccaagctcatccatggtgcccgcgattga

SEQ ID NO: 28948 - DNA, 3084 bp, Oryza sativa
  Clone ID: PAT_MRT4530_33497C.1
ccacgcggccccgcctgctccttctgcctccgcgcccggaccacgataaaggccggctctggcggcgccgccgcggcggcggcagcggcggcgaagaagaagcagcagcagggcggcgccggcgtgacgggcgaacgagagtgccagctgatggggatcatgtggctgctgcagcggaacgccacgcggtacggcgcggcggccaccgccgtgatccaggcgctgatggccgccgacgaggcgtccgccgcgggcgtcgcggcggcggcggatgggccggcggcgtgctcgctccccgtcgacgacatgccgctcgcggccgagtacgcgaggtctagcaatgctcttggctctaagctcttccggtggtgttcgcgcgagaatcacacgtccgtcaggaagctgttggaggtggatggcacgtcagagagatcaaaactcctgaacaaagtgtctgttttgatgggttatagtaatacacaagaattaattgagcaagaaagagcccgcagaggatctgctacagaattgatcagtgtatgcaaagaaattgagttcccagaaatgtgtgcaaagtttccatgcataaaaattggtgattcatcacctattgaactatatgctgctgctgctagcatgagtcagaaagaaactgtgctttctgaaaacctcacgaatttcatgcgagagtccggtggaaattttggggcagcttatgagttttctgacaaatgccatccattagatccaacccttacaaacgtcgatcacctatcaatcagtgaagagagttctctcacagcacagtttgtttctcttgaaccggcagttgataccgatgcttgtccagagtcattggcagtggcagatgctacagtttctgattctagcatcttggacagaagtataagatgttttcccggaacaactagtaggcaatatcgccagctagaggatggtggtttccatacggtacggaaattgttgcagcattttccccggacctatgcagatctacaaaatcctcaaggttcaatagaagaggggcagtacatcatgctgtttggaaccgttgtatcttccaggtatatgaaatactattggaggggagccagacttaagcacactttaggttaccttgaggttgttgttagttgttcaataatcgagagtgagttaagctcttcagttaagagttgtaactctcaagcagaacaaaagaagacaattcatttgcacctcaagaaatttttcagcggcacacgcttctcttctccatcttttcttaagtgtatatcatcgaagtacaaagagggggatcttgcttatgtcagcggtaagatcaagaaggcgcttactaaagaccattatgatttgagagagtacactattgacatgcttgaagaagaggaacaacaatgcaccctgcttgacaggaaaccatatcctatatacccatcaaaagcaggattgaaaccaagtttgctgagcctctccatctcaagttcccttactaaatgctactcatacaagtggaacctagagatggatggactgtcggattttttcttcttgctattggatatctgtgtggcttacatgggaatccacaagcctaagaatcgagatgaagccgattttgctcggagaaggcttattttcgatgatttcttttatcttcagttgggaagactgtttcaaatgcttgaagctgttggtacacgggttgagaaggaagaattgttattgaagtgcaaaaatcatgagctaaatgctgttggtgctgacgagtggtctcctcttgcaaggaaattgttaaaagttcttccttatttgcttactcctagtcaattgaatgctgttaaagagattatatgggatctcagaagaccagttcctatgaacagactcttgcaaggtgatgttggttgtggtaaaaccgtagttgctttccttgcatgcatggaggtcattagctcaggatttcagggtctcaagacaggagaaatagcaatggtcattggaacacacagcttaattggtgataaaaccgaattctcagctttgcgcatctctgttatagatgagcagcagcgctttggtgttgttcaaagaggaaggtttaatagtaagcatatcactgcagaaaatgacccatcattacaatttgctattcttgctgttattacaatagctagcatatcattgcagaaaatgatgctatataccccttccacgaaatcgagtgatgatgatacaatctcagacgagaattccgcttctgaaatatttatggctccccatgttcttgctatgtccgctactccaatcccaagaacgttggctcttgctctgtatggggacatgtcccttacacagatcacggacttgcctccaggaagacaacctatagaaactcttgctcttgaaggaaatgatgctggttttgaatctgtcttccagatgatgagtgatgaactggttgatggaggcaaggtctacctcgtatatcctatcatagaagaatcagagcagctaccacaacttcatgcagcaaaagccgagtttgattccataaagcaaaaatttgaaggttatccctgtgggctgttgcacggtcgcatgaggagcgatgagaaggatggagccctcagcagttttagatccggggaaacacgtattctcctctcaacacaagtgattgagattggagtcgatgttcctgatgcttccatgatggttgtcatgaatgctgagagatttggaatgtctcagctgcaccagttaaggggtcgggtagggcgtggcgaaaggaaatccagatgtgtgttcctatgctccactcctagcgcgctgccaaggttgaaggtgcttgagaagtcatccgatggattctacttggctaacgccgacctgctactgcgtggccctggtgatctactcggcaagaaacagtcagggcatcttccagagtttccaatagctagactggagattgatggcagtattctacaagaagctcatcttgctgcacttgtgaacaatcctttttcagatgctggcaagattgcaagttactactag

SEQ ID NO: 28949 - DNA, 285 bp, Oryza sativa
  Clone ID: PAT_MRT4530_33498C.1
atgaagcccgactccaccgtcgacatggtcgcgctctccggcacgcactccatcggccgctcccagtgctcctccttcgccgaccgcgtcccgccgcccagtggcaccaccacctccggctccgacatggacgccgacctcgtcgcgtccctgcggcggcagtgcacgacgccgagcgacacggtggcgcaagacgccgtgacgcccgacgcgctggacaaccagtactacaagcaggggcggatccagcatgggggcggcggggtctcgagcccccactactga

SEQ ID NO: 28950 - DNA, 135 bp, Oryza sativa
  Clone ID: PAT_MRT4530_33499C.1
atgtcatgtgacagcatcttcgtcgccgccttgcaccgcccattcttcatgccagaatcaggacatcagggaagccccgccaccaccgtccttgctcaccgcttgggttccggccgcagctccagcaacagcaag

SEQ ID NO: 28951 - DNA, 1525 bp, Oryza sativa
  Clone ID: PAT_MRT4530_3349C.1
atggaggcatacaagctctgggtgcgcaagaaccgggacctcgtccgctccctcgagtcgttggccaatgatatcactcatctgaagtatttttatcaggggctaacgtggatacttcctgagcgctttgccaactctgagatcgcaccagaagcagtatatgcatttctgggtatcgtgagttctgtcaatcagcacataattgaaacgccaactgatggtcagacattggcctccaaagagcaatctatcccatggtcccttgttgtctcagtacttaaggatattgaggcagttgttgaggtggctgcccagcactttgttggagatgatcgcaaatggagctttcttgctgttacagaagctgtgaaagcaggtgtcaggttagctgctttcggggagagtggctacaagatgctcttacaaggaggagaggtggcaaatgaagaggagattaatattcttgatgaaaattttggagccaaaagtaatggagtaccagtcatttatccgatgaatggccatttccaaaatggtcatggggttgcatctaatggtcttgatggaaaggctggatttgtatcaaagagtctggagggaagagctgtagctgctcttaacaagtttggccagaatgcaaagatgacgtcagatcccatgtggatgaagaaggctctgcctcctcctgatcctcctgcgatggtggttgagaagccaactttggcaagtatttggtctgctaaaggaatttcagggcggttatttttgttaggagaagttgtccacatattcagaccactgctatacgtacttttgatcaaaaaatttggaatcaaatcatggaccccatggggacgagttgaaaaggcgaaagatgatgtggccctttatgtcatgagagatccattctttaccagatacaccaagcgccatctccagaaggctgagaaagtgttggatccagtgcctcttattggtttccttacaggcaaactcgtagagctagtggagggggctcagacacgatatacatacacatcgggctcataaggataatggacaagcaggcagatgtcatgtctgagagtttccttaacgatttgccatgattaaccttttgtggttcatgtgatctggttgatgggttttgttttgagcttgatcctaatcctatctgtacatgccatttccttagcaagatttggcattcctacctgatgtcttggggctgcaaagctgttgcggccactgtaaactctcctctctcctctggtggcagctcagctgagaatctaactatactatagtatatcggtgtaatattaagaataggcacatcatccctgcaacgataccgtgtatttatttaccaattaccatgcaggacatactggaacccagaacaagtccaagagaaaattgcttgggtttttcatgaaaaaaaaaaaaaaaaaatgctcgcgactggcgctctctctcccccgcgtgccgtttcctgcaaaaaaaaaaaaaaaaaaaaaaaaaa

SEQ ID NO: 28952 - DNA, 405 bp, Oryza sativa
  Clone ID: PAT_MRT4530_334C.1
ccacgcgtccgcccacgcgtcggtcattttgtagctcaaaagctttgaaggatttcagaacctgacacacgaagacgcatggcgtcaagaacactcatttcttgtctactgtttgatgagatttttatcattgtacttacacctttactgaatatatacactgtcattgagaagcgttcagtcgatacctttatggaaaacgaggatgttgcccatagaaaaaaagccctcaccgatcgtcctttctaacagatgcgctgcctgaattggcgattgggacgctctctgttatgcgcatttaacccgtcgggtgtgggggttactctcctttttggtcctcttctatttgtctaagagcccctagtgcccgttttctttaggcttttttttacctcttatattttt

SEQ ID NO: 28953 - DNA, 2701 bp, Oryza sativa
  Clone ID: PAT_MRT4530_33500C.1
tcatccagacaaataacactggatagccgatacaacccgttgtctaatttgaactacttcttcgatggcttggatgtcttgggcgtcggttccagggatgattttgagggacttggtcatatcagccacattctttatagccgatttaagtatggatttatgttcttcgacagcatttggaagattggctaacttttgcttctccagatccaactcagcattgcattcttcaagttgagctattagatcaatcttgcgggcttcaagccgatctatgttcgattgaatcggaccagcagagagttgatcaagcttggctttctcctcatgcacaagctgccgattggcttggatagtggcttcaatatcttttcgctcccgtcgatcagctattctttgcttagccttctccagcttgaattgatgttgctcgaggtatacagctggagtaatggtgttcgccagatcatccgggattaaggcttggatttcagcaaaccgtgcccggattgagccacaatcggccaccagattatccaatgatgactctagcggaagggatatgtcttcaagtgttttcttgatagtttcatccagagggtctagagccttgctagtggtttcttcctttgtctcatcaaagtaatcctttatatcaaaagagaacaaatcggctaaggctaggatggcaggagcggctggttgttcttcttcttcatgatgatgacttcctgtagccgatggggtacagtcacttgacatctgctatacaggtggggaaggaggagcaggaggcggtggagctggtttaagtattgttgctgccgatttcttcctcacagcagtcttcttttttttggctgcagcttgatcgacatcttcttcgatctcttcttcatccagggcttgctcgatggatggatctaaagcaggcaagtcatcggctggcttaggtttgttcttcttggtcttcttcttgggagccagagctgattggtcaatagccgatgccttggcctttctcttcctgccaacatcggccggttctctcatctgtccttgaagcagacttgaggtcttgggggcatggtagccgatgacaggaggagctaatccacctccgtttggtagaaggcatggagcatattctatgtccctgccgctattgctcttgcgaggaggagaagattctgttgtctgagggacaacatcaggaaataggtctgtcatgtacatagaagccgactgatggaatatatgttgcttccattcgccccaccatctgtcaaaattcctactcctgagtcttgccaactctatgttctcgatgctgcccagagggggtgctgggatattgagtagccgatccatcatcagtgtggatgagatctcctcgcttcattggattttatcggcaaagaataagccgattggcgtctatcccattccaaactgtctagcatgggcaccaaacttgtatgtttcttccttgatggatgccgacaggaaggatgcatggactaatagcagccgagaagacttatctggacttgtcaaatttttcggaattgatatcctcaaatctgaagtctgctgggatatccaaatttacttaatcttcgtatgggaaccaaactcgagcatctctctggaagccttcataaaagctacagaaccaatccttgagcaattcagccgataactttgctccagcatcggctggtgtggatgcatattccccataggacatacacctgcggtgggtgcgctcttctccatcatcattggtaatcggctttaatcttggaaactcagcttctgtcatagctggccgattgacagctttcatggctaccaggtttagccaggtttgcagcaaccaccatggcccgcctacactaacggctgagcagacaacaattttagccgatgcattgttcagcatttgaaacaagtagccgaggaggatcttgcctaaaggaaattgcctctttgattctaaggcttcagctaaaaactgccagttggttgtggggccgcaacttgatccacaaaaaaggaatttctcaagccacatcagcagaaaggccacatgttctcgggaggtggcaggtcctttgcccatatatgctgctacataatcagaccagccacatatgctcttagttctgaagtcaaactggttcttggtgttcaagctcatgaggttagccgacgaggtcatatccaaaccgatgatcatggtgatgccaagcaaaatggggttcatcggcccttggttgaacaggaaagcattaatggtgttggaccaaaaataggtggcagcggccatcaggggttcatctttagctgaatttgctatggtaaggccaagtgcctggccgatgccgatttcgtcccaattgccctgcttgctacccgatacccgtttatgccacacagaccaacttttctccgtagtggttttctcaagagaaggccaagacataaaggtgtttttccagtgacctagatttgggttggccaatctaaaagggatcctattggtttcagcgatgatgaactcggtgggatcaagattgccgatcggaccaaggaaataatggtgctcatgtgacagactcgggatcgtgtccagattggacaagtgctctgcgtattctgccgatggcgcgacggatggactggcggaggacgacat

SEQ ID NO: 28954 - DNA, 2046 bp, Oryza sativa
  Clone ID: PAT_MRT4530_33501C.1
caacggcagcataataggccagccgtgcaggcggaaacaccagtcggaggcggcgaaggcggtggagctggtttaagtattgttgctgccgatttcttcctcacagcagtcttctttttccttgagaaatgagctagggtagcaggagttgggggagtttgcttgggtgaagccgatggtgttttttctgtatcacttactttggctgcagcttgatcgacatcttcttcgatctcttcttcatccagggcttgctcgatggatggatctaaagcaggcaagtcatcggctggcttaggtttgttcttcttggtcttcttcttgggagccagagctgattggtcaatagccaatgccttggcctttctcttcctgccaacatcggccggttctctcatctgtcgttgaagcagacttgaggtcttaggggcatggtagccgatgacaggaggagctaatccacctccgtttggtagaaggcatggagcatattctatgtccctgccgctattgctcttgcgaggaggagaagattctgttgtctgagggacaacatcaggaaataggtctgtcatgtacatagaagccgactgatggaatatatgttgcttccattcgccccaccatttgtcaaaattcctactcctgagtcttgccaactctatgttctcgatgctgcccagagggggtcctgggatattgagtagccgatccatcatcagtgtggatgagatctcctcgcttcattggattttatcggcaaagaataagccgattggcgtctatcccattccaaactgtctagcatgggcaccaaacttgtatgtttcttccttgatggatgccgacaggaaggatgcatggactaatagcagccgagaagacttatctggacttgtcaaatttttcggaattgatatcctcaaatctgaagtctgctgggatacccaaatttacttaatcttcgtatgggaaccaaactcgagcatctctctggaagccttcataaaagctacagaaccaatccttgagcaattcagccgataactttgctccagcatcggctggtgtggatgcatattccccataggacatacacctgcggtgggtgcgctcttctccatcatcattggtaatcggctttaatcttggaaactcagcttctgtcatagctggccgattgacagctttcatggctaccaggtttagccaggtttgcagcaaccaccatggcccgcctacactaacagctgagcagacaacaattttagccgatgcattgttcagcatttgatacaagtagccgaggaggatcttgcctaaaggaaattgcctctttgattctaaggcttcagctaaaaactgccagttggttgtggggccgcaacttgatccacaaaaaaggaatttctcaagccacatcagcagaaaggccacttgttctcgggaggtggcagttcctttgcccatatatgctgctacataatcagaccagccacatatgctcttagttctgaagtcaaactggttcttggtgttcaagctcatgaggttagccgacgaggtcatatccaaaccgatgatcatggtgatgccaagcaaaatggggttcatcggcccttggttgaacaggaaagcattaatggtgttggaccaaaaataggtggcagcggccatcaggggttcatctttagctgaatttgctatggtaaggccaagtgcctggccgatgccgatttcgtcccaattgccctgcttgctacccgataccagtttatgccacacagaccaacttttctccgtagtggttttctcaagagaaggccaagacataaaggtgtttttccagtgacctagatttgggttggccaatctaaaagggatcctattggtttcagcgatgatgaactcggtgggatcaagattgccgatcggaccaaggaaataatggtgctcatgtgacagactcgggatcgtgtccagattggacaagtgctctgcgtatttttccgatggcgcgacggatggactggcggaggacgacat

SEQ ID NO: 28955 - DNA, 368 bp, Oryza sativa
  Clone ID: PAT_MRT4530_33502C.1
ctggaaataggtgtgaaaatttccacataaagacgcgcgtttggatcacaaacccttttcatggtttggacagtaaaaaagaatgagcccccaaagaagggggctatagctatatctggctactgatttcctgagctaaagcaccccggatttcttggatggcagattgcaggagatccacccaggggtttcttcttgggtatcctgcacaggattatgggaagatggtgagtcctgtcaaaggggggccagagccgtttgtgaccttcacagaggcaggccttaccaggctatgccttaaaaggagcccgggtttgaccacatgcgggacattcccagcgttgagctaatgggattcctggggggcg

SEQ ID NO: 28956 - DNA, 2382 bp, Oryza sativa
  Clone ID: PAT_MRT4530_33503C.1
aaggctctggtcagaagtgtgggcgactatgaagaggttgaaaagcccacacgggcaaaactgttttagcacttgccagctggtgatgcttgatgccggtggacccgcaacgagaaccgtgtgtcagagacctgaagtttctgcacctgctctcaacggttcaggtaccagatttcttttgcgttagcccaagggtgagtatgtgagacgactgggtcggatcttactgcgtatgatggtgccgcgattgactgctcttgatctgtccatgatatcgattggagagagaaaatttgctcgttgccggcctcagggaaaaaccttaaaggagaagaatcttctaacagatttgttgaagagcaagaaactcgcatggcacaagaagccaaaaggtggttgtcgatttctatgcatgctggttggccgtcggccaatggactctcggggagactggcatggcatgctccaggattatttaatttgaggtctgtgttggtcgcggacatcttcgacggcaagtctggaggggctgaaggcctgagtaattcgagacacattctggtgattactatggctttgaacggtttcacgttggctgaggtgaagcatgggaataccttcgttgcagagagcgagaagacaatacttagttttcgggcatggtgatggttgtgtatttaagaaggctttgtactatcagctttgtttcgtatcgtggtacttcaaacatatccgtttatgagcttgttgacgaagctgaacgagcggaccacggaggagggatctgacggagttataatgaagctagaatcgatgaagtgtcatgcaagggtggcgaatatgaagaagaagggaaaggcagtggagtaccggtgcctcgtccgtgccaccgatggcaagaagaacatctgcaccgcggggtcgatagtgcaattacgagctgagctctctgcaaaggagtacctgaagttccaagcttcatatgccacagttcttaaagcccatatgcacgctttgaagaagagggagaggaaagacaagaagaaggctgcagaggttgagaagataccagagaaggcaccgaagaagcagaagaaagcaccgtcttcaaagaaatctgcagggtccaagtcatggtgccgttcgccgggtggagcatgcccaatccagtacaaggacaccatcatggactccaccctcaactgccgcgccaacggcagcctcttcgacgtctcccacatgtgcggcctcagcctccacggccgccaggccatccccttcctcgagtccctcgtcgtcgccgacgtcgcggcgctcaaggacggcaccgggacgctcaccgtcttcaccaacgaccgcggcggcgccatcgacgactccgtcgttaccaaggtcaccgaccagcacatctacctcgtcgtcaacgccgggtgcagggacaaggatctcgcccacattggggagcacatggaggccttcaacaagaagggcggcgacgtcaagtggcacgtccacgatgagcgctcgcttcttgcattgcagggacctcttgctgcaccaactctccagttgctgacaaaagaagatttaagcaaaatgtatttcagtgacttcaagatgattgacatcaatggatatgcttgctttctcaccagaactggttataccggtgaagatgggtttgaaatctctgttccatcagagaatgcagttgatcttgcaaaggccctcctggagaaatctgaaggcaaggtgagactgactggtttaggtgcccgtgacagtctccgcttggaggctggcctctgcctgtacggcaacgacatggagcaacacatcacaccagttgaggctggtctctcatgggcaattggcaagaggaggaaagcagaaggcggcttcctgggagcagatgtgatcctcaagcagctccaggaaggcccaaagatcaggcgtgtcggtctcctctcgcaaggaccgcctcctcggagtcatagtgagattgtgagcaactccggggagaacattggtgaggttaccagtggagggttcagcccctgcttgaagaagaacatcgccatgggctacgtaaaatccggtttgcacaaggctgggacagagttcaaggttgtcgtccgtgggaagtcctacgatgccgtcgtcaccaagatgccgttcgtgccgaccaagtactacaaaccctcatagatttgtacaaaggatgctccttcggttgaaattttctcatgcaactctcttgtcgctgcttgttctgcagcaccgcaactgtaacttctgtaaggtctcatcttacagcttgacattttacctctgcccatctaataatatgaaatgtgatatgcagtatggatcctttcccac

SEQ ID NO: 28957 - DNA, 459 bp, Oryza sativa
  Clone ID: PAT_MRT4530_33504C.1
tttttttttttttttttgtcgttcagctgcagaaaaagaaacaagcttacaagccctgccagttcatctattgccaatctaaaaccatttacaactcatgtggtacaacttcctatcaaagatatgctgtagaccagccaatccaagggagtgaaatgattagtgtcctaacaaaactttcaagaaatgtgaacagaacaaaacttatctatacatcaaacaatgatgatttcctcatcctctagctaacaatacgaccagatgcttttctttagtgttctttacagacatctgagaatgaaaataattgactcgtctacattgtactgctggagtttggttaccaaaggccacttgttgcagctgcaagaatgcaagcatacttactgcaaacatcgcggtattaccgagtgcaccaccaatcctctaaaatcttaaagaattcttagctatagctaa

SEQ ID NO: 28958 - DNA, 650 bp, Oryza sativa
  Clone ID: PAT_MRT4530_33505C.1
atggctaccacggatgcaaccattgctcacatcatggactaacaagaagacatcgagatcaagtcctcccagtgctggaatccgattcggccacctactacactgttgacttcaaacagccgccgaatctgcatacgacctccgttttcggcccgtgagtatttgatggaaagctctcggagccctctttccaacggatctagcttcttctccgaattccatctcgtgtggccggaatcacaggaacaaggtgctgcgtcacctataatgggcctgtgggcttgtaacttcatttgggaccccggaccaggtggggcccatgtggggtgcgccccaagctggtggagcacgaccctaggaccctcttggtcgtcctcccacctccttaaatagctaggaataaggttgatttgtaccggcaagatcaacaacccatggagaggtgtatcgattgctaaggcgcaacgcaatgtcttgtacgctcaactcaccgaaagatcgggccaacaacagccttgagtctcgagtggaacttagggttcatcacccaccatatactaataagatgcacccacttgctaattgctacaataagtcgtacctacctaattccaaatcgttgtatcaatttacctttttgtaagactagt

SEQ ID NO: 28959 - DNA, 705 bp, Oryza sativa
  Clone ID: PAT_MRT4530_33506C.1
cgccgccgccgccgccgcatccccagatccagcatcagagggcgccgctgccgtcggctccttggctaccacggatgtaaccattactcacatcatggatgaacaagaagatatcgagatcaagtcctcccagtgctggaatccgattcggccacctactacactgctgacttcaaacggccgccgaatctgcatacgacctccgttttcagcccgtgagtacttgatggaaagctctcggagccctctttccaacggatccagcttcttctccgaattccatctcgtgtggccggaatcacaggaacaaggtgctgcgtcacctataatgggcctgtgggcttgtaacttcatttgggaccccggcccaggtggggcccatgtggggtgcggcccaagctggtggagcacgaccctaggaccctcttggtcgtcctcccacctccttaaatagctaggtaccccttaagggtttctcggcaagatcaacaacccacggagaggtgtatcgatcgctaaggcgcaacacaacgtctcgtacgcacaactcaccgaaagatcgggccaacaacagccttgaatgtcgagaggaactcagggttcatcagaatttggtgatcatttataattggctgcacatggaagcatttttttgagtacttggatcaatttcatgaaataattatagccttttgagggcttctc

SEQ ID NO: 28960 - DNA, 672 bp, Oryza sativa
  Clone ID: PAT_MRT4530_33507C.1
atggctaccacggatgcaaccattgctcacatcatggactaacaagaagacatcgagatcaagtcctcccagtgctggaatccgattcggccacctactacactgttgacttcaaacagccgccgaatctgcatacgacctccgttttcggcccgtgagtatttgatggaaagctctcggagccctctttccaacggatctagcttcttctccgaattccatctcgtgtggccggaatcacaggaacaaggtgctgcgtcacctataatgggcctgtgggcttgtaacttcatttgggaccccggaccaggtggggcccatgtggggtgcgccccaagctggtggagcacgaccctaggaccctcttggtcgtcctcccacctccttaaatagctaggaataaggttgatttgtaccggcaagatcaacaacccatggagaggtgtatcgattgctaaggcgcaacgcaatgtcttgtacgctcaactcaccgaaagatcgggccaacaacagccttgagtctcgagtggaacttagggttcatcacccaccatatactaactaggtgtggtttttttgtgagacggaggaacattcttaagttattgtattaagatgcacccacttgctaattgctacaataagtcgtacctacctaattccaaatcgttg

SEQ ID NO: 28961 - DNA, 807 bp, Oryza sativa
  Clone ID: PAT_MRT4530_33508C.1
atgaaatatttggtcaatttaaccctcaataaagctgcactcaaatgttcagacgcgattaaaaacaccaactttgtggtagtcattgcactggtgattacagggttcgtcttggctatacagtcgcttggatttcttatgtggagaaaggcacggcgctgcaaaaaagtcagggtgcttgatgagacaggtgacttcatcaccggatgtcctacttatcctttcgagattattagagcagctacgaatggattctctcaggagaacgaaattgggcgaggtggatttggcattgtttacaagggccaactgccaaacggtcaggaaattgctgtgaagaagctctcaaaggagaacacggttcaaagactgaaagagttcatgaatgaggttgacattatctatgagagtgggcgtgctatgttgagctggaaaatgagaatggacataatcttagatattgctagtgggctgcaataccttcacaaggactcaaggcacaccatcatccaccgagatcttaaggtggtggctaagatatcggattttgggattgcaaggcttttcagccacaatggtggcaatcaggactgcacgatcactgacagggttgttggaacacctggatacatgtcaccagagtatgcaatggatggtaagttgtcattcatgcaagacgtgtatagtttcggcgttctactactggagatcatcagtggcaagcacaaccaaggaacttcgagccttatagcacatacatggaggctatgggaagacggcaggaacctcgagctcctggaccccgcc

SEQ ID NO: 28962 - DNA, 481 bp, Oryza sativa
  Clone ID: PAT_MRT4530_33509C.1
gggaactccaactcaacggcttaacctcacaatttttatttctgcttgcagatagggcagtaaagctaccaaaatatgaaagtatgaaaattattgtactatcgaagtgccaagcactaccctagaaaatagcaccagaccatatattatcgaatgcgacattggccaatggtacaaaaacagcacggagtattgaagtgggcaacataaatatttcacacatacaaaatacggagtatatgttatagctgggttttcgcttagtgcttaccaatagtaattcttccactgtctccattccaagctattgtccacccaccacactgatatccaatattgtcagaatgtgttccagctacaagtattcttttcacatttttggccaatggaaggaatggttccttctgattcttgccattttttagaagtactaaagacttccgaacagcctcacgtgccagcaaccgatgctccttacaac

SEQ ID NO: 28963 - DNA, 897 bp, Oryza sativa
  Clone ID: PAT_MRT4530_33510C.1
atggtgaagcctgcagccgtcctcctgctcctctaccttccccttctcgccaccccgacgaggatcggcctcagccgcaaccccttcgtccctcctcccaactctgtacctaccatagacaggacggagatggacgtgagcacgtcgccgtaccgcgacttgatcaagaaatggcgagacctcgtgctcctcaacactcgcccggaggtcatggtgccggaagaccatccggtgctggctccccagtacgacgacaccgtcccgccggaacggttgctgttgccgaagctggtggccaacggggacaagacggccacgctcgccctccgcgactccaacatctacttcataggtttcgccaacaaagcagggcaatggttctctttcaaggacaggaacgacctgccgccttcctttcgggccaggcctctcagctttggagtggactacgcatcgatcgccggcttccggaaaaaccttccaaactaccctctcggtaggcgtcaaacggagtgggcggtaaaagttctttcagaatacgatccaaatcgcactgatgaagcaaccataaaacgtgcggtagtgatcatccttcttaccttctgcgaagctctcaggttctttcctataagaaatgcggttgaaataggttgggactccgttgcctacattacctcaaccgatgcggatcgtctcgtatgttggggacaaatctcatatatgcttgaatatagttttatgtccggtcattcatgggactcggaggaacaacgtactcgcctcaagaatctagcacgagattgtaaaatctttaacgaacctcaggcacttgaaaccgttgatgtgttagagtacggagctatcttaggtgctaaaagtacaaattggttgtattaa

SEQ ID NO: 28964 - DNA, 1654 bp, Oryza sativa
  unsure (1)..(1654): unsure at all n locations
  Clone ID: PAT_MRT4530_33511C.1
aattttttnactcctctttccccctcccttcttcttgcttctaatcccccaagcaataacgaggcgtcatctgactagttctcttctactctccctcctctagtcctcttcttcttctactttgtacgcgccactcactctccgagcttgacggcggcggcggcggcggaggtcgtcgagtggtggtcggggagatgggtcaagatgaggtggaggtaggtgcggagaagaaggatcaagaactaccggaggtggaggtggtcgaggaggaggaggaggagggatccaagaaggcggcggcgggctgcgactactgcggcgacgcggcggcggtggtgtattgcagggccgacgcggcgaggctctgcctgccatgcgaccgccacgtgcacggcgccaacggggtgtgctcccgccacgcgcgcgcgccgctctgcgccgcgtgcgccgccgcgggggccgtcttccgccggggcgcgggcggcttcctctgctccaactgcgacttctccaggcaccgccacggcggggagcgcgacccggcggcgccgctccacgaccgctccacggtgcacccgtacaccgggtgcccctccgcgctcgacctcgccgcgctcctcgggatctcctactccgacaaggcggcggcggcgaccgcggcggcggggggcgacgacggtgggtggtgggccatctgggaggagccccaggtgctcagcctcgaggatctcatcgtcccgaccacctcctgccatggattcgagcctctcctcacgccatcttcccccaagattcagaactcgccggatgggaaggtgaatgaggaggtcatacgacagctaaccgagctcgccaattcagacggcggcggcgcgcagatttgggctcatcgcgaggcggcgcaggccggcgatcatcagttaccttcatggggaacaacaacacaacacaacactggacatggcaatttcggtactgcaaacagcaatgaggttgcaaccatgccgacgcctggttatgagaatggtggatgggataacagcgattaccctgcgctaaatgatccgtgcaaggtcgagttcacatatgagcaacctccagccagctcagctgaagcatgtatttcatcatttgttcagatgtctgaactttgccccagcatgagcaatggtagcagcatggaggaaacccaccagacaaaccctggaaatggcacgccaatgcaagttctacccaaaatgccagaatttgttccttgccccgacaggaacttggtcatttctcgctataaagagaagaggaagacaagaagattcgacaggcaggtccggtatgagtcccgcaaagctcgtgctgatagcaggctgaggattaagggccgttttgctaaagtcaatcagatttgagccttcatttctgtaatatattttgcatcttggacatgagtaatactaattaggaccaagcagatatagtacaagaaaaaatatcagcattttgtatgtaactatgtacccacccagtggctacgccacgctgaggagaatttagtttcatcgaatctctgtatatagtgttgcatcgaactcagtgatactatttacatgcaaaggatattgtcattaaaaaaaaaaaaaaaaaaaaaaaatccaaa

SEQ ID NO: 28965 - DNA, 447 bp, Oryza sativa
  Clone ID: PAT_MRT4530_33512C.1
ccaaattaactccattcaatagtatcgacgtgctttacacgtgcacgctcattagttagatattacaaaagagggcctagatttggaaaccttttctaaggactcgacgtacgtgttgagaaacatgaacacaaaaatacttgcagccttgcaaggcgccaatgtacacagttgagaacaagaaaaagaaaaagattggctccactacacagtgcacattgttggagaacagggaaaataagagatacatgtctaatgaaggcgttaacatgtgcctcacagccatataaattctctaccgcatggcatagcatagggtccattttgtttcatcactacctagttgaaatgaagtgataaaccataaatggaatgtgaattttgcagcaataatttcgatgatagaggaagcagtaactgacaagaatggacagtggcaccaacata

SEQ ID NO: 28966 - DNA, 605 bp, Oryza sativa
  unsure (1)..(605): unsure at all n locations
  Clone ID: PAT_MRT4530_33513C.1
cttcctatacacttccgttcttccctcggagagcacggtagtagacaagcagtggcgaggtagcaccgacaccagctctggcagtgtcgatgctcggagcacccgatcaaacgacagtcgggcttgagaaagcctgatctggtgctagcgaggcctaaaggcgtcagatctagcgattccagcactcggggacgctcgatccgatgctggcaacggagctctatatgtttctccttgtttgtactacttaatactactagggataaggaagaagatgaatccagccagcagagtagaggaacaaggcagagaataggtttgttgcagatcattgttctctctttgttgcactttttcgtattggagtgttttattctttcttttgtcggatgttgcanatagcaagaatttgatgtttcaatcatttttctcaatgttgcatttgcttgaaacacttttcattaagcgatgaaatatttttcattgatcaatgaagcatctaaaatatttttttgttgggacattttttattgaatggtgaagcttctantacatatttttacctaggttgggacattttccgggtttcttttccttttgctcgg

SEQ ID NO: 28967 - DNA, 217 bp, Oryza sativa
  unsure (1)..(217): unsure at all n locations
  Clone ID: PAT_MRT4530_33514C.1
natcnaatcngnaaagagaagaggagcgtcgncgagatccaattccaatcgaacctagtgctgctgctgntgntgcgntcagacgatcccaatccggatctcgatggcggccanggctcgacatctccctgctantcntcttctctcgncggcgntgntccacgaccttgcctccgacgacgctnccggatgctgatccggcagctggccgtcttcg

SEQ ID NO: 28968 - DNA, 426 bp, Oryza sativa
  Clone ID: PAT_MRT4530_33515C.1
atgtcgcgagggaggggagcactgccagccaccgccctccccctgccccctctagccagatctgggaggaaggggccgggagtcgccgccgcccgctgccgggagcacgccggggaggggaggggaggggagggggaagggccgaagaggcagagccaccagcagcaaccctgcgcaactattgggagatcgctgacaattgaaccatatgcatgggatctaattaagctaaatacaaagaggaacacaacaaacgcaggcagaggcagatcaagcccaccactagcgaccctatgcaactatgagactgtgggggatctgattaataagctgtctgcaaaggggaagcagaaactagccaaagtcagaacacacatcgatcttcagcctgattgggcctcagcattcgttcacaagttctcctag

SEQ ID NO: 28969 - DNA, 2116 bp, Oryza sativa
  unsure (1)..(2116): unsure at all n locations
  Clone ID: PAT_MRT4530_33516C.1
agaccaattagcatcagtcttaacaacttgattgagaccagatgcttatttatactcaaggatacacctttggctctacatacaaaaaaaccagcctgttaaagttccaggataacatgggatctgctctattagaatgttgctcacagagatagaatatacagagataatttaatcatgatgtgataatttataaccaaatgacaattgtatgaagaaaatatcctgcactcaaccctaccaaaaaagaaattttttttcttacagattgaatgaagaaatgtagctgtacaggcatgcacctagctatccacaaccccacttagattcttcctcctcaagatcattatgcagcttataatctgagccttaggaccataagaggggtactgtttcattcttgtgatgaatttattggtggtaaagaattggaaagatggtgatggatgctcaatttctgaattgtacaaggactggaacaagacaggggaaggatggacacaagattactctgtatatttatagtactgcgagggcactgtaactagagagggagaaacagatggaggagtttgtagatgtgtcatggagttctgagcaaggcttggggaatactaattcagaatatccatgcacatttgaacaagtccaggcactggaaggagccaaatcggctatagagaaattgagattagaaaggcatatagcactaaatggatcaccctcgattcctgatagaactccagcaacagagatgtttgtcccctccatattcttttgggtgatatgatctatcaacgaaagaaaatgtggatcaaaacagtcatctgggtggaacgacaatttgccgctaaaccctcaggcgagatagacaccatccattactagatttgggacgacaacttccgcacagtaacccccacgaccgggagtagtcccgaaggaggagcctttactggaactgccgattcgaatgtgatcaacatgaatatctgaaattccaccagacatttcactaccaattgcaagagcagctccagacgatgcttgcagatcaaccctactgatatgaatgtctgaggttggccttccaaaagaaattccgtaattgtcccacccgcttttgagtgatatggcatcatgaccaacactaatgctgctatcctcaatgcacacgttggaacatgaatctggaactatgccatcagtgagtggagcatccaatgaggtcttgattgtgacattgtggacctttacattgcataccgagccctgaccatcaataactccattattcccagtaatgacaacatcacttaaattatatccatttattaaactgcggtgtctaggacctggaagatctaatccttgcccataagatggcaaaggttccacaatcggccactgtgatggatccttccaaatactccatgtctgcatgaattttggaacgaaacaactaaaagccagacctaacttgaaccctactgatcgggatatctttacaagatttttcctcctatccatccaaagcaactttgtgccgatgatgacggcctcttcctcgaggaagagggtgaggtggctggtgaggttgaagctgccagtgagccaccgtcccttgggcacgtacagctgcgcgccgcccttgtcggcgaaggaccgagcgtagaagacggcgttctggaagggcagggtgttgagcgtcttgccatcgccgacggcgccgaactcggtgatggtcacgctgtgaggccgcgaccccggcgcccatcgccacccatcgccatgaaccaactcaacaacggccagcaacaccaatgctacgaccaccattcttctcttcatcaagtccccctctcccctcctcgcggcaagagagggagagggatgggagaagacgaagcagcagagaagaaaaaaatccacgcgcctccgccgcaggcaaagaagagacttgaaaaaaccagatttttccggncgaaattccggccaaaatccgcggcggaagaagaggaggagaagctgcagcgccgcagcagcagcagagagaagagagaagagaatagaaggcgacgcagagttggttttttttttacttagtagcaccgga

SEQ ID NO: 28970 - DNA, 276 bp, Oryza sativa
  Clone ID: PAT_MRT4530_33517C.1
atggctgttgagaggaatgacgtccggtctgaagatcgccgtccccaggcggtggcttcggaccaggcttcattccccatgactcatggaacccacacaatcgcagtgccactaggcactggctgcttgttttggatgaactttgctagcttggattggatgcacaggttggtactacctacctacttgctgttgctggcatggcatgctgatgctggcatgctgcacctacttgcttttcgtgcttcgctcgaacataaggcaacaaaagattag

SEQ ID NO: 28971 - DNA, 3114 bp, Oryza sativa
  Clone ID: PAT_MRT4530_33518C.1
atggcggcggccgagacggtgaggaagctggtggtggaggtggtggaggcgcggaacctgctgcccaaggacggcacgggcacgtcgagcccgtacgcccgcgtcgacttcgacggccagcgccgcaagacgcacaccgtgccgcgcgagctcaacccggcgtggaacgaggcgctcgagttcaacttcgccggcgtcgccggcgacgtcgtcgtcggcggcgagccgcttgaggtggccgtcctccacgacgtccgcgtcgggcccagccgccggagcaacttcctcggccgcgtccgcctcgacgcgcgccagttcgtccgcaagggtgaggaggcgctcatctacttccccctcgagaagaagggcttcttcaactgggttcgcggagagatcggcctcagggtctactacctcgacgagcccgtcgctccgcctccgccgccgccggagccacctgccgctgatcccgctccagccgaggccgctcccgatgctcctccggccgatgccgacgccgcgccggaggcgccggagaaagcggaggaagcactaccagctgccagcggcggtgacgatggcgccacggacaagccaccggagactgacgcggcagcggcagcggcaacttccgcgccggaggaggaagcacccgtgatggcatcggaggcggtggcagcttcggcggaagccgcgccggaagaagagcagatactgaccccgccgccgccgcccacgccgacgccgacgccaatgctgcggcaggtgccggtgccggcgcggccaccgccgccgccaccagaggcgccggtggagcgatcaaagcatgacctggttgacaagatgccgtacctgttcgtccgggtggtgcgcgcgcgggggctcccggcgggggcgcaccctcacgtgcgcgtcgccgccggcggccgccacgcgtccacgcgggaggctcgccgcggcgccttcttcgagtgggaccagacgttcgccttcgtgcgcgacccgggggccaccgactcgccgggaccaacgctcgaggtctccgtctgggacctcccgcccgacgccgacgtgtccgacgccgacgaccgccacttcctcggcgggctctgcttcgacaccgccgacgtgcacgcgcgcgacccgcccgacgggccgctcgccacgcagtggtacaggctggagggcgggcgccgcctcgccggcgccgacctgatggtcgccacctgggctggcacccaggccgacgaggcgttcgccgacgcgtggaaggcggactccccggcgtcctcggtcgcggccgccgcggcgtcgcgcgccaaggtgtacgtctcgcccaagctctggctcctccggctcaccgtcatcgaggcgcaggacacgctcacggcgccgccgccgcgcgacgccggcatcgcggtgcgcgggacgctggggttccagtctctcaagacgcgcaccgccccggtggcgcgcaacggcggcccgtcgtggaacgaggacctgctgttcgtcgcggcggagccgcacgccgacggcgacgactgcctcgtcatctccctcgaggtgcgccatggcaaggacgccttccccgtcggctccgccagcatctcgctcgccaccatcgagcggcgcgtcgatgaccgcaaggtggcctccaagtggatcgacctgctcccgtccgacgaggccatgaagaaggtcggcaagaaggcggccatgcacatgcacggcggccggctgcacgtgcgcgtctgcctcgacggcggctaccacgtcgccgacgagcagccgtacgcgagcagcgacttccggccgtcggcgcggcagctatggcgcccgccgatcggcgtcgtggagctcggcattgtcgggtgcaagggcctcctgccgatgcgcaccgccgacggcaagggctgcaccgacgcctacgccgtcgccaagtacggccccaagtgggcgaggacgcgcaccatctccgacagcttcgacccggcctggaacgagcagtacacgtggccggtgtacgacccgtgcacggtgctcaccgtcggggtgttcgacgatccgccgccgccgtcgccgtcgcagctaccggacggcgccaaggacgccgccgcgttctcgcggccgatgggcaaggtccggatacggctgtccacgctggagagcggccgcgtgtaccgcggcgtgtacccgctcatcatgatgctgcccaccggcgcgaagcggatgggcgacgtcgagctcgccatccgcttcgccgcgtcggcgtcggcgctggacgtgctgcacatgtacggccgcccggcgctgccgccgatgcaccacctgcgcccgatcccggcggcgagccgcgacgcgctgcggctgtccgcggcgcgcatctcggcggcgcacctggcgcggtcggagccgccgctgcggcgggaggcggcgacgtggatgctcgacgcggcggagccgcgcgggttcagcatgcggaagctgcgcgccaactggacccgcgccgtggcggcgctgtcgtgggtgtccgacgcggcgcggtgggcggaggacacgcgctcgtggcggaacccgacggcgacggcgctggcgcacgccgtgctcgtcctcctcgcgtggcacccggacctcgtcgtgccgacgctcaccctgcacgtggcggccgtcggcgtgtggaagtacaggcgcaggccgcgcgcgccggcgccgcacccgtgcgtgcgcgcgtccatggcggaggcggcggacagggaggagctggacgaggagttcgacgcgatcccgagctcgaggccgccggaggtggtgcgggcgaggtacgaccgggcgaggatggtcggcgcgcggctgcaggcgatggtcggcgacgtggcgacgcaggcggagaggctgcaggcgctcgtgtcgtggcgcgacccgcgcgccacgggggtgttcgtcgcgctctgcgtgttcgtggccatggcgctgtacgtggtgcccatcaaggtggtcgccgtggtcgccgggttctactacctccgccacccgatgttccgggaccggatgccggcgccggcgatcaacttcttccggcggctgccgtccatgtcggaaagaatcatgtaa

SEQ ID NO: 28972 - DNA, 261 bp, Oryza sativa
  Clone ID: PAT_MRT4530_33519C.1
atgcccaagaacctagagccaagccaccgcacgcagagcagcacggacaatgaacgaacactgaccgcggcgcgggggtgcccggcggcgagcggtggtccggtccggtccggtgaagccgtcgaccaccgaggagaggccgagaggggtggggagagcgaggaagagaggaaggagatgatgggtatttatatagccttatctggaaggaaacgggttaggagggagggagaggccatgaggaatgagagaagctcctga

SEQ ID NO: 28973 - DNA, 2735 bp, Oryza sativa
  Clone ID: PAT_MRT4530_3351C.1
atgtacaacggcatcggtctccagaccgcgcgggggtcgggcacgaatgggtacgtgcagaccaacaagttcttcatcaagccgcggtcgtcgtcggcgggcgggcccccgagggcggcgccggccccggggttcgacgacgccggcgggggcctcggcgggatgcggaagccgaacaaggagatcctggagcacgaccggaagcggcaggtggagctgcggctgctcctgctgagggacgcgctcgaggagcaggggtacacggagggggagatcgaggagcgcgtcgaggaggcgcgcaaggaggccgagatcgaggccgcggcggccgcggccgccgaggaggaaggacgcggcgcggggcggcagccactcccgggcaaagggagagcagggctggtgactcatggaaggttatggtcattcaatttcttacaagaagtgaattctctcagtttttcagacacacaaagccaccacgttgctgcaaggaaggagaagcagcttgagacgctgagggctgctcttggtttggatgttgatgataaagcgaagaagaacgctgatgtagaaagtgatgtggaatctggggagcttgttcctgggaaggagtatgaaggtttggaaatagatgggccagaagatggcaagactttaaaggatgacagaaggcatgcaaagaagggtaagaaggataaagggagtgatgcaaagagtcatggcaaaagttctaggaagattaaacttggtcatgattcagattcagatcatgatgataacaagaagaagaagaagaattctcgctatggttcagaagatgattctgaggctaaatatgatgaaaagaagcacagtaaacacttgaagaattctcgccatgatacagatgatgattctgagagtgaccataagaatgcaaagtgtaaaaagagttctcgccatgattcagagtctgattctgagagtgatcataagaatgcaaggcgtggaaagagctctcgccatgattcagagtctgattcagatggtgattatggcaagaagacaacaaaacatggcaagaacgatcgtgatgagagaaagaaaaggcctgccacgatctctcgccgacatgactcagaagatgaaaagcctagaaagggtaagcgcatggatgattcagatactgactcggagggtgatggttcgttcagtgagtcggacagcgactatgatcggaagaagaagaaatctacaaatagttctcgcaatgaatctaaagatgataagccccgaagaaaggctcctaaggacaagtattctgatggcccagaaagtggctcagacagtgatcatggtggaaaatcaaagtattcaaagatttctcgccgtgattctgaacttcagtcccgaaaggatgctgataaacaggaccagtaccgtgataaattgaagagtgagtttgctagcgatggctatggagagaagaaatctgttaagatcccatacaatgacttgaaagatgacaagccaagcagcaaggttgttcggaaggaccggtacagtgatgaatcagagactgattcagaaacttatgttaagaaaaagaagaatcttccgaagtcctatcaccatagtgataaaccagcacaaagaggtaaagaaaaggaagagaactctggaaagaatgttgataagcgcaagaggcatgatactgattctgattcagatagccatgctcgtgaaaggaaaagacaccttgatgcacgggcgagtttggctgcccaaaagaaaagaagtgtgactagctcaagtgagagttcagagagttcagattacagcagtagcagtgatagtgaatcagatgtgagttctgacagccgcgaggataggaaatcagcaagacagttgaagcatgatgagttagagagaaagaaaaggagtcaagacgagaagagaaaggagctagagaagcaaaagcaggaggaagagagaaaagagctggacaggcagaagcagagggaggaagagagaaaggctaaagagcttgagaagcagaagcagagggaggaagagagaaaggcattggagaagcagaagcagggggagagggacggagatagatatgagcgtgaccatgaggggaggaaaggcgaaaatgatgttgaaagagactacaaaagaaaagttggagaagataggtatgatccaagcaggaggcaggatgaggataggtatgatccaaacaggagacatgatgaagatatgtatgatccaaataggaggcatgaagaacatggtcgacgaagaaatagagattttgatagccgtgatccgaaaaggtctagacatgatgattcttatcatcattctcgaagggactatgaacagcgttattctagagatgaatatagagacaggaggcatcgttgaatgcaagtcatgtccatctctggtttcttcaagcagaagagggatgcatctgtacatgaaccgagcagatgatcgatgtcctgctccctcaagtttttcagagtcctagcagaagaagacttgatgcagcagtaaatctctcctagcagtagaccaccttttgcctcaggaatgtacgtttgcgtatgtttgtatgaactttcatacttgttgttttgttgtgtgaatgatcaatatgtattctggtggatataattaccttgtgtctgcaagaaatatatgatttaacactgtgcccgtgtcggcttagtggcttagtgctg

SEQ ID NO: 28974 - DNA, 538 bp, Oryza sativa
  Clone ID: PAT_MRT4530_33520C.1
tttgcaattaagttataagttaccatggttgagattctagaagtctgaactttggaatattcattgacaaaaggtaactctgaaagtctgaactttggtttgaaagtttgaaagtgtgaaattctgaacatgcagtggctaatatatatcggtcgtcgaggcgtggtaattatattgaaatttccaatcaattctaatatggttgcataataaatcacattttatcccccaccggctgggttttatttcaatcacattttatgacaatgctgaaatcgaaaacaaatattttacattttatatgtgcagccaacaagtcaattccctgttctgttgtttctgaactctcatgttgtgtgttactgctactgatgatattaatgatacattaactatttccttttgccatgtagttgttcagccaaattttgctcaatcaagttgttatctcaagctaattttagagacaggtttggaaatgcatttagcagtcaattatgtactatgctaacacattgaccaattataaattgttgcc

SEQ ID NO: 28975 - DNA, 183 bp, Oryza sativa
  Clone ID: PAT_MRT4530_33521C.1
catggaatatgtgcatcacaatcaccttttaccaatgataccagcatcagaaagcccccaaaaaactacaaaatattaacacccacaacctgccacgaaaggaattcacaagcccgtgtcatataaaagaggactcatgacatgcatccaaggccgagccggcacaccagactgagttaaacc

SEQ ID NO: 28976 - DNA, 1145 bp, Oryza sativa
  unsure (1)..(1145): unsure at all n locations
  Clone ID: PAT_MRT4530_33522C.1
ggcgccgngacggggagcggccgtcttcgcatctctcccccattcaaattccaatactccgatgcgccgcgaggactactacttctctcacgaatccccaatccctaaaatccccgtacgccgcccgcttctctcctccgattcctccgccgccttcgcgccgccgccctcgcctctcttgcgcctccaccggccaccgccgcggcgtccgatggagaagccggagtggagcatggacgacttcgagatcggcaagtacatcggcgagggcaagttcgggaaggtctacctcgcccgcgagaagcagagcggctacgtggtggcgctcaaggtgacattcaaggcgaagctggacaagtacaggttccacgcgcacctgcggcgggagatcgagatccagcacggcctcgaccaccccaacgtgctccgtctcttcgcctggttccacgacgccgagcgcgtcgtcctcgtgctcgagtacgccgcccgtggggagctttacaagctcctccgcaccgtccgccgcttctctgagcgcaccgctgctacttatgttgccagccttgccggtgcactagcatactgtcataagaagcaagttatccatcgggacatcaagccagagaatttactccttgatattgagggccgacttaaaattgcagattttggatgggcggttagatcaaatgctaaacgacacacactttgtggtacaattgattacctggcacctgaaatgatagagaaaaaggctcatgaccatgctgttgacaactggactttaggaatcttgtgctatgagttcttatatgggtcaccaccttttgaagcagcagaacaggatgatacattgaggaggatagttaaagtggatttgtcgttcccctcaactccttatgtttctgcagatgctaaggatctcatttgcaaggttactccgtgtcattgaaaagatttctttggtacatatgaacttcctggtgggaaaatggaacttcagggagtgagtggcaaaggtcgcatatcctttagaacaaggtattcgcgatgaggcctgcgaggtgtgtgattgtggaatgctgtgcgaaggccggtttttatgataaattatggttgttgagcgggtccggtcgtagccacgg

SEQ ID NO: 28977 - DNA, 768 bp, Oryza sativa
  Clone ID: PAT_MRT4530_33523C.1
atgggcgatagattagctgaaacgatccggttcaaagaaatgcctttcttccgctgctccatgtgccgccaatacttccctgctccttgcagaccggcctcgagccccacccgcaccggcgccgtcgctgtcgtgtcgccatcaccgcgccgcgtcgccgtcgcctcgctctgccaccgccgccgcgtgccgttttgttgccattgccgtcgccctgccgcgccgctgtcgcgcgtcaactcgcgccccgcgccgccgcgtcatgtcgcgtcgccgtcgccgcgccgtctccaacccgccgcgtgctgtcgccgtcgccgttggctgcgccgcgccgagccgagccccgcgccgctcgtgtcaccgtcaccgtcacttgcgccgcgccgagccccgtaccagtcgcgtcgccgtcgccgtcgcatcagtgcctcatgccccgtgcgccgctgccgcgccatcgcgtcgccgcgtgtcgccatcgccgccttgagccacgcgctgccgtgcgccatcacgtcgctctcgagcccccgtgcgtacgggatcttcttctctactccacccccgcgacatcgaacttcgtcgttcctccatccctcgaaaccgtcgccgtgccggtccggccaccgttctgccgccggtgagctcgccgtggacaagccatcccggagctcctcctctccatctacacctagctacccgtgcccggccatggcggccatggcggccatgcggcgccgctcgcccctgcgccgtcctacgccg

SEQ ID NO: 28978 - DNA, 345 bp, Oryza sativa
  Clone ID: PAT_MRT4530_33524C.1
atggcgcacggcagcgcgtggctcaaggcggcgatggcgacacgcggcgacgcgatggcgcggcagcggcgcacggggcatgaggcactgatgcgacggcgacggcgacgcgactggtacggggctcggcgcggcgcaagtgacggtgacggtgacacgagcggcgcggggctcggctcggcgcggcgcagccaacggcgacggcgacagcacgcggcggggcgacggcaatggcaacaaaacggcacgcggcggcggtggcagagcgaggcgacggcgacgcggcgcggtgatggcgacacgacagcgacggcgccggtgcgggtggggctcgaggccggctag

SEQ ID NO: 28979 - DNA, 942 bp, Oryza sativa
  unsure (1)..(942): unsure at all n locations
  Clone ID: PAT_MRT4530_33525C.1
cctaacccgcgatccnnctccgccgccgccaccaccaccacccacccggatccccacctccctccccgatctcaccacntccgtataaaggcggctcggtttgaaaaatctttgcctccggaggangngngggggatggctgccgcggcggtggatccgatggcgctggggctggggacgagcggaggaggaggaggaggcgagtcggcggtggggggtgatggggcggagccggtggatctcgtcgagcacccctccgggatcgtccccaccctccagaacattgtttcgacagtaaatctggactgcaggttggatctgaaaaaaatcgctctacaggctcgtaatgcagagtacaacccaaagcgttttgctgcagttatcatgaggataagggacccaaagacaacagccctgatatttgcttcgggaaagatggtttgcactggagcaaagagcgaagaccattcaaagcttgctgcgaggaagtatgcgcgaatcgtccaaaagcttggcttcccagcaaagttcaaggatttcaagatccagaacattgttggttcatgtgatgtcaaattcgcaaagagatttacgctccctttgagaacatgttcccggtgctcactgaatacaggaaaactcagcagcgctgagggaatgatttgtcgacagaatggggagttcgctcccgctgtacataccatcttaaggacctgccctggcccagattttgagacatgcacctggcgtcattcctttttctttcctttgttcttcgtagcagtagggtaggagagcaactgcgtaaaggagagtatgtaaacaagttgatcaaagtattcttttgataaactaatgctgacatgcaagaaatgcatcctgacttgagatcaaaaaaaaaaaaaaaaaaaaaaaaacctgcagcccgggggatccactagt

SEQ ID NO: 28980 - DNA, 531 bp, Oryza sativa
  Clone ID: PAT_MRT4530_33526C.1
atggcaagacttggctacgtgatggactacgcatcggtggtggcggcggccgagggctggagcggcgacggcggcgtgcaggcgaaggccgcgccaccgcctgccctgtcatcggagggcttgaggaggacgccggcaaatcctggggaggctacagggggacccgcgggactaagcgagggtgtcatgagcgtcgccacggctcgccacgctgctcagggcggcgtgcctctcgccgcgcgcccgcgcttgatgcgcgcgctccccgccgagctgctcccgcccccgtcacgactcacgaccgcgtcgtcgtcaccaactccggctactccagtgtcgtcctctgccgcgtcggcgtccccgtccggctgtccccctcttcgtcgaccacaaggggacggctacccgatggcgcgcccaaggcgtgggccgtgctccacaagctctctgtctgctgcccggggctcctccacgccggcgtcctcgtcgagccctctgatgatggggcaggcggtggcggccatcgtgtaa

SEQ ID NO: 28981 - DNA, 511 bp, Oryza sativa
  unsure (1)..(511): unsure at all n locations
  Clone ID: PAT_MRT4530_33527C.1
gcaggttggatctgaaaaaaatcgctctacaggctcgtaatgcagagtacaacccaaagcgttttgctgcagttatcatgaggataagggacccaaagacaacagccctgatatttgcttcgggaaagatggtttgcactggagcaaagagcgaagaccattcaaagcttgctgcgaggaaggtaatagccaatagtcatattgtttcatcactatttatgcttaggaacgcttgttgtttacatcatgcagggagaaattgttcactgatcctattttcggcttttgctgaattgctctataacaatttttatctgattatttgttagcgcagtatgcgcgaatcgtccaaaagcttggcttcccagcaaagttcaaggatttcaagatccagaacattgttggttcatgtgatgtcaaatttcctattcgcctggagggccttgcttattctcatggcgcattctctagttatgagccagagctcttncctgggctgatttaccggatg

SEQ ID NO: 28982 - DNA, 244 bp, Oryza sativa
  Clone ID: PAT_MRT4530_33528C.1
ggcagagcattttgctgcaacaaaatatggcttccaacaggtagtgttctcagtgttgcttctcgccgtcgtctccgtgctcgcggcgacggcgacaatggcgggtaccaccaccaagaccaggtggtctacacccgggcccttctgtcaccaggatgggtacccgatgtacccgtcccggttgccgggcgttggtgaagcgccatacgtcggcgtggaggcgcagcgccgagcagttagcgga

SEQ ID NO: 28983 - DNA, 156 bp, Oryza sativa
  Clone ID: PAT_MRT4530_33529C.1
atgggcgactgtgcaactctcggcgccacatgggacgtcgacatggagccggagcaggggttccgcacagcaatttggcagagtgccactgccggcccgatgtggcggatgacgaaggagtgccttcgctgcaaggagcacaccccagtgtggtag

SEQ ID NO: 28984 - DNA, 480 bp, Oryza sativa
  Clone ID: PAT_MRT4530_3352C.1
cggacgcgtgggtgtcaatcagcacataattgaaacgccaactgatggtcagacattggcctccaaagagcaatctatcccatggtcccttgttgtctcagtacttaaggatattgaggcagttgttgaggtggttgcccagcactttgttggagatgatcgcaaatggagctttcttgctgttacagaagctgtgaagtaagatgataacttacgtatcattttcttggttgcataactcataactagtctgcgtttcaggcattgctcagaaaaatgataatggttgtgcaacatttcagagcaggtgtcaggttagctgctttcggggagagtggctacaagatgctcttacaaggaggagaggtggcaaatgaagaggagattaatattcttgatgaaaattttggagccaaaagtaatggagtaccagtcatttatccgatgaatggccatttccaaaatggtcatggggttgca

SEQ ID NO: 28985 - DNA, 493 bp, Oryza sativa
  Clone ID: PAT_MRT4530_33530C.1
gggtgtttttttttttttttttctttttttttttttttttttctttttttctttttttttttttatcttctttctttgtttttttttcttttttcaaagaaacacgcgcaacttacgcttaaggggtaaaagggggggcccccacctccccaaaaaccgggggggggtcacaccccccccccggggggccctttaagccctccccccatcaaaaaatgtggttaagagggggggacctgccggggcacgtgttgtgaagtgcctaacccccacccttttatcggggggggggcccgaaaaggttcgaaaccaacccccgaaataagcccggggggcccgggccattttttttggggcccggaaaccggaaggcttgggccggggcctgcgcccccgcgccggggaacttttgggcggggggacccccttttttctcggccccctgggggagggcccccgggggggggcccctatggggctggggggggggggg

SEQ ID NO: 28986 - DNA, 457 bp, Oryza sativa
  Clone ID: PAT_MRT4530_33531C.1
tttttttttttttttttttttttttttttttttttttttttttttttttttttttttttttttttttttgggggaaacatggaccataaaaaggttgcaaccaaattttgaaaaagggggagccttcactttttgataggaaggacaggggctcaaaactggtgaaaacaagcaaatgactgggctgccccccaaacttttaggggggggaaaaaactttagcagccactattttgttaacaaaacagggcagccatagcaaacaaggggctggtttccatttaggaagttcataccgagactggtttaggggtgataaaaaaaacacgcgaggggaattttttaacaaccgggcaatgacaggtttaaccttaaaaggggggtaaagggggtatttgggaaaaacctttgggaaatccaccttgtttgggggaaccttttcctccataacctggtt

SEQ ID NO: 28987 - DNA, 507 bp, Oryza sativa
  Clone ID: PAT_MRT4530_33532C.1
gtgagcttgttgaaacagctagaatagttatgactgagaggaaagattctggaccagtaaggccttgccacatcagagaagcctacagaagattgaaacttgaagggaagatcccacggcggactgttcccaggctcttccgttagaattgaagcatctctgttgatcccagtcgacactgagatggtcctttctgcggtcagatgcgcggaaagagagaatgacatgagatgtatttcttcagctttgtgaaattgttactgtgatttctgtcgcagcaagggaaccagagcaaacagtacgtacaagctgaagtactacggtactactagccgtggaaaattctatgtataaagtattggccgtaggctgtgaattttcaggcttatgaatagttgaactgtgtactatgctgtttggagtatgcgctgaatctgattatatgcttgtctgcaattaaatgcgaccctcgttttaacccaaaaaaaaaaaaaaaaaaaaaaaaaa

SEQ ID NO: 28988 - DNA, 240 bp, Oryza sativa
  Clone ID: PAT_MRT4530_33533C.1
atgatcaaatatcacaaagaaaaacttaaagcgacgaagatagtacttcgtaaatttttgctgctcctgccggtggaagctggacagatctctgtgtgctcctgcatgcctgcctctggccttcaacactcactcttctacatgtactccgtacagctctacacctcttgtactgtactcacctacatccccgtggccactgcaactcatgcatgccctgcttcgacgcgacttgcccac

SEQ ID NO: 28989 - DNA, 483 bp, Oryza sativa
  unsure (1)..(483): unsure at all n locations
  Clone ID: PAT_MRT4530_33534C.1
ccacgcgtccgcccactcttgtctcggagaaggcaacgtcgccctcgccgccgcggcggccggatccggcggatggcgaactcgaagcggctcccgtactccacggccggcggcggcgggggaggaggaggaggaggggggagtgcgcggcggtgccttcggttccggcgtggtggngccgttggtggtcctcgtgttggtgttcgtgctcgcgccgtcgatctttttcgtcgcgcgcattgggggccacgttcacgtttcctcagatcccatggatagggaaggtaatcaggaaacagattgttaaattctactggntgtatacaatctgaaatttattttgtgcatggagatgatcgatgctttagtttttagtgattatgaagcatgttctttgagtgttgattttttcataaaaggtgtatgtttcttttgtttaattgatgatttatgttttgacctgagtagtgcttgtttgtatgt

SEQ ID NO: 28990 - DNA, 636 bp, Oryza sativa
  Clone ID: PAT_MRT4530_33535C.1
agggcccgagctgccgtcctgtgcctgctgccgtcgcctcctcctccatcaaatccggggcgtcgttgatccccttctaaaattgattgcaaaaacggattcctctctatctcctctacctaatcccgaagaaacccccatcaaattcgttatatatctcacgaattttggccgtttatattcgggtgaactcagataaatcctaggggctttcaccaaatccatccgttcctgagccgatctcttcaatccaagcctataaatagcaccccctagtcgccctctttcgtttgacccatctcccgagctctctcgtcaaccgtagcgccgtcgccggtcaccggagagtcgccgctgccgacgaccgagtcgccaccgccgcacaagctcgccgccggccgtcatccgtcgtcgttcgtcacgttgtttccgacgttccggaggagagcgttttcgttgaggaaggttcgtgagtgcgtcgaaagtgttcaacaagactaattgaagaccgattattgcaaggcaagtcacacagatcctaaacaaccctttgagcatgttgaacccgtttaaagctattattttatttcaactatgcattatttcgaatgtcatcgggtggtgaactttccaatt

SEQ ID NO: 28991 - DNA, 2180 bp, Oryza sativa
  Clone ID: PAT_MRT4530_33536C.1
tttattaccagaaaagtctggactctggaagaaagaatgcggcgcggcggccggcggggcacggcacggtggacatcacagggaaggagaaacgcttcttcccgttgttcccaaatcccacagtcgcaggccaacgatcgagtggagtcgagcacaaggaaaaggaacgcatcgccatcgccatcgcctccctccctgtcctgtccagctcacctccaaaccctccatcttcttgatttactatacttgattccgtacaaccgctcatggataaagagccaacgcgtcatggaggatttaccttcaaatctgggtcagccttctacttctgcatcatctgttgatgctagttattcagccaacaggattgaagattcacagctcttcctctccgtcccagctttaaaccaagctgcgtcttatctggcccagacagcttcatatcttacccagtgcctcccagtatctggttacacagctatttctgacgaagggcaagagctagcgacgctgccacctgcatcaactgctggtggatcctcttttcaggcttcttccgaacagtcagcagactcatctcctggtgaaattgataatactggaagctcatctcaagaaatcacagaacagatggcacctttgcgcgtcttccagaatggggcttcactgtttcaaggtcttgtagaacgtgctcggaaaactgttcgtggctcagccgatgatattggatggcttcagcaggatcaaagcttacctccaactgaggacggaactgccagattcttggaaattcttgatgctgtgaggcaagtttgctgccactttggttgtgaattcgcattttggcaattttctgtgttgacattagcttttctattgtttgcaggcttgtttagtaaccatgggcctctttactttgtcaagacaaaatcatatttctccaagatgggtctggcttgtcacattgccaagattcacagtgagtcttcagtaagtaaaaatgcaagggaaataaaggaatatatagaagaaatatactggggatcgaagaagcgggtgctacttctcggccatagcaagggtggtgtagatgcagcagcagccctctccctttactggccacaactgaaagacaaggtcgcaggtttggctttagctcaaagcccatatggaggaagcccggttgcttcagatatcttgcgagaaggccagcttggtgactatgtcaggttacgtaaactcatggagattttggtatccaaagtccttaagggtgatcttcaggctctggaagacctgacatatgagaggaggaaagaattcctgcggcagaacccattgcctcctgaggttcccattgtctcgttccacacagaggctagcatcactcccagtgtgcttacagccctctctcatgttgcacacttggagctcccagctgcagctgatgggaatcctactaggatcccagttgtaatgccactttcagctgcaatggcagcatgctcacaacttctggtggcaaggtatggtgagaagagtgatggtcttgtgacaaggaaggatgctgaagttcctggatcagtagtggtccggccagagcggaagttggaccatgcatggatggtttattcctcactcaatgaggaacctagggatcaggcagacacatcgcagggaatggtccaacaatagtgttcactactgctcctgctggggcccaggaggcaggcgccgtgctggagcgtggaaatggtatctgatgactattggtgctggcataggtagttgtgaactaagggtagagctatggcccttctggtcccagccgaggagcaaactggctccattcgtttgttcctgcttttcctttgcttcatcttcataaactacatataaacacagaggtggaaaaagaaaaaagaaaaaaacaccaagcagcaaaagcgccagatgggcactcctccccctcgtcctggcgcctccgctccccgtgcgcgctccagtcgcatgtgcacttccaccgtccgggggttacgctgttgtacatcccctccagggaggactgaaatccgaaatgcacagtacaggcatgcggttgttggcctgccaatgctaaggaggagacgtggcctagccagggagctctcatcttcttgatataactagcaataagaaac

SEQ ID NO: 28992 - DNA, 1326 bp, Oryza sativa
  Clone ID: PAT_MRT4530_33537C.1
atggactccagaaccactgagaccgaagagagagcggagtcgaaaaccctagagttctgctccttccatagttgccaagagaccaggagcaccagggagtcgaagctgtcgcggaggtgctcaggtaacaggttcaatgctctcaagatctcaaaaactgcacaagctaaaaggataagttcagttgttgtatctgatgaaaaattttgggataatgtagagttagccattaatgttttccgttcactggttaagcttcttcgctttgttgatggtgataaaaggccagctataggattcattcatggtggtctgatggatgcaaggattgagctagctcagttgcttcgaaatgagcttgagctttgcattcctgttattaatgccattgatttttacatggatggcaagttggatagtgaacttcacctaatggcatattatctcaatccttactacttttatagcaacagaaatggcttcattagttcagaaaaaatatctggcagtgttcacaagtttattcagcgtttttatccagatgatcaaaatcaagacaagatcacaggagctgaaatgttggcatactctgaagcttctggaacttttggaaatccaggagctaagaggcagagagagaaaaacaatgattcatttaatcctgctcactggtggaatgtctggggatcaaaagcaccatatttgcaagggtttgctacaaaaattctaaacttgacatgcagctcttcaggttgtgaaagaaattggagtgcatttgaatggactcaaacaaagaaaagaaacaagctaattgttcaaaggctaaatgacattgtttttgtacaactcaactcaagaatgaagaagaaggatggttcagcgcagaaagaagatgctacaatggaagcatgcgaagacaatgacacttgtaatgttgaaggttggcttcaagatgaatctgaaggctcacaaaatgtggcaagaactcaaacttggggttatacagctgaaacaccagtcctggcacaaagagatcacctagaaaacaaaccagggaatcagcaaaacgtgcgaaaaggtcacatggagcgatgtcaaatcgtgcttccacttccaggacagcagcgccaatccttgatgaaattggggagcatggcggggagcgcggggacgggtgtcaacgtaggtaggcaaagaagcccacaagtcaccgcccctagtcctcaagtccatgagccaccatcaataagtcctctctgtgctgccatccaagagcccaagtacactagagatttgctacacgcgctagagatggagaagaaatga

SEQ ID NO: 28993 - DNA, 282 bp, Oryza sativa
  Clone ID: PAT_MRT4530_33538C.1
atgggatttgggagcccaagtggggtgggtgaccagctgacaaccaatgcggtcacaatggggatgtccatgtcccactcccaggaggtttgcatcggcgggctcttgtcgtccgccagttcaatgtgcgacctgatatatgacaccgttttaattttaggtatagatgtagaggtgatacttaataaacagtcgggaagtccaaggatgctaatttttgagggatctccccagaaagcttatttgatgagaggtccaaagactcaagttgatgcagactag

SEQ ID NO: 28994 - DNA, 590 bp, Oryza sativa
  Clone ID: PAT_MRT4530_33539C.1
agtcataggctagcgaccaaggatatttcaccagacctggagaaagccgaggcaaagctagatgctgcagacagccaattttaaactaggtgagtttaagcgtcaaacatcagttgaggcaactcgcctagagtcttgtcttacaccatattaaatcgtcatctcccgagccttcagattaatcgctgtgttagcttgagaacttagttagtatcctggactcacaaccaaacttgtcaacaccgaaggtagagacccacgtcttaagttgaccacaagtagcttgatcagacgcatatgacttgcgtaaaatttagctgacttcgagctattagggagaaacgtctggtaaccggccatagcaggtatccggtaccggaattcccgggatcagacaccacagccagtccggactgagttcctagatcgccagcagtcggtgtcgaccagacaagggtacgcgcctccgaaaccctagctccccgccttcccctaccgcggccgctctagaggatccaagcttacgtacgcgtgcatgcgacgtcatagcttaactataggtcacctaatcattcactgccgtaattgcc

SEQ ID NO: 28995 - DNA, 681 bp, Oryza sativa
  Clone ID: PAT_MRT4530_3353C.1
tgagaagccaactttggcaagtatttggtctgctaaaggaatttcagggcggttatttttgttatggagaagttgtccacatattcagaccactgctatacgtacttttgatcaaaaaatttggaatcaaatcatggaccccatggttagtgtcattagctgtggagatcacaagtcttggcatccattcacgtgcaactgatcttcatcaaagagggggaaaagttcatcagctctcatctgctgagagggacgagttgaaaaggcgaaagatgatgtgggccctttatgtcatgagagatccattctttaccagatacaccaagcgccatctccagaaggctgagaaagtgttggatccagtgcctcttattggtttccttacaggcaaactcgtagagctagtggagggggctcagacacgatatacatacacatcgggctcataaggataatggacaagcaggcagatgtcatgtctgagagtttccttaacgatttgccatgattaaccttttgtggttcatgtgatctggttgatgggttttgttttgagcttgatcctaatcctatctgtacatgccatttccttagcaagattaggcattcctacctgatgtcttgaggctgcaaagctgttgcggccactgtacactctcctctctcctctggtggcagctc

SEQ ID NO: 28996 - DNA, 300 bp, Oryza sativa
  unsure (1)..(300): unsure at all n locations
  Clone ID: PAT_MRT4530_33540C.1
ctcancccaccggcccaccccccacccccatcccgggtcgctaccccccaccccaccattttaatctctggagtaatttgtttactgctagaaaacacctggcatgtatatatactggttttaccatctcttacgggtatntctattttttttgcaccagcctgggtatccgntttttgtggatctgggaacggctgggccagtgtgcggtggtgatggcgggctacaggaagnaggcagcggcgtgctgggtctgttctngntagcgggcagggcgtnnagggagtcagttgggatctg

SEQ ID NO: 28997 - DNA, 483 bp, Oryza sativa
  Clone ID: PAT_MRT4530_33541C.1
tcaaggaggtggttcagcacagcttgatcaagatataaaacgcttagagaagatagttgagattttgccccaggaccaactctgttatgaagctcagataattagggatggtgcatttcttcaacgtgcactatctttctacagattaatgatactatggtcagtagaccttgttggcggatttaagatgcctttgccatcacaatgtccaaaggaatttgcttgcattccagagcatttcctcgatgatgcaatggatttactagttctaacctctagagttccaaaagctttggaaagctttgcgttggatgactttctcaacttcatcattatgttcatggcgggcacttcatacattaaaaatccttaccttagagcacagatggttgacgttttgaattgctggatgccacaaagaagtgggttgagttctacagcctcattatttgaggggcaccaactatgtctcgattacctggt

SEQ ID NO: 28998 - DNA, 210 bp, Oryza sativa
  Clone ID: PAT_MRT4530_33542C.1
atggcaccactccagctgttactcccaaatcggtacgacgtggcgctctcgctcagtggaaacgcgataccgcgtcgatatctgtcgcacccgcacggtcgcaccgacggtgtcacccaccgcgttcctagggaacagcagaccaaagaggaacgtacgtacgtacgtacagagacgggagtgtggtccgtcgtcaactggtcaaggagc

SEQ ID NO: 28999 - DNA, 300 bp, Oryza sativa
  Clone ID: PAT_MRT4530_33543C.1
atgtggggaggacgcgggagcggcgcggtgtgggcgcgggaggagcggaggaggtgggcgcggtggtttcgacggctggaggaaggggacgaccccgacaggtggggcccacctgtcggcgtcccggagaaagagggcgtgagggaggacttcggggaggggaagggaggagcgggccggcccagcaaggggcacgcgggaggagaaaggacgtgggcttccatgtcaaaccatgaagacgccggcaagggcgaagtgcatatggtggacaaggatcaagtggagaaggaggatgcttga

SEQ ID NO: 29000 - DNA, 1293 bp, Oryza sativa
  Clone ID: PAT_MRT4530_33544C.1
ggacataagtatgtactaaaactttggaaaatcaaacagatgcaatcatcttaatgaaagttgaccaaatatacttttttccatatatcttatataaatgacatatattccaaacaatgctcacatacagctccgcagcaatattttggaaggacacatgtatgccttatgttgccatcggcctattacaacaaaataaccaaaaataataattatttgctcactcaaacatgacacgatctcttttaagagaggattatttagatgttcatatttcgcatgtgacccaacaagagtacacatgtctgttacttagagttggattccactcttgtactcagagccagctgtaaagctttcagggatgatatcgtcgacgacacggtagccgccattcttgacaaggaagcggacagagaaggggcccttgagcggcgactcacttttgagcgtccaggtgttagacgacgattccttgagcgccacccagtccttgccgcccttctccttgacctccaccttagagatggcaacattagtgacaagctctagacttttggcgctagagcccttagcgaccttgaaggtgagctcagtggcacaggagccaacaaccaatagtgccgccaccgccacggcgagccggaaaagatgacaaggaggccattggctagctagtttgtttgttggtgtaatcttccttttttcttgattcgaacaagctttgacgatacaggcatcacaaatgtccagcgcgatctgtgccacttcatccaccgtgagtgctgtcatgtgcgaggagaattcttcaacccagagggtgcccgagccgaggtaggcagcctttttctcctccccgaagtcctccctcactccctctctctccgggacgccgacaagtgggccccacctgtcggggtcgtccccttcctccagccgaccgccccacgtcggcagccaccgccgaaaccgccgcgcccacctcctccgctcctcgtcgccggcgaaatcagaggctttcccggccacgtccgcttccccctccaccgggcaatcaccgccgctagcttcgccgccgcgagagctacctcggccgccgctcgctttccgttcgccaccgccgtaccgttcttcccacgcgccggcggctactaccggctctggccgcgcgccaccaccgctaaagccgccgccgcgccctgaaaccgtcgccgtcgcgctcgccagtgtcgcctgcacctcgatcaccattcggttgccatccgccgccgccggaacccgattcactcgcat

SEQ ID NO: 29001 - DNA, 1264 bp, Oryza sativa
  Clone ID: PAT_MRT4530_33545C.1
tcaagcatcctccttctccacttgatccttgtccaccatatgcacttcgcccttgccggcgtcttcatggtttgacatggaagcccacgtcttgactcctgcagcgggcgactccattccacaggcacccttgatggcagcgacgaaaccaacttcctcgaaacagctccaactgagaagaacttcaactctttctcctcccgcgtgccccttgctgggccggcccgctcctcccttcccctccccgaagtcctccctcacgccctctttctccgggacgccgacaggtgggccccacctgtcggggtcgtccccttcctccagccgtcgaaaccaccgcgcccacctcctccgctcctcccgcgcccacaccgcgccgctcccgcgtcctccccacatcgccgccctctctcccgcgtctcccggcccgcacgcgccccctccacctataaattgctcccccgagcctcctcttccccttcccgctctcgccgccccctcccgtgcctcctaccgagcccgcgccgctcgccgctagcgccgccgcttgccgccgcctccggccgcacgccgccgtcgcaagagccgtcgcctcgccgcgcaatcactgccgctagcttcgccgccgtgagagctacctcggccgccgctcgctttccgttcgccaccgccgtaccgctctccctacacgccgctgcctactaccgcctccggccgcgcgccaccaccgctaaagccgccgccgcgccgtgaaaccgttgccgtcgcgctcgccagtgtcgcccgcacctcggtcaccactcggttgccatccgccgccgccggaacccgattccctcgcatcgccggtgaggaccccttccctccccctcctttcctttcccttccagcaagcgccgagccacgccgccgttccggccgtgcgccgtcgccttcgcgccggccgccgccgcctcgccgtccgccggtcgtcttcggaggccgtgtgccgccgccgccgccctgccatggtcggtcggcttgagccgtgccgagccaccatccactccccctcccgccttgtgccgctgcccggtgggcctcacagactggtggaccacccctccccttgagccaccagccggcgccccctccctctccccttgtgccgctgacaagcggggcccgcatgtcggcgccgccccccccctttgatgacgtcagctctggttgtacacctctggccagagtaaaactattcgaatagccgtgcccacagttatgg

SEQ ID NO: 29002 - DNA, 410 bp, Oryza sativa
  Clone ID: PAT_MRT4530_33546C.1
cgcgtccggaaaaagctcacctaaatgagcttatcagattataataagctgggctccagattataataaggtgggctccagattataataagctatagcaataaggtgtctgtttctttcagcttactccaaataatctggattataataatcccaatctgaaaaaaaacagggcctaaggtgggaatttaatcatatccccttaatccactccaactcctcccttattagggcatggacaacagttagagataatatgggttttaaacattaatgtatccaaatactgtttttttctctcctttcctttctttcactatcatgcaacagaatttactctaataaatgctaagagtcgactttgagccggtgtcatgcataacaaccatacttctttctctttctttcat

SEQ ID NO: 29003 - DNA, 357 bp, Oryza sativa
  Clone ID: PAT_MRT4530_33547C.1
atgagggtcacctttgatgggttctacaggatgccgtcatcgggcgcggtttcggccaccgcggcctctccccccaccgtcggccacttcctcctccgcctcccgaccgccggccgccgccgcctcgcccgcctaacgaccgccggcctcgacacgtttggggaacgcggatccggcgcctatcccccgaccgccagtcgcctcctcctccgccaccccaccgccgcctgccagatccgacgacagctgcaccgccaaccgtcggattcggcggcctctacccccgacgtgccggcgtcgtccaccgtctccttcttcacccgcgtagcgccgccgccattttcaactcttagatag

SEQ ID NO: 29004 - DNA, 333 bp, Oryza sativa
  Clone ID: PAT_MRT4530_33548C.1
atgaccaagcacaaaaaggcatatcatatattcattattggaccatttgctcaggtgaacaatttggtgccatacagacgaactcctggaatattgaccggtcagaaaaggcggtggttgccggtcagaccggcttgtgttgagcggtcagaacggccagcccgcggtgactcgatgccacgggagagtatttgcggtgatggaccgggagtcggcttggtgagaacggaagaaaacccaaacaagcctcatgtaatactgcctattcctctttcgtccagtgacgcagttcctaattgctcaattgaaccatcatccccaaaagagtactga

SEQ ID NO: 29005 - DNA, 196 bp, Oryza sativa
  Clone ID: PAT_MRT4530_33549C.1
cacggtgacgctgtgctgcgtaggaaagccactagctggtgccgtggtgcagcagagcagcagcatcacgccaatgactcgaggcattacacaatcgattgatacgctgttgccttcttcacgtgcccgcgtcgcagcgagcttcgcctttccacacagagattttgtggagatcgcattctcctctcctgtgtaa

SEQ ID NO: 29006 - DNA, 1690 bp, Oryza sativa
  Clone ID: PAT_MRT4530_3354C.1
gcgcgtgggcgcggccccggctcgcctctctaacacgagcccaatcacgaggagggcgggcaagtgcggcaaccgcatcgcatcacactaaccgcaccaccggcagccggcagtcgagaggatggacagcagcaacggcgagcggccgccgcagggagaggatgcgccggcggcggcggcggggtcgatcggagggtacgagtccctgcacaggctcctccagtccaacctctccccggagctcttcaaggaagcaagccggctgctattgggactgaattgtgggcgtgctctagaggccatctcattgcccgaagccacatctgctcttgcaaaagctcataactttgatgtgcaggccttccgttttgatgcagataaagagtatctcaggcaaccacgggttattcgagttggcctgattcagaactcaattgctattcctaccaccagtcattttgcagatcagaagaaggctatcatggagaaagtcaagcctatgattgatgcagctggtgatgctggtgttaatattttgtgtttacaggtgagtcaattatcggaagcttggacaatgccttttgccttctgcacacgtgagaaaaggtggtgtgagtttgctgagcctgttgatggagaatctactcaatttcttcaacaacttgctaagaaatataacatggtaattgtgagcccaatcctcgaaagagatgtaaaccacggagagattgtatggaatacagctgttgtcataggtaatcatgggaacataattggtatacatcgaaagaatcacatcccaagagtcggtgatttcaatgagagcacatactatatggagggtaacactgggcatccagtgtttgaaacagcatatgggaaaatcggagtaaacatttgttatggaaggcatcatccccttaattggcttgcttttggcctcaatggagctgaaatagtattcaacccatccgcaactgttggtgaactcagtgaaccaatgtggcccattgaggccagaaatgctgcaattgcaaatagctactttgtcgggtcaattaaccgggttggcacagaggtcttcccaaacccattcacttctggtgacgggaaacctcagcatgccgactttggtcatttctatggatccagccatttctcagcacctgatgcttcttgcaccccatcactatctcgctaccgagatggcttgatgatatctgatatggacctcaacttatgtcgccagatcaaagacaagtggggcttccgcatgactgcccgttatgacacgtatgcttccttgctttcagagtacttgaagccagattttaaacctcaagtcattgttgaccccttgatcaataagagtgcgtaatggtgagaaacttggtgccaaaggagagcactcaattctggaacttacacatttagagcattcagtttgagggaactcttcaaaatctgccattggggaatcgatttcttttttcaattttcgtatgtaaagaaaaatttgtatacatgtttacctcaaattgccttttacttggagttggaaacattgatactcattttgctttctgctgtaaatttgcaaggtatgtatgatctgtaaagataatgcacaccaaaaaatataaaaaattaatgatttagcccaaaaatttatatcacaaaaaaaaaaaaa

SEQ ID NO: 29007 - DNA, 441 bp, Oryza sativa
  Clone ID: PAT_MRT4530_33550C.1
aaatcaacttgcatatatacatttttggaagcagcaaattaaataatcggttagttacaaaatagaaaaaataaaaggaaaaaaataaaaataaaaagcaaggctcctcaaagaatcgtacagtaaggaaaccttttagaatcaagcttgctagcctattaatttacagtcccccaagcaatacgtccctagatgttgcctcaaacctttaggaacacatgaattgaccctacttgtaaatacttacattggatgtatatacacatacatatatcccgatcacataaagcattgatatagtacgtacacctacaatatgtatatatatatattggattagattaacactaattaattaattaattaattttttaatttattagtcggaatgacctactttgaatgaccaggtcactcttgagtgatcttttcttttgcgtc

SEQ ID NO: 29008 - DNA, 342 bp, Oryza sativa
  Clone ID: PAT_MRT4530_33551C.1
atgacgaagcgtgcgtggaagaagggtgatgcgagcgcagggcgagtgtactcatacattcaggggatagaggctcggaggagcccacctgtcgtgtgtggacgaggagtcactcatggtcagaagtatgactggacgtctatcccttgctatgcatcctgcgtgtcaagcgccgatcggtggactgtgaacgccgtgcgtcgccaaagccaagagctcaatcgtccagattgtggcagtagaaggagcacaatcagtggactctacagttttgccatgggctgcggtgattgggaggcttcgggtggcctcggtctctggctcgatcggattggtgagtga

SEQ ID NO: 29009 - DNA, 2763 bp, Oryza sativa
  Clone ID: PAT_MRT4530_33552C.1
atggcgaagacccggaaggccgcggccgctccgccacctccgcccccgcccccacccgcggagaccccagcgaggaggaaggggaagaagaaggggcggccgtccctcctcgacctgcagcggcgcagcctccgcctccaggcccaaaaccctagcccggccccgtccccctcgcggcgggacgccaatccgtccgacgaggacgacgacggggtcgggagtggggggcgccgacggcagaagcggctcaagagcgtcctctccagcagcggcggcggcgaggtcgggcgcgctccccccctcttacctgtcgcgccaatttttcgaaatttgcccgaggtttttgggggcctccccgaggagaggagaggggggtttttgccgtgggacacgcggcgatgcggttgccgtagtggttggatctgcgattttggaatttttttgaggggggtgggtttcgtggatgatgaggcgcccgcggccgccgtggtggtgaaggtggaggtggaggagaagaagaagaaggtctcgtcgaaagcgaccgggaaaggggacgctgcgtcggatggcgggcccactacggggactcccctcccggacaaaaagttgcttctcttcatcctcgacaggctccagaagaaggacacctatggagttttctcggagcccgtcgaccatgaggagcttccagattaccatgagattatcgagcatcctatggacttctcgacgatccgcgagaagctgttgaatgactcgtataccaccctagagcagtttgagaatgatgtgtttctacttacatcaaatgccatgtcctacaattcagacgacacagtctactatcggcaggcacgatctattgaagctctggccaaaaaggatttcgagaacctgaggcaagctagtgagcctgaagaagaacaacaacccaagactgtacccagaagaggcagaccaccaaaatatgcaaagaaaattgagaagactgaaaatgatgtttcaccagatttatccaatgcaaaaacaaaatctgcagaccatgctgaaacaattagaaaaaggttgactggggacagaactcgaaatgcaaatatcacaacaagagactcaccctttcttcaacataatacacctggttcttttgctggtaaaagaacagatagatttggtgattattcagggccttcgaagtacggaaagaagaccaccccgactatttcagatgatgagcgtcgtagtacatacgatcagcaatacttccatagtagtcctctgttttctgcccttggtggtgagaggaaagtacttgtgccggtgggacttcaacagcaacatgcatatgctaggagcttggcgcggtttgctgcaaaatttggtcccgtaggctgggacatagcagcaaagagaatcagacgactactgccttctggaacaaattttggcccaggatgggttgtggatggtgagccacctgagaactctcagtggcctcgagttcccatgctctctgatccatccatccagtctactggtgttccagctagcaacgtaatatccaagaatgatgaatccaatcagaagtctggactgacttcgaacgaggattctggtgaagagcatctagctagaaccgagccagtggcttctacatctgcatgcgttaacacaaactctgtatctgccaccaagctagctaccaagtgtgaaaacggggctaatgtgtcatgtgatggtgtgggtagtactggacagacacctcccttgcagcagcacagccatagtcgagagatccactcaaatatgaatggcttcactgccttgccaaacacaattagtcaatacgcagggcaaggattcttgggacagatgcagttgacacatgctcaagttcttgggatgttttccggagtcaatggcagaacaaatggctttatccatgggcacccactggtggctaatagcattaaagcaccacaaaatggggatgttggaaaggtagccactaatccatcaccagatgcaggtcatgattcagaagctgcattatcacaaaccatgactagttctgctccaagtttaagtgctggtgttcaaccatcaggttccatgccaagcgaaaagttagcaaatccaaaaaagcacccggacttggcattgcagctctgaagacaattagccattgacatagttcagcttagcgccgtccttgattggaaacatgattcagaatcccagcttctcgagtccttattctccgcttctgctatgctgatggatattgtagcagcacactgagtggttctgagggagaattaacaatggatttctcgtcgaagaataattcattgtgaggcgaggtcatgggaaggagtaactagagccgatgaatcgtttgactcccagcaaatttgttgtaaaagggtaggtagtctgtatagattctaatcttatttccgatgataatgtttcggatgggcagcatctggcatccaatgtgtaacattatactagtggaggtatacaagcagggagggaggcaagtgcataggtgtgcctttttcctgcgaggattgatccgattccaggttgtatgagactggcggatggacgactgctgcaactccaccccagttgagctgagtagcaagtagcctgagtcaccaaaatcttgctctgagcccctgacatgattctgtgttgacattttcactgacatgattatgtagtgttttaacatttgttgatgttgctcttgactgt

SEQ ID NO: 29010 - DNA, 174 bp, Oryza sativa
  Clone ID: PAT_MRT4530_33553C.1
atggagatggttggagctaagcatgtggaagcgtttgaccatgggcggtctgactggcgttgcgcggccggtctgaccggttaccaggggcggtatgaccggccacatgccgctggtctgacgggccaccccaggcggtctgaccggctgtatggccggtctgaccggttctag

SEQ ID NO: 29011 - DNA, 599 bp, Oryza sativa
  unsure (1)..(599): unsure at all n locations
  Clone ID: PAT_MRT4530_33554C.1
agctggccaggatngcagaaaggatggaaagaagcaacaggcgaagaaggacgacgacctgaggagcagaggtctgtgcctggtcccggtctctgtgcatgccccacctggccgccgacaacgacttcgtcgtcggctccgacttctgggccggcggcggcggcggcgcgccgcccctcgccggcatgaacctgcggtaggccggccgggcctactgctacacgttcatcttcgatcatatgcacagacgacgacgacgacgcatcggtggtggaagttttggccaaattgaatggcatccacgcacgtactattattttgggtgtttggtgtgtgggtttcgtgtgattttgagaacgatggattgattttctccttgatcggcgtttatagggcttaattgaattagctggtcgatgcgattatcgaaatatgacataccatncaggagcagtgcaatctgtcatgattaaggctgattgctcttgatgctatgcaaagtgatgatgatgatggctcataaatatgtactattgcacacactttgctacgtatataatatacatttccttgctgttcaaaaaaaaaaaaaaaaaaaa

SEQ ID NO: 29012 - DNA, 1670 bp, Oryza sativa
  Clone ID: PAT_MRT4530_33555C.1
ctgcaggaattcggcacgagggcgtcgcgcacacacacgaatcgcgaagttcgcgacccgattcctctccgcccgccatgctgcggagtctcctcgcgagagcaatcccgcgatcctccgccgccgccgccaccacccgcggattcaccgatccgcggagctttcctctactctttcgcgaaggttcgcgtctctccacttcgcagggcggcatcggcaatggcggcggcggcggcggcggcggcaatggcggtgatggcgaggaggatgaccccttctcgttcgcggacctccagaagctgccgccggacgtcgcgcgtgacgtggaggccgtcgtcggcgcggccgaggggttccatgcggacgccgcgcgggccaggggcctcctggagcggtgcggcgccacggcgtccgagccggtcgtggtggccgtgctggaccgcctccgcaacagctgcgccgcggcgcacgccgcgttccggtgggcctcggcgcagccagggtacgcgccagggcggcacgcgtgccactccatgctcgccatcctcgcgaagcaccgccgcttcgacgacgcacgcgccctgctcgaccaaatgcgccgctcgtcgcttgcgtctccggccgcggtgatgcttctcatccggcgctactgcgctgcacgggacgtcgccggcgccgtcgcggcgttccgtgcgctcccgaaccttggtttccggcctggcgtcgcagagttccatggcctcctgaccgcgctttgccggtacaagaacgtccaggatgcggagcacctgcttctgtccagcgagaaggagttccctttcgagaccaagagttttaacgttgtgctcaatggctggtgcaacatggtccgcagtgtgcgggaggcgaagaggttttggaatgccatggaaattaagggtattaagagggacgtggtatcatatgggagtatgatttcgtgcttctcgaaagccggaagtttggacactgtcatgaagctctttaaccgcatgaaggaggctggtgttataccagacaggaaaatctacaatgcagttgtctacgctctcgccaagggacagtgtgtgaatgaggcaaaggctcttgtccggagcatggaggagaagggggttgccccagacacggccactttcaactccctcattagacctctttgcaaggctcgtcaggttcaggaggcaaggaaaatgcttgatgacatgttagggagagggctgtcaccttcagtgagaacatttcatgcgttactcgatgtggctagaagccccattgaggtgtttgatctgttggataagatgaaagaattgcagtgtgacccagagatggacactttcattatgttgatcaggaaattctgccggtggaggcaacatgacagtgtggagaagctctggagtgcaatgcctgcaaatgggctaagccctgataggagtgcgtatattgtattgatacacggtttattccttaatgggagactggaggagtcagcaaagtattacgaagagatgaaagccaagggatttccacctgagaagaagactgaagaaatgatacaggcttggctttcaggcagagagcttgccaaggcttcagcttcagtgggttcaaggggtggttctgtgtctctcagatcaaatcctcgaaagtga

SEQ ID NO: 29013 - DNA, 309 bp, Oryza sativa
  Clone ID: PAT_MRT4530_33556C.1
atggcgccggcggagtccgtggcgcacttcgactctgcgctcagctcgctcgtgtcgtctccgcagggcggcggtgatgagatggcggccatcggcgacctgatcggccggctcgggagcatctgcaaccacggcagcgccagcgccaacaactcgtgctacagcacgccgcgaacgcgagcccgaagctgtccaaggtcgccggagccggagacgacagcgactcggcggcggcggcggaggataagctggagccagccacaaagactacatccatgtgaggatgaggaggggacaagccgccgatag

SEQ ID NO: 29014 - DNA, 453 bp, Oryza sativa
  Clone ID: PAT_MRT4530_33557C.1
aagaaacatgctctgtgacactttattacatgggaacatggaacacctgtttatttattatccatcgctgaacaaaaagaacttgcgacaggattgactgaacaataagtttggaggtctagtgtttcttaataacggttcgcacactctatgacaaacggcctgagatgcctccccctctaaagcataaacacataacttgaattactttcttgtacgggccttaacattgcaggaagctctctttcttagcacccaggaaaagcctttgcacgcataacagggcatacttcctcactaatgcgatttaatggaatattacctccattactcgatccttcaaattagacccgtcaccataatgctcccattagggtgaaactgaaagaactgtgaaaactgtatgaaccaacatcattacaaacgagtcgctcgataaaaaggcgattgtca

SEQ ID NO: 29015 - DNA, 2253 bp, Oryza sativa
  Clone ID: PAT_MRT4530_33558C.1
atggacgacgagaagaggccgagggtgggggatactgccgagagcccgcggaaatccccgcgcctggtgcaccgaattccgacgacgacagatcaggccgaatctggagtcggtctcaagtccttgcttgggttgatcaaaaacaatccgagcaaggagctcgatgacccaaatgctgcctctctcggcgtgatagacgtggagaagaaggcagcaaggccaggggatactgcggcaacggcgctggatgtgaacgattggtgggagaaagtcgtggcgttacaatggatggcatcggtcggcggcgactgccgtgctcggcggtgccggcacgtcttgtatggggaggatgacattaatttggccatagcactgatcaagacctgcgatgacaccccaatgtgtaatgctgacaattgtggcaatactgaggggagggaaatctcggcgtgcttggattgcgaatcgcgtttctgcactacacacgggaaatggcacgcctcggtcaacaagcattgggttgctttggtgtacaaaaagccacatgtggcgtattgcttcgcgtgtgaagagtgctatttcatcagaactgagcattttggggtggtaatggacaacgaggatgactatttcatcagtttacgtgaggaggatgagaagggaatgagagttgacaatgtggcaggtgatcatgcatctgggtcagttattgggcatgcctgtcctattaaagggataccgaatcttggaaatacatgctacttgaattcattgctgcagtgcctccttgtgcttggaagactgcgggcagggatattaggactagatgctccattggggctccttggtagctcactgcgatctctctttgatgatgcagacagtgtaaataatgcaggaggcctgctggacccagagaagctcttggcttgtgtacgcatgctgaacccagagtttaaaggcaatggtatgcatgatagccaggaagcactttgcattttgcgcactggtttggacaaggaggagagggcaatgaagctgtctaacatgcaagccggtgctcccagtgcagtggctcctacagttattgattccatttttggcggtcagctgtctgttaccagttcatgcaaacattgctcagttagatcactttcccatgatgtattccatgatctctcagtgccactaccacaggagtctccagccaaaagtgatgaattatcaccatggactaaaggtcgcagatctccacggaagattcgtatcaacctgctttcagcaatagacaaacacaaaagtgacaatgaaaagactcagagtcctgcttcagaattggaagatgtgttcttggtgaaaagatcaaagcctttaaaagttgattctaccaaagtggaacagatatctcatagcatggatgcaggtggtcctttgcagactagaaaggataaggtccaaggaaaggttgttgatgtccttccccgcattccagaagatcctgcttcaccatcatttgtttctccactaagcgaagagaaaaatgacagtgctgttcaaccagaggttagtacagaagccaagatgaccgcttcctcagcaaaagttactacaaaagacaaggggaaaactcagattagcgatgttgtttatgacaaggcacatgatatcaactctcttgcatcgattgagaaatgcttggaattgtatcttgaaacagagatagaatggacctgtgagaactgctccaaagttcttaagaagccaggcatcatgtcaagtactaaggaggacacaacagctggagaccagagtgaacagttagagaagagtgcacaccaagtggaagaaaaccaaaatgagcagaaagataagaatgaatgtcccattcaaacacgtcttattcgcaagttgccacctgtattgaccattcatctgatgagatatttggaggatttaacgaaggtgataggacatgtgagctttaaggaaatccttgatgtggggcagttcatggatcccagctctgaggacagagataattcccgctatcgtctagttggttttgttgagcacctgggccctagcatgtatgcagggcattatgttgcttatgtgagaccaagtcctccgcagcagaccaatggctcttcctcatggtttcgtgcaagtgataccgatatcacagaagtctctttagaagaagttctcaagcgcgaggcttaccttcttttctatgagaggattgaaggctaa

SEQ ID NO: 29016 - DNA, 280 bp, Oryza sativa
  unsure (1)..(280): unsure at all n locations
  Clone ID: PAT_MRT4530_33559C.1
ctaaattaagctcttgattaggttgtgatcaaactgggtgtcggtggagcgtctcactgcatgcagcaggtcaatctgcaagtcaatggttcangtgttaaaacaagctcagagacgttgattgcaggtacggtctaccaaacatcagtttagctttagttatgatctgctaacaaaagcagctatcttacctagtcttcatttattagtgagttaaatgtttacatgagcatgttacatgtacatctgtgtagaacccacattgcgtagttcgctttga

SEQ ID NO: 29017 - DNA, 708 bp, Oryza sativa
  Clone ID: PAT_MRT4530_3355C.1
atgccaattaggatatgtggatgcacggcggaggctgacgaggaggaggaaagggatggtgaccgcctagggataaggtggacacgatgcatccccatcgatagtgggctgagaggtggagcccttgacgatcgatgttcacacacagaatggctccccggccctgccgaaagcaacaaaggggttagcggtgactcaacctcatcttcgacgacgtctaggaagccctcgacgaggtccgcattccatagcaccttccaggagaccctcctcgacctcaagcaccacacatgccaagcacaccatcatcatcgagggcgacttggggtggaactaccatcatcgaggcgacgacagtggcttggtatcctccctatcctcaaggcccacggtggtggtcgtgggaaaccaatagaccccttcccttgggcatggcggcagctacaccaggtatgtcaagtcccgctatgtcggcaactcggcatcagcatcaacatcaacataaggagggtgccaacaagcgggcaagttttgacgacggcagcagttgaagacaaagatgaagggggtccttcatttctctcccagagatcaccagcaccaagcagtcaaagattccacaatcagcatcaagtagaggacaagtgtgttgaagagcctcccctgaccgacattactcccacagtcactgagaagctactactgtag

SEQ ID NO: 29018 - DNA, 2691 bp, Oryza sativa
  Clone ID: PAT_MRT4530_33560C.1
atgggatccgtggtgtcctccgcctacgccgcgctgcgctcgttcgtggacgcccgcattgagaaggtggggtggtgggcgtggcccatgggcgagcggcggcgagagcgtcccaagactgacgccgagttcgccgcccggattgcttggattattgaacagtcgaatcgctgcaatcaccgggacaatgaaaagactcataaaatttctgaaagaggtgattctcagagtcctgcttcagaattggaagatgtgttcttggtgaaaacatcaaagcctttaaaagttgattctaccaaagtggaacagatatctcatagcaaggatgctataggtggtcctttgcagactagaaaggataaggtccaaggaaaggttgttgatgctcttcctcagaaagtgttgtgtgatgccaaagttgatggaatggatgcagcaacagcagattcccgcattccagaagatcgtgcttcaccatcatttgtttctccactaagcgaagagaatgcactgatagcatcaggcagtgatgtaaagataaatgacagtgctgttcaaccagaagttagtacagaagccaagatgaccgcctcctcagcaaaagttactacaaaagacaaggggaaaactcagattagcgatgttgtttatgacaaggcacatgatatcaactctcttgcatcgattgagaaatgcttggaattgtatcttgaaacagaggagagagaatgggcctgtgagaactgctccaaagttgttgagaagccaggcatcatgtcaagtaccaaggaggacacaacagctggagaccagagtgaacagtcagagaagagtgcataccaagtggaagaaaaccaaaatgagcagaaagataagaatgaatgtcccattcaaacacgtcttattcgcaagttgccacctgtattaaccattcatctgatgagatatttggaggattttaagaaggtgataggacatgtgagctttaaggaaatccttgatgtggggcagttcatacaggactcagagtttgaaggctattctatgcaagacagccaacaaattgctgaaagaggtgattctcatagtcttgcttcagaattggaagatgtggtcacggtgaaaacatcagagcctttgaaagttgattctactaaaatggaacagatcacacaaaacaaggatgctgttcatggtcctttgaagactcagaaggataaggtccaaggaaaggctgttgatgtccttccccaaaaagtgttgtatgatgtcaaagttgacagaataaatgtggcaacagcagattccctcattccagaagatcctgcttcacaatcatttgtttctccactaagggaagagaatgcactagcatcaggcagtgatgatgagaaaaatgacagtgctgttcagccagaagttagtacagaagctaagagaaccacttcctcagtaaaagttactacagaagacaaggggaaaactcagattagcgatgttgtttatgacaaggcacaggatatcgaatctcttgcatcgattgagtgcttggaactgcattttgaagcaaagatgatagaatgggccaatgagaactgctccatcattctagttgaatacagggagcccatcatgtcaagtaccaagggggacactacagatggaaaccagagtgaacattcagagaagataatatgccaaagtgagcaatcttatgagaagaaactattcccagaggttggcacatgtaacacagatattgttcaagcaatagttgaaggccgtgattctcatatcactggtttagaactggaagatgtgacccatgtggccatagaggaaacagatgatctgaagagatctttggggtctcgtaaggttataggacatgtgagctttgagaaaatccttgatatgggactgttcatggaccccagctctggcgacaaagataattcgcatagtccagttggtgttgttgagcaccagggcctaaggggacctctgaattttctaggagctacaaaaagaggagggccacaagcccctgagcctgaatttagctggatctctgttatgggtgatcccgttattaacactgatggaagctgcaccatcgcagctgccacagtgtgcatagaggcccaacacaggttggcctttgaacggctgtacggaaaaggttctttcccatgcaaagctaaagtgcctaaagaactgaagaaggcctgctaccgtcaagggatttggagcagcgaggaaggggcctggactcccgacgttcttttaatgataatggagaaaggcggtatcctcacgcaacgagtaccgaataacatccagcttgcaattgatggatttttttggctagagagaaatgtagcttttggaaaacttgagtttatgcgcctgctgtatgcctatggtcctcttctcagcaccctttggacagatgatggttatgcacaaacgtttggagaccgtgtctacagagggctacaaaaggatccagattcgggggaccatcattgcgttgtctgttttgcataccgggttgacagcaggacaaatgagctctacgttagaattatggacaattgtgcagatgatggacctatcagatgggtattatttgatgtgttcgatagcttctacgttccactgataaaaaaatcctatagagcctcatga

SEQ ID NO: 29019 - DNA, 255 bp, Oryza sativa
  Clone ID: PAT_MRT4530_33561C.1
atgaggagggagatccttcttaggactggacccgcgaggtactcatacggcgtagactgctacgctgcggtccacgaggttcgaatacgcgaggacgacatgccggactggcaaaacgcgctgcatcctgcatgcattgtggtagcccggttcgccgctagcgagctttcgcgcattagacatgcctggttatgtgagcctactccatcagagctcggcagctcgcagagaaaacgaatgctggagtactcgtga

SEQ ID NO: 29020 - DNA, 354 bp, Oryza sativa
  Clone ID: PAT_MRT4530_33562C.1
atggaacttgtcgcctcgaggaggggaggggagcaccggagcaccgccgattcaaacctggcctcgccggcgccggagatggaggtggaggcgaaaaactactcgtgcatcctcccgccgccgcttccccaccaacgccgccggctgcgcggctgcgacggcgacggcgacgctctcccccggctatctcgaggtacgcgccgcatctccatcccgcccatcccccacccttccgtgtcccgcgactcacctagcctcgtctggacttctcgggaggcgccggcgtggagtggccggccgcgccgacggctgcgcacgggctactgcttggtgcgtctcaaccgtcgagcctag

SEQ ID NO: 29021 - DNA, 437 bp, Oryza sativa
  Clone ID: PAT_MRT4530_33563C.1
cccacgcgtccgctttttgaaggtgcgtgcaaatggataaagctttaagctgcttagcagaagatattttcattaaagtggatgcgtcaagaaaaggagaactaaaacaagtaggagtaccagctaaacaccactgtggcgacacttgttctggaagcaaagaaatggaaggccgtaacttcgataaagctgcgtgagttcgagaaagaaatggatgcagctggggctatgtcgtatggaaggcagtggatggagttgcagcaatagcatcagaaaatcaggaattcaggattgctactgggagtacgagtcgtcaactactgatcgtccggagtgcagtcgaacagaggatctatgggagcatggaacagagatccatcttgtttgacacccagaaccagctcttcatcaatatggagggttcaattcttcttttt

SEQ ID NO: 29022 - DNA, 369 bp, Oryza sativa
  unsure (1)..(369): unsure at all n locations
  Clone ID: PAT_MRT4530_33564C.1
ccctgaactgatttatggtcaaatcccgatacagatccagacactcgagatccacccnaccaaacaatctaatttaggagtataaacaaaaccagccatccacactctctcatccccaacacaccacacaccagggcaatccctaaatcgaccaaagctttgattcccgtccctatatagctccacacccaaccaaccaccacccatggcgagaagagaaaaaaaaaatacttatatatataggagtattattatatataagtaaatcgagccaccctaaaaatcacggaaaaatatgttctgtcttctccccctccacctcccagcgccgaattagcacaaggaaagggtccaaaaccaaaaaaaaaa

SEQ ID NO: 29023 - DNA, 249 bp, Oryza sativa
  Clone ID: PAT_MRT4530_33565C.1
aagctttttttttttagggtaaattgcaggatggtatcctgcttgttcgtcagttaacgatatgaataacagtaaccccagttaaagtttctataatactgataatctagtcccccagaagatcaaagaaagagggaatattgttgaatgcatgagcatgcatactgactagtgggcatctaatggtacagatgcacctacagtgaagtataattgtgcgtacttcttgttcagtgcctcgttaagctt

SEQ ID NO: 29024 - DNA, 1982 bp, Oryza sativa
  Clone ID: PAT_MRT4530_33566C.1
atggcccctcctcccctggcggcagcgccaccgccaccgcccgccgccgccctcgtccaccactacacccgcctcctcttcgccgccgcctccgcctccgccgccgcctccctccgcgccctcctccccatccacgcccgcgccgtcgtgctcggcatctccgccaacccggccttcgccaccagcctcatcaccgccgtggcccccgcctgcctcgcctacgcacgcagggtgttcgacgccgcgcccagccgggatgcctacatgtggaacaccctcctccgcgcccatgcccactcccgcgcccacgccagggacgccctcgcgctctacgcgcggatgcgcgccgcgggcgtggcgcccgaccactacacgtacccaatcgtgctcccggcgtgcgcggcggcgcgggcgccgcggctcgggcgggcggcgcacggggacgccgtgcggttcgcgctggcgcgggatgggttcgtgagcagcgccctgatctcgatgtactcccaggagggggaggtgcgcgacgcggagcgcgtgttcgcggagagggatgatgcccggacggtcgtctcgtggacggccatggttgctgggtacgcgcagaactgcttcttcggcgaggcagtcacgttgttcagtgacatggttgctgcgggcgtgcttccaaatgagatcaccctgatcagtttcctgccctgcttacgggggcaagaatggctgcctgttggggagatggttcatggattcgtcgtcaaactgggattcgatgcaaacgttcccatggtgaatgcgctaattacgatgtatggaaggtgcggaagtgctcccgtggcaagagttctgttcaatgggatgagtagccgcactctggtttcttggaatactatggttgcgatgtatgagcaacacggtgatggggttcaggcaatcaagtttttccgcaggatgcttaccgagaaggtggggtttgactgtgtgactttggtgagcgtgttgtctgcttgtgcgcgctcgggagcccttggtaccgggaagtgggtgcatgagctagccaggagtcatgggcttgacactgatgcaaggattggcaatgttcttgtagacatgtatgcaaagtgtggtgagattgcttatgcaaaggaggtttttcattcacatggtttgcgtggtcacagtgttgtgtcctggagtgccatgatcaatgcatatgccaaccatggggaggcagaagaggctctcaagctcttctccctgatgaggaatgaaggggtgaggcctaattcattcacatttacagcggttttaatggcgtgttgccactcaggccttgtcgatgaaggactgaagcatttcaacagcatagccacagactaccaaatgtcaccaacacttgagcactatgcttgcatggttgacatgctaggacgtgctggtagacttgttgaagcatatggaatcattaggggaatgccgattcggcctgacaagtgtgtgtggggtgccttccttggtggttgtaggcttcatggaatggtggagctagctgaatatgttgcaaaggagcttttcgactcaggatctaatgatgtaacattttatgttctgatggcaaacatgtactttgaagctggaatgctggaagatgctgagaggataagaggagtcatgaaagagatggagctaaagaagacagctgggcatagcttagtttgtactgatagagaaagaatagctgtcacacaatcgcccacgtggcctggcaccttcggggacgtcgggcccgagggtgaggtgtccgccctcctcctgatttccccgagggggggtcgggtgactcctgccccggccccgagggccgaggcgccccgaccccttgtggagttagcgccacatgaatgggttgggtgaacacggtaagcctcaccggtcagatcacgggttaggtggcgactggcggtctgacgcacgccttgccccat

SEQ ID NO: 29025 - DNA, 192 bp, Oryza sativa
  Clone ID: PAT_MRT4530_33567C.1
atgagaaagaagggatggatgatcatgagactcaccagccaaccagcgagagagacgccgcggacgccggcggcgatggatggagatcgacgcaggcgaggcgtccgggagtcgagggctcgaggcctcaccgaccaaaccaagtatgggctttcacttctcacatggttcacttcgccggcccaagagtga

SEQ ID NO: 29026 - DNA, 258 bp, Oryza sativa
  Clone ID: PAT_MRT4530_33568C.1
atggattccaagatagttgtcttcgatggactgaggaccccgcaagccaagttccaatacatcattgacactctcaataaggcacttgtgagattttcatggatgacaacaactggaacattatggatgccgatgttcgccatcctcttaagacgtaaatccaaatttctaaacacacaatacgttttcacatcttcaatccttccatttgcaaaaattaaagctcccaacaaggtgaacgaggatttgagcaactga

SEQ ID NO: 29027 - DNA, 3615 bp, Oryza sativa
  Clone ID: PAT_MRT4530_33569C.1
atgacaaagccgccatcaaccaaggcggaggtggaaccatctaatatgttgccaatctcattggaggatcttgatggggaagcgcgcaaggccatgaaggagtacattaagacgatcacacaggaggcattgatgagaacatgcaccaggactcgtcaaggtgtggtgctcaagcctggacagttgcctaaacctaatttcgatgtgcaaaaccggtggagtgaatatgcaaacaaccggcgagggagtggctgcgcaatcagtcggtctgaccgggccaaatggccagccagaccgcgcattcaccgccggtcagaccggccagatggctggtcaggccgggttttcccccggcggtcagaccggaccccaaaccggtctgaccgtgcctctggatgccggtcagatcgggccctggaccggaatcgtgctaaggtttaccaaaagccgtatcctgattattatgacaacatcccataccctcgtggttatagagttcccaaatttaccaaatttagtggtgaggatagtaggaccacatgggagcaaaaatacaatgaatctgtcattgattatattaagagatttagggatgttagaaaccgatgttatagcttgaatataactgatagagatttggctgatcttgcttttaatggtttaattgttcctattaaagaaagattagaaggccaacaatttcttgatgttaatcaactcatgcaaaaggctctggatcaggaaaaccgggttaaggatagtaagaaatttgttagaccctatgagaaaaagcataattttaatttgattgattaccctgaggctagtgattctgatgatgagggtgatcatgggatgtatggtgctgagtggtcatggactaacaaaaataagccttttgtttgttctaatctaatgccgactcctcgtaaagatcggcaaattcaatcggccatagatgaaggacgattgaaattcaccgatggttccaagatgaagcttgatagtgatctttttctggtgaacacaattaatttcattgataagaagttttatgttaaaaatcgggtcaatgaaggaaagagggaaggaaagcgcgttaaggtggagacgaggactttggaggtgataactattaaagtgggatctcatgatgtgccagtaccatctggagatgaagttggggagtcttcgagtaacaaatccgaagccaggaccagcttgtcgcagtcggccagtctgactaggccctctggccgaatcaacaggggacattatttacctcctggaacggagccgaaaccaaggtggatgcctaagtatttgacgactatccaaaagaggaggttgcaacgtcttcgggcccaagaattaaaacagagagaagccaaagagcggagggatagaaggttcaacgagttgcgaccaccgcctacaaaggtgtggaggcgtaaatccatagagggagaagaatcggttgttgtgcaaaaagagaaggaagaacaatcggttactaaggacgaatcatctccaaaggaagacatggatgtcaacatggtgtgcatgttgcctatggagtcttgtgctatggatgaagccaaagttgctcaattttcactaggtcctaaagatgcggtttttgagaagcccgatgaatcaaatcgtcatatgaagcctctttatctcaaaggtcatgttgatgggaagctggtctctaggatgctattagatggaggtgccgccgtgaatttgatgccgtactcgttgttcaagaagttggggcgtggagatgacgagttgaagaagactaacatgattctcaatggctttaatggtgaaccaacggaggcgaaaggtattttttcggtggagcttaccgtgggaaacaagacattaccaaccgctttctacatcgtcgatgtgcaagaagctaatttagagtggttgcaaaagagggtgcaagaatatcggtctacaaagaacgatattggtgaaaccattgaagattttgatgaagtagagaagcttggtcaagggtttacatcggccgatcctttggaggaagtagacataggtgatggaactaagccaaggccgacttttgtaaacaaaaacatgagagctgattataaggttaaaataatcgagctacttaaggagtatgtggattgcttcgcatgggagtatcatgagatgctgggtcttagccgtgatcttgtcgaacatcggcttccaattaaaccgggttttaggccttataaacaaccacctcgacatttcaattctttgctatatgaccgggtcgaggagattgatcggttgttgaaagcggggtttattaggccatgtcgttatgcggagtgggtatctagtatagtcccggtggagaagaagggtattatcttagaaatctatattgatgatattattgtcaaatcggatggcatggagggacatatggccgttttaaggttagcttttgagagaatgcgccggtatggtttaaagatgaacccactcaagtgtgtttttggtgtgtcgacgggaaaatatttaggattcatggtgcatgagagaggagttgagattgatcctaagaagatagaaaagattcgtgatttcaaagcgccgacatgcaagaaagaagttcaaaagttactaggtaaggtgaattatctaaggggatttatttctaacctagcgggtaaaatcgatgattttgttcctatacttcgcttgaaaaaagaagccgattttactttgggggcaaaacaacaagaggtgtctgaggggttgaagaagtatttgtctactccacctgtggtgcgagcgcctagagccggaatgccgtttcggttatatattgcttccgaagacaaagtcattggtgccgttttgacacaagaggaagatggcaaggaatatatcattacatatttgagctgccgtcttttgcatgccgaaacgagtacatgcatagttgcttgtcaagccgatgttattaaacacatgttgcaaaggccaattttaagcgggagaattggcaagtgggcatatgctttgattgaatatgatttggcttatgaaccattaaaatatatgaaaggccaaattatatttgattttatagtagactattatgtagataatgcttatgaggaaaagaaaacagaagaaaattggagaattcctttgattagatatttgaaagatcctacacttaaggttgatcgaaagattcggcggcaagcactcaaatatacattgcttgatgaagatttatatcaccgaaatatagatgaagttctattgaagtgcttagatgatgatcaatctaaagtggcaatgggagagcatattatccatagattcggtattccgcaaatattgactacggatcaagtagcttcttttatgtctaaggaagtgaagagttttgccgaatcttatggtgttaaactgttgagttcttctccttactacgctcgggctaatggacaagccgagtcaaataatttatcaagtggagattacaggacattgatgggagataatcttgatgaagtcatcgacaagcgtttgaaaggtttggaagagatagagaaagagaagtag

SEQ ID NO: 29028 - DNA, 1869 bp, Oryza sativa
  Clone ID: PAT_MRT4530_3356C.1
atggcggtcgaggcatctggaggcacagcagatcacgcctgtcaggaggcagcctacttgatgatggccagactacgggagcgccacgactacatcttccacgacacggcgtaccgctaccacccccgtcgagcccatggtgatggcgtcagctccttccgtccgacagctggcgagaacgacaccaccttcggtcacatgtgtgctgtgatgaggggattggaccagatgcactcggacctgcacaaggcgaccaaggccttgaatgatgggaagctcatgaggatcgtcgctctgaaggacgagatagcgcgcctgaagaaggagaatgctcagttgaagggtcttccagcaccaggaggagtccggatccgcactacgccccgttgcttgtttgggatggtctacaccaggactggcaaccgcacgacaggcgagggcagcaacggtgaagaacgcgctgatggtgtgcaccccaacagtgattctggcaatggtccgccaccacttcccgagaatccgacccttgcccaagttatggcacatcagactcagatgatggcagccatgatgcagcagatgcagcagcagcaccagcagatgcaccagaggatgatgcagcacgccgaacagcagcaccagcagtttggtccccctccccctcagtccaagttgccggagtttctacgtgtcaggccacccaccttctccagcaccaccaacactatggaggcaaatgactggctccatgcgatagagaagaagctgaatctcctgcagtgcaatgatcaggagaaggtcgctttcgccacacaccagcttcagggtcctgcgtcagcttggtgggacaaccacatggccacccgcccaccgggtactgaagtcacatgggcagagttctgccgtagcttcaggaaggcacaggtgccagacggggtcgtggcacaaaagaagagggaattccgggcgctccatcagggcagcaggactgtgacagagtacctccatgagttcaatcgcctcgcgcgatatgcaccagaggatgtccgcaccgacgccgagaagcaggagaagttcatggcgggtctggatgacgagctgaccaaccaactgatatctggggactacgccgactttgagaggctggttgacaaggcaatccgccaggaggatcaacgcaacaagatggataggaagaggaaggccgcgcagttcagggcacatcagggaagtcaccagaggccgcgcttcactcccgggcagcagggtggacctaccaccatgattgttcgtcaacaccgcccattcaaccccagcaacttccaccagggctccagtggcagccagaatcaccatggaagtcagcccaaccgcggtacagctccacgcccaccgatggcaccggcacagtcaggccagcccgcacaagccaagaaggagacgggagcaaaaccagggtcctgcttcaactgtggcgagcttggccacttcgctgacaaatgcccgaagcccaggcgtgccggaccaaggtttatccaggctcgtgtcaaccacgcatctgcggaggaggcacaagcagcaccagaggtcgtactgggtacgtttcctgttaactcaatccctgcaacagtactttttgattctggtgcaacgcattctttcatctccaagaaatttgtcgggatgcatgggttaataagagaggaacttagcacaccgatgcgggttcataccccagggaatagctccacttcggttcaattcagcccttctataacaatagaaattcaaaggtcacccggttttgccgagttcagtggagtcatcattcggaagaggaagcgacctgggaaagggaagatgagttga

SEQ ID NO: 29029 - DNA, 1301 bp, Oryza sativa
  Clone ID: PAT_MRT4530_33570C.1
gcaaatttgtacctatctctgtaaagccggctaaggctaatttagagtggttacaaaagagggtgcaagaatatcagtctacaaagaacgatattggtgaaaccgttaaagattttgatgaggtagagaagcttggaaaagggtttacatcggccgatcctttggaagaagtagatataggtgatggaactaaaccaaggccgacttttgtaaacaaaaatatgagagccgattataaggttaagataatcgagctacttaaagagtatgttgattgctttgcatgggagtaccatgagatgccgggtcttagccccgacatgatgattaatgatgcctcgggtcataaggtgattagctttctagatggtaatgctggctacaatcaaatctttatggcggaagaggatatgtacaagacggcttttagatgcccgggatttgttggtttgtttgagtgggttgtcatgacttttgggttgaagaacgccggtgcaacatatcaaagggcaatgaattaaatctttcatgatttgctaggtattatcttagagatctatattgatgatattgttgtcaaatcagatggtatggaaggacacatagccgatttgaggttagcttttgagaggatgcgccagtatggtttgaagatgaacccacttaaatgtgcttttggtgtgtcagcggggaagttcttaggattcatggtgcatgagagaggatttgagattgatcctaaaaagatagaaaagattcgtgatttcgaagcaccgacatgcaagaaggaagttcaaaagttgttagataaggtgaattatttgaggagatttatttctaacctagcaggtaaaatcgatgattttgttcctatactttgcttgaaaaaagaagccgattttacttggggggcaaaacaacaagaggcgtttgaagagttgaagagatatttgtctactccacccgttgtgcgagcgcctaaagccggaaagccttttcggttatatattgcctccgaagacaaagtcatttgtgccgttttgacgcaagaggaaaggagtatatcattatatatttgagccgccgtcttttggatgccgaaacgaggtatgtctttatagagagactttgtctatgcttatactatgcttgtaccaaattgaggcattatttgttatctagtacatgcatagttgcttgtcaagccgatgttattaaacacatgttgcaaaggccaattctaagtgggagaattggcaagtgggcatatgctttgatagaatatgatttgtgtcacgacc

SEQ ID NO: 29030 - DNA, 2087 bp, Oryza sativa
  Clone ID: PAT_MRT4530_33571C.1
atgacgaagccgccaacaaccaaaccggaggttgaaccatccaatattattccaatctcgttggaggatcttgatggggaagcacgcaagatcatggaggagtagattaaggcgatcacgcatgaggtgttgatgagatcgtgcaccaggactcgtcaaggtgtggttctcaagcatggattgttgcctaaacctaattttgatgtggtaagtactgaagaggtaacaactcctatccaacaactcatagcaaatacaatagattcatccattgctgctttaaataataaattagatgcatcgtttgaatctcgttttaatgagcgtattgatgattttataaggaatagattcagttcttttatagccgatttccaacctaaagataaagcctctaccagtactagtaaagcccctgtagatcaaatttatagcaaaaccgatggggcaacgttcgccgctggtcatacaggacagatggccggtcagaccgggtttcctccctacggtcagattggaccccagatcggtcaaaccaggccctggaccagtcagaccggcgcaatcatcccaatacaggggattgatccaatgacaaataatgggtttttataccatattccagtacatgattcccctgtatctactgttaatacccaagttcccccacatatcccaaatgtttacaataatcctactaggggatatcctcccaatactaggtatggccaatataattatattgcgccgcaaccgcaacctcttaggccaccaaacccaccaccaaatcagcataggcctgagaatatggaggaattgattagtggtattattagggataaattcaggattgaagctaggaatcatgctaaggtttaccaaaagtcgtatcctgattattatgacaacatcccatatcctcgtggttatagagtttccgaatttaccaaatttagtggtgaggatagtaggaccacatgggagcatgtaggtcaattcttagcgcaatgtggtgaggctagtagttctgatacttataaattgcgcttgttttctttatctttgtccggtactgcttttacatggtttacttttttaccggcaaattctatccatacttggcctcaattagagcaaatatttcatgattatttctatactggttaaactaaacttagcctaagtgatttaacatcgattaggcaaaaatacagtgaatatgtcattgattatatcaagagatttagggatgttagaaaccgatgttatagcttgaatataactgatagagacttggctgatcttgcttttaatggtttaattgctcctattaaagaaagattagaaggccaacaatttcttgatgttagtcaactcatgcaaaaggctctggctcaagaaagtcgggttaaaaatagtaagaaatttgttagaccctatggtaagaagcctaatgttaatttgattgattaccctgaggctagtgattatgatgatgatggtgatcatgatatatatgttgttgagtggtcatggactaacaaaaataatccttttgtttgttctaatttaatgccgactcctcgtaaagatcgacaaagtgagattaagtatagttttgacgtggccaaatgtgataagatttttttattatcttttgcaagaaaagataattagattgcctaaaggccatgtcataccatctcaagaggaattgaaacgtcgagcttattgtaaatagcatgattctcattctcattctactaatgattgcaatgtatttcgacgacagattcaatcggccatagatgaaggacgattgaaattcactgatggttccaagatgaagcttgatcatgatcctttcccggtgaacacaattgatttcaatgataagaaggtattgattcggccagagcaagccgaatccactaaggggaaaaaagtgttcattggagagcctaggccaaagatgatggtgccaaagaatccggagaagtatgaaaagcaaggtggtgagaaaattcacaataaaggaaaacaaccaagattaaactccatgtcttcatttggaacatcaacacatg

SEQ ID NO: 29031 - DNA, 298 bp, Oryza sativa
  unsure (1)..(298): unsure at all n locations
  Clone ID: PAT_MRT4530_33572C.1
ccggcccggggnttatcacaggccccttggttcagttagatctcacagagtcaccattctctgaacaaaggtgccctcttaggaaatggggctcaagatttggagaggccttactgcatcctttctctatgactttggttattacacataattgcaggactgtgggaggcatagttatcaataagggctacagaggcttttgcttaagacactgcctggtttattccacaaacaccagctgtctagtagactttaataattatgcataaaatggatgcaacagatgttcctggaccgc

SEQ ID NO: 29032 - DNA, 572 bp, Oryza sativa
  Clone ID: PAT_MRT4530_33573C.1
atggacggcgacggatatgatgacggctccggcacgagggacttcatgtcacagtccgattcacacgcctccgccgatgggctcgacccctacaccgactccctgcactagttcactggatttggcagcggcggtgcttctaggataggcatggccgcccttgacctcaactccagtggggatgggtggccggatctagaaagctacgagggtctccttctttgggccgatgcacaaggaggtgacgtcggcggatctgggagccaccttcgctccgcctcaaaaggaggcggctccgctgacctccctctcgtgcgtggctgcggcgtcagtcagacccttggcttacgcgcagcctgccctcccggtggtcgaggtgccattgccgcttgcggcaattcctcaccatatggaggtggccgtagagcgcctgcgaccggacggctgatgcaagggcgtggtcgaggcgcgcccgcgaccggacccaggagccatggtggtggccgtcgatccgcagcctccaccgtatctgaagacaacttcgacatggactccaacaacgtcgatgatta

SEQ ID NO: 29033 - DNA, 1053 bp, Oryza sativa
  Clone ID: PAT_MRT4530_33574C.1
atgggtatggtgggagagaccgttgggctggtgacggcgatcctcagcctggcgagtcgaatcgtggagatggtggattcagctcggcgaagcaaggagcagtgctctcttctgagtgaacacgtccaaaacataagaaacctcctgacgcagctggataaccagtggacgcccgacctggcgacggaaggggtgctgaggagcctaaaaactgccctcgacgacgcgctcttgctcgttgaggcatgccaaatcgagaagccctggtataagcgtttggccccctctaagaaggccaagaagttcgatgccctggacaaacggatctcgatcatcctgcagcagttccatgtcgccaacatggtgctcatcgttaacatccacaaagatcgtttcttcatgactgttcttaagatgctacttggagatggcgcttgcaggaacctgccagagaggaagaaaaatgagctgaactcatacatcagaggtttgactcatcgtgatgatatgtccacagacgcgaaatgggtgttgggatggatacaaaaggacctcgcggacgggaacggcagccggttcgcagcatcaatcccagcagaagagggcagtggtggcggcggcgttagcgacactcttgcgaaggaggtggtgcaaacctgtgaacttatcgtgcaggaggccgggagcgcgaggcagaaccaggggcatgtgcagcggctgaagcagctggcgcagcaggtggccgacctgatgcagcacccgcaggcgtacgggctaacgcgcgaggcggagacgagagagatggtgaacaacctcaaggaagtcctcggcgacgcccgcatgatcgtgtggtacagccagcagccgcaaaggagcatgatcccgctacccctgatatcctgcagcggcggccgcggcagaggcgtggagcagccagccgagcagattctgacggtggtgtacaagatggagtattacctccaggtcctccccgtcatggctaggcgccagatggtgatccctgaatctgaatacggagctcaggcgagctga

SEQ ID NO: 29034 - DNA, 477 bp, Oryza sativa
  Clone ID: PAT_MRT4530_33575C.1
atggcgggagtggtacgtcgagtggaggaagaagaggagttcgacgagggagaagtgtgggaagtgctgcatcacgatcagagcaacgaagcggcggcggcggcgctcgccggcaggacgacgaagggcgccaggaataacaggcagcacgaggaaggcggcggcggggcggcagctgcgaggaggagcaaggggaggtcgtcggcgccggttgccatcccggcggctgctgccggctcctcgtcgtcgtcgtcgttgtcgtcaaggcgcggcggtggcggtggcgaggaagacgaggaggaggaggaggagatgatgatgatgctgccgccgcacgagtggctggcgaggaagatggagcggatgaacgcggcggcgccggcgccggagatcggcggggggaggagcaaggggagggagatgaggaaggtcagggacgccgtcctccccaagaccgccttctcatcggagcagtag

SEQ ID NO: 29035 - DNA, 185 bp, Oryza sativa
  Clone ID: PAT_MRT4530_33576C.1
ccacaagcggtccacaatacatgctgtaacaaaaatagataaggcagcggaatataggcagcggcgacaccattgccacaggcaacgaccgtaaataagacctatggaacaatgcatatgatagtggtattcaaagtatggcccttggtttatttgcataaagctaaaaaaaaaaaaaaaaaaaa

SEQ ID NO: 29036 - DNA, 293 bp, Oryza sativa
  Clone ID: PAT_MRT4530_33577C.1
gtgttttttttttttatggggaatttttggggttttattaactgatgaaaccttacacgaaaaagtaacctctatctaacaaacattggatcgggtaatgcctcacaccgttttgataccacacacccgcatcaggctgatggacacaatgatggatatttgatttaacaaactctgtgataatgctccacagtcagagatcggttgattggccacagtgaaaaatcaacaccgcggagaggctagacctcatcctgtcctccctttcgcctcagcatccccccgccgtcacc

SEQ ID NO: 29037 - DNA, 387 bp, Oryza sativa
  Clone ID: PAT_MRT4530_3357C.1
gtatgttgccaggaaagtttaaggaccaaaaagcccgcccccacaaaaacaggggggcggccacaaaaaaaggggagagaaaaggggggacaaacccaaaaaaagggggaccgagagcctggggcaaggaaacaaaccaccaagatgaagccaccccccaaaacaaaaaaaaggaaaacatatttggcggggagaggaacccccaaagaacatgggaagaaagggaacaccttgccgcgggggaaacaccacaaaaaccaaaagtcccgggcacccccctacccaatggggcaagggtcaaaaaagaaaaaacgcccccaaaaccaaaaaaaggggaaaagcccccagcggggggaaaaaaacccccccccccagggggggggaacc

SEQ ID NO: 29038 - DNA, 787 bp, Oryza sativa
  Clone ID: PAT_MRT4530_33580C.1
cgaccggaagtgaagagttgttgcatgcgttcacgcgaagcgaaggaggagcaaggaggaaaaaggcgagaaaagagagagagagagagagagaaccaaaccaagcacgcgaccgagatgggctccttcttctcgacgatgttcacgccgccgcccgccgccgacgacggcggcgactcgcgcgtggtggccgtccactccacggccacctgggacgagcagtggggcgcccacaagagcaaccccaacaagctgatcgtgatcgacttctccgccacctggtgcgggccctgccgcttcatcgagccggccttcaaggacatggccggacgcttcgccgacgccgtcttcttcaagatcgatgtcgacgaactttcggaagtggcgaggcaatggaaagtggaggccatgccgacctttgtgttaatcaagggcgggaaggaggttagtcgcgtggttggtgctaagaaggatgaactggagaggaaagtcaacatgttcatttcatcctcctcatcctaaatcccaaacttatgcctgcattcctcatttagtaccaggctctggtttctctcggtgctaggagtgagagaccctgtggttgtcctcttaaaaatgctgcaaaattcgatgtgaagtgggagtaaacgcgtttaagacaataaacttgtgatacttgggaatggaaatgtaattgcctgttgctcttgagtcatcatctaatcaaaaacaattctttattgatattaaaaccatagaaaaaaaaaaaaaaaaaaaaaaaaaaaaa

SEQ ID NO: 29039 - DNA, 660 bp, Oryza sativa
  Clone ID: PAT_MRT4530_33581C.1
gcggggccgagctcgatggtgagctgtgtgtatttctaaatatttgaagaaaaaacccatgtctgtcctcaaaactaaagctggtgactcccacttttggcagggtcttatggaagtaaggaatgatttcttcaagttttgttcaaaaaaaagtgggtgatggaaggtccatcatgttttgggaagatagttggttagagggtcgacctctaactagtcagttccctgctctttacaatattaccttgtcaaaaaacatttctctagccatgataaaggaacatggttggggtgtgatcaaattcagaaggaccctttttggtgaaaaattgagagattgggataagatcaaacagggttttgataacttacatttcatccctaactgcagagatagactttgttggaatctgactaaacaggggactttcaatgttaaatctttttacaatgcactttgtgtccaacaaacaaatgtacccttcaagaaagtttggaagttcaaaatccccttgaaaatcaaaattttcatttggcttatcttaaaaggaaggactcttactaaggataatctttttaaaagaggttggaggaaaggagacacaaattgtcagttttgtgatcaacaagagaccatccaacatctttttttcgattgtc

SEQ ID NO: 29040 - DNA, 220 bp, Oryza sativa
  Clone ID: PAT_MRT4530_33582C.1
caacaaatcaaggtcaagttcatctggagatcgattgatttcatatcatagcagggtttaaccatggacatcacataacaacacgcgcgaaataaataaagaaattatggaggagtgtagttcgggtggccatcgaccgaccatgccggatgtgacttgtgtgcggtggtgtttgttgcatgttggatggctagctcgtcgccaccgcggccatcgccat

SEQ ID NO: 29041 - DNA, 310 bp, Oryza sativa
  Clone ID: PAT_MRT4530_33583C.1
gtatatgcaatctttacaagccgaataaaacagctaatcggctgacaagccgatgtaatgattccagccgatgtatgctttaaccttcggatcaatatttgctctactatatcatattgttagctgattggtttctactggattatattgctatattatatcatcaacagccgattgcctctatatcattatctacattagacatatagctgattgctgaaaccctatcactatcggctggtattggcatcggctattatctgctatcggctggaatcactacatcggcttgtcagccgatcggctgttt

SEQ ID NO: 29042 - DNA, 126 bp, Oryza sativa
  Clone ID: PAT_MRT4530_33584C.1
atgtcgggtgatcaagctgacgacgttgggtgcgataactccgcatttgtcgagaatgttcttgataatggagcgtactcgaccacaacctactcgaaagataacagagcgagcccccagcgttag

SEQ ID NO: 29043 - DNA, 2946 bp, Oryza sativa
  Clone ID: PAT_MRT4530_33585C.1
atggcgcggaggaggggaagcgcggcggcggccgcggcctcaccggccctcagcatgttccgcagtggcagtgctcctcccactgttcagggtgctcgcactgccagcaatggtggtgttggtgatgtgctctctgacgaggagataaggtctcacccagcctacctgtcgtactactattccaatgagcacctcaatccaaggttgccaccaccaatggtgtcgaaggaggattggcgtgtcgctcagcgagtacaggctgtttcaggaggggtaggggataggaggaggaggccctcggatgtggggggtggaagctcgctgttttcggtgcccggaatgctttcgacagcccaaatccaattagacctgattcatcaagagcgcaactgcagagcagatcagaatccatgaatggcttgcgatctggatccacttcacccagtcttgtcagggtccaaagtttaggttcttcaatctctcataactttgcttctgcagtaggctcctctatctcaagaagcaccacccctgacccccagttgattcggaggactccaagtccttgccttcctccagttggagttaggatgggaagtactgataagaaggttgatggctcggctgttgcttcacataatcatgatactgctgacattgcggcggctctatcttctatgaacctttctggtagcaagatggccagtttagaagctgaagttcaaaatcgtgcataccagaactttggtgatcaaacagatgtactctttagcgttccaaaggagcgcagacaattatctcagcagaagttagctcaaaatgctgatgaagaatcgataaatgccttggaatatgcagcttttccaaatggtagcggtaacttcaataattcaaatatgagcaagctgtcagttgatagcaggagcaagtttcctatacaatcaccgcatggtaatgccaataataaaggatctcttgtgagccccactggatctgtgtctctctaccagaaccttaatggtgataactccaacattgatgttaatcttctttcgaatcaagggggatctggttttcagggccaaccaatggagtcaatgtatgctccatacttgcaggcaaactctgactctccccttggtgcagccacaaatttgaatccattccaaggaagcagcttttctggttcagtgcccctagatagccctggataccaaaaagcttatattgcctcattactcgctcagcagaagctacagtatggcgtgccatacctgggcaagggaatggcatatttatcgagtccaacatctaccccttttatctcatctcctcagggccatgttaggcaaggagataggctagctcgtatctcatctgtgggtaagaccactactggagggcctatgggatcttggaattcagataatggtctaattgataatggttatggatcttctctgctggaggaatttaagaccaacaaaaccagatcttttgagctgttagatattgtaggtcatgtggtcgagttcagctcggaccagtatggaagtcgctttatacaacagaaactagaaacggcttctgctgaagagaaggacaccatttttccagagattcttcctcaagcacgaactctgatgactgatgtttttggaaactatgttatacagaaattctttgaatatgggactgaaccacagaagaaacaactggctagcttactcaagggctatgtagtgcagctgtctcttcaaatgtatggttgccgggtgattcagaaggctttagaaatggttgaggtggaacaacaaacccaaatggctttggagcttgatggaaatattatgaaatgtgtccgtgatcagaatggcaaccatgtaatccagaaatgcatagaatgcatccctcaagaaaggatacggttcattatatctgccttttatggacacgtggttgagctttccactcatccatatggttgccgtgttattcagcgtgtcttggagcactgtaacgatgaaaatacgcagagcaccatgatggaagagatcatgcagtctgtggttctgttgacactagaccagtatggcaattatgttatccagcatgtcttgcaacacgggaaaccagatgaacgttctgctattattaagcaactggctgggcagattgtgaagatgagccaacagaaatttgcttccaatgttgttgagaagtgcctttccttcggtagtcctgaggagcgccagattctaattaatgaaatgcttggcacaactgacgagaatgagccattacaggcaatgatgaaagaccagtttgctaactacgtggtgcagaaggttttggagacttgtgatgaccagaaccgtgaattgatcctttcacgtatcaaagtacatttgaatgcactaaagagatacacctatgggaaacatattgttgcacgggttgagaagcttattgctgcaggagaaaggcgcagtggagtgtcttcgtcatcttcgtgagattgcaatggttagtttgacagaataacacctgtacagacaaatagcgaggctagccttacctgtagtcttgttgggttaaatcggaaaagctaagctttgaaagcctttgatgtaaataaaggagggcctctggaaataaaaaggagagagtgtgcttgttcttaagaaagaagctgtatatttgtacgtttttcccctcttcgagtaagataaaaagaaggaagaaaggcaaagcatggaagaaattagtgcaaagatttaggatagatgatgggaagcaaggacccctgtagatccttttgccttgaatttcatcagtgtataaggtttcatgaggtttcatctctgtaaaggttttctacttaactcacattttgcagaaatcaaatgcatgtctctgtttatcagaattgtcttcagctctaaa

SEQ ID NO: 29044 - DNA, 196 bp, Oryza sativa
  Clone ID: PAT_MRT4530_33586C.1
atggataagatcgactgctacgtcgtgccgcagaccacgggcaccggccggaacatcttccagggcggcagcccgctctcggcgtcgctgccgctgctcggcgtgcagctcgtcctcatcgtcgccgtcacccgcgtcctctacttcctcctcaagccgctgaagcagccccgcgtcgtgtccgagatcatggcac

SEQ ID NO: 29045 - DNA, 310 bp, Oryza sativa
  Clone ID: PAT_MRT4530_33587C.1
cccaagctcacgcacgagatcaagcatacgcatgaccagacgcacagcctgcttgtgaatgagcgcctgcaaaagtgccggagaatctcccggccaccacgaccaccacgagcacctgcatgcgcctatgcatcctaatgctgaacacgatactacagacattactacactggttgctacactggctaatgacaatagaagtgaccaagcatcgacacgcaccggttgaagcatggcaagaacagtacatagagcaacacaataatcgacaagatagagctcgagcctgagctaggccctgcgccgtgtc

SEQ ID NO: 29046 - DNA, 339 bp, Oryza sativa
  Clone ID: PAT_MRT4530_33588C.1
atggcggacggctatcgacggcgggagctcacggcggcttcgaccctcgttccggccgcgtgcggtagagcgggaggcatgccgtgcataccggcggcgaggggaagcgggcgtccatatggctgctgcagctgcaatctgcgcatgtgcatgcgcatgtgtcagcggcttgggggctccagtgaggacgccggcgggtttgctgctccgggctgccgcggctggcaggatgcagatgtggttgagagagttcaccgtactgtgctgggctggtgggctgcttctcctccgctctgtgggctcgctggtgggctgcggctgctatctgggccggcgtaa

SEQ ID NO: 29047 - DNA, 438 bp, Oryza sativa
  Clone ID: PAT_MRT4530_33589C.1
atggccaccctgtcgctgcaggtgttcagagttatatttgcacactcagagttgagttactggcaatctgcaacagtattgccgcggccgctctacagggacatgaggctgctgggacccgccgcacgtgggctggctcccccgcacctgttgccgcccgccgtgtaccacacgccgcgcgtcgtcgtcgtctcgtctcgactcgactacgtgtccgtgacgcgcgacacctcaccggggagaggacgaagaggaggattgtacatactctacgccggggggcgcgtcaaatcggcgaggtggatccagggcaatcgtaatgcgaagcatatgcgattatatccttaccagtacagcttcctggagtacagagggaaggggccagggaagcacagtgttaaagcacttgagctcttttgcttcactctcgtggactaa

SEQ ID NO: 29048 - DNA, 7581 bp, Oryza sativa
  unsure (1)..(7581): unsure at all n locations
  Clone ID: PAT_MRT4530_3358C.1
ttagagaatgtccttgtttggtccccaatcaacttcttcaatcatccatgcatttcttatgctcggtctcttttctttcgcccaagcaagtaactcttttgggtaccgcaagccaataattgaggaatactttaaatatcttagaattcttttcacggccactaagtgacactccttgggagcggcttgaaaccgtgcacacttgcaaacattaaacatgatatccgacctagatgcggtaaggtaaagcaagctaccaatcatagaacgataaagctttaaatctatcggtttacctccctcatcaaggtcgcgatgctcgttggttgccattggtgtcttgatgggcttcgcatcctccaagccaaacctcttgagttgattcttgatgtacttggtttggctcatgaacgtcccatccttgagttgcttgatatgaagttcaaggaagaagctcaactttccaatcatggacatctcaaattccctagacatcatatcaccaccaaattccttacaaaatacctcattagtagaaccgaatatgatatcatcaacataaatttgacaaacaaagaagtcatcaccaatgatatttgtgaaaagtgtggtgtcaacttttccagttttgaaatcatggttaggatttttaggatcttcaaaaccgggaggttgttcaacaaagacaagttcggcaatttcaccatttagaaaagcacttttcacatctatttgaaatagttctatatcaaagcatgatgcaaatgcaagaatgatgcgaatagcctcaacttgtgtgaaaccttgtgccaccaagcttatcttgtttctcaccaccaacccgttctcatcttgtttgctcctaaagacccactttgtccctatggcattgtgatctctaggtctttcaaccaaagtccacaccttgtttcttacaaagttgctgagctcttcatgcatagcattaatccaatctggatcataaagagcttcatctatatgttttggctcaaaacaaaaaacaaacgagtaatgctcacaaatcgaaacaacatgagatcgtgtttggacacccttactaatgtcacccaaaacttggtcaattgggtgattcttggaaagagcggtgtgtatccttgggggcataggtggatcttgtgccttctcctcttccacttccacttgagcttgacttggcgcagcggaagtagatggctcaccttgagtggaggtggatggcttgtcttccacttcaataggcttgacatctccaatagacatattcttcatagctctcatcaagccttcatcacctacatcatccaaattctcgtgcccctcttgggaaccattagtttcatcaaattgaacatcaacagtttcttccacaatacctttgttcttattgtagacccggtatgccttgctatttgaggcataacttgccatctcaaccaatgtatgatttttcctctccactacaccattttgttgaggtgagtaggtagcggaaagctcatgtttgataccaagatcatcacaatagtccttgatattggtatttttatactcggaaccattgtcacttctaattttcacaagagtgcaactaaattcattttgggccctttttgcaaactttttgaaaagctcggcaacaatagactctttgataaatcctgctgtgataagcctatctacctccgcaatgacttgatcttggaattctggtcgtaggcgacgtggcggctgctttacaggccgaaattgtgggtcgatggcaagtttgtgtgttgcaacacggggatcaagacccggcatctccttatatgtccaagcaaagcaatctcggtactccatcaggaagcttcgataactctcttgttcttcggctgaaagcgcggcactaacaaatgtagggcggggatcatccatggtgcctaaattaatttccacaagatcgtcaatggtgggttgcttctcctctttgagttcatcaagcatgaagggatcttctaattctccctcttgctctgtgatcatgctagcgtaaatatagccggtggcggcggcattcgcctgttttgttgaacgttgatcccagccttttccaataaaggaattaatttggcatctaccttcatagtggtagccacttcttcttgaattgttgcgagccctgattgtgattactgtcggcgcatcgttgctgatatctagcaacttgcggccttggaccattgcaacatttctggttagcaagatttcttttgatgagggagcctgtaaatcaaccggaactctcgccacagacgtttgtgtagttggagtccgtgatgatgtccctgctttcaacaacagaggtgtgaaagtcggtgacgtaagagcagtatcnttctccactggaaccacgacaccggacattccggctcccgtatacggcttattctcatactgtgcactcatgaatgagtggtggcgagcgttatttctgcgattacgggttgaggaccctgtcgcaccagcaagtggtcctgctgtgatgagccgtcttatctctggggtaggtgtgcgtccaggcgcgattaggagatccgctgccggagttgttcgaccaagagtttgatcagaatcgtcaactggaaaatagtactttgcatcggcatgatgcgattcttgggtagtgtatggagagaggttgccgacgatcctctgttgcgtcccactaccatctaggaactttaagcattggtgtagcgtcgaaggcaccacacgatacttgtgaatccgtggtctactgtcacgccccgaactagtcccgaccggaactagcccgtgacgctccaaattaaccttagtgagtcgatccacaactacccagatcgattcgtgacccgatgatgtccggggcagtcctgttataaagtccattccaatctcctcccatttccattccgggatttgaagaggttgaagtaaacctgctggtctttggtgctctgccttcactcgttggcaaacatcgcagagtgcgacgaattcagctatttctctcctcatgctgacccaccaaaacttttctttgaggtcttgatacattttagtgctgcctgggtgaatggagtactgggtctgatgagcctcggtgagtatcagatccttcagttccttgtcgtcaggtacacacaatctttctcccaaccagattgtgccatgctcatcttcgtggaaatcccgggcttttccgacactcatgttctttttcagctctgctatttcagaatcatttgcttgagcgtaggccgtgcctccagagcggatgccctcgatgcatagggcagtgcagtaacttttccggcttaaagcgtctgccaccacattggctttacccgggtggtagtgaatactcatgtcatagtctttgattagttccaaccatcttcgttgtcggagatttaggtccggttgggtgaagatgtatttcagactcttatggtccgtatatacttcgcagcggttgccaatcagatagtgcctccagatcttcaaagcatgaaccactgctgccaattccaagtcatgagttggataattcccttcgtgtggacgcaactgccgtgaggcatacgcaaccactctgccctcttgcattaggacacatccaagtccgtgacgggatgcatcacaatagacttggaagtctttcatcgggtcgggcagaatcaaaacgggtgcggatactaatttcttcttgagctcctcgaagctcttatcgcactcggctgtccatttaaacttctcatccttcttaagcaactgagtcatgggtcgggcgattctggagaaattttcgatgaatcgacggtaataaccctgagctgtaatgacatggcccaaaaatttgacttccgtcaaccagaagtcacacttgctgaacttggcatatagctggtgctccctcaacttctcgagtaccagacggaaatgttgttcatgtttttcttcggactttgaatagataagaatgtcgtcgatgaacaccacaacaaacttgtccagaaattccatgaacactttgttcatcagattcatgaagaatgcgggtgcgttggtgagtccgaaagacataaccgtgcactcatatagcccgtaccgagtggtgaaggccgtcttcggaatatcctcttcccgaattctcaactggtggtagcctgatcgcaggtctatcttagaaaacactttagctcctttcagttgatcaaacaaatcatcgattcgcggcaaaggatatttgttcttgattgtgacctcgttgagtgcgtggtaatcaacgcacatcctcttcgtcttatcctttttctccacaaaaatgaccggagcacccaaaggtgaagtacttggtcgaatgtaccctttctgcagctgctcatcaacctgtttcttgacctctgctagttcgttggccgccatcctgtatggtctcttatagattggagcagttcccggtgccaagtcaatccggaattcaatctctctcttgggtggcatggtagtgaggtcttcggggaacacttctggatactcgcagactatgggtatatcttccaattttctcgagttcttctctacggtgtccactgggatttccgcttcaatctgattcaaagagacccctttctttggcgagactagagatttgtacaccacgntttctcccttctcgttgatcaaggtgactgtgcgattcgcacaatcgatgacccccttaaacttggtcagccaatccatcccaagaatgacatctaggtcagaatcaaaaagtactgttgcagggattgagttaacagggaacgtacccagtacgacctctggtgctgcttgtgcctcctccgcagatgcgtggttgacacgagcctggataaaccttggcccggcacgcctaggcttcgggcatttgtcagcgaagtggccaagctcgccacagttgaagcaggaccctggttttgctccagtctccttcttggcttgcgcgggcgggcctgactgtgccggtgccattggtgggcgtgaagctgcaccgcggttggactgacctccatggtggttctgactgccactggcgccctggggaaagttgctagggttgaacgggcggtgctgacgaacgatcatggtggtaggtccaccctgctgcccaggagcgaagcgcggcctctggtgacttccctgaggtgccctgaactgtgcggccttcctcttcctgtccatcttgttgcgttgatcctcctggcggattgccttgtcaaccaacctctcaaagtcagcgtagtccccggatatcagttggttggtcagctcatcatccagacccgccatgaacttctcctgcttctcggcgtcggtgcggacatcctctggtgcatatcgcgcgaggcgattgaactcgtggaggtactctgtcacagtcctgttgccctgatggagtgcccggaattccctcttcttttgtgccacgaccccgtctggcacctgcgccttccagaagctacggcagaactctgcccatgtgacttcagtacctggtgggcgggtggccatgtgattgtcccaccaagctgacgcgggaccctgaagctggtgtgtggcgaaagcgaccttctcctgatcattgcactgcaggcgattcagcttcttctctatggcatggagccagtcattcgcctccatggggttggtggtgcttgagaaggtgggtggcctgacgcgtagaaactctggcaacttggactgagggggagggggaccaaactgctggtgctgctgttcgacgtgctgcatcatcctctggtgcatctgctggtgctgctgctgcatctgctgcatcatggctgccatcatctgagtctgatgtgccataacttgggcaagggtcggattctcgggaagtggtggcggaccattgccggaatcactgctggggtgcacaccatcagcgcgttcttcgccgttgctgccctcgcctgttgcgcggctaccattcctggtgtagaccattctgattcccactaagtctcctctattttcagctccttgcagcatactcgatagaccctcagcaacaagcaaaaaaaggtatggggataagggatccccctgccttaagcctcgagaaggcttaataacctctgtcaatacaccattgaaattcaccctgtactgaacttttcttcctttcttctttttcattgtgtgtaagcactcataagctaccaaaacattatccgtgatcaacctgcccgggacaaaagcactctgctgatcacttattatttcagggagaagacactttagccggtttgctaacatcttagaaattattttatagaccacattacataagctaatgggtctaaattgagttactctgtctggtttatcaacctttggaatcatgacaacagttgtgtcattccatccatctggaattttcattgtatttattgcatcaagaacttctttaaccagatcactctccaacatatcccagaatcttttatagaaaacagcgtgcagcccatctggtcccggagctttcagatcacctatactgaacagagcatttttcacctcttcagctgtatacggtgctagtaatccaaaattcatatctcccgttacttttctctgtacatccagcaaagaagatccatctatttgtgtaacctcagccgagaagagantttggaagtacccataaactatgntactcattctgtcttcatcggtttgaaaacatccattctcatcaataagtcccttaatnttctttcttcttcttctcngngcagcaaattgttgaaagaaactggtgttacggtcaccatgttncaaccaatttgctctcgctcttggatacaatattctttccttgatcgtgattgggacaaaccgaacgaggggttnactcaaatctaagaaaaccctagctctgaggtatttaacaggattgattctcccctcatctactataactgtgaatggttgttcaccaaccttcttagcaaccctctctgctagttctctcttcttcatcaacccatcaggcaccccatgaatgcgcgtccaaactggaattttatccaacttataatcaaacacattagtgaagccatcatattctttaaggactacaggagctcctctaaagatccatggacctccttccatnactctgttccaatcaccaaggcattgaaattgtaccataaagagatttgaatccattaccttaaacgagatatcctgtgccgaagaccaggcgtttctcatagcattcaacagcgctgagtggctaaagggttttgtagtataaaccctaaaaagagcgagccagcgtacgtccttgatcagcccttccaattcctccgagaaatctaggtcagtttcctcctccccatgcatattcaacctcttcaatctctcttccagatttggttcggatcccatctctccatcacgcccagtctcctcctccgtagggcgcttggtttcatcctcggcagatgatcgagtatctgccat

SEQ ID NO: 29049 - DNA, 398 bp, Oryza sativa
  Clone ID: PAT_MRT4530_33590C.1
ggagccgcagcaccgccatcttcacttccatccagctcgcctgcctcctcctccaagccgctggccgacgctcccgcagcgaccacctttccgtaccgcatcacctcctccgcctctcatcgctgtaccagccaccctttccatccccaacgccgcctgcctcgctcccgcggcaacctccttcccacgccactgctcctcaccgcctcccgccgccggtgcgccaggccgagcgccgccgcctaggcgcctcctcccgaccgccggctagcaacgccgcggcgaccgccttcctccccacatcgccgccctcccgcaccgccgcgctaagccgccatcgctcggccgctacccatgccgtcgcgtgccagccgcctcccgctcgggcacgcacgcat

SEQ ID NO: 29050 - DNA, 333 bp, Oryza sativa
  Clone ID: PAT_MRT4530_33591C.1
atgatgactgagtcaacgtgggacccacatatcaatgacacaaactctcattcttctccctctgttgctctccccccgttctcactcaagctggtggaggagcaggacccggaggaggatgtcaaggccggcgtcccatcggacggagtcagcgagggtggtggccgcgccatggcccaggggcaaggtgcccaacccatccccctggcggcgatggggtctatggaatctggcgccagcagagggggcgccctggcagtgacccgcgagcaccgctcacggaggaggtcgggcaggggcggtgtcgatgagagcttagtagagccggagtag

SEQ ID NO: 29051 - DNA, 213 bp, Oryza sativa
  Clone ID: PAT_MRT4530_33592C.1
atggccctgtactatgtcaaggcgcaggtttcggagggagggagtttggggaataacaaattccagacctactttttgcattgtatcgccacccaaggtaagatgctcaagctgtccaagtggagggagaacgttcaagtttttgcaccaacttatctctacaacccgtacatgcttgagctgccccacccaatctggaagttcaaatcctga

SEQ ID NO: 29052 - DNA, 4131 bp, Oryza sativa
  Clone ID: PAT_MRT4530_33593C.1
atggatcttggatatgagcatcctgctgtgcttctctcggtggagatcagcgaagtggtccagaagctccgccgctctctgggcaaaagtagcgactccttcaagagaactacgaagaagctggatgtggtggaggataagcttcgcttcctccgtctggacagcctgcagcgggtcaagcctgcccctgcatggctgcaggacctgaacaaggctgcacaagatgcaaagggacttcttgacgacatggaatctgaggtgaaagctcctgactcttcaatctctgatgttatgaattggctctcctctgatgacagaaacatgattagaatggtatacgtcattagtaaacttgccagtgcatgttctcaaggcaaatctatagttgacacaccacccctgaatgagagtgccttaggagatgaaaaggaagataagatagcttcatcttctgttgccatgactcgccaagacaaatctttccttggtgatgactttcttattggtcgcgatgaggaaatagctatgataagagacatggtattggacaatgcccaatatgtaccaacagaaataacacttaagattagggaagaagctgagaagttacatgttcctcataagggttggattactgaaactcttcataaaattgatatgtctaaatggacacagcaagcaatagaagtatccccacaccccgaaaatgaaaagagcaacaaggtagaatatattcgtcatccacatgacagtgctgttacataccttcggaatccggcagttattcccattgttggaatcagtggagtgggcaaatcagctcttgccaaattcatattcgatgacgcaaatgttcgggagcactttggtgatatatctgcatgggtctatatgactgacagaactgaccagttggttacaatagaacagatcatctattcttttaatcccaaggataacatcagttatatgacaagcctggacagtgcctactctcaacttcaggatatcatagaaggtaaaagattcctcctggtacttgatgatgtatggaatgagatatgtgtgctatggaatgatttaaggagtgtactaagcaaaggagcacctggaagtgtagttttagttacaactcaattgtacagtgtagctaactttgtagggactgcaggccctgtaattctggatcctttacaatccgatgactcatgggcacttctcaggagatatgcatttgttgaaccctgcagaagtttgtccacggaaggtctcaaagaaattggtagaaaaatatcacacaggttacatggattgcctctatccataaaggtaactggggcaacattgagaagtcagttggaagaagctgattggagggaaatcttaaatagttggtggtggaatgtttcagatgataactttgcaatcagaattatatcttctcttggaagttgttacagtgcgttacctggatatttgcggcagtgctttgtctattgttcaatatttcctaggaactatgtgtttgaaaaagataaattggttcagatgtggatagctaatggttttattcagctggacagttctagtggagtcaaaaggttggaggatgtaggtggggaatggttctacgaacttgtcaatagggcctttcttcagccatcagcaaggaaaactgaatacattatgcatgatttggtctgggattttgcaagtgcactgtcttctgatgaataccatggtaacgataataaggtgagaggtgtttcacaggatgtccgctatttatcagttgacatggatgccctagatacactaccagataaatttaaaactgaacaattgcgcacttttatgttgcttgacggcagtcatcaacccagcaataatgaaactcatctccctcttagtaattttttgtgtaattccaaaagcctacgcttactggccttctcttcaaggagttacaaatggctgggacggacgtccgctctttcaaatgttattagctcaacgaaacacctcagatatttagacctctcgtttactgggatcgcgaaactgcctaattcagtatgcagcttgtgccaccttcaggttcttggcttgagaggctgtacatttggtaaattacctggagacatgaatttcttaatcaacctacgtcacttgcatgctagctcaggcacaattgctcaaattaatggcattgggaagctaactaaattgcaagagctacatgaattccatattaaagcagaagaaggtcacgggataactgagctaagtgacatgaacgatttgggtggttccctttgtatttcacaccttgagatggtgactgatcctgcagaggcacttcaagctaacatagttgagaaggactatataacagctttagaattaagatggtcttatactttgcctgatctgtccaagtcgatacttgggtgtttgtctcctccaagatatctgcaggagctaaaactgtatggttactcaggatttgaacttccagattgggtggggcagctcaagcatgtacgggttgtagagataagttggtgcaaaaacttgaacgttctccctccacttggacagcttgagcatctgcaaaaactcaagttggatggtttgccgtcaataaaggatataaactctgatatttgtggaacctcaaacgtggtcttttggtccttggaggagctaagctttgaatatatggagaattgggagagctggacatatgcagggagtagtgacttcattcggaacctaaaaaagctgaagatactttcatgtgaaaaattgagaaaggtgccttttgagtcgttgggtttagccacgaaagagataataattaagtggtgtgatccatatgatgatacgttctcgaggtatttgcaagggctaaacggtctgacacgtttagaggtaggtggtagccggaggtgcaaattaatcattccatgtaaacaattgatgtccttggagtacctacatatccaaggttttggagatgtgtgcattaaaagtggactgtggtatatcaaaaacctgaagaatatactgattattgattgttctacagtagttacagattcaaatgaagagtcagcacaagaagacaagcaatccccaactcaaatcgatcgcactatgcattctctcacccaccttaccttgggtggcgatacaatgcaaaaagtaggtctggaatttgttattccccaaactccctccctccgaaacctgcgccttgacatagtacagggccatacaagcattactaagaagtggcttcagtatctcacatctctacaggagctggagatttattcgtgccatgcactcccatcgagcttgtcctctctgtcatccttgaggaggtgcactctgaagtactgccactggatgtattcaataccacccaacagcctgccaggtaacctaaaagagttgcaaatagaggagtgctcatttgaactagaggcacgatgccagaatccaacaggagatgcgcggccagaggggcgtaagattgagttgtggcagaagaggaagatgggcgagtggcgagagaggaagctggagcatgggcggacgaagcttattgaaatgcagcaaaagaacgagtcactaggaataccgatgagctggagggaaaaatcgccgaagagttctaaaggggagtcgttgtatcaaagtgataaatattggtcgcgtgggcagaggatgcaggagggacacgagtggccgaggaagcagcacatggaagaacagtcgtttatagaaaaggagaagtcgtcgagtctgaacgagcaagcagaggaagacgaatccaagaaggaaccactagaagagtggctgcagcagagtgaaggagatcaatggcctgagcgagagtgggagctgtactcatgggtggagaggaagctgaagaaagaattggacagaaacaaagatgatccgtctagtctgatgaaagagagagaagaatggctgaaggaagaggagcgcaaattccacattcacgattcacatgctctggtaaaggaaattttgcatctaaatcaagagtcaagacaatgcttttgctttcggcatcatctatctgcccagcgcacttga

SEQ ID NO: 29053 - DNA, 167 bp, Oryza sativa
  Clone ID: PAT_MRT4530_33594C.1
caccgttttgttttggctcacccctgtcgggttgagaggcagggccaattctagcctgaatctattgtgagagtgtcagtgtgagaagtgctcatccaattcgagctgttaacatgttgctcgctgcatgatcagagagaagggtacagagagatcgactgggagga

SEQ ID NO: 29054 - DNA, 175 bp, Oryza sativa
  Clone ID: PAT_MRT4530_33595C.1
atatgtaacgaccatggtaggatgtatcaaaaaacgggacggagcttaacacaaaaatagtgactaaaattacaaccctctcatgataaggacggataggaaagtcacaagagtggctaggacacctggcagttctttgttcgtgatcgtggcgaaaaagggcacacggttaaac

SEQ ID NO: 29055 - DNA, 3129 bp, Oryza sativa
  Clone ID: PAT_MRT4530_33596C.1
atttcttttcctctactgaacccttccatcagtcgtgctgttcttcagctcttcagcatgtgtatatgattcatatcatttctcttgctctactgaagccttcacccgtcgtgctgtacttgctggcatgttacaggtgtagtgaagaacaaaaaagctagtgcgccccacaaggatacggcaaagtatggcagaagctgcagtagtccaggccctcatcaagattggcacgacttttggagacgcggcattgcaatcgctcaaagacatcataaagaaagaagtagctctgttacaggaactaccagagctcgcaaaatccattgggagggaactggacatgatcaatagcttccttatgcaagtgcgggcgaagatccacagcactgacaatgaagttctgaaacgctgggtggtgagagtacgccaggtggcctaccatgttgaggacataatagatgagtactcctacaatgttgctctgctgcaggaggaaagctatttaagtagaatgatgcgtgcgacctactatggtgtaactttccatggcattgctactggactgaaagatgtacaaaatgatatcaagcaattgtcggatactaagacaaaatttgcagagttcttcaatgagttacatagcaacactggtagtaacacacaatctcatctatcacgtgatagatccctccatacagttaaagaaggtattgttggtatgacagaagaggtagatttactgaattcatggttatcacccaatgatctcactagagtagttttatctgtgtggggtctgtttgggctggggaaaacaactctggtgagaaaggtgtatgaatctgtgaaagagcagaagatctttgactgctattcttggattgaggtaccacacgagtacaacaatgatgtaatgttaaggcagttaataagggacctatcacaagaccaaagccaaatacctggaaacctggacagtatgtatggcagccagctggttgatatattatgtgtggtgttatccggcagaaggtacttgattgtgctcgataatgtctgggatgccgatgcatttcatggcatatcaagctttttgatcgacaatggtaatgctagtcggataatcatcacgactaggacaagtgatgttgcttcactggctcaagacacatacaagctcaagcttaagcccttgggtgatgaggctgcaatggaactattttgcagaagggcttttcataataaagacatgagatgccccccacacctgaaggatctgtgcgaacagattgtgagaaagtgtggtggcttaccatcggccatctatgctataggcaatgtgcttgctgtcagagaacagacagaagtagcatggaaaataatgaatgatcagttccagtgtatgttagaggacaaccctggcttgggagaagtgaggagtgccctgagtgttagcatcttgttccttccaaggcatctcaagaactgcttcctctattgcagcttgttcccacagaactaccggttgtcacgtgaaagccttgtgaagctgtggacagcagaaggattcataacgaagagaggaagcagcactctggaagaagttgcagatgaatacctgatggagctgatccgaggaagcttgttgcaactcctggagacagatgaaattggcagagtagccttctgcaagatgcatgacattgtgcgtgacttggctctgtcctactccagaaaggagatgtttggcctgagtgatggagacctccaaacagatcaaaaggaagatgttcgtcgcctgtcaatatccaagtgcaacaagaatgtgggatcaatcttggagtttcctcgccttcggaccttcgtcgctaccaatggaggcgcagagtcagacctgttacattctctcatacaaaaatcgaagtaccttgctgttctggagctgcaagactcacccatcgacataattccagcaaatattggagagttgttcaacctgcactatcttggattgcggaggaccaatgtgaaatcacttccaaaatctatcgagaaacttaccaatctggagactctggacctgaaatacaccggggtagatgtgctgcccaaggagatctgtaaactgaagaagctgaggcacttgttcgccgagaaactcattgaccgtaatcgccaagtgttcagatacttcaaaggtatgcagctgccacatggattttcacacatgaatgaaattcaaacccttgaaacagttgaggcaacgaaggactccattgagctgctggggaagctgactgcactgagaaccctgtgggttgagaatgtgcatcgcgctgactgcacaaagttgtttgattcattgtcagaaatggagaatctctcaagcctgctcgttagtgccagcgatgaatatgaggtccttaactttgatgcattcagtccttctgagatgaagctccagaagctcatcattagaggctgcctcgagaatgacacatttgacaagcttatgttcaaaaaccttggctcacacatcaaatacttgtcactaagttcctcgagactcggcaatgatccgttcccgctcctcgcaaagaacatgaagaacctcatctacctgagcatcaggaagtggtgctgtgctgaggaggtggctctccgtgaagggtggttccctcgcctgacaacactcttccttggtgacatgaagcaggtgcacactattgtcatcgagccgtcagcggttgagagcttggaggcgctgtacttggtttctctgacggctatgacagcggttccgacaggcttggagctcgttgggtcgctcaggaagctcgttgtgtgggggcagtcagacgatttcaagctggagtggaagagggagaactgggaaacgaagctgcgccatattccggaaattcgcatttaattgatcaagaactgcttaaaatttggatggattatatcttgcatgtctactgaatcggtctctggactgattcctcgtgctttggttctacttgaatgtgatttatttatctctttgtctgaaatttatgtttgtaatatgtctgaagttactgaacttctatgatgtaatctaaattctgaatattttcttgcacc

SEQ ID NO: 29056 - DNA, 486 bp, Oryza sativa
  Clone ID: PAT_MRT4530_33597C.1
atggcggtcggcctcgccttcgccgcgaacaccgactcactcaacgctttcgtcccgctcctcggcgcgagctcctcagcggacactcagcgccccgcctgctccaggcccgtcgacctcgccgtcgtcggcggcggccccgccggcctcgccgttgcgcttgctgatgaaggatcgcggccagagattgagcatgaggcatcagttaacaaacacaagacggcgaggttggcaatgagtactcggtgggaggatcgccggaggtggcccaacatcgtccgggccgccggcggcgagggcggggcggcggcggcggaagaacccccgaagtccgattcgtgtggagaagggaagggaagagaggccgcacggatggagaagctgacggtgatgggccaggcccatcacaaagcccatgtaaagaaagcccacatccagacatcctcggcgtggaccggcggtgctgtcggcacggccgccggctga

SEQ ID NO: 29057 - DNA, 1709 bp, Oryza sativa
  Clone ID: PAT_MRT4530_33598C.1
atggagcccaaggaggcgcccccgccgccgccgccccagtctccgtcctccaccgaggaggaagggatgctctccgtcacggccgctatggccagagacgccgccgtgctgttccagagccgccgctacgccgactgcgccgaggtgctcgcgcagctcctgctcaagaaggagggcgaccccaaggtgttcgttagtggagctgcttccgcagcattatgggttgagctcgtgggatgtctgcatatttcacctgtatgtgcgttatggtctgtgtgtgatatgcagtttcatgttgtgtttgatgcatgcgtagacatggatgtccacactgggcatgatctgtttaataaggtccttcacaatatggctattgcagaatctttcttggatggttgtcctgacccaaagaaattgcttgaaattctaggcaatgttaagagaagaagtgaagagcttgcctgtgcatctagacaacaaactgattctgccaatgggacaggaaacagtgtttcttctggatcaagagggagtggcattatacctctgatttctgctgcaaataatgcgacaacctatggggatgagtttgacacaaccataataacattcaacacttactgctttagccaatcaaccatggctgttatcctttaccatcttcacgattatgaatctgcactatctattttggatccactctaccgaaatattgaaccaattgatgagacaactgctcttcatgtatgctttctgttgttggatattacattagctttgcaagatgcatcgaatgccgcggatataattcagtacttggaaaggtcatttggagtagttagcgcaacaaaccagaatgaaaatgctaatacagctcagcagcagtcagctcaaccaaagccttctgcaaagattagcacacctccagattctgattcaaatacttgtgctggtggatctgaaaacctttcagcaggaaatttttctgatgatacacttgagtttgaatctttttactctaccttggatggtggtaatcagaactggggcagaccaattttaaatgatttctcaagggcttcagctgatcttgctgccactgctgctgatttgaaagttagactgcaaatatacaaggtccggcttctgcttcttactaggaaccttaaggttgcaaagcgagaactgaaagttctgatgaacatggcacgtggtagggattcatcaacagagcttctcctgaaatctcagttggaatatgccagaggaaactatcgcaaggctgtgaagctgctgagcacacccaataatcggagtgaacaagcaatgctggccatgttctacaataatcttggttgcatactccaccaacagagatctattcaaacctcagtatggtgcttcagcaaagcattgaaatatagcttatcacttcgttcagagaaaccatgcaagctgaccgcaatatcgcaagacaaatcttgtcttatttcatacaactgcggcatccaacatttgatgtgcgggaaacctttgttagcagctcgctgttttcgtgaagccatgccgctcttgtgcaacaggtccctcttttggctccgttttgctgagtgtagcctgctagctctggaaaagggtatcctgacttcaagtggtgctacttcgtgcaatgatgagattgaagttgatgttatggggtcaggaaaatg

SEQ ID NO: 29058 - DNA, 2658 bp, Oryza sativa
  Clone ID: PAT_MRT4530_33599C.1
atggaggccccgcccctcgccgccccgatttgtgcttcacagggagccatgggatcccttcttgggaagatggaggagctgcttgtggctcccgatggcagcaggctacccaagggggtgaaggatcggatgctcctcctgggaggcgaccttggagtggtcgccgcgtacctcgccgatctgtcggagctggaggaccctcccccgacggccaagcgctggatgagagaggtgcgcgagctgtcctacgacatcgaggactacatcgacgagttctgcgcagcgccgcggcctggccgccgcgcgaacaccatggccagattcgtctgcagaatcggccgtgtcaaggttgctcgtcttcccaagaggctcaagaggcaccagcagatggggaagatggtgtcgcagttcaggatttatgttgaggaggccattgagcggcatgggaggtatggtctggattgctgcgaccacaggcggagatatgtgtcatttggccctatgttgccatctaggccgtatggggaagaagatgcccagctagtgattgatggccgggtgagcgagttcatcgagcggctcgccaatgatgaggatcagaagctcaaggtggtgtctgttgttggatcttcaggtattggtaagaccacacttgccaaactgttgtacaacagaattgggggacaatttgactgtcgagctttcgtccggatctcccggaagcctgatatgaagagggttttccgcgagatgttctttcaactccagcggaagcagccacctgacgattataaggagcttgcgcttattgacagcatcagggagtatcttcaagatagaaggtatttaattattattgatgacttatgggctgcctccgtatgggatcttatcaatcaagcttttccagagacatgcttgctatatcttaatatgtatccagagggttataaaatatgcaaggatgatgttgtggaaaaatgggtggctgaaggttttattgatcaaatagagggccgagacttggagaaagttgcagggagctatttcgatgaacttattgacagaagattcctccaacctagcagactcaactacaacaatgaggtgtcaacttgtacaattcatgatgaggtacgagatcttattgcatacaagtctgtagaggagaactttgttctggtattagatttttaccggaaggatgtggaactttctgataaagttcgtcgactttctgtccactttggtgacataaagtatgcaaaaataccaacaaacatcagaacatcagaagttcgatcacttacattttttggattatgtaagtgtatgccttctcttacagagtttaagcttcttcgtgttctaaaccttcaattatctggtcatgttggtgatgaactcttagacctcagtgggatttctgaactatttcaactgagatatttgaagattgcatgcgatattcgcacagaactaccaagccaaatgcgagggctaaaatatttagaaacgttgcagatggatacaacactcactgctgttccttgggatattatctttctcccgtgcttgttacacctccatcttcgttttgatatgaatctgattgatttgatgggccacatgacacctcccagcgaactaggatcaagcagtagtaactcatcacccagtgggggcatcattagcaatctgaacaacgtacgggatattcatctcaccttctgtgcactgccttccaaacatctagagagaaacatggaaattttgggctctttgcttggaagacttggtaatctgaaaaatctaactctagtttcttcttcctctcaaaagaaaattgcggcttcaggagcctcagaagtaactattttgtgggataatttggcacctccacctcttctccagagatttgagtggttgctgcacagctgcatcttttacagagttcctaagtggattggagaacttggcaacctatgcattttaaagattgcagtaagggagcttgtaaagaacagtgttgatattctcaggggattgcctgccctcatggctctatctttgaatgtgcacagagcatctgtagaaaacattttctttgataaggtaggattctcagttctcaagtacttcaagtataattgtagtgtaccttggctgaaatttgaggcaggggcaatgcctaatctcaggaagctcaagttaggtttcagtgcccttggggatctatatggtactgcacctatcaggattggacacttgttaggcctcaaagaaatctcagtaaaaattcatggtgcaagtgtcgacgcagagtctgcattgacatctgctgttagcaatcacccaagcaatcctagaatcaacgtacagttggtggataagattttttatggtgatagagtgacaaaagagaaagatcatgggtctgaggaagaacaaaatgctatcatgagcgccaacttcgatgaatatcatcaaactcaagataaagagtcaagtgatgcgaacaaacaagttggaagtattgtgcctctgccacgggagcaagaacatgggattttagaacatgatgagtatgcaccaaaagacccagataagtacaaacaatctgatatcagaaacattagcattttgtacataaactag

SEQ ID NO: 29059 - DNA, 3919 bp, Oryza sativa
  Clone ID: PAT_MRT4530_3359C.1
atggtctacaccaggactggcaaccgcacgacaggcgagggcagcaacggcgaagaacgcgctgatggtgtgcaccccaacagtgattctggcaatggtccgccaccacttcccgagaatccgacccttgcccaagttatggcacatcaaactcagatgatggcagccatgatgcagcagatgcagcagcagcaccagcagatgcaccagaggatgatgcagcacgccgaacagcagcaccagcagtttggtccccctccccctcagtccaagttgccagaatttctacgcgtcaggccacccaccttctccagcaccaccaaccccatggaggcgaatgactggctccatgcaatagagaagaagctgaatctcctgcagtgcaatgatcaggagaaggtcgcttttgccacacaccagcttcagggtcctgcgtcagcttggtgggacaaccacatggccacccgcccaccgggtactgaagtcacatgggcagagttctgccgtagcttcaggaaggcacaggtgccagacggggtcgtggcacaaaagaagagggaattccgggcgctccatcagggcaacaggactgtgacagagtacctccacgagttcaatcgcctcgcgcgatatgcaccagaggatgtccgcaccgacgccgagaagcaggagaagttcatggcgggtttggatgatgagctgaccaaccaactgatatctggggactacgctgactttgagaggctggtcgacaaggcaatccgtcaggaggaccaacgcaacaagatggacaggaagaggaaggccgctcagttcagggcacatcagggaagtcaccagaggccgcgcttcactcccgggcagcagggtggacctaccaccatgatcgtccgccagcaccgcccgttcaaccctagcaacttccaccagggcaccagtggcagtcaaaactaccatggaagtcagcccaaccgcggtacagctccacgcccaccaatggcaccggcacagtcaggccagcccgcgcaagccaagaaggagacgggagcaaaaccagggtcctgcttcaattgtggcgagcttggccacttcgctgacaaatgcccgaagcccaggcgtgccgggccaaggtttatccaggctcgtgtcaaccacgcatctgcggaggaggcacaaacagcaccggaggtcgtactggtcaccttgaccaacgagaagggagaaacagtggtgtacaaatctctagtctcaccaaagaaaggggtctcgttgaatcagattgagacggaaatcccagtggataccgtagagaagaacttgagaaaattggaagatatacccatagtctgcgagtatccagaagtgttccccgaagacctcactaccatgccacccaagagagagattgaattccggattgacttggcaccgggaaccgctccaatctataagagaccatacagaatggcggccaacgaattagcagaggtcaagaagcaagttgatgagcagctgcagaaagggtacatacgaccaagcacttcaccttggggcgctccggtcatttttgtggagaaaaaggataagacgaagaggatgtgcgttgattatcgcgcactcaacgaggtcacaatcaagaataaatatcctttgccgcgaatcgacgatttatttgatcaactgaaaggagctaaagtattttctaagatagacctgcgatcaggctaccaccagctgagaatccgggaagaggatattccgaagacggccttcaccactcggtacgggctatatgagtgcacggttatgtctttcggacttaccaacgcacccgcattcttcatgaatctgatgaacaaagtgttcatggaatttctggacaagtttgttgtggtattcatcgacgacatacttatctactcaaaatccgaggaagaacatgagcaacatctccgtctggtactcgaaaagttgaaggagcaccagctatacgccaagttcagcaagtgtgacttctggttgacggaagtaaaatttctgggtcatgtcattacagctcagggtgtggcagtcgacccatcgaacgtggagtcagttaccaaatggaccccacctaagaccgtgtcgcagattcggagttttctaggactggcaggttattaccgccgattcatcgaaaatttctccagaatcgcccgacccatgactcagttgcttaagaaagatgagaagtttaaatggacagctgagtgcgataagagttttgaggagctcaagaagaaattagtatccgcaccggttttgatcctgcccgaccagatgaaagacttccaagtctattgcgatgcatcccgtcacggacttggatgtgtcctaatgcaagagggcagagtggttgcgtatgcctcgcggcagttgcgtccacacgaaggaaattatccaactcatgacttggaattggcagcagtggttcatgctttgaagatctggaggcactatctgattggcaaccgctgcgaagtatatacggaccataagagtctgaaatacatcttcacccaaccggatctaaaccttcgacaacgaagatggttggaactaatcaaagactatgacatgagtattcactaccacccgggtaaagccaatgtggtggcagacgctttaagccggaaaagttactgcactgccctatgcatcgagggcatgtgtgaggaattgcggcaggagtttgaacatctcaacatgggaattgttgaacacgggtttgtagccgctctggaggcacggcctacgctcgtggatcaagttagagccgctcaagtaaatgatccggaaatagcagaactgaaaaagaacatgagagtcggaaaggctcgggatttccacgaagatgagcatggcacaatctggatgggagaaagattgtgtgtacctgacgacaaagaactgaaggatctgatactcaccgaggctcatcagacccagtactccattcacccaggcagcaccaaaatgtaccaagaccttaaagaaaaattttggtgggtcagcatgagaagggaaatagctgaattcgtcgcactctgcgatgaagaattggggacccgtttaaacttcagcacggcctatcacccgcaaactgatggtcagaccgagcgagtcaatcaaatcttggaagatatgttgagagcttgcgctcttgattttggtggagcttgggacaaaagcttgccatatgcggaattctcgtacaacaacagctaccaggccagtctacagatggcaccgtttgaagctttatacggccggaagtgccgcacacctctcttctgggatcagacaggcgaacgtcaactgttcggaacagaagtattagcggaagcagaagagaaagtcagaatcatcagggaaaggttgaggattgcccagtctcgacagaagagctacgcggataaccgtcgaagggagctcacttttgaggcaggagattacgtgtatcttcgtgtcactccgctccggggagtacatcgttttcagacgaaaggcaagttggcaccacgcttcgtgggaccatacaaaatcttggaacgaaggggagaagttgcttatcagctagaacttccatccaacatgatcggcatccatgacgtgttccacgtgtcccaattaaagaagtgtttaagggtacctgaagaacaggcggattcggaacacattgatatccaggaggacctaacttatgttgagaagccggccgaggcccagcccggcagccggccgcccgcctccctccctcctggggtcgccgacagggggacccacctgtcggacccgtctcccacctcccgcctctcccgctcgcgccgccgcacccgtaacggccgccgcgcccacgcctccgcctcccccgggccac

SEQ ID NO: 29060 - DNA, 2568 bp, Oryza sativa
  Clone ID: PAT_MRT4530_335C.1
atggtggtggcggcgctgccggacgacgtgctcgcggaggtcctccgccgcctcgcgccgcgcagcctcgccgcgtgccgctgcgtctgcaagccgtggcgcgacctcgtcgacgaccgccgcctgctgcgcgcggacctccttccgcgctcgctcgccggcatcttcgtcaacttccactgcctgtacagctcggagttcttcgcccgccccccggccgccgccgccgccatctccggcaacttcgacttcctgccccccaaagacgagtacgaccagtacaggcaccaccaggtcgagggccactgcaacgggctcctcttgatcaggttccgcgatctcgtggtcaaccccgccacgcgatggtgggatcgcttgcccccgcgcccgctgccgcgcgacgagatggaccgcatcgacgccgcctacctcgtcttcgatcccgcagtgtccccgcggcactacgaggtgttcttgaccccatcgttccgctggaaaagcgaatcggagaaagccgaattggaccccatggtggaggcatcggaatggccaccggaatcatacacactgcccgtcttctcgtcgaggacagggctgtggcaagagaggagtttcatccgtcagggacaagccgcaggcaccatcgccgacatgcgatcggattgggcatcggaccaaaggaatggtgtctattggcgaggagcattgtacgttcattgtcagactaattttgttatcagaatatcgttgaatgatgacaagtaccaagtaattaaaccaccagagtactccggccgctacctcaacttttatcttgggaggtcagagaagggtgtataccttgcattatccagagacaactgtcttaaagtttggattcttgatgaaacatgtagcaaaatgaagtgggagctcaagcatgacaagcacatcagacatattctgcttgggcgcaataatcgacaaggtctcggcccatggattttacaggatatcaaccaccaaaagaatccttatatatatgaatatgatgaaatcattgaagcacccaaccagaagaaggttgaatgtgaacaagcagcattggagaagtttgaatggatctcagacgatgaaaatgttcttgacaatgaagatatagttacaggaggatatcatgaatacattaatatcattgggtttcatccatacaaagagataatatttttagacgaatcgttaaagagagggctagcctatcatttaagcagctcaaaggttgaagatatagaaacttctttgaaaatccttcaatccagagagttggtgacaacgctttctcccttcccaacagatgccactgttagctgcctgatgaacgaggatgccagatgttgggatggagatttgataagatccctcttccctgtggacattgcaaaggagattctacagattcctattagtagacatggtgatgctgacttcgcttcttggccacatgaaaaactgggtttatactctgtgcgttcggcttacaatatggtgcgatcagaagctttctttgcagatcagagcaatagtgggagaggaatggcgtcgagactgctggagagccaaaaggattggaagggcttgtggaaaatcaatgcgccgggaaagatgaaaattattctctggcgtgctgctcatgaatgcttggcgactgggtttcaacttccacggcggcatatcccctctactgatggctgtgttttttgcaacagagatgacacagtggaacatgtcttcctgttctgcccctttgctgctcaaatctgggaggaaatcaaaagaaagtgtgctgtcaaactaggaagaaatgggttctcaaccatgaggcattggatctttgatttcctgaaacggggatccagccatacaaacacccttttggctgtcaccttttggcacatctgggaagcaaggaacaatacaaagaacaacaatggcacagtgcacccccaacgtgttgtcatcaaaattttgtcttatgtcgacatgattctaaagcacaatacgaagacggtggatggccagcggggtgaaaacactcaagccatacctagatggcagccactgccggccggtgtatggatgatcaattctgatgctgcgattttcagctcgtccaggactatgggggtcggggctttgattcgtgataatacagggaaatgcctggttgcttgctcggagatgatcagcgatgtggtgctacctgagcttgcagaagcgctggcgattaggcgggcactgggtctagcaaaggaagagggcctgcaacacattgtcatggcatctgattgtcttactgtaatcagacgcatccaaacttcaggaagggatcgctcaggagtgggatgcgtgattgaagatatcaagaagttggcgtccacctttgttttatgctcttttatgcatgttaaccggttgtccaatttggcggctcattctctagctcggaatgccgagctgtctacctgtactgtgtaccgttctgtaataccggattatatccgggacatactttgtgatgatgttgcttaa

SEQ ID NO: 29061 - DNA, 594 bp, Oryza sativa
  Clone ID: PAT_MRT4530_33600C.1
gaaataatgcttgacaacaatctaattcaagcagggctggtcatgtttacacgcttaccaagctcttaaataatgcatttgatgcaaatattttctatatataattttcctgatatactttttaaagtaacttttcataccaaacaaacatgtgatgtcgctcattcacctttatttgttaatttgatgacttaatgcactatttttctggctcatgccattacatgtgcatagatgcattgtgtttgcatatagaatatatttaaaaagtgcctagatgttgacacaaaacaacaacaaaatacaaggcactgtgcctcagctgtttgactaatgcactattctcgctagagttttggttgcacacattttctgtaggttgatttccttcgtgatttccccatatctcttatgcaaataacataaacaagcataggagcaagtgaataagtagatctactgtcaccccattcgcatgttgtagtggcaagcacaaggaagttagaaagcaggcaacttttatcatacacacaagcatgcaacttcagtgatagccatcgctagccgtggtgggatggcacacttagatgatct

SEQ ID NO: 29062 - DNA, 684 bp, Oryza sativa
  Clone ID: PAT_MRT4530_33601C.1
atgggccgagcttgttgctttttctacatcgccaccacggcgggtggacccttgaggtggaacaccaaggcgggcatggcgctgccctttatgatcacgatgggtgcgcttatcctttttggcgagttccataaggacgttggtggcgcgcttggcggcggtgcagtaggcatggtgccaggagaagcaccggtggagggcgccgacctgcgtgtggaccttgcttgggagtgctggcagcagatctctggcttgcccaatagcttaccctactccgtgattccggggctctgggccgacaactcgatcggaccgaaaccagtggcccgttcggagtttttgaaggcaaatggagccggccaccgcacgcggctgccgctgacagccttggtcgaggaaccccacgccctcctccaccggcctcacggcctcgtccccacgcaccaccgcctccttggctctagcgccgagaccgacgccgccgtcggcagcagcggcgacggcttcgtcgtctccgcttccgctcgcggcggcgtgagccggaccatgtgttcgccgccgtcgcccggcgccgacgccatctctacttggtgctggatgactggaaggaggggtacagcctacacaaagctcgacttcagccatgtctccggcgacgacgccaccagttgcgccgacgtgtga

SEQ ID NO: 29063 - DNA, 174 bp, Oryza sativa
  Clone ID: PAT_MRT4530_33602C.1
gaacaactccagcatgtagaaaggcctgaagcaaaaatggcgatctccagcctacatgccaccagatttgtgcgatccccatgcacgaccagcacaggctagaaggccgaatcaggtcgttttctacgcatttttttgcaagggggggggtcgcacagggtacggtggagcaaa

SEQ ID NO: 29064 - DNA, 525 bp, Oryza sativa
  Clone ID: PAT_MRT4530_33603C.1
atggcgatcaccatgacgatcaccgcgaagctttgcgacctcgacccaggatttgctctcgttgttgaaaactcggtgattccgctccttctagatattccatgccgtgagggtcacaattgcatcgaaccctcgttgctttcttttttcgatattcgctctgcagttacaccaccaagccacgaaggaatgctgcgcaaatgggagcaggttcggcctcccaatgacccaaaggatgagccaccaaagctgtcgggatttagggcagtcaatgaggatgtgatccatggattcatcgcattggctgcaaaggacgcagctggccgggtgtggcaaccctctgctccgcaaccgatcggctgtccagcagctgcgacggatggcgagccaggcgaagtatcagcagcgagggggcgccttactcttccagaccggttcctcggggaatgtttgccgaccatggaagagtgcaagtggtgggataagggcgtagactgccggggccaggcttcgcacgctgagtga

SEQ ID NO: 29065 - DNA, 186 bp, Oryza sativa
  Clone ID: PAT_MRT4530_33604C.1
atggtgcgtgcagcgtgcctctccttcgtaaccaagctcggcgggtccccctcatcaatggcgaacggcagtggcatgtgtggtgtgccccttctctttcctcggtcgagatctgtcccccaaccccaagcagcatgggagaaatctgagtccggcaacaatcaacttcttactcttgcttcctag

SEQ ID NO: 29066 - DNA, 656 bp, Oryza sativa
  Clone ID: PAT_MRT4530_33605C.1
cgtgcgaagcctggccccggcagtctacgcccttatcccaccactggttcgcaacaagagaaccgtgatggaggccctggcaaaccatacttggatcaatgacatcagggggggaattggagtggacgccgtgatccaaggaaatgggaaagctcgggacgatactccgccaaatctgcctaccttgcactcttccatggtcggcaaacattccccgaggaaccggtctggaagagtaaggcgccccctcgctgctgatacttcgcctggctcgccatccgtcgcagctgctggacagccgatcggttgcggagcagagggttgccacacccggccagctgcgtcctttgcagccaatgcgatgaatccatggatcacatcctcattgactgccctaaatcccgacagctttggtggctcatcctttgggtcattgggaggccgaacctgctcccatttgcgcagcattccttcgtggcttggtggtgtaactgcagagcgaatatcgaaaaaagaaagcaacgagggttcgatgcaattgtgaccctcacggcatggaatatctagaaggagcggaatcaccgagttttcaacaacgagagcaaatcctgggtcgaggtcgcaaagctggagggggaggaagcggccctctggca

SEQ ID NO: 29067 - DNA, 1482 bp, Oryza sativa
  Clone ID: PAT_MRT4530_33606C.1
cgctcgaccaggtgccccgatggagcgaccccgaccagcgcctgtacgcgccttcgtcctcctccgccgcggccgccggaggtgtggaggcagggcgagggtggcaggatccgagcccgccgcgtccgcgttcctctcgttctccgaccccctcaccggcgacgacggcggacgggtcaccggcggcggccgcggcggggcctcgaggttccccgtcgaccacgagatcaactccaggatctacctctggaggggccacccctggaacctggaggtcgacgctgtcgtcaactccactaacgagagcttggacgagtcgcacagcagtcctggtctgcacgccgcggcaggatcggggctcgcggaggaatgctccaccttgggaggatgccgaactgggatggcgaagatgaccaatgcttatgatctgcctgcaaggaaggtcattcatacagtcggccccaaatatgctgtcaagtatcacacagctgcagagaatgcacttagtcactgctaccgttcttgtttggaactcctcattgaaaatggccttgaaagcattgcaatgggctgcatttacacggaagctaaaaactaccctcgtgagccagctgcccatgtggcgataagaactgttagacgctttctggagaaacaaaaaagcaaaattgctggtgttgttttttgtactgtatcatcatctgatacagagatatacaagagattgctcccactatatttccctcgggacaggcaagaggaagagattgcggtatcaaaacttccagccgatgttggggatgagaatggtgaaacagtaattgatgaaaggaaaataactgcaggacctcggcccgcgggtgcaacagacagagctgcaactactgctcctatagatcttccttttgattctggtttggcatcgaagaggagttctttcaagttggattcatatctggatccttcatttatgtcattaattaaagacccagatctgaggcgcaaggagcagtgggaaaaatctgctcaagctcaaaagggatttaattatgctaagttgcttggatatggagatctagcttgcccttcattatccgccgcagaggaatattcacttcattcaagataccttgctaaagcaaattctcttaatctttccagagattgctgaaatgaaaataatttatcgaggtggagttgacagtgaaggacgcccggttatggttgttgttggtgcacactttcttcttcgctgcttggatcttgaacggtttgttctacatgtagtaaaggagtttgaacctttgattcagaagccatatagcattgtctatttccattctgctgcatcattacaaccgcaaccagatttaggattcatgaagcgcctacaacaaatattgggtcgtaaacatcagcgcaaccttcatgccatatatgtcctccaaccaacgttgggtttgagaacagctattctggcaa

SEQ ID NO: 29068 - DNA, 1846 bp, Oryza sativa
  Clone ID: PAT_MRT4530_33607C.1
atgcgcaggggcggggtgaaggcggcggcggcggccgagaaggcgcgggaggcggcgcgggcgaaggtgtgggcggcgcgggcgagcaccaccgtggtgctctggctgtgctgcgcgctgctgctcgcgacgtcgcgggagctcgggaggtggtcgggctgcctcacccagccgctgatcgtcgtagagcgccggttcgaggcggttgccgccgcgggcagcgagagggcggctgcatcagcatcggcagcggcagcggcgcgcggcgagagggcagaatcatcagcatcggaagcggcggtggcggcgctcccgccgaagagaatctacaagaacaatggctatctgatggtctcctgcaacggtgggcttaaccagatgcgagcagctatatgtgatatggtgacgattgcaagatacctgaacgtcacccttatcgtcccagaactggacaaaacttcattttgggctgatcctagtgagttcaaggatatatttgatgtggattacttcatatcatcattgagagacgaggttcggatactgaaagagctgcctccaaggctgaaaagaagagttgaactgggatatgttcgctcgatgccacctgtcagttggtctgatatatcttattaccaaaatcagattctaccactgattaggaagtacaagatcgttcatctgaacaaaactgatgctcgccttgcaaataatggcctacctatggagattcagaaattgaggtgccgtgtcaattttgctgcattgagatttacccctgagatagaagagctgggtaggcgtgtggttcgaattcttcgtcgtaatggcccttttctggttcttcacttgcgatatgaaatggacatgctcgcgttctctggttgcacacatggttgcagcaacgaggaggctgaggagctcacaagaatgagatatgcttacccatggtggaaagagaaggtgattgactcaaatgcaaagaggaacgacgggctctgtccattaacaccggaggagactgcaatggtattaaaggcactagacattgatagcagttatcaaatatacattgccgctggtgaaatatacggtgggcaaagaagaatggctgcccttacctcagcttatcccaatgtggtgagaaaagagacattattgccttcagatctcaggtttttccagaaccattcctcccagatggcagcattagattacattgtatccttggagagtgatatttttatccccacttatgatggtaatatggcaaaagttgttgaaggtcatcgcagatacttgggcttcaagaagactgtactgctagataggaagcttatagttgagctcgttgatcagtacaaaaacggcacaatgagatggaaccatttctcctccgctgtgaaggcgtcgcatagcagccgcatgggcgcgccatcaaggaggcagatgattcctgacaaacctaaggaagaagactacttctatgcaaatcctcatgagtgtttgcaccaaccagaagagctatcagttttgtgacacccctcccactatacagaattacacattctttcaggattatattacagattgaattggcaataaatggaggcccagttgtattgatgaataaaagcacacgagatgagagaatttggcctccttttgctaggtgactgttacataacatacacgttggcataattttttgccgttttctcccaaaaataagcatgtaattttgttttgtaaatataagcatacatgctcacaggtgttgagttgttcgtacatatacatacggatcaagacttgtcaaaattcttccaaaaaaaaaaaaaaaaaa

SEQ ID NO: 29069 - DNA, 107 bp, Oryza sativa
  Clone ID: PAT_MRT4530_33608C.1
acaggaaactgtttcataaatgtaacatatcatacggacttgatgggtcattaaaccaggacccaaggtagacatcagcacccaccaagtactttgacgtatcagag

SEQ ID NO: 29070 - DNA, 380 bp, Oryza sativa
  Clone ID: PAT_MRT4530_33609C.1
cccactcgtccgggacattaaactagccgcataatgagccaggacgtgcctatgatcggtgctatgtgctatgctttgaggcgtacagtgatgcaactggtgcagtagctgctctggaggccctccacgactaccggttacacgagaggaaacccgataccgttgttcttaatatcaaccctgcacggtcgccttttcggccggccgatgacccgcgagacgatcgcttacgccgtaccttgcactgcttactacctaccttactatcctcctcccctccctgcccccaccctgcccctagcattgcttctaccaaatctagaaccatctccgccccataatactcgggccttacctcactgctttggtgtgcggtgacg

SEQ ID NO: 29071 - DNA, 181 bp, Oryza sativa
  Clone ID: PAT_MRT4530_3360C.1
ggattaccagttgctggagttggaaaggttttcttggagtatgcagatgtggacggcgccaccaaagcaaagacggcaatgcatggaaggaagttcggtggaaatccagcggtagctcttgtcaccggagacgaaggagaatggtgggggcgaggacacctcatcagtctgtccctctggc

SEQ ID NO: 29072 - DNA, 985 bp, Oryza sativa
  Clone ID: PAT_MRT4530_33610C.1
ggagtagatagctaggaattaattaattaagctaaggatgatgaagaggttctactcgtcgatcgggcagggggtggaggcgctgcaccggagtctggcggtcggcgaagtggggttcatgtcggcggcgttcgtgcagcaggctgcggcgctggtgcggtcggtgcacgcgcagctgctggaggtggtggggaggctgcacctgccggcgggggagaggtggctggacgagtacatggacgagacctcccgcctgtgggacgcctgcctcctcgtccgcgccggcgcctccgccctccacgcctactccgccgccgccgcccacgccatccaccacctctacgaccatgacgacgactacatccacgccgcccgcgccatcaacgcccctcgccgccacgccgccggcctcctccaggacaaccgcgccctcctccacgacaacatcctcgacccggcctccctcctcctcctcgaccaccgctccccgagggacctcaacctcaacgccttcaacggcttccgcgccctcctctacgccctccgcaacgccacctccttcctcctcgccatcctcctctctgccaccgtctcctcctgcctccccgaccacctcatctccacctgcactccccttcccctgcccaccgcacccggctacgcctcctccatggctcgcctccgccaccgcgtcgcccaggagatgcgcgccctcgccgcccccgccgccgacggcatcctgatgtacgagttccgccaggccagggccgccatcgacagcctcaaggccgacctcgacagggtcgtcgccaccggcaccggctacgcccaccgggaggacatggccgagagggcccacctcgtcaaaggctgcctcgccatgctcagctccggcgccgaggccgtcatcgccgagctcgacgacttgttcgatgacattgtcgagggcaggaagatgctctccgacctctgcagccatcgctga

SEQ ID NO: 29073 - DNA, 1075 bp, Oryza sativa
  Clone ID: PAT_MRT4530_33611C.1
cctctcctttgttcttcaacgcaaacttagtctgaccttgtgcacctgcaaataatgcatagcacttacacagatacaacctactatatcacttgtggaccatttacaagaacatatacggttctcggaaaactagcccaagtggagataagcataatagacaccatccacccaaggaacaatggatgaaacccaagaagatcatacaaatcacacgactttgccagattccaaccaagtggatggcacatcattttcccaattagacaacaagcgcaagccttttccatgaacgaaaggaatcattctcaggcaactaaatattctagtccatccccctttcactagagtactttctccattttattttcttacttttcgagtgattccgtcagacaaatcaacaagaaagtggctgccaaaccagtgatctagtccaataccaccagacctcaagctaagaaaacgacagcgccactgctgcttcttccacagaagagcaagcagacagactaacagttcaaaacaacatgaacagcagcgaaatgactagatctgcagttcaacgggggcatactgcatctaataggtaaaaaaacgatagatcgatgaaccgaattagctcgaaaggggaacagctatgcgtgcatatttcgtgtgaataatcaaatacaggcttcctccacgcagatctcgagtcttcactacagtccccaacacgatctccagtaaacatggcaagaaaataaaacgaggtgtgtttagttccaaagtttttttccaaacttctaacttttcccatcacatcaacctgtcatacacacacaaactttcaatcacatcgttgcaattttcaaccaaacttacaacttcggcgtgaactaaacacagccacatctcacagtcaccaagaaccctaaactttcgcatcagatcagacctcgaaccccacacagccataccctccaaccctagatctaacacgattccaaacaaaaacaacagctgcagatccgtaccgagcaatctcaaatcgaagtgcaactgcgggaaagatcaagaacgaacactccac

SEQ ID NO: 29074 - DNA, 183 bp, Oryza sativa
  Clone ID: PAT_MRT4530_33612C.1
atggaaaaacaggatactggagatggacggcagagggagccaggctggcgttggacgcgaacccaaggcggcgacgtcacctggagtcgaaagaagacggcggcgctaacgggagtgaggagaggggacgatgaacggatgaaggccgagacggcgtcggcgcgctgcacgttccgaggatga

SEQ ID NO: 29075 - DNA, 213 bp, Oryza sativa
  Clone ID: PAT_MRT4530_33613C.1
gcgggatgccgtcaacattcatgatggactacctggcaaagaagtgagaggccaactgtctcagcagcagtcatgtttcatccatcggtatcagaaatgtagctggatggatggtttcagattcttacctttcttctcgtttacctctgtggcaggtttgggatcacaacatcccagatatgcatggttggtgaccgtttggataccgacatc

SEQ ID NO: 29076 - DNA, 309 bp, Oryza sativa
  Clone ID: PAT_MRT4530_33614C.1
aaattattggggatattttttttatgatatttaatattttataattttttttttattttatacaaaattttttttttttttgcaaggaaagaaccaaactgtggttgtaacggaaaatttcttagcacaaaactaagtttgttaactgtgcactaatcatgaagcaccattctacaatgataaaaaggggtcatagatccaatctgatagaaattgaatttttttgacaatttcacagatctttggaaaataaaacttaacatttgaaaccttgagaacctaatgatgtcgaaaaattaccaaaatttt

SEQ ID NO: 29077 - DNA, 2078 bp, Oryza sativa
  Clone ID: PAT_MRT4530_33615C.1
atgatgtactataggagagctttgaagcttcaagcgttccttgacatggcttctgaatctggatataaagcagttgcagatccagcagaggaggagaagaaaagccaaagatctttgtcctctcaactcgaggctgtagcagacatgaaatttacatatgttgctacttgccagatatacggaaatctgaaacaagctggtgatcggcgtgcaacagatatcttgaacttgatggtgaattaccccggtctgcgtgtggcatacattgatgaagttgaagagagggatggtgacaaggtgaagaaggtcttttattcagttctagtaaaagctctcgacaatcatgatcaggaaatataccgtataaaattgccaggaccagcaaaattaggtgaagggaaacctgaaaaccaaaatcatgcgatcatttttacccggggtgaagccctccaaactattgatatgaaccaggacaactatttggaggaagctttgaaaatgcggaatttgctggaagaattcaacgaaaaccatggtgtccgtcaacccacgattcttggagtgcgtgagcacatatttaccggaagtgtgtcgtcacttgcatggtttatgtcgaaccaggagaccagctttgtgacaataggacagagggtcctagctaatccattaaaggtacgatttcactatggacatcctgatgtgttcgacaggatttttaacattacaagaggaggcattagcaaggcttcctgtggtataaatttaagtgaagacatttttgctggtttcaactcaacgctaagacgtggaaacgtcacccatcatgagtacatccaagtgggaaagtcgatggttgtcataatagtgtatgttttcttgtacggaagactttacttagcattaagtggacttgagtttgcaattatgaagcaagcacggatgagagggaatcgtgcacttcaagcggctatgggatctcagtctattgtgcagctaggtcttttgatggccttgccaatgtttatggggattggactagaaagaggtttcagaagcgccctgggggatttcataatcatgcagcttcagctctgttcagtgttcttcactttctaccttgggaccaagtcacattattttggccgcacaattctccatggtggtgcaaaatatagagcaactggcagaggttttgttgttcgccatgtaaggtttgctgagaattacagaatgtactccagaagccattttgtgaaaggacttgagctgatgttactgctagtagtctatcagttgtatggtgatgttgctacggattcgactgcctatatacttctgacatcatcaatgtggttcttggttatcacttggctattcgctccattcctcttcaatccatcaggatttgagtggcagaaaatagtagatgactggaccaagtggattagcagtcgaggtggcatcggggttcctgctaacaaagcttgggaatcccgaagatcaacgactacaccttggcagcagaaggccttcactaagcttcttggacttcaataccgacgcaagggagccaagaatggagcagctgatgctttgtcccgacgcagccatagagtcgatctcgcagataggcggaggtacgattgcttgctccttgcatgtgaaggtgggaaacaaggaaacagaggaaatgcttactgggacatagccttcgtcctatgcatagtcagtactatagcctcactagtcctcgtcgaggaatctccttgccgccctagaagtttgagatcgtgcccgaccgttttggagtctgttcaggagctccttcagcgcccggggattgacgtcggactggagtcggctcaacatgaaatcaagcatggtgcgatagtcttcttcatggagctcctctccattcttcagagtaatatcacgcaatgtgtccagaatctgggcgtgacaggcgcgggccttttgtagagaactttcctttcaaagagagagaggtcgtccctcccaagaaaaagaaggagggttctgttctgcttccgcggccgcaagcttattcccttatagtg

SEQ ID NO: 29078 - DNA, 630 bp, Oryza sativa
  Clone ID: PAT_MRT4530_33616C.1
atggggccggatgtctccatggccgtgtgttgcgcctttccagtacttgtgtctttgcttcttgtccgcttcgcatatgtgatgtatcacagcggtcacatgccttcgaaactctcagcttcagctgctggaatgcggtctctcatcgtccttgggtctggaggacatactgcagaaatgatgaatgttgtaactacacttcagaaggatagatttactccaaggtactatgtagctgcacttactgacaacatgagccttcagaaggcacaggtctatgagcagtcattggttcgggttgaggttgataaagaagagggtgttgagaatgcacagttcgtacagatatatcgcagtcgtgaagtaggccaatcttatattacttccatcgcaacgacattgcttgctacgtcacatgctatctggataataataagaataagaccacaagtggtgcttggtttgggatggtcctccattttctacatcgaaagcattgcaagagtgaagaagctttcattaagcggtttactgttgtacaagctacgaatagctgatcagttcttcgtgcagtggccccagctgcagcaaaaataccctcgagcatgctatgccggccgtttaatgtaa

SEQ ID NO: 29079 - DNA, 405 bp, Oryza sativa
  Clone ID: PAT_MRT4530_33617C.1
atgggaaaaacaaaatcttttttttcatttttttaggggacacaacaccaactggatcattatttgggggaactaaacccattttccccaacccaaagacaacgaacttggtggccacaaatccatccaaccacaattaaccactgttaagctacgggcccccactttacttggcggggaccaagttgggggggtacccccaggcgttgttgttgacggggccggcgagggggccggcgaggttctcgggggggcccttgccggggacaaaggcctggacaaaaaagccgaacatggggaacatggggggggggccggtcttgaaccccttcaccttgagctccgggaacgccttggggtcatcggcgaggcccagcgggtcgaaggggcccccggggtagaggg

SEQ ID NO: 29080 - DNA, 177 bp, Oryza sativa
  Clone ID: PAT_MRT4530_33618C.1
atggcttgcggtgttgggaacgcgtgccggcgtatggggtgggggccgcgggatccggcagaatatgcggaggatccgtttcggctgcggcgcggtctgcgtctcggcacggcgcgcgggagcggggcgtctggccacgtcgcggtgcacccaggctgcttcacaatttcactttag

SEQ ID NO: 29081 - DNA, 264 bp, Oryza sativa
  Clone ID: PAT_MRT4530_33619C.1
atggcggggtgcggcggagacggcgccctcccaacggcggcgtcgacagcgtccgcgctccctctcccgctctccttcctgtctcgctggcacggtgtagcgacgacggctgttggagggcatgcgggggcggtgttggaggaggaggagcgcggatcgggtccggcggggctgtggctcaggcggcgtggagcggcgatgttggcgtggatggggccggcggcagttgaagaggacagcgacgagaaggaggaggctatttag

SEQ ID NO: 29082 - DNA, 531 bp, Oryza sativa
  unsure (1)..(531): unsure at all n locations
  Clone ID: PAT_MRT4530_3361C.1
cttctcttcttctctctttttttttttttttttttttttttttttttttttttaaaaattcaccagaaatttccttcaacattttactttaaaaattttcctttcccccaagctttaaagcttaaaaaaaaaattttgaagtggtgggggggttgcccccgtgggggtaaggggaaaatttggcctccaaggtcgtgggggggggggatccggcctccaaggtcgtcgggggggggggatccggcctccccaacttggggggaacgggtttgggccgtcccttatttaggggagcccacgggggggggggggnnnaannnaanttagnngnnannggaggagggagagggaaaaggaaancccaccgccggacccgnggcccaccaccgaagcgggccccggncctttcccgggcgatatggttgccttttgccgaaacaagccgcggccctttccccgccgttgttgttgcccaaaatttggcaagagggcccaaccgcccgcctttggggaaaggtggggggaaaaagg

SEQ ID NO: 29083 - DNA, 170 bp, Oryza sativa
  Clone ID: PAT_MRT4530_33620C.1
aagagaaaaaaaaaaaaaaaaacaagaagaaaaaattttcgataacaaggaaaaagcaaccttccgacacaatcaggttacctgcttgagtgactgcttggactactcctcctatacatgcaggctacaaagcatagaaaaaatgggaataactaaagatcttttattaa

SEQ ID NO: 29084 - DNA, 2059 bp, Oryza sativa
  Clone ID: PAT_MRT4530_33621C.1
atggcgagcctagcggcggcagagagccacgagggcgccggtgacaccaacgacgggaacacagatgacaccacgagtggtgacctggtcgaggccagcccgtacaggcccataaagcagacaagcccaaacaccgcacttgacaatatctccggctctccgctccgctctatcgagtatcggataggaaggaaggagacggcggcgctgcgagagatggaggtggcgggtgctcaggccggcatcctccccctcctcctccgtcaccccgcgtccctccggggctccctctccctctcctgcggcggcgcccgccggagctgggcggcggcggcggccacggcggaaggaggaggaggagaggagggtcgcggctacgagagggtgcccatggacacccccggcgcctaccgcctcgtcgaccgggccaccggccgcagcgtcatcgtgtggggcggcaccgacgacgtcagcatgccctcccccgcggcgatggcatatcgacctgtcttggaggggaaaagctgcattattggtgatcaaagtggatctggcaagacattggcatatctttgcccagtagtacaaaacctgaggaaggaagaagttgaggggctccataggtcttctcctaggaacccacgagtggtagtactgacgcctacagctgagcttgcttctcaggtattttacaccttgaatgtgatcctgccaatgttcagtgattgtttttatgccaaattaggaaaagctggagtgctcattggaacatttttaatctctcagaagacacagttagaaagtcttgatcaagagcttgatgtacttattgcaacacctggtcgtttcttgtatctgcttcaagaaggctttgtgcaattaaataacctcagatgtgttgtgctggatgaagtggatattttatatggtgaagaaagttttgaacaagtgcttcatcaattgattactgttgcaccactgaccacgcaatatctctttgtcactgccactcttcctctcgacatctacaacaaggttgttgaaacatttccggactgtgaactaatcatgggaccaggcgtccaccgaacaagctctcgtcttgaagagattctcgtggactgcagtggagatgacaatgaggaaaagaatccggagacggcgttctcaaacaagaaatcagcacttgtaaagataatcgaggaatctcctgtccgtaaaacaattattttctgcaacaagattgagacatgcagaaaggttgagaatgcgctgaggcgggtggacaggaaggcttcgcagatcaaagtgctccccttccatgctgcattggatcaacaacagagaatcgccaacatcaaagagttcctgaacaagcagacggctgactcgatgttcctggtgtgcacagatagggcgtcgcgaggcatcgactttgcgaacgtgaaccacgtggtgctgttcgactacccgcgcgacccgagtgagtacgtgcggcgcgtcggcaggacggcccgcggcgcgtcgggcaacggcaaggcgttcgtgttcgcggtggggaagcaggtgtccctcgccaggagggtgatggagaggaacatcaagggccacccgctgcacgatgtgccatgcgtctagtcctagaaagagctctacagagcagagacagtttcaggtcaaatttgtgctagcatacatagcaccatctaatattgatgtagatagggtttgtgaaaccggttttgatgcatacacatatgctgatcgagtgaattagcatctgtctgtctgttttagaatggtgatgcatattggttcatacatacattcatagtgctagtagtagtaaatttcagtcgctgaccaactcacaagtggtgcagctgctgctgcttgctgtaaacgatggaatgtgcaattggttactacactactaactgagatgagactgctgctgctaaaaaaaaaagtggagctggtgctctccacgaccacgcgcgtacccgacccgccaaaagaaaatgggagaagtacaagcattggaaattttggcagactc

SEQ ID NO: 29085 - DNA, 209 bp, Oryza sativa
  Clone ID: PAT_MRT4530_33622C.1
atgcctggcctccctaggccagagacccccaaccgggctccccagcgcctatacctcacccgtggcgcgagcgaaaccaggactgaacgcttgcccaccgctactgcacggccgatacactcggccctcgagccagaacctaggtcggcctaccgttctatgcgcgtccccaccttagtgtgccgtaccccgccgacctcccgtaggaa

SEQ ID NO: 29086 - DNA, 714 bp, Oryza sativa
  Clone ID: PAT_MRT4530_33623C.1
atggcgtcactatgccgcccggcgccagcgatccatgcattcaccgccgtgtgcgccctcccaccgcccgctctccacgcctgccgtccgtcgccgctacaccacaacaccgtgcgccgccactgcgaaccattaattccgctcgcagccatcgcacttccacgccgcgcgccaccaaccgtccctggatgctgcacacaggtggtgccggcccaaccccagcgccgccgcttcccaaggtgtttcacgcctccggcgccgtccttctcggccggagtcgcgcctgaacctgcatattctcggggaaagctctaccgactgcctcacgatcccctccacccacgtctccttccacgaccatcgctggcccacgaatgcgttggcaaaggtggcgcagcccctgcccaagacggatttcagccgtgccgcccacgtcctgggcgggatccaccttcactcgtggggctcgcctgttccaccaccacccgtgacggttcaaccctcgctgtcggcctgccgctgaccgggaagggagcaatccgcgtcgccggcgaccccaaattcatgaatacaactttgggcaactttgagaatttaatcaagaatagattttgggacactggatgggcttcgatattcgtgctccacgccttctcctccaactctagcgacctcctcttcttctttggtgccggcgaggaccctacgggttag

SEQ ID NO: 29087 - DNA, 258 bp, Oryza sativa
  Clone ID: PAT_MRT4530_33624C.1
atggcggccgaggatatcacggtctccggggcgattggtgccgagcaaaagccgaacctgctcgaaattcggttggcaattgattggggagtttgcctgctcggtttgctttgcttcgctttactatttgcttgtgcgagtgcgacactggcctaccacgagagcgtggcccggccgctggcctgcctatcccagggaagagcggagctgccgtgcgtggcaggcaggcagggccggccgtgctacttgaggagttga

SEQ ID NO: 29088 - DNA, 214 bp, Oryza sativa
  unsure (1)..(214): unsure at all n locations
  Clone ID: PAT_MRT4530_33625C.1
gagagaggaggagaaaaaaaaatcgcagcagcaaaccctcctcctnngncatccgccgncttccctcctcccccacgatctccggcggcggcggcggcgatggcccgnaagaggaagacggacgcgnngncgtggctggacgaggccgaccggacggtctantccaccttctncggcgccgcaactncctnttccagctctacacccaggtcat

SEQ ID NO: 29089 - DNA, 264 bp, Oryza sativa
  Clone ID: PAT_MRT4530_33626C.1
agccaagagccgagcggcggcaacggcacgtgtactctgcacagtgcgctaacatactgtgactggattcgacggcaacctgtcagacataagcaaagatctgcttatgtaccaccgtctgcaccatctacagctggacccacacgaagggcgcctttaatgaacacatactaggcatcagtgcttgatacagaactatagcgctcgactacgaaccaattgcagcgtcctgacacacaactccctttgtgtatagtgaaaccc

SEQ ID NO: 29090 - DNA, 496 bp, Oryza sativa
  Clone ID: PAT_MRT4530_33627C.1
tttttttttttttttttttttttttttttttttttttttttgggttttttttttttttttttttttttttttttttttttttttttttttttaaaaccaaaacccaaattttatggccggtccccccgacggacaaaacggacaggaaaagggggcaagaacaatggccccggccaagaagggccaaaggacgggacaaaagcacccccggcccttttttttaaacaagggaaaaaaacccaaaaaaggtcaaacgggaaaaaaaaatggcctgggtttggcccccacccaaacaaaaaaaattggggggccggaaaaacaaattaaaagcttacccaggggggggtcccggaagccgcccccggggggggaaaaaaggccccccccgggcccccttccctcgggaagggaaaaacctccttttttgcccccatgcccggaaggtccgcacaaacatgagggcctcatagaggggggccccccccccggggggggg

SEQ ID NO: 29091 - DNA, 318 bp, Oryza sativa
  Clone ID: PAT_MRT4530_33628C.1
atggcggaggcgccagtggaggagatcgagggccggagctcgcagagaacgacaaccagtgccgcggcccccgtcgaacatgctgttcctggcgacatagcagtctcgtcgtccatccagcaaaaagtggcggcggcgaccaggaacggcggcgtgctcggtggggccgcggcgctgttcgtcgtcctccgcgagctccggccctcgatctcctccatcgcccgtgacccgcgcgaaaaatttgataatttgacactttttttcgttgcccaattatttaaattggcacttgtgaggatgataagtgggaccatctga

SEQ ID NO: 29092 - DNA, 799 bp, Oryza sativa
  unsure (1)..(799): unsure at all n locations
  Clone ID: PAT_MRT4530_33629C.1
tttttttttttttttttttttttttttttttttttttagatatangacaagcgctgcagggaatcatgacacatgcttgccatgtattgatattgcatcacgtttgagattaccacatactgtatactatcccaaaggtaaataacaggagaacttttctggctttcttaaatgaactagatgttcgttcttttaaagggaagtaacaaagaagcacaagtcaggcaaacctaaatgaaatatttgaaattaaggttgttaatttacatctgctcttcttatctgcagatacattagtgagcaattcagtgaaaactgtattatacagagctggcatctacaagataaatctagtcaaacagatgattaggaaaaaaaatcaccaagggccacaagttacggctatctttaccttctacaagttgaatgtgtaatcatcggtgttctcggattggtggctgaagttgctttagccgttgaacgacctgcttcatagttggtcgtacagagagtgaatcaacagtgcacatcactgctaaatgcaatgtctctactaagtcatcatgcggacccacatcccacaggccatcaataaagaattcacgagcgcggccttgacgaagaagcatgcaagcccaagcaactatgttaaacccattaccataaggagaaaatgacggatccaaggctttcttgtctgatattaactccatcagtacaacaccatagctatacacatcggctttatctgaaacacggcatgtcatagcatattctggagcaacatatccaaaagtcc

SEQ ID NO: 29093 - DNA, 5160 bp, Oryza sativa
  Clone ID: PAT_MRT4530_3362C.1
atggcggtcgaggcatctggaggcacagcagatcacgcctgtcaggaggcagcctacttgatgatggccagactacgggagcgccacaactacatcttccacgacacggcgtaccgctaccaccccagtcgagccaacggtgatggcgtcagctccttccgtccgacagctggcgagaacgacaccaccttcggtcacatgtgtgctgtgatgaggggattggacaggatgcactcggacctgcacaaggcgaccaaggccttgaacgatgggaagctcatgaggatcgtcgctttgaaggacgagatagcgcgcctgaagaaggagaacgctcagctaaagggtcttccagcgccaggaggagtccggatccgcaccacgccccgcaagacgacgacggcacccgtgcgcatccagcttgcacccagaaacccacctccagcagcagctcccgcagcacctccagttccgcccgcagttcctgcagctccagctccagctccagctccagctcccgcgtccgctctctccttcgctccagcgtcagccgccagaggtccagccagtggcaccgggggttggttgtctgctactcccagtggcagccgcgatctcagcagcagcagctccagtggctcgcagtcaggcagcggcgagacgtatctgccaggctccaggagtcgctcagagggacctggttgtttgtttgggtcagacgacggtcgatatcatgtgcctatgatggtctacaccaggactggcaaccgcacgacaggcgagggcagcaacggcgaagaacgcgttgatggcgtgcaccccaacagtgattccggcaatggtccgccaccacttcccgagaatccgacccttgcccaagttatggcgcatcagactcagatgatggcagccatgatgcagcagatgcagcaacaacaccagcaaatgcaccagaggatgatgcagcacgtcgaacagcagcaccagcactttggtccccctccccctcaatccaaattgcctgagttcctaggagtcaggccacccaccttctccagcaccaccaaccctatggaggcaaatgactggctccatgcaatagagaagaagctgaatctcctgcagtgcaatgatcaggagaaggtcgctttcgccacacaccagcttcagggtcctgcgtcagcttggtgggacaaccacatggccacccgcccaccgggtactgaagtcacatgggcagagttctgccgtagcttcaggaaggcacaagtgccagatggggtcgtggcacaaaagaagagggaatttcgtgcactccatcagggtaacaggacggtgacagagtacctccacgagttcaatcgcctcacgcgatatgcaccagaggatgtccgcaccgacgccgagaagcaggagaagttcatggcgggcctggatgatgagctgaccaaccagctgatatccgggtactacgctgactttgagaggctggttgacaaggcaatccgtcaggaggaccaacgcaacaagatggacaggaagaggaaggccgctcagttcagggcacatcagggaagtcaccagaggccgcgcttcactcccggacagcagggtggacctaccaccatgatcgtccgtcagcaccgcccgttcaaccctagcaacttctaccagggcaccagtgacagtcagaaccaccatggaggtcagcccaaccgcggtgcagctccacgcccaccagtggcatcggcacagtcaggccagcccgcgcaagccaagaaggagacggaagcaaaaccagggtcttgcttcaactgtggcgagcttggccacttcgctgacaaatgcccgaagcctaggcgtgccgggccaaggtttatccaggctcgtgtcaaccacgcatctgcggaggaggcacaagcagcaccagaggttgtactgggtacgtttcctgttaactcaatccctgcaacagtactttttgattctggtgcaacgcattctttcatctcaaagaaatttgtcgggatgcatgggttaataagagaggaacttagcacaccgatgcgggttcataccccagggaatagctccacttcggttcaattcagcccttctataacaatagaaattcaaaggtcaccggttctagccaacctcatccttctcgaatccaaagacctagatgtcattcttgggatggattggctgaccaagtttaagggagtcatcgattgtgcgaatcgcacagtcaccctgaccaacgagaagggagaaaccgtggtgtacaaatctctagtctcgccaaagaaaggagtctcgttgaatcagattgagacggaaatcccagtggacaccgtagagaagaacttgagaaaattggatgatatacccatagtctgcgagtatccagaggtgttccccgaagacctcactaccatgccacccaagagagagattgaattccggattgatttggcaccgggaaccgctccaatctataagagaccgtacagaatggcggccaacgaattaacggaggtcaagaagcaagttgatgaacagctgcagaaagggtacatacgaccaagcacttcaccttggggcgctccggtcatttttgtggagaaaaaggataagacgaagaggatgtgcgtcgattatcgcgcacttaacgaggtcacaatcaagaataaatatcctttgccgcgaatcgacgatttatttgatcaactgaaaggggctaaagtgttttctaagatagacctgcgctcaggctaccaccagttgagaatccgggaagaggatatcccgaagacggccttcaccactcggtacgggttatatgagtgcacggttatgtccttcggacttactaacgcgcctgcattcttcatgaatctgatgaacaaagtgttcatagaatttctggacaagtttgttgtggtattcatcgacgacatacttatctactcaaaatccgaagaagaacatgaacaacatctccgtctggtactcgagaagttgaaggagcaccagctatacgccaagttcagcaagtgtgatttctggttgacggaagtcaaatttctgggtcatgtcattacagctcagggtgtggcagtcgacccatcgaacgtggagtcagttaccaagtggaccccaccgaagactgtgtcgcagattcgaagttttctaggactggcaggttattaccgtcgattcatcggaaacttctccagaatcgcccgacccatgactcagttgcttaagaaagatgagaaatttaaatggacagcggagtgcgataagagctttgaggagctcaagaagaaattagtatccgcaccagttttgattctgcccgaccagatgaaagacttccaagtttattgcgatgcatcccgtcacggacttggatgtgtcctaatgcaagagggcagagtggttgcatatgcctcgcggcagttgcgtccacacgaaggaaattatccaactcatgacttggagttggcagcggtggttcatgctttgaagatctggaggcactatctgatcggcaaccgctgcgaagtatatacggaccataaaagtctgaaatacatcttcacccaaccggacctaaactttcgacaacgaagatggttggagctaatcaaagactatgacatgagtattcactaccacccgggtaaggccaatgtggtggcagacgctttaagccggaaaagttactgcactgctctatgcatcgagagcatgtgtgaggaattgcggcaggagtttgaacatctcaacataggaattgttgaacacgggttcgtagccgctctggaggcacggcctacgctcgtggatcaagtcagagccgctcaagtaaatgatccggaaatagcagaactgaaaaagaacatgagagtcggaaaggctcgggatttccttaaggatgagcatggcacaatctggatgggagaaagattgtgtgtacctgacgacaaggaattgaaggatctgatactcaccgaggctcatcagacccagtactccattcacccaggcagcaccaaaatgtatcaagacctcaaagaaaagttttggtgggtcagcatgaggagagaaatagctgaattcgtcgcactctgcgatgtttgccaacgagtgaaggcagagcaccaaagacccacagtacataccacatatacgggcaaaaggttggcggagctttacctttcgagaatcatgtgcctacatggagtactcaaaaagattgtatctgaccgagggagtcagttcacctcaaaattctggcagaagctgcaggaagaattggggacccgtttaaatttcagcacggcctatcacccgcaaactgatggccagaccgagcgggtcaatcaaatcttggaagatatgttgagagcttgcgctcttgattttggtggagcttgggacaaaagcttgccatatgcggaattctcgtacaacaacagctaccaggccagtctacagatggcaccgtttgaagctttatacggccggaagtgccgcacacctctcttctgggatcagacaggcgaacgtcaactattcggaacagaagtattagcggaagcagaagagaaagtcagaatcatcagggaaaggttgaggattgctcagtctcgacagaagagctacgcggataaccgtcgaagggagctcacttttgaggcaggagatcacgtgtaccttcgcgtcactccgctccggggagtacaccgttttcagacgaaaggcaagttggcaccacgcttcgtgggaccatacaaaatcttggaacgaaggggagaagtggcttatcagctagaacttccatccaacatgatcggcatccatgacgtgttccacgtgtcccaactaaagaagtgcttaagggtacctgaagaacaggctgattcggaacacattgatatccaggaagacctaacttatgttgagaagccggttcgtatactggataccagcgaaaggagaaccagaaacaaggtcacccggttttgccgagttcagtggagtcatcattcggaagaggaagcaacctgggaaagggaagatgagttgaaagccgcccatccgcacctcttcaccagctcctccgaatctcggggccgagattccgtttaa

SEQ ID NO: 29094 - DNA, 249 bp, Oryza sativa
  unsure (1)..(249): unsure at all n locations
  Clone ID: PAT_MRT4530_33630C.1
accacctcctcctcctcctcccatccagcacncncctcctctctcgcgcngctttccatntccatntccccctcctcctcctacgtctccnccgnnnctcacntcctccactcgatttcctttctnngcctctnctcctctgacacangggtgtgcaggtttgtgtttntgcgtngcgcgtncgcatgagctngcggcagnggccggaggaggcggcggcggtngtngcggggggctggagctgtcggt

SEQ ID NO: 29095 - DNA, 280 bp, Oryza sativa
  Clone ID: PAT_MRT4530_33631C.1
tcgtatactcgtggcagcacctgtggacttgatgccgcctttggtcgttaggacgccttacggaacacgtaccgcccttgccggccgagcccatgtttgtcgcccttatggatggacaccctaccagcatgcatgcaacggcaattacacaacatagcagacactgatagtgcagaagagcattgcatgggcggaggtgtgggccttgaacagatacatggggcaccgaactgccacatggtcccagcataaggggacaaggggtgtacacgggagaaca

SEQ ID NO: 29096 - DNA, 345 bp, Oryza sativa
  Clone ID: PAT_MRT4530_33632C.1
atggcggcaatggggatcggtggcggcggggagcagatcggcgcggaaggcggcggtggtgacctagcaacaaaagggattccggtggcgggatcggtggcggcgaggagcagctcggcgtggaaggtgtcggcggcagggatcgatggcggcgaggagcagctcggcgtggaaggtgtcggcggcagggatcggtggcggcgaggagcagctcggcgtggaaggcgtcggcagcgacctagagatgaaaaggcttccggtggcaggggcggtggcgccgatttgggcaaggacagtggcagaggacggacaaaaaatgaggcattgcgaggctgcgagggctaa

SEQ ID NO: 29097 - DNA, 852 bp, Oryza sativa
  Clone ID: PAT_MRT4530_33633C.1
atgggccgagacgcgcggggcgacggctggcgagagcggccgcggcggcggcggcggcaggcgaagaaggcaggcgcggtggtggtaggcgaacgcggtggcggtgggcgagagcggcggcagcggcgggctaagcaggcaggggcggccggcgaggcaggcaagggcggcaggggagagcggcggcggccgcgcgtggccaccgtggtcctccgtgtccgcctcgtcgtcctctgtggttgcgccgccggccgcgtcgttgaggcggctgctcgtcgcggtggtcttgttcacatggccgagcagagcggacggcgggcggaggagggggccgtaacggcggaggtggccgaaggaggagcgtggcggcggtgggcgagctccgcgggcctacaccgccagccgagccatcatcgtcctcgtcgtcagccgagccatcctcatccgcgccaagcgccacgcaccgctggttccccctgccaactacaccctctccgcgtccccgtccgcatcatcgcgctctccgtctccgaccccgacgtcccgctcagccccgccgtcgacgagtcctacacgctctccgtcgacaagtcctacacgctctccccgccgtgctcgtccgctcgcccaccgtcgtgctcgttcgctccgcccgccgccgtgctccgtctacgcggccgcttcttgccgctgccggcggcaacggcgctcccggagtccatggagctcggcgacgacgcgttgagcgagctgcaggcggccgagctcgcgtcgttgctgctgctgctgcaggtgcaactattgctctcctgggttagcacttgctcttgctccatctgtgtgacgagctag

SEQ ID NO: 29098 - DNA, 390 bp, Oryza sativa
  Clone ID: PAT_MRT4530_33634C.1
atgggcccacatcccttgtttcttcccctttcttctcttctctcgtcttcttcgatgggccgagacgcgcggggcgacggctggcgagagcggccgcggcggcggcggcggcaggcgaagaagtcaggcgcggtggtggcaggcgaacgcggtggcggtgggcgagagcggcggcagcggcgggctaagcaggcaggggcggccggcgaagcaggcaagggcggcagggttgagcgccggcggccgcgcgtgcccaccgtggtcctccgtgtccgcctcgtcgtcctctgtggatgcgccgccggccgcgtccttgaagcggctgcttcaccggggaggtgcaactattgctctcctgggttagcacttgctcttgctccatctgtgtga

SEQ ID NO: 29099 - DNA, 983 bp, Oryza sativa
  Clone ID: PAT_MRT4530_33635C.1
ggcctcctctcctctccacgcgacgagcaagtggaggagcggcggcggcggccggcgatcgagctgctcgatcggccatggatgctccagttattacactcctcgtcttcctcgtcgccgtcgctgcggcaactgcggcggcggagatgccgcggatggagcacccgcgcaagggcgacgggtcgctgagcctcctcgccgtcggcgactgggggcgccgcggcgcgtacaaccagtcgatggtcgccgcgcagatgggaatagtaggggagaagatggacatcgacttcgtcatctccaccggcgacaacttctacaagaacggcctcaccggcgtcgatgataaggccttcgaagaatccttctccgacatctacaccgccaagagcctccacaagccatggtacaccgttcttggcaaccatgactacaggggcgacgccctcgcccagctgagccctgttcttcgcaaggtcgacagccgctggatctgcatcaagtccttcgtcgttagcgcagagatcgcggatttcttcttcgtggacacgacgccgttcgtgctcaagtactggactgatcccaagaacagcaagtacgactggagaggggtttctccccgtgaaacctacattgcaaatgtcctcaaggatctggaggatgcactggagcagtccaaagcgccgtggaagatcgtggtcggacaccacgccatcaggagcgtcagccagcacggcgataccaaggagctcctggagcatctccttccaatcctcaaacaagattcagtacctgacgagcgggccgggtcgaaggcgtggcgcggggtgcagacggcgaacacggacaaggtggagttcttctacgacgggcagggattcatgtcgctgcggctgacggcggcggaggctagcctcgccttctacgacgtcgccggcaagatcctccacacatggatggtcgccaaaccagccaccgggtactga

SEQ ID NO: 29100 - DNA, 1088 bp, Oryza sativa
  Clone ID: PAT_MRT4530_33636C.1
aactcggcacgagcctcatctcctaccgccctaccggacaccttgcccctaggctccaagcgtggtggtctcaccgcctcacctgaggtgaggtgattccacccgccgccgccggcagccatgcttccaagaagccagagcatcttccacctcggcgaggagggtggcgtcgtccactgccaccgcggcggtaaccacctcgtcgcggcgtccatggggatgggcggcgccggtggacactacgggtccggcacgcgcggcggcggccgccgcgcgcgcgagcgcgagcgcctcgtcgtcgggctccagatcatcgtgcacagccagcaccaccacggccggcacgcgcacgcgcacgcggcgagcgtagtgctcaagcagatggtccggccgcgcgccgctgccgccgccgccgcagggcgccacggcgccgtctcgtgcagcttcctcaaggcctgctccctgtgccggcgtgagctcagccctaccaaggatgtctacatgtatagaggtgaccaagggttctgcagcgaggagtgccggtggcagcagatcgccgtcgacgaggcgcgggagcgggaggcggcggcggcggcgggccggccggagcggcgaggtctggctcgccaccacagccctcaccgtgcggcggcgcccgtccgtggcaggccaaggaagacactagccgtagcctagagttattactatgtagtgttaaagtacttactgagaagaggagcacgtactactactgttcatggagaactttgagaggaagttattagccaggtatgtcaataacagaaggactttgcatatgtgtatgcatgcataagaagaagaagatgtgataagagagttaatttgagtggtaatcaacagaggttaatcatggagtagtagaaaggggttgatcagaatattgggtcagtattttttgtttctattttttgcgtgttgtaatcctagaagggatatgcaacttgttgttagatctgtgtgtttgtttgttatacacgtacgatccgatatggttgattaattatattctggaaggttgcatgcaagaaagttaagtggagaacaat

SEQ ID NO: 29101 - DNA, 1497 bp, Oryza sativa
  Clone ID: PAT_MRT4530_33637C.1
atgaaacatcttttgtgaaaaaagggaggaagaagtgggtgggaccacgtgggggaggggcgcgcagggggaggtgggccggccggcgatgggcgacacggcgacgctgggcggggagaagcggcgggtgcggaggaggttgcggggcgaggcggaagaggaggtggcccacggcaaagacgctgtgaagaagggtggcagcgaagaggagatgggcggcatcacttgcggaagagtcaagaagcttgagagtaggggcggagccaggtgtggggcaggcttgggagagaaatggggaagggcaaggtgcatccctcgctgtcaccgacggtgctggtgggtggtggcgatggcggtactcagggcggaggtgaaggaggtgctcatgttgatgtggttgtcgtcatcgtcgatgacgaggtgggggaggcggacaaggaaaagggaaagggtggagggagtggaaagagcagtggccaatgcgagcgcgtgtggagagggaggaaatgacgaggccggtggtgaatgcgcgagaagagggaggaggcgaggaggccgacggcgagcgcgcaaggagagggaggaggcgagggcggcgagaggggttgggaggccagtgagcttgcccactcccctggggcgagctgcttcctgtcggcggtgaggagggcggcggagagggcggagcagcgatgggcgggcagcgagcgagcgcggcggcgggtccgcgcggcagccgagcggcagcaggcgagcgcggcctgcgagcgagcggacgagcacggcggcgggcagagcgaacgagcacgacggtgggcgagcggacgagcacggcggggagagcgtgtaggacttgtcgacggagagcgtgtaggactcgtcgacggcggggctgagcgggacgtcggggtcggagacggagagcgcgaggatgcggacggggacgcggagagggtgtagttggcagggggaaccagcggtgcgcggcgctcggcgcggatgaggatggctcggccgacgacgaggacgatgacggctcggctggcggtgtaggcccgcggagctcgcccaccgccgccacgctcctccttcggccacctccgccgttgcggccccctcctccgcccgccgtccgctctgctcggccacgtgaacaagaccaccgcgacgagcagccgcctcaacgacgcggccggcggcgcaaccacagaggacgacgaggcggacacggaggaccacggtgggcacgcgcggccgccggcgctcaaccctgccgcccttgcctgcttcgccggccgcccctgcctgcttagcccgccgctgccgccgctctcgcccaccgccaccgcgttcgcctgccaccaccgcgcctgacttcttcgcctgccgccgccgccgccgcggccgctctcgccagccgtcgccccgcgcgtctcggcccatcgaagaagacgagagaagagaagaaaggggaagaaacaagggatgtgggcccat

SEQ ID NO: 29102 - DNA, 510 bp, Oryza sativa
  Clone ID: PAT_MRT4530_33638C.1
gaacatttaatataaattctaataattatttattaaataatttataaatcctgaaacgaaaatcaagatgtgacaacacgtttccgtgcgtcgacatgccaccatgacataacagaaagagtccgtgacaggacccttcacataaccccctctaactaattgaaccacacctcaggtttcgccccgtccccagcaggcaacggaacttaatagaagaagtttctccgaacccggagcagagtgtaccggcagctctagtactcctcccaaattcctcctagaaagctacactcgccgaggaagaagtcagagagagtgccaaacttccgggcactcctccagagcttctcctcactctctacctattttctaatgtacaaaagatacaatagagcctcttataattcagctcaaagttgtgtgtttcgaagtgtgatggagtcctccttttatagctaccatatgacggttatggccatggtaaatgtcctaactacccttcaaccgtca

SEQ ID NO: 29103 - DNA, 594 bp, Oryza sativa
  Clone ID: PAT_MRT4530_33639C.1
tggatccccgggctgcaggcgcatattgttgcatggaagaatctcagttgagtcactttaggactaaatcatttcaacagaaatatagaactgctcctctcaaagaaattcatgatacaatacatagaggcattatagaagggtctgaagcaggccaaagaattataaaaccttcttcctatgttggagggccacgctatctataccaaaactaccttgattgtgttgctctttgtcgaaagtatggttgtcctgatttatttatcactttcacatcgaaccctttatagacaaaaattacttaggctttggctctaattcctgggcaacattcatcgaacagcctgatattgttgatcgtgtgtttcatatgaagctgcatctcttcatcgatgatatcacaaagaatgaattttttggtccaattactgcaggtttgatacattactttaattctagacatactccttttatttacctttccatttattttaaatatgtttttcactttatttatttatgatgtttcgcagttgtatacattatcgaattttagaaacgtggtcttccacatgtccatattattttatggct

SEQ ID NO: 29104 - DNA, 1324 bp, Oryza sativa
  Clone ID: PAT_MRT4530_3363C.1
gcacgagcgattacagcatgagtcaaactgagctgcctgagtccacttcgccaagcgagagcgcgccggccatggcgtccaccacgccggcgccgtacgtcgtcgaggactgcggccctaacctccagctcttcagcgacggcacggtgatccgcttcgaggactacaacatcctccctccgccggtcttgcctcccgcgctgtccaccgtccagtggaaggacgtcgtctacgacgccggccgcggcctcaagctgcgggtgtacaggccaccggcggctaccgtcgccggcgagaagctcccggtgctcgtctacttccacggcggcgggtacttcatcggcagcttcgagatggataacttccacgcgtgctgcctccgcctcgcccacgagcttcccgccgtcgtcctctccgccgactaccgcctcgcccccgagcaccgcctccccgccgcccacgacgacgcggcgaccgccatgtcctgggtgcgcgaccaggccgtggcgagcggggacgccgccgacccatggctcgcggagtcggcggatttcggccgggtgttcgtctccggcgactcggccggcgcgggcatcgtccaccacgtcgccctccgcctcgggtcgggccagatcgccgtcgacccggcgcgcgtcgcggggtgcgcgctgctgttcccgtacttcggcggcgaggagaggacgaggtcggaggcggagtacccgccggggccgttcctgacgctgcccttctccgaccaggggtggcgcctcgcgctgccgcggggcgccacgagggaccacccgctggccaacccgttcgggccggagagcccggcgatggacgccgtcgcgctgccgccgctgctcgtggtggtcgcccagctcgacctgctgcgcgaccgcgacgtggactacgccgcgaggctgagggcgatggggaagcaggtggagatggtggagttcgaggggcagcaccacgggttcttcgccgtcgagccgttaggcgacgccgggagcgagctggtccgggtcgtgaggcgcttcgtctacggcaacggcggtgacgccgccgccgccgccgccgccgcgtccaagtaaatccagccgaccagacaccgatcgctttctgtggcattgcgtcagctgccacgtgacagcatgagacacgccccagttcccaccatgtgatacacgcccacggcccaccttggaagcctattggacattggattttaactaggcccactcatatacgacttgtaccaaaccaatcttctcaaaaagaaaaggaataagttcactaaaaaaaaaaaaaaccaaaa

SEQ ID NO: 29105 - DNA, 2793 bp, Oryza sativa
  Clone ID: PAT_MRT4530_33640C.1
atgacgccagaacaactattcgatctgtcggtgaagtatttcgaatgggccgaggacaacgcgataaaggcgtcagaatcagccagctttcagggtggcgtttatgaatcgcttgttcataagccgcgcgtcttcacctggaccggataccgactatttatcggtgcaagcgaggccgcaatcattaagtggaagcgtgaggaagaatacagtgaggttatggagttcgtggaatccgtaatcaacgagcaaaaatttcagcttgccgcaaacggcgttattaacgcctcatttatcggcaaggatctcggaatcgacaagccagcttcaataaacatcgaaaactcggcagcttcagcgtcgaccgctgtcgccactactgaggaagcaatgaaagaggctgctcagcagttccagcctaactggcatcacctttacctatgtcacgaagtggaggaaattattgcaggccgacgcggtaacactatctttaacgtcacgccaggctccggtaaaactgaagtgttctcaattcaccttccggtgtacgcaatgctcaagtgtaaaaaggtgcgaaaccttaacgtatcgtttgccgacagcttagttaagcgcaacagtaagcgcgtccgtgagattatcagcagcaacgaatttcaagagctatggccctgcaaatttggcacatcgaaagacgaagagatgcaggttcttaacgaagacggaaaggtttggtttgagctaatctccgcagcggctggtggtcgtattactggttcgcgtggtggctacatgactccgggattctccggcatggtaatgctcgacgatatcgacaagcctgatgatatgttctcaaaggttaagcgtgagcgtacgcacatgctattgaaaaacaccattcgatcccgtcgtatgcataacgagacgcctattattgcaattcagcaacgactacatgctcaggattcaacatggttcatgatgaatggcggcatgggtatcgagttcgaccaaatatcaatcccggcgcttgttactgaagaatacggaaagacgcttcctgactggttgcagccttactttgagcgagacgttttgtcgtctgagtatgttgaattggacggtgttaagcattattccttttggcccagcaaggaaagtgtgcacgacctgctagctttacgagaagcagatcagtatacctttgattctcagtatcagcagaagccgatcgcgctgggtggctccgtgtttaactcagagtggtggacttattacggcaacagccttgacgctgatgagccagatcctggtaaatatgattaccgattcatcactgccgataccgctcagaagacaggcgagctaaacgactacacggtattttgtttgtggggcaagaagaatgataaggtttactttatcgacggcattcgcggtaagtgggaagcgccggatatggagaggcaatttacagctttcgtcaatcaggcatggaggcacaataaatcaatgggggtacttcgtaaaatctatgtggaagataaggcgagcggtacgggcttaatccagaacctaaggaaaaagactccgatatccatcactccattgcagcgtaacaaagataaagttacccgagctatggatgctcagccagttattaaagccgggcgtgtggttctgccagaagagcaccctatgcttgctgaaattatcgctgagcacagcgcctttacttacgatgacacccatccgcatgatgatatcgtcgataacttcatggatgcggcgaacatagaattgctgaccattgatgatcctatcgagagaatgaagcgactcgccgggatgggctgtcaattgacggccctttttattggaggaaacatgaaaattgttaagcatgatggatataacgatatttttaacggcggtgcagacggatcgcctaagccattctttatgtctgatgcatcatatcacgtcggatctttctacaacgacaacgcaaccgcgaagcgaattgtggatgttatcccggaagagatggtgacggctggatttaaaatgtcaggcgtcaaggatgaaaaagagttcaagtctctgtgggatagttacaaaattgattctagcttggttgacgttctttgctggtcgagactatacggtggggctgctattgtggcaatcatcaaagacaacagaatgctaaccagccccgttaaacctggagctaaacttgagggcgtgcgtgtttacgatcgatttgcaatcaccgttgaaaagagagtaaccaatgctcgatcgcctcgctatggtgagcctgagatatacaatgtatctcctggcgataatcttcaaccttacttaatccaccacacaagaatttttattgctgatggtgagcgagtaacccctcagattcgcaaacagaatcaaggatggggagcgtcggtattgaacaaatcactgattgatgcaatctgtgactatgattactgtgaatctctggccactcagatcttgcgacgtaagcaacaggctgtatggaaggtcaaaggtcttgccgaaatgtgtgatgatgatgatgctcagtatgccgcgcgcctgcgacttgctcaggttgatgataactccggcgtaggtcgtgcgatcggtatcgatgctgagactgaggaatatgacgttctcaactctgatatcagcggagttcctgagttcttatcaagcaagatggaccgcattgtctccctatccgggattcatgagattatcatcaagaataagaac

SEQ ID NO: 29106 - DNA, 237 bp, Oryza sativa
  Clone ID: PAT_MRT4530_33641C.1
atgcggcagcacgtcgtggacgacgggagcgtgcgacgcaggatggaggccgaggtgccgagctatagccgtgactgggagtttgcagcggttgtcgacatgaaccttgcctcctctacctctccatccgcctcctccttctcctctccatccgcctcccctccacacctcgacagtggcaactcctacagatccggctatgggaatgttattgggtcgatgacggtctgggtgtga

SEQ ID NO: 29107 - DNA, 273 bp, Oryza sativa
  Clone ID: PAT_MRT4530_33642C.1
atggacttatggctttcgtttcatctattcatcatccttgtcaccgtagctccaggcaacatgacgggtgtaaccggctggagaaagtcgcggtccgaagggtgtttcgtcccgcgccggtcgcccgccggtggcccgcgggcccgcgggtgggcgaggtccgagccggcggttgcccgcgcgtcgcccggggcctggtgcttgtctccctccgtcggcgacgtccttcgtctccgatttcgcccgcccgcgtttttggccgccttcgtcagg

SEQ ID NO: 29108 - DNA, 2025 bp, Oryza sativa
  Clone ID: PAT_MRT4530_33643C.1
atggtgcggaagaatgggtggcagctcccagcacacaccttccagattattgcaattaccgttttcttccttctggtggttgccttttatgccttctttgcaccattcctgggaaagcaagtccttgaatatatcgcattcggcatctatactcctgtggcatttgttgtcttcatcctttatatccggtgcactagcataaatcctgcagatcccgggatcatgtcaaagtttcaaaatggcttccgtaatgcaccaacaagtggcaccggcttacaggacacaaatttgccaggaaggggtgatgttgctactggaacgaattccccaacatctacttttaagagctctctagatggacgttctaaccatgctggtttagctgctggagatggaaataatttgagctcacaaccaccaaggagttcaagttgctccttagtcggaggacttatttgtgctctgtttgttgaggaggattgcaggacgcttgttgattcagagcatcaagctgatggagaagatgccttgttttgcacattatgtaatgctgagtggctaaataattgcgttgggcgcaagaactatttcacatttcttgctctgatgattaccagcctcctctggcttgccattgaaatcggggtcggcattgctgttcttgttgtatgcttcgtcaacaagaattcagaaagtattattcaagacaagcttgcaaatggtttaactcgtccaccctttgcaactatagtagccatatttactcttctttctataatcgcttgtatacccctaggtgaactcttcttcttccacatgatactgatcagaaaggggatcacaacttacgaatatgttgtcgcaatgagagctatgagtgaagcacctcaagaggaggaagaagaggatggggtgaacattgtttattccccaacaaattcagcaactactggattcagcggtggaagctcacttggtcttccctacaagggttcatggtgcacacctccaaggattttcgttgatcaggatgaagtgatcccacacctggaggctgggatggtgccatcaaccatcgaccctgacacggctggaaatgctgagagagcaaacagagccaagaagcaagtgaagatcagcgcgtggaagctcgccaagcttgacaccaacgaggccatgaaagcggcggcgagagctcgggcgtcctcctccgtcctccggccggtggacgctcgccaccgcggcggccacgacgccggcgacctgagctccagcggcaacggcagcgtcaggagcagcgtgagcgccgccgccaaggagcagaggaggagggcgtcctctctcccgagctcgtgcgcgcagagcgtggcgagccaggacgagtacgagcagagcggcagcagcgtgatgagcagcccggtgcgcctccacaagctcgcgccgccgccattgccggcggcgcacaacgtgccgcctcggccgccgccgccggtgaacgctgctccggaggcggcaatacctcggccgccgccgcctgttcctccggcgacgaggatatccaacccgatgttccagtcggccacgtcgtacgtccgggagaaccggagggcgtcggtcgtgtgggaccaggaggccggccggtacgtgtcggtggcgccggcgccggcaacggcgaggccaggaggaggcggcggtggcgccgagcagccggcggcgagggcgccgcctttcttggcgaacccaggtggcgagcgcgagccattgagtgccgcccgtagccgcaataatcccgccgcgcccgcgcccacgaacgccgccccttcgtcgtcgtcgacgctgccgtcggagaggctgacgtactccggccagtcgatattcttcggcgggccactgctgggcggcgccgccgccgccggcgaacctcgaagggacgaggcggcggggacgagggcccgcggcggcgagtccttcccggtgtttgctcccggaacattccagaagaagccgccaccgttccgtaggtga

SEQ ID NO: 29109 - DNA, 225 bp, Oryza sativa
  Clone ID: PAT_MRT4530_33644C.1
cccggtgttggtagcttaagttagagtgttgtggtttttgcgcagttttcccctagttaactgtgcattgtaaggtttggtctcgttttctccttaaaatgagacacattcttttttatataaaacgtcggcaacggcctgactgttcgaaaaaaaaatatgacagtacaaatatctattgcaacgaaacaatctcactatatatgcttttgaatccctcgtgcc

SEQ ID NO: 29110 - DNA, 201 bp, Oryza sativa
  Clone ID: PAT_MRT4530_33645C.1
aatcggttgggatgggggagagtgctgctggattgggttctgctggtttctcatgattcttcttcccccacagccacgagatagctagaagaaaatggtaggccaatgcagtctttccttctcgaatgcctcggcagcgagaggagctgtccttgaaaatttgtggttgttttacggggatctttgcctctttgtgctttc

SEQ ID NO: 29111 - DNA, 1902 bp, Oryza sativa
  Clone ID: PAT_MRT4530_33646C.1
acaggcacaaaatatttcacagcaagcgggtagcatcttgataaacagaagttctcataaactagacctaagtggtgacgcgcgcagttgacgcatatgtacaatcaccacagcaactgggtggtaagtagtggctggtgctgcctgctttcccctacctgatacaattggaagctggtgagaggactgaactactgaattcacaagcttccaacaaacaaaatgcaaaagggggcataagtttatctaaggtgagccggactcctcctcagagtctgcaactatcatttcacgatcatcttccgagcctgatagagaaaactgctttgagatagatgttggcctctgcctcattgttttctttgtcatggatcgaggagtaagctgtcctgggcgcatgacgtcttcgtcgtttttcatatttctccgactccggcggagcccttgcggaggcttgtcaaaccgacgggaggcaagacgagtcctcttacgtgggacaaatacttcctcctcttcagtatcacccttgttgggatcataagcatcattttctccatcactgccaacatcattttctccatcgctgcctgacgagtcatcatccttaccattgtagtctctgtcttcatcctcatcagaactcaggtcatcaagggactcgacatcctcctgtccgccatctttgtcctgctccggattgacgtcagaccctccagcatcctcctgtccatcttccttctgctctggaccaatgtcagaccctccattggctcctttattgccctgatgtgaggcacgcttctcttttttgcctgcctcctgtggatcagattcttttgatttcgctgcagcttttattgcctcctttatagaacgatcgtaatcagagtaattgtagctgacaggcctacgttcacgcaatgaacgggtttggaaacttgtagcataagctaaaagttcatccttcttctgctgacgttttaaatcccgctccttcttcttttgaagcttctccacatctggaataatttctgtcttaagatgctcgccgatggcagattccggtcgacctttactgcatagtttctccgatatctcaacgaactcatcaaggttagtcgcaactgtttcccactgaatattgataactggctttgtcaaacgaccattctttcccttcaagttgcgcttgaaatcaagtgttacatactcactatacaatctatggccaatagttgagtcaccatcataccagtatatagttccgttactactacttcctaacttttcttttcggaaattggaaatatcaactcctcttttcatctcgtcattaacataccataccgcgtcattttgctctgaacgaacttcacagagtgctttaagtatcaacaagcgtttaatcggatcttgctgtttatacgtgtcaatttccttccctggattaattttgaacgggtttgcaccttcagcaacccatgtccaccaatctgataatttcttggcagttgccgttatccatccatcatcgaccttcagatttttgatagttggtggtattccctgatacacgtgactattacaatcggtgattgcaaacaaaaaggacaaggacaaagaaatgaagttttttccctttttgcagaaaacctttataagcgcaatatggatgcgggcaaggtcgtggttattggcgatgagcgcggtctcgatctcctccgctgatagccccaggttcccctcgatcaccggctcaaacacccggagaaagtggagcaccgacgcgagctcccagctgcggcggaggaggacgcaggggtcctccggcgccggcggcgacgcgggggggtccaccggggacgaggccgggggcctcgcgcgcttcgccggcgaggccat

SEQ ID NO: 29112 - DNA, 1286 bp, Oryza sativa
  Clone ID: PAT_MRT4530_33647C.1
cccggcccccacgtcccggctcccgccgccgccgccgctgttcactccgcaccaactccgacgatcccccggcgagctctcgacgatggcgacggcggcgacggcgtcggctacggcggccacccgcttcacgcggctggcgggggtcgggctccggcgcacggcccgcctccccacggccgtgcggttccagcgccgggtgctcgccaccaccgcgctcctcaggaccgccgagctccggcccaaggagcagggcctgcccgagacgctcgactaccgcgtgttcctcgtcgacggcgggggccgcaaggtgtcgccgtggcacgacgtgcccctgcgcgcaggcgacggggtgttccacttcgtcgtggagatccccaaggagagcagcgccaagatggaggtcgccaccgacgagtcattcacccccatcaagcaggacaccaagaagggcaacctccgatactacccgtacaacattaattggaattatggattatttccccaaacatgggaggacccaactcttgcaaacaccgatgtcgaaggagcatttggggataatgatcctgttgatgttgttgagattggtgaaagacgtgctaacattggagatgttcttaaggtaaaaccgttggcagctttagcaatgattgatgagggtgagcttgactggaaaattgtggctatttctttggatgatcctaaagcatctcttgtgaatgatgtggatgatgttgagaagcattttccgggaacattgactgccatcagagactggttcagggactacaagataccagacggtaagcctgcaaacagatttggtctgggcaacaaacccacaagcaaggaatatgctctgaaggtcatagaagaaaccaacgaatcatgggagaaattggtgaaaaggaatatccctgctggagagctctcactagcctaatcttgtccatgagaagccatcagattcttttggtcatttacctaagcatgttgttttcataagctataagcatgctgcttcttgcgaactctttggtgacctgtgtgcaacaggaacagcttgtggagtgaataaggctttctgagctagtttttctaagggaattgggtgttcttgagcagcgattgtgtttggaacaagctttacaaagtgaacaatcagtttagaagttgaatgataagcaaatatagtttcaacattgtaatcattaaaaaaaaaaaaaaaaaaaactcgaaacacgccctctccctcgtgccgaattcggcacgaggcctcgtgc

SEQ ID NO: 29113 - DNA, 1551 bp, Oryza sativa
  Clone ID: PAT_MRT4530_33648C.1
atggatccattgaaaggggttgaggaatcatcgctggtcactaaaggcgagatgaaaagcctactacaagacttgatagctactgggatgatggggcctagaataggaggggcatcacctgaaataaagctagagcaaatgccgaatgaagttaagttggaggagagccaaaattacttgagctggtctagaaggacaagattgatgttgagggcaaaaggggtagaacactatttggaggaaacttgtattgaaccagatgacaagcttagtgtggactggaaggtgtggaattccaccaactctacggtggcaacatggttaatgacctcagtggctccatccattgcgaggatggtggagacaatttctaatgcatcaactgtgtggaagacattgagcaaaatgtactcaggggaagacaatgcaatgatgatggttgaggctcaagacaaggtggagaacttgaagcaagagggaagaactgttcaagaatatgctagtgagttgcaacaattatgggcagatttggatcactatgagagggggactgggaggaggattgggactggagtcaggcgcaatgggttgtggtacatcaataatgaagaagtaggattggctgcagttgcaggaaatgctgaggagattattttgcttcattgccggttaggacatccatcatttgataacatgacaaggaagaatgatggggaccaaattagggaatttgcacgggagcaagttgaagagtctgaacaacctgagcatccagtccaagaatcctccccgtgcctctctcctccaactcccttgcccctcattgaaacgtctggtgatgttccccctatacttgaacaagtagaattacctcttacacaacgtagggaaactagaagtaatgctgggaaacctcctatacgtcttggctttgaacatattagctctaagcatgacattgcaaattatatctcatactcccacatttcacctgcatacaaaactttcattgcatcattacaagcagtgcctgttccgaaagactggagatgtgccaagcaagatcctaggtggaaagatgcaatgaaggaggagcttcatgcccttcaggagaacaagacatgggaacttgtgagacttccaccaggaaaaagagcagtaagatggaaggtggatagatacaaagcaagatcaattgcaaaaggttatagtcaaacttatgggattgactatgatgaaacatttgctcctgtggccaagatgggtatagtgagagctttggtgtcttctgcagttaactttggatggcctctacatcagctggatgtgaaaaatgctttcctttatggtgatctacaagaggtctatatggagattccccttggatttggaaataaccaaacggtaggaaaggaaatgtttggaaagacctttgaggtgaaggatcttggacctcttcgatacttccttgggattgagattgctcggtcgtcaaagggaatcgttctctcccaagggaaatatatccttgatctattggcagaaacatga

SEQ ID NO: 29114 - DNA, 661 bp, Oryza sativa
  Clone ID: PAT_MRT4530_33649C.1
cacagctcagtgtcaaccaccacaaccacaagcaagcaagccatacacatcaagaaggcgtctgcgtgcgaggaaatcatccggtttttcaagctaaaagcgtgaagatgagctcgtcgtcgttgagcaagaaggcgtcgtcgttcgtggtgacggcgagcatgagcgcggtggaggcgctcaaggaccaggcggggctgtgccggtgggactacgcgctccggtcgctgtaccagcgcgccgccgccgccaagcaggtcaccggccgcgccgtcccggtgtcgctgtcgtcgcagaccggcggcgcggcggcgtcctcctctcccgccgccgcgtgcggcagggccgccaggtcgaagaggtcggaggaggagaagatgcagaaggcgtatcacctcgtctgctggggacctaattaaaatctgttcttcaaattcgtgatttcgtgtagtagttttttcgtttgcaatttgtccacccctcattttctggtgtgtaaatcgagccaatacctgcagggatttttgtattttgatccgttttcatgtactactacttccccatctgattctgatggagaattgctatgtgcaaactacggagtaaaaatcaacaagatgatgcgattgttgcacggaattaattaaaaaaaaaaaaaaaa

SEQ ID NO: 29115 - DNA, 345 bp, Oryza sativa
  Clone ID: PAT_MRT4530_3364C.1
atggcggtggcgcacggcgcggagtgggttccagcggcggaatccgacaggagaggggtggatagggtggcccgcacgacggcgaacgcgatggcgtctacggcgtggctcgaacctggtgaccttgttcctagtcctcctttcactggtctcaaggatgtgaactggcttctccacatatgtcagatcttcttgaatgtcaatgtgttccgaatcggcttgttcttcgggtacgcacaatctttctcccaaccagattgtgccatgttcatcttcgtggaaatcccgggcttttccgaccctcatattctttttcagttcagctatctcaggatatttacatga

SEQ ID NO: 29116 - DNA, 573 bp, Oryza sativa
  Clone ID: PAT_MRT4530_33650C.1
atgtctctcatccatcatggatcaaagctgtcatgttcgcccttagctaatccggacgaattgaatgacacacaccgcctttcagttagctgcttgcctgctgaatcaggaaaagggaaaaggctgatgatgatgaggatgcaaaggtcgacgcctaaagtgaaccgagatcgagtgcaaccggaccgaagctcgtgggcgaccacttgccgctacagctcatcgcttccgttctttccagccatcccggttaatctaaggctcatcagtccatggctgctgctgcactcatggtatcgattccgaggccgtctttgccggctcgtcggatcgctagtgtgccttcctatcactttctgggcctccccgggcacagttcggcgtcgatgtcgccatgtcggtggtgggtcacgtacggtgtcgccgacgacgtggtctgttcgtgccgagaatctcacgcaggaggatgatggtgttgccgtgttggccatggaccaatggacgacgaaacgagacgagacgggccctgccggccctgggcgggcccgggagtactggacccatgaaaaccct

SEQ ID NO: 29117 - DNA, 392 bp, Oryza sativa
  Clone ID: PAT_MRT4530_33651C.1
gacagaaattaattaagctagaaatctcctcgatcgatcacacacacacacacaattaaggtacatacatacatgcactgctgcaactgcaactgcagggtcggtgcgtggctactacaagtgtacacatggtaccgttggtttggcacccactctcagatcggtgtccgttgtgcctcactttttgccggggaccgaacgttggctgggcgctatgggcccacggcgttgtttcggcgaacggggttcggccgaccgtggttcgacagagggtttctcgatggggcgcccctttgccggttgacgaatgtgccttggaccgaaggaagtccgaaccatgggagaaccattggcgaggggcggccgtttcttgagcttcctttcacctttga

SEQ ID NO: 29118 - DNA, 361 bp, Oryza sativa
  Clone ID: PAT_MRT4530_33652C.1
ccgagcaactgagaggagggggaagaaggggcgccagggctctggtggctgggaggcggcgacgccggcggccggtggcggcgaggggcggtggtcgatggcggttcaggaggaggtcgacggcttggccacggcgacggcggcgcaaaggaagaggagatggcgccggctctgtactccgattggatgtcgatggcggcgcgcacacgtggtggctgaaggggatttggacggcggggagggggagcacggcacggcggcggcggcggcggcgcaaaccgtgggcggcggcgctcccatggcgcacggcaacgacggctgcagcgcgtgtgtggcgtcacgcgcgcccacagagaagtga

SEQ ID NO: 29119 - DNA, 686 bp, Oryza sativa
  Clone ID: PAT_MRT4530_33653C.1
cccacgcgtccgaaaagagctccatgaagatataatggttcctgactactgttatgctggtggaggggagcttcagtcacttaatgcatggtttggtccacacgggacagtgacaccattgcaccatgatccacatcacaacattttagctcaggtattgggaaggaagtatattagactatatcctgcttccatatctgaggacttgtacccacacacagaaactatgctaagtaacaccagtcaggtagatcttgacaacgttgatctgaaggagttcccacgggtagaaaatcttgatttcttggactgtatattggaggagggtgacttgctttacattccaccaaaatggtggcattacgtcagatctctttctattagtttctctgttagcttttggtggcgttcaactgttgtaccttcaaagggttcatagcgtcacattctggtctttgtacagcagaaccggaccacgggaccttggaaaacctgacagaaccttttgatttagcatccactattgcatggatgtggccatactattgcagatgtacattgttacttcccctgttatgactaaacatgtagttgctactataccaaatgtaacaatgacgatgtaccttctggtaacctctgatgcttgagcattgagcttggagggttggatttattgctcctgc

SEQ ID NO: 29120 - DNA, 269 bp, Oryza sativa
  Clone ID: PAT_MRT4530_33654C.1
aagcttaaacacataagaaagccactgaaactgattctgataatacatagacgagatttccagagttctcaacaaattacatttttttaaggcgacactgggaaaatgggttctagactaacatcttcactcgggtggaaagatacattcaaggctttccaagtcagaaccacatatttctttgactgcacacagaaccttcagtcactagctaaacctatggagatcaggaatcgacgcatcaccgactgtaggcgctactcctatgc

SEQ ID NO: 29121 - DNA, 367 bp, Oryza sativa
  Clone ID: PAT_MRT4530_33655C.1
atgaatatgagcagtcgaatgctcgacgttgtcggtgaggtggttctgttccttgtcgtcaagttgttcgacgtaatcatcgagccagctatgaacggttgcagcacgactacttctcgccgaatcctacatacggcccagtcttattccggcgaagttaatgatgtggtagcccatgatgattattttgtgctaaaaagaaatgctgcaagtactatgggtatattaccattggtaaagattgccaccacacttagaatgataaccaatggagtcgcagccgacactcaagatgaatatctgcaaattgctgatagtaccactattgttgagaattttggagacgagtacttgcgttatccaacta

SEQ ID NO: 29122 - DNA, 261 bp, Oryza sativa
  Clone ID: PAT_MRT4530_33656C.1
atgggggtaggagagagattgaccagggggagatggtgggggcaaaaggcggccaagtggatggagcacgccctccctagggttttggggagaaaggataatgttttccatcatgagtgcacatgcatagagaacatcaggatgcctgcagttccgtatattgaggatgcagatgcaggggtgctgcaggaccatgttgaggatcacgatgatgctcttccacctgatctctcagggcaaatcgtggacgagcaagagtaa

SEQ ID NO: 29123 - DNA, 426 bp, Oryza sativa
  unsure (1)..(426): unsure at all n locations
  Clone ID: PAT_MRT4530_33657C.1
angnnccgtttattcncagtgnactgtcagncnaaccggtgnagttctccnnnnnatgtnanggtacatcaaannnccngccgntgctccaagnagcacnntttggcncaatggattggtgttggaagatcatntccgganaatcnntcataaagagggctcatcgtatcggcacatgcacacnccaaggatntatnaccctcatgaagggnatntaagttaatacttaacnttncanctctgaagtngnttgtangaagatggatancccattgtangaanntnagcncggctcggcncgtnancctcnnagcncattttagaanaannancanaacatnncccngngtggccantttgngcnggtntnctgagttncatcacagtacatattngaaatcnagttgggataaaaaannnaanaaa

SEQ ID NO: 29124 - DNA, 345 bp, Oryza sativa
  Clone ID: PAT_MRT4530_33658C.1
cttctcttctctggtggtgtgggtgggtgcctgtttaccctctcctgcctactatccttcaccctcctctgttcccccttctcacaagagagagagcgccagactctccccaggattcagccatgaagggggccaaatgcaagggcgccgacaagcccgacgccaagttggctgcgaagagtaaggacgcggagacgcccgccgccaagggcaggaaggggaaggcctccaaggaccccaacaagcccaagaggaatccctccgctttcttcggttttatggaggagttccgaaaggagtccaaggagaggaaccccaagaataaatcagtcgctgctgcaagaa

SEQ ID NO: 29125 - DNA, 312 bp, Oryza sativa
  Clone ID: PAT_MRT4530_33659C.1
ttaagagtgtgccaaggagaatccgacggtgaggactacaacggtgatagaagcggccccggtgccggagaggtggccgacgaaggtgtgcgggatgccgagccgacacctcacacaagcttttgtatggaggccgatgaagcgatccgacgcgcccgcattccccacgctgctccctattccccattccccccacgcgacagtggagacgacaagtgaagcgatcgccacaagccgccatccgcagcgccgactccgacgccggacgccgggcgccgcgtcggcgccgagacgctcacgccggccggccat

SEQ ID NO: 29126 - DNA, 3639 bp, Oryza sativa
  Clone ID: PAT_MRT4530_3365C.1
atgatcaacaccaggaatggcagccgtgcagcaggtgagggcagcaacggtgaagaacgcaccgacggtgggcatcccaacagcgcctccagcaatggtccgccaccgcttctcgagaacccgattcttgcacaagtgatggcccatcagacacagatgatggaagccatgatgcagcagatgcagcaccagcaccagtagatgcaccagaggatgcagcagcaagctgagcagcagcagcagcagtttggtccccctccccctctgtccaagctgccggagtttctacgcgtcaggccacccaccttctctagcaccaccaaccccatggaggcgaatgactagctccatgccatagagaagaagctcaatcttctgcagtgcaatgatcaggagaaggtcgccttcgccacacaccagctccagggtcccgcgtcagcttggtgggacaatcacatggctacccgtccgccaggtacggaggtcacttgggcggagttctgttgcagcttcaggaaggcgcaggtgccagacggggtcatggcacaaaagaagagagaattccgcgcactccaccagggcaacaggacagtaaccgagtacctgcatgagttcaatcgcctagcgcgatacgcaccggaggatgtccgcactgacgcattgaaacaggagaagctcctagcgggcctggatgacgagcgtaccaaccagctgatttctagagactacgccgactttgagaagctggttgagaaggcaatccgtcaggaggatcggcgaaacaaaatggacaggaagagaaagacggctcagttccggtccaacccaagaagtcaccagcgaccacgcttcacttccggacaacagggtggaccaaccatcatgattgtccaccaacatcgccctttcaactcaagcggcttccaccagggcgccagtgggagccagaaccaccaaggaggtcagcccaactgcaatgcagctccgcacccaccaatggcaccagcacaatcagctccatcagcccaagccaagaaggagactggggcaaagccagggtcctgtttcaactgtggcgagcatggccactttgctgacaagtgcccgaagccaacgcgtgccgggccaaggtttgcccaagcccgtgttaaccacgcgtccgcagaagaggcgcaagcagcaccagaggtcatactgggtacgtttcctgttaacacgatccctgcaacagtacttttcgattctggtgcaacgcattcattcatttcaaagaagtttgctggggtgcatgggttaagaaaagaagagcttagtacaccaatgagggttcataccccgggaaatagttcaacctcggtcagttatagcccttccgtgctaatagaaatccaaagatcaccatttctagccaacctcatccttctcgaatccaaagacctagatgtcattcttgggatggattggcttaccaagttcaaaggtgtcattgattgtgtgaatcgcacaatcaccttgaccaatgagaagggagaagcagtggtgtacaagtcaccagtctcactaaagcaggggatctccttaaatctgattgaggtgaaaaatccggtggccaccgaggagaagagttcgaggaaattggaagatatccccatagtatgcgagtatccagaggtgttccctgaggacctcactaccatgccacccaagagagagattgaattccggattgatttggcaccggggactgctccaatttacaagagaccgtacagaatggcagccaacgagctagtagaggtcaagaagcaggtggatgagcaactgcagaaagggtacattcgaccaagtacttcaccttggggtgctccggtcatttttgtggagaaggacaacacgaagagaatgtgtgttgattatctcgcactcaatgaggtcaccataaaaaacaaataccctttaccacggattgatgttctgtttgatcagctgaaaggaaccaaagtgttttccaaaatagagctgcgatcgggctaccaccagttgagaatccgggaagaggatattcccaaaacagccttcaccactcggtatgggttgtatgagtgcacggttatgtcttttggactcactaatgcacctgcattcttcataaacctgatgaacaaagtgttcacggaatttcgggataagtttgttgtggtattcatcgatgacattctaatctattccaagtcggaagaagagcatgagcaacatcttcgtctggtactcgagaagttgcaggagcaccagctttatgccaagttcagcaaatgcgacttttggttatcagaggtcaaattcttgggtcacgtcattacagctcagggcgtggcagttgatctatcgaatgtggagtcagttaccaagtagaccccgcctaagacagtgtcacagattcggagttttcttggacttgcgagttattaccgtcggttcattgaaaatttctccaggattgccagacctaggactcagttgcttaagaaagacgagaaattcaagtggacagccgagtgtgacaagagtttcgaggagcttaagaagaaattagtatctgctccagttctgattcttcccgatcagacgaaagacttccaaatctattgcgatgcatcccgtcacgggcttggatgtgttctaatgcaagagggcagagtggtcgcttatgcctcgcggcagttgcgcccgcatgaaggaaactatccaacacatgatttagaattggcagcggtggttcatgctttgaagatctggaggcaatctgattggcaaccgctgcgaagtatatacggatcacaagagtctgaaatatatcttcacccaacctgatctaaatctccgacagcgaagatggttggagttaatcaaggattatgacatgagcattcactaccatcctggcaaagccaatgtggtggcagatgcattaagcaggaaaagctactgcaatgctttatgcaccgaagacatgtgtaaggaattacagcaggagcttgaacacctcaacttggggctagtagaacacgggtacgtggctgccctagaggcacgacctacgctcgtggatcaagtcagagcagctcaggtaaatgatcctgaaatagcagagctaaaaaagaatatgagggtcgaaaaagcccgggatttccacgaagatgaacacagcacaatctggttgggagaaagattgtgcatacctgacgacaaggaactaaaggacctgatactcaccgaggctcaccagactcactactccattcacccaggcggtaccaaaatgtacccaagacctcaaagaaaagttctggtgggtaagcatgagaagggaaatagctgaatttgtcgcactctgtgacgtatgccaacgagtaaaggcagagcaccaaaggccagcaggtttgctacagcctcttcggatcccggaatggaaatgggaagagattgaaatggatttcataacaggtctgcccaggacatcatctggtcatgattcaatctaggtagtcgtggatcggctcactaaagttgcccatttcattccagtgcataccacgtatacgggaaagaaattggcagagctgtacttagcaaggatca

SEQ ID NO: 29127 - DNA, 216 bp, Oryza sativa
  Clone ID: PAT_MRT4530_33660C.1
atggacagtgccattttacaaagaaaatgcccagattaccacgaaggcaatggattatttggcttgattcgcagcaaatcctgccaaaacgagaggcatggccatggttgccagaccttcatcggttacgggaggagtgcggaagacttcacctcgagagccaacgcctcagcggcctcggcgctggcggcctccgcggctggcggcggtcgctag

SEQ ID NO: 29128 - DNA, 266 bp, Oryza sativa
  Clone ID: PAT_MRT4530_33661C.1
cccacgcgtgcgaccacgcacatgaatacgcgttcgctcacgcttagtcagatacattccagagatgtgaggatgccgctcagataagctgcggctgggagaaagtgaatacataaggaccggagccctaggagctacgggcattggagcccaacaaggagatcctgatggacatctccgtatccaacttctacgaggcaccaacagacacgcctatgatcatgaacttacgccggaatcgagtatgtaaatccattgacacagag

SEQ ID NO: 29129 - DNA, 719 bp, Oryza sativa
  Clone ID: PAT_MRT4530_33662C.1
ccggccgggaaaaaaaaaaaaaaatcacagaggagcgttgcatcacgccgctcgtcctctcctctcctctctcctcaccagataacagcagcggcgccgatgcacatcggcggaagggggcgtccccggcgcgcatcggcgacgagccagcgacggcggtgcgtctccgcagcggcgtccgcgcgcatcggccgcgacagcgggcgcacataggcggtgagccggcgatggcccgacgacagcagccaacagtcggcggcacttcaccttcctggcttcctcagccacgggcccacggcgagccagcggccgacgacagcagccagaaaatcttgggtcccaaaatccaattgagtctcctctctaatcttggatctgcattcttattttgcatttgatagtaattagccaattagaaattggtttgatttcctggatgaagaggtgctaaacattaatatcatttctgtccacccaaccccagaaacaacagaaactgattgagtacatcacaacactagaaacaggcggaactgaggatagtaacaatgggcaaaataatgttgtgcttgctccaaatgtgattgttgttgaccgggctgctcacaccaattgaacaattggatgtaaacattaggtagaagggattatttgtttgtacagtccttagagaaccacttgacacatttatttgtgacattgagatttgatttggatcc

SEQ ID NO: 29130 - DNA, 399 bp, Oryza sativa
  Clone ID: PAT_MRT4530_33663C.1
atgggatcgaggcaacccgcaggaagtagcctcgtcgcgcctcctcctccggtcaccgccgccattgccgcgaaatggaatcggttgctcgccgccgccgccgccgccgcctccatagtcccacacggccaccacctgccgccgccgccgaagccccccgacccgacctccatctccgacgaagctcctcattgccatcgcgcggcccaactgccgccgcggcgagcccgcgagagcccaataagtgttcgatctctcccgttcttcaccggctccgggacaaacaggagaagttgcagcatcaataatgaggcgtttgtacgcatccaatccacaacgatatatcttaatatctatatcccggctatgatgcatataagggagatcgagagagatcga

SEQ ID NO: 29131 - DNA, 624 bp, Oryza sativa
  unsure (1)..(624): unsure at all n locations
  Clone ID: PAT_MRT4530_33664C.1
tcgctctggtacgagctcgcctacatcgatggccaatggggcgcatgtcgccgncggcgatccgctgtctgtgcagatctggcttcggtcacgcggattcagagtgcaacagcgccgtntggaagtgcctcctgcaccgtcatagatcgcccgtccgatctgggccgtgtggatcgatctgcatccaccgctatccccggtcgacagtcccggagggtcgntcaagctgtgatcgaagtccatgggtagcctcagccgttgccctcgccggcggccggtcgcgccgccgccgcagttaccgtccccttacaccgtggtacggtcacccgcgaagcgtgcggtccgtcaaactgttggagcgtgtcgttaagtgttgttggtgnttgttcgtgtcntgtgtccgtccgtgtgtccccgtcccgtcgcgttcgtgtaagtgttgttgttgtcgttggtcgtgtcgcgtgtgttagtgtgtgttagtttgttgtgtcgccgtagtaaacacggagttaaagtcgatatactttgtctgatgtgtcacataaggaatgatcattcacaggagattaattattatatatttttttaattttcccaatttaaaaaaaaaaaaaaaaaaaa

SEQ ID NO: 29132 - DNA, 391 bp, Oryza sativa
  Clone ID: PAT_MRT4530_33665C.1
gaatgttctaatgatggtttcaacagtcattccaattttaaatcgacactgaatccaggtgcacataaacggttaactcaaaagaagtattagcgaaacagcacataattgcaacccaggcatcaccaaagcccatacattgcattgcggatccacagaacactcaacgaatacagtatcatcgcagaggcaggctcaagttccaattttgagcgcaggaccgcacaagaataccaccgcgatattcaaaccattccaatgtcattacaagacgacgtgggaacgcttcaacgcgcctagactcagagaagagtctatgttactgctggatgtccacggaaatgacataaccctgtcacagcactctgagctctcataacattgaagtcca

SEQ ID NO: 29133 - DNA, 498 bp, Oryza sativa
  Clone ID: PAT_MRT4530_33666C.1
ccacgcgtccgccggagcgagcgctgctcggatcggattgggtccgtggaggcgagcgcacaatttctcgtttgagcaagcatggttagcacaataaaggtccacaatgtctcacttgaagcatcagaacaagatatcagggagttcttttccttttccggtgtcatcgtacatgttgaaatgcaaagtggtgacgagcggtctcagtttgcctacatcaccttcgaagatgacgaaggagcagagagggctatgcttctcacgggtgcgactatagtggatatgtctgtcatcataacaccggccactaattatcagctgccggcagccgttttagctgatattgagtctaagaacgctggtggcatggaatctgcacttcggaaggcggaggatgctgttgtttccatgttggccaaaggatttgtccttgggaaggatgcccttgaaagggccaagtcttttgatgaagagcgttaggtgacatgcaccgggact

SEQ ID NO: 29134 - DNA, 1838 bp, Oryza sativa
  Clone ID: PAT_MRT4530_33667C.1
atgctgctgggtgccatgagcggcggcggcgtcgtcgtcgccgtcgccgtcgcctacgccgccctggccgtggtggcgctgcggatggcgctgtcgtacaagtcggcgctgtacgcggtgcggcggctgtggcggtgggccgacgagtgggcgcaggcgtaccagtaccacgaggtgccacgcttcgcgtgcgacggcggcggcgccgagaacccgctgttccgcaaggcggcgcagtacgtggcggtgctgccgtcgctcgaggacgccgacgccgcctccgtgctgtcgtccgcgtcgaggaccaacggcggcttctccctgcagcttgggccaggccacaccgcgcgcgacgccttcctcggcgcgcgcctcgcgtggacaaaccggggcgacgtgctggttctgcgcgtgcgccgccatgaccggacgcgcgtgctgcggccctacctgcagcacgtcgagtccgttgccgatgagatggagctccggcgacgcgagctgcggctgttcgccaacaccggcgtggacgggagcaccgggacgccgaggtgggcgtcggcgccgttcacccacccggcgacgcttgacacggtggccatggaccccgacctcaaggctcgcgtccgcgccgacctcgagaacttcctcaagggccgcgcctactaccaccgcctcgggcgggtgtggcgccggagctacctcctctacggcccgctgggcaccggcaagtcgaccttcgcggcggccatggctcggttcttgggctacgacatctacgacgtcgatctctcccgcgccggcagcgacgacctccgcgcgctgctcctgcacaccaccccgcggtccctcatcctcgtggaggacctcgaccggttcctccagggcggcggggccggggacgcggaggcgagggcggcgagggtgctgagcttcatggacggcgtcgcgtcgtgctgtggcgaggagcgggtgatggtgttcacgatgcgcggcggcaaggagggcgtggacgcggcggtggtgcggccggggaggctggacgtgcacatccacttcacgctctgcgacttcgaggcgttcaaggcgctggccagcaactacctcggcctcaaggaccacaagctgtacccgcaggtggaggagagcttccatggcggcgcgcgcctcagccccgccgagctcggcgagatcatgctcgccaaccgctcgtcgccgagccgcgcgctgcgcaacgtcatcacgaagctccagcacgtgtccggggcggcggcggcgccgcggccgccgcacaggcggaacacgagctggtccggcgcgggcgggccatgggaggagcaggccgcgcgcgccagcgcggacgcggcggacggcggcgaggaggcgatcacggcgacggcggcgtgcggggtgttcgcgaaggacgcgccgatgagggagttcaagaagctgtacgggctgatcaagatcaggagccggaaggagggctccagcgggttcatgcccttgcacggcggcgaagcgccgtcgccggcaaacgggcggggcagcgagcacgacaaggagcggtgagtcagcgccgataaggaccggtgataaattaaagaaaaacattttgcacttgccctcttcttcttcttcttcttcttcttcttcttcttctgcttcttcgccctcgtgcgccgcttcgctcttgttcgttgttcttctcatttgtaatttgggggctgtaccttgtagtgtagtagcccattgccaaaggatggctcaactcaaattcaatgcaccttggagtggccaaaacaatcaaaacattcgaaaaaaaaaaaaaaaaaaaa

SEQ ID NO: 29135 - DNA, 1543 bp, Oryza sativa
  Clone ID: PAT_MRT4530_33668C.1
atgtctcacttgaagcatcagaacaagatatcagggagttcttttccttttccggtgtcatcgtacatgttgaaatgcaaagagcaactaaccttcaaagacagctcacgaaggaggatatatggctctaacctttttgcaatgcttttcagtggtgacgagcggtctcagtttgcctacatcaccttcgaagatgacgaaggagcagagagggctatgcttctcacgggtgcgactatagtggatatgtctgtcatcataacaccggccactaattatcagctgccggcagccgttttagctgatattgagtctaagaacgctggtggcatggaatctgcacttcggaaggcggaggatgctgttgtttccatgttggccaaaggatttgtccttgggaaggatgcccttgaaagggccaagtcttttgatgaaaagcatcagctcacatccaccgcaactgcgaaagttacctcgcttgataggaagatgggtctaagccagaagttcagcactggtaccttagtggtaaatgagaagatgaaagaaatggatcagaaataccaggttgcagagaagaccaaatcagcattagcagctgcagaacagacagtctctactgctggctctgcaatcatgagtaacagatacatccttacaggggcagcatgggtaaccgatgcctatagcaaggttgcaaccactgcaactgatgctggagcaaaatcaaaggaaatggtggtggctgagcaggatgacaagcatcaagatgataaaccggcaaaggactattctcctataagctctaaagagtttgtacaagagggcaagcatcaggaaggtgaacgaccaaagaagaacatgccagaaaaacctgaaatgggtaaacgggagctggaaaatcaggaggccgcaatcccaacagcccatgcgcaagaaaatgcccaaataaccgggaaggagcataagcatcaggaggctgatttacctaaggccgatatacctggaagtttcacgatggccgcgaaaagtgaaaagcacaggaacccgtacagcgaattgtcgaaaacccatatcccaggaagccctgcaacgattcctgtctgcacggccactactgatgtgaacagtaccaaaactccaaagaagccagagaatgccgagggattcatctgatgatgtgttcgattcaaagaatgtaaatatggatgtgggatgccggtgatgtttttgattcagcttataatgtggaacttgccatctttcagatatcgttcacaattgtttccagattttaagattgtaatgatcaccttttcgttactgtttttgtgcagttttggtccacatttgtattctaggtcccttttttatgcactactttcttatatgtgaaacaaactgtgccggcagttgtatccttagaacaaatcaagtatgccgtctgtttgttgcccgctcaaatgtttttcttatcctagactattgctgcagacacactttgtatccaattcggcaattcctatgcaaatatggcctatgg

SEQ ID NO: 29136 - DNA, 1050 bp, Oryza sativa
  Clone ID: PAT_MRT4530_33669C.1
ttagatccccggtctgaccgccgagatcagctgctgctcgctgtcgccgctgccggtctgaccgccgcttgccgccggtctaaccgccggtagatcgcagagcccggtctgaccggtcacatgaaataatgaatcctgctggccatcatcttcccaatcaatggaaagggcacgctggatcgctatggcctcaatagtttcaggcatcattatcccagggaccagctcactgcatgcatacaggcagtctccattgtggtctcggatcaccacgcccacacccatcttgcgagatgactggaagatcgcaacatctgttgatgaggaaagtccctgccgacggtggcacccatctagcaactgaaggaggggaatcacaccaggagtacatacttgtgttcttggacctattttgaacacccccatgacctcctccttggacaccaatgttatcagtgggatgagtgcaaaagggatctgaatcgactgaagcacattgagccactcgttcagaacatccaatgcagagtcagacgtgttgaaccacacagcaacagcggcataagttccagttatggtgctacttgttccagcggtgatgacaacgccggcccagagcggcatgaagccatggctgaggatcctgatagcgacggcgctcctgatgacctcctggatgtcggcgctgaccatggcgacctcggccacgagccagagcgcgcggtgcgcccagtccgggtacccgccgcggcagagctcggcgaggtgcctccccgtggccaccctgaggcgcgcggagagcagctgcacgagcaggcccatggccgtggtctagaggagcagccagagcagcgcgtcgccggcggccgcgccggcctggaggtcgtcctcgaggttgcccgggtccaggaacgcgacgctcatcaggagccccggccccgtgaacagccacagcctgcgccacgagaagggcggcacgggcacgcgaccgccgccggagaaggggcggtcgtcgtcggagtgggagtcaccggaggccgagacgattag

SEQ ID NO: 29137 - DNA, 338 bp, Oryza sativa
  Clone ID: PAT_MRT4530_3366C.1
gccacgcagaggctggtccagaggaggctccacgaccgccagcgcgcgcttgcgggcgcgcttgacatggtgctgaccatcacgccgacgtccaccggcgcggccctggtcctggcgctcctgatggcgaagctcaaggggatggtgctccggatgccgcccccgaagccgtccccggacgagctcgtggtgcacctgttcaagcagaccttcaacaaggcggtgaaccaggcggtgcacgacaggttccgcgacaggctcaagggcatgctcaagggcttcgacgaggccttcgacgtccccgacttgagcggctcctacaggtgctgcaccatgta

SEQ ID NO: 29138 - DNA, 1037 bp, Oryza sativa
  Clone ID: PAT_MRT4530_33670C.1
cgcgacggctgccgatggtgttaatgcttttggtggtcaacaccgcatggtaccggttcgggctctcagtgcctttgcccagctcctgctctctcctctcctagtcggtcctgagagccggacgattcacatgctgggcatatttggtctgccggtggtcggcaatgctgggtaacttgtctgccccgtaggtcctaggcccgtcgccgaacagtcacggtactttgggctccttggagccgttgcattgtctcgcgggccgactccggtggccctccgacaggccttgtcggggaaggttggttgccctgcttgtgctgggtcgtctgggggcctgccacggttcgtcggtccccctcgaccccatgcgaagtctcccgcgcgggctcctcgagcactccttcacaattgttcaactaaacatggaggcaatagtacaagagatgctccaagcacatggacttatagaaataatgagacgaactgtgctgatagaactgttccgagaacagcacctcagcccaatgatcacgtggattgcagggttagtggctttgctgaagcaactaattttaatgatcaagcaggaagacaccaaggttttagaccttcctcctttggaactaccaaccattgtcaaggccagataattgatcatgcagtagctgcttccaagcatgctgaggttaataatagtatgaaatcaagagatgtcaacctcaattcacgcctgaacacaatatcctttcctatgccgactgcaaacaatgaaacatcgacctaacttaatgacgtgagtcggtcatgcattactgtttagacctttctcctttggaactaccaaccattgtcaaggccagataattgatcatgcagtagctgcttccaagcatgctgaggttaataatagtatgaaatcaagagatgtcaacctcaattcacgcctgaacacaatatcctttcctattgcaactgcgaacaatgaaacatcgactgcccttaatgacgtgaatcggtcatgcattactggaaaaggt

SEQ ID NO: 29139 - DNA, 606 bp, Oryza sativa
  Clone ID: PAT_MRT4530_33671C.1
atggagataatgaagctgtgtgttcaagttgtttattcagcttctgcacgctttgtagagaccgccgtcatgttggggacaaatttcgctacactttatggattgaaacgccaagaagcaggaaaattacagggagatcagcataagtttctggaggaactacgcagcatcaaggcaattatgaaggactcaaaaatgtgcccgcggtgcaagatggctatccataagatagaaggatgcaataagatgtcatgtagtaattgtggccagtacttctgctaccaatgtaacagtgcaattgaaggttatgaacatttcaggggttcatgtaagcttttccctcaagaagagcttgatagatggaacatgcaaatgaatccgagggtccagcgtcaaaatgttgcacaagtgcaagctgaaatgtttcggcaatttgctcatccatgccctacttgccggcaaccatgtccgaagatgggaaacaacaaccacgtcttctgttgggcatgccagaagcacttctgtgcactgtgccggaaaactgtccacaagacctcacagcattttggtccaaaaggatgcaaacagcatactgcagatccctga

SEQ ID NO: 29140 - DNA, 1359 bp, Oryza sativa
  Clone ID: PAT_MRT4530_33672C.1
ggcaaaggtatagctcggtgtgatgcatacgaggagcccatagacgtttcggacgacgacgacactgacccgagcaatagcgatagccatggcaacgacctgcctgccaagctgtccgatctaccacgtcattttggcgaacgatgcacgcagatgttggatgaggccatggcagagatcaaagattcatttcaggcaactcaggcaggcatcctcgcattgttagcgaagcacaacgagaaatgcggccacgtgttatcatcattaacggaaggcatacaggttgggacatgggaacacggtgaggaataatactcgtgtgtaatgtatcaagctgtcgacgctgacccgcatcgatcctaccccccatcaccttctgctatagtcaccagcgctagcgacgataggatatcatccaaaacgtcatgagttggatcaagtggaggcaaaggtgacccaatagggacaaaaaaatttccaagttttgcaagtgggaggaactatctgtgtgctgaccgtgcaaatccgttgtcggtgtcacgcacggcccgtatcgcacatcaccatctattaaaatcaccagcccaagcgacgtcagcagttcatacaaaccatcgtgggttggatcaaggagacggcgccacattggatcaaaacaacaatggtgcacaggataagtaccaagggcaatcagaacgttgcgagacgcagatgacgaaagaggcggggaatcatctaaggccatcttgcatgtcatcgttttcaatgcgcacagttcatgaatggtggccaaactctatattagctgggagattattccgttggcttgaggagtcatgtgatgacgatataaccggggtttggttcaagcacgacaagcctacatcaattgagataagtgccaaggaaatcaaaatgcaggtcatccgcggtggtattctacatgcggacctttgttcagcattgatcagactctaccaacagttagatgccaagatgaatacaaacccatgtgggcagcggtggcgtcacttcttcctaccccaattcgcgaaagctttgatgtttgaacgaaacttcagttccatgaaagcagtcagtgacatgtttgatcaacatattagcggctacaaaatacagaactgccaactgctcatttccccggttcaattagctagtgatacatgggcatgctacatttgggacatgggagaagaggcaaatgcacattttggaccctgtcttgcaacaccgggaggtctccgatcattgactcgtccctcacaagtgaagaaaggggacaggaacggaagtaagcaggcatcagagcaacatttgtgcagacctactactcactag

SEQ ID NO: 29141 - DNA, 405 bp, Oryza sativa
  Clone ID: PAT_MRT4530_33673C.1
atggaggatcatcagggtggcggtgtaggcagggcgagcaacaagatcagggacatcgtgaggctgcagcagctgctcaagaggtggaagaagctggcgaccatggcgccgggggggaggagcggcgtgcccaaggggtcgttcgcggtgtacgtcggcgaggagatgcggcggttcgtgatcccgacggagtacctcggccactgggcgttcgagcggctgctccgcgacgccgaggaggagttcggcttccgccaccagggcgccctccggatcccctgcgacgtcgccgccttcgaggccaccctccgcctcgtcgccgccggcaacggcaacgccaaggccaaggacgacgccgccgccatgtgctcctgctcctccgacaccgagatcttgtgcagatga

SEQ ID NO: 29142 - DNA, 492 bp, Oryza sativa
  Clone ID: PAT_MRT4530_33674C.1
ggggggggttttttttttttttttttttttttttttttttttttttttttttttttttttttttttttttttttttttttaaaatataaaaaacaactttttttctttttatatcccccaaagtttcacatgtcacatataaaaatttggggggtgtgggggactccccaaccactttacttttaaaactcattacaaaacacccccaaggggggtaatggtcctgggtcccccataatccctaggggggatcccctttttagatggccccttaaaacccaacagagcttgagcttgaccccgtttcccttcaaagtaaaaatcaccaaaccgctggagttttagcttcttccctttggcctgaacaatgttaatgccctgatagggaaattgttgcccccccagcccgagcttttccccaacttggttgtttttcattttaaaccccccttattgcaaaaaggggtttgccgtttttccatatttgtgcct

SEQ ID NO: 29143 - DNA, 427 bp, Oryza sativa
  Clone ID: PAT_MRT4530_33675C.1
atgtcaagaatcagacttatcaacgaatgggccaaaaatgcagaaatgacatgaccaattgggccaaaattcacaagtctgcacatgggagcaaaagaggaggccaccagccaaaacctgggctggttgggccgacccatggttcggtcgaaccctcctcagcgccgctcgatccagggttggtgatggatggtgtggatggcttccctatagcgattgaagggatattagaatagtatttggtaatttaagcatggtgtttagattactggatatcattatttggggttatatgttgtagaagcgaggtgggccgctgatggtgacagctcagtacattatttctgcgctattgctgggaattatatttctagtaacgtcgttaagaaataccaacaagttcatgctggttttaaggagtagatct

SEQ ID NO: 29144 - DNA, 827 bp, Oryza sativa
  Clone ID: PAT_MRT4530_33676C.1
agtaaccaatctgagtttatttatatgtttttttgacacgagtttatttatatgtgattatcgatatgtaaaactccaaaggaaccaaacaaaaccatacatgcatatgccatatactccaaaaggaggagtataagcctgtgcacgcacatgcttcgtaattattccatccgtcttttaaaaaactaatatctccgttccataaaaaactatggtaccggatgtctgattcgtagtactataatgtattacatccgtactagggttgattttttattagacggagggagtaaagtccaactagtaataattaatataattagagtgaaactaatacatatatttgagcatgattatttggtagaagaagcaggcgtgaaggagacgagctccttggatttgagccaggccttcaccaccaccacggcgtcgaacacccggtcaccgccggcggcggcgccgccgcgggggtccctcgcgctcgcggcgaccttgaggtagtaggccacgccggagacgacctgcttctgcgcctccacgacgcgtgcgaacgcgagcttcaccgggacggggtcggcggggccgccggagccgccgtggcggaggcggcggttgtgctcggcgacggcgaagcggcccagcgactgcaccgccttgttgctgcccacgtccctgatctccgtcctcccgccgaccagcacgggcgccgccggcgccgccgcgttcgacggcgatgcctcgtcgccagtggcggcggcgactagtactagtaggagggagacaaggaagagcataggagaggtggccattgttgcagccctcgtccg

SEQ ID NO: 29145 - DNA, 384 bp, Oryza sativa
  Clone ID: PAT_MRT4530_33677C.1
atggttcaacgtacgttagaagtaagaggatatgctgatatatatgcatggataggcatcgccggcgcggtggagggcggaggcgtcggctgcggcatggtggaggacggcgttgtcggccacggcgcggtggaggacggcggcgtcgaacgcggcgcggtggaggatagcggcggccgccacgcggtggaggcggaggcggcggccgcggctcggtggagggcggaggcggcggccgcggcgcggtggagggcggaggcaggccacggcgcgatggagggcggaggcggctgcagcgacgcggtgcaggctggaggaggaggcggctgcagcgacgcggtgcaggctggaggaggaggcggcgctgtgcggcagtggtggtag

SEQ ID NO: 29146 - DNA, 309 bp, Oryza sativa
  Clone ID: PAT_MRT4530_33678C.1
atgcgccgcccatggaagcacccgacgccggccaccactgccgacgctgtggcttggcaccgcgccgccgacctcttcctctgcgaggtcgggctcctccttcgccgccgtattccactcaccttgcttgccgccatgcgctgcccgtccaagcacccgccgccgcagcggctcggcacggcgctgctgacctctgcctctgcgaggtcgggctcctcctccgccgctgcttcctccgccgtgcgacagcctccgaggtgcccccacccctcggccgacgaaatcagcggtagcgagctcctcgcctga

SEQ ID NO: 29147 - DNA, 145 bp, Oryza sativa
  Clone ID: PAT_MRT4530_33679C.1
cgagggaacgttgccgggacgctggggtacatcgcgccggagtaccaccagacgctcaagttcagcggccaagtgcgacgtgtacagcttcgtgcgtcatcctggcggtgctgggcaccggtgaaggagccgacggacaggttct

SEQ ID NO: 29148 - DNA, 3693 bp, Oryza sativa
  Clone ID: PAT_MRT4530_3367C.1
atggaggcgaatgactggctccatgccatagagaagaagctgaatctcctgcagtgcaatgatcaggagaaggttgctttcgccacacaccagcttcaaggtcctgcgtcagcttggtgggacaatcacatggccacccgcccgccaggcactgaagtcacttgggcggagttctgtcgtagcttcaggaaggcgcaggtgccagacggggtcgtggcacaaaagaagaggaaattccgggcactccatcagggaaacaggacagtgaccgagtacctccatgagttcaatcgcctcgcgcgatatgcatcggaggatgtccgcactgacgccgagaagcaggaaaagttcatggcaggtctggatgacgagctgaccaaccaactgatatctggggactacgcggattttgaaaggctggtggacaaggcaatctgtcaggaggatcagcgaaataaaatggacaggaagagaaaggcggcacagttccggtccaaccaaggaaaccatcagcgaccgcgcttcgctcccgggcagcagggtggacctaccaccatgatcgtccgccagtaccgcccgttcaactctagcaacttccaccagggcgccagtggcagtcagaaccaccatggaggtcagcccaaccgcggtgcagctccacgcccaccagtggcaccggcacagtcaggcccgtccgcgcaagccaagaaggagactggaacaaaaccagggtcttgcttcaactgtggcgagcttggccactttgctgacaaatgcccgaagcccaggcgtgccgggccaaggtttgtccaggctcgtgtcaaccacgcgtctgcagaggaggcgcaagcagaaccaaaggtcgtactgggtacatttcctgttaactcaatccctgcaatagtactttttgattccggtgcaacgcattctttcatttcaaagaaatttgtggggatgcatgggttaaggaaagaagagcttaatacaccaatgagggttcataccccgggaaatagttcaacctcggtcagttttagcccttcagtgctaatagaaatccaaagatcaccatttctagccaacctcattcttcctgaatccaaagacctagatgtcattcttgggatggattggctgaccaagatcaagggagtcattgattgtgcgaatcgcacagtcaccttgaccaacgagaagggagaaaccgtagtgtacaaatcactagtctcaccaaagcaaggggtctccttgaatcagattgaggcggaaatcccagtggtcacgaaggagaagaatccgaggaaattggaagagattcccatagtttgcgagtacccagaagtctttcctgaagacctcactaccatgccacccaagcgagagattgaattccgaattgatttggcaccgggaaccgcgccaatttacaagagaccgtacaggatggcggccaacgaactagcagaggtcaagaagcaggttgatgagcagctgcagaaagggtacattcgaccaagtacttcaccttggggtgctccggtcatttttgtggagaaaaaggataagacgaagaggatgtgcgttgattatcgcgcactcaatgagtttgttgtcgttttcatcgacgacatacttatctattcaaagtctgaagaagaacatgagcagcatctccgtctggtactcgagaagttgaaggagcaccagctatacgccaagttcagcaagtgtgacttctggttgacggaagtcaaacttctgggccatgtcattacagctcagggtgtggcagttgatccatcaaacgtggagttagttaccaaatggaccccactgaagaccgtgtcgcagattcgaagttttcttggactcgcagatgaaagacttccaagtctattgcgatgcatcccgccacggacttggatgtgtcctaatgcaagagggcagagtggttgcgtatgctcgcggcagttgcgtccacacgaagggaattatccaactcatgacctggaattggcagcagtggttcatgctttgaagatctggaggcactatctgattggcaaccgctgtgaagtatatacggatcacaagagtctgaaatacatattcacccaaccggacctaaatctccgacaacgaagatggttggaattaatcaaagactatgatatgagcattcactaccacccggggaaagccaatatggtggcagacacattaagcaggaagagttactgcactgccctatgcatcgagggcatgtgtgaggaattgcggcaggagtttgagcatctcaacgtgggaattgttgaacacgggttcgtagccactctggatgcacggcctacgctcgtggatcaagtcagagcagctcaagaactgaaggatctgatactcaccgaggctcatcagacccagtactccattcatccaggcagcaccaaaatgtatcaagacctcaaagaaaagttttggtgggtcagcatgaggagagaaatagctgaattcgtcgcactctgcgatgtttgccaacgagtgaaggcagagcaccaaagactagcaggtttactccaacctcttcaaatcccggaatggaaatgggaggagattggaatggactttataacaggactgccccggacatcatctggtcacgattcaatctgggtagtcgtggatcgactgactaaggtttctcacttcataccagtacataccacgtatacgggcaaaaggttggtggagctctacctctcgagaatcatgtgtctacatggagtacccaaaaagattgtaactgatcgagggagtcagttcacctcaaaattctggcagaagctgcaggaagaattggggacccgtttaaatttcagcacggcctatcacccgcaaactgatggtcagaccaagcgagtcaatcaaatcttggaagatatgttgagagctagcgctcttgattttggtggagcttgggacaaaagcttgccatatgcggaattctcgtacaacaacagctaccaggctagtctacagatggcaccgtttaaagctttatacgaccggaagtgccgcacacctctcttctgggatcagataggcgagcatcaactattcgggacagaggtattagcggaagcagaagagaaagtcagaaccatcagggaaaggttgaggattgcccagtctcgacagaagagctacgcggataaccgccgaagggagctcacttttgaagcaggggattacgtgtatcttcgtgtcactccgctccggcgagtacaccgttttcagacgaaaggcaagttggcaccacgcttcgtgggaccatacaaaatcttggaacgaaggggggaagttgcttatcagctagaacttccatccaatatgatcggcatccatgacgtgttccacgtgtcccaattaaagaagtgcttaagagtacccaaagaacaagctgattcggagcatattgatatccaggaggacctgacatatgtggagaagccggttcatatacttgataccagcaaaagaagaaccagaaacaaggtcaccaggttttgccgagttcagtggagtcaccattcagaggaggaagcaacctgggaaagggaagatgagttgaaagctgcccatccgcacctcttcaccagctcctccgaatctcggggccgagattccgtttaa

SEQ ID NO: 29149 - DNA, 309 bp, Oryza sativa
  Clone ID: PAT_MRT4530_33680C.1
gtgtatatagacattttttttgtaaacctaattacatgcgtggtgtcaggtagacagacaaattccacaggctgaagcttaacttttcgcattcaaccaagccctgcggaaaaacatttggtccacgcgacagaaccctgaccaaatcaaaatctgggagatttcaccccacctacacaaaaggaacccctaaaagtaaaaacaaagtttccaacccaaaacaaggaaaccgattctaggccttcaaggaaattccaggggcccacatacagtcaatccatcaattgtgcgcgccctaacgggggaaaa

SEQ ID NO: 29150 - DNA, 1604 bp, Oryza sativa
  Clone ID: PAT_MRT4530_33681C.1
tggatccccgggctgcaggaatcggcgcgcggcacgagggcagcaccttatattcttcctacatattcattctccccacaacaacaactaacactactcactcttcattgctttttttttctctctctagctagctagcttgcttctacttcttcttcatcttgatcttgaaactagtcttatcaatctgaggaattaatccatcattatgatgaatcttatatcatttgaaacgcctcctcttgggaggaggagtcaagatggaggcagcagcagcagcagcatcactgctgctacaaccactatcaacaaggcaaaggaagcagcaagccatctagacctcagcctcggcatctccttgtcacccggcggcggcggcggcgacgctggcaccaaggccagcagctgctgctacggcggcggcggcgacggcggcggctgcatgggcagtggcatgctcactgcaggagttcttggcgttgggcatggggggagtagccatgacaatactacgacgagcagtggcggggtcgctgcaggagttcttggcgttgggcatggggggagtagccatgacaatactacggcgagcagcggcggcggcggcagctggacggcggcgttcatgccgagcccgacgggattcatgcacccgtggagcctcgccgcccggcagcagaaggccgccgccgagcaggagcggagcggcgtcgcgaggctgccgccggcgacgacgacgtacatgccaagagctgccgcgaccgtgatttcactgccggcggcagttggctggccaccggtgcacacatcccggcgtaacctcgttgccaccataaataatgtcctgaaacccgacactactgccgccgtcaagccggacagaccgacacaagcaacggcgatgttcgccgccgacgaaaccacggcgcccccgccaaggagcgcggcggcggcgaccgaggccagcaggacattgaacatgtttgccaaggtgcacatggatgggtacaaggtgggcaggaagatcaacctcagggcacaccgcaactacgactccctccgtcgggtcctcaccaagatgactcataatttcttctgccccgcagattattcaagcacaaataagggagaagaagattgtgctaaaagtgacgagttcatatttctatatgaagattttgagggcgaccgaatgcttgttggcgatgtcccatgggagttgttccttgcatcagcaaaaaggttgtacattgccaaaaacccagcacccagaaacaaagaacatgctgaaatcgccaaaaggaaagaaactgaagatgcaatagataactgaaggcacctgaaaagcaagttgatctctgcatatactacaatatgcacttctcatgatctgacatatatagctctcgacttgtgctgttcatcttgtattataataagctatcttcgaagagtaggtttataatgtacggatgcatgttaaaatgcttcttgatcactgtgcatacaattttgcgggcattaggtaagtactctgaaaaatgtactagacacggattcagtatgtctacacaaagtggataagactcgtctaataattaact

SEQ ID NO: 29151 - DNA, 843 bp, Oryza sativa
  Clone ID: PAT_MRT4530_33682C.1
atggatctagatggagttctactccgatttgcagaaaaacgcttcagggatttcacccgtgggtgtgatccggttggaaaatcgagtttggaagtggagggtgtctaccagttcatcgtacagggaggcccatggctgcacagagaagatgctcttatggtggcaaagtttgatggaattactagtccgtcacaggttccccttgagttaaatcctatcactatgttggatgttgtattatccaagtattatgcagataaggagtgtgataggaaactggccacaggttttcaacctttccaattctccgcagagctgcgttgttcacctctgaaaccatttgagaggaagatcaataaggtgaagccgatgcagagtacaggggttgtgtgcaagctcattttcaaaggtgtgggcagtgcaagctcaacctcgtcgtgtcaagataaaggagaacaatgggacgaagccattccccggagggtggatgctcaggatggttttgaatccagagagaaggaggaagatgagaagatagatcaacaattggcagagcaagcttgcaatctgcaggtttctgttaagaaggtggcgaggcagcaggatagttcgtcagaaggtggtcgtggagggacagaggctgcacaacttccctcagaagagatgattccagtgataaagaacctacaccaacaggcgtcgtttggggatggatcaactaaggaaagtaatagccaactcaagagaagatctcctgatcagggcgctgctaaacagatggggagagtgcaaccggcctttttgggctatgggcagttgacaggggacaacaagcaactctag

SEQ ID NO: 29152 - DNA, 1657 bp, Oryza sativa
  Clone ID: PAT_MRT4530_33683C.1
tacggaatgctagggttttggcggcgcctgggcgaccaggaggcggcagccatttttcttgtgtagagatggatctagatggagttctactccgatttgcagaaaaacgcttcagggatttcacccgtgggtgtgatccggggatatttaacggtgtggcagaaacagaatcaaacggagtgtttgttttcgaaaaacaaggtcaaataagcaaactagaaaaatagggctaaattggtagttaggcttcgaaatagggtcaaataagcaaatgtcctataacaaacatatgggatctcatattgggaaacgttggaaatatgatcgtggatggtatttctggtttgagatcatgaagaaatcggactcggtagttgaagcgtataaagctgaggggactacgccgctactggttgaacccgtgaaatccatggaggtgctaggtctgctttggtttctagggtttagtcctcgaggcaacaagatccaatccatgacgtcttttgacggtgggggcgataaagggaccatcgttgagaaggttgcctgcccgaagccgtcgagcgacgccatggccaagatggcggtggatgatccaactgctttagctttggttatatcctctcaaagatagggggataaatgcaagctggttatatcctctcaaagctcggttcaaagagaagagcaagatagctatttgcagggacctggagcatttacagaaggcgaagtctatgaagaagaggacgtgattgaggtgaatttagaggaagaagaggtcaagcaagcaggacaatggtcaatcctggaatgatattattcgctgaaaacgccgaatcagacagctctttttgatgatatgccacgggcgtggaggctgaaatctgacataagtttaagtctctgagagacaatttgttcattgttactttcatagtggagggtgtctaccagttcatcgtacagggaggcccatggctgcacagagaagatgctcttatggtggcaaagtttgatggaattactagtccgtcacaggttccccttgaggtagttcccatctaggttaggatatatgatttaccgctggttctaatgacgaaagaaagaggaattttatatggaagcaaacttggccaggtcaaggaagtggatgtggaggatgacgggcgtaacaaacatgattttttttcccgcttatgagtggatcttcctgtcaagcgtcccctgaaaacaaagctagccattaaaatcaatgttcaaggtaatgaggtcgttcggcactttgatttgagatatgagcgagtgccacacttctgcttcatatgtggtttaattggccactcagataaggagtgtgataggaaactggccacaggttttcaacctttccaattctccgcagagctgcgttgttcacctctgaaaccatttgagaggaagatcaataaggtgaagccgatgcagagtacaggggttgtgtgcaagctcattttcaaaggtgtgggcagtgcaagctcaacctcgtcgtgtcaagataaaggagaacaatgggacgaagccattccccggagggtggatgctcaggatggttttgaatccagagagaaggaggaagatgagaagatagatcaacaattggcagagcaagctt

SEQ ID NO: 29153 - DNA, 386 bp, Oryza sativa
  unsure (1)..(386): unsure at all n locations
  Clone ID: PAT_MRT4530_33684C.1
atgaagatatctgagtttatttttaacttccgaacacactggaaagtcaaaactcagtacaaaccaccgccaagggaggtaaagcttctaggatggctctgggtcctccggaataccccgtgtagatacggcatgtagaaggcaaataaaaagccaacatagcttgagctcgagccagattccgatcaaagtagagaacaccaaactgctggagttgtagctgctgcgctatggcctgaacaatgttaatgtcctgatagtgagattgttgcgccaccagtgcgagctgtagccagacttggttgtttctcagttgaaacgcatntgattgtatgatgggggttgatgttatgtcatactgttgtcttacgaactcattatatggg

SEQ ID NO: 29154 - DNA, 345 bp, Oryza sativa
  Clone ID: PAT_MRT4530_33685C.1
gaaaaggactgccctaacataccatgggtacaccctggggtcatatcagcagaggacttttacacaacatacacaacaccctaactaggccatagaatgacttgaaacgcggaccactacgcggaaccccagcttatttgtccttgtggatattggggccaggaccgatgacgacagccagcaggagcatccagctctttcgtgccgacggccatgacggcctctgggcactgatgcatcgtgcgaacgagagggtcgtggacgccatcgagacccttcttgttgtggttggcccaatcggcctcggcgacctggaggccgaccaggcacggcatggccgggtcc

SEQ ID NO: 29155 - DNA, 174 bp, Oryza sativa
  Clone ID: PAT_MRT4530_33686C.1
agcagcagatggttctcgcctcgcatgtttgccatgaacggatcaccggcaaattaatcctattgcatataatttggtctctgtattgtaaacgtttaattctttatacgctcccatcggatgcagctctgatgctagaaggagagtaaggagtataatttatgtcgaacgagt

SEQ ID NO: 29156 - DNA, 139 bp, Oryza sativa
  Clone ID: PAT_MRT4530_33687C.1
aaacatccatcttttgggttgcaatattgtctgggcaagtgttgttggaacaacacccacaaatgctgccttttgaggttccatgtagactgactcccatcctgggaaatgtattgccaatccagggatgacatccttt

SEQ ID NO: 29157 - DNA, 270 bp, Oryza sativa
  Clone ID: PAT_MRT4530_33688C.1
atgacgaaggaagtcgacgaggcaaccgccgttgcacaaggcacatgcgccgggagccgatgttgctcctcggcaccggtgggttggggttcggcgataggcgacgtgacgctctcgcacaacatcgtgatgcaccactcctcctcatcccgccgccaccgctcattcttgctccccaccatgttcatcgccgaccaggcccgccagaagcccaggatcttgcgccgcgtcaccatctccggctcctctctcgtcggctactgcccctag

SEQ ID NO: 29158 - DNA, 163 bp, Oryza sativa
  Clone ID: PAT_MRT4530_33689C.1
cacagattattttttactcagaaagactgaaacattcagaatttacataattcatttcttagttccatattatatatacacataattacatagacagtatcagatcatcttggaatgcatatctggagaaccaacaataaacatgcttacattaacaaccatt

SEQ ID NO: 29159 - DNA, 258 bp, Oryza sativa
  Clone ID: PAT_MRT4530_3368C.1
atgggctgggcaacgataacactcaacgctttcgctctggcatcgttggaggtccttcagcttttgagagtcatgggcaaaagccctgcatggcctttatccatgactagcgacatcgatgcctgcgggtgccgtctccttcttgaaggtgaaaaccaagtcaagttttggatgggtgttggcagcggcattgtcgttgcttccatccttggaggatatggcttgaaggtcctactctttcctcggtcgctcatatga

SEQ ID NO: 29160 - DNA, 302 bp, Oryza sativa
  Clone ID: PAT_MRT4530_33690C.1
gtggcggccgctctataactagatggctccgcgcgctgctgcaagaattctccacgagcagtgctccactattcatggatgctccacactcttgttagaaggacggatgcataggatgaccattgctttgatgaggaggctattccttgtgataagaatgatgacaattacattgattatgaccactgattatcgcaatatgacaggaaacacctctggatctatggctttatctatgcttgaacagtgctcacttaatctaatcctgaatgattacaaccaggctgataactttgctccaa

SEQ ID NO: 29161 - DNA, 205 bp, Oryza sativa
  Clone ID: PAT_MRT4530_33691C.1
ggcgcccttcctaccgtataagggattggtactgggggcatgatacatactgatccacatgcactgcattaaagttattaaaaacatatgcccagaaccgagaacactggtaacagagaaatatacatacagtggatgtaaccccgagaacaccaatctggcgaggtttacacactacgctgtgcagatatacatgtcacgtggc

SEQ ID NO: 29162 - DNA, 127 bp, Oryza sativa
  Clone ID: PAT_MRT4530_33692C.1
accttaaaagggccttggttaagggggaaattgggactaatcaagccgggccaagaatatttatttgtccccaaaacataagggattttataaccaaggcattcatacccttggggggaaaggggga

SEQ ID NO: 29163 - DNA, 240 bp, Oryza sativa
  Clone ID: PAT_MRT4530_33693C.1
atggcccccatcatgtatgatgggagggctgagagcaccgaattgatgagtgcaagccgaccatcggaagatagaagagaaaggaccaaggatagctttaagaaccacaagttgttgttgctctgccggcaagatgatgagactgtcgtcggcatactgcaagatggggcactggagagaatggtcaagcgggtggctcaggtctccgttgtgagaagcctggagcagcaggcgttgtag

SEQ ID NO: 29164 - DNA, 171 bp, Oryza sativa
  Clone ID: PAT_MRT4530_33694C.1
atgagggaggggtacaccgtcactgcgtgccaggacgcatttatcatcttcatttacccgtgtgtatctgaactgaagaagggagccagagagcgtctgctcgctttgccaaacgcttccaggcaaaaacttctgctggaccatggcgataaacttctgcaggaccatgac

SEQ ID NO: 29165 - DNA, 426 bp, Oryza sativa
  unsure (1)..(426): unsure at all n locations
  Clone ID: PAT_MRT4530_33695C.1
caaacaagcccgtgagaaaggtccatattagttacttaaggctactggattttccaacatggtaacaaggggattacaggcttatttcttcgaccggccgcgccgggaaaaaaaacaaccgggcagcttcaaccagggagatacagatcacttgagtacacacaacgacactttgcacagacagacgtattacccaacggactcttacttactactggagtactggacttagttactggctacttcgcagcaagcctatggcccgactgtcttaaatatgccaccggatgccatgggaacgccacgggatattcaagagaaagattcaccacagctaggttgagagttgagtggacttctacgcttgacagaagaaactactactagtacctagtaattagancctagtagtagcctgctttctgc

SEQ ID NO: 29166 - DNA, 1257 bp, Oryza sativa
  Clone ID: PAT_MRT4530_33696C.1
atgggcgtgatgcctccccgcactcgccatggtcaccgtacgcccactccggatcccgtgagtgagactgaggaatcgagcggagaggattacgctcaaagtgatgaagaggttgaagcaaatattgagggggctagtgaggtggcaagtggagatgatgtcagtggaagtggagaggatgaggatgaaggaaatgatgatatgcacattgatcccttcatccagtttgtggtgaacatgaggaatccatcgcagtataccatcttgaggcatcatgatcagttcttgaggcctcgagacaccctggatccccgttttcacaccgctttccagaagactgtgtatgaacaggtttatgcagggaaagcatttgcaaagcataagtggatttcttggagagacatcaatgagactccagagtttgagagcttgcaggatctcttcaagactgttggtattgaccggattgtgaccctcaagcaagactacaatgaatatttgatccggcagttctatgctacagtgtgggtggctggagactatagttgccggcttgaggactatcccagtgtggttaacaggattgtgagagctaccatccttcctcgccttggcaacaatgatgacattaggggggtggcttggcacgtcatcgatgcaatcattcagggtcgtcagttcgacattgtgtctctcatgatgcaagagattgccatctccaaggggaccttcactcagggaatctattatgccccttacatcatgaggttgattcaagacaagcttggggctgctgggcaaaatttgaagaagcacaagcagtacaagccccgccttcagcttggagctccccgtgctcctaggacggtgccctcttctcatcctggagctagctcaagctcagcacctcctcctcctcctgagtatgatccaaatgctttcttccatccacagtttgcttactttggaacgcaacccaatgaatacttcaacccggtacttggggctattaataccctaagtgaaagcattcaacgcttgtctaccgggcaagaagcattgcatgaggatgtttgtggcttgcgcaccgatgttggagacttgaatgcttccatggggagattgcacactagagtgggtgcattggattctcgagtccaaatgttggagagcacccaagcttttctatatcatcgtcttcctgatgctcctcatccttcctcttcggcgcgtcctccttctcctccacaagaatga

SEQ ID NO: 29167 - DNA, 1371 bp, Oryza sativa
  Clone ID: PAT_MRT4530_33697C.1
atggcaaaggctggaaagccgcgtcggtactccgaaagtaaaggcatcttgagcgaaggcatctcgggcgaactacaaagacttcgccatgacgagttcggcatcaaggaggcccaacaggccgcccccgtgatgcctccccgcactcgccatggtcttcatgcgcccactccggatcccgtgagtgagcctgaggagtcgagcggagaggattacgctcaagtgatgaagaggttgaggaaaatgttgagggggctagtgaggaggaaagtggagatgatgtcagtggtagtggggaggatgaggatgaagaagttcttgaggcctcgggacaccccggatccccggtttcacaccgctttgcagaagactgtgtatgagcaggtttatgcagggaaagcttttgcagagcataagtggatttcttggagagacatcaatgagactccagagtttgagagcttgcatgatctcttcaagatagttggcattgactggattgtgaccctcaagcaagactacaatgaagatttgatccgacagttctatgttacagtgtgggtggctagagactatagtgagatgaagtggatgtctgacaccctccagtgttctatctctcggaggcagttccggcggctcctcaacattcacttggattttagagatgatttgcatgaggagcacactcacaatccgctctccatagactatctctctcagttctatgaagatggagtgcggtacacacatgagaaggttgacggcttgaggactatccctagtgtggtcaacaggattgtgagagccactatcctccctcgccttggcaacaatgatgacattaggggggtggcttggcacgtcatcgatgctatcattcagggtcgtcagttcgacattgtgtctctcatgatgcaagagattgctatctccaagaggacattcactcagggaatctattatgccccttacatcatgaggttgattcaagacaagcttggggctgctgggcaaaatttgaagaaaaacaagcagtataagccccgccttcagcttggagctccccgtgctcctaggacgctaccctcttctcaccctggagctagctcaagctcagcacctcctcctcctcatgggtatgatccaaatgctttcttccatccacagtatgcttactttggaatgcaacccaatgaatacttcaacccggtacttggggctattaataccctaagtgaaagcattcaacgcttgtctaccgggcatgaagcattgcatgaggatgttcgtggcttgcgcaccaatgttggagacttgaatgcttccgtgggaagattgcacactagggtgggtgtattggattcttga

SEQ ID NO: 29168 - DNA, 1134 bp, Oryza sativa
  Clone ID: PAT_MRT4530_33698C.1
gtttatgcagggaaagcatttgcagagcataagtggatctcttggagagacatcaatgagactacagagcttgagggattgcaggatctcttcaagactgttggcattgactggattgtgaccctcaagcaagactacaatgaagatttgatccggcagttttatgctacagtgtgggtggctggagactatagtgagatgaagtggatgtccgataccctccagtgttctatctctaggaggcaattccggcggctcctcaatattcgcttggactttggagatgacttgtatgaggagcacacccacaatccgctctccttagactatctctctcagttttatgaagatggagtgcggtacacacatgggaaggttgccggcttgaggactatccccagtgtgggccgtcagttcgacattgtgtctctcatgatgcaagagattgccatctccaaggggaccttcactcagggaatctattatgccccttacatcacgaggttgattcaagacaagcttggggctgttgggcaaaatttgaagaagcacaagcagtacaagccccgccttcagcttggagctctccatgctcctagggcggcgccctcctctcatcctggagctagctcaagctcagcacctcctcctcctcctgggtatgatccaaatactttcttccatccacagtatgcttattttagaatgcaacccaacgagtacttcaacccggtacttggggctattaataccctaagtgaaagcattcaacgcttgtctaccgggtatgaagctttgcatgaggatgttcgtggcttgcgcacggatgttggagacttgaatgcttccatggggagattgcacactagagtaggggcggtcagaccggcctcacaacagcagtctgaccggcggcacatgcgccatcagaccggccccctggaggccgggatggtgctgctcgggatggtcgatacagagccgacggagccgtattcggtcagaccgagccgaggccggtctgaccgagccgaggctggcggggcgaaggccggcggggccgcgcccggcggcctggcgacggcgccgcgcgcggcggcgggcggctgggccgcgcccggcggtcgtggctag

SEQ ID NO: 29169 - DNA, 915 bp, Oryza sativa
  Clone ID: PAT_MRT4530_33699C.1
ttacccagcagccccaagcttgtcttgaatcaacctcatgatgtaaggggcataatagattccctgagtgaatgtccccttggtgatagcaatatcttgcatcatgagagacacaatgtcgaactgacgtccctgaatgattgcatcgatgacgtgccaagccacccccctaatgtcatcattgttgccaaggcgagggaggatagtagctctcacaatactattaaccacactggggatagtcctcaagccggcaaccttcccatgtgtgtaccgcactccatcttcatagaactgagagagatagtctatggagagcggattgtaagtgtgctcctcatgcaaatcatctccaaaatctaagcgaatattgaggagccgtcgaaactgcctccgagagatagaacatgtagcatagaactgccggatcaaatcttcattgtagtgttgcttgagggtcacaatccggtcaatgccaacagtcttgaagagatcatacaagctctcaaactctggagtctcattgatgtctctccaagaaatccacttatgctctgcaaatgctttccctgcataaacctgctcataaacagtcttctggaaagcggtgtgaaactggggatccgggatgtcccgaggccttaagaactgatcatgatgcctcaagatggtatactgcgctggattcctcatgtttacaacaaactggatggagggatcaatattcatctcatcacttccttcatcctcatcctctccacttccactgtcatcatctccactttccccctcgctagccccctcaacattggcctcaacctcttcatcactttgagcatactcatctccgcttgactcctcactcacgggatcaggagtgggcgcacgacgaccatgacgggtgcggggaggcat

SEQ ID NO: 29170 - DNA, 4251 bp, Oryza sativa
  Clone ID: PAT_MRT4530_3369C.1
atggtctacaccaggaatggtagccgcgcgacaggcgagggcagcaacggcgaagagcgcactgatggggcgcatccccacagcgattctggcaatggtccgccaccacttcccgagaatccgacgctagcccaagtaatggcacatcagacccagatgatggcagccatgatgcagcagatgcagcagcagcaccagcagatgcaccagcggatgctgcagcacgccgaacagcagcatcaacagtttggtccccctccccctcagtccaagttgccagagttcctacgtgtcaggccacccaccttctccagcaccaccaaccctatggaggcgaatgattggctccatgccatagagaagaagctgaatctcctgcagtgcaatgatcaggagaaggttgctttcgccacacaccagcttcaaggtcctgcgttagcttggtgggataaccacatggccacccgcccaccaggtactgaagtcacttgggcagagttctgccgtagcttcaggaaggcgcaggtgccagatggggtcgtggcacaaaagaagagggaattccgggcgctccatcagggcaacaggactgtgacggaatacctccataagttcaatcgcctcgcgcgatatgcaccagaggatgtccgcaccgacgccgagaagcaggaaaagttcatggcgggtctggatgacgagctgaccaaccaactgatatctggggactacgctgactttgagaggctggtggacaaggcaatccgtcaggaggatcaacgcaacaagatggacaggaagaggaaggccgcacagttcagggcacctcagggaagtcaccagaggccgcgcttcactcccggacagcagggtggacctaccaccatgatcgtccgccagcaccgcccgttcaaccctagcaacttcccccagggcgccagtggcagtcagaaccaccatggaggtcagtccaaccgcggtgcagctccacgcccaccaatggcaccggcacaatcaggcccgcccgcgcaagccaagaaggagactggagcaaaaccagggtcctgcttcaactgtggcgagcttggccacttcgctgacaaatgtccgaagcctaggcgtgccgggccaaggtttatccaggctcgtgttaaccacgcatctgcggaggaggcacaagcagcaccagaggtcgtactgggtacgttccttgttaactcaatcccttcaacagtactttttgattctggtgcaatgcattctttcatttcaaagaaatttgtcgggatgcatgggttaataagagaggaacttagcacaccaatgcgggttcataccccagggaatagctccacttcggttcaattcagcccttctataacaatagaaatccaaagatcaccatttctagccaacctcattcttctcgaatccaaagacctagatgtcattcttgggatggattggctgaccaagtttaagggagtcatcgattgtgtgaatcgcacagtcaccttgaccaacgagaagggagaaaccgtggtgtacaaatcaccagactcaccaaagcaaggggtctctttgaatcagattgagacggaaatcccagtggacaccgtggagaaaaacttgaggaaattggaagatatacccatagtctgcgagtatccagaagtgtttcccgaagacctcactaccatgccacccaagagagagattgaattccggattgacttggcaccgggaaccgctccaatttacaagagaccgtatagaatggcggccaacgaattagccgaggtcaagaagcaggttgatgagcagctgcagaaagggtacattcgaccaagtacttcaccttggggtgctccggtcatttttgtggagaaaaaggataagacgaagaggatgtgcgttgattatcgcgccctcaacgaggtcacaatcaagaacaaatatcccttgccgcgaatcgacgatttatttgatcaactgaaaggagctaaagtgttttctaagatagacctgcgatcaggctaccaccagttgagaattcgggaagaggatattccgaagacggccttcaccacttggtacgggctatatgagtgcacggttatgtctttcggacttaccaacgcacccgcattcttcatgaatctgatgaacaaagtgttcatggaatttcttgacaagtttgttgtggtgttcatcgacgacattcttatctactcaaaatccgaagaagaacatgagcaacatctccgtttggtactcgagaagttgaaggagcaccagctatacgccaagttcagcaagtgtgacttctggttgacggaagtcaaatttctgggccatgtcattacaactcagggtgtggcagttgatccgtcgaacgtagagtcagttaccaaatggaccccaccaaagaccgtgtcgcagattcgaagttttctagggctggcaggttattaccgccgattcatcgaaaacttctccagaatcgcccgacccatgactcagttgcttaagaaagatgagaagtttaaatggacagctgagtgcgataagagtttcgaggagctcaaaaagaaattagtatccgcaccagttttgattctgcccgaccagatgaaagacttccaagtctattgcgatgcgtcccgtcacggacttggatatgtcctaatgcaagagggcagagtggttgcgtatgccttgcggcagttgcgtccacacgaagggaattatccaactcatgacctggaattggcagcagtggcacggcctacgctcgtggatcaagtcagagcagctcaagtaaatgattctgaaatagcagagctgaaaaagaacatgagagtcggaaaagcccgggatttccacgaagatgagcatggcacaatctggttgggagaaagattgtgtgtacctgacgacaaggaactgaaggatctgatactcaccgaggctcatcagacccagtactccattcatccaggcagcactaaaatgtatcaagacctcaaagaaaagttttggtgggtcagcatgaggagagaaatagctgaattcgtcgcactctgcgatgtttgccaacgagtgaaggcagagcaccaaagaccagcaggtttactccaacctcttcaaatcccggaatggaaatgggaggagattggaatggactttataacgggactgccccggacatcgtcgggtcacgattcgatctgggtagtcgtggatcgactcactaaggttgctcacttcatactagtacataccacgtatacgggcaaaaggttggcggagctttacctttcgagaatcatgtgcctacatggagtacccaaaaagattgtatctgaccgagggagtcagttcacctcaaaattctggcagaagctgcaggaagaattggggacccgtttaaatttcagcacggcctatcacccgcaaactgatggtcagaccgagcgagtcaatcaaatcttggaagacatgttgagagcttgcgctcttgattttggtggagcttgggacaaaagcttgccatatgcggaattctcgtacaacaacagctaccaggccagtctacagaaggcaccgtttgaagctttatacggccggaagtgccgcacacctctcttctgggatcagacaggcgagcgtcaactgttcggaacagaggtattagcggaagcagaagagaaagttagaatcatcagggaaaggttgaggattgcccagtctcgacagaagagctacgcggataaccgtcgaagggagctcacttttgaggcaggagattacgtgtatcttcgtgtcactccgctccggggagtacaccgttttcagatgaaaggcaagttggcaccacgcttcgtgggaccatacaaaatcctggaacgaaggggggaagttgcttatcagttagaacttccatccaatatgatcggcatccatgacgtgttccacgtgtcccaattaaagaagtgcttaagagtacctgaagaacaggctgattcggaacacattgatatccaggaggacctaacatacgtggaaaagccggttcgtatacttgataccagtgaaaggagaaccagaaacaaggtcacccgattttgccgagttcagtggagtcatcattcagaagaggaagcaacctgggaaagggaagatgagttgaaagccgcccatccgcacctcttcaccagctcctccgaatctcggggccgatattccgtttaa

SEQ ID NO: 29171 - DNA, 429 bp, Oryza sativa
  Clone ID: PAT_MRT4530_336C.1
gtccacacattcaagttatcatacatcaattccatctccaaatgtttacatcaattccatactttcaaacaaaggcaatacaaagttaacttgagagaaattaagttgaaataataaagcaaggcatcaccttgttaatcttgtttccatgtccaacactgggtgcacaagttttctcccttccagaatcatgattcttggaatttatatgattggccaggaaaatctccgttgaggccaacattgtttgcattaccacgtcttctaagagcaaatccatcagggttcatcgttggaagtatatgaagatgcatgttttccataataagagttgcttttgcttgagatgtttgagaagccagagcacgcaaccagcagcaacggagctcgctcaatcccagacatccttgttggacgaccccctaccct

SEQ ID NO: 29172 - DNA, 876 bp, Oryza sativa
  Clone ID: PAT_MRT4530_33700C.1
ctatctaactgttgtcgacatgacggtctgaacgtctgactcgtagtcgacaacagggtagccttcctcctcgagttcgtgcccggcaagatcagagacaacgctatgtctctccgttcttgagtaatcgagtaggcgtagagtctgcgacggagccttgtcaacatttgtcgtactcgcctttgtcgatcttggtgtagaaccatagagacatggagtcttcaacgatgtcgaatagagttttcctcgaccatctgaggttgcggtgcgagggattgctacgtactggtttgaggaccagcgaacgtgtagaatcatctctcgaacaccaatggaggttgcggtgcgagagattgctacgtactggtttggggaccagcgaacaagtagaattatttctcgaacaccaatggaagttgcggtgcgagagattgctacgtactggtttgagaaccagcgagcgagtagaatgatctcttgaacaccaatggaagttgcggtgcgggagattgctacgcactggttcgcgaaccagcgagtgagtagaatcatctctcgaacaccaatgaaggcttgcggtacgggagattgctacgcacttgttcgagacccagcgagcaagtagaatcatctctcgaacaccaatgaaagttgcggtgcgggagattgctacgcactggttcgagaaccagcgagcgagtagaatcatctctcgaacaccaatggaagagattgctacgtactggttcgagaaccagcgagcgagtagaatcatctctcgaacaccaatggaagcttgcggtgcgggagattgctacgtactggttcgagaaccagcgagttgtttccatataggacatggtatgtggtggctca

SEQ ID NO: 29173 - DNA, 513 bp, Oryza sativa
  Clone ID: PAT_MRT4530_33701C.1
atgccatttgatgaagtttgtttccttcgccattccgagggcagccattcgacggcgcagtcggcgaccggggcgaggcgaggtgcggcggcacggccagcgaccgggccgaggcgacggctccgtggtgccctggctggggcggcggcggcctggaggtggccctgcggcgtaggggaaaggggtcggcgcggcgacgaggctaggtgcggcggcgcggtgccccggctgggtggcggccgggcgccgcaactcaacgccatgccggaacctcgcatcgagcactacggctgcgtcgccgatatgctcagccgcgccgggagactagacgaggcagaggagctcatcgcgctgctcgccgcctgccgcgcgcatggcgacgtcgagcgcgccgagcggatgaggagaagcgagatcgacaaggtccctggctgcagcctcatcgagatcgacggcgtcgtgcacgaattcaaagcaatcccagcaaattccatccgacaacaagattcatag

SEQ ID NO: 29174 - DNA, 379 bp, Oryza sativa
  Clone ID: PAT_MRT4530_33702C.1
actagaaaaaaaaaatctctccagttgagaaaatactagttctagtagagcatgaacatcgcatgaaccatgatttgactccaccactgctagtatcaagaacgttttactgttgtcttcaccaccgtcgacgccgcgtctaccaggcggctgcggcgactacgacgactgcgactcctggacgcctatgccgacaccgacgccgcgtttgctagacgactccaacgctggctatgtcatctacagatctggtctgcagctagcaacacgatgcagactcccttcttgaacacttgcgatgaactacacatattcccctctgagcttggcccgttggcgttgatctccatgatccaggagtgccaaatgcgtcagacct

SEQ ID NO: 29175 - DNA, 663 bp, Oryza sativa
  Clone ID: PAT_MRT4530_33703C.1
atggaaacgggagtgttcgtcgtgtccgccgtggtaggattgttcgcggtggcgagcgccgtcctggggttcatcgccgaggagaaaaaactcacccccgaagacatcgacgtgtcgagcggcgagtgcgagtacccggcgaacgccgccttcgtgctggggatatgcgcggtgctcctgctggcggtggcacagatcatcgtctcctccgtcgccggctgctgcggatgctgcaggcctcgtgccggcgcttccgagtccaggcgtgtcaccggcattgtctgctctgtcttctcatggatcgcggcgatcgtcgcgggtgtgtccttcgtgcaaggcgcggcgtggaacgcgccggtgacgcgcgacacggcgccgctgtgctactacctcaaggacggcgtcttcaggagggcggccgtgctgagcctcgccgccgccgtgttcgggatcaagtcctacatcatgcttcgcgtcgccgcggcggtcgagcctaagcccgacggccagcagccgcagccgcagcaggcccccgccgcaccggttgtgacgggatatccgccgcaaggatatgcgcctaaccagcagttcactgctgcggctgatcaagtatatgggccgagcgcgctgtaccctcctaccaaaggttatggccaagtgtag

SEQ ID NO: 29176 - DNA, 162 bp, Oryza sativa
  Clone ID: PAT_MRT4530_33704C.1
atggcctggcgcaagagcgtgcagatggcagtggagagctcgccgtggaggttgatggcgtggggcgtgacgacggccaccctcctgcaacgacatagcaagcaatgcgtggccacccacatgggtcaccgcgactcaccgccgacgctcaccatgtcgtag

SEQ ID NO: 29177 - DNA, 150 bp, Oryza sativa
  Clone ID: PAT_MRT4530_33705C.1
atggatggcaacggggcggggcggaccgggttgggctggaacgctccagaccccgacccccaacttcactcctgccctgatcatggatgcgggtcaaaaacaacgctcgtccctgacccctccggggccccacaacctgaccagagcccc

SEQ ID NO: 29178 - DNA, 330 bp, Oryza sativa
  Clone ID: PAT_MRT4530_33706C.1
atggcccaaggagacaatggcaagaaggcaatgccacaggcagaaaacaaagagattgctgctaaggatgcacaggacataagaagacaagcagatgaatttaactcttggttggacaggatggaagctatggacagccaagagctgaagcagtacaaagaacaaaacaaggacatgtttaacagccagaagaaagctgcgataaacaagattcagcagaaggagaagaagaagagaaagagaactgtgctgagcccaatcttgggcgctgtgatgaaatttcatagagacaatgatgtggacccttctgcttcaggaccggctgcataa

SEQ ID NO: 29179 - DNA, 533 bp, Oryza sativa
  Clone ID: PAT_MRT4530_33707C.1
tcagtgcggccaacggccggagaggagactcactggttgacgtcgacggcgatccgacccgatcgataacaagggcaaaaccctacgcttcgctccggccaagcctccaataatgggcttccgcttcgctctgacagaagcactccactccactccactagtatcgatcgatatgccgatgcgcgccgccacctcctcgccgcggtgcgcgtccttctcctgcaaccgcggaggcgcccacgcccacctgggccaaagctgcgggccgcccgctgggccgagctgccgggtgcctcgccgccgccttcttcgcgtcgctggagcgctgctcctgcgtcgagttccccacggacgacgacgacgaccaccctcccaggagccgggacgtcgtcgtcgtcagcgaggcggcgccgctgctgccccgcgccaccacggcggcgccgaagaagagcacgtcgactacgacggccgggaagggcaagatcagcaggggtggctttcgctgttgtgacaacaccaccactgctaattaa

SEQ ID NO: 29180 - DNA, 434 bp, Oryza sativa
  Clone ID: PAT_MRT4530_33708C.1
cccacgcgtccgccaacgttgggttcccatttctctctcccgaaaaggaaaaacacaaggtgaacttttctttctgtcgttcttgttctcctgagaattatctctagattctatatggttatctgcagaagaatgacgatttcctgtaagaatttcatgtggcgccatttgttccccactgtgtatattgtttaatacaattgaaattgtctccaaatctgaagttagggattagtgcttgtaacttcttttaattacatttcacaggtagaacgattctcccaggaacatcaagatgctgtagaatgtcataagcaacagagaaagaaagtttcacaattgaagaaaacaatcaggagtactaagggtttcaaagaatttcaaaagatcatcgacatgagaaactttacaaaaagaaaagatcgagcgtttgg

SEQ ID NO: 29181 - DNA, 1753 bp, Oryza sativa
  Clone ID: PAT_MRT4530_33709C.1
atgaggaaggcggcggcggcggcggtcgcggcagcggcggcggtcggcgtggcgctgctggtgcgccggcagctgcgggaggcgaagcggtggggccgggccgacgcggtgctgcgggagctggaggagcggtgcgcggcgccgccggggcggctgcggcaggtggcggacgcgatggccgtcgagatgcacgccgggctcgcctccgagggcgggagcaaactcaagatgatcatcagctacgtcgacgccctcccttccggggaagagaagggggtgttttatgcgcttgaccttggaggtacaaatttccgtgttttacgggttcaattaggtggcaaggaagggagagttatcaagcaagaacatgacgagatttcaattcctccgcatctgatgactggtggttcaaatgaactatttgattttattgcttcttctttagcaaaatttgttgcttcagagggtgaagactttcatcttgctgaggggaggcagagagaacttggctttacgttctctttcccagtaaagcaaacttcaattgcatctggcactcttattaattggactaagggtttttcgattgatgaaacggttggtgaagatgttgtgactgaattaaccaaggctcttgaacgccaggggcttgatatgaaagtcacagcattgataaatgatactatagggacattggctggtgggagatatgatgataatgatgtcattgctgctgttatactgggaacaggtactaatgcagcatacgtggaacgtgccaatgcaattcctaaatggcatgacctcctgccgaagtcaggagatatggtaataaatatggaatgggggaacttcaggtcatcccatcttcctttgactgaatttgatcaagcattagatgctgaaagtttgaatcctggtgaacaggtttacgaaaagttgatctctggcatgtatttgggagaaattgttcgtagagtcctattaaagatggctgaagaagcttctctttttggtgatgaagtaccaccaaaactcaagattccatttattatcaggactccatacatgtcaatgatgcactgcgacagatcacctgatctcagaacagttggagcgaaactgaaagatatcctgggggtccaaaacacctcccttaaaacaagaaggcttgtggtggatgtctgcgacatcgttgcgaaacgcgccgctcaccttgctgctgcagggatacacgggatcctgaagaagcttgggcgcgacgtccccaacaccgacaagcagaggacggtgatcgccgtcgacggtgggctctacgagcactacaccatcttcgccgagtgcgtggagagcaccctgagggacatgcttggggaggatgtgtcctccaccattgtcatcaagctcgccaaggacgggtcaggcattggcgctgctctccttgctgcggctcattctcaataccgtgaggctgaggagctctagtggatctcttctcttggcagctgttatgctttagttgtttggattttcctgagattctgaacccccaggagcaattgcattctatagagttgcaccagcaccgtgctggtgtttagaactttagatggaggcaccaacctttagctagcttgcaagtcctgtaaactgtataaacgcagaacacagtattgtccttccaacaaatttccggctaaatttatccggagcaccagagaaatttgaaatttgtgtcaaaaaaaaaaaaaaa

SEQ ID NO: 29182 - DNA, 5118 bp, Oryza sativa
  Clone ID: PAT_MRT4530_3370C.1
atgggttgcaagatggctggccacccacccaaccaccgcggagaaggcatgatcgactttgtggcagagctggcacgcatgacactggtggtgggctaccccaacgcgccggagtacacgactattccgccgcttagtggcgagcttcctcaccgtgtccgcttggaggtccatggctacgtggggacttgcctcgctaacatggcagttgaggcgtcaggaggcacagcagatcacgcctgtcaggaggcagcctacttgatgatggccagactacgggagcgcgacaactacatcttccacgacacggcgtaccgctaccacccccgtcgagccaacggtgatggcgtcagctccttctgtccgacagctggcgagaacgacaccacctttggtcacatgtgtgctgtgatgaggggattggacaggatgcactcggacctgcacaaggcgaccaaggccttgaacgatgggaagctcatgaggatcgttgctctgaaggacgagatagcgcgcctgaagaaggagaacgctcagctaaagggtcttccagcgccaggaggagtccggatccgcactacgccccgcaagactacgacggcacccgtgcgcatccagcttgcgcccaggaacccacctccagcagcaactcccgcagcacctccagttccgcccgcagttcctgcagctccagctccagctcccgagtccgctctctccttcgctccagcatcagccgccagaggtccagccagtggcaccggaggttgcttgtttgggatggtctacaccaggactggtagccgcgcaacaggcgagggcagcaacggcgaagaacgcgctaatggtgtgcaccccagcagtgattccggcaatggtccgccaccacttcctgagaatccgacgctagcccaagttatggcacatcagactcagatgatggcagccatgatgcagcagatgcagcagcagcaccagcagatgcaccagaggatgatgcagcacgccgaacagcagcaccagcagtttggtccccctccccctcagtccaagttgcctgagttcctacgtgtcaggccacccaccttctccagcaccaccaaccctatggaggcaaatgactggctccatgcgatagagaagaagctgaacctcctgcagtgcaatgatcaggagaaggtcgctttcgccacacaccagcttcagggtcctgcgtcagcctggtgggacaatcacatggccacccgcccaccgggtactgaagtcacttgggtagagttctgccgtagcttcaggaaggcacaggtgccagatggggtcatggcacaaaagaagagggaatttcgtgcactccatcagggcaacaggactgtgacagagtacctccacgagttcaatcgcctcgcgcgatatgcaccagaggatgtccgcaccgacgccgagaagcaggagaagttcatggcgggtttggatgatgagctgaccaaccaactgatatccggggactacgctgactttgagtggctggttgacaaggcaatccgccaggaggatcaacgcaacaagatggacaggaagaggaaggccgctcagttcagggcacctcagggaagtcaccagaggccgcgcttcactcccggacagcagggtggacctaccaccatgatcgtccgtcagcaccgcccgttcaactccagcaacttccaccagggctctagtggcagtcagaaccaccatggaggtcagcccaaccgcggtgcagctccacgcccacccatggcaccggcacagtcaggcccgcccgcgcaagccaagaaggagacgggagcaaaaccagggtcctgcttcaactgtggtgagcttggccacttcgctgacaaatgcccgaagcccaggcgtgccgggccaaggtttatccaggctcgtgtcaaccacgcgtctgcagaggaggcacaaacagcaccggaggtcgtactaggtacgttccctgttaactcaatccctgcaacagtactttttgattctggtgcaacgcattctttcatttcaaagaaatttgtggggatgtatgggttaaggaaagaagagcttagcacaccaatgagggttcataccccggggaatagttcaacctcagtcagttttagcccttcagtgctaatagaaattcaaagattaccatttctagccaacctcattcttcttgaatccaaatacctagatgtcattcttgggatggattggctgactaagttcaagggagtcatcgattgtgcgaatcgcacagtcaccttgaccaacgagaagggagaaacggtagtgtacaaatcactagccccgccaaagcaaggggtctccttgaaccagatcgagatggaagtcccagtggtcaccgaggagaagaatttgaagaaattggaagacatacccatagtctccgagtatccagaagtgttccctgaagacctcactaccataccacccaagagggagattgaattccggattgacttggcaccgggaaccgctcccatttacaagagaccgtacagaatggcggccaacgaattagccgaggtcaagaagcaggttgatgagcagctgcagaaagggtacatccgaccaagtacttcaccttggggtgctccggtcatttttgtggagaaaaaggataagacgaagagaatgtgcgttgattatcgcgcactcaacgagttgagaatccgggaagaggatattccgaagacggccttcaccactcggtacgggctatatgagtgcacggttatgtctttcggacttaccaacgcacccgcattcttcatgaatctgatgaacaaagtgttcatggaatttctggacaagtttgttgtggtgttcatcgacgacattcttatctattcaaagtccgaggaggaacatgaacaacatctccgtctagtactcgagaagttgaaggagcaccagctatacgccaagttcaacaagtgtgacttctggttgacggaagtaaaatttctgggtcatgtcattacagctcagggtgtggcagtcgacccatcgaacgtggagtcagttaccaaatggaccccacctaagaccgtgtcgcagattcggagttttcttggacttgcgggttattaccgccgattcatcgaaaatttctccagaatcgcccgacccatgactcagttgcttaagaaagatgagaagtttaaatggacagctgagtgcgataagagtttcgaggagctcaagaagaaattagtatccgcaccagttttgattctgcccgacccgacgaaagacttccaagtctattgtgatgcatcccgtcacggacttggatgtgtcctaatgcaagagggcagagtggttgcgtatgcctcgcggcagttgcgtccacacgaaggaaattatccaacgcatgacttggaattggcagcagtggttcatgctttgaagatctggaggcactatctgattggcaaccgctgcgaaatatatacggaccataagagtctgaaatacatcttcacccaaccggacctaaatctccggcaacgaagatggttggaactaatcaaagactatgacatgagtattcactaccacccgggtaaagccaatgtggtggcagacgctttaagccggaaaagttactgcactgccctatgcatcgagggcatgtgtgaggaattgcggcaggagtttgggcatctcaacgtgggaattgttgaacacaggttcgtagccgctctggaggcacggcctacgctcgtggatcaagttagagccgctcaagtaaatgatccggaaatagcagagctgaaaaagaacatgagagtcggaaaggctcgggatttccttgaggatgagcatggcacgatctggatggtagaaagattgtgtgtacctgacgacaaggaattgaaggatctgatactcaccgaggctcatcagacccagtactccattcacccaggcagcactaaaatgtatcaagacctcaaagaaaagttttggtgggtcagcatgaggagagaaatagctgaattcgtcgcactctgcgatgtttgccaacgagtgaaggcagagcaccaaagaccagcaggtggctcactttataccagtgcataccacctatacggaaagagattggcagaattgtacctcgcaaggatcatgtgtttgcatggggtacccaagaagatagtatccgaccgaggtagtcagttcacctcaaaattttggcagaagctacaggaagaattggggacccgtttaaatttcagcacggcctatcacccgcaaactgatggtcagaccgagcgagtcaatttaatcttggaagatatgttgagagcttgcgctcttgattttggtggagcttgggacaaaagcttgccatatgcggaattctcgtacaacaacagctaccaggccagtctacagatggcaccgtttgaagctttatacggtcggaagctttatacagccatatgcgctttattctgggatcagacaggcgaacgtcaactgttcggaacagaggtattagcggaagtagaagagaaagtcagaatcatcagggaaaggttgagaattgctcagtctcgacagaagagctacgcggataaccgtcgaagggagctcacttttgaggaaggagattacgtgtatcttcgtgtcactccgctccggggagtacaccatttccagacaaaaggcaagttggcaccacgcttcgtgggaccatacaaaattttggaacgaaggggagaagttgcttatcagctagaacttccatcaaacatgatcggcatccatgacgtgttccatgtgtcccaattaaagaagtgcttaagggtacctgaagaacaggttgattcggagcacattgatatccaagaggacctaacctatgtggagaagccggttcgtatacttgataccagcgaaagaagaaccagaaataaggtcaccaggttttgccgagttcagtggaatcatcattcagaagaggaagcaacctgggaaagggaagatgagttgaaagccgcccatccgcacctcttcaccagctcctccgaatctcggggccgagattccgtttaa

SEQ ID NO: 29183 - DNA, 366 bp, Oryza sativa
  Clone ID: PAT_MRT4530_33710C.1
cacggcgacaaagtgccaagcaagccggcatacacgggcaaagtgcgaaggcacaaacacagtggtgcccacaaccaaaccaggcgtgcgtgccgtcagtgtgaagttaccaaagtcgtagagtcaacaaagtaggtgggccgttggtgtgtgtcacccaaaccaaacaacggttacggggggggccgtcgtagtcccgggtaaagtaaaggtgtagggtaggtacgtagcaaaaagctggaggtttcgtcgaatattagtggaaaaaggtcggccccgtaacggtccgaaccaccagatctgggccgtttttaacgccggtcaatagttagtcctcaggcacgatgtcgacggttaaaaaaaaaa

SEQ ID NO: 29184 - DNA, 109 bp, Oryza sativa
  Clone ID: PAT_MRT4530_33711C.1
gtttgacgagaactggcaaactgttataatttctcagagagtctatgcatgcgaaggattatttttcgacgagaactggcccgacgtaaagcttctaggaaatgcatga

SEQ ID NO: 29185 - DNA, 534 bp, Oryza sativa
  unsure (1)..(534): unsure at all n locations
  Clone ID: PAT_MRT4530_33712C.1
ttttttttttnttttttttttttttttgttggataatccatttgctctggttggcataaatttgaacaggtacatcaacaactgatacataaccaatgtctccccaaaggggaaaaaatagtactacatacatagcaaaaaagaattcacgacttgttaactcttaaccgctgatcgatctacactgcctaccgaatttagacgtcagtaaaagggatgatcttaaattccccttaatgattaggtagccatcatgatccagcctctcaactcaattgcatcagagccttatatacatatcttcagattgacggcaatcaactggtgccacccttgctctcagacttactacagtggtctgaatttttcagggacaaataagcgacagatatgtgagtgataagtcaagtcagagatgaacaaacagttgatttaagaacagagaaattcagagtttctgtgatgnagtatccacggatctacaagagataaatgatcaatagtccgtgaatttgacaccgatggatggagtgg

SEQ ID NO: 29186 - DNA, 176 bp, Oryza sativa
  Clone ID: PAT_MRT4530_33713C.1
atggcgatggctgcgttggccacggggcttcatcgtgacgcaaaaccattgcttcattttacacctgatgacttggaggtcgtccccttctacatggaaaactttctggccctcctcgcccccgggctgatcatcctgttcccggatctcaaggatatcctaccgtcatcatggag

SEQ ID NO: 29187 - DNA, 355 bp, Oryza sativa
  unsure (1)..(355): unsure at all n locations
  Clone ID: PAT_MRT4530_33714C.1
gttgttataattattcacggggtttcaattgcttacattaagctacatgatctatgtctaatccttacagaaaatggttgttggtttgtacaagctcaaaattcttacaatgtttttagaataatctacatacatgaacaaatcattaacatgcaccgaagaaaaaaaaaaggaagaaagaaaatggacacagctaagcgtagttcggagtccggcgtcgtggtgaacaccggcttgtccttgtccaccaccgacgccaccgccggcggcgcccgagagggggctttggcgctggcgctgccggtggagctgccgctcttgcggcgcggctnngtctcgccgaccatggctatga

SEQ ID NO: 29188 - DNA, 280 bp, Oryza sativa
  Clone ID: PAT_MRT4530_33715C.1
atggtcgccattgacacgaagaggacaaagcaatcaatcaagggcgagaaacgagagcaacgattccgcgtgcgaggcgatgcgcacaaccacggcgacttacttaccctgggcccgaaggcgccagacaatcgggcgtcgaaccggccccaccgggtttcggacctgggcgcgcccgccggcgtattttgggagagaatggtgaaccggggcaaagcgggatccaaggagggaggaacgggggtcaccttccggaagccaaggaagaagaggggaagcc

SEQ ID NO: 29189 - DNA, 1669 bp, Oryza sativa
  unsure (1)..(1669): unsure at all n locations
  Clone ID: PAT_MRT4530_33716C.1
atgccaccactccaccgccgcctcgttctctgcttcctcatcctcgccgccgccgccgccgctaccaccgctgcctccatctccacccccgccgagctcgcggtcgcgtcgcaccctctgtcccccctccgtctcccgccggccgcgcccttcgccggcggcggggagggcggcggcggtggcggtggccccttctgcacacgcgtgcatatccgcggtcgcccgtcccgcctccgcgacccgtcgcgcttcttccacgccctcagggtccgcgccaacgctacccgccccagcggacttgagctctgctttcaccggaatgccacagtgggtccatgcaagtgcgcggcgtcacagtgccataagatggccaagagcggcctatgggtgcaagccatctccccgtacgacacccgggtcctcgatttccggatgccatcggacccttcgaggtctatcatagtgtcgacggaggaagagttcttgcttcacagggtggtgttcttgttgctgggaatggtgctgatggcagtggcgcacactcttagcgagtctgtggtattctactatggcggagcaatgacgattggaattttccttgtaattctgattatactcttccagggaatgaagcttttacccactggtagaaagagttctcttgcaatttttgtgtactcttcacttgttggcatgaccacatattttttgcactatttgtcgggacttttacgttctgtgcttgtggaaattgggattgccgaagacatgcataatcctctaggtgtattccttctcgtaagtgtgatcttagctggagcctggtttggttactggggtgtccgtaagcttgtgctaacagaagaaggatctgttgatgctggtgtggcttattttgttgagtgggctatcttgattatttctgcagttatgatcctgcagagttctttggactatctctttgcattttcagcattattattttgcacagccatcaaagcagtttctaggattgagggaaagtcaagagttctacggtgcctatcaagggcattttcgaacattgttcccactggctatgaaggttttggtgaggagtactccagcatgaatggatctcaccaagatggatttagcaagcttcatggatcaaggaagacattgtctcaagaccttgctacggatagctactattctaccttccacactaaccctgagcggaaaaagttttcagaggaggaatatgcagcattcactagagaagagacacataaagctatgaaacaactggtctcatcgcctgatttcaacaggtgggcactagcaaacgtggacaggatatctgtgactcctccacaaagaacaccccaaaatagcatgagccagcagcggaaacgtttgttcggactgttttaagctgtgtgtgatatcttccatctagtaatctggtttccattgcccatcaatagatttgagctgtatatcagtttttcttcctggtagtggtatcttcagtgtgcttgcagcggtaggtattcaatgtatatgaattgagtggtagctancagctgtaacaatggtgtatttgcttgtggaagcgaatctgtagtagctgtaacgatggcgtatttactttcctggaaaaaaaaaaaaaaaaaaaaaaaaaaaa

SEQ ID NO: 29190 - DNA, 102 bp, Oryza sativa
  Clone ID: PAT_MRT4530_33717C.1
atggcgtgtggcaatgcttctacggaaaactccggcaagagcgactccggttcctgcagggcgcaaatatttggatatgtaaaggagttacccaccgagtga

SEQ ID NO: 29191 - DNA, 345 bp, Oryza sativa
  Clone ID: PAT_MRT4530_33718C.1
atggtctcaccgccggagctcgtcccttacttgaccggagacgggacggagaagcgcgggtgggtcaggatggccgtcgatgccttggctgccgtcttgtccgcggatggggtaaacgaagataccaaggaaggtctcatcgatgccctcatagccggcgatctgggccccatcatgaacacgctcatcgcagctgttcccagatctggtatgggtcctcaaggacgccggcaatctgctgcatggcggcaaccgtgcaggtgcgaggctgcccagctcgctcgtagatggtccggccaggcgccatcccgacgctcgcgcgagttcaccgtgggagacgactag

SEQ ID NO: 29192 - DNA, 1997 bp, Oryza sativa
  Clone ID: PAT_MRT4530_33719C.1
ctcggctccaccacgcggctcgcggctcccgctgccttcgtctggatcgcctccgcccgctccgtttgaccctttcgtcctcttcgctgatccggtacgccgtacgccctcggcatgcgatcacgctgcaaccggtgaacgcttcaagccctcccctagtgagccccttcacccagggaatacatcaatgcaagccttatagagactggtgaccaaggtcaaagtcatacaaagttcatttccactcaaggtcccttcctcaggacatttggggattcctggcaatggctttctctgccccaggcacggaccgcatatcaagccatttgacgagattgaagaagaaaatagaaaatgcaatgaagaagacggaaaacgggaaagcggctaagaacacaggatcgccccaccgggatatgtatgctccgtttctgacattatcttgggggtatataactgtattcttcatgtctctaaccccttacaatgatcatatacaggacatacagacagcattccagacgggaaaatttactgctgctcaaaatcctgctaatagggaaaaaaaccgctacagtgatgtcatgccatttgatgaaacccgggtacgtttaaagccctcagcaagtgatcacccttcaagcaatgaatacatcaatgcaagccttatagagactgatgaccaaggtcaaagtcatacaaagttcatttccactcaaggtcccttggtcaagacatttggggatttctggcagatggtctacgaaaaccagtgtcctgtgattgttatggtcactaaatttgatggtgccaagtgtgacaggtatcttccaacgaacgaaggagaagaaagggattatggaaaattcagtgttaagatcacaaagttcaaatgcgatggtgtcttagaattgcgtggtttggaggtacagcagaatgagctcagagatttccccaggttagggcctgcttggaagtccggtttttggcctaatcatgctattgggcaatacacagtcaaatttgctcatgatctgtgctcgatgcattcaaagtactccgtatatgactatgacttgtttgcttggttcccaaacagtattttacaagttcgccatgttctccacattctgtattctgactggcctgaccatggggtgccacatgacagtgcttttgtacgaaaaattttgaaaagattatatggcattccaaaagagcatccaatagtagcacattgcagtgcaggtattgggagaactggtgcttatatcaccatccacaacactatagagaggattttacttggtgacatgtctgctttggatctttctaaaactgtcaaaaaatttagatcccagcgacctggaatggtccaaacagaggatcaatacaagttttgctatatggcagttgtctctgagctgaacgacctgctatcaaattcaaaacactgaatcatttctatggaacaatcagtgccctgggtatctctgacagattgtcgcccttcaactccctcaattctttaagcctagctaacagcattcatgtatgctgatgatgtacagcatgaagactgaaaaattcatgcttcagcaggaagctttctctaacttctccacaccaagaaccacgtgtatgatcccaggttatgcctggttctgtatccaaagctgatgatgatgatacaaggtttggaaatttgcagcggcgcttctcctgcccacccacctaactttgtgattgtttggtagcttctcctgcatcatgcatatgatgaaatttttcggaagttttaagactcagctttgtcacttttcaagcagtagtgacgctgcccccatttgtttgtgtgtgtgaggtcaaatgtctggagaagattgaaacagctgttgctactgcaaatgcagccacttcttgatgatgctctgttctatctctagactgtctgtttctgggggttgaggagttgaaaccggtgttgccaagcagaa

SEQ ID NO: 29193 - DNA, 5157 bp, Oryza sativa
  Clone ID: PAT_MRT4530_3371C.1
atggccggccacccacccaaccaccgcggagaaggcatgattgactttgtggcagagttggcacgcatgacactggtggtgggctaccccaacgcgccagagtacacgacgattccaccgctcagtggcgagcttcctcaccgtgttcgcttggaggtccacggctacgtgggtacctgcctagctaacatggtggtcgaggcatctggaggcacagcagatcacgcctgtcaggaggcagcctacttgatgatggccagactacgggagcgccacaactacatcttccacgacacggcgtaccgcttccacccccgtcgagccaacggtgatgacgtcagctccttccgtccgacagctagcgagaacgacaccacctttggtcacatgtgtgctgtgatgaggggattggacaggatgcactcggacctgcacaaggcgaccaaggccttgaacgatgggaagctcatgaggatcgtcgctctgaaggacgagatagcgcgcctgaagagggagaacgctcagctaaagggtcttccagcgccaggaggagtccggatccgcactacgccccgcaagacgacgacggcacccgtgcgcatccagcttgcgcccaggaacccacctccatcagcagctcccgcagcacctccagttccgcccgcagctccggcagttcctgcagctccagctcccgcgtccgctctctccttcgctcccgcatcagccgccaggggtccagccagtggcaatggaggttgcttgtttgggatggtctacaccaggaatggtagccgcgcaacaggcgagggcagcaacggcgaagaacgcgctgatggtgtgcaccccagcagtgattccggcaatggtccgccaccacttcccgagaatccgacccttgcccaagttatggcacatcagactcagatgatggcagccatgatgcagcagatgcagcagcagcaccagcagatgcaccagaggatgatgcagcacgtcgaacagcagcaccagcagtttggtccccctccccctcagtccaagttgccagagtttctacgcgtcaggccacccaccttctcaagcaccaccaaccccatggaggcgaatgactggctccatgccatagagaagaagctgaatcgcctgcagtgcaatgatcaggagaaggtcgctttcgccacacaccagcttcagggtcccgcgtcagcttggtgggacaatcacatggccacccgcccaccaggtactgaagtcacatgggcagagttctgccgtagcttctggaaggcgcaggtgccagacggggtcgtggcacaaaagaagagggaattccgggcactccatcagggcaacaggactgtgacagagtacctccacgagttcaatcgcctcgcgcgatatgcaccagaggatgtccgcaccgacgccgagaagcaggagaagttcatggcgggtctggatgatgagctgaccaaccaactgatatccggggactacgctgactttgagaggttggttgacaaggcaatccgccaggaggatcaacgcaacaagatggacaggaagaggaaggccgcacagttcagggcacctcagggaagtcaccagaggccgcgcttcgctcctgggcagcagggtggacctaccaccatgatcgttcgtcagcaccgcccgttcaaccctagcaactttccccagggcgccagtggcagtcagaaccaccatggaggtcagtccaaccgcggtgcagcttcacgcccaccaatggcaccggcacagtcaggcccgcccgcgcaagccaagaaggagactggagcaaaaccagggtcctgcttcaactgtggcgagcttggccacttcgctgacaaatgcccgaagcctaggcgtgccgggccaaggtttatccaggctcgtgtcaaccacgcatctgcggaggaggcacaagcagcaccagaggtcgtactgggtacgttccctgttaactcaatccctgcaacagtactttttgattctggtgcgacgcattctttcatttcaaagaaatttgtcgggatgcatctgttaataagagaggaacttagcacaccaatgcgggttcataccccagggaatagctccacttcggttcaattcagcccttctataacaatagaaattcaaagatcaccatttctagccaacctcattcttctcgaatccaaagacctagatgtcattcttgggatggattggctgaccaagtttaagggggtcatcgattgtgcgaatcgcacagtcaccttgatcaacgagaagggagaaaccgtggtgtacaaatctctagtctcgccaaagaaaggggtctctttgaatcagattgaagcggaaatcccagtggacaccgtagagaagaactcgagaaaattggaagatatacccatagtctgcgagtatccagaagtgttccccgaagacctcactaccatgccacccaagagagagattgaattccggattgacttggcaccgggaactgctccaatctataagagaccatacaggatggcggccaacgaactagcagaggtcaagaaacaggttgatgagcagctgcagaaagggtacattcgaccaagtacttcacctttgggtgctccggtcatttttgtggagaaaaaggataagacgaagaggatgtgcgttgattaccacgcactcaacgaggtcacaatcaagaacaaatatcctttgccgcgaatcgatgatttgtttgatcaactgaaaggagctaaagtgttttctaagatagacctgcgatcaggctaccaccagttgagaattcgggaagaggatattccgaagacggccttcaccactcggtacgggctatatgagtgcacggttatgtctttcggactcaccaacgcacccgcattcttcatgaatctgatgaacaaagtgttcatggaatttctggacaagtttgttgtggtgttcatcgacgacattcttatctattcaaagtccgaagaaaaacatgaacaacatttccgtctggtactcgagaagttgagggagcaccagctatatgccaagttcagcaagtgtgacttctggttgacggaagtcaaatttttgggccatgtcattacagctcagggttattaccgtcgattcatcgaaaatttctccagaatcgcccgacccatgactcagttgcttaagaaggatgagaagtttaaatggacagccgagtgcgataagagcttcgaggagctcaagaagaaattagtatccgcacccgttttgattctgcccgacccgatgaaagacttccaagtctattgtgatgcatcccgtcacggacttggatgtgtcctaatgcaagagggcagagtggttgcgtatgcctcacggcagttgcgtccacacgaagggaattatccaactcatgacttggaattggcagcagtggttcatgctttgaagatctggaggcactatctgattggcaaccgctgcgaagtatatacggaccataagagtctgaaatacatcttcacccaaccggacctaaatctccgacaacgaagatggttggaactaatcaaagactatgacatgagtattcactaccacccgggtaaagccaatgtggtggcagacgctttaagccggaaaagttactgcactgccctatgcatcgagggcatccgctctggaggcacggcctacgctcaagcaaatgattctgaaatagcagagctgaaaaagaacatgagtgtcggaaaagcccgggatttccacgaagatgagcatggcacaatctggttgggagaaagattgtgtgtacctgacgacaaggaactgaaggatctgatactcaccgaggctcatcagacccagtactccattcacccaggcagcactaaaatgtatcaagacctcaaagaaaagttttggtgggtcagcatgaggagagaaatagctgaattcgtcgcactctgcgatgtttgccaacgagtgaaggcagagcaccaaagaccagcaggtttacttcaacctcttcaaatcccggaatggaaatgggaggagattggaatggactttataacaggactgccccggacatcatcgggtcacgaatcgatctgggtagttgtggatcgactcactaaggttgctcacttcataccagtacataccacatatacgggcaaaaggttggcggagctttacctttcgagaatcatgtgcctacatggagtacccaaaaagattgtatctgaccgagggagtcagttcacctcaaaattctggcagaagctacaggaagaactggggacccgtttaaatttcagcacggcctatcacccgcaaactgatggtcagaccgagcgagtcaatcaaatcttggaagatatgttgagagcttgtgctcttgattttggtggagcttgggacaaaagcttgccatatgcggaattctcgtacaacaacagctaccaggccagtctacagatggcaccgtttgaagctttatacggccggaagtgtcgcacacctctcttctgggatcagacaggcgaacgtcaactgttcggaacagaagtattagcggaagcagaagagaaagtcagaatcatcagggaaagattgaggattgctcagtctcgacagaagagctacgcggataaccgtcgaagggagctcacttttgaggcaggagattacgtgtatcttcgtgtcactccgctccggggagtacactggtttcagacgaaaggcaagttggcaccacgcttcgtgggactatacaaaatcttggaacgaaggggagaagttgcttatcagttagaacttccatccaatatgatcggcacccatgacgtgttccatgtgtcccaattaaagaagtgcttaagggtacctgaagaacaggctgattcggagcacattgatatccaggaggacctaacatatgtggagaagccggttcgtatacttgataccagcgaaagaagaaccagaaataaggtcaccaggttttgccgagttcagtggagtcatcattcagaagaggaagcaacctgggaaagggaagatgagttgaaagccgcccatccgcacctcttcagcagctcctccgaatctcggggccgagattccgtttaa

SEQ ID NO: 29194 - DNA, 287 bp, Oryza sativa
  unsure (1)..(287): unsure at all n locations
  Clone ID: PAT_MRT4530_33720C.1
tgtttttgtcggncagcgtcgggttgtgcccaanttttgttncgtacattcgnnttgtctgccacnnactcctgtggaatggcanananaattncnnanncgnngatctctccagcgcggctgtnatggtcntgaattcctgatgctnnnganantgtnagtnnngngtantgtgcnttttancgncgctttttactgtacctnctactactgntntgctttttncngcacccacnatggttatttataaactctctnnncnngattcatatnnnaaaaaaaaaaaa

SEQ ID NO: 29195 - DNA, 147 bp, Oryza sativa
  Clone ID: PAT_MRT4530_33721C.1
atgcgcgagcacatcaccggtggtgacggcaggagtgaagacgccttgaccgtgcgggccggtgtgatgaccgacggcagcgatgccatgatatctcccaacagaccaccgaacctcgtcatcaccgatgatccgccacccttgcgt

SEQ ID NO: 29196 - DNA, 432 bp, Oryza sativa
  Clone ID: PAT_MRT4530_33722C.1
cccacgcgtccgggacctgtggcacgaggtggtggcggcatggagttcctgcaggggcagagcacggagaccgccgtggccgtggcggtggccgtcgtcgccgtggccgccggcgccgccttcctcctcctcctcctccgcagcagcaagaagcccaagggctgcttggaccctgagaacttcaaggagtttaagcttgtggagaagaggcagatcagtcataatgtggccaagttcagatttgctctaccaacccctgcttctgtgctggggcttccaattggccaacatatcagttgcagagggcaggatgctactggcgaggaagtaatcaagccttatactccaactacgctggattctgatcttggacggtttgagcttgttattaagatgtatccccaaggaagaatgtctcatcattttcatgag

SEQ ID NO: 29197 - DNA, 616 bp, Oryza sativa
  Clone ID: PAT_MRT4530_33723C.1
gcacgagggatttgcttactcttcgagaagcttctagaacataaaggacctaggcagggagcccaagctaccgtgccaagtcttccactcctgcctcttcccaccagccggcgacaccggccagagttggccgccggccgccggccgccgcgtcggggaaggaggcggcgccatttgctaacccctccgccccggcctcaaatccaagatccacagcttcgctgctcgccacctgttcgacgtaatgccgcgcccgcgaggcggggacgatcggcttggcgccctcccggacgaggccctgcagcacgtgctgtccttcttgccgttgccggaggccgtgcggaccggcgcgctcgcgaggcgctggcgccacctgtggaagtccatgcccgtcctgcgcatcaccggcgaggggagggtgctcaaccggcgcggcgtcaggaggctgaacaggttcgtgaaccacctgctgctcctccgtgaccgcagcgcgcgtctggatgcgtgtgagataaacctcggtacgttccggagccaggatgatccgcaaatcaacctgtggattcgccacgtgctgctgtgcgaagctcaagatctttgggttcatctaagcatt

SEQ ID NO: 29198 - DNA, 325 bp, Oryza sativa
  Clone ID: PAT_MRT4530_33724C.1
ctgtacctgtgtaacctgtaatttgcttctcattggtcaatggtcatcacactcaataggatttggttggattgtgctctattattacggttgggttcaaaatgtgcccatgaaagaaggtatagtttgttggctgtttcaaggcaagccattgtgaattgaacctcattctagacaccaggaaatcaaatttctgattagttaaaacaatgcgtcgtttagatggctatgctgttgcaagttacaaatattgccttctaccagtttgttaatggtgaaatggaattcataacctaaaaaaaaaaaaaaaaaaaaaaaaaaaaaa

SEQ ID NO: 29199 - DNA, 1202 bp, Oryza sativa
  Clone ID: PAT_MRT4530_33725C.1
atgaaaaagaccaatcaaatcaaacttttcttggaaaaaccgacgccaacgttaagatcagtctcctttcttttcggcggcatccttccgcattggcggcgagtggaagagttgggttcgattccctttatacgcgatgtggcgaaaaagactgattcaacgaaatatgccatgcctgcattattacttaccaccagtatctcgggaaacggaaaaccggaaatgacaatcctttctatggtctatactaaattactttgtacgaatgcacatctcggcgggcgtcgggtagatgctcaccatttcaatgtctatatctgtggttccagaagtggaattgctattctcgattcagacaagacactgatttgtttacgaaccgctcttcattttataggatctcccattcgtaaaaaatgccgttccttccttttaaagaccaatcatttatttcgatgtgagatattggaaaaaatggcgagctgtatcaatgattctcaatggaagatcgggactttttttagcaattatttggctaaaaaaaaattccgtttaagaacgaaaaagataaattttgggttgaaccaacaacccgattgtgcggttattctgaatgcagatagaaagtcttcggtcatactggaagctgctcgatcacaaatacctattgcattcttagttgattccacgatcccaggggaatcccataaaagaatcacttatcccatcccagcgaatgatcctatacagttcgtatatctatttcgtcattcggtcacgaaaacagggattctggaacgtaaatctgtgcacgaacccatgcaaacaggcttaaaagcagtggatagcctggttcctataggccgtggtcgacgagaacttataatcgggggcagaaaaacttcaatctgtagcgctacttccagagttaccaaaactcgagttttatactgcgcttgacagcgaatattttaggtgcccgcctttctttcgaatgccaaacaggtgtttcactgtgaacctttcttttacatcccggacagtagttcacctcctttccaatgcaaatttaggtgaaatctaccattaaccagtccagggagcttgcccgtaatctaagggtgggctgccctctcttaatattgggtagcggccaaccctcttctaaacattttgggatttcggaaaggggacaatactaa

SEQ ID NO: 29200 - DNA, 1794 bp, Oryza sativa
  Clone ID: PAT_MRT4530_33726C.1
atgtcgctggggaaggttggtgtcgccgtcgtcggcggcgggaggaggaggtcgaggtaccgcctcgagacgagggggttgtcgtacgtgctcccggcgaggggggcggcggcgaggttgtttcttggaggcggtggggaggagaggttgctcctgaggggcgtgacgtgcgaggcgccgcccggggaggtggtggcgatcgtcgggccgagcggggccgggaagacgacgctgctgtccgtgctggccgggtcggccgacccggcgagggtggtcgccggcgaggtgctggtgaacgggcgcgccatggacgctgcgaggttccggcgggtgtccgggcacgtcccgcaggacgacgcgctgttcccgatgctcaccgtggaggagtcgctggtgtacagcgcgcggctgaggctgcgcggggcgggcggcgggaatggcggggcggcggtggcgagggcgagggagctgatggcggagctcgggctgcggcacgtggccgggtcgagggtggggagggtgtccggcggcgagcggcggcgggtgtcgatcggcgtcgacctcgtgcacgacccggccgtgctgctgctcgacgagcccacctcgggcctcgactccggctccgcgctccacattgtcaagatgctcagggacatggccgccgcgcacggcaagaccgtcgtgctcaccatccaccagcccgggttccgcatcctcgagctgctcgaccgcgtcgtcctcctcgccgacggcgccgtccgccaccacggctccctcggcttcctcgaggctcgcctcgccgcctccggccacggcatccctccccacgtcaacgtcctcgagtacgccatggagtgcatcgactccctcaagcccgaggtcaccacggcggacgcgagccacgcggacgccgcgtcggggtcgtcacggcggcgcgcgagctccgcgccgtacgcgaactcggcggcggcggaggtgtgcatcctgtcggcgcggttcgcgaagacggtgctgcggacgccgcagctgttcgcggcgcggatggcgcagtcgctcctcgccggcgcgttcctcggcaccgtcttcctgggcgccggcgacctccagtcgaggctgggcttcttcgccttcaccctcacctacgtcctctcctccaccaccgagggcctcccggtgttcctccaggagcggcgcatcctggagcgcgagacgtcccgcggcgcgcaccgcgtcgcctcctacgtcgcctccaacgccgccgtgttcctcccgctcctcctcgcgtcggcgctgctgtacgccgcgccggtgtactggctcgccggcctcgccagggagcccggccggttcgcctacttctccctcgtcgtctggctcgtcatgctcaccgccaactcgttcgtcgcgtgcttcagcgcgctggcgcccagctacatcgtcgccaactccctcatcgcgggcctcatcggctgcttcttcctcttctccggctacttcgtggcgagcaagaacatccccaggtactgggtgttcatgcactacgccagcctgttcaagtacccgttcgaggcgttcctcgtcaacgagtacggcggcgcgcgcggcggcgccgagtgcctcgccgaggtcggcggggggctctgcgtgctcgacggcgccacgctgctgcggcagcaggggatgcgggcgagcatgcggtggagcaacgtcgccgtcatgctcggcttcgtcgtcggctacaggctgctctgcttcgtcttcctctggttcagatgccaccgcatgaggaggtga

SEQ ID NO: 29201 - DNA, 531 bp, Oryza sativa
  Clone ID: PAT_MRT4530_33727C.1
atgtctcgtgcatcgccttcctgtgcactgctcccgcttgtcatgcgcactgcacagacccgaggtgccgctccctatcatgccgcgccgcaacaagagacggacgttgcatctaccgtcctcgccggattttcacgcgtcaagtggacgcgctacccaccaaccatctgcgtcatccatccttctgagcaacgccacacaacgatcgtccgacaccacccaaactaccacgaatcaccacatcgcttgtggccccgccttttttgccccgacatccatgtcgtgccgccattggacccggtccagtgcgctaagggcgagcgcccagccacctggagacgcatgtccatgcgatccgcatgctccgggctcacatcaagtgccacggcctcgccttctcctccaagccagcgaggacaatcgtcgccgcctaaaaaacccgagctgcccagtgcattcttcctatatttttcccttttcctctgccctccgcactcatacctcgctaccccatgtcaaacacctcactga

SEQ ID NO: 29202 - DNA, 843 bp, Oryza sativa
  Clone ID: PAT_MRT4530_33728C.1
gcacgagggagagagagaactagtctcgtgtttttttttcccaaactcataactccggtgatcattattcattattcgcactcaagattaggtgttcagtttacaactttacatgtaatccatggtgttcttcgtctgtcaggtgcgaactagaaaatggtatttttacaagaaagcacacttttttacatgccaaacaatcgctaacagagtaacagcactgaagatggaaaattgtgagctgaggaaaaagcccctttctccactttcaaagaaagtccttaagacaacatgagctcccgactgcaaacaccactctttagacacggctcactcatcacccattgcaagctccagtgcataatcatccctttcaacaggtcctcgtgcgaaatatcttccaaactggagccagtagacctcatcttcgactagatcttgtgttgcaacttcaaccgtgatagttggaaaaccaacactcaacaaaatgtagcccttatcttttagttcagccgatattccaagtgctctcggttgtcttatttgtcctgactttttccgggccgcacagctggaggacgagtccgcgctctccgcgaagggcagctccacctgccgcgcccccgcggtgcgcggcatgtacggctcctgtgggacgacgaactcgtggacggcccctctctggcggtagtggacggtcccaatgcgagttggagcgggcgagggggacggagccatggcgatggcttggcagccggagcagctagattgcttgtcccgcgcgcggtggtggccggtagggagcggcgcgagcgagcggaagggggaaatcacgcctcgtgc

SEQ ID NO: 29203 - DNA, 876 bp, Oryza sativa
  Clone ID: PAT_MRT4530_33729C.1
atggccaccaacagaatggacttggaccaggcagggcatctaaaccgccataaaaaagcaaggactttctatagctatgacttgtacattgataagaagttaggtttggaggttgaagatgagaccgtacctattatgcagttcaaagctaagaacaagcttgtttttctagctaagcaaagtagcaagagacaaaattccgctaaacttagctttggacaacatcctttatctacttatgaagtggtgggttcctggtcaaatgtttcgcttcccttctgtacagaggtatgcaaaaagttgatcctatctgtgatagaaggagttaaagcgaatcttgaagatggcaactgctttgagaaatttgatgaaaataatctcgtcgtcgggccttctggaaaaagaggatggtgcttcacaaaaatgtatgagcacatcaaattcaagataactgccgcacagaagaatttgattctgatgagggttccatatcatgaaaaatggagaataattgcaaatcaaaatgctgttcttcacgagacgatcaatttcatatacagcaattatggttgccttcctaagttcaatgaaaaaggtgtactttatactgaaattgaaattcagctacatgaggctgaaatgtttctggacttcattcgccacggtacagctcaccgtctccaaagaaacataagcttgacaccacatcagcatgagctcatacttctggtgatgtatcctttgttgttgccactacttcaagaagctattctggatgtacttggagagccagagttcagaaagatactgttaaggtctgtgttggaggttactatgaaggacatgaagttgcttgagatgtatgatggtgactga

SEQ ID NO: 29204 - DNA, 3267 bp, Oryza sativa
  unsure (1)..(3267): unsure at all n locations
  Clone ID: PAT_MRT4530_3372C.1
ttttttttttttttttttttttttttttacaaactgagccattttttcctttttcattgcagtggggtaataatacatcccccattattatacctgtacaacccaaaccctccacatgtcaataaaatgtttgggccgtcctttccctagccgatctcctcaataaaacactattggcttctccaggatcatgctcagtcccatctaacctcctcctatattgttctgttaacttactactaaattgatgtttactttggttagtatacaaggaagaactttcatcgccctgattccaaccctccctggcaccctgaagcctgtgctcgtcaggcctatactgatccacctcttgacccgatgaactggtacccaagctagactttgatcgggaataagtcatacggccgttttccccatgtccgaacatagagccatcaaagtatgaaacttgatcaccaaatatgaggcgttccatatcctcactggtagagtttctagtgctttcactgctgtcggtgctatgtgaccctgtgtcggaactggtgaaaattgatgaactctcacttggactaggagattctgctggcgaatatggtccatgtccaaactcgtcatatgtatggggcaaatcatctgtcatgtgatctgcgtacatctgaccaccttggtgtatgggacctcctccatgccaccgtcctgaatttacccttgccttgtccttctttacacgtgctggatcttgagccatcagcgctggccttacagagcttggagctcttggtgaacaccttgcatagagcagcatgtatgcgcacttcgacatgacattttccagagatacaggtttgacctgactgtcatctgttttgtaccacttcccatgcgtgtccttcacatagcatacataatgaccagaaaaggcggcattcataatatcatgatggacaaccactgcatacaggctgtaaacaggggaagtgtcatcagcttttgggctcatatagcgctgcaagttcaaggtctctggaaatctgatggctttgttgatctttccaaactttccagactgatatcttttcagcgcaatagtcaggacatttggtgcttccgatattgtcagcttctttttagcgcgctcatgcgatttgcatctgctgcatttatatttattatctccatccaagacttctgtagatgtaaatcgctcaagtgctccttccagtgaactgatgtcgccatctatttcaacagtaagatccaaaatacgctcatgttgctcggaagtagcatcacatcttgtgcatcttatcttagatcgcagatagcccccaaatattaattgcataagtgttgtttcttcgtgtaaccgatgagtgccgcttttcctggcttccttcatgcatacagattgcatagcatcaatggcgtacctaaggaattcatgagcatcttcttgtttaccaggaccaaagctacttccaatgtcaggcaaatgagagagtatcccagttggtgacaaagcaatcttgccttgtctgccctccccaacgagtttttcaaattcacacatgaagcaccattcctttttggaacaattttttgaatgaagccctcccaaaagatatgatgtaagtggtcgggtaaacattaagcactgaagaacagcatttgcatagcaactattgccaaggttatgaagaccaaacggttgcaattcaaccttttcatagagcttaatgaaaagctcatatggaaaatgtgttggctctgatggataatgcctcacaacttttggtgctgtttgctgcctgacaatttttttcagagatgttgccaggctatttgctgttgaaattgatttctctgatggtttagaattcctttcagcaatattatcagccctttttgatgaattaggtgtaacagaacgtccaccgggaacaggagaaactttatcaacagtcaaaacagatggcaccatttttgacacaccaatgttgtctgagccagcagcttttgtcttggagtgtccaacttccacatgaagagcagtcctggaagttttaggttctactgcaacaggtagagcagcttgagcattgttgttatctgcatattttttgctgttactagtttgagagcaatcctggtgcttcttggaatcaattaaggactctttgttgataagacttccagagccactaatctttggtggagaaggttgaaatctacacaccaacgcctcatctaagtcctttgtgtaagaaccattttcaacaggagttgtaggtttcatatttgattctgtctttctactgccaagagaagctacttgtgaagaactttgagggagtttgaccgcactgacagaatggtcatcatcaggaacctccaccgaagcaagtacttctgagggcatatcttttgttttatcatttaaattcttcacggtggctgccgtgttggtttcagctatgttttcttcagaagcacttgtctgctcaattttcctttcctttgcaacagaaagttcagccacatcatcatgattagcatcagtgcttggtgggcggcattcatttttatgaccctgtctccagtgggctatctggcatttgaaggaacagtacttgacagccttgcactgcttgcacctgaacgtcgtcggccggaagcacaccgcgcagacccccttggcacccaccggcggctgcggctgcggctgggcccgggcctccatctccgcctctgcctccgcctgagccggaaccacggccggcggcgccccccacgccgcctcatccaccatctccgtcgcgtgcacgacgctcgggaacagctccgagtagtaggcgcgcgcgcactccacctccgccatctccgactcctcctgcgccagccgcgtgagccgcagcacctcctccctccgcgccgcggcgcgcctcaccttccgtcggaccacaacccacaccaccaccaccaccgcaatcaccacagccaccaccaccgccgacgccgacgacgacgacgacgaacccgccgcctccgccatccaccacctcctcctcccctttgaccccggtaccctgctcctccttctgccctgccctacccatcgnatagatctagccgaccaacctcctgcacccatcggatgcgcccggcgatcccgaacccgaacctcccccggacctagccgtagccaacccgcccaaatttaggctttcaaatttttcccggatattaaaaaaaaattttcccgct

SEQ ID NO: 29205 - DNA, 464 bp, Oryza sativa
  Clone ID: PAT_MRT4530_33730C.1
cttgtaggagggtggaccacacctccccccattggggggttttttcaaggaccgggggcgtgattccaccagggtggagagggaagagatggcagctcactatgacgagtaccgcttatccccagggcaaggagccccagaccagccagaagacgtagcgccatgacgaggtcgcgacgttcgagacagatcgttgcctgcaacaccgttatctgacatgcccctcaccacagtcccatgttctcggaagcacagagcggatgaacccatgaaggccgttctattggacataagaatttaacggcaatgcccttaaaagataaccgatctgcagaaagaatgatgatgagaatctcattatctgagcctgaagaagactggtggacataggtcgacatcccagcatatcgaagaaataatgtcctgggaggaaataaggatctatcagcctcaagcatactaag

SEQ ID NO: 29206 - DNA, 538 bp, Oryza sativa
  Clone ID: PAT_MRT4530_33731C.1
tcactgtcttggcataacaatgtcgagtgcgattgcgacgacgaaggtgacggagatgagtacagggaacaatgtcctcctaatatccatcaaaggtcccgtgaatagagactccaagaattcccagatgcccgggaaacagaagaggactgcagctgaagacaccatatagacgaagatgacaagtccacggttggccgagccgagcacaaggtgaaacccgagcgcgaacgtgccgatcaggaactgagctccccacggcaccaacccagatgccagtaagctgtaccaccaacgatggccgcgtggaatctcctttgcgctaccgtatataaggaagctggttgccacgatggagcagaggaaggccatggtgtctgtcacgacaaatgctcggaatgcaaaccggctcgccagtattgctgtcccggcatgcgggcggtcgtcggcgatgaagcccccagggacagtgaaagctgccgcgaatgccactgtggcgatcagaaccgacccaatcgttccgtttcttgtcatgtaa

SEQ ID NO: 29207 - DNA, 482 bp, Oryza sativa
  Clone ID: PAT_MRT4530_33732C.1
gggacccaaaaaggggggcttttcattttaaataccagggaaaaaaaccccccagcccaacaaattccagggccaaaaaaaaaccggtttaacaaaaaaggccggaaaacaatttcagcacaaaaaaccccccttattctacggaacaaaaaagaaaggcaccaaacaacaggggccgggaaaaaaccggccctgagggggcaaccaaaaggacaaacaggagggggtctttaaaaaccgagccgggagcaaaacaaaaaactttttaaccccccgaaaccccctcaaaaaaaaaacaacggaaaaagggggggtcgacccaaacccccgattgggaaaaaaaaaaaccccgggattttggccccccagggcaaaaatggcaaccgccggcttgggggggttaagaatgaaccggaaggggaagaaccccccagggaacaaaaaccaaacacccttggggaacaccctggacaaaaacccgg

SEQ ID NO: 29208 - DNA, 263 bp, Oryza sativa
  Clone ID: PAT_MRT4530_33733C.1
ccggccgggcttccccgccgccgcccgagcaacactaaaccccccatctccgccgctcccgtcttcccctcgccgccgccgtcgtctcccagatctcgccatggcgtcggagaagaagcaggcgaacccgatgcgggagatcaaggtgctgaagctcggcctcaacatcttcgtcggcgagagcggtgatcgcctcacccgcgcttggaaggtgctggagtaggtgagtgggcagttaccgttgttctccaaggctaggtaca

SEQ ID NO: 29209 - DNA, 495 bp, Oryza sativa
  Clone ID: PAT_MRT4530_33734C.1
ccccaaagttatgaatacaagcacctacttcaattatcatcagtgaaaattctaggagtgacccagcagaggccctactccggcccatacaactgtcatgctagccccgaggctcacaatgatgagtgtcatcacacaagagatgtccttccaagcaagaagcatatcgagggtagctctggcctccttcatccaacccttgcgaacgagcaagcatggataccatgccacgccgagcatgacatgttagttgtactacaatgcaagcgtcatggtgaagatcatgaagtgataacgaggccctcattgttcctcgatatggaactcctgcgtgatgtagaacatgccatcgaggatggtggctgcgatggtcaccagcgcggcacccctttgttgattgaatttattgcagcaattaatcacgtccatctcgagggcaaccctgcactcattcatccaaaccttgctaatgagctagcatggctaaactggtag

SEQ ID NO: 29210 - DNA, 606 bp, Oryza sativa
  unsure (1)..(606): unsure at all n locations
  Clone ID: PAT_MRT4530_33735C.1
tttttttttttttttttttttttttttttttttttttttttttttttttannccaaatcaaacactgatcattcgtacatataatcaagtttttacatgcaaccatacgtgctacacactctgaactattgcttcttaatatgtgcatggctaaatatatatatactcgcatatcctctgcaaccgatcgaagcttccggtcgccggaggcttacacggcggcgatggccgccgccggcggtgagaagctccggtagagaaggccgtcggcacggtggttgtcgccggcctcgtagtcgtcgtcttcgtcgtcggcggcgccctcgtcgaagttgagcgcgtagctgaggggatcataccggaactcccccggcgagccgacgcggcggcgccactgcgccaccgtgtcgccgaggccacctccgccgccgccgccgccgtagccgaagcagcagcacaccgtggccctcagcctgtcacgcagcgagctcatcggcgacggcggcgaggcctccgtctccatgaaggctactcacctacttcttaccgagctaagcggctcagatcaagtagtaagcaaaatgagtggtaatacggtcaaaccgc

SEQ ID NO: 29211 - DNA, 1569 bp, Oryza sativa
  Clone ID: PAT_MRT4530_33736C.1
atggacaacgccgctgccgtcgccaccttcatggagatcacctcctgcggatcccaggaggccgccgtgcagcacctcgcctcctgcaggtgggacctcgacgccgccctcaaccgctacttcatcttcggcggcgtgttggccgccgctcccgctcccgctccggtcgccgacgtcgcgccgcccgctgcgctggatgacggggtgcgcgctcccatccccgcccgctccgacacgctgtacggcgacatgtacggcggcgccaggcgccgtgaccgtgattcccgtcccgccccgtccgtttgggaggacgagccgccggcggtgacaccctcggtggcgccggtgtatatacagatgccatctgcgaatcccgcggtggcgccggtgcaaatacagatgccatctgagacggcggcctcggtgcccgctgcgccggtgcccgtacacgctccatctcagccccccgtggttgcaatcgccgtcaagaaagaacaaaacgagaaagacgaggaggaagacaacggccgcgacgacgacgacgacggctacagcgacagcgactacggcatggacacggacgacgacgacgaccgctacgacgagtgcatagagaaaacgccatctccaccacccaagtcgacgcagcaacaggcgacgacgctcgccgagatgtaccgccgcccgcgcgagctcatgcacgacgcggacttccacagcaccaaggtgcacgcggcgcgtcaggaccggtggctgctgctcaacctgcagtccgccggcgagtttgcgtcgcagatgcacaaccgggacctgtgggccgaccaggtgatcgcccgggtcgtgagagagagcttcgtcttctcgctgctcgagaacagttacggcgacgatgacgacgaggccagcaaagtttgctgcttctacaagctccatgaccagcttcccgccgtgctcgtcatcgaccccatcaccgggcagatgctggccaagtggagcggcgtcatccagcccgaaaccttcctggtggacatcgaagaatacagcaaatcgaagccgagcatgcgttccaaaccctatatattccaaagaaagcccatgccggtaaggtcagcacctgcagccagcgagcagcatcatcaagaaccggcaatggttgacactgctgcgcctatggatatccacaatgttcaagaaccagacactgctgcgcctgcacctgcacctgtggtcgaacacggtgttcaacaacctgcgactgccggcgccggcgcacagcaaccagcagatgaacaagatgatgatgaccagccgatggaaggtgagaagatgtacaggatgagggtacgattccccgatggctctgtggtcaccaaagagttcggctgcaagcggagggtggcagtgctcttcaattactgcagatcggtgctccatgacaagccgcaggcgttcaagatcaagaggttgctcggcgtcggcggagctttccacgagttgccccaaggtgaccactcgtttgaagatttgggcctgaactgcgcgactgtctcagtaattttggatacttag

SEQ ID NO: 29212 - DNA, 421 bp, Oryza sativa
  Clone ID: PAT_MRT4530_33737C.1
ccaacagaggcctctcctcaccggcggtggtggcggcagcggtggaggggttaggcggcagcttccgtctggcttcgtccccccgcacggcgtccatctgttgcagctggctccggaggcaatagccacctcatcgctggccactctagggtttcgaggaggctgtttccgcttcgatttcgccctgcgtgtgacgcccctctggtgcagtcgacggcgaaggcagtggcggcaccggcaaaccgaggagacttcgcgcagcgtcgacgacggcgaccgagctccgtgcggcgtcgacgacggcggatacgcaaatgtggccgagctccgtggtgtcgacaacagtggctatgtagatgtggtggagctcggcgcggcgtcgatgcggatgtggttgctaatcaccagagtggaggaagag

SEQ ID NO: 29213 - DNA, 437 bp, Oryza sativa
  Clone ID: PAT_MRT4530_33738C.1
atccatccccacacagatccatccccgtcttctcttcccaagctcctggcggcgacggcgccatcccaggccacgcgcccgcgcccgtcgtgcccgcggcgcttgccgcgtccgcgtccgtcgcgcctgccgcatccacgcctgtgcaggcttgacgcacgccgcgccgcccagctcccggctcccgcgtcgtcccatcgccggaccacccaggtcgcagtgccgccgcctctcctcgcctcctccctcagaccgtcagtgcgtcggcaccgggcgtcggcctcctcttctaccctccgtccatcactccatccattcgaatttgttatccgtgcttacttgtttgacttgggcagttttgttgcatctgactatgtgatgatatgcatctgtgaactttgtgatctggcattattattatgttgttgatgaagtac

SEQ ID NO: 29214 - DNA, 118 bp, Oryza sativa
  Clone ID: PAT_MRT4530_33739C.1
gtggtatccatttttatgggccggaccgaacacagagtgcatggtaggaggggggaaaacaaaagtacccctggacaggggcgggtaaaatcatagcacacagggaagagaagtggac

SEQ ID NO: 29215 - DNA, 996 bp, Oryza sativa
  Clone ID: PAT_MRT4530_3373C.1
atggacatcacgggttggagaagtacgttgaattccacgctctttgcaggcacggatctcagcttgtacgtcgagaaaaacccagcaagcttgcaaggatctttctcgggctcggacgtcgtcgatgttccgctctccacttctacgggaggatccttcgacatagagccgtctggggtcggtgacggtgctcatgtagccgggagacggcgacgtcggaggcagaacgtgttcccactcactgcatatccggggaatgtggcggtaaacagtgaaattgagggagaagttgggaacgcggtcggcaaaagctcggtcctgaggagagagaggaggctctggtgtggttcaaggtggcggcggacggaggggaaaagtagagaaatgggttcttctcagcgaggcggagctggtgcgcagccgccggcgccgtcgattcgattccgacgccccgccttcgccgccggcacccctcaccgccgaccgcctctagatcctccagatcgacgccgcccctccccaccgacctcctccagatcgacgccgcccctcccggacaccgccgccgtagcgtcgccacgcccgctccactcccggacaccgccgccgccgcctcgccacgccggctccactcccggacgctgccgccgtcgcctcgcctcgcccgatcccggacgccgccgcgactcacgccgacgccccggcgccacgccaaccgctacgctgcctcgctcctcacgccaatcgccgatccacatccgcgggcgctgccgaccgccgatccacatccacatcgaggacagccaaggaagcaagcgacaacctcctctgcgggcgctgccgacagcctcggccgcccgcatcaccgatctactccacgccgactatctcctccgcggccgctgccgaccgccgatccacagcgaggatagccgaggacagttgaaccacatccacactgcagtccctggaggcgagccacaaggatttgattga

SEQ ID NO: 29216 - DNA, 462 bp, Oryza sativa
  Clone ID: PAT_MRT4530_33740C.1
tttttttttttttttttttttttttttttttttttttttgggggttttaacagggcacatccctcctcgtatgaccttatcattattatacagtaatgaaacaggtctactttacatttggctaaatcttcagatcagggggaatataatctccgccgggtttagttccaaaatatttcttcaaacttccaacttttctatcacatcaaaactttcctacaaacataaacttctaacttttctatcacatcggtccaatttcaaccaaactttcaattttagcgtgaactaacactagtacggaaaggctttttgcatacgggcaaaaagcatttttgcatgcggttggggcaaccgcatgtgggagaaggtctgtaaaaatcacccttttcgcatgcggccggcccatccgcatgcaaaaatcccattttcgcatgcggttgcttatacgggccgcatgcg

SEQ ID NO: 29217 - DNA, 346 bp, Oryza sativa
  Clone ID: PAT_MRT4530_33741C.1
tgacagaaaacacgaggcctgggagatctgcttaactccagtgcaggtccaaaactcgccttcggatgtataagtgtgccagttgatttgatcctgtaatcaacaagaaataaaaacaaaagaaccgtggttaaatctataaatgatagccgatcggccagaactctatccatacatggcaatcatcttgaagcacatcaacccgagcccgatgtcgcgcacaagtcgcattactagaatcggctataccaacttactcagcctagctcaaccttagccgatcctagccgtagccgatccagactctagccaattcttgctctgttccagaactcgatctccgcct

SEQ ID NO: 29218 - DNA, 204 bp, Oryza sativa
  unsure (1)..(204): unsure at all n locations
  Clone ID: PAT_MRT4530_33742C.1
ngnatcaacacaagcncaagtcangtcaagcnttctcactanttcaanccccctcactaacaccttcganntgngcgccatggagcttgncctggttggcgncccttcgantggcgnagcgaacgnacgtgcgnatccgtagnatcgttgtccgacgtaagntccaaggncgtcatncaaacgtcggtgncccaattgcgangg

SEQ ID NO: 29219 - DNA, 415 bp, Oryza sativa
  unsure (1)..(415): unsure at all n locations
  Clone ID: PAT_MRT4530_33743C.1
gcccagcgtccgctggtcgctttaagtttggagctggtcttagaaattatatataaacttttggatttgaaaaaaaaaaaaaaaaaaaaaaaaaaaaaaaaaaaaaaaaaaaaaaaaaaaaaaaaaaaaaaaaaaaaaaaaaaaaaaaaaaaaaaaaaaaaaaaaaaaaaaaaaaaaaaaaaaagtgggaagaagaggggaaaaactcccncaatttttataaaattaaaataacaggtaaaaagggtgaaaaaaaccaaaaactaattaattagcgaaactataaaaattattaacgggtggcgtatttaaaaaactggggctttggaaaaaactttctttccccaattttattttttaaggagaataccccgtgtggggaatggggcaaaaaagattattgtgcaaaaaggtc

SEQ ID NO: 29220 - DNA, 423 bp, Oryza sativa
  Clone ID: PAT_MRT4530_33744C.1
atgggggagcttgcctgcggcatcggcaccatcaaggtggagtcggtgtggcatcgcgtccctaccaatatggcgtcctcgcggatcccgccgtccccgctagttctggctgatggtggtgctgctgctccaatgctccataccgtttgcctgcaggtcaagaggctcgaagcgaggatccacgaggcggtagcggcgcttgccgacggcttccgcggcccgaccttctccttcccactaaggaacctccacgagctcgcctccatcaaccccaaggtatcgaccaccggcaccgcgagttccttaaggccgccaccgcttgcgcgcctcgacaagctctggggcaagcccgacgtcttccgctaccgccgccttctccgccccaccgtcaccactgcgccgctgctcggggtgtgtcgttga

SEQ ID NO: 29221 - DNA, 441 bp, Oryza sativa
  Clone ID: PAT_MRT4530_33745C.1
atgaggaggaaggagaagaacatggggcttgggaagaacgtgcgggatgctggtgggtcccgcttgtcggtgggagtcaagattggcagtaatcaggaggggaccccccgatgtgggcccaccgcaaggatgccaccgtgtgctaagtttgtggtgatcgtttcacagggagccgcacggtcggcccggcccaacaagttggccagcctctctcccctactcttctggaaactaatgaaaaaaagcattttattttgtttgtgataattcacacactttatctgaaaatgcagtttaaaatcggtagtggaatcccaagacgtgagctcaaattgttttggcactcctactagaagaccccgtcccatgtcttgtgctgcttgtgtctcacgcacactagcaaagataaaattattattatcacgcgacactggtccctat

SEQ ID NO: 29222 - DNA, 513 bp, Oryza sativa
  Clone ID: PAT_MRT4530_33746C.1
atggcggtgccaaggctagccgtcttcttcctcctcgccctcctcgccgtcatgtcgcccgccgcggcgtcggcgtcggcggcggcggcgccggagacgtgcgtgcggacgatgcagcggatgctgtcgtgcctggacttcatcgagcaccgcaccgacgcggtgccgcggccgtgctgcgcgcagctgaacgccaccgtcgccaagcagccgtgctgcctgatgcacgtcctgcacggcgacgtggcgcggctcgtcggcccggggttcgacaccgcgcgcgccatggtcaacgtcaccgccgcctgcctcggcgacgcctccgtcctcatgtccatcgcccgctcttgcgccggcaagccgctgccgccacttacgccggaatatccgtttaccaccggagtgccgccggcgcctccgcagacatccggagcgacgcggctggagggcacgtcgaacaccgcgctgttatttgcacttggggcggtcgccatcgccatgctacggatttag

SEQ ID NO: 29223 - DNA, 345 bp, Oryza sativa
  unsure (1)..(345): unsure at all n locations
  Clone ID: PAT_MRT4530_33747C.1
aacgggaaaaccgggttgcctgacatctgctcgaaaagctnncctgaattgnntggcagacactacntatgtnnngctcnagatcgncatattatgtagttctagattcctagaaagtgtcctattacctataaattctgttacattcaggaagattcaaacgttacctgtggtagttcatttcttccacagttttgtcagattgacccccnggccattttctgtanggataatagcaatagtnccttgctttcttgatncggaattgatgtatngggcacattctttatacacacacncacacacacacacacacatactgagaatccaatacgtatactataa

SEQ ID NO: 29224 - DNA, 366 bp, Oryza sativa
  Clone ID: PAT_MRT4530_33748C.1
atgcgagagagagaagagaagggagaagccgccgccgccgccgaggggaaagagaaggagaaggggaagaaggtttcggcttctggatatggccgcgttggcgagggagatgtgctgcgttttcacctgggctacgaccccacgatgccactagaggcccgcgagatcaacagtgcaaggcggcaacgctgggggagcggcgcgcaggcgacagggggaggagttgcgggcggtaggggaaggagcggcgcgtgggcgtcctgcttcgccccgccctttcccggtcccgcctcgccccgccccgccgccaccctcgtctcccgcgtcgctccgtcaaccagcctacgcccctgcacagagaagtga

SEQ ID NO: 29225 - DNA, 141 bp, Oryza sativa
  unsure (1)..(141): unsure at all n locations
  Clone ID: PAT_MRT4530_33749C.1
ggggtgtgtgnnnnnngggattaattaatgatgtgggggggtnttatattacaaatnaaaaacatgcaagggggcattaaccaccaancccagctttcctaatttaaggggtaaacaacaaaaggatgcacctttcctttt

SEQ ID NO: 29226 - DNA, 1360 bp, Oryza sativa
  Clone ID: PAT_MRT4530_3374C.1
attgtcagcccgatccacgacgtcatcaccagccttctttttctctcggcatgtgctcgcggttagtgagcttagtgccgccggatgatgtcagatctggcgtgagtggataacgggactcctctccacctccacctcaaagatcatcctgaacggtatcccaggcgaaacaatcaagcatggcaagggcctgaggcgaggcgacccgctatcctcctcctcttcatcctagcaatagatcccctctaacgtctactggataaggccacagagacaggaatcttgaacaagctgagaggcagagaagttagattccgcacatccatgtacgctgacgacacggcggttttcatacatccaactaaataggacgtaacagcatttgcggagctgctaaaccactttgggcaagcatctggattatgtacaaatctacaaaagtcccaagtagccccgattaggtgcgacaatccagacctcgatgatgtcctgcaagtcacacctgccaccagagccaattttccaatgaagtacctagggttgcccctaacacctggaagaccgcgaagaatacacctgcaacctcttttcgacaaatcaatgaaccgcatatctagatggaggggaaaacacatgggactggcggggcggactactctggtaaaggtggttcttacatcgcaacatgtttcctcctgacgggtctgaaagcttccaaagagtcccttgaagccctcgacaaacaaagaaggaaattcctctgggcaggtggagaggctctaacagaaggaaaatgcaaggtcaactgaacgtgaacctgcctaccaacggctgtcggaggactggggatcctaaacctagaaaagttcacaagagccttacgcccgagatggctttggcacgagtggaagtcaccggagaaagcatgggtgggatctggaacgccatgcgatgacaccaacaaactcctctttgtggcaacaacgatcttgacaataggcgatggagctaagataagcttctgggaatcagcatggttccagggatgacgcctaaaggatgcagcacctctggtttacgcagtggcgaaaaagaaaagtgcaagcctgcagcaagcatcacactccgaccaatggttgatggatctcgacttgccggtggtctcagggtggacaacggcctaattagtcaacttgtcaacgtgtggggtgttgtacgaatcttgcatttgatagagagcaaagaagacaagaccacgtggaaattaaccagctacggcgaatacacggcagcttcagcttacaatgcgcaacttcttgatacaacaacttccaacttcaatcccatcgtcatccaaaaa

SEQ ID NO: 29227 - DNA, 1849 bp, Oryza sativa
  Clone ID: PAT_MRT4530_33750C.1
gcagcagcagagaggtctccacttccctttcctcccaccccgagaaagccaaaaaaagaaaaattatttttcaaaaaaaaagctcgcctcgccctcgcgtcgtcgtccccatcaccccccctcctccgctccgagtacgcgtgcgtataccaccacctccatctccaccaccgtatgtatctacggtgaggcggcggcggcggaggaggaggaggagggggagtggtgagggtttcatctgcggaggaggagggaggaggagggaggagggtagatctgggagggggatggggaacaggataggggggaggaggaaggcgggggtggaggagaggtacacgaggccgcaggggctgtacgagcacagggacatcgaccagaagaagctccggaagctgatcctcgaggccaagctcgcgccatgtccattctgcaaaactcccagttatgctgtggagtatcgtggtgtaaagacaaaggaggaaaggagcatagaacaatttgaagagcagaaagtcatagaagcacaaatgaggatgcgccagcaagcacttcaagatgaagaagataagatgaaaagaaaacagaacaggtgctcttctagcagaacaatcacaccgaccaaagaagtggagtatagagatatttgcagcacatccttttcagtgccgtcataccgatgtgctgagcaagaaactgaatgctgttcatcggaaccttcatgctctgcccagactagcatgcgccctttccattctaggcataaccgtgatgataacattgacatgaatatagaggatatgatggttatggaagcgatttggcgttccattcaggagcagggaagtatagggaatcctgtctgtggcaactttatgcctgtaactgagccatctccgcgtgaacgccagccattcgttccagctgcttctctagaaatacctcatggtggtggattttcctgtgcggttgcggcaatggctgagcaccagccacccagtatggacttctcttacatggctggcagcagcgcattcccagttttcgacatgttccggcgaccatgcaacattgctggtggaagcatgtgtaatctggagagctcaccggagagctggagcgggatagcaccaagctgcagcagggaagtggtaagagaagaaggagagtgctcggctgaccactggtcggagggtgcagaggccggaacaagctacgcgggctcagacatcgtggcagatgccgggaccatgccgcagctgcctttcgccgagaacttcgccatggcgccaagccacttccgcccggagagcatcgaagaacagatgatgttttccatggctctttctttagcagatggtcatggaagaacacactcgcaagggttggcatggttgtaggtagagcactctaattttgacgccttgctgccctctcccttgcgctgctgttgctgcccttctctcccctgcctcctgcttctgcctcctttttgccaccagctcttggcctttttgttcaccccttttttgcatgtgttttgtcgtcatggtttgatatagatccagctatagctctccattgttattgcttatatgtatgtaaaatggaatatgaggaaatagaaaaaaggaaaatgggtcaacagttcttttggcagtaggatgtgaattgtttttttggttgcgaaagcgtatagcatccttcaattcttgcagttggaagcaatgtttgcaggttgcatgtatgtttgtgatttcacatccttattgtgtaagaatgttacacttacagcagccaatggaagagctatctcgatgagaggcgagctgctaccagcattcagcct

SEQ ID NO: 29228 - DNA, 330 bp, Oryza sativa
  Clone ID: PAT_MRT4530_33751C.1
ggggctgtgttttttttttttttttttttttttttgtgtttttttttttttttttttttttttttttttcgggcgaaacgggcgaacagagggaaccacattccgaggaaaaaagcaacctcgggtttttcataggggccccctcaacctaagggtgggggggagaaaaaaaattttttgggcccccacaaggggggcaaaaaaaggggccccccaaaaccccgccccaaaaaaaagggccttttgggaaaattaaaaggccccccccggggaaaaaaaaacgggtaaaaaccccgaaaagtttaggcctttggggccggggaaagggaa

SEQ ID NO: 29229 - DNA, 1734 bp, Oryza sativa
  unsure (1)..(1734): unsure at all n locations
  Clone ID: PAT_MRT4530_33752C.1
ccacgccgtccgctcgcaacaacacaaaaccctagacttgcacagatcgagacgagagaggctagcagcaacattcttcgacaatggctagccttgcaatcttcgccgctgtagccttcgttctcctcgccgcctcggtgtcgtcgtcgtcggcggctttgtacaccgtcggcgatgcgagggggtgggcagtgccgcccacaggctcagagtcgtacaaccattggggtctaaagaatcgcttccgcgtaggcgacgtcgtggagttcaagtacgtgaacgaatcggtggtggtggtgaaccacgagggctacaggaactgcagctcgctgagcccggtgatccggttcacggacggcgacaccaagtacctgctcgaccgcccggggctcgtcttcttcatcagcggcgtgcaggagcgctgcgagcgcggcctgcggatgaggctgcgcgtcaggcccgccgctccggggccggcgcaggcgccggcgccggggccaacgagggcggcgctgacgctgcgtcgtccacccatcggcgctcccaggccggccgccgtcaccgccgcgttcaccccgacatcgccgtccgcttcgcgcccgagcgccagaaccagcccgagtcccagccctgggccggcacaggcgccgagcggcgaaagaaaagtccggaacagttcagttccgcgcgcgcgattccaccggcgaaacgggagctccacgtccgcgttctgttgcgcctcgcacgcccggttccaccgctcgcgccgcgcgctcggctcccgtctcgtccacatcccccgcgaccacgtacgctgccacgcccgcgcccatgcccacgcccacgcctgcggccgccgggccaccggttggttgtccgcctctagtttccaggacgagactggccgcaccattccaaagttcggcgcatgggacgtcaacaacccggcctctgccgacggtttcacggtgatcttcagcaaagccagggatgagaagaagggccccgtcaacgtggacgccagcaccaggtcaaactctgacatgaaagactccaataacaataaggcaacagagaagatcaacccctaccaccgcaggacaaactccgcatcaaagaagtggttttgctgtgtgtcgcccagccccacccaaccttgaggaagcaaaggaataccaaatataacatgatgctgctactgccgccttgttaatgcatatagtaatgattatacacacccagttgaaaatggcccggtgttattctgtgatggttgctctgttgttgtgaggaggctggtcttgagctcctcaagcctgtctgtcagtgacaacagcgccatgtatgatttgttttccgccgggccaaccatgtacgagtgtatgactgttacatgagaaatttatgggtatatgatgattaaaaacgtcgaaaaataaaaaaaaaaagttggcgtttgattgtaattatccattcgctcttgtcctttttcttatggttctgcagtgtgatccttcctcgaattaatgctataattctgagatccaagaagaagaagaagaagaacgtgtcatgtcatctcgcggtagatgacaggatcgagtccatttttgttaattagggtgttccaatgttttgtctagggtacttaattaaacccttatggcnttatgtangtaaaccnattccctcaataaaatcccaccagttttattgtgaaaaaaaaaaaaaaaa

SEQ ID NO: 29230 - DNA, 150 bp, Oryza sativa
  Clone ID: PAT_MRT4530_33753C.1
atggtgaataggcggttcgaccgacaacgacagggcttcgtcatctacttcgttcgagggtttgttgtctccaagttttacttggagactaaggcaactcatgatataaaaggcatacccccgaaggggctgaggatcttcgaatcatag

SEQ ID NO: 29231 - DNA, 1100 bp, Oryza sativa
  Clone ID: PAT_MRT4530_33754C.1
atcaaagggaggtagtgcaagaggaagaacaaaacagcatgtttttccagagaaagaattcaaagaaagtgaaggactccaatggatcgtcgtcgaagaaggacaaagatagccgcgggaagaacattttcgacagtgccaagggaggacttggtgcccttacaggaactctccagacagcaaagaatgatgccggagagaaggctgaaaaccttcaagatgatgtgaagacaaccatcggagcaatcttgcgcagaggatctggtgttcttgagaaagccaaagagattggaggccattcagaggccagccagtccaaggaactagagcaaggaagtgaagaacaaggaaagaaagatatggaagccttaaccaaagtcatggacaaggtcaaggaagtgaagagtaacccagaagtggtggagaagctggacaaggtcaaggaagacatcagcagccttgctcatgctttacatctgggaaaacatgataaggaacatgaatctgaggagaaggcaaaggaaggtgagactgcgaaaagggccgacgagggcgcctctgccagcaagtctgaagattcaggtgtggtagtacaagctgtggaagagattcaggccgttgtcacagctgtgcagcagcagctgcacacagaaggagctgcagctgaaactcccaatgaggctgctgctgctgaaacttcagcagaaggagagaagcctgaagaatcaaagagagatgtagagaaggatgatccgtcgaagcggctcgacttcaagggcttctttgccatgatatttgagaggtgctgcaaccctgggaacaagaagaaagattaagcttggaagaaaatgatgtggattttttttgtttttttgtttttgtgtgtgtgttcttggagactgaagaatgatgtgcatgggattgtgggatggtgtacagtttgcagtttgtgtgttttcttcagagttaattgtctgcttttggtgttttatccttttatgtgttgatggatgtatgtcaaagagtactttgtgaaattcttgttagcaatgtgagcttgatcttacttatgtgaatgaaagaatttatttatttatttt

SEQ ID NO: 29232 - DNA, 1530 bp, Oryza sativa
  Clone ID: PAT_MRT4530_33755C.1
atgggcgtctccgccctgctgctcctcctcctcgccgcggccgccaccgccgcgccgccggagcagcccgcattgtccgctactccctcctccgccgccgccgccaacaacagcagcggtggtggtggtggtgcggcgagcaacggggtgaactcgaactcggtgctggtggcgctgctggactcgcactacacggagctggccgagctggtggagaaggcgctgctgctgcagacgctggaggacgccgtcgggaaggggaacgtcaccatcttcgcgccgcggaacgaggcgctcgagcgcgacctcgacccggagtttcgccgcttcctcctcgagccccgcaacctccgctcgctgcagcggctcctcctcttccacgtcctccccgcccgcctccacgcctccgactcctcctcccccgacttcccctcctcccaccccaccctctccggcgagcgcgtcgacctctccgcctcgccgatgcgggtcggcgccgcggcggtcacgcggcccgacgcggtggtgcgccccgacggcgtcatccacgggatcgagcggctgctggtcccgcgctccgtgcaggaggatttcaaccgccgccgcagcctcgccgcgatctcggcggtgctcccgacgggggcgcccgaggtggatccgaggacgcaccgcctcaagaagcccgcgccgcccgtcccccccggcgcgccgccggtgctgccgatctgggacgcgatggcgccgggcccatccatcgcgccggcccccgcgccggggcccgggtccgggaaacaccacttcgacgggcacagccaggtgaaggacttcatccagacgctcctcctctacggcggctacaacgagctcgccgacatcctcgtcaacctcacctcgctcgccaccgagatgggccgcctcgtctccgaggggtacgtgctcaccgtgctggcgcccaacgacgaggccatggcgcggctcaccaccgaccagctcagcgagccggggtcgccggagaacatcctctactaccacatgatcccggagtaccagacggaggagagcatgtacaacgcggtgcgccgcttcgggaaggtgaggtacgacacgctgcggctgcccaacaaggtgacggcgagggaggccgacgggtcggtcaagttcggccatggcgagggctccgcctacctgttcgacccggacatctacaccgacgggaggatctccgtgcagggcatcgacgccgtgctcttccctcccaaggacaccgccaccggcggcgaaggctcaggctccggctcgtcgggcgccgctcccgccaggaaggcccccgccgtcaccgcccactccaagtccaagctccgacgaggtcaggaagttgttggaaggggcatgccaagtgatgggcttcctaggccgaagatcgcgattcgcgagctgccaatagactacgacaatggcttgatggacaaatatgtatatctgccactgctttttgctcaactcatgacgctgaaacatgaaccgaaatga

SEQ ID NO: 29233 - DNA, 230 bp, Oryza sativa
  Clone ID: PAT_MRT4530_33756C.1
gcacgaggcttgtgtgtggcaatgcgcgccgtggaattttagcgacgaccacggcttcgttttggcttcctcttacctcctcttactatgttgctggctttccttgttgggttggccattggccctctccttgtttgcctcctcctctcctctcaatctcaggccctccctccctcgccgacgagcctctcctcttttgccgattgataagccgagggtgagggtgagcc

SEQ ID NO: 29234 - DNA, 324 bp, Oryza sativa
  Clone ID: PAT_MRT4530_33757C.1
ggccgcctcttcggcgtccggccgttgcgccgcgcgacgccggcgggtaaccgggcgccccgcctccccggagatgatggccgaggtgcgtacgcgatcctttccagaagcttccgttccatctgtggagtcccacaccgcccgctccatcccatttggtacccgccggctcgccgccattgttgcccctaactaaatccgagaaccggggggatcattctggaagtcttggtcctgcgttgtcaggggtcatcagcgacgcggaggctgcgaagagggggatgattattgcaggagggtgtggtcgtgtgcggtttatcgatc

SEQ ID NO: 29235 - DNA, 342 bp, Oryza sativa
  Clone ID: PAT_MRT4530_33758C.1
gaactcacaagaaccaacgataaaaaaaataaactcaaacggaagaaatatgtgacttgtagaattttccaaagctctaccggaaagcttctcgtctcgaaaacacaatcttgtaagcggaatttggaggttttaatttcaccgaagccggggaaaatcggatgtaattttttctgtagatgtctgtggatatatattatttgtccgattccgagtccatatgagaaactaacgtgttcgcataaaatacccaaaaaatatcctcctaccacgtcggttcgcgtgtgccacggtggcggggtgatggcgccaaccgttggaccacggcgtcagccactttgg

SEQ ID NO: 29236 - DNA, 166 bp, Oryza sativa
  unsure (1)..(166): unsure at all n locations
  Clone ID: PAT_MRT4530_33759C.1
aaagggaaaaatgggcccattccattatcactttcagggaacgggtaaaaactatctaggatagggagggggggaacccccaaaaaaaagctactaaaacactactagggaaaataggccagctatatttgggttggaataaataagttttttnggacgcgggggg

SEQ ID NO: 29237 - DNA, 691 bp, Oryza sativa
  unsure (1)..(691): unsure at all n locations
  Clone ID: PAT_MRT4530_3375C.1
nnnnnnnnnnnnnnnnnnnnnnnnnnnnnnttcggtgctaaccaaccaaaccataatcaaaatataagttttatataagttgttacatattgataatggcaattaaaaaaacacttatgatgataggcagcagagaagcagaagccgtcatgcctcacagtttttcttctctttttccttcttctcccatcgtttttttttttggttttacgtcgtccgatccgtccattgctccattgctgacgacgagcgaacctccatccaaacgctgttcgcaaccgatcccagagatcaaggtccccatacattcaccaccaccaccaccaccatccttttcctcttccctctcttgcctcctccttttattactctactcatttagcttttggttggttggttcccttcttgagaccccaaaacccaactaggaaggacaaggacacatccctctccctcttccaccaagagagatagagccaagaaccggacgaggtagaagagattgngccgccacggcagtggnagcgcgcgcgcaannttccccgagatccgcgagatctccgtcgccggctcatgccactggtcggttcttggggcggcggcggcggcggcggggggtggtgagtctgtggccgtttcttgcggcgtggtgaggtgaggggagggagaaagagaggctgcacatgtccgt

SEQ ID NO: 29238 - DNA, 393 bp, Oryza sativa
  unsure (1)..(393): unsure at all n locations
  Clone ID: PAT_MRT4530_33760C.1
aaaaccccccccttttttttttttttttaaataaattaaaacgcgataggttatatatcacaaaccagaccctcccannacttcacactaccgntacagatctcaccctctctccaaaatcnnacaatcatacacncccctaacatacataccttcccctcataatatcaccaaccatcatttactttacctcttacacacacacacactctaatntacaaaccctcatcatcaccaacctacctaccttaacttaaatccatcctttcacattccaataccaccacactttttcttactttccnacacccaaatttttcaaaatcacccatcccatctcaactaccaactttnccaccaattaatcctaattctttactataccctttacat

SEQ ID NO: 29239 - DNA, 1635 bp, Oryza sativa
  Clone ID: PAT_MRT4530_33761C.1
ctaaaggggaataggtttgacaaaatggctctccatcgtccttttgaaatccttactgtatgtgtatgcatctcttttgtcaagaaacaaaatagccatgctccttgataggttggtgacccgatgtacaaatggcaacagttcacggcgatcaatatgagcttggtttatggttttccatgcatcttcgaccaaagaacctatcttggctagggcaacctcactggtaacattgtactccttgatgtagcactccacggagctggctacatccaatttgttccttccattcttaaatgcagccatgtcatccatgaaacgtgccacctcaccgccagccctaacggcatcattgttgccaatggcccactcaagtgtctcctcggttactatatttcccatgccgacaagtatacatacacttagtgcttgaatacctgcagacatcaccgacacttctatttgctctttgaaacttggtacgtagttatgatggaaccattctgcctcctggagataatacccagataacaattgaaacactttcctattgtaagcattgcggtgcctaatatgtggttccaattcattctcgaactccacgaaattgctcatcaccttgagaaagaatttcttcagataatctggtagaacagaaatatcactctcatcccagctttgtatggccacattgagatttcgacattcctccaaagtagcatgcgtatcataagtgtcatctaacaatgatgttaacatgaaaaacttggcaaggatcatccgggcacgtgtgtactcctcctcaaagtacatagaatatgaccaaaagtagcattcaacaatgcgatcccttatgtagtctagtcctatgtcatttgaaagatcctcccaccactgagtaattgtcttgagctccctttggtgaatatgttgaagaaggttaaagtctagcttggcaagctccagtattgaggggttgtatgtttgctcgtgtacattgtactctaatatataagatagggcctcaaccctcttcaagtttctggacaatggtatctgaagagcacgtgaaacttgctcagctaatggggacttcaggttacttttcattaactccaaatgatgccttgaaaataagatagcttcctggagggcttcctcgttgtgggtgagaaggttggcagcattgtataagcttaagagaccttttgggtcatttgttatgtcaatgataaagcttccatctctgtgtttgaatttgttgaaaacatccgcggtcgcccttttccccggctgcctctgcaagcgaaaccggagggcaacgtcatgaaggctagggctgtcaaattcagcaccatgaatggtattcaaggtggtggctatctcttcctcaaagagatgatctatccccaggcgttggagcgtgtcaactagattcattttttgtcctttcttaactgatcggatctctctctcatccatttctctggccgctgcaactacagaaactgtgtgtgcacatttgccacaatcgtaagcatgtatagttctcaacccctcaccatgttgtctcgtccttccctccgatttgttctctgtactatgccaacgcctctgcttggagggatcatccat

SEQ ID NO: 29240 - DNA, 2248 bp, Oryza sativa
  Clone ID: PAT_MRT4530_33762C.1
caaaaaatatattaaaaaaaaatccacataaaccctcgcttccgaaaaaacccgcatcgccgcgcggagcaaagcagagagggggaggaagccgccgccgccgccgccgccgccgccgcacggcggaatggagtcgacgccggagccggaggacgggagggagctctacgcgctgctccacctctcgccggacgcctccggggaggaaatccgccgggcttaccgccagtacgcgcaaatctaccaccccgacaagtaccaggacccccagatgaaggatgtggcaactgaaaacttccaacgaatacgtgatgcatatgagatactatcagatgagaacaagaggcagatatatgacatctatggtatggaaggtttaaattctggcctggaacttggccccaagctaaacaaaccagaggaaatcaaagaacagttggaacggctgaagcggcgcaaggaagaagagaaatttttagcccatgctcgacccactggctcaataattgctaatttttccgtgccacagtatttagatggctatggaatcatgagaggcatgggaatgtccagtgaagttcagttgccagtgtccaagaaaaatactgttgttgttggtggaaatttggttgtcaatggcacagatggaactggtgcagcaagcgctgtgctgcgtcaccagttgtcttctgtggcatcagtagagtttatggctacagctggactacgttcccttattagcgtacaaacatttcgtcaaatttcaccacattcgacagcaacatctggacttgctctttctttgagagatggatctatcaatctatcaaatgcctggactcgccaactatctgacaatattgttgggaatatacagcttgcccttggtacagactcaagtatttctgttggatggcaaaagaaggatgaaaaaaattctgcagcaggggatgtgaagcttggtactaattattttggtgcatctgctcattacacccgttatttctccaccaagtctcatggtcgcgttgctggtcgagttggaagcacggcccttgattttgaaattggaggaggaaggcggatatctgagttcagtactgtaaggatgatctataatataggaatccagaatataagtattttagagttggacacggttattaacaaagttggtatgattaaatgggagagtattgtgattggaggagaagtggagggggtctcttggagattcgagttgcatcgtgctggtcaaaaattagttatcccagttttgctttcaactgatttcaatgcattacttgctaccagcgtttttgctattccttcaacactatattttctacttcagacgtattttgtaaagccatactgtcttaagcgggaaaagcagaaggaacttgaaaaaatggaaagtttgtcttcacagctaactgaagccagacgcgcagcgaaaaaagcacaaaagttactagaacctgtctcaaatcgtaagaagaatagacagctggaggatgatggcttggtgattacaaaagctctgtatgggaatcgcaaaaaagttaaagagagcagcgaatcaaatgagttgaatgatgatgtggcttcgcaagtattagacgtgaccatcccactgaacttcctcgtctctgaggcaggccagctaaagcttcatgaggggatcaagaagtctggaataatgggcttctacgatccttgccctggtgatccaaagctgttacttgtagaatacacatttcatggtcagaaatacaaggtcatggtagatgattacgctgcactgttgataccacaagatattcatcaaatttgatctgccgctgatcccgaacaattttgagccccatagctctcttctcatagtttttcttcttctgatgaggcttttctgtttttcgctgtttttccctcacatggtccattttgttgtatacatgcgtggatttgttccacctagattgtagatacgcggggtgagatcccgacagtcaataagtttcagtcaatcaaaagttcgcgacattagttcaatcttcactggacgaaacatgcactgaactgataatttctttatctacgaagatgcagctgtcgcctttccacttagatcacagccaaccctctaacacatgcatctgtttttccttgtctgcgagcgtgcgacaatgtgatactctgtttttgtcatattccagttttgatccgtcaaaaaaaaaaaaaaaaa

SEQ ID NO: 29241 - DNA, 280 bp, Oryza sativa
  Clone ID: PAT_MRT4530_33763C.1
tgcggtcactctgaggatctccataattgccgttgattgttgtaggtaaagcccccggctttttgttatgcttgcgctttttctgggtcatagttatagactttgacatcgggattaaaaaagggagattgcacaggaataaaggaattttgtttttcccccaaccctcggtaaatgttattaaccattctttcccggtcaatgccataggcgatcgcctgacgaaaattgagattattaaaccaccgggatttaatcggatccccgggtaccgagctcg

SEQ ID NO: 29242 - DNA, 433 bp, Oryza sativa
  Clone ID: PAT_MRT4530_33764C.1
acgcaaaactatctaaattatattatagacgctactactttatgagaagcatctccaacatatgatgtgagctttacacgagtgtatcctatttatgtgaagtactaagagcttaacctagccaaaagaacaatcatgcccaccattgaggggcggctcagactgaacacactgagcaatgatcacatgccatgaagactgttattactatacaggaaaaagaactgctccagcatgatctaccctgaaaatgtatcaacatttacgagaacatattcattagcgcttagcttatgcatgagtctcctagccaataagcttgagaggaacatataggtcaggagagttcatgcaacctatgagctgccaagcgatgactcgaaaaaacgaatgctgcctgacgtcattggcaccagcttttcaacctatacga

SEQ ID NO: 29243 - DNA, 518 bp, Oryza sativa
  Clone ID: PAT_MRT4530_33765C.1
gccgcgccgccacacgggacggccgagtactacgccgcgcttgccggccacgacggcctgcgccgccggtcgctcggcgtcggcggcggcggcggcggcgccgagttcgccttcgccgacggcaacgacacctaccgcctcaacgatttcggattagcttgaagttcgacgtgtatagccctgcgcaatcgactactagccggaaggtcccgtgcagtagcaacttgtgtgatctccaaaatgcctgccgttctaagagtaacagctgcccctacagtatccagtacttgtcggataacacctcatcctctggggtattagtggaggatgtcttgtacttgacatctgactccgcgcaatcgtaaaatcgtgtacaggctccgtataatggttcgggcttcagtacaggtatcgttttctaggccagtgcttgcgcccaaacggttctgccttgggtcttgggcatgggacagcgaaatcgggttcctgagcttgtctagccaagccaaagggacttg

SEQ ID NO: 29244 - DNA, 300 bp, Oryza sativa
  Clone ID: PAT_MRT4530_33766C.1
acagtgttttcataataatgaaaacactacaagaggatttttttctttttttcttttattttttttttgctcacatgtataatcagctctgaaaattagctgccttttgtaggatgtttttatgccactaaaaattacataatatcccaaagtttaagtaatttggtgtagttgcatatgtttaggttgctaggctataacaggttaggaaagtataattattatagtacatttatttgttacatgaggaaattgccttattaggctcagtaaattagttattaggcttaagaaatatga

SEQ ID NO: 29245 - DNA, 1704 bp, Oryza sativa
  Clone ID: PAT_MRT4530_33767C.1
atggatccgcgcgccaggtaccctcccggcatcggcaacggccgcggcgggaaccccaactactacaaccgcggcccgccgctgcagcagcagcacaaccaccaccagcagcagcagacgtcggcgccgcaccaccagcagtacgtgcagcgccagccgcagcagcatcaccaccacaaccaccaccagcagcatcagcaacagcagcagcagtggctgcggcggaatcagatcgcccgcgaggccgcgggaaccgacaggaatagcgagccgaaggctgtggcgcaatccccagccgtcgacggcatcgattcgagttcacaagactggaaggcccaattgaagcttccacctcaagatacacgatacaggacagaggatgttacagccaccaaaggaaatgagtttgaagactattttctcaagcgtgaacttctgatgggaatatatgagaaaggatttgaaagaccctctccgatccaagaagaaagcattcctattgcattaactggtagtgatattctagccagagcaaaaaatggaactggcaagactgctgcattttgtatccctgcactagaaaagattgatcaagagaaaaacgctattcaagttgttatattggttcccacaagggagctggctttgcaaacgtcacaagtttgtaaagagcttgggaaacatctgaagatccaggtcatggtcaccactggaggaaccagcctgaaagatgatatcattcgtctctatcaacctgtccatttacttgttggaacgcctgggcgtattttggaccttacaaagaaaggtatctgcattttgaaggactgctctatgcttatcatggatgaggcagacaagcttctctctcctgagttccagccttccgtggaacagctgattcgttaccttccagcgagccggcaaattttgatgttctcggcaacgttccctgtgactgtgaaggagttcaaggacaaatacctgcctaaaccttatgttattaaccttatggatgaacttacactgaagggaattacacagttttatgcttttgtagaagaaaggcagaaagttcattgccttaacactctcttttccaagcttcaaatcaaccaatcaataatcttctgcaactctgtaaatcgtgttgagcttctggcaaagaagatcacggagcttggttactcttgcttctacatccatgcaaagatgctgcaagaccatcgtaatagagttttccatgatttccgtaatggggcatgcaggaacctggtttgtacagatcttttcacaaggggaattgacattcaagctgttaatgttgttatcaattttgatttccccaaaaccgctgaaacatacctccacagggttggtagatctgggagatttggccatcttggcctggctgtgaatttgatcacctatgaggatcggtttaacttattgaccaagctatatattgccaataatttgacagagttccagcgtgtattcactttctctaagggtaataagaagacaattcttgtaaataccagctcatcagcacatacatctgagtttgatttggaggttgaaaagcgaggttttatcatggatctcctgtggcatatgggaacattcatttttggagttttatttgagatgagacagactactcttccgatggacaccttgtgcttatatcattttggctaa

SEQ ID NO: 29246 - DNA, 432 bp, Oryza sativa
  Clone ID: PAT_MRT4530_33768C.1
ctatcgttttagcctcatcccgagcctccccgtggtcgtatcacccctccccgctgtcgcccttctcttttccccgcgccggccgcctccagccgcctctccctcctcgcccgagcgccgtccggccgtgccgtcgcctcctccagcatcgcagccgcctcctcttcgccggcctgccctctgtttcccgcggagacctccggaagtgcatccccgccggcaacagtggcgttgccgccactgttccgtctccggccggctgctgttcatcaccggtacaccgactgacgtcaccatctcctccctcgacgtcgccgcgtcgccctccaccccggcctgccctcggtctcgccctccgcctcgccggagttccttcggcaaccccttccgccgtgcccatgcgccggccgacgtcgccgtctcctccggcat

SEQ ID NO: 29247 - DNA, 312 bp, Oryza sativa
  Clone ID: PAT_MRT4530_33769C.1
atggccggagttctgaagctgctgctcgtgctggtccttctggtctcgtcatcggacggctcggatgcgtcgaggcatctgaaaggagatgcgatcgaacggtcaggagcagccgcaggcgaggctgtcatgatgagagccgtgatgatacatgtgatcaagggcatggagttggagatgcaaacttgccattacacaggtcagattactgttcaggactcaagaaaaacttgtgacctagaaatgccacgaataaatatcacggcactgtgcatatgcagcattgcatggggaaaaacaccagcaggctga

SEQ ID NO: 29248 - DNA, 2734 bp, Oryza sativa
  Clone ID: PAT_MRT4530_3376C.1
tttttttctttttttttttttgaccaggcataaaaattccgaattttatagatgctaaccactgggtttactataccacttgatatctagcactcacctattaggactcacgagtgggttgttagctggtcaaattcggctgtactaacctgacaaactgcacaccggtaaaagaggtaaaaaaaaaaacccaaagatgcactacaattctgaactgcgctagcaatgagagataaaagtccatagtggaccaaattgttctggaggcagttatcttttgctctcctcactaaagctaacaattcctgagaatgacaggaatcagtgcccgctccgcttgtacgtctgacgccaatgcaaaggggatagttgaagcaactgggagcaaccgatattttgcaagacgtgttccgaaacctaaacaaccagacgcaagaggcaccattatgatagtatatccgaatagactgccaagctgacgctgatatgtagaacctctctctatttactccgctgtgtaaacatgtatttagatacttgtgttgcttgaggtttaacttggcagggatgcctggctctgcgtggatcttccaaaagggaggaggagatcaatcatggagtcatactcctctcggctaacctgagccgagttcaaaagcttctgcaaaagcttcgaatctgacattattggagcaagagcaggaagccgatggagtgagagcgcatcaagcagcacgagaaccatcaattgccactgccttgatctcagagaaggcagtgcatcaacaaatgacatcgtgtccaacaagtatcccagagtaatctccaactttgagactggaatttgcatcctcaagtttgatacaagaactggcagggcattacacacacaagtatccaaagctcttctaatttcagatgagtggccatcatttaaaactctcttctgaggacattctcttccacctgcaatcaacaaatcttccatagaactttcatcaagcccatacacataggccaatgaggaccgggatacccatccaaataatgcagcccacatcgttgcgaaggaggacagagttagactaaagccttctggtggtgtatcatgccaagaatcatcgacatcaaacatatctgtgtctagaagcacagtcttcttcggccacttcacaacacccctatcaatttcaaatatttcattttcccctgcatctttgtcattgtcataatcattattgtactgttgctggttaaccatgtccggcagtatgatgattcctgcctttgaaactgcatcttctacttccgatgtgccagatgaaatagcttctgctgcttcaataagcgcagctgcacaagcttctgcagattcacgccttactgaactgtccatgctttcttgagatttactggagtgacttacaaatgctctgcttgtctctaacacacttccattctcgtctgcccatttcacagaatgccctgcattcttggatccaacagccttcaatgaagatcttagtgtacatctaccactatcatcacttgtctcgtcttttgcaatgttaactgcattactaaataattcatctagttcttcagtgtaagcttgcactgaatctatcgctgcatattgagatgatgaaggctgctcatttgctaatatagaacttgagaaattatattgacccagagcaccatgatccatcatttctgaaccacgatcacccataataattgtacttgtaaagtccacttcatgtccatcacgcccaactggtctttttgcaggcttactcttacctaccctcgatgttcctttagctgctttatttttcttcttatcctttttctcttcgagaactacatcctccagctgcttcacaatggaatccgatatgcaagacgacaacatatcattatcttcatcctgcttgaacatcttcaatggggttttggttgcttcctttttctttgcttttgtattctcagtaagaaccatgccggattcaccagaagaagcattcctagaatccacattaatattactggactgctcagcactacaagcatcgttctgtttagcctctttttttggccctccaacgacgcgatcacggcgaggcacatagccctcgatggcgtccgacggcccaatccactcctgcagcgtcacctcccccgtcccagccgcctccttctccatgatctccaccttcctcccctcttccacctccttcccatcgccgctcgccccaaaccctagcgccaacccaccgtcatcaccaccaccaccaccgccctcgaagagcgcgacgagggcgtcgagccggtcgggcgagacgccgaaggggcggtcgggcgggagcgacgccccgaaggcggcggaggcgacgaggcagcgctcggagcagaacttgcgggcctcctcgaggtcgtacacgcggtgctcccggagcgagatgcggaaccgcggcgccgccttgccgcgggcgtcctccgaggggagcgggttggggcacgccgggtacccgcaggcgtcggcgatggagcgctccgtgacgacgtcggcgtagtccggccccgagagcagcgaggccgccgcgcggagcagcggctccctcgacgccgcggcgccgtcgtagagcgccatctggacgcggtgcaccgccgacgcgacggtcgtgggcttcatcctcgcgccggtgtcggtggccgtggtggggcccat

SEQ ID NO: 29249 - DNA, 1053 bp, Oryza sativa
  unsure (1)..(1053): unsure at all n locations
  Clone ID: PAT_MRT4530_33770C.1
tctagataagctttatatcaaccctcactaaagctttagtgagggttaatattaaccctcactaaagctttagtgagggttaatattaaccctcactaaagctttagtgagggttggtgttgaccggcactgggagtcgggtgggccaagatgttagagcgtgaccgagacggagaggagaggcaagaatcgacacgagaggagcgtaagaccagcgacgcacccggcgaagcgtggcggacgcggccgagggagcagagaacaccgaccagcaccaccgagccccagagcagcgagcaccccgccccgcgcgccagcggcgaggaccagacggagagagaccaggggcgcccgcccacggaggggacaaacagaggcagcgacgcgctacaacaccacgacaccccgcgggagcggaccgaaaggccacacgaaaaagaacacgcccgagagaccgagagagagccgcgaggggaacggcaccgaaggggcgcagtcaaaggcgggaccgcacaaagcaacctacggccccgaacatatcacgcaaaaagcacggaacaccgaccgaccaacgacaccgaaggagacgcgcaggcacacaaccgacgaacgggggcccaacacgcgagacgaaaatggaggagggccaaggcaacgggacgaaaagagcaacagccgccagcacgccacagccaggggggtggaaatagcggcgagagcccaacaacgaggcgccaaggcggcaccgccccagaaacagcccaccaagaggctccaccccccccccctcaaaaacagcctgcgagcacgcgagcatccacgaccccacggcccgcacgcgacaaagactcgacaaaccttcaaagaggcgcgagcggcaccgtccccccgaagagaagcagcggcgaaccggacggaataaaaagaacgcgcagcgcggggcaggaaaagagcgtacagagagccggaccggccgagagcatcgcttcgcccccgagaagacgagaggaccagcaagccgcacaagagcagacgcaccaaagatccccaccn

SEQ ID NO: 29250 - DNA, 232 bp, Oryza sativa
  Clone ID: PAT_MRT4530_33771C.1
agaggggacactaaaagcatgcagggcactaaaactttggtttacattacaaacatgtaagggcttcggaatcactcaccactcataaaggttagggataaaagggataaaacacagggaagccctgttttttttttaacaacaaatgtttgccaggggttgggttcatgaatgccctgaaaaacgggctcctccttgttttcctgggcttcaacgacaacatcgaatgggg

SEQ ID NO: 29251 - DNA, 390 bp, Oryza sativa
  Clone ID: PAT_MRT4530_33772C.1
caagtggtgagggttttcctttggaagggtttggagtcagtccacagcgggagttgaagcctagttgcatggcccaaaatttcccgacctaaggagctatgaggttgggcatcatgaacctttgggtcatgggttgggcactgcatcacacaagtaatcccaactgggctagcttttgtcatgcccagaaattcacgaaccaaaatttctaagctgaatgtacattaaatctctgtccaggaccagccaggatacacaaaagacaattgttgatgtatagatctacgtcttacaaaaatataaaagattacaaatgcagcggaaaagataaaacaagctagacttgaaagcttgacttctgcagcgggcaactccactccacaggcatcc

SEQ ID NO: 29252 - DNA, 267 bp, Oryza sativa
  Clone ID: PAT_MRT4530_33773C.1
ggacggtgggagtacgtcctggctgggctccttccgtacagaggatacctcctacgtggccgccgccgcctcagcccccttacgcatcaggcccacgtgtcagtgaccgcgggcgcctcgagaggatacgtacgagccgtacgatgcgccaggtggacggctcgatgggcgacacgtcgcgagcccggcggcgggtggcgcgtcgctcgtgggttcgtggctctccgccgcgaggccgcctccggttcaaagcctagccctctctga

SEQ ID NO: 29253 - DNA, 372 bp, Oryza sativa
  Clone ID: PAT_MRT4530_33774C.1
tagtgtccgataaggattttatcttttccttttatctttacctgcttcttgattgccaataagggtttcatcggggtttcagccgattttataacattggacctccagccgatgtatgctttaaccttcggatcagtgtttattctatcatctcattgctagccgattggtttatactgtattatattattgttatactatattatcatcagtcgattgcctttatatcattatttaagtcaagtgtcagactctacattggacataaagccgatagcttagaaccctatcgttatcggctggcatcggctatcggctggtatcggcatcggctggaactactccatcggcttgtcagccgatcagccgttt

SEQ ID NO: 29254 - DNA, 222 bp, Oryza sativa
  Clone ID: PAT_MRT4530_33775C.1
atggaggaggaggaagctggcgccaagaatcaaacgttgttcaacgtgataagtgtcccctgcatgtcggtatccactactcctccaaaagtcaagagtctatacattgatctagaggttccttctgaaactcagctcccaagccccttcctgatagatatctctgacactggcattttgttgagagttcacagcatacaagtcagggaacagtatctttag

SEQ ID NO: 29255 - DNA, 3389 bp, Oryza sativa
  Clone ID: PAT_MRT4530_33776C.1
actccccggtctccgggctgcagccccagggacgggcagcagcagcagcagcagcagcaaacgcagcaggagaaaacgccggcttggagaggcttgtggcttcctggtctgtctcttctctctccccctagcagccgcgcagaggcgcaccagggggtagacggccgccacgggctcctatccggaggccgcgcccaacgcggccgtcgaccccggcgaacataccacctgaagatccgattgggcgcaccggagcacagcgccacggcccctcctccgcccctgccgagccgcgccccaccttcttcgccaccgacgagcacgccgcgaagaaggataccaacgtcgtggggcgctcggtcaaagtttgtaatctactgaactgaggcgtgactttcgtcgcatcctccgtgagtgcacaggttaacgggcgagggcaggcgtcggaaaggcagaatttccaaggaggcagcttttgaaataaaatacgagccaaaatgagttgttgtcagcacaacacttccagcaatccatctgcgaatccaagtttacgctcagggcccagttgcaatgtggaaaaactctttctgaccaggtgaactgaattttgcacgggctcgggaactaatgaaaaattcgttcatcatgtaatgttgttcagccattaagctcgctcttgaaaggttctcacagcctgtacagactcatgtagatcaccatgggcaaggccaagattggaaggaagtgagaacataacatgcatctgatgaaggacttgacagcaggatagactgagaataagccggtccttttcttttccctttgtttggacataatattgaagaagtgggtatacatttttcagaagaatgtgtagaaaaaatgttgatttataccagtactgaaaaaaaataaaaaatagataatggaatggttataaagaaaattgtcatgtaccccatccaacacagggattaccgaccagggattgacaatcttttggtgcttctgattggaggaattcccattgccatgcccactgttctttctgtgactatggcaatcgggtcacaccgcttggctcagcagggagcaattacaaagaggatgacagctattgaggaaatggctggtatggatgttctttgcagtgacaaaacaggaacactaaccttgaacaagttgactgtggataagagtcttattgaggttttccaaagaggtgttgaccaggatactgtcatactaatggctgccagagcttcacgtaccgaaaatcaggatgccatagatgccacaatagttggtatgcttgctgatccaaaagaggctcgtgctggtattcaagaggttcattttctgccattcaatccaactgacaaaaggactgctttaacctacattgatggtgaggggaaaatgcaccgtgtaagcaagggagcaccagaacagatccttaatcttgcacacaacaaaactgagattgaaagaagagtcagagctgtaattgacaaatttgctgagcgtggcttgcgatcacttgctgtgcaataccatcaagtgccagatggtaggaaagaaagtcctggaggaccatggcaatttgttgggctcttgccactttttgaccctcctcgacacgatagtgcagaaacaatcaggagggcactcaaccttggtgtcaatgttaaaatgattacaggtgaccaacttgcaataggcaaggaaacagcacgccgcttgggaatgggtactaatatgtatccctcatctgctttactgggacaagataaggatgaatcaattgtggctttgccagttgatgaattaattgagaaagctgatggctttgctggagtctttcctgagcacaagtatgagattgtgaaacgcttgcaagcaagaaaacatatatgtggtatgactggagatggtgtgaatgatgctcccgctttgaagaaggctgatattggcattgctgtggacgactcgactgatgcagcccgtagtgcctccgatattgtcctaactgagccaggccttagtgtgattattagtgctgtgcttacaagtcgagcaattttccagaggatgaagaattacactatttatgctgtttcaattacaattcgtattgtgcttggttttatgcttcttgctctgatatggaagttcgatttcccaccatttatggtcctgatcattgccatcctcaatgacggtaccataatgaccatttcaaaggacagagtaaaaccatccccacaacctgatagctggaagttatctgagatttttgcaactggggtcgtccttggtagttacttggccatgatgacagtcattttcttctgggtagcatacaagactgatttcttcccgagagtgtttcacgttgaaagccttgaaaagactgctcaggatgactttcagaagcttgcatctgctgtctatcttcaagtcagcacaatcagccaggccctcatcttcgtaactcggtctcgcagctggtcatttgtggagcgcccaggattcttgttggtttttgctttctttgtagctcaactgattgctactctgattgctgtatatgccaactggggattcgcttcaatcaagggcattggatggggctgggctggtgtcatctggctctacaacatcgtcttttacttgccactggacatcatcaagttcctgatccgttatgcgttgagtgggagggcatgggatcttgttcttgagcaaaggattgctttcacaaggaagaaggatttcggcacacaagaaaaccagctcaagtgggcgactgctcagaggaccatccatgggctccagccagccgccaccgcggctgtcttccgcgacatgacaagctacaacgatctcaaccagcttgcagaagaggcccgtaggagagccgaaatcgcaaggttgagagagctgaccaccctgaaggggcggatggagtcggtggtgaagcagaagggcttggatcttgagaccatccagcagtcatacaccgtgtgattaacagagaatctccaatatatatatttattatatactatttataatgtgctaggccacaacaataatttacctggatgatgatgattgagcggatttccagtgtcggtgcggtgctaatcgctagagttcatcccccatctatcttgtgtccattaaccacccccggcagatgggcttgcattgagatactatatacaaactctttttactactagatgatataatagttcaattttgttttgtcaaaaaaaaaaaaaaaaaaaaaaaaaaaaaaaaaaaaataataaagataattataaaaagaaaaaaaaaaaaatagatattaaaaataattaatttagttaaatttaatgtgg

SEQ ID NO: 29256 - DNA, 361 bp, Oryza sativa
  unsure (1)..(361): unsure at all n locations
  Clone ID: PAT_MRT4530_33777C.1
atggagtcgcggcgaggcggtcgcgacggcggggcgacgcggcaccgagggtgcacggccnaggaagaagagagggagaggtggcgcccggagctcctcttcggctcctccgcggtttcgtgggcggtgcgaaagcggcgacggcgaggatgcaaggggcggcgaaggcggtggaaattgattcgcgagcgcgggaggggcagctcggcgctgtcaaggtgggggcggcgcaccgtcgtcagcgtctcttcctccaagcgcaagcggacaagggcgggagagagagtgcttgggcacgcgctgcagagctcgcggcaggcagcggggccgagcggcaacgtggcgcaggcggctgaccacg

SEQ ID NO: 29257 - DNA, 5340 bp, Oryza sativa
  Clone ID: PAT_MRT4530_33778C.1
atggtgattgtggtggagctggtggtggcgagagcaacggagcaaggagagagcggagaggggaggagactccgagacgcggcggaggtgatgccggcacacggcagcacaggggaagaagatgccagccgggccgatcgccttgcaatttgcaaactgggccaagcctggcccagtacaaatgcagacgcacagaacatgcacatattcacccctatgaacactagcctccttcgttgtggcatgggtgcctacttgctgacatggggatcactgtccttggtactcctatccgtgttgcaatcctccatgatgtacatgtcctccggctgcttcacggaggagagagcggctctgatggatatcaagtcttctcttaccagagcaaactccatggtggttcttgattcatgggggcagggtgatgactgctgcgtgtgggagctcgtggtgtgcgaaaatagcacccgccgaatatctcatctccacctctcagggatctattatcctcccatttcaactcccagtgatcgttggcacctgaacttgtcggtgttttctgcgtttcatgagcttcagttcctggacttatcatggaattaccccagttcgttaagctttgatggtttagttggactaaagaagcttcaatatctggacttcacatactgttcgttggaagggagtttcccggtatttaatggggaatttggtgcactggaggttctagtactcaaccataaccacctcaacagaggactttcagcacaagcttttcaaaatcttcaaaacctgcggcaattgaatttgagtttgaatcatttcggtggagaactaccaacatggttgtttgagcttccccaccttaagatcctagatctctcaaataatctttttgaaggaagtattcctacgagttcatcactgaaaccctttgccctggaaatcttggatctcagccacaaccatttgagtggggagcttccaacagcagttttgaagaacatcaggagcctaaatttgcgtggcaaccaattccaaggaagtctccctgcttcgttatttgcacttcctcaactcaagttcctggacctttctcaaaattctttcgatgggcatattccaacacgtacatcttcagaaccacttctgcttgaagtcttaaatctccagaacaataggatgagtggatcactttgtctttggagtgaacgagcatttggaaacttgcagaacctacgtgaattgtatctgagttccaatcagttcagtggaagccttcctacgttcttgttttcacttcctcatattgaactattggatctatcagcaaatctcttagaagggcctattcctattagcatatcttcgaatctttctttatcgcttaagaacattcgcttctcccagaataatttgagtggtacatttccatttatttggctgagaaacctcacaaaacttgaggagatagacttctcgggcaatcctaatttagctgttgatatcaattttcctggatggatacccccattccagttgaaacggctagtgctctctagctgtgagcttgacaagagtactctttcagaaccatattttttgcacacacaacatcacttaaaggtgcttgatttgtcagacaatcacttgacagggaacatgcctaattggttgttcacaaaggaaacagcactggtcagactaaatcttggaaataacttgctcactggatcatttgccccagtctcgaacaacgagcttagcggtctgatttttgatggggtgaacaatctttctatcatatcacaattgtacctggacaataacaagtttgaaggaacgataccccataatctgtcaggacagctaaaaatcattgatttgcatggtaatagactgtctggcaaactcgatgcttcgttttggaacctctcttctttgagagcactcaatcttgccgacaaccatataactggagaaatccatccacaaatttgtaaattaacaggaattgtacttttagatctatcaaataacaaccttacaggttctataccagatttcagctgtacatcagagctccgtttccttaacctgtctaggaattacttatcaggcaatctctctgaaagttatttcaatacatccaatcttatagctttggatatcacatataatcagttcaccggcaaccttaattgggtaggttatctcggtaacacaaggctactttccttggcgggaaataattttgaaggacagatcactccaaacttgtgcaaactccagtacctgaggataatagacttctcacacaacaaactctctggttcattaccagcatgcattggtggtctctctttaataggcagagcaaatgatcaaactctccaaccgatctttgaaactatatcagacttttatgacacccgttatagtttaaggggcttcaactttgctaccaaggggcatctttatacatatggtggcaatttcttcatttcaatgtctggcatcgacctatctgcaaacatgctggatggagagattccttggcagctaggaaatctgagtcatatcaggtcactcaatctgtcctacaatttcttcactggccaaataccagcaacatttgccagcatgaatgagattgaaagcctagatctatcccacaacaacctgagtggaccgataccttggcagttaactcaattagcgtcgttgggagcattctccgtggcgtacaacaacttatctggatgcataccgaactatggtcagttgagctcattcagcattgacagttacctaggcaacgacaaccttcacaaaatatctcagggaaagaggtgctctcctagcccaggtgctgtggcaaaggaagatgtaggagagagggttgatcccttttcggcatatcgggtatgcattactatgcaatcatatactcaaaagggtgatgtcgaagtggtttgcgatggaaaggaatgggacatagttgttgatggagataaattcaacttgattgcacttactgatgagattaaagaacattttgaatggggaaccaatcaaaaagctagcatgttatatcttgatagtacaggacaataccttccactgactagtgatgctgcgctgagaagtctggtagattcaaattttctatttcgcgaaattagtgttttggttagggtggaggatattgttgaggttgctgatgccgatggcaatggcaatgccaattgcaatggtggtgatggccctggtggtgatggcagtggtggtgatggctctggtgctgatgtcaatggtggtgatggcaatgatggtgatggcaatgtagttgtaggtgagaaagagatgcaacaaaaagcatctagtaaatggcaagctatgttttgggatgatactcctattagtaatcctgaatatcctgaagatgaaccaattggggtgaatgaagaacacttatatggagttgtagatcttcaatctcagaagaaagggactagtggaaagaagacagataaagaggggtcaagtgggaatgaggtagctactcaggatgttccaaatgattttgacccgcagcatgtccctgaagaggaagtacctgttgatgagattggcattgctgtgcccttgtttgtgcacaacagggagaatcctacatttgttgtagatgcaacattcccaaatggagaggcttttaaacttgcaatgagacagtttgcaataaaaggagaatttgaggtcaatgttagccatagtagtaaggctaggtatattgcaaagtgcgctaaaacaaaagactgcacatggaggatatatgcgaggaaagagaccaaatctagtgtttggaagatcagtcgcttaagtgagattcatacttgtgctactacaagcaagctgagtggaaagatggcatcctcaggatggattgcagatagggctaaggatataatgaccacagagcctaacattggccccaaggcacttcaagataggttggagaagaaatataatgtaactctcaggtctggcagaacttgggaaggcctccaaaaggcaaaggatgacatccatggatcatgggaggctagctttcagcttctgtggagttttaaggctgagatagaaagatcaatgccaggtagcattgttgacatcaatgtgaatgcaatgggggaaaagtggcatatgcaatttttgacaaggaaaaactatgaaaattgggaatggttcatgcaaaggttgaaacaagcagtagtggaatatagagaatgctttcgacatctcatgttgaacttcagtaaaaaattcaggggtgaagtatttgattccaatatgtggcctgcagcatggaccttttcactctacaagtaccaagagtacatggatcagattaaagaagcatgccctgctgcttatgagtacctagaagtccaccatccacatacatggacaagaagcaagttttcagaagcatgcaagattgagtatgtgtgtaataatcttgcagaatcattcaatgcatggataagtgatataaaaggcttgcctattattgacctagtaaataagctcaaacaaatgataatgaagcagatgtcaaggagaaaaatagttgcagaaggcttaataggtaaaattcttcctagtgttgttagagctctaaatgccaagagtagaggactaaactatgaaattgcaagaagtggtcttactgatgcagaggtgacagtttttgatatgaaaaccaaaaaacacaacacttatggtgtttttctagaaaaaggagctagtttggaagattatgttggggaatttttctctgtagataggttcaagttagcatatgcaagttccattgtacccatgtcagacaagacccaatggccaaaagttgacatagggttcaaaatgttgccaccaaaacttggaagatcagcaagaagacctcagaaaaatcgtgtgccaaatagtgctgaagggaaaggaaaaggcaagcgcaaaaggtgctcgagatgtcaaggatttggccatcaagctagaacttgcaaggaacctgagtgggtagacccatctgatcttgcatctgctccagcaccccccaaaagaaagaaaaggaagaccaaacctacagtggtagttgtctcaaagccccagacaaggtctaagtccaaatgtgatgcctcatcttcttcccagccactacctacatccccttcacatcctgctggagtagtttctacatctcagccgcctacaaggacaactcctcccaggctagcaaagacaaaagcaaggacagctggtgttaggccaaaatga

SEQ ID NO: 29258 - DNA, 473 bp, Oryza sativa
  Clone ID: PAT_MRT4530_33779C.1
ctcgctcttctccagaggagcgcggtctctcctccccccctcgccgtctgccggagatgaagtgggccgccgccgccgccgccactgcctcggccgcggccaccgccgtcgcgtccgccgccaccgccgccgccaccgagcgctgcgtcaccccatgctccaatcccacggggtcgccggcgtcgagggggaatgggcggaggagcgcggcggaggaccggttcgggccgcggttcgacgggctgcgcttcatcgagaccctcgtcaccgctcaccgttgaaccgccatgggagagcaggattcatggcttagttaggtagctagattagcattcgcgaagagcagaatggatttcagttagcctcaggatgggtgaaagatgaacgaattagttactactaccatcattaattgactgtgctgttcttcctgcttaatctgagtttgaattttgtgcaaaaaaaaaaaaaaa

SEQ ID NO: 29259 - DNA, 7769 bp, Oryza sativa
  Clone ID: PAT_MRT4530_3377C.1
atggccaacttttccagccacatccaggagctccgcgagctcatcgcggcgtcctccaccaccacctccacctccgcccccgcatccgtccacttcgaggtcaagctccgcgaggtcctccccaacctcctccgcgactacgtcgtcccctcatcccccaccggtgcagcggacgggagggaggccaccgcggtgctcaagctgctctcctacaccgcggggaagttcccgggggtcttcttccacggccgcgccgccgacgtcatccgcgtcattggccgtgtcctccccttcttcgcggagcccaacttccggtcaaggcatgagattatatttgatacagtttggtctcttctctcgcttcttcgcacaggtgaccgagaagcctaccggcagttcttcttggatgtcatggttgcagtacaagatgtgctatatgtggtggcatcaatgcatggggacaggccaagtggcgtgcttactgaaagatatttagttaaatgcctctgcggatccttctcagatatcttggattcacctgggatttttagtgatctcccagacagttgccagcctaagaatggacccggagtactggttgatctgacagatgggaccctgtatgtcgagggacttgttaacatgccatttgtttctgctgcctgttctattatctgctatggggatgaatccctacacaaggtttgttttgattttgcacggattgttgcaacggtgatcactgttgagattcttcctgtggaaaacattatccgttcgataatgtgcattttgagccaagatgttaacggactttctgatatcagagatgcagattacgacttttcaatgggtgcctgtcttcatgcactgcattcttcctgcccaggctatattgttgcaattacggcttctgacattgttaatgtttttcaaagagcagtgcataccagcagaagctcagagcttcaggttgctatgtgcaatgcatacaagagaatagttgaactctgctccccacgagtgtggaaaccagaaatacttctaaagctgctttgcttgccaaagccttgtgctaaattgatagaatgcattcgactggtcgttgacaaatctggccagagttttttatcttctgatgacagggatgatggaagcagcctactggcaaaatctgagggattagatttgccaaaagttgggcagaaacgaatagctctggacgaggaaaatagtttccccaaacgtttaaagatgacagaaccaagattttcttctggttcatttatggtcgatgaactttctgctggcgttggacaggagctagaaaaggatcatggttgtgattttcgtgtgcaactatattcacttattaattgcctgtcacctgacaatcatatggcttatccattggagccggcaatttctattcaagtgcttagtctgctatgcctttcattatctgtttatccaaagacaaatctgtttagtagaatttccaagcaagtcctttcctggattccttggatttgcaagcagacaaccaagatatgcatgttttcctttgatgtgtcactctattttgaagctgttcagactgtaatgcttctccaatcttttcttcctggacacacaaaactgtttgaagatgaacctctgttgattggtaatggttgtacagatttcgagtatccaagatatgctgatcttattaacttgctgaaactggtgtcggatgatggttatcttacttctcaaacatgttcggagaagttaaaatgccttgcagtacaaattattgctaaaataggcagcaggcagaatgctgagtgtgatcttcaagtccttgaattggctatccaaagtgaaactggggagcttcaaaacgaggctcttatgtcattacccattattgtattgtactctggtcccaggatgcttggagcaatgttcaggaaacttgagacaattggtactttaggatgcaagaaactgtggaaaagtattgccatttcacttggttttctttcttgcttaaatggaaccactgattgcactgacaaagtgggaaatcattgcaaacttttcctggccaagcactgtgaacagccaatcttgacattaaatctcttaagaggtttctggtgcccgcagtgtgatgtcagaactgtccacattgaagatcaagttcctattgtggacattgcactttcggaagataaaaatattgacttcaaaattaacatgttcaaggcccattctcttttcttcaagttcctttatgctgagacttccgaggagtgtatagtttctatagttgaagtattgccacgaatattgaaacattctagcagggacgttctgcttgatatgaaatttcagtgggtacagtgtgttgattttctcctactacatgaaatgaaagctgtccgagatgcattctctagtgtagtgtcctgcttcttggaaacaaacgcgatggatattttgttttctgatggaacgggaatgagtggagggaccagcagagttaaatttatggacaaaataaagagtgctttcactgaagctgaagatccccagatactacttactcttttggaatcgactgcagcaattgtgaaagctagtgatattcatggggaagtttttttctgctcatttgtattgctaattggtcagcttggtaatcacgattatattgtaagggttactgcattgagattacttcaaagatgttgcacctactgtttcaagggaggattggaactcttcctttcaaagtatttccatgttagagataatctgtatgattatctgtcatctagacttttgactcatcctgtagtgattagtgaatttgctgaatctgttcttggggttaagactgaagagctgatcaggagaatggttccatcaattataccaaaacttattgtgtctcaccaaaacaatgaccaagcagttgttactctgaatgaactggcgagtcatctaaacagaactgatagcaaagagatattttcagctgctttgccaacactgcttgatgaaatcatatgttttcctggtgaatctgaccagatcgagacagatagaaggatggcaaaaatttcaccaactattcagaatatcgcaagaattttgacaggcaacgataaccttcctgagtttttgaagaatgattttgttcggcttctcaacagtattgacaagaaaatgcttcattccagtgatgtgaatcttcagaagcaagccctccagcgtataaggaaattagttgagatgatgggcccttatttgagtacacatgcaccaaagattatggttctgttgatttttgccattgataaagaaactctgcaaatggatgggctagatgtactacattttttcatcaagcgactggccgaggtatcgtgtaccagtatcaagtatgttatgtcccaagttgtagctgcatttattccctctttagaaaggtgcagagaacgtcctcttgtgcatctgggcaaaattgttgaaatcctggaagaacttgtagttaaaaacattatcttgcttaaacaacatatacgtgaattgccgttgttacctagcttaccatctttgtcaggagtgaacaaagtaatacaagaagccagagggttaatgactctgcaagatcatctaaaggatgctgtcaatggtcttaaccatgagagcttaaatgtaaggtacatggtggcatgtgagttaaataaactattcaatgatagaaggggggacattacttctctcattattggtgaagatattgctgatttggatataataagctctttaataatgtctttactaaaaggatgtgcagaggaatcaaggacagttgttggccagagattgaaactagtttgtgcagattgtcttggtgcacttggagctgttgatcctgctaagtttaaggtaatgtcatgcgagcgctttaagattgaatgttcagatgacgatcttatatttgagttgatccacaagcatcttgcaagggcattcagagctgcttctgacaccacagtacaggattctgctgcattggctattcaagagctactaaaactgtcagaaagtagtggagctattgttcatggaattactggaggacagagtgaagtctgtattcaagctgtcttcactttacttgataatcttgggcaatgggttgatgacctcaaacaggaaattgctttatcccaatctaattatgcaatggctggaagacagggaggtaaactgagagatgaaagcaactctatgtatgaccaagatcaattgctagtgcagtgcagcaacgttgctgagctgttggctgctattcctaaagtcactctagctaaggcatcatttagatgtcaagctcatgctcgtgctctaatgtactttgaatctcatgtccgtgaaaagtctggctcctcaaatccagctgcagactgtagtggtgccttttcagatgatgacatctcttttctgatggaaatatatggaggactggatgagcccgatggcctcctaggtttagctaatctgaggaaatcatcaaccctacaagatcaactaatcatcaatgagaaagcggggaattgggctgaagtgctaacattatgtgaacagtctttgcaaatggaacctgattctgtccatagacattgtgatgttctcaattgtttgctaaacatgtgccatcttcaagccatgattgcacatgtggatggtttggtgtatagaatacctcaatctaagaaaacttggtgcatgcaaggggtacaagcagcttggagattagggagatgggatctcatggatgaatatctagccgaggcagacaaaggtctggtgtgcagaagttctgagaacaatgcttcttttgacatgggtcttgctaagatattcaacgcgatgatgaaaaaagatcagtttatggttgctgaaaaaattgcccagtccaagcaagcattgcttgtacctttagctgcagctggcatggactcatacatgcgtgcatatccttacatagttaagctccatatgctgcgtgagttagaagacttcaactccctgctgggagatgagtcatttcttgaaaagccatttgctgcagatgatcctaagtttctgaaattgacaaaggattgggaaaaccgtctgagatgtacacaaccatctctgtgggcaagggagccattgcttgctttccgaaggatggtttataatctgagtcatatgaatgctcaagctgggaactgctggcttcagtatgcaaggctctgccgtttggctggccattacgagactgcccaccgtgcaatactggaagcagacgcttcaggtgctcctaatgctcacatggaaaaggctaagtacctctggaatatacggaagtctgatagtgctatagctgaacttcagcaaacacttctaaacatgcctgcggatgttttgggacctactgtcctttcatccctttctagcctttctcttgctttgccaaatgcacccctctctgtgacacaggcatcaaaagagaatccagatgtgtccaaaactctccttctctacactagatggatccactatacagggcaaaagcagagcaatgacatcaaatctctatattctagggtagcagatttgcggcccaagtgggaaaaggggttcttctgcatagcaaagttctatgatgatttgcttgttgatgctaggagacgccaagaagataagaaaattgcaagtggagttggacctgtccctcctagctctactggttctttaactacagcaactgaagagaagccttggtgggatatgcttccagtagtcttaatacagtatgcaagaggacttcacagaggacataaaaatctttttcaagcgttaccgcgattgcttactctttggtttgaattcggaagcatatatatccaggatggatcttccttcaataaacccatgaaagaagttcatataaggttgttaggcattatgcgcgggtgtttgaaagatctaccaccatatcagtggttaactgtgctgtctcagttgatctcccgcatctgtcatcaaaatattgaagttgtcaaacttgtcaaatgcatcgtcacatctattttacgggagtaccctcagcaggctctatggatgatggctgcagtgtcaaagtcaacagttgctgcaagacgagatgctgctgctgaaatattacaatcagcaaagaagggcagtcggcgtggtagtgacagcaatgcattattcatgcagtttccttctttgatagatcatctgatcaagctgtgctttcatccggggcagccaaaggcaagggcaataaatatctcaacagagttcagttccttgaaaagaatgatgccgttaggaatcatcttacccatccagcaggctctaactgtgactctaccatcatatgatacaaatatgacagatcaatcaacttttcgtcccttttcagtttccgagcaccctactatagccggaatagctgatgatgcagagatccttaactctcttcagaaaccaaagaagtccctgagagccgcagggagaaagctttatattagaacctttgcagtggttccgcttacagaagattgtggaatggtagagtgggtgcccaatactcgtggtcttcggcaaattcttcaggatatctacataacttgtggcaaattcgataggatgaaaacaaacccacaaatcaagaagatatatgatcaattgcagggtaaaatgcctgaggagatgctgaaggctaaaatccttccaatgttccccccagttttccacaaatggttcttgactacattttctgagccagctgcatggatccgtgccagggcagcttatgcgcatacaaccgcagtttggtcaatggttgggcatattgttgggcttggtgacagacatggtgaaaacatccttctcgattcaactactggggactgtattcatgtggatttcagctgcttgtttgacaagggcttgctgctcgagaagcctgaggtggtgccattcaggtttacacaaaacatggttgatggcttgggcatcactggttatgagggcgtgtttgtgaaggtctgtgaaattactctatcggttctgagaactcacaaggaggcactcatgactgttcttgagacctttatccatgatccgctagtagagtggaccaaatctcataaatccagtggagtggaagtccgaaacccacatgcacagagggccatcagtaacatcacagaaaggctccagggagttgtggtaggcgttaacgccgctccttctctgccactttctgtggaaggccaagcacgccgcctgattgctgaagcagtctcccacagcaacctcggcaagatgtacgtctggtggatggcttggttctaagttctaacaggtccctcctccaccccctgcttattatatctgttctactcgtatttatgtttgacctggaactctggaagaggtaggcaggaaccggagggcagttagctagtggcattttgtaactggccggccctctagctgccatattcctgtgaatgcctgccaatgcatgtcacttaacatactcttggactcttgggccgtccatagtattattactactattataattaggatcttattatatattagcaagaaaacatttgcactggcattctggcaacttgtcacactaataatatataaaagtgatgcgtgaggattggacc

SEQ ID NO: 29260 - DNA, 210 bp, Oryza sativa
  unsure (1)..(210): unsure at all n locations
  Clone ID: PAT_MRT4530_33780C.1
cnaaacccaaaccacgcgcagctcccatcgcccagggcaacgncacgaaacctagccccaccgactcgcctcgcctcgccttggaatcccccaacaccagatcgcggcggcgaccatggagccctcccccgtaggcgncgggtncgcttccgggtcggtggagcggtggcgcgcggaggcgtagngngcgttccagcactacctggatcg

SEQ ID NO: 29261 - DNA, 495 bp, Oryza sativa
  Clone ID: PAT_MRT4530_33781C.1
cggcaacatcccccaacatctttgattgtcaatcaatggttcaaggcatgatcctcatcacaatggcactggtagatcaaaggctacactaacaagaatccaagcatgatcgcgatagcgggttcgcggcatccaccagggaaaaataaagagggaaaaaagagcaaaaaaagaaaaggttcctacatgaatgaacatactgacagcagacatcaaatatccttatcctcctgccagatggctgatgctcttactacagccatatctcttgtgaaacaagcatctatgagaatgacaggcaaagctggagaagcactagcagaagcatcaagaggttgctgcttctaacatgctgcagcttccacgagaaggccgagtcaacctcgatcatgataccgaatctgcatgttccggtgctggggtcttggccagtgatcgttgcgaggttcgagaacccacaggcgacatcggcttgatcgttcttctggtagtagc

SEQ ID NO: 29262 - DNA, 1317 bp, Oryza sativa
  Clone ID: PAT_MRT4530_33782C.1
ccggccgggacgcgagacggtcaagaaacaaacgggagttgcttccaaggcgaaggcgacccggtgacccacctctcctctctcttctcgccgtcctagcaagtagcaaccctcctcagccaagaaccacaagataacgcaactcacaaggcacgcacccatagattgatagagagagggacagagagagagagagatagagctcaggttgcaagcagatagaacgggtccaggtagcttcgcaatcaagaagaagaagaagagtgaaggaggaggaggagcaagagcaagccatggaggagccggcctcggctgatcccccgcggattttctggaagtcgaggaggagatcagcctcagccaatggccggagcttgcaacaagaacttaacaaagaggctgctgatgaacaactgaacaatcaggctcatgaagaggccatgaaaatagatgatgcaaatgcagtaagtactgacgacgatgttcatccagatccaaaagctaacttatctgagaagaggaaggcgctgtttgagcctttggaaccaatcaacggcaagcgcagttctgctgaaatgttgctcccaccaccagactttgagcccgcgtcatatcccaagggatggctggttggcaagaaacgcaagcttgtgaatgttgatgtggtggagagcatgaggaggatagcaatccaagaaatgaacagaaaggaccgtgagatcaatggcctgaatgaacagttggaagaagactcccgagtgcttgagcttctacaaaagcagctcgcagatgagcgtaagaagcgaacggagatagagaaggaaaattccatgcttcatgagcaggtatctatgctgatgaacatgctcgatgaaaatgaagcctttgatgaggagggagaagcaccaccacctgataccttataggcttagattaagtaatattatcaaggttccaagttctacacatcttcggataccagtttaagagtattcccagatgtctttatcttgtgtaaaattcaatttatcttattttattttatggcttgtgtgtagatgaaggggttctgtttgctgtacctatttgtttctaggctgcaagtgtatgcgagatgcttgtaatgtattctatttaaatgcaagtgtttacatgttataagagctcttgcaagactccttttccttgcatgagctcttttgcttaaaaaaaaaaaaaaaaaagaaaaaaataaacaaaaaaaaaataaaaatgcataattaaactacaataaagaaaggatcacagggaccaatacacaagaattttccaattctc

SEQ ID NO: 29263 - DNA, 429 bp, Oryza sativa
  Clone ID: PAT_MRT4530_33783C.1
atggaggcgtggtcgcgtggaggtggaggcgtggatcgacggaggcggaagcggaggcggagcggtcaaggcggaggcggaggcggaggcgtgcgtggatcggcggaggcggctagggttagggttagggttgtgagggaggcggactggcggaggcgagaggacgcggtggcctttatatatgaggcgtgggcacgcggcggcggctcccgatgggcctcgtcgggccgtgcctaccgttatacaggcctgggccgtgtcggcccatcgtgccgtgccggcccatcgtgccgtgccggcccagcgtgctgctgcgggagcctaggcatggcccggctgtcgggccaggccggcacgggcacgaacactgacgggccgggccgtgcttgggccgggcagtcgggctgcgggccatatggccatctatag

SEQ ID NO: 29264 - DNA, 1407 bp, Oryza sativa
  Clone ID: PAT_MRT4530_33784C.1
atggattgtgacctcagcatcagcggtggtagacactcttgctcctatccaaaggtcctggagtcaaatgccagctcaatatctgtttatcctaagtactcatttgacgggcaggtggggggcggagcgcacgggcggctccttcgatggccgctgtgtcacgggcgactgcgccagcgcgctgtcctgctccgcctccggcgagctgcccaccacgctgcccgagtacacggctacacgctcggctcccgacccggcaccggcgacgacttcctcgacctgtcgctcatcgacgggttcaacgtgccggtgagcttcgagacgaccaacggcggcggcgccgggtgcagcaaagggcgcgggccgagctgcgccgtggacatcacggcgaggacttgctacatgcccgccgacaagctactccatgttcttcaaggggctatgcgcctcgacgcctacagctacgccaaggacgaccagaccagcaccttcacctgccccgccggcaccaactaccgcgtcgacttctgcccgccgacgagtggcgtgacggccggcgacgacgatggtgtgcgtggccacggcctcccgcggctgacctgccggatttgtgcatccgcggcgatggtcatggtcctcctcctgccgccggccacggcctcccacggtggagaccgccgtgagctgccgaattttcgtggcttcggggtcggtcttcctttcctcccaccgccggccacggtgaagaccgctattgagctgtcggattgtgcagccgcggtgactgtcctcctcccgccgctgttcacggcctcaagaggagcatcctggtggaggcgtacgccgcggcgcacgctgagcagccgccgacagcccgcctcgctcgcctgctccggcgcccacctgcccgtccgctcccgggaagaagagagagaggagagggaaacaaagaggagtgaggatgaggaagaagagcgaagggagagggcatgggcacagatcgcgcagcggcaagcgttcggcgcgcacgacgacgggcggtcagcgcaggcgcagtacgaggagcttcaccagtgcgccaagtgggatgctgagggccggcggctgcttgtgtcaaatttcttcgatgtcggcgtgtccaagctctacgccgccgggacagcggggaaggagaaggaggaggagcgggttgtgtctggcatgtatgagctccaacgccaccgggagggtcgcgctggggttcaccatcgacacactgaaggggcgctgctcattgtctatgctgaccggatgccgcggttcgggtactccgcccacaactccggctccctcccggagttcgccgctcccgcctccgtttcctgcgccggcaccgagcgcacgcgccgaacgcttgccgccgcgtga

SEQ ID NO: 29265 - DNA, 1910 bp, Oryza sativa
  Clone ID: PAT_MRT4530_33785C.1
acacgttaaatggagtaaagattccacgtttactgacatctacaaaaaaacaatctagccagtttcaaggagcgtagggtgtgtagcaaagatggtttaagaatatcagatgcagcctacaacgacagcgtctctatgtgttttaaagcggaaagaaacatgtgtcttccctcccattgttagagcaaggcatacaaagctcacattcatcttctgagctatcatcagatcgatcagcaacttcagaacaagctgttacccaggtacatctatcgatatgatacaaatgtagatccactgattaaaagctgcacatcccattgttagagcaaggcctgcaagttcattcatcttctgaggtaacatcagattgatcagcctcttcttcctctggcaaaggagagacaattgcggcacagcagaaagaatcacggtccttcaggaggaggcaagttccatctgagttccatttcaagtccacaacccgaaagtttggcaacggaacgttgacgcagcatgcaccagatggtgtccacatgtacaggtgcggactctccgtgcagaaaacaaggcgtgggcaattagggtcccaagcggcagcacggattggatctttctgaacaagaacagcagcaagatcaaggcggcagatatcccatatccaaagagcagttggcatattgtcattccgagtgaagaaatagtgactgtcgctgctccatgacagcataccaattccctgcttggggttgggcttgtctgtaacgggtttctgtgaaggcaaagtgattggagcatccatcacagcatacttaactcgagaacctccctctgtcccattttcagcaccattgccttgcatgttacgggagaatccttcacttaggcataactctgacatgtcaagctgccatggatcatccacttccttaaatatagcagcattagtaggatttcgaatagatgctgcgtgtgagaactcagcaaaagttttccatgtcaggtggttcaaagtccgaactgcttgatcatagctgccaactgctaaaaactgtccacatggtgaccacgcaacagttttcacacctaatccactttcatatgctaagtacttgaacaggcacctcccatccggtgaatatatcagaaccttgtattccagaagtgaatcccagaccacaatagcactatcatctggtgaccactcaacacctgccaagtctaccgtgtcaacagcaaagacactcattatctcccaggaatggcatgacagcaaatttacataatccttgcagtcacgcctagtacagattgcagcgaacttcccgtctttagtaaaagaaacacctctggaggcatgctttggccactgtacatgtatgcatgctgtatttacaagagaccaaacagtcagacggagctgaaactctgatgttgttagtatatgacgactgtcagggctccagcgagcatatgcaatcccagcagggccctcatcaatcttgcaggtccagtcaggctggctcagtgaccaagcctgcaccatgggtcgcttgtaaagtccacatagaatatactctgaatccggtgcccagtccagaaagcttatcttgtccacacatgaaaacaactgcaccaccttgagggagacgacgtcccggacgacgaggcggtagtcgacggcgacggcgaggtagcggccgtcgggggagaagcagcacggccccgtctgcttgtacgcctccgtgaactccatcccttcgccttccccttgtcacgcggcggcgggcgggcgggcccggcgccggatcggccggcggaagcgagacgggggggctctcgccggcgtcgaggtgggggagaagaatgcaaacctcctcgcctgaaatttttttttcccttgctatttt

SEQ ID NO: 29266 - DNA, 350 bp, Oryza sativa
  Clone ID: PAT_MRT4530_33786C.1
aatggtacaaaaacaaattaggttggccatattcattttttgcaagagaccagtgaatcaagaacattgtgattacaacgagatcgagtaacaatttatcaaatcctttattttcgtgttatctagcatggtggaactgacatatatactttgacatgacaaagatgtactgatggatgcaagctcagtgagactgaaatcttcaatgctgaaacttgtcatacagctgctactttggcaatgcatacagccaatggtgaaatctggtggatctggtttcagtgacgcttaaagaagtcgaccatcggtccgtatatgagttctggagcattgtaagccatgattaagtc

SEQ ID NO: 29267 - DNA, 191 bp, Oryza sativa
  Clone ID: PAT_MRT4530_33787C.1
gcagttgttggcctctttcggtgagttcagataactacgatttgggagaaacattgacaatccgactataaccgtacgagacgttgtgttgcgcattagcgattgatacacctctccgtgggttgttaatcttgccagtgcagatcaaccctattcatgcaagcaaattgaagaaacaagcgagaataaga

SEQ ID NO: 29268 - DNA, 2472 bp, Oryza sativa
  Clone ID: PAT_MRT4530_33788C.1
atgaaggccctcactgatgactgtggcgacctcggcaaacctgttcgtgaccgtaccctcgtcttcaacaccctcaacagcctctccgacaagttcaaccatcttcagtcgccgatcctcatgcaacgcccgttcccgatgttcgccgagctttgctcccttcttcgcctggaggagatctccaagtcaccgcactccaccaccacttcggccgtcttcctcgccggcacctccaacaacagtggcaagacctctaatccagcgcacaccaccggttttggtgcagggaatcaaggcaacaaaggcggcggcaacaactccaagaatcgttgtcgtcgcggcggcggcggcagtggtggaaacggaggaggaggcggcggcggcactccagccgccaacaatggaggcaacagcgctaagtcgggcgctggcggcgcccaacagtggctgacgccacacaacccgttggccggcacaatccacatgtggcgtgctcggcccaaggccggccgggcctcccttcgctggggctgcgcttgccggcccagtcggcgcccacccggcccaacagtggcaggccacctagatgcatggggcgcagggccaaccagcccaataggtggtctcccagccacccacccccatgggctttcaacagcctatgggttggttcgccggtgctccctatcaatgggatcaagcgtctctcgcgggctctttcaacaccacgacacttcagcagcccgccacgaacgaatggctcctatcggcgccaaccgacgacctgcagctcccttgccagccgccccaactccaccacaggctgcccatacacctgggtcagccaccgctgcatcaagctcaagtccagctccctcggcctacaggatgacgctctctcggtcggctgggccatccgtgccgcaggccacccactcacctgggtcatccgccctgtcactaggccgacgcgcgttgctccacgatgggccgctgacacatgggccacgctccaccgagccatctccttcgactggcccacgacaagactactctgctgggtcgtccaagtctcctgggctgaccgaagcagcacaagccgagccagaggttcttgcacccccatgcccaagtctgcttcctccatcgcatgtctccattcccacttggccaaggtctgctcgtgtggccggcgtcccgaagccaccatccatgctcgacgcttcccctgtcgtcaacgaccatcacatgtccactcacagcaagcacggcattcacaaggtccccgaccggctcaacctccatgtcgacacgctctccccgctcccgaggacgtacagggccgccctcgccgatccgccctggcgctccgccacggaggagttctccgctctcctcgtcaatcgcacatcggagcttgttcctcgtcctcccaacatcaacgtggacatggtctactgtatccagcctcctggctttgtcgacaccacccaccccgacatggtgtgccagctcaacaagtccctctatggcctcaagcaagcaccccatgcgtggtacagtcggttcgcctccttcctgctgacgctcggcttcgtggaggccaagtccgacacctcgctcttcatcctctgccgcggcattgacaccgtctacctgctcctctactcctctagcctcctgcttagccagcgccagtactgtctcgacattcgggatcgggctggcaagacaaactgcaagccctgcaccacccccatcgacacctccgccaagcactccgccacagatgatgctccggtcgccgccccaacggacttccgcagtctcaccagggcacttcagtacctcaccttcacacgccccgacatcgcctacgccgtccagcaagtctgcctccatatgcatgatccaagggaaccgcacctcgctgctctcacacggattcttcggtacgtccgtggcatgttggacctcggcctccacatccagccgtctgcagcaacggaacccgtcgtctactccgacgccgactgggccggttgccctgacacaaggcgctccacgttaggctacgctgtcttcctcggcgacaacttggtgtcttggtcttccaagcgacaagtcacggtgtcccactctagtgttgacgccaagtaccgcgccgtcgccaacgccgttgccaaggtcgcatggctacgtcagcttctccacgagcttcactcgcctccgcccaaggccaccttggtctactgtgacaacgtgagtgcggtctacctctcgagcaacccgatgcaacaccagcagaccaagcacatcaagatcaacctccattttgtttgcaagaaggtggcggttggcgcaattcgggtccttcatgtgcccacttcctcacagtatgccgacatcttcaccatgggacttccttcgccgattttctcgaagttccgttccagtctcaatgtccactag

SEQ ID NO: 29269 - DNA, 1407 bp, Oryza sativa
  Clone ID: PAT_MRT4530_33789C.1
atgggcggcgggcaagagcaacggcgctcgtcatgctctagatcttcaccaccggcgtcgtcgtcgtgctggtcaacctcctccatgagcgcgacaggcggagtagcggtgggcgagtacagagcggggggcctggtcgacgagcgtgagcagcccgtcaccgagctcgcccgcctccactgtcgtcggccgtcgatacctctctctccccctttccttgtcgtcgtccccagcacaccgagttacgtcgggggcgagctcgcacctggggaggacgtcggcgggctgctgccttcggcggggcaaggtgggagaggacgagggcgtcgccggcggccggtgacgggcgacacgatggcggcggctggcgactgcgcggcggagtatgtcgctgaccctgaaatcgagggccgggagctcgtggggcagatgcgcccagctcctggagagcatgccggtggcaagtgccgtgcgggtgtagaggcggcggaggacgaggaggagcaggcctcccgcggccgccggcctctcggtctcaagctcatcctggccatggtagatgtgcaggatacaaagctcgatgatatgcagctaggcagctatggaggtaaaggatactggttcatcagggacatcttccccaacctgcaccaaaaccaaaatcacaaccaaataaaccaatccatgacgatgaccttgagcagcgtccgcctccgtgacgtcgccatggccagcaacagccgatctacgctcgctccctccgctgccgccgccatctacgctcgcttcctcacgcgcctccccgccgccgccgatcccaatgccgcggtggtcaaccccgccgcggtgctcgccctctccgccgccgacctccgcgccatcggcgtctctgcccgcaaggcggcctacctccacgacctcgccggcaggttcgcggccggggagctctcggagtccgccgtggccgcaacggacgaggcggcgccagcgccaagtcgccagccgacgccgttgtcccccgctgcctacccaaacgagaagagtgagagagagagagagaggagaaagggagaggagagggtgatgacgtggcccgctgacatgtggggcccacgtgggtcccacgctgactcagccgtcacgtcggacaaaaccgggatgaaaaccaccgagggacctcggttgaggaaccttcggtgtactttttccatcccctttcctccccctcttgccacgaacccttcgccgtcgccggcgatcccaccgactcccggccacctctgcttccccggcgatgtctctgctttgcgctccgccgtcaatgcgcgttgcccgggctatgcgtcgccttctccctgtgtccttgtgcgacccgagccgcaaatccaggccccagagccgcaggat

SEQ ID NO: 29270 - DNA, 333 bp, Oryza sativa
  Clone ID: PAT_MRT4530_3378C.1
gctctctctcccgccgctctctccctctccgcccttctccctccacccgtcgccgcctccgtcgcgcccaccgccgactccacccctctccctccgcctgtcgccgcctctctctctctctctctctctccctccacacggcaagtggcgcacggggtggtcgcgggtcacagtgacggacggtgcacggcgtcgagtggcgcgaccgaacgacggtggcggcatcgagtagtgcggcccagtggcggcggtgcctccctctccctcgacatcgagccgtggcggcgaagtggcagcaagcagcgaccatgcgagaggagtggcggtggggtg

SEQ ID NO: 29271 - DNA, 553 bp, Oryza sativa
  Clone ID: PAT_MRT4530_33790C.1
ttacctcacgtggttataaagagagagataagggaaggattaaaaagcagaaatccaagcactccacaaccttgctgggagagaccaaaaaatggttggatgaagttaaatgtggatggatcctttgatgctgcttcgggtaagaggtatgattcttagagatagcactggtaatatcattttcacctcctgtagatcactcgaaagatgcaatagtcccttggagtcagaactgcgtgcttgcgttgaagggcttaatctggcaatccagtggacaatgctcccactccaggtgaagactgattgcgcctcggtggtccagcttctgtagtgcatagaaagagatcgtttcgagcttgcaaacatcattcatgaagcaaacctgctctaggctggggagagggttatctctgttaataaaatttgtattagtcagaatattatcagccattatctggcaaataaggctagagctgaatccttctctgggttttggttgggggaaaattgtaattttatctcgcatttaatgggggagaacattatgattgag

SEQ ID NO: 29272 - DNA, 297 bp, Oryza sativa
  unsure (1)..(297): unsure at all n locations
  Clone ID: PAT_MRT4530_33791C.1
tcgcgtgttcgccggacacgcacgcacgcggccacgacggcggcgatggagggcgccctgctctgcgccggcaaccacgctccgctcacgcccatcaccttcctagaccgcgccgncctcgtctaccccgaccgacccgccatcggcgactcctcctccggcctcacccgcacctggtgggagacgcgtgaccgatgcctccgtctcaccgacgccctcgacagcctaggagtgcaccgacaccacgtggttgcggtattcgcgcagaatattccggcgatgtgcgagctccacttc

SEQ ID NO: 29273 - DNA, 597 bp, Oryza sativa
  Clone ID: PAT_MRT4530_33792C.1
ggccgcccctttttttttttttttttttgcaatttaatttctcgtgcatgaaatcattcactcgtgacctcgtcataatatggctggtgtttcccttgtagccattaatacaatatacttgatgtacaatgcctgctgattgcacatttcacgctaacaaaggtaagatggaccatcggacaagagctcatgtacatttcacactgcttatgtatacttcttgcttttccagtccagatgtgacgtcttgattgcatgcattttgctggctacttgcttcatgttcaatcgttcagacggtaatgagcgtgtgcacgagattgatacttcgagcagagccaccaaccaatggtagatcttatcttctgataccgtcttttcctgagtcaactttttgcattccttcaagagatgagcatcgatgacatcatatatgagatctggaaagctgttcgccacaaaggtgataatgtccagtccatccgtgaacattggatctgtcggccttttgcatgtcaaaattttcaacaacactattccaatactataaacattcccagtaagttgaagcatggccctctttccccgtactttttt

SEQ ID NO: 29274 - DNA, 167 bp, Oryza sativa
  Clone ID: PAT_MRT4530_33793C.1
cccacgcgtccgatggcctggcaatgacccaccgaagtcgactatcccttctctgctgcctccttgaggggtttacaattcacgccagggttgggattgggcctcccagggggccttggccttttttgggccaattaattaaatctggccaaggcccctttaactaa

SEQ ID NO: 29275 - DNA, 333 bp, Oryza sativa
  Clone ID: PAT_MRT4530_33794C.1
atgtcctcagttgccaagcccagcggcaccggaggcccagaggaagccgcgatggaccttatcgattctctttatcacccactttggcacattgatggccatcagcagatagatcggtgcagcggctgtaacagcccttcattctctgctttagagaaaagagagcttaacgagtccatagcgaggacgaacagcatgggagagattggatccccctggcgcagccctcgccggtgcaagatagggttccctggagatggaatcgaatgcctgcgcaatgtcgagcttcaaaagcaaggaggattgcttccgctcatgcaaccgcttcgctag

SEQ ID NO: 29276 - DNA, 261 bp, Oryza sativa
  Clone ID: PAT_MRT4530_33795C.1
atggccgcgttcgctaagcgccaaaagctcggcctcggccgccatcacctttgccacttagacccaggtcttttgctgttggttgaagaccctgttgttctgctccttccaaatagtccaagctatcaaaggtgcaatggacgcaccgatcaggatgtggtaaaccccgtctccgcaaacgatcggccgtccaacatctgtttagtgccactaaccacaggaaatagcggcatcggggcggtgctaatgacccccagatag

SEQ ID NO: 29277 - DNA, 1947 bp, Oryza sativa
  Clone ID: PAT_MRT4530_33796C.1
atgggcctaaagggtatgttgggctttggaggagaatgggcctggagcttttccaccatgaagccagtctcgttagcctcccttatgaacaccgccgtcgaccggccatctcgacgaaccgtgaaagtttttgccgagtccgagcatcgcgatcttcctgttcctgtcacgaagacgacgctgtctcaggccgtcgacgccttcgctgccgctggccgcggcgccaacgagctcacaatggctgctgcgatgcagagacagtttcaagcgcaggtcaatgagcttcatatcaatgagcaccttgctgccactggcaagtgcttgtctggccttagtgttgaaccagtgttaccgggacacacgtggctcggcttgagcgtcaaaatcacggctgagtttggtgcttcgtggaactttgagggtggtgaacaaaggggggaaaagggaatgggcacatgcaggaaggcagggaagggaatatctggaggctggtgtatggatgcaatagagctggagtttggtgtctgtgaagaaactgtggagaacaagccactcctcaaactgaaatctgtgaagacagttgttcgtaaattgatacatgacattgccaagctgagcgctgtccccattgatcccaatcttccgccccctataatcagaaagccaccacctaaggtgaaacaaccacctccaccaccaaagaaacgagtgggacgtgatgatgtagagatgaagaaaggagattggctctgcccaaagtgtgacttcatgaactttgcaaaaaacactatttgcttgcaatgcgatgctaaacgtcccaaaaggcaacttctccctggagaatgggagtgtcctcggcggaatatgtcgtgcttccattgtgaacacaaccgtccaccagatgaatacaccaacagccaaatggaagctaatcaatctgttccacgaaagcgattggaaagacctgctcacaaatctgaagtttgtaatgcatggaactttgattttgatgacaatgaatcagatggtgctgatgttgcagcatttgagtttgctgattcatcaaaggccaggaatagcttgtctgtggacaacacgtcttctagaggtggttctaagttctctgaggacaacgaatttggaattaatgaaacatggagagagggaacagagagaaggttttcagaaagagaaagagttggttttgatgactttgatgacgaagaggatgatattgatagttacgagcttgatttatcaaagggtggtcagacagatggaatgtcaaggatgagttatttggactttgaagatgcttgtgactcggcagacctaaatgggcgtgctaaaattaggaactctaagcacggtgaagaggaggatataatagggtctcctgaggatgaggaatttgatcacccttccctgagatctagtcatcttgctgcttcttggaggaaacctgtaagctgcaatggttccaacaaccacagaagggaatcttttggctcggagagtgatgatgggattatttctgatttggatggggatattaatgaaggattgaaatgtaaaggaggccataacaagcattatcctagaagagttgttgttaggcataatgaacttgatgatgtaccattttcagatatggattgtgacataggtggctgtgttcagtcagataggaggaacaggttctcaacaaagttcagtgatgaattccatgccagggcctccaactcaaataggaagaaaatgaatgaacgattcaagagttctgatatgcgtgatggtcacccgccctttgataggactcgtacaagaggtactactgaactacatgatggctcaagagatctacagagtaacgcaagaagaaattgggttaaaagtggtggatttgatgataacaacaggccgctcaggcgtttgaacagaagatag

SEQ ID NO: 29278 - DNA, 649 bp, Oryza sativa
  Clone ID: PAT_MRT4530_33797C.1
tattaaaagtttctacacatatacttatatgcacagagtttatacacatgcctatttttaaatagaatcaacgtgctcttctgggaagacaactggatccaagggtcatcaatctacacccttgcgccggctgtgcatgcagcggtcgcagcaagaacgcggaattgcaggacggttcgcgaagcactccaagtggcactaaacagatgttggacggccgatcgtttgcggagacggggtttaccacatcctgatcggtgcgtcctgtgtgatcaaggtgacgagacgattgatcatctcctggtcgcatgcccggagtcacgtcaactgtggtggttcgcactccgagcaattggtttgtcggacatactgccattcaacgaaccctccttcctcttatggctttgtgacaagagagtgaaggttgccaaagctcagcgacgaggatttgacaccattgcacctttgatagcttggactatttggaaggagcagaacaacagggtcttcaaccaacagcaaaagacctgggtctaagtggcaaaggtgatggcggccgaggccgagcttttggcgcttagcgaacgcggccatgctggagttacctctaccgaccacggagtggcggtcgcaaaattttataggagat

SEQ ID NO: 29279 - DNA, 2427 bp, Oryza sativa
  Clone ID: PAT_MRT4530_33798C.1
atgtcaatcatttatagccttgctggttgtgatcaaaataactgcgtggaaatagacagagtaactgacctgatccccaaaatcattggattcacaagcttcaaaagtgcaatggtaaattccgaagcacaacagaaggttctgttaatgtcatcgttgaaggtgctgcagaggctcacaagcattgaaggggaaattggcataacactgaggtacaagatatcaaaacattccttcttattgagaaaccttgcagagatcttgggagatagcagcagcaatcaaagaactaaggaggatccttttacaatgggtcctcctgttggattacggtcgtctacggtccccagtccgatgcggacaaggcttgactccaagctcaagtcggttggttgtgccctaaaaagctggagtgatcggaaggtggggaatgttaagctacagctagaaatgattagagaactcattgggaaacttgatcgagcggaggaagtgcgcggtctctcggcacaagaaagattcctgcaccgaggactaaagaagagcaattggaattcgactcagaggtcgcaactgccccggaagagaaggcgtaacttgcacagtccttcttctccgaagttcttagctcagtcagtccgcccggggcagccgttatccgatttggaggaccctttcactgacgaaaaggtgtggcaagcggtcaaggaaattccttgcgacaaagcgccgggaccagacgggttcaccgggcagttctaccattgctgctgggacatcatcaaagtggatgttctagctgctctccaacagctccatcgtatggatggttcgagtttggagaaggtgaacaaggcattcattatgctactgccaaagcgcccagatgccaggaacttgcgggattttcgcccaattagcttggttcacagcttcgttaagcttttcacgaagatcctctcacgccacctagctcccaagctagattctcaggttgccaataatcaaagtgcgttcatcaagaagagatgtattcaggacaacttcatgctagtgcggcagtcggcgaagcggttgcatgagcggaagcaatcctccttgcttttgaagctcgacattgcgcaggcattcgattccacctcctggcaattcattttagaggttctggagcacaaagggttcggtagccgttggtgtgcttggattgccatgcttttcctaatagcaagtacgcgggtcctgatcaatggcataccggggaaccctatcttgcaccggcgaggggtgtgccaaggggatccaatctctcccatgctgttcatcctcgctatggactcattaagctctcttttctctaaagcagagaatgaagggctgttacagccgctgcacctgccctaccgaacttccctctacgcggacgacacggtcgttttcattcggtcggatcctgaggaaatcagcacagcaaaggaaattctacacatctttggggaagccacagggcttgggatgaatttcgctaagtgtgcagctctcccaattcagtgcaacgacaacaacattgcactgatccaggacgaactaccatgtcaggcagagcagatggcgctcattggtcgggtcactatggtaaatgcggtattgagctctataccgatctatttgctgatggccatcaatgtgccaaagtgggtgataaagggaatcgataagatccaggggtcgtcgatccgcacccttgcgccggctgtgcatgccgcggttgcagcaagaacccggaatcgcaggacggttcgcaaagcactccaaggtagaacatggatccgggatatatctggggctttcgaaatccaagcaatcctagagtacctcagcttgtggacatctttgcaatccttggatgccctcacggaagagccagattcaatcatctggagatgggagtcatcaggagaatactcagctcactcagcttatcagtccatgtttgtggggagggtccaattccaggacaagcctatctgggggtcgttagcaccgccccgatgctgctatttcctgtggttagtggcactaaacagatgttggacggccgatcgtttgcggagacagggtttaccacatcctgatcggtgcgtcctatgcgatcaagatgacgagacgattgatcatctcctagtcgcatgcccggagtcacgtcaactgtgctggttcgcactccgagcaattggtttgtcggacatactgccattcaatgaaccctccttcctctcatggctttgtgacaagagaatgaaggttgccaaagctcagcgacgaggattcgacaccgttgcagccttgatagcttggactatctggaaggagtggaacaacagggtcttcaaccaacagcaaaagacctgggtcgaagtggcaaagtga

SEQ ID NO: 29280 - DNA, 573 bp, Oryza sativa
  Clone ID: PAT_MRT4530_33799C.1
atggactcgttaagctctcttttctctaaagcagagaatgaagggctgttacagccgctgcacctgccctaccgaacttccctctacgtggacgacgcggtcgttttcattcagtcggatcctgaggaaatcagcacaacaaaggaaatcctacacatctttggggaagcaacagggcttagggcgaatttcgccaagtgtgcagctctcccaattcagtgcaacgacgacaacattgcactgatccaggatgaacttccatgtcaggtcacagcattcccttgcacttatctaggactgcccctttccatcttccgtcttcgcaaagaagacctgcagccgtttgtggacaaggtagcctgtcggttgccggtatggaaggcagagcagatggcgcccattggtcgggtcactatggtaaatgcggtattaagctctataccgatctatctgctgatggccatcaatgtgccaaagtgggtgataaagagaatcgataaggtccatcgcggcttcctctgggcctccggtgccgctgggcttggcaactgaggacatcgccggaaaagccat

SEQ ID NO: 29281 - DNA, 3633 bp, Oryza sativa
  Clone ID: PAT_MRT4530_3379C.1
atggcggaatcgctaatcctccccatggtgcgcggggtggcggcgaaggccgccgatgcactcgtacagagagtcaccggcgcgtgcggcgccgtcgacgacgaccgccgcaagctgcaacgccagctgctggccgtccagcgcgcgctggccgacgccgaggcgaagagcgagaccaacctcgccgtcaggcgctggatgaaggacctcaacgccgccgcctacgaggccgacgacgtcctcgacgacttccgctacgaggcgctgcgccgcgacggcgacgccaccgccggcaaggtactcggctacttcaccccgcacaacccactcctgttccgcgtaaccatgagcaagaagctgagcaatgtcctcgagaagatgaacaagctggttgacaagatgaacgagcttggcttgtcagtggatcgcacagaatcaccacaagaactgaaacctccttatctccagatgcattctgctgcactggatgaatcaagtgacattgttggcagagacgacgacaaggaggtggtggttaagctgttgctggatcagcgatatgagcagagattgcaggttctccctgtcatcgggatcgggggttcaggcaagacgacgctcgccaagatggtgtacaacgacacgagggtacgtgaccatttccagctgaagatgtggcactgtgtttcagagaattttgaagctgttccccttctgaaatccatcgttgaattggctacaaatcgaagatgtcaagtgcctgacaaggacaccatcgagctcttgcgacggcagcttgagggagccattggtagcagaaggtttctgttagttcttgacgatgtatggaacgaggatgagaacaagtggaaggatgaactaaggccactcttgtgctctgctgctggtggtcatggaagtgttgtagtggtcacaactcggagccaacaagtagcatctatcatgggcaccatgagatcccatgaactagcatgtctgaatgatgatgattcatgggaattgttctcaaagaaagcattcagtgaagaagtacgagagacagcagaattggtcaccattggaagacttattgtcaagaaatgcaaggggcttcctcttgctctcaatgctatgggtggcctgatgagctcaaagcaacaactccatgaatggaaagccatcgcagacagtgccagagacaaagatgaaatactttccatgcttaaattaagctacagacacttaccatccgaaatgaagcaatgttttgccttctgttccatattcccaaggaaccatgagatggacaaggaagtcttgatccaactgtggatggcaaatggtttcatccaagaagatggaataatggatttggaacaaaaaggagaatacaccttccaatatttggtttggagatccttcctccaagatgtcaaagcaaagaaaactctggaccatttggcagagctccagccgtcgaccattctacaaaaggaaattatggacaaggcattaccatatgagtccattggttgcaaaatgcacgatttgatgcatgacctagcaaaagacgtggcagacgaatgtgtaacttcagaacatgtacttcagcacgatgcatctgtcagaaatgtccgtcacatgaatatatctagcacttttggtatgcaagaaactatggaaatgttacaagtaacatcatctctccgtacttggatagtgccatcacccttgtgcagggatctcaaggatttaagcctggcatcattaagaacccttgtaattgaaaagggaatcttccattaccattcggttatgtctaaccatgtgatcacttattcgaagcatctacgatatcttgacctatctatgtctcaaattgttatgttgccaagttcaatatgtgtgatgtataacttacaaacattgagactcaatggttgcagctttctaaaatatttaccggaaagtatgggaaaaatgaggaagctcctccatctttatcttctgggatgtgatagtttggtgcggatgccaccaaactttggtcttttgaacaatcttcgcactctaacaacatttgttttggacactaaagctggttgtggaattgacgagctcaagaacttgcgtcacattgccaacaggttggaactgtacaatttgagaaaaattaattgcaggaacaatggaatagaagccaatctccatcagaaggaaaatctaagtgaactactattgcactggggtcgtgataaaatttacacaccggaaaacagtgcctacaatgaggaagaagtgttggagtcacttacacctcatggtaagctcaaaattttagagctgcatggatatagtggcctgaagatcccacaatggatgagagacccacagatgttgcagtgcctaacaactctccgcatttccaactgtttaggatgcaaggatctatcaacactgtggttatcggtctcgcttgagcatctgcagttatcccgtatggataatctaaccacattgtgtaagaacgttggtgtgggagctgaaggatacaccatccctcagcaagttttcccaaagttaaagtctctgaaactagagttgttatttagcttggagaaatgggcagaaaatactgcaggtgaggctaagaatttggttacatttccagagctcgaaatgctacagatcattcgctgtagtaaacttgcaagtgtcccagactgtccggttctaaaagaactggacagatttggatcttatatgcttgcaatgaacgaactcacacatctgacatcattgtccaagctcaattacgttgcaaacagtctttgtgattgtgtgagcatgcctttgggctcatggccatctctcgtagaactagttcttagatcttcaacacacattccaaccactctgcaggtggaggcaaatcaaggccagctagaataccttcggagtttgagtctagtaaactgcttcacggctgcatccggctcatccgaaatgcgtcttgggctctggaaatgctttgcctttgtggaggtattgcatattcatatgtgcctcagtcttgtgtgctggccaactgaggagttgacgagcttgattcaccttcgacacctatatattgagcactgtcatagacttgagggaaaaggttcatcatccgaggaaaaattcatgtcactgtcccatctagagaggttacacatacaacactgctacaatctactggagatcccaatgctgcctgcatccctgcaggatctgcggttagaatcttgccgaagattggtggcattgccttcgaaccttggaaatctggccatgttaaggcatctttatttgatgaactgctatgtcctgaaagatcttcctgatgggatggatggcctcgtttcccttaaaattttggagattcaggcatgtgcagagatagaggaattcccacagggtctcctccagcgacttccaacactgaaagaactgtccatacaagggtgccctggattggaaacacggtgcagagaaggtggtgagtattttgatcttgtctcttccgttcaacgtatatgcattccagcagcagcgaaaacagaaatggaggaggaatcaaggtctggaatctaa

SEQ ID NO: 29282 - DNA, 1260 bp, Oryza sativa
  Clone ID: PAT_MRT4530_337C.1
atggtggagacgacgacgatgatgaaggtgttggtgagggtgagggagttcgacgtggagaaggacttgccggcggtggaggagctggagcggcggtgccaggtcggcctgtccggcgacatggccgcggttcacgaccacgccgacgacggcgacggcgccgccgccaaggagaagaagaagaccaagacgaagacgaagaagaagaaggcgagcatgtctctctgcgtcgagcagatcggcgacccgctcgccagagtccgccacgccccggaacacgtcatgctggtggcggagtacggcgaggaggaggagaagaagaaggtggtgggtgtgatcaaggcgtgcgtgaagacggtgagccgtggcgggaagcaggagaagccattcgtgaaggtcgccaacctcctcggcctcagggtgtcgccatctcacaggcggctggggatcgggacggcgctggtgaggcgggcggaggagtggtgcgtggcgaggggagcggagcacgcgacgatggcgacgacggagtcgaacgcggcgtcgctggcgctgttcacggggaggttcgggtacgcgccgttcaggcggccggagttcatcggccacccggtgcacgcgcaccggctgccggtggcgagggggcaccgcgtgttccagctgccccccgaggtcgccgcggcggcgtacgcgcggctgctcccgccgcaggacgccgagttcctccccgccgacatgcccgcgctgctcgcacacaagctcaccctcggcaccttcgtcgccgtcgccgctgacggcgcgtcgttcgccgtgctcagcgtctgggactccacacgctcgctcagcctccgcgtgagcggcgccccggcgctgctccgcgcgtcgctcgccgcgctccgggcgctcgaccgcggtgcgccgtggctgcacctcccctccatcccggacatcttccgccccttcggcgcctacctcctctacggcctccgcatgtccggcccggacggcccggcgctgctccggtcgctctgccaccacgcccacaacgtcgcccgcaagaacccggcgtgcgccgtcgtcgccgccgacatctcccccgacgacccggccgccgccgccgtcccgcggtggcgccgcttctgctgcgacgaggacgtctggtgcatcaagaacctcaacccggacgaacacgacgccgacgactgggcggcgccgccgccgccgccgggacgccacctcttcgtcgacccccgcgagttctaa

SEQ ID NO: 29283 - DNA, 2753 bp, Oryza sativa
  Clone ID: PAT_MRT4530_33800C.1
atgaagctacaaagttagaggagaaaatatcggttggttgtgccctaaaaagctggagtgatcggaaggtggggaatgttaagctacagctagaaatgattagagaactcattgggaaacttgatcgagcggaggaagtgcgcggtctctcggcacaagaaagattcctgcaccgaggactaaagaagaggtatttggcgtactcttccttagaacggacaatggctaggcacagatcgtgcatcacttggttgcaagaaggagatgcgaacacgaagttctttcatcagcaagcagcttggcgtcgtcggtgaaactttgttcagcaattggaattcgactcagaggtcgcaactgccccggaagagaaggcgtaacttgcacagtccttcttctccgaagttcttagctcagtcagtccgcgtgagttctcgctcgaattgagcttccttgagcagccggggcagccgttatccgatttggaggaccctttcactgacgaaaaggtgtggcaagcggtcaaggaaattccttgcgacaaagcgccgggaccagacgggttcaccgggcagttctaccattgctgctgggacatcatcaaagtggatgttctagctgctctccaacagctccatcgtatggatggttcgagtttggagaaggtgaacaaggcattcattatgctactgccaaagcgcccagatgccaggaacttgcgggattttcgcccaattagcttggttcacagcttcgttaagcttttcacgaagatcctctcacgccacctagctcccaagctagattctcaggttgccaataatcaaagtgcgttcatcaagaagagatgtattcaggacaacttcatgctagtgcggcagtcggcgaagcggttgcatgagcggaagcaatcctccttgcttttgaagctcgacattgcgcaggcattcgattccacctcctggcaattcattttagaggttctggagcacaaagggttcggtagccgttggtgtgcttggattgccatgcttttcctaatagcaagtacgcgggtcctgatcaatggcataccggggaaccctatcttgcaccggcgaggggtgtgccaaggggatccaatctctcccatgctgttcatcctcgctatggactcattaagctctcttttctctaaagcagagaatgaagggctgttacagccgctgcacctgccctaccgaacttccctctacgcggacgacacggtcgttttcattcggtcggatcctgaggaaatcagcacagcaaaggaaattctacacatctttggggaagccacagggcttgggatgaatttcgctaagtgtgcagctctcccaattcagtgcaacgacaacaacattgcactgatccaggacgaactaccatgtcaggtcgcaacattcccttgcacttatttagggctgcccgtttccatcttccgtcttcgcaaagaagacctgtagccgtttgtggacaagatagcccgtcggttgccggtatggaaggcagagcagatggcgctcattggtcgggtcactatggtaaatgcggtattgagctctataccgatctatttgctgatggccatcaatgtgccaaagtgggtgataaagggaatcgataaggtccgtcgcggcttcctctaggccgggaaagcaagtgctagcggtggaagttgccgggtcgcttgggcacgtgtttgcgcacccaaatcgtatggtggattgggtgtccctgatcttgagcgcatgggacttgcgctctggtgccgctgggcttggcaactgaggacatcgccagaaaagccatggcatggactcaatgttccgatctcgcaaaaggagaggaacctactccaagtctctttgacatgtcgagtcggcaatggaatgaacgtgctcttctgggaagacaactagatccaggggtcgtcgatccgcacccttgcgccggctgtgcatgccgcggttgcagcaagaacccggaatcgcaggacggttcgcaaagcactccaaggtagaacatggatccgggatatatctggggctttcgaaatccaagcaatcctagagtacctcagcttgtggacatctttgcaatccttggatgccctcacggaagagccagattcaatcatctggagatgggagtcatcaggagaatactcagctcactcagcttatcagtccatgtttgtggggagggtccaattccaggacaagcctatctgggggtcgttagcaccgccccgatgctgctatttcctgtggttagtggcactaaacagatgttggacggccgatcgtttgcggagacagggtttaccacatcctgatcggtgcgtcctatgcgatcaagatgacgagacgattgatcatctcctagtcgcatgcccggagtcacgtcaactgtgctggttcgcactccgagcaattggtttgtcggacatactgccattcaatgaaccctccttcctctcatggctttgtgacaagagaatgaaggttgccaaagctcagcgacgaggattcgacaccgttgcagccttgatagcttggactatctggaaggagtggaacaacagggtcttcaaccaacagcaaaagacctgggtcgaagtggcaaaggttatgacggccgaggccgagctttggcgcttagcgaacgcggccatgccggagctacctctactgaccacggagtggcggtcacaaaatttagtaggagattag

SEQ ID NO: 29284 - DNA, 144 bp, Oryza sativa
  Clone ID: PAT_MRT4530_33801C.1
atgccgcgccgacaagtggggtccccaggcaccggctccgtgaggaagaaaggcgccccccctccgaccccacgtcataacaccctggaaaagaatgatcgggggctcacctggccgcccgaacgatgccccaactacacaacg

SEQ ID NO: 29285 - DNA, 1644 bp, Oryza sativa
  Clone ID: PAT_MRT4530_33802C.1
atgctgccctccgccgcgcccgcgcgctgcctcctcctcctcctcctcctcgccgtcgccgtcgccggcgccgcgttcgatctcgaggaggccacagtcgactccatccgccgcgccttcgccgacggggagctcacctcgcgcggcctcgtcgagctctacctaagccgcgccgcggcgctcgacccgtccctccacgccgtcgtcgagctcgacccggacggcgcgctcgccgcggccgaccgcgccgacgacgcccgccgcctcttcgcgtccgcgggaggaggcgcgctcccgccgccgctgctgaacggcatccccgtcctcgtgaaggacaacatcgccgcggccggcggcggcggcgcgctgaacgcgacgtgcggctcgctcgccctggtcgggtcgcgccccgcgggcgacgccggggtggtcgagcggctccggcgcgccggcgcggtggttcttggcacggccagcctcagcgagtggtgcaacttccgcgcccccggcatccccgccggctggagcccccgcgccggccagggcaagaatccctatgtgccatcggcgacgccgtgcgcgtcgagcagtggctcggcgattgcagcggcggcgaacatggtggcggtgacgattgggacggagacggacgggtcaatcatgtgcccgtccagctacaattcggtcgtcgggattaagccgacggtggggctaaccagccgcgccggcgtcatcatcatttcgcctaggatggacaccgttggatggacagtttcagatgctgtgcatgttttggaagcaattgttggatatgacccgcgagacgcagaggcaactcgtatggcgttgcaatatatcccagaagatggttataggcaattcttgaatatagatgggttaagaggcaagaggttgggaatccttaggaaagatttctttcggtttccctcgggctctgtccaacaaaagatgacaatgacaacgtcaacagtacaatcttatgcatattctagtctcaaaatgaatgagatcaagtttctttcctttctcctgattcctggatgctataaaactgaaagtaagatgggtgccatattggtggacaatctcgagataccaaacatgaacatcatcaacgatgcagtacaaagcggtgaacgtgctcttatgctagccgaattcaagttgtccctcaactcatacttgtctgaactggccagttcacctgtaagatcattatcggacataattgatttcaacaacaagcatccggtagaggaaaggatggctgaatttggtcagagttaccttctgcaatctgaagcaacagatggcactggtccaactgagaagaaggccattgcgaaactgaacgaactttgcgaaagtggcctcgagaaaataatgcgagttaatcaactggatgcaattgtttcaccaggtgcatctgctcatagcctgcttgcaatcggcggctatcctgcaatcacagttccagctgggtatgcatcgaatggtgttccttttgccatctgctttggaggtttgaaaggatcggagccaaggcttattgagatagcctattcgtttgaacaggcgacaaaagtgaggagacctccaactttgcagcattctatcatttga

SEQ ID NO: 29286 - DNA, 186 bp, Oryza sativa
  Clone ID: PAT_MRT4530_33803C.1
atggaggtaacaacatcatcaaggttttttagggggaacagttataccaatattttatcaacaataagagttccagaaacctataatacatgaagaggaggaaagaagcataacatgaattagttcactcgcacaggaggccaacataaaagaaattaccaacacccaagggcttgggggatccta

SEQ ID NO: 29287 - DNA, 816 bp, Oryza sativa
  Clone ID: PAT_MRT4530_33804C.1
atggcggagaggagggccctccccccgcccgtgccacccgcctcgcccgaccccgccgcctcctccggcgccgtctccaccgccttcggctccccgctcgaccccgtcgccgcgcgcccgcaccagccgcgcgacacgtacgtcgtccacgtccagaaggaccaggtataccgcgtcccgccgcccgagaacgcctacctcgccgagcggtaccgcgcggagggcggcggcggcggcggcgggaagggcggcgcgtgctccccgtgcgccctgcgcacgctcggcgcggtcctcgccgccgcgctgctcctcggcgccgccgccgcgctgtccgccgtcgtgctgcggccggacgcgccgagcttcgtcgtcgacaacctctccgtgcacaccaacgcgtcgcggcagcaccacgtggcctacgacttcttcctcacggcgatcaacccgaacaaggtgaccgcgctgtggtatggcggccgcggcacggcgaggctggcgcacaagggcaacgccctggcgaagggcggcgtcggggagcccgaggacggcggggaggacgccatgggcttcaacgtgctgctccacgggacgcagcgcgacggccgcacgcccagggcggtggagaaggcgctccgcggctccaagggcgccgtgacgctcgacctcgccgtcgagttcgccgtgcaggtgcacgccggcgcgctcggcttcgagcggaggacgctggccgtgtcgtgccacatcaccgccgccgggctgaggaaagacgtgcacatctcctcgcaaacgtgcaagagccgctttggaaactga

SEQ ID NO: 29288 - DNA, 540 bp, Oryza sativa
  Clone ID: PAT_MRT4530_33805C.1
tctgcctgcgccatccggccggcgagatcagtacgtacccaggacgccggtgatgaacagggagtaatccatagcagctaattcacagggataagctagcagatcgagtggctactatggatataaccactggaatcagatttggccacctgctatactgctgacttcaaatggccgccgaatctgcatacgatctccgttttcggctcgtgagtacttgatggaaagctctcagagccctctttccaacagatccagcttcatagccaaattccgtgcaatttggccgtaatcacataaacaaggtgctgcgtcacctgtcttgggcctctgggcttgtaattatgtttgggaccccggcccaagtggggcccatgtggggtgcgccccaagctagtggagcacgaccctaggcacccctaggtcatcctcccacccctatatatagctaggaataaggttgatttgcaccggcaagatcaacaacccacggagaggtgtatcgatcgctaaggcgcaacgcaacgtcttgtatggttg

SEQ ID NO: 29289 - DNA, 120 bp, Oryza sativa
  Clone ID: PAT_MRT4530_33806C.1
acacgtaatttccgagaatacccacacgtgcatgacatgtcaccttggacaatctggcgaggaggttgagagcacgcaagggtcacacaaaccccaacatcgccatcatgcttgtgggga

SEQ ID NO: 29290 - DNA, 453 bp, Oryza sativa
  Clone ID: PAT_MRT4530_33807C.1
tgtgggtgatttgtgtggtggtagtgtgaagtttttaaacttgggtggcgtttttattgagatttgtggcacccggaagggacaatctgggcacacacggtgatgcatgactttattttgtgtcctgggtgctatactggtcaatgggaaccagggcgaccggcggggggaatggtacagggagcggtgttgtgggtagggtaggaaccgtatattgacggcgtgtttatgggcaacatagcgtggagcttgagctggactttgggcgaagtggacgctagcggactgttgggggcgtaacgtgggggacaaatgggctgaacactggtaatgggcggacagggggactgttgggcgatcatcctgagcttgtggcaggactggtgctgcatgacttgacaggttctcatttggaacacgggtgattggaagaagggggttgccactgtgctg

SEQ ID NO: 29291 - DNA, 1905 bp, Oryza sativa
  Clone ID: PAT_MRT4530_33808C.1
atggacttctcggagcaggacgtcgaaatcttcggcgaggactacgacgacgccgaggccgacggcggcggcggcggcggtgcctcgtccggctcctcctccccgtcctcatcctcctcgtcgtccgccgccgggtcctcctcctcctccagcggcgcctccagcagcagcggcgggggcgggggtgggggcgaggacgaggacggggtcgaccagggggacgccagggggtacgacgacgacccgttcgacggcgcgcccgcgagggccgccggtgggtacggtgacgaggagaggggcgagggtgatgcggaggaggaggaggaggaggaggagagggatttgttcggctctgacaacgaggattacgtcaagacccccgcgcgtagcaactacctagtcccagtgctaccctcaatacggaacaccaacaatcattctcggggaggatatggggggcggaatggcagaggtccacctcttcttccaaggccaggaggccatccaggacggcataactttggatatggtgggaggttttcgcatggaaatgggcgtaatgttgaaggttttgtttcagaaatgaagcttaataagagtgaagaaactttatctaggaagtttgttgcttttcaggagccttctgagattgcatgctacagccgtattgagggtggggatgtatattttgatgaccgcagcttgaggctcttcaaacgtaacatttgcgactatgttggtgaaaatctcaataaaggatttgaatcttttatagagaaaagagatttgggttcagaaggatttggtgatcttcttgcatgcataagaaattcaactgtacctcttcagaacatacattttgtgacataccgcaacaatcttaacaagatattggccacggcttatctaagagaaccatggaagatgggtgtgcacaaaagaaatggtgttgtatacctggacgtccataagctccccgaaagaccacaaagtgaggttgaacgccggagatgttattggggatattcttttgaaaatcttgcaactgagaattccattgatgaggatggaagaggtattgatgcaaatgtagagttctgtgctgtaataataacgaaattgggtgcacatcgtattatcatgggtgctgagatggactgctgtgacgcaactgatgatggtaggcggttctacgtggagttgaaaacaagcagagagattcaatcatttattgctggtgttccatatgttgttgttggattcaggaatgatgctggtgtacttatacggactgagagactaagaaccaaagaaataacacaaaaggtgaaagcgaagaactactggcagggaggtgtttgcttggccttcgctgatgaggtcttatgctggttgtatggcactgttagagaaaacgaggactacatcctgcaatttgtacatccattcaatcgcttggaacttctacgtgcccagtctccctgtcctgatgccatcactcatcatgtggagcagctctctggtacagcaggctaggttaatttgtacacacaacttcggcaagtaaaagggctgtttgaggtagatccgtgttgaaggattttattttaggggtgctgacttttaaacaaaacttcggcaattatataatggttgagctgacgacttacccagccaagcaacataggccgacgactaaatggtttgctctttgaactgccaaaaagattttgaaattgtcaaaaccttgtgtttctccagtaacattaagttataaattagggaaatggagagctatgcggcaatgctactactgggtcatgcccccgaggcaccaatgatgtaactctgtaccagataccagtaccaagggaaatgatatgaattttaaaaagtttttgaact

SEQ ID NO: 29292 - DNA, 2289 bp, Oryza sativa
  Clone ID: PAT_MRT4530_33809C.1
atggcctcccgcctcctcctcctcccccgccgccgcagccgccatggcggcgccagcctcctcctcgcgcggctcctctcctcatcctcctccgaggctggcggtggtggggcggtggagaaggtgcttgtggcgaacaggggggagatcgcgtgcagggtgatgaggacggcgcggaggctcgggatccccaccgtcgcggtctacagcgacgccgaccggggggccctccacgtgcgcgccgccgacgaggccgtccgcctcggcccgccgcccgccagggagagctacctcaacgcctccgccacagtcagagctgcagaccgtacgggctcaacggctaaccgtccatcatcttgttgtctttcggtgagggcaaatttcgagccactgggggagtctgagggaagcacatgcctcgaatggttgtaatcagtttgcttaaagacggggcacaggtggaggaaggtcaggcctgtcatggttatggaagcaatgaagatggagcatgttgtgaaggcgccttgtgccggatatgtggaagggctgaaggctactgccggacaacaagtttttgactctagtgtccttttcaccgtgaaggagaacaagccaaattgagaaacccaggcagagattcacgacctgtacagctcaattcacagacgcttcataagttggctgatgatgctgccggccgtccaaaagcaagcaaataataagcgacaacatcgagttcacaacacaaaagcaagcaaaaataagcaacgggttcatctgtgtgaataaattagttgacgagctcccaacccaccccctgttgttgttgtcgcaaacctgaaactgtacagtgtacattactgctgtcacatacagtgacaaaaacaattaaacctcatttgttcttccattgccctgagaattctatttcatggaaatgaatactcggctccagcctgttaaccgcattaagcttcagtacaaattggatgtggtcatctcaaatattaaaatactttacatggtgaatcgatatttgaaggttgaacacccagtgaccgagatgatcgttggccaagatcttgttgagtggcaaatacgaattgcaaatggagagtgcctaccattatctcaggagcaggttccgttaaatggacatgcgtttgaagcccgaatatacgcagaaaatgtgccaaggggatttcttcctgctacaggaaccttacaccactacaggccagttccctctaccgcaacagtaagagttgaaactggagttgaagaaggagatactgtcagcatgcattatgatcccatgatagccaaacttgtggtttggggtgaaagtcgcaatgctgcgctagtcaagctaaagaacagcctgtcaaactttcagattgcaggtttgccgaccaatgttggtttcctccaagaactcgcaggtcatagtgcctttgaaaaaggcctagtcgatacacatttcattgaacgctatcaaaatgatcttctgagtacttctactcaagccttgagtggatcacatgaagcagaagagcttggtgcaattttggctgctgcctgcatttgcaagaaggatcatgtttcctctgaagtgtcacttcatgataagaaactttctatgtggtacgcccatccacctttcaggatgcatcattttgccaagcgtctaatggaatttgagttggatagagaacttggtggatcaagtgatgatcttcttaaactgtcggtaacatatagatctgacggaacctacttcgttgagactgaagatggttcttctcctggattggatgtcaaagtagatagcagaggtgaccatgatttccgggttgatgttggtgggctgcaaacagacgtaactctagcattttattcaaaggacaattgcaaccatatacacatctggcatgggaagcatcatcatcattacaggcagacgttgagagctgagcagtcacctgatgacagttctcaacctagcgcttcctctgaggcgaggtcacatccaaaggggagtgttttggcaccaatggctggtctggttgtaaaggttttgcttaaagacggggcacgggtggaggaaggtcagcctgtcatggttatggaagcaatgaagatggagcatgttgtgaaggcgccttgtgccggatatgtggaagggctgaaggctactgccggacaacaagtttttgactctagtgtccttttcaccgtgaaggagaacaagccaaattgagaaacccaggcagagattcacgacctgta

SEQ ID NO: 29293 - DNA, 289 bp, Oryza sativa
  unsure (1)..(289): unsure at all n locations
  Clone ID: PAT_MRT4530_3380C.1
atatatatatatatanatatatatatatatatanatatatanatatatgtgcggttaaaagtttgaggtgatgctttctggtgtttaattaattagctataatcagatcagatgcatgcagtgtgttcttgtttaagttcctttctctgtttattagctggttgtggtacgtgtgtgtggtatagtacatcgccatgaatcaataaagagaactagctntgtgtaaaaaaaaaaaaaaaaaaaaaaaaaaaaaaaaaaaaaaaaaaaaaaaaaaaaaaaaaaaaaaaaa

SEQ ID NO: 29294 - DNA, 504 bp, Oryza sativa
  Clone ID: PAT_MRT4530_33810C.1
atggcgatccatgccatgtcgcagctggacggcagtgccgacgacccctccccgtcccctaccccgggcgcgaggatgtcgccatcgcggatcttcgcggggctgccgacggcgcgcggggtggctaacggctcctccaccacggcgaggggcgcgcgccgcgcgggagtcgtcgccatcgtggatctttgcggggccgccgacggtgcgcggggtggccgacggctcctccaccacggcgaggggtgcgtggggtggacgacgacgaggggcgcgcaggcggccgcaaggttgtcgccgtcgcggatcttcaagctacttcgcaagcgcgcccatgactacaactccgacgacgagaagcacctctcggcggaggatgaggaggaggaggagtgggcctccagcttcgaagcgggcgacgcgcggggccataaagcgcagacggccgcgactgctggcgttgtggagaagggcgttggcgggagcatctcctccgggtactga

SEQ ID NO: 29295 - DNA, 482 bp, Oryza sativa
  Clone ID: PAT_MRT4530_33811C.1
acaaagggggaactttcatgttcctttttctcacttgaggattggatccaaagtttcatacataatttttgggtaagcatttttgtgaaatggaaagaagcatgttcgatgcccgttactttttaccttttttggaagttcagcttaaatatgctcaaactaaacaggatggcaaacatagccgggaacatggccaacatgatggctgccaatggcagtaggtcacgacggaaactaaagttgtcattgatgaagggagcaatagattttgtctttccgaatacgaaaatctccttctcatgctcatccccgaactggggggggaaaaaaacattgagtgtccatgacaagggggatgcgtaatacaaccatttccaccattttggtttttggggggcaggccccataaaacccgacatgagggtttgcacggtgtaaaacatggatgctaatatggatgccacttggatgttgggggtaag

SEQ ID NO: 29296 - DNA, 375 bp, Oryza sativa
  Clone ID: PAT_MRT4530_33812C.1
atggggaagaagtacatgcgctatgtgaaccgttgttgccgttacttgtggcggctggatctggcggcccccaagctcgcggtggcgggatctggccgttccacacccgagcacatggggaggcagggccaagggaagggcgacgtaatctcaattttttttaggtgggaatggggaagagccggatttggctaccctcaagctcgtggcacccgagctcgtggggaggcaggaccgagggaagggcgccgccgtgagacaacgctacccgccaagggaagggcgtgccgccatgccggcgagcgtttcttgagttcgaaggagggggagaagaacgagaaggtgatggcggaggatggattgtggctcagctag

SEQ ID NO: 29297 - DNA, 773 bp, Oryza sativa
  Clone ID: PAT_MRT4530_33813C.1
cggacgcgtgggcggacgcgtgggcgaggatctggacaactacgacattgtcttccaatcggtgatcttccgtacgccaatggctacatctcccagtgggaccagttcaccgcccaggtcgcccccatcaccgccaagaagccctacatgattgcaagcggtaaccatgagagggactggcccaacaccggagggttcttcgacgtcaaggactccggcggcgagtgcggcgttccggcagagaccatgtactactacccggccgagaatcgagccaacttctggtacaaggtggactacgggatgttccggttctgcatcgcggactcggagcacgactggagggagggtaccgaccagtacaagttcatcgagcagtgcctgtcgacggtggaccggaagcaccagccgtggctcatcttcgcggcgcaccgcgtgctgggctactcctccaactggtggtacgccgaccagggctccttcgaggagcccgaagggagggagagcctgcagcggctgtggcagcgccaccgcgtcgacgtcgccttcttcggccacgtccacaactacgagcggacgtgcccgatgtaccagagccagtgcgtctccggcgagaggcgccgctactccggcaccatgaacggcaccatcttcgtcgtcgccggcggcggcgggagccacctctcggactacacctcggcgatccccaagtggagcgttttcagggaccgggacttcgggttcgtcaagctcaccgcgttcaccactcgtcg

SEQ ID NO: 29298 - DNA, 2324 bp, Oryza sativa
  Clone ID: PAT_MRT4530_33814C.1
ccttgtttcttttttttttggactcagaaattcagattgccaatcttattagacatttgtgcccgagcagctaagcaattttattgcacaacatcaccatccatgaggaagagaaacacgatcgagccaagcgatcgaccactaccacacctgatcgaaatggttgaagaagaagaaaaaaaataaaacccaactcgatcgaccgaccgatcactctttctcagctgccagcattttgacgatgaggcatcaactcatgcatcctaataatgatcctttcccttgtttcattcatcaggaggcgagcgtggtggggaggcagctgtcgtgcacgcagctgagcacgtcgcggtaatccctctccacggtgaaggagtcatacaccttcccatcgctgctcttcttgtactcgaacagcagcgacgagtggttgaacgcggtgagcttgacgaacccgaagtcccggtccctgaaaacgctccacttggggatcgccgaggtgtagtccgagaggtggctcccgccgccgccggcgacgacgaagatggtgccgttcatggtgccggagtagcggcgcctctcgccggagacgcactggctctggtacatcgggcacgtccgctcgtagttgtggacgtggccgaagaaggcgacgtcgacgcggtggcgctgccacagccgctgcaggctctccctcccttcgggctcctcgaaggagccctggtcggcgtaccaccagttggaggagtagcccagcacgcggtgcgccgcgaagatgagccacggctggtgcttccggtccaccgtcgacaggcactgctcgatgaacttgtactggtcggtaccctccctccagtcgtgctccgagtccgcgatgcagaaccggaacatcccgtagtccaccttgtacctgtgtcgtgttcgtgtatgcaccgaccagttcgacccaaaaagcttaatccgatagagcatatgatagaaaaaaaagtttaaacagaagttggctcgattctcggccgggtagtagtacatggtctctgccggaacgccgcactcgccgccggagtccttgacgtcgaagaaccctccggtgttgggccagtccctctcatggttaccgcttgcaatcatgtagggcttcttggcggtgatgggggcgacctgggcggtgaactggtcccactgggagatgtagccattggcgtacggaagatcaccgatgtggaaacaaagtcgtagttgtccagatcctcgaccagcctgtccgtcgtgttcagagatcctggctggtagttggcgaactcgtttgatccgtctctctccgccttgcccatgtcgccgaagacgatgatgcgttgcagcgagttctggccagggaagggtggcgcccggaaagtgtattgcttgccccagacaattgatccgtcagaaagttcatgcccaatcttgtagtagtactctttgttgggccacaggtctctcaggaaagctgtgtggatgaacccggggtctctccacccaacagtgcgtgccggctcaccgcacatgctgccgcggttgaaggtgagcgtgccggcggcggtgcgggttggagcggcggcgccggcgacgaccatgccccactcgacgaacgggtacgcctcgctgatgtcgtagccgctggtccatgtgacggtcatctcgtcgtacgacttgccctgcgccagccgagggtacaccggcgccttggggttcttgaacgatatcgcctccgacaccgccaccagcttagggttttccaggccgccggtgaacagggcgaaggagaagtcgtagcgctggttgatgagctggaaccggatgctgcccttgccccagtacacgtagttcgccgagtagtttgcgaattgatactttattggtgcagtgcagagcagcggctcatccgggtatctggaaggattagggcaagaacccgagatgaaatcggccggagagaagacagcaatccagtcgtcagcggaagggtttgcccagccgtatttcaccgtgacccactctgtgtcttctccctggtcgccgagcaacgccggcgtggcgctgacgaacgcggagccgtggaggtcgacggtggccttgtggacggcgatcttcgacagcggctggaacccttccagcgacgacgacggccgcgacgcgctcgccgccgccagcagcatcgccaccgccattgccacgcctcctcctcctcctctcttcctactaaccatggctagctttctacagctagctaatgcaatctaactacctctcctgcttccccagaagctgccatcgtcgcccgt

SEQ ID NO: 29299 - DNA, 278 bp, Oryza sativa
  Clone ID: PAT_MRT4530_33815C.1
ccaaagatcccctcccctctcctctcttcttcactctgccccagagctgacttttgcttcttactcctactactactacttgtctttctctttgcaccctagcctcatgttcttcttcttcctcctctcctcctccttgtagcttccacccccaaccaactgggtcacactcgagccggccgattaacagaccgagtgtggggagggcaacgcgctcagatcgcgcaggggccccaacaccctatttaatattgccccaacgcggtggatcacgaaga

SEQ ID NO: 29300 - DNA, 258 bp, Oryza sativa
  Clone ID: PAT_MRT4530_33816C.1
gagccaccaccagaggcgtgaccgaatcggctagcgagtgagagaggaggagcagttcacaggtgcagttccacgctcacagcagtgtccagagcagagcgcgaagggaagagggcgcatagaggaggaggagaggcagccatgggcgaggaggagaaggtgaaggaggaggcggcggcggagaaagggaaggaggcggcggtagcggaggagaggaaggcctaatcatgttctgctgaatacaaattcttccaggga

SEQ ID NO: 29301 - DNA, 187 bp, Oryza sativa
  Clone ID: PAT_MRT4530_33817C.1
ggaggggggaaaaatgacgaaaaaaatatatttatatttggcaattaaagaaaaaaaccaatttaaatgatattgaccattggaggtgagatacagataatgaaaacggtaagttcataactatgggaaaagtaataaactttttcttgtgagacaaagagaactaaaatctgaaagcttccgtttt

SEQ ID NO: 29302 - DNA, 352 bp, Oryza sativa
  Clone ID: PAT_MRT4530_33818C.1
aaatgagctggggattttgttgctgaacagtcataagacatgatggataaacatttttttgctggttagcagcttgtgatactgttatctcataagtcatatcttaactagtgagtttcacatttcgctgttgtgtagattctggatagactaagattctgttaaataaatctgggtatttattggttgtgaagcaacttttacgttttgtacgatacatgagtaggttttgagctgaaacaaaaggcatgtttatttatgctccaatacggcgaccagtcccccgccgccaccgcctccgtcgaaccgtcgctggcacagggcaggactccgcggcggactccgagaacgc

SEQ ID NO: 29303 - DNA, 534 bp, Oryza sativa
  Clone ID: PAT_MRT4530_33819C.1
atgtcgtcgtcgtcgtcgtcgccgtcgaaggcgaagaggccaggcggcggtagcatccagggcccgcggccgcagtcgctgatcgtgtcgccggcggcggcggaggcgagtcggccgaccaagaaaccccgtgtcgtcgccggcggcggcgacatgggaccggtgatcgtgtacgagctcacgcccagggtcgtccacgcgcagccggaggagttcagggccatcgtgcagaagctcaccggcaagccgtcgacggcgacggcgacggcgccgtcggatccaaccgcgacattgccggacctggtggccggaggcagggccgccgccgccgccgacccactggtgctcgcgcttgggcagcagcgtcagcctgctccgccggcgattgacgacaacgacgacgacgacgacgaccattcggcgcatccatttcttcttccatctccggcggctgcttctcttctgtcgccgagtagcctcttcttctcgccgaccacgatgcaggccttgcaagagctgggcgttttgttctaa

SEQ ID NO: 29304 - DNA, 179 bp, Oryza sativa
  Clone ID: PAT_MRT4530_3381C.1
tcccgtacggaaagatggcccaaccttgactgactacaacatctaaaaggagtccaccctacacctgggtctaacgctcatgggtggaatgcaaatcttgaggaagaccctgactgcaataaccataaccctagaggtagaatccaccacaactattgactacgtgaaggccaacatcc

SEQ ID NO: 29305 - DNA, 1161 bp, Oryza sativa
  unsure (1)..(1161): unsure at all n locations
  Clone ID: PAT_MRT4530_33820C.1
ggcgggagggacggacgtagggacggcggcggacaccgtaacnccgaccattgancactccacctcctccttggccgaccctcccaaacttctctacccccctcggcacacccccccccatccacttcatataaaccttcgcatgcccccataccaaacaagggcaactacgccaccaccacgatcagtccacccaatataggcccagccccccccaacaaaacaccccactccatcgaacacggttctttccctcgctcccccacccaaccccaaaaccccctgaaacaacgccttccaacaattctcaaaaaactgtaccccctacaaccctccacgcccatcccccccaaaanccccccacaaccacaaccaccgccgcctccaccaccaccagtcgtcgccgccgccgccaccaccgattagtcccgccaccagctgcctccccgctgtccaaccgccaacgccattgctgccgtgccgccatcgcgggagcgttggaatcagccacgggacggccagatccgggcacggccgtgccggacccgcgtcctccaccaccgccgccgaaggcccgtcgtcgtccatgccgccgccggccaccgtcgcccatggcctactcaacgttgcctaccgttcgcttgcggccatctcgacgaccttcgactccttgtaggggctgccacgacgtccgccgacgtgcctttgccagatccggccgcctccactgtgggcgccggcgtgcccttgctggatctagccgcctttaccatgggtgccgggtgccccagctgacgctgttttggtgaagaagaagccccgctgccgccgtccttgcggccagatcgcacacccaacccgatccacatcatccccaaacctcccttcccgacttccccagcttacggttaccgtgcccgtctcctcctcgacctcgagagtccacctttccccctccccttccacctcccctctccggccatctccgccgccgccgccgccggaagctcgcgcagttccagcagcaggtgcgcccccgtccccacccggctgatctcctcccctgctgctcctgttcgatcgcgcgtgttggggggtttcgggatcgtgccagatttggtctccgctgcggccgcccatcgcggcgggttgtgcgagagg

SEQ ID NO: 29306 - DNA, 1734 bp, Oryza sativa
  Clone ID: PAT_MRT4530_33821C.1
atggtgaaggaagagcaaggtggcgaggtggccatggccgccgccgccgccgtcacgacgacggtggcgccggcgctgccgacgcaggagcaccggctgccgctgtcaaacctggacctcctcctgccgccgctcgacgtcagcgtcttcctttgctaccgccacccggcgccgtccgcggcggcgctcaaggaggcgctggcgaaggcgctggtgccgttctacccgctcgccggcgaggtcgtggccaacggcgacggcgagccggagctgctgtgcagcggccgcggcgtcgacttcacggagtcggtcgccggcgaggagatgcgcgggctgcggattggcatggtggacgagcgcgtcgagaagctggtgcccgccaagaaagccgccagcgtcatggcagttcaggtgaccaagttcaagtgcggcggcgccgtcgtgggctgcaccttcgaccaccgcgtctgcgacgcctactccttcaacatgttcctcgtcgcctgggccgccgccgcccgcgatggtcacggcggcggcaccgcgccgcctccgccgacgatcccgtccttccgccggtccatcgtcgcgccgcgcgacccgccgccgccgcgctcaccgtccaccgacgcgctgatcgaccgcctgttcgcccctctcggctccgcgcctccgccaccggacgacgccgcggcggccgccgtcaaccgcatctaccgcgtcgccgccgccgacgccgcctccctgcaggactcggcggggcccgggcgcacgaagctggaggcgttcacggcccacctgtggcagctcaacgccagggcggcggcggcggagcgtgagcggccgtgctgcatgggcgtcgtcgtcgacgggcgcggccggatgttcccggacggcgccatgagggcctacttcggcaacgtgctgaccataccgtacggcgtgatgggctccggcgagctgcgcgccgcggcgctcgccgacgtggccggcgacgtgcaccggtgggtggcggaggcggccaccggcgaccacttccgcgggctcgtcgactgggtggaggcgcggcgccccaagccggcggcggcgagggcgtacctgggcggcaccggcggcggcgacgcggcggcgtgcatcgtgtcgtccgggatggggttccccgtcggcgaggccgacttcgggacgggcgcgccggcgttcgcgtcgtaccacttcccgtggcccgccggcgccgggtacgtgatgccgatgcccagcgcgcgcggcgacggcgactgggtggtgtacgtgcacgtgtcgccggagttggcggtggcgatggatgaggagcccaccgtgttcaggtcgctggacaacagctacgtctggtgcgctgacgcgcgtgacctcgcgcacgtacgccgccggtgtcctcgtagcctccgcagctgcgcctctccgatccccgtcgttcgtcgcccgccgagcgcgctgccgctgtacgcctggctgctcgcgatccgcgaagggtggagtcgtgcacagaccaccgcggcgcagcgaccgcgcgcatcaccctgcggcgccggagcccaggacccgtggctggctctggccctagcaagcatgcgtgatgatgtaaaaccagttgccgtcgacaacagggtagtctttctctttgagttcgtgctcggcgagatcaaagacagcgcaatgtctctcctatcagtatccggagacaccgtaggggattag

SEQ ID NO: 29307 - DNA, 735 bp, Oryza sativa
  Clone ID: PAT_MRT4530_33822C.1
atggcggcggcggcggaggagggggagggggtgcggctgctgggggggaggatgagcccgttcacgatgcgggcgcggatggcgctggcgctgcgcggggtggagtacgagctggtggaggaggcgctccacccgcggaagagcggccgcctcctcgccgccaacccggcgtacgggaggatccccgtgctcctcctgcccggcggccgcgccgtctgcgagtccgccgtcatcgcgcagtacgtcgacgacgcgtggggcggcgccggcgccggcgccgccatactgccggtggacccgtacgagcgtgcgatgcatcggttttggaccgcctacatagatgacaagttctggccagcgttggacgccatctcactggcgccaacgccggaagcgcgggccaccgcgacggcgagcacccgcgcggccctgaagctcctggaggaggccttcgccgcccgcagcaacggcggggccttcttctccggcggcggcgccgccgcctcgccgggcctcctcgacgtcgcgctcggctgcttcctgccggcgctctgggcctgcgagaacctcaacgggctccgcctcctggacgacgacgcgacgccgctcctccgcgcgtggagcgcgcggctcgccgccacccccgccgccatggccgtcatgccggagacggaggaggtggtcgcgttcacgaggttcctccaaaccaagtttggcgtcgcaggatcgaaataa

SEQ ID NO: 29308 - DNA, 390 bp, Oryza sativa
  Clone ID: PAT_MRT4530_33823C.1
ctttgctccatctgccgccgccgccgcctccgcgcggtggatctctctctctctccggccaagctacctttgacggaggaaagttacagcgcgggccgaggagggagggcgacaacctgtacacagggcagagtccacaccggaaggtcatagagccatagagctagcaagagctgagtggggtgcgagagtaaaaaaatatctgtgcattcgattgcatcacggacatacgggaaaggatatgaggttcctggggtggtacctcaagatcgcggtaggcggcgccgccataggtgccagcatggagctctttatgatccacaccggcttttatgagaaggtaacttgtgttggaattagaaaaaagagcttgtgagaacagcccaaaag

SEQ ID NO: 29309 - DNA, 2421 bp, Oryza sativa
  Clone ID: PAT_MRT4530_33824C.1
aagaaacgctctttatacaagctctccaactttataacgcggggtagtagctcgcataaactttgtttagcatgcaaagaacgagccaaatttagaccaaaacctcctttgaagatagcgtgccattgtcaaacagcttcccaagtaaaccggcaattaattaaaccggcaatttctttaccgtgtacagtgtacacgtaagttagttgttacagtctcatcaagttgtcagattggagacaccatcttcgatactttcctcttcctcgtcctcctcgaagtctccttcctcgtcttcctcctcttcctctgcgagggtctcctgtggcactcgttcagggacttggtaaggtccatgtttctgcagactccaatacatgatgcttgcagtaagaaccaggatcatctttggattcacctccattatgtcctctggcaacatgaagagggtgcacccaagcttcctagcaacactgatggtgtaagtggcatttgatttcttctcttcatcatcctcccccttcttcaccatgctcaagtcaacatgcctgtggttaacagcgtggagaagctctaggaagaaaactccatttgctatgcttttatccttattatttgcccaaatgagaatatcagcatcggttatctctttgtctttggaatgggttctcaggttttttagcaattgtaggatactagtcctcatgagttgccacaggaaagctagaattagcttcttatttccttgaacaatgtcatttcctgaaatgttaaccacagagaattttaactcctttccgatttcgataacctggttgccgttctccacctttctaaaaggcataatgattggtggcttagaagcttgcttccagttaactattcctggagaaattttgtcaagaacctctaacaggacccatccagtccttacatcctcaaacaaattgttaacataagttgcaattccaaggctgttgatccacaaacgaaatgctctctcttccctggttgcttcaacgtcatctggagtgtcttgaacaacaggagccacattgttgtctgacaggccatttctgtggtggaatatttgagcaacaaaagccaagttgagatttgcagaaccctccacaatatctttagacgttacatatctagtacactcgagcttttctgcagtttcaagaactttctttgccctttcattaggatctgaagtttctatcatggttgtggagctaagttcgggagctagggtgttgagaaggtaagcatatgcttcgccatccttaacatcagtagagaagtttgtcacagttttcttgtaccctgctttcttaagatgaaagttcatccatttgagcaacatcttatctggtgctaatgtgactagctcctctgcttccttgctattatcatcagccaccaactctgccaactgaggtgtcttctttaaattcagatcagctaacagttgtatctttatgatttgggataacaaaccaagaactagatgaggtctagcttcaatcaagtcctgtgtgccaatgttaacaacagtgcagccaatggcctttgcagagttaagacaaagggtgtgattctcattcctctcccacgggttagggtccttctttgtattgattgctctctcatcgattgtacccggaacagcgacattgatcaacttgcaaagtagaacaccatcccggacaagattaaatatatcatttgtggatggatccaaaggtaagaaattcttcaggaaagaatcctctcccaggaaattgttgatgtggttgacataagatgttttctcagactcattaatgacgtgcaagagagtagttgttgaggccttcaaaaaagacacagatcccttcaatttctttttgcctcctgttttgctgctcccctttgcttgaagatttaagtactccctgaggaatgactcgaactctattgtttggttcatatcgggataagactcgcctaaaaaagtgctaatctcttcctcagatagaacctcatggatgcccctaagcttctccattaccggtggcaaatcttttacagctacatgatccgcatccgatttcttcacggacacaaatttggtttttagagttcgtagctgcacttgggtgaactggctctgaagccatggatctgacacaagaaccccaacgaagctagacattgccttccaaaatcaatgtattcttgtccctaattatttctcacacaaattcctcaattcttgcagacctttctatcaagaaaagaaaatgggggcagatttcgcttcctcttccttcctcccagctctcgaaatcattcactccatacacattccttccagctcccgagcggacgcgtggatggtggggagggggacgtgtggttggattgcgggaagcc

SEQ ID NO: 29310 - DNA, 1151 bp, Oryza sativa
  Clone ID: PAT_MRT4530_33825C.1
agaccaaaacctccttctttgaagatagcgtgccattgtcaaacagcttcccaagtaaaccggcaattaattaaaccggcaatttctttaccgtgtacagtgtacacataagttagttgttacagtctcatcaagttgtcagattggagacaccatcttcgatactttcctcttcctcgtcctcctcgaagtctccttcctcgtcttcctcctcttcctctgcgagggtctcctgtggcactcgttcagggacttggtaaggtccatgtttctgcagactccaatacatgatgcttgcagtaagaaccaggatcatctttggattcacctccattatgtcctctggcaacatgaagagggtgcacccaagcttcctagcaacactgatggtgtaagtggcatttgatttcttctcttcatcatcctcccccttcttcaccatgctcaagtcaacatgcctgtggttaacagcgtggagaagctctaggaagaaaactccatttgctatgcttttatccttgaagttttcaatacaggatgttttgcctgattccttgaccttattatttgcccaaatgagaatatcagcatcggttatctctttgtctttggaatgggttctcaggttttttagcaattgtaggatactagtcctcatgagttgccacaggaaagctagaattagcttcttatttccttgaacaatgtcatttcctgaaatgttaaccacagagaattttaactcctttccgatttcgataacctggttgccgttctccacctttctaaaaggcataatgattggtggcttagaagcttgcttccagttaactattcctggagaaattttgtcaagaacctctaacaggacccatccagtccttacatcctcaaacaaattgttaacataagttgcaattccaaggctgttgatccacaaacgaaatgctctctcttccctggttgcttcaacgtcatctggagtgtcttgaacaacaggagccacattgttgtctgacaggccatttctgtggtggaatatttgagcaacaaaagccaagttgagatttgcagaaccctccacaatatctttagacgttacatatctagtacactcgagcttttctgcagtttcaagaaccggacgcggg

SEQ ID NO: 29311 - DNA, 921 bp, Oryza sativa
  Clone ID: PAT_MRT4530_33826C.1
atggcgggaagaggaggaggaggaggaggaggcgagctgcagctgctgggcacatggtacagcccgtacgctatgcgcgcgaaaatcgcgctggggctcaagggcctgagctacgagtacatcgagcaggacctcttcggcaagagcgagctcctgctcaagagcaacccggtgcacaagaaggtccccgtcctcatccatgccggccggccggtgtgcgagtcgcgcgtggttctcgagtacgtcgacgaggcctggcccggggccgcgccgccgctcctcccggccgacccccacgaccgcgccaccgctcgcttctgggcgacctacttcgacagcacgttcttcccgccgtggagggcgctgatgagggcgacgacggcggagcagagagcggaggccttcatgaacgccgtacctcaggtggaggtgctggagcgagcgttcgtggagtgctccaaggggaaggcgttcttcggcggcgacgccgtcgggctcgtcgacgtcgtggtcggcggcttcgtggtgtggttcaaggtggtggacgaggtggccggctccagcctcctcgacgaggccaagttcccgggcctggcggcgtgggcggagcggttcttggcggtggacgccgtccgggaggcgatgcccgacgccgggaagctcctggagcactacaagggatttctggctaaattggcttcgccagctgcgccgacctcacaggaaccagcaacccatggtgataaggaggccaagggagcgagggaggcgtggggacatcaaggaggccacaattgctcgacagggagatggaagtgcggcacagctaggctaggggaaagggagggggctgctcctgagctcgcggcagttaagagagagaatgaggcggagggggagattccgaggcataaaaactag

SEQ ID NO: 29312 - DNA, 504 bp, Oryza sativa
  unsure (1)..(504): unsure at all n locations
  Clone ID: PAT_MRT4530_33827C.1
gaagactccctgctaaggggcagaagaactctatgcaataaaagggtagtgctggagttatgtggcattgatacaaataactgatgagataaaatacattcagtgttgtatacatgtttgctaatgcacaagatataaagtgagaaggtgctaactaactgaactaaaactgacgattgttttggcatgcaagttcttttttttcccaaaaaaaaagaagaagagataataagacaataatcagatttcatatgaaaaagggacttgtaaagtgttgctaactttctaactatatatacctcttgcatgggttcaattgccgccttcaaatggtatactcctggtaattctgaaatcatcacaaaagaggctgtgctcttgtgaaaataaaaactcctccaccaccaaccgatcgccccaggagcatatcgcggtcaaggtaagaaagataatatagtcctccgggtgatctcctgaacgaccattaacaggaactngagctcg

SEQ ID NO: 29313 - DNA, 356 bp, Oryza sativa
  Clone ID: PAT_MRT4530_33828C.1
aaaaattttggctatcacaatgtaggtgagatagcaaccaaagagtttgatatcctcgctcttgatagttccaatgtccctgcttgggcaatggatgtcaaagttaatctaacaaccaatggactatacaaatgtataaataaaacagctgaagggaacgttgccccctctaacatgtctaaatacactgccttgaaagttatgaggaatcatatccatcaggatttgaaaatggagtacatgtatgaggacccatgcgctttgtggacatctttcaaaaatcgatatgaacatcataaagctactcttctcctagaggcaacgcatgagtggaaccacttatgcctacaggattt

SEQ ID NO: 29314 - DNA, 551 bp, Oryza sativa
  Clone ID: PAT_MRT4530_33829C.1
gcaaatttagggaccatttaattcagctcctagtagctgaattgggagctagctaattaacaggatgttcagagctgcgcagctcctcctcagggagacgaacagagctcttggggcagcaacttcgcctgcaggcttcgtcagtggcttctccacggcttccaactctgcgcagaggttggctggcaaggtggctgtcataaccggtggagctagcggcatcggcaaagcgacagccaaggagttcatcgagaatggcgccaaggtcatcatggccgatgtccaggatgacctcggccactccaccgcagcggagctcggcccggacgcctcgtacacgcgctgcgacgtcaccgacgaggcacaggtcgcggcggccgtcgacctcgccgtgaagcggcacggccacctcgacatcctctacaacaacgccggtgtcatgggcgccatgccgcaggacgacatggcgtccgtcgacctcgccaacttcgaccgcatgatggcgatcaacgcccgggcggcgcttgtcggcatcaagcacgccgcgcgcg

SEQ ID NO: 29315 - DNA, 661 bp, Oryza sativa
  Clone ID: PAT_MRT4530_3382C.1
gtggcgcggacgcacgccttgccgtcatgcaacgccgctccagctccatctgccccgccttgctgcgcggggggagggggccggctggagagtcgcggtggcctgtcggcaccagggcgaggcggtacagtcggtgctacgagcggtggagtgggcgagtgcccatggtgagcggccaacgtcacgagtggccggcgctgacgtcgtgagtggtcggcgctgtaagcggctggggcgctggacatggcaacgtggccggatgcgacgggcacgggtgcagctgggaactgttgcgcgattaggggcactttagtccctccaactaaataccacctagatacgatgggttcacgcgttgtgggggccgggcaacggcgccattcgactatgcggtggcggcgtgcggcgacgcccatcagcgccttttcctttttttttttccatttcttcctccttttcatggttccttgccatgtgcggcggtggagcaatgaggaatggtcggacggcgccggcatgaccgtgcgacgacgagggcagaggcacggcgtgagcgacggtagtgcgtgccaaggcgcgcgtgtgagcgccgcggtctcggtgtgggctgcccggcggcagccgtatgccgtggtggcgtggcacggcacggcgtgctgtt

SEQ ID NO: 29316 - DNA, 709 bp, Oryza sativa
  Clone ID: PAT_MRT4530_33830C.1
aagatatgaagcagactgttactacctccagcagaggtggtaatggtgctctccttaaaatctacagagaaactgctgaagcactggagaagtcagtcaagtcacgcattttaggactgtacattgtcttcatgcccagctaaggatattgttcttgaggcaccaaacttcatggtcactgatgagtgatgaggttaagctctaaatttctgaacaaacgatgattcaagacagtaaatggtggaatgagattctctcctgcgccagggtttcagaagcctgtctagtcgctcgcgcgcttgccaggcctgattctggagttcagagcaagttggatatctgtgaccatgagtccccatctatgcatgatgcaggaaaaccggttcatgtcttgaagacctggccatcaaattcactactatcagacttcgtcaatttctcgggtcaccacggaggagaaagctactgaattttccgagttcttcgccggtgaagggttcaaaccatcgttcgagagtgtgctgaagcaaagcctggagagggtccggatcagcccgagatggatcgagagcatcaggccttgctcgtacagtgcatgagctgcagcagcaggaaatgtaactttctgggctaagctagaagattttacacgcatggaagttcgtacaaaaaaaaaaaaaagaaaaaaaaactcggagactagttctct

SEQ ID NO: 29317 - DNA, 2556 bp, Oryza sativa
  Clone ID: PAT_MRT4530_33831C.1
atggcggaaactccacgccgaatccgccgcggcggcgccgggctctcgctcgtcgtcgtcgccctcctcctcgccgtcgcggcgagggcgcagcaggagtacgaggcgaaccagcagaacgcctgctacgccaccaacgcgagctccaccctcggctacacctgcaacgccacctccgcctccgccgccgccgcggcgccctgcgacgcgtacctggtgttccgctcctccccgcccctctacgcctccgctgtctccatctcctacctcctcaacgtcgccgccgccgccgtcgccgactccaacgccgtcgacccggtcgcccccgtcgccgccgaccgcctcgtgctcgcgcccgtgccgtgcggctgctccccgggcggctactaccagcacaacgcctcccacaccatccgcgacaccggcgtcgagacctacttcatcatcgccaacctcacctaccagggcctctcgacgtgccaggctctcatcgcgcagaatcccctccacgacagccgcggcctcgtcgccggcgacaacctcaccgtcccgctccgctgcgcctgcccctcgccgccgcaggccgccgcgggcgtcaagcacatggtcacctacctcgtcacctggggcgacaccgtctccgccatcgccgcgcggttccgcgtcgacgcgcaggaggtgctcgacgccaacacgctcaccgagagctccatcatataccccttcaccacgctgctggtcccgctcaagaacgcgcccacgccggacatgctcgcgccgccggcccaggcgccgccgccccccgcgcccgcgccgccgcgggcgcagccgccgcctggtgggtcgggcagcgggaagggagtcgccgttggggtaggcgtcggttgcggcgttcttgcgttggcgggtgtctttggcttgctgttcttctgtctccggcggcgacgcggcgttggggaagaaagtgttcgtccggggaaggtggtcggcgacgtgtcctcttcggcggagtacggcgccctggcatcggggaagcagacgacgacggcaacctcgatgtcgtcgctgtccgcggcgaggtcgctgatggcgagcgaagtgcgcgaggcgttggagtcgctaacggtgtacaagtactcggagctggagaaggccacggcggggttctcggaggagcggagggtgcccggcaccgccgtgtaccgcggcgtgttcaacggcgatgcggcggcggtgaagcgtgtttccggcgacgtgagcggcgaggtcggcatcctgaagcgcgtgaaccactgcagcctgatccgcctctccggcctctgcgtccaccgcggcgacacctacctcgtcttcgagtacgccgagaacggcgcgctcagcgactggctccacggcggcgacgccgccaccggcgtcctggggtggaggcagcgcgtgcaggtggcgttcgacgtcgccgacgggctcaactacctccaccactacaccaacccgccatgtgtgcacaagaacatcaagagcagcaacatcctcctcgacgccgacctccacggcaagatgtccagcttcgggctagcccgcgcgctccccgcgggcgacggcgccgccgccgccgccgcgcagctgacgcgccacgtcgtgggcacccagggctacctctccccggagtacctcgagcacggcctcatcacgcccaagctcgacgtgttcgccttcggcgtcgtcctcctcgagctcctctccggcaaggaggcggcgtcctccggcgacggcgagaacggcgaggcgctgctgctgtgggagtccgcggcggaggcgctcgtcgacggcggcggcgaggacgcggggagcaacgtgcgcgcgttcatggacccgcggcttggcggcgactacccgctcgacctggccatggccgtggcgtcgctggcggcgcggtgcgtggcgaggcagcccgccgcgcggccggccatggacgaggtgttcgtctcgctcgcggcggtgtacggctccacggtggactggaacccctcggatcacggcaactccgggtcgtcgctgattgggaggtaggaacacggcgaacacgccgagcgtctgctcgttcagcttctcgttgaacacgccgtcgacgtcgccgtcgccgtcgtctctgctttgcgcttgcgccggcatgacgtgcaccttcttcttctgcttcttgccgccgccttgccggtgtcgccgccgccgctgtggcctctcgccgacgagcgccaggctcgcgcggacggcgagcctgcccatagcgcgtcggagttgcacacgaagaaggacgccgcgtcgtcgccgccgccgagcacgtcggagaccaccgcgacgcagggagaggccggcagctccctcagcgagccgtcggccgcgatcaccctcgccggcggcggcggcggcgccggagcttccgactcgacgacgatgtcactctccggccggtggattaaggatgaagaagatgtatttatagagtggcaaaagcaaagggttggaccgggtgtctttccattattcaaaacaaaatag

SEQ ID NO: 29318 - DNA, 1239 bp, Oryza sativa
  Clone ID: PAT_MRT4530_33832C.1
atgtcggccgactcggtggccatgtacaccctgggacacatgtccctcaacagcgggttgccagagcagcagctggtggcattctgggcgcctttcctgctgctccaccttggtgggcaggacaccatcgcggcctacgccgtggaggacaaccggctgtggatgcacgacctgcagagttttgcggtgcaggtcgcggcagccggtacggtgtgggctctcaagtgcgcaaatgctaatgccggcaacgacgacaatagccgacttgtcagaggtatggatgtcattccagggcaacgcaaatcacgtcgtgccagaggacagagtagtgatggtgatgcggaaggcctgctactggaagctcacctactgttcgacatctgcaagcgcttgataaaggggccgggcgtggccgtagcatttcgagaagaccagcgccgcctgctggctgtttcactctcatcaacagctggccagtgccacagggaacagcagcaaagtcaacgtttccatcacttacatcctgttactcggggccagcatcctggagatcatttcggcgctgagggctctttgatccggctggacgtgggcgctcttgtgtcgacgggaattcgaccacgatccaaggtggtggcttgcatggggctccaagactggtggaacacaaagcgtcactcctggttcatctccatcccagcggctgtcatgcgcacggaggcgacaaacctcgacgacgaggtgggccgacaccgtggacgcgtgacgctccgtcgatggggtttgttcgaggaactaggctggagcgttggcaacgaggatgatggagatcaggcctcgtcattcgccagcagcatcctgctctggcacattgccactgatgtctacctcaaactgtacaggaaggagatcgaccaggacgaagggcagcgagctcttgtggaggccatcaagacgctcgccaactacatgtttttcctcctcgttgtacgtccccagatgctgcctgctggctccgtcgaacagcaacaacagtatgccaccaaactacgtgccgtggagcttggcaagagtgatttgttggcaggaacattttgcgcgtctttttggttatctgtatccaggattgtccgaggaatgattggcaggaagctatccacgtttgaacacgctccaaatgatcgctgcactttgggtggagttcctgtgctatgtggcctgcgaaagccaaacgcatga

SEQ ID NO: 29319 - DNA, 595 bp, Oryza sativa
  unsure (1)..(595): unsure at all n locations
  Clone ID: PAT_MRT4530_33833C.1
ggctcgngctagtggaccacgagtattgctgacccggcaacctactgaagggcgaagtcgtgatggaggcctacgtcttggtgagatggagcgtgactgtttaatcgcatacggtgctagcatgctaatctttgaacgtctactaatatctagtgatccatatcaagtacaggttggggggggggggtggcttgttaggctattacaatcataaactgaaggcttcctactgttccatgtgcananatggagaaaatatggccaagatgaggatgccgtatgcttgcaagcttttattccaggagctgcaagcantgaacgttgttccacgattgatgttaactganggataacttgaaatccgatggtcnngcagagctcaagctctgttggttcatgcttttgcggctntgaggcttgctgttctcctgtcgccgcctgctttgttcgtgtgttccttttctttttttcggatttgtgtttttctttggtttctgtcctgcggttttgttttctttcttttttttttttttttttgggggtttttcgtggtttcctgtgtttttttgtgtttcttttcctttctttttttttt

SEQ ID NO: 29320 - DNA, 630 bp, Oryza sativa
  Clone ID: PAT_MRT4530_33834C.1
ctatgcctcctcttctactaagctcaacgccctcttcagcggagacctcgccgccgccgccgccgccggcgcggcgcctctcgccggactcaggaacacggcgaacacgccgagcgtctgctcgttcagcttctcgttgaacacgccgtcgacgtcgccgtcgccgtcgtctctgctttgcgcttgcgccggcatgacgtgcaccttcttcttctgcttcttgccgccgccttgccggtgtcgccgccgccgctgtggcctctcgccgacgagcgccaggctcgcgcggacggcgagcctgcccatgtcggcgctggacagcggccggccgagcatcgccctgggcagcacgaagtagagctcccccggccggagcggctcgccgggggacagcgccggcgggcggtcgtcgaagtagagcgcgtcggagttgcacacgaagaaggacgccgcgtcgtcgccgccgccgagcacgtcggagaccaccgcgacgcagggagaggccggcagctccctcagcgagccgtcggccgcgatcaccctcgccggcggcggcggcggcgccggagcttccgactcgacgacgatgtcactctccggccggtagatgcacgaaagcttcgatcccat

SEQ ID NO: 29321 - DNA, 1473 bp, Oryza sativa
  Clone ID: PAT_MRT4530_33835C.1
atggcctgtgggtctcccagcactgaggtggtcgatgagttcgagaagcttgtcattagaatgaaccctccaagggtcactgtggataatacctcggacatgactgccaccttggtgaaggcaagcaacacttctctgttcttggttcttgataattcttgcaggagaggttgtcattcttttctgcaggtggacagtgcaaacaagtatgggaccttgctggaggtggttcaggtgctgactgaactgaagctgaccataaaaagggcctacatttcctctgatggagagtggttcatggatgtgttccatgtcgtggatcaggatgggaataaactttatgatggccaagtcattgacagaattgagctgtcgctgggagctgggtcgctgagtttccgggcgccgccggagaggtcggtggaggtggaggcggaggcggcggcggcgcagacggccattgagctgatcggtaaggaccggccggggctcctgtcggaggtgttcgccgtgctcaccgacctcaagtgcaacatcgtgtcgtcggaggtgtggacgcacgacgcgcgcatggcggcgctggtgcacgtcacggacgccgacacgctcggcgccatcgacgaccaggaccgcctcgacacggtcaagcgcctgctccgccacctcctccgcggcggcggcgccggcgcgcgcgaccggaaggccaccgcccgcgccgccatccccgcgccgcgccgcgacggcgcggcggcgcacgccccgcgccgcctccaccagatgatgcacgacgaccgcgccgccgccgccccccagccctcctcctccttcggcgacggcggcggccgcggccgccccgtcgtggaggtcgtcgactgcgccgagcgcgggtacaccctcgtgaacgtgcggtgccgcgaccgcccgaagctgctgttcgacaccgtgtgcacgctcaccgacatgcagtacgtcgtcttccacggcaccgtcatcgccgagggctccgaggcgtaccaggagtactacatccgccacctcgacgacagccccgtcacctccggcgacgaacgcgaccgcctcggccgctgcctcgaggcggccatccaacgccgcaacaccgaggggctgaggctggagctgtactgcgaggacagggtcgggctgctgtccgacgtgacgcggatattccgggagcacgggctgtcggtgacgcacgccgaggtggcgacgcggggcgcgcgcgcggcgaacgtgttctacgtggtggcggcgtcgggggagcccgtggaggcgcacgccgtggaggcggtgcgcgcggagatcggcgagcaggtgctgttcgtcagggaggacgccggcggcggcgagcccaggtcgccgcccggtcgcgatcgccgatccctcggcaacatgatcaggtcacggtcggagaagttcctctacaacctcggcctcatcagatcgtgctcctag

SEQ ID NO: 29322 - DNA, 1607 bp, Oryza sativa
  Clone ID: PAT_MRT4530_33836C.1
ttgctctgctgctggaggaacctcagcgactatttcaaagtacaccggagcgtcgggagagccggaatcggggaaggggcgacgcaccacgtggcgcttacgtggcaccgacacggcggccacgtggcagccacgtgggcagcccaacggacggccccgatctaccgcccggtagatcggatggcggaggcggctcgcggccgggtggccgtggcgtgcggcggcgcggcgcgacgcgtcggcgacgcaaggcagcgagcggccgacggcggagagcggcggcgaccgacgacaaacggcggtgcacggcgagcgacggcggcgcggccccgagcggcaaggcagcggcactaagagggagaaggggaaagacgatggggcgatgctcaccggggttcggccggcacgaggggacgacggcgaacgacgacgaggaatgaccgggggacgacagcgaacggcggacggtctccggaaccacctagcgaacaagatgagaggggttagagggagagaggaaaatgggagagggcgaggacgccggccgaaggcggcagccatggcggcgcccaccggcgcacgggcgaagagggttccggcggcggattccgacggaggagagatggacgggacggcccgcacgacggcgagcgcaacggcgtcgacggcgcggctcggcacgacggctagcggcggcttgcggcgaccggagcggtggcggcggcggcggagaggagggcgatggcgctagcgcggtggagggcacgggggaactcggcgaaatgtagaaaaagagagaggggagggcggtgatgcgcgggcgcgagcgggaaagagagggagtgggcgcggaagacgcgggcgcacgcgcgggcatggccgacgtggcgcggggaaagcgggcgcgggcggttgcgaggcggcggctgtggacggcgggtggccggaggtgggagacaggccgaagggaggaggcggccggctcagctgggccttggccttcggccggcccagcgggaagggaccctagcttggctcggcgcggtggcggcgccgctcccggccgccgcctcatcggcggcggcggcggcgcccacctcctgccggcctccgcgcccacctcgttgtcgtcggttcccgtcggcaccacctcccgtctgcgccgcctcccaccggcctcccgtctgtaccgccgccgacgcccctcccctccgtgctggatccctgcggtgacggccgacgcccaccagatcccacgcctccaccgccgcgccgcgcctccaccaccacgcagtatgccgtccaccattcacgctgtcggcaccatctcctccggcgttgtcgacgtcggccttgagcccacccactgcctcgggagtgtggaatacatgaatatcaagctctcttatgtcatcggtggcagtgctactctgggaattcgtaaacttgatagttccatgcgcactagcaaatgttccagtcccacccgtaatggaccactgaccattgggtttgacacccaagagcccaaacacctcaattgtggacccagctggtggtggtttgaccagcttggagatgaaagccttgtagacgtccaacaacat

SEQ ID NO: 29323 - DNA, 209 bp, Oryza sativa
  Clone ID: PAT_MRT4530_33837C.1
atgcggcaccggctcgctcccgcagtcagacgcaaccactgcgtcggtcccgcggaccagctgcgcggcaccgcgcgggcaggcctgcgtgaccgcgccgggtgccgggctgttgcgcgcgggtgcgggagcgtcccgcgagggagcgagggtcccgcgtcctcattccacgggagcgagcggtcccacgtccccgttctgcgggagag

SEQ ID NO: 29324 - DNA, 344 bp, Oryza sativa
  Clone ID: PAT_MRT4530_33838C.1
ttaccatacaagtaaatttgatgacatggaagaaagagaaaagagtatggttcttatgcatgacaacggctcagagtcggctcttagcatttattagagaaaattttgttgcatgatataactggtggacccttgtagcggattctccaagcaccccgcgcaccctcaggtccctagtgatcttaatctcgtggaaaatctggtgcgaacaaaatacaagaatcttccgcaacaatgcatctgcgctgtcctcaattctagtaaagatcaaggaggaagaaagagcatgggccaaagcaggggctgcaatcctacaggagtttggaattttgggagatatcact

SEQ ID NO: 29325 - DNA, 333 bp, Oryza sativa
  Clone ID: PAT_MRT4530_33839C.1
atgacgactgatgaggaattgaggaggaagacgacgacgtacgacgcctcaagctgttacatttttggatggttcgagctgcagcagcgaagcgccccggccgcgcggcgtgtgagcgtggcgcgtggtggtggtggtggtgcgagcagtgcagtgcagggcaagggcgcgcgcgacgtcgccgtggctgccacgattgttgtcgtcaccacccgccgaagcccacgctcgagccgaatcgcagtcaccggccgcatccagatccacctccttgaccgctgtggaggactgctcacgcccccgccacctgagcaccgtccgccgccggattag

SEQ ID NO: 29326 - DNA, 1704 bp, Oryza sativa
  Clone ID: PAT_MRT4530_3383C.1
atggacgccgtcgcgttcccgccgccgcccgccccgttcctcgacgacgacctcgatttcggcgacttcgccttcgccgatccccagcccgccgccgccgccgccttcgacgccttcggcgcctacgacgacgactggggtgacttcgtcgacagccgcctcggatccaatccggatggtggctcgtcggcggcggccccggcggagaagccgccctcctgggagaagccgcggggcccgctccccctctccctgttcggcgccgacgaggacgaggaggaggaggagggaccggccgagctgccgccgacggctgcggatcagcggggagcgtcgcacgcgtcctccaatggatcgaagccggctgatctcaaggacctcatcgccggcctctatggatctcacccgcaaccctcctccaccgacgccgcggaggtgggtacacaggaggggtcagcggtagcggcggcggaggaggaggaggaggatggtgacggattcgaagatgatggctgggaattcaaggccgcggcgccttcttcttcgtcggatgctgtacaggatggcggcagacaagcccatggggatcttactcaggatgtaccaaagtcaatgagcagcgaccaggagggctggtcatcatttactagtgttagcgaaaatttgaacaatgttcaaactacagatcatgttggaactcatgaaaaccattcaattaaatcagcaagtgataggattttgattgatttctaccataagctgagagaagaatcattgacggtaatatcccagtacaagaaggatcttaaggaaagccagaagaattctatgctttctgatgaaaagaatgaagtgatgacagaaactgaaagggagattcaggaaatttgcaaggaattacaagattcttcacttgcgaaaggtttttgcaaagatgaacatccttcaaaggatgtttgcatttctgagctgcttaacagtgccaaagaggatcatttgaaggattttgataaagaataccatttaacagaaataatagcaatggcactggaagacatgagttcagctgttaaactctataagcacagcgtgtcaatccttcgtaccttggaaatagcatccaaagaggagcaatgtgattatgtcagtgcatggtacagtatgcttctgtcctgtgcccaagaattgcagcatggtgcgatgatttggcaggaatcttgtcatgcaaatgttggcgaaacagtaatttctcaaggtgctcattactttattgctcttggggagatctacagagttgcacagatcttacatatatccatgctatctttcaagccttgggttcttgcagatcctggaatgttgagtaaaatgttggtttgttggaacagctgcgttaattcatggactagtggtttaggaatggctcttacaatggttgtcgacagcaagaacttacatgcacctgttgctaaagttcttctcgagtctatcatcaatattaatgacattgaggtgcccaatcttcaaagcttccttcccagtgacaagatggcatgtaaacttaccctcttgcccactagtcttgtacctggaatggaggtcatcatttgggatgccgatcactactttgttaaagttgcaaatctgtgggctaatcagatatcttctgaccctccccagttttcagtctctcgtgttgcttaa

SEQ ID NO: 29327 - DNA, 432 bp, Oryza sativa
  Clone ID: PAT_MRT4530_33840C.1
caagttgtggcgtcgccagagattgtggcgagagaaataatcgccacagctgtggcggaaataagcatgcaaatgaactagcaaaaagtgtggctgccacaactcacgtattaaccaaacatcagtcaaactgtcgtggcagccgcatgtttggcgaggcaatgtgtggcagggatccaaacaccccctcagtaacaaccatgtacattgcaagctgcacagtgtgttgaaatcttagttgcatctgtgtgagctcgtttgtaaatctggacggctagttatccaggacggtagagttcaagaactcgacttcctcagaaggattttgtttctgccatttgtatatttattatctgatcttgcatggaccatggcaaggggcgggttgatttgatgcatcaactgatatctcttcgtgcccctgatgtgatt

SEQ ID NO: 29328 - DNA, 291 bp, Oryza sativa
  Clone ID: PAT_MRT4530_33841C.1
atgccggaggtgctgcagatcctgtccgggtcggcgccgccgcccgaggtgccgcagctcaagccgtcgttcgtgtggccgccggatggcggcgccagcgcgcactacgacctgatcgacatcggcgccctcgcgagcggcagcctcgccgccggcgggagcagcgccgccgccgccgccaccgccgccgacgacgactcggcgcgcgccacgcgggacaccgcctccgccgggttgcggccgccgaacagcaccggcgatttcttccccgcgctctcctccggccgctga

SEQ ID NO: 29329 - DNA, 629 bp, Oryza sativa
  Clone ID: PAT_MRT4530_33842C.1
gcccataaggcgtctttgtactcgcctctgtccgggccctcctccgtcggcgttcgccgccgttcgtgtctcgccgacaccgccgccgccgtgagggagtgcatctcgatccacatcggccaggtcggcatgcacgtcgggaacgcgtgctgggagctctattgcctcgagcatggtatgcagcctgatggacagatgcccagggacaagaccaggggcggaggtgatgatgcttttaacaccttcttcagcgagactgctgctgggaagcatgtgccccgtgctgccttagtcactcttgagcctaccgcgagggctgaggggaggactggggactaccggcagctcttacaccctgggcagctcatcattggaacggaggatgcaagcaacaactttgcccgtgtcactacaccattgggatggagattgatgatctgtgccttgaccgaatgaggaagcttggcgacagctgaactggtctacagggctcacttgtgttcaacgctgttggaggaggaacggactgcgaacttggatgccttgttcttgagcgtctctctgaggactatgggaagaagtccaagctcggagtcaccgtgtaccagcacggtcagggctacacctct

SEQ ID NO: 29330 - DNA, 414 bp, Oryza sativa
  Clone ID: PAT_MRT4530_33843C.1
atggagccgcttccagagaatggcgtgcaaacctcacaagctgaagtgccagctgctgcatctgagccagccaaagttgtagcagcagtggccgatgagatgcccgattctacaacttcagtgccactccctatcactgcagctagacatactgcctcaacaaggcgcccatgctatggatggcttattgagagtgaatccgaggatgatgaattggacaatggagtgtcagctgttgagcaatctaatcctccatctgctacgaatcataagatgagtaatggatggtcatatgttgagcaagcaaggccttcagttgctatgagacatgaaatggaaccatatactcatcatagagggatgctctcaaagaggaggcggccgagcggatgggatgtgcgcccatcctattaa

SEQ ID NO: 29331 - DNA, 267 bp, Oryza sativa
  Clone ID: PAT_MRT4530_33844C.1
atgtggggaggaaggcgtgcaaaggaaagagggcggagcggcgttaacgcgatgcgtagcggcagtgccggtcagcaacggccgcggatgttgcggaagtcggcgccgtgccgagaatcggcccggtggcggcagcagtggagtggcgtcagcgcgatgcgtaatggcctaatggggatgccggacatgatcgcccacttttgtatgcttgaagcacatgatcttgcaaagttccaggcattatacctaaataaatatacctactaa

SEQ ID NO: 29332 - DNA, 996 bp, Oryza sativa
  Clone ID: PAT_MRT4530_33845C.1
atggtgaaagcaagtatgaagccttattttgtcgccatcgtcgtccaactgatctacactggcatgtttgtgatatccaaggctgctttcaaccacgggatgaacatctacatcttcgtcttctatcgccaggcagttggctccctcatcttgctccctgcagctcttctacaaaggagaagtgcacggcctgccatgacacttggggtgctcataaagctcttcttctgtgccttaatcgggattacgcttggggtaaatctgtaccatgacaggacggagtatgtgaagctgaggagctcttcaggcatagccaaggtcacaagtgtagcactctgcctagctggagtcttcaccatcgtcttcttcaccggcccatccataagccctatcaaccatcaccgtgccttcgcctctgacacaagctcgaaaacagtagttccgaggggtgtgtggatcaaatggacattccttatggctgcggtgcaaaaggaatatccagataaaatggttgtgactgtgactcggtgcctgttcagcacgatgcagtcgtttgtcgtcgcggtggtcgcagagcgcgacttctccagatggaagctaagattcgacattagcttgctcgccatcctatactcgggtgttatggtgacgggagtgtcctactacctgcaaacgtggtgcctagagatgagaggccccatgttcttcgcctcctggacgccactctgcttcgtgttcacaatattttgctcatccttctttcttggagagattgttcacctcggcaacatcttgggtggaattttgctggtcgcaagtctttacaccatgctgtggggtaagagcaaagagggtaatgagactgatgatgtcactgatgacgatattgagaaatctacacatatctaccccagagagcaacaacatactacaacagatcaggccaaagaatcgatgttgacaagctcggcagctttgcatgtccaagaactataa

SEQ ID NO: 29333 - DNA, 416 bp, Oryza sativa
  Clone ID: PAT_MRT4530_33846C.1
acattacatgatacacatttttgaatgtttccttttggcacaaatttgtaccaaattatgaatgttgtttacaagaggggggtaatgatataatatcatgtctgcaaaagaacacatcaatttaaaattcgcaacaactaagcacatgggggctgcacctccagtatcctttcctgtgaaaatggggctccaaggtgacacacgttatggtgttagcgtatactgctctggggaaaataatgttctttgccagaattctccccagaatgcgccgaaagaattccctcccagtatctacgggcaactcaacaggcgctcgagatctgtatgcccttgatttgtgctttgagacactccgattcctcaccagttatattcaccattctagctgggttttggacaacttcagacattgg

SEQ ID NO: 29334 - DNA, 1308 bp, Oryza sativa
  Clone ID: PAT_MRT4530_33847C.1
aatattatatggtaccttgccatttgtttttattcacacttgcaatttacgtgatattatgcttcatcttcgtgaaaaatcgagtatttaaattttacaaaccaaaggagaaaggtcatttaaatacttatgtataattacatgacaggatacataagtattgctcctcaaatatgcataactctttattagctaccatccaaatacccaaacaaacatatctgccgtataaacatgacatgccacccaacttatcgatgatctgaaagcttaattacttggggttgaagagaattactatggcacggccagaaatggtttgaaggtccaaatgagttccaaaaattcaataataatcaaaatgaagaacaccatttggtcacctggaaagaaaaatgcatgttggcgtttttgtgcccacgaaaaatggtgaaagcaagtatgaagccttattttgtcgccatcgtcgtccaactgatctacactggcatgtttgtgatatccaaggctgctttcaaccacgggatgaacatctacatcttcgtcttctatcgccaggcagttggctccctcatcttgctccctacatttcttctagaaaggcataccaaggtcactagtgtagcaatctgtctggctggagtcttcaccatcgccttcttcaccggcccgtccataagccctatcaaccatcaccgtgccttcgcctctgacacaagctcgaaaacagtagttccgaggggtgtgtggatcaaatggacattccttatggtggtcgccaacatgtgctggtctttgtggatcatttttcaggctgcggtgcaaaaggaatatccagataaaatggttgtgactgtgactcagtgcctgttcagcacggtgcagtcgtttgtcgtcgcggtggtcgcagagcgcgacttctccagatggaagctaagattcgacatcagcttgctcgccatcctatactcgggtgttatggtgacgggagtgtcctactacctgcaaacgtggtgcctagagatgagaggccccatgttctttgcctcctggacgccactctgcttcgtgttcacaatattttgctcatccttctttcttggagagattgttcacctcggcagcatcttgggtggaattttgctggtcggaagtctttacaccatgctctgggacttgcggtgcacgccgagcacctccgagcgctgccgtgcgccacgggtcttcagaatgcctgctcctgctggagcaaatgccttgaagaaggacattaaagtggtggctaagccatttgcggttgctctttga

SEQ ID NO: 29335 - DNA, 1140 bp, Oryza sativa
  Clone ID: PAT_MRT4530_33848C.1
gccgaggcctgtatcgagatggtgaaagcaagtatgaagccttattttgtcgccatcatcgttcaactgatctacactggcatgtttgtgatatccaaggctgctttcaaccacggaatgaacacctacatcttcatcttctatcgccaagcagttggctccctcatcttgctgcctgcagctcttctacaaaggaaaagtgcacgacaggtcatgacacttggggtgctcataaagctcttcttttgtgccttaatcgggattacgcttggggtaaatctgtaccatgtaagcctcaagttcacctctgcaacggtggcatctgcagtagacagctcactcccagccatcaccttcttcttggcagtgcttttgaggacggagtatgtgaagctgaggagctcttcaggcatagccaaggtcactagcgtagcactctgcctggctggagtcttcaccatcgccttcttcaccggcccatccataagccctatcaaccatcaccgtgccttcgcctctgacgcaggctctaaaaatgtagttccgaggggtgtgtggatcaaatggacattccttatggtgatcgccaacatgtgctggtctttgtggatcatttttcaggcagcggtgcaaaaggaatatccagataaaatgattgtgactttgactcaatgcttgttcagcacggtgcagtcgtttgtcgtcgccgtggtcgcagagcgcgacttctccaaatggaagctaagattcgacatcagcttgcttgccatcctatactcgggtgttatggtgacgggagtgtcctactacctgcaaacgtggtgcctagagatgagaggccccatgttcttcgcctcctggacgccactctgtttcgtgttcacaatattttgctcatccttctttcttggagagattgttcacctcggcagcatcttgggtggaattttgctggtcggaagtctttacaccatgctgtggggtaagagcaaagagggcaatgagactgacgatgtcaccgatgacgatattgagaaatctacacatatctaccccagagagcaacaacatactacaacagatcaggacaaagaatcgacgttgacagggtcggcagctttgcacgtccaagaactataa

SEQ ID NO: 29336 - DNA, 184 bp, Oryza sativa
  Clone ID: PAT_MRT4530_33849C.1
gcggactcttctgtgccaccgaccaccgctcaatgctagtcagcttctacacctaccgacagagacgggactccaagaccattaactacatggataccgggaggtcacatgcatctgccttcttcacgttatcctccgatccaacagatgcccgactccatcgagtacataacacgggaaggat

SEQ ID NO: 29337 - DNA, 231 bp, Oryza sativa
  Clone ID: PAT_MRT4530_3384C.1
atggacatctctagggcaaatgaagactacacgggctgcggctcggtagtcgagatatcatggcacatggtcggcatcacgaagatgatcttcgcgctcccaagtggcttcatctggggtatgattactccactgaaccttaaagaatttgatagtgtgccttctagtggtgcgctcaatttcatcaagaatgcgaatcgggtgctcttgataagaaagatcgggttgtag

SEQ ID NO: 29338 - DNA, 513 bp, Oryza sativa
  Clone ID: PAT_MRT4530_33850C.1
atgggcgtcacgcctagagagagaagacggtcggtggccaggttcctcgatgaggagaggatggaggtgagggagagggagctgatgagcttgagcgatgcatcgtcccatcttggccgttgtgttcttcggccgcaccctgtcggtcgcgctcgcattgatggcaacctctcttcctcttcccttatacaagcccgagagcgtcggtggcgcgatgcccagacaggctccagctccgccctcaccgtacgtcggaggaggcggaggaggggactgagccacgtcaggggccacaaccagaagtggatgggggaacgaagaggggaggagggggagcaaaagtgcggccctcactcaagtctagggcggtggagttgtgttagcggtcgtcttcttccccagtcgtcgtgcccgccttccatctcacgaggagagaggtttccaaccctccaacagaacatcatgtatataaacctaaccgttaatttggcatgttccttctacagcatgtga

SEQ ID NO: 29339 - DNA, 1722 bp, Oryza sativa
  unsure (1)..(1722): unsure at all n locations
  Clone ID: PAT_MRT4530_33851C.1
atggtggtggctgacaatggcaagtgggcgctggagaaggctcgggcgctgcaagatttggaggaggaattcaaccaacagattgcaaggattctcagctgctaccagctacctgaccacatcaggctggatctccatgagcagcaccgcaatgactacaaggtgcctgacgatctccggctcaagttcgtgaatgccgttttcgaggggaaatccgggatgcttgatcaagacgaggaactcagggttcaggctcggaaggaatccgagaagttttgggtggaggcggcgggggcggcgaagaaggcgcaagcactacaagacatggaagagagaaacaggcaattgttctttaagcattatcctggcgtgcaagacatgcctgaccacattagggagtactgcttcaggaaattcatggaagatgccagggatgaggtagaggtcagattcgggatacgtaatcacgaaatgcgactcaggatccgagcttgggaggaatcgcagcagtttctgatcaagacaatggccgatgggcgggcagccaagaaagtgcagaccttgcaagatgaggagaagagatatgttcagggtgttaagaaaacttttgacagcgaaaacatatctgagtacttccaacaggctttcttccagcaaggcctacttgataatatccggctgcttttcatagatgatatagaggaganattcaatatgccagtgacgaagagaaacctaagggccttacaagatttggaggacaaattcaacccacagactgcaaggattctcaagcgttatgacctacccgagcacatcaggctggatctccaggagcaacactacaacaactacaaggtgcctgacaatctccggatcaagttcataaatgctgttttcaatggaaatccccggatacttgatcacaagagggagctcaaggtccaggctcgcaaagaagcagaaaagttttggatcgaggcggcggcgacagcgaagaaggcacaagcactacaagatttggaagagagatacaagcaacaatttattaagcctagttatgacagggaagacatatctgagcacatgcaggagtatttcctcagggaaagaaagataactgacaaggcctatctcgagtacaagaataatgtagaggataaattcgcgatacgtaaccacgaaatgcaattgaagtttctagcctgggagaaaacacagcagtttcggattaagatgatggctgatgagcgggcggcgaagaaggtgaaggccctgcaagatatggaggagagatatgttcaagattatatcaacaaggttgaaagactagatgtacctgactacatcaagcagggcgttatccaggaatacaaggtacctgacggtacccgactacgttacataaattatatcgaggagaaattcaggatgcttgatgaccaagaggaacgtaaggttcacatttgggagaatttcaaaaagttgaagatccctctcacaataaagtctcccatcactgtcgctatcatgttctcgattggcatcatgatcttgttctccggcttccttgtccccaagatgcccaaatcgttgaagatcatgtgttgggcgacttcaattgtcatctgctttgcggccgtgctcagctacgataatgaaagctcgaagaccactgccccaactgaaatgcatgatctggaaaatcctccaagtatttaa

SEQ ID NO: 29340 - DNA, 276 bp, Oryza sativa
  Clone ID: PAT_MRT4530_33852C.1
gggcccaacactttatcacaaaaggcatggccgttcggcccctcggttacccaaaaagcagccaagggcgccttgattaccaaagccggcccaaaaatttggggggtggccttcccaagggagtttccgagagggagagagccccccaggtcgggcccttatttaggtatcgttcctttgccattgccaggcgtaaaaaggttttagttattttgggacctccaggctgagggtctttttggggggattggcctttttctccaaggtcccaagcgg

SEQ ID NO: 29341 - DNA, 2153 bp, Oryza sativa
  Clone ID: PAT_MRT4530_33853C.1
ccgggctgcaggagagaactagtctcgagtttttttttttttttttttttttttttttttttttttttttttttgtgttttttttttttttttcatcagtctgatagtatgtcattaacaggctcatagcatatagaaatacactgaagtctaaaatttcaagcacaagactgtaaacagctagacttaaagcactagaacaaagaacttgtttaccttccaaataaaaaagaacttgtttttccacatagggatggaacgagttctcagatgacttcttattactaacaagttcttattactaaccgatctgttaaatagcactatttcctatctaacaatagattacacagggatggaactgtatgccagttaaatggcattattcagtattaaatacttggaggattttccagatcatgcatttcagttggggcagtggtcttcgagctttcattatcgtagctgagcacggccgcaaagcagatgacaattgaagtcgcccaacacatgatcttcaacgatttgggcatcttggggacaaggaagccggagaacaagatcatgatgccaatcgagaacatgatagcgacagtgatgggagactttattgtgagagggatcttcaactttttgaaattctcccaaatgtgaaccttacgttcctcttggtcatcaagcatcctgaatttctcctcgatataatttatgtaacgtagtcgggtaccgtcaggtaccttgtattcctggataacgccctgcttgatgtagtcaggtacatctagtctttcaaccttgttgatataatcttgaacatatctctcctccatatcttgcagggccttcaccttcttcgccgcccgctcatcagccatcatcttaatccgaaactgctgtgttttctcccaggctagaaacttcaattgcatttcgtggttacgtatcgcgaatttatcctctacattattcttgtactcgagataggccttgtcagttatctttctttccctgaggaaatactcctgcatgtgctcagatatgtcttccctgtcataactaggcttaataaattgttgcttgtatctctcttccaaatcttgtagtgcttgtgccttcttcgctgtcgccgccgcctcgatccaaaacttttctgcttctttgcgagcctggaccttgagctccctcttgtgatcaagtatccggggatttccattgaaaacagcatttatgaacttgatccggagattgtcaggcaccttgtagttgttgtagtgttgctcctggagatccagcctgatgtgctcgggtaggtcataacgcttgagaatccttgcagtctgttggttgaatttgtactccaaatcttgtaaggcctgcgccttcaacctgttgtaatcctccgaaatgtaacccttaggttcctcttcgtcatcaggcatattgaatttctcctctatatcatctatgaaaagcagccggatattatcaagtaggccttgctggaggaaggcctgttggaagtactcagatatgttttcgctgtcaaaagttttcttaacaccctgaacatatctcttctcctcatcttgcaaggtctgcactttcttggctgcccgcccatcggccattgtcttgatcagaaactgctgcgattcctcccaagctcggatcctgagtcgcatttcgtgattacgtatcccgaatctgacctctacctcatccctggcatcttccatgaatttcctgaagcagtactccctaatgtggtcaggcatgtcttgcacgccaggataatgcttaaagaacaattgcctgtttctctcttccatgtcttgtagtgcttgcgccttcttcgccgcccccgccgcctccacccaaaacttctcggattccttccgagcctgaaccctgagttcctcgtcttgatcaagcatcccggatttcccctcgaaaacggcattcacgaacttgagccggagatcgtcaggcaccttgtagtcattgcggtgctgctcatggagatccagcctgatgtggtcaggtagctggtagcagctgagaatccttgcaatctgttggttgaattcctcctccaaatcttgcagcgcccgagccttctccagcgcccacttgccattgtcagccaccaccat

SEQ ID NO: 29342 - DNA, 579 bp, Oryza sativa
  Clone ID: PAT_MRT4530_33854C.1
gcacgaggacaaacattgatttgtcagtcaatgagctaaaacctgtgcaattggcttggaactaggcgatctgtgccctctggacacaaatgccatcattctgggagactaataagtcataactggagccatgggggcatagctaccttttgtgggttatctttgggacctgcttctaccggaaaacatcaagacatgtgatttatgctgtaggtgcatgagaagcttcaaactctgtatgatgcatacttatccatgttggtttgtaatagcagcccacaaattcacttgtccgtaaccagtttgaccgataatggcagggcttgaatgttcatgcaactacccacttgcacaatatggatagtaggagtacaaaaggtaatttaccatcccatcacaaatcatagggatgattttaatggaaggttctactttctgtttagcttgcacatgttctatcacatatactggtagttatgcatctgtaattctattccacattcaatggaagtctctttctgtttagaatgcttaatgaaccaatagagatgaaagtattgagatcatgagttgtgctta

SEQ ID NO: 29343 - DNA, 721 bp, Oryza sativa
  Clone ID: PAT_MRT4530_33855C.1
ggctcttccacccgcagcaaccgccccccgccgctctgccacttcccacccaccccactaatccactataaatacgcgagcgacgtcagacccgacaggggggaatcgcctcctcctcctcctcgaccccggaatccaggaagatggcgctcgccaaggccaaggagaccgtcgcctccgctcccgtcgtcgtctacagcaagtcttactgtcctttttgcgtccgtgtgaagaagttgttcgagcagcttggagcaactttcaaggccattgagttggatggggagagtgatggatctgagctgcagtcggcacttgctgaatggactggacaaaggactgttccaaatgtcttcatcaatgggaagcatattggtggctgtgatgatactttggcattgaacaatgaagggaagctggtgcctctgctgaccgaggctggagcaattgccagttctgcaaagacgacaatcaccgcatagttcttcgtgggacactgggactagccttcgttgacctctttatactgcatccattctattagataataaaggtggatgtttgtttggcaagaccattacttgttgccgtctagtatcgtgtgatagctatcctgtgcccgtgtgaaactccttggacatcaataatatcgtctttgtgatagcagttcgctgaaaaaaaaaaaaaaaaaaaaaaaaaaaaaaaaaaacctgcagcccgg

SEQ ID NO: 29344 - DNA, 385 bp, Oryza sativa
  Clone ID: PAT_MRT4530_33856C.1
tcgtctcaacctcgactgctttcccgccggcggcgtcaaggtctgcgccggcgtgcgtgcgtaccaaggccaccttcacccctgcgctgttgactaccacagccgacgcgtgctgagcttggcggcctaggcgatcgaggagattgcggtggatgagcggaccatggtcgtcgtggaggccggtgcggacacggtaacacatgcataagtggagcggagtcaaacaagcactgatattattagttgattaaacagacttgaccgatctcgtgaatggccttcaagccttgggggcttctattatttacactggtggtacactatgaagtatggaagcagttggagtggatggtactaaagtttaacataataacaaaattttctg

SEQ ID NO: 29345 - DNA, 513 bp, Oryza sativa
  Clone ID: PAT_MRT4530_33857C.1
aaaaaaggcaacgcctcatttgaataatttggacaagttacaacgcaaaaaaaccattgagttggaacaaatcgggacttacaaagggggggggggagctcatcaggcacaaaaaaatcctctcaaggaaaagaacaaaattgctcaccatcagggaaaagcactttttttccaccgaaaggtggttttatgttccaccaaaacaaaatcaaccagatcaactccctaattggtcactaaccaaagcaattttcccatttactggagcaaaaaaaaaaagcaaaatcattttgctattcacctcaagaaaaaaagaagttttacattggcatggatgggtcctgccccaaaaacaaaaaaaacgcccggtcggggatcctggccgaagccaagcggcccaagggcatttcctggtggacctcgtcaacgttcgggaaaggggggggcgccggcggcgcccccgaggaaataaacggggaaaacctgctggggctgccgctgccgctgacaccg

SEQ ID NO: 29346 - DNA, 240 bp, Oryza sativa
  unsure (1)..(240): unsure at all n locations
  Clone ID: PAT_MRT4530_33858C.1
ccgccccggaccccccacgcctncccaggcgttgatacatgttgctgacccaacaagcgtggttttaccccggagcatcattttcaggggggcaatgcgcagagggacctctatctttttaccaactgctaccttttcaatgttcccagagaggggtgctatgaatgctctgagcccgtaacaaggggggggttgggaatctgggactgtgtctgtgattttgccccccgatgggagtat

SEQ ID NO: 29347 - DNA, 428 bp, Oryza sativa
  Clone ID: PAT_MRT4530_33859C.1
ttctactttggatttgaagatgatgtcatgtatcctagctatatggttttgtttacaacctttctcggattggctctggtaaggagattatctgttgatcagagagttgggccaaaagctgcttggatcttgacttgtctttattcttcaaaattatcaatgttatttatcacatcaagatcggtgctatgggtttcagcggttttgctactcgctgtcactccccccttgcttctttacagagacaagtccaaaggggcttcaaggatgaaagtctggcaagcttatttccatgcatctgtagtagccttttctgcatggctctgccgggaaacaatcttcgaagctttacagtggcggaatggaaggcctccttcagatggcctacttttgcgttcctatattctgttgacaggtcttgcttgcat

SEQ ID NO: 29348 - DNA, 824 bp, Oryza sativa
  Clone ID: PAT_MRT4530_3385C.1
ccggccgggggcctccatcggtatataagccccagatttcgaattcctctctgcggctgcgctttgctcctcccctcaatcctcctctccgctctcgctctcagtctcagatcaggagggaggggatcgatattcgatcatcgatggccaccttcgagctgtaccggaggtccaccatcggtatgtgcctcaccgacacgctggacgacatggtctccagtggggcgctcagccccgagctcgccatccaagtcctcgtgcagtttgacaagtccatgactagcgctttggagcatcaggtgaagagcaaggttactgtcaagggccatctgcacacctacaggttctgcgacaatgtgtggactttcatcctaacagatgcaattttcaagaacgaagagattacagagacaataaacaaggtgaagatcgtggcctgcgattccaaattgctggagactaaagaagagtaatttgcggaagagcccatcctgcttctcttgatgctgcagacctggcgcacctgaaatataatcttgcatctgttttcctggctcgtatcatgaatctgaacagtttccatggtaggagtactagagtatcatgttcatagtttctgtctgccatccgcatcactcatggatcgatttctctcttctctgttgagtgatggaccgatttctctcctctgttgataatgaagagtgtgatgtgtgacatgagtgtgctctgtacctaatcatgctctcgccgaaggcagacctaacatttgaattctaaatctttgaacaggatgttcagatttaaaaaaaaaaaaaaaaaaa

SEQ ID NO: 29349 - DNA, 1380 bp, Oryza sativa
  Clone ID: PAT_MRT4530_33860C.1
atggacgtcgacgacgacgacgcgaggccgacgaaaaggccgcgcgccgccgccgcgccgccggcgtggtcgcgatcatggtcggacctcccggtggagatcgccggcgagatcctcggccgagtcccgtccttcgccgaccgcgcccggttcagctccgcctgccgccagtggcgcctcgccgccgccgagctccacggcggcgccctccccccgccgctcccgtggctggtctcctgctacaagggcgccttcgactccctcccctacggcgaccgccactacctcgccctcgactcgccggcctgcctcgcctgcgacggcggctggctcctcttcgatcgccgcgccgccgccgccgtcgccggcggcggcggcggcggcggctacctcctcaagaaacccatctccaaagccgccatggagctcccgggctccttgtccggccctcccgccgccacggcggagatgaagatctgcaagctcgtcgtgatgtcacgcgacctcgtcgccgccattgtcagcaccagcggcggcggcggcggccgcgccgttgccctgtgccggccgggcacgtcgccgtcgtggtcggcgcatcacccgccgggaggagctgaccaccagctaggcgatctcagggacatcgccgtccacggcgggaagctctacgcgttgcacggccacggcaacctctgctcctacgacctcatcgccggcgacggcgagcccaaggtgtcgtcgtgcgttcaccacatagccggcgacgcgctgccgccgaacaagctaccggaggagcacgacgcggggcaccacctcgtcccgtcggccaccggcggcgagctgctgctggtccggcacctgtacagcaggttcctgggcaggcacttcaccgtgttcgtggcggacgtgggcggcgcgcggtggtcggaggcggcggcgtcgagcctgcgcgaccagctcatcttcgtcggcacgggctgctccagggcgctcacggcgtcgcactacggcggcgtgggcgccatgcgagggaaccgcgtcttctacacgaacgacgtcgaggcgtacagtagcacgcacagctatcttgtctacgacatgatcatgcggtcaaatggcccggattcgtggtcctccgccgcctggtcgtcaactccaccgccaccgccgcttcctggacgtcaactctaccgctgccgggaacgatcgaacgctgcatctacccttgctcatcttttctctcttgattctacccatcccgcggctacgccttcaagcacggtaacaaaacacttggtcggcagcggctacgccttcaggcgcggtaaccctcttgggggcattgtcgaggtaccctcctccttcgacgaggatctctag

SEQ ID NO: 29350 - DNA, 435 bp, Oryza sativa
  Clone ID: PAT_MRT4530_33861C.1
atgcttggacgtcgtcgccttgccggtcgcggcctcttctacgcaacgccgtcgactttccgctcgccctcatcaacactgctatcttctacacacattgtcttgctgcttgaagagaacgccggccggagcgccactactcggtgcccgcaaggcgtcatcagctccggctgcgtcccgaaccatctcgctggagttgccgtggacaccgctgagccgcccaagtccatggacggcgaggcgttgccggctaacgctcgtccccgtcatcatcagctgcccgccggagaaggccattgccaggtcgccaaggtgctggttgctgatatccggaggtcgttaatatatcatccacaagccgcgatgggtatcatcggacccctgttgctggcacctgtcatgatgcggccttgctgggcagggatgtccgactga

SEQ ID NO: 29351 - DNA, 640 bp, Oryza sativa
  Clone ID: PAT_MRT4530_33862C.1
tatttgtagggctagaaggagtagatgagctcgggcggcccgtcatcgccatggatgagctcgaactttagatatggctggggcggcaagggctgtgagagggcggccaagataaatttgagtggcgggaggccacgtttgaatacttaccggtgaaagattggcttgaccgcaagtagaaacggctagcgacgtgttggcgccaatccgggcgcgacgcgcggcggcggcgagggtgaaaacggccggctcgggggtgaatgcaagaattggtgcgattcaccctgggtagaatcaaaatcggactcggcggcggctttggatgggagcgcacggtgtcgagcggcgatttcttgcggcggtcgtcatcccggctttgtcgtcatcaatattggtgcggcaatggcagtctgagggcgtcggacggctagcggcacgccaaggcgatcgggcacgcgcaagcggccccgaggcttacgcgcggcgacacggcgcgcggctaagtcggatgaccggggggcgcgcgtgaaggggaggaagaagcaaagaaatccacggtttttgagtggggtgtggccccctaggatcaattctaaactttgtaaaagattgggtagattgggctgctctaggtgggcta

SEQ ID NO: 29352 - DNA, 1974 bp, Oryza sativa
  Clone ID: PAT_MRT4530_33863C.1
cccgcgtccgctccacaccgcacagacaaatactctacgagagagagagagagagagaattttaattttaggagaaaactgtggccgcgtgcgtcgcgtctcctcctatcttctccccgaagcttccgtatcgcgggcgcctccttcctttccccctctatctatctactcccttggaaatttattcggtcgcgtggggtttggatcggtggatcgatcgatcgatcgagcgagcgaacgacgacttgtgagcaggttaaggacaggcatactggactgactgttttatggctagacaccatggaaaccattccctactgccagagatggttcaacccaataatgagcaactcaaccaacctctgcctttaggtcagaagttatttgtgcatgctggaaatgatgcagcccttaaaattggcccttcataccatgggaatgtggcaattagatcgaatgatcttccatcttcaagtcgagtggcacaatattcaggtcatagagttaaaaacacaggaaccttacataactcctatgttcactatcctgctggaagctctggtggccatgtatcctacaatcctcaaactgaacctgttataacttatccacatagatctgagggagaatttgctcgagggagttcccaaatcgacaacagaactgctgcagtgaaacgaaaaaatcctgtcatttatccagagtatagcatcaatggtgatggttattgtgccggtagctcatcaagtacccagttctctaattatccacagccagctccattttctgagtccttgcatcgtcaaatgcctccaagtgttggcccaattaattggaatgaccagagcttgcacatgtatttaaatgattatgtaggtgcctctggaatgcactctggagaaatgccttacactatgggaagcagcaactcatctgttcctgtcccaactttacaaggctcttcaagcagtgcaatatttgccagtggtgtctttgcacctaggcatgttcatggtgacactgttcctagctacattcatctgccttctgtagcatcctctagctctacagcgattccccatgaggtgatcattccgagctaccaacctgctacctctgcaactacctcaacacccatgagggccagtcagccattacctgtcagagctgttgcatcttctagacatgcaaggaatgtactcatagggcatgctaacagcggaaggaacagaagggcgagaagctcatactatggtattcagcctttgatgattgatgcacagcaattgataatgatgcaacaatttgctctccgcgaatcaagagaagcacaagacccccacagggccatgagactggacattgacaatatgagttatgaggacctgctggctttgggagaatctattggtaatgtctgcacaggcttggtggacgagaaaatctcaggttgtgtgagagaagtgatctattgcagttctgatgaacagcaaaatgatcaagatgatgggaaatgtgcaatttgtctggaggaatacaaagacaacagtttgctgggaatactgaaatgcaatcacgacttccacaccgactgcgtcaagaagtggttgaaggagaagaactcatgcccaatttgcaagtcggctgctgcataggacacgcgaggacaaacaacaatatggtcctcaaatttgttagtatttagacccaattaagttgtttcattctttgtgcgcctcagccatgtaaataagtaagtttgctaacattaaattattttgtgtgttaccatagctgatatccttttatatgtattaactattaaaatgccaatttttaattcatttaatcatatgaagtggtttacatttttaataaacaaaaaaaaaaaaaaaaaaaaaaaaaaaaccaaaaaaacgcgagactggatcacaccctggcattttaatagttaatacatataaagcctcgtgc

SEQ ID NO: 29353 - DNA, 579 bp, Oryza sativa
  Clone ID: PAT_MRT4530_33864C.1
atggagatcgccgccactcccctgttcagccgcgactcgtcttggcggcgcaaggaggaggagacgagagcggcggcggcgcgccggctcgcagtggacggcggagtgcggcgaggcggaggttggattcacggcgacgctcggttcctcctccggtgcactggctcgcggtggatgacgaagccctctttctccgcggcggcggcgcgccggctcacggtggacggcggagcacggcgaggcggatgtcggattcacgtcgatgctcggctcctcctccggtgtaccggctcgcggtggatgacgaagcgcggcgaggcggaggtcggactcgtggcggcgctctactcctcctctcgggttgcaccgacgggggtcggcctcctcgccgagtgcctctacggctatgagctagcgggggacgctgccatcgagacggagcgacgcaacacaacctccctcgacagggagccatgggaggaggagagggaggcaccggaggagaagccgagcgccgtcgcgagttcaacttccgccttgccgcactccgccgcaaccacgacctccagtcgggaatga

SEQ ID NO: 29354 - DNA, 294 bp, Oryza sativa
  Clone ID: PAT_MRT4530_33865C.1
atggggatcatcgtcgctgacgggaagcagcgcattggcgaccatcaaaggggagaaccaagctttcccccgagggggtcgggcccgtggatgggtggtggctgccccttccaatcccgaggggtcggactgccccgaactctcccggcggcggcgtgcggcaggtatgccctgttccatcacgatgatgagaggctctgttcctctcaaccgtccggaatcggcttgatcgctctggacgtgcccgagatcgtgttcccggtgcatgaacgcccccaagtcctcctccattaa

SEQ ID NO: 29355 - DNA, 753 bp, Oryza sativa
  Clone ID: PAT_MRT4530_33866C.1
atgaatcagaaaaaggatgtgatgctcaccatgatcctctcccctgctctgctcgccagatggagatcgccgccactcccctgttcagccgcgactcgtcttggcggcgcaaggaggaggagacgagaggtggcagcgaatcctctcggtggtagcggcggcggcgcgccggctcgcagtggacggcggagtgcggcgaggcggaggttggattcacggcgacgctcggttcctcctccggtgcactggctcgcggtggatgacgaagccctctttctccggtcagcctcccttctctccggtcaaccccgccgtccccttcatcgccggcgaccctctctttcctggcaacgaatcctcccggcggtagcggcggcggcgcgccggctcacggtggacggcggcacacggcgaggcggatgtcggattcacgtcgatgctcggctcctcctccggtgtaccggctcgcggtggatgacgaagcgcggcgaggcggaggtcggactcgtggcggcgctctactcctcctctcgggttgcaccgacgggggtcggcctcctcgccgagtgcctctacggctatgagctagcgggggacgctgccatcgagacggagcgacgcaacacaacctccctcgacagggagccatgggaggaggagagggaggcaccggaggagaagccgagcgccgtcgcgagttcaacttccgccttgccgcactccgccgcaaccacgacctccagtcgggaatga

SEQ ID NO: 29356 - DNA, 680 bp, Oryza sativa
  Clone ID: PAT_MRT4530_33867C.1
tgcttcttctgttgagactattgctgttatggaagcagttttagaagagtgggagcaattgttctcttccaaagaagaatatgttccgccccaagaatcaccaaaagaaaccaatgattggagtgatgattgggatgatggctgggaggccctaccagaagagttagagagtccaacgaaaaagcacggtagaacctcattatctgttgatcccctccacacttgttggatggagattatcagaaaactagttgagcttggtgaaccacataagatggttgaagcaaaaatgagggaaggaacagtgtccacctcatcaaatgctgacgatcatgagctgctggccttggttttgtcatctggagtcctgcagagaatcgtgaccgaagtggaatactcaaaattgttctctcacatatgccatcttgtcggacatcttgctaggtcatcgcagaacgatctccttgtaaagtggaatgatgaagcgaatgcaccagggacatccaagacaaataaatctctactgtttgctagggtcttgtttcctagtttcatatctgaactggtgctcaggggccaatatctactggctggctttgtcatctccagatggatgcatacccacccatcccttggcctgatggatgtcgcggaggccagcgtgcgacgatacctgaatg

SEQ ID NO: 29357 - DNA, 1130 bp, Oryza sativa
  Clone ID: PAT_MRT4530_33868C.1
gatcaagtaaaagaacatggtatttcttttccggaaacattctgacaatgctagttgaaattctgcaataatttccccccctaaaaagtttaaactttgcaatattgacctagctaacagcttatgttacagttacactgatagtacaccacctgcctgtgttgagttaaaatattcacaaaacctcgatgcacatctacaaatcttggttcggaagggttgccaatgcagcttgcacaagagaaaccaagtttgatcgtagagtggagagagcatggcttacagacagttcattgtcagtaagaaaaacatcggttcctcccaattgctgagcttgaacaatctgaccattcaggtatcgtcgcacgctggcctccgcgacatccatcaggccaagggatgggtgggtatgcatccatctggagatgacaaagccagccagtagatattggcccctgagcaccagttcagatatgaaactaggaaacaagaccctagcaaacagtagagatttatttgtcttggatgtccctggtgcattcgcttcatcattccactttacaaggagatcgttctgcgatgacctagcaagatgtccgacaagatggcatatgtgagagaacaattttgagtattccacttcggtcacgattctctgcaggactccagatgacaaaaccaaggccagcagctcatgatcgtcagcatttgatgaggtggacactgttccttccctcatttttgcttcaaccatctgcaggcaccgcaaccttgtagtttcataagggagaagcagcatgattttgagagccatcaacggttccattgcagatatgagttcaagtaaccggtttgcttcatcatcctcgattaacatgctatttctggatgatgctcggtccagaagttcaattaccttatgtggttcaccaagctcaactagttttctgataatctccatccaacaagtgtggaggggatcaacagataatgaggttctaccgtgctttttcgttggactctctaactcttctggtagggcctcccagccatcatcccaatcatcactccaatcattggtttcttttggtgattcttggggcggaacatattcttctttggaagagaac

SEQ ID NO: 29358 - DNA, 3954 bp, Oryza sativa
  Clone ID: PAT_MRT4530_33869C.1
tcatcgtcgttgctggacagcggatcgactgaggccgcgaggcttgccttcctcacccggcgaggtgtgtgctttgcgaccagcacgacgaaacgattgaccacatcctgatcttctgcccggaatccgcacaattctgttggattgtgatgaatgccattgggcgcccggatctcttccccgcttcttgtcccagtctggaccttctttccgctgaaactgctcctccagcgcttgatggcatccaaacaagatgaatgtctcaagtgatacaagaagaccactccagggcagtgacctcaactgacggcactgatcgatcttcagaaaacgaagcgagcaaaagtcatccatatcatgaagcttacacaggatgacaggaatcataagattaacctgtgcattgtattttgcagctgggagctgaagaaaactggaagagcttgctgcagaatcagttggatgcagtagactggtctggattgaccactcgatcatatcattctcgcgaagtacttcctcagctatatcttcagtatcttccatcgatttatcagcatagaaacatgacggcaacatggcatacttctcccactcaatgccatgttgccattcaaactgctcctctagcaatggatgacatccgctcaaatacaaaaagttaagggtcagaggaagaccgtcttcaggtaaagaaacaagttcagggcaattgtgtatgatcatgactctaagggagaagaagtcaaccatctcaggcagaaccactaacttcaggcaatttctgatctccagtttggtgaggaaagaaaggtttttcaggctcctcagtgataccagtttgttgcagtgctctataagcacctgtgtcaaggttgttaggtttccatcctcaggtagttccttcaattcggggcaattatttatgatcaagttctggagagcaggaaaacaaccaaagtccggtaacaatgttaagttggggcagcttataaattccattccagttatcctcagaaatgtgctaggagaatcagagaatccagggatatacggtccctttgggaggttgtgccttcgatctctaagcccatcgtttgatatgcctgctccatcaaagctgatgtctgcagattccatagattccagataatgaagacgtaaatccaaaaggccggttaagctaatctctcgagtaacgcatgtgtccaagcgatgatcagtatgctgtgtgcaaatgatggattcgagcactttcatttttacaggtggaggaaagactggtggcagctctttcagctttgggcacctcctgatgaatacaacctgaagaacaggaaaagcataatcgacagaacaccaatatgccagttctggcaactgtgtcaattgtagtgtttccagggagggaaaaccaacaatcccatagaaagatgtgtctatacattccaatgcgtccattgtatcaatatgaagctccttgagacatggtagctgacctaaaggaggaagcaacttccaacatgtgcaatcatggatgttaatgtgttccaatctagatagccagttgaactctagccaagacggagatttataacctgggtatccatcaacagtcagttccttaaggccagggtgaggtcttaaagcattgaacacatcatactctttatctgacttgctatctgcattagaagaatcccattgcagcttcaatctagatatttgactcttgttggctaactgagcattagctgcctcatccttgttattcacattctcaagagacgaaattacaagaaattcctggagttcattcatgtcctttagaatctctaatccctgcactttcgctttttcaacacaaaattctccgactgcccgaagaaatggtatattccccgcagaagccaaatcaacaagaaggtccgtatgaatatcaatataaaatatgctgctgaggttatccagattttttgggaagatgacaggtcctgtatccataaaacatgaatgtgggtgtacggataacatttgcaaatgataaagactgcagagtgattcaggtagaggatggttagtgtatgggagaattaagcacctaaggtgtatcatatgatttaagtcaggtgaatgtcttaagcagcaacctgtcaaatccaataatctcaagctcttgaactctttgaaaaaatttgcttccacacaaactcgtgggcaaaaacacctgtctttattccagattattagtgtgcgcagcctttgcaacttacaggtgcaaagtaggtcaattctttcagccagtatggacagatgccgaactgctggcgggatctcttcaggttcatcaacatctaatctgtagcactcaccattggatgtgtggaaagcaagatcgttcatgaggtcatgcataacataatgtactgtacctccgtactgaagtgcctggaaaaatgatctagaaaacaactcatcaaaataacttctcccggtgcttctcaaacttccataggtgtgtccatgatcctgaataaattcatgagctatccacatattcaccaatatgccaggctcaaaataatagccttttgggaacaaaccacagaatgaaaaacattgctgaaggtgctctggcaagcattcatagcttagacgtaaaattgtcataatatctttctcatttgataaaccattttttagaactcgattccattcatcatagttgaagtttaaactaagatgcccagcaacggcctttattgctaatgctgagccattcaacttttgcacaatgcattcacctatagacttcatttcttgatgttcatttggatctctagtgctgaatgcacatcttctgaaaagttcccagctatcttcactctctagaccactcaaagagaacggagtggtacagcctaatgtatttgcaacaatatccattcgagttgtaactaaaatcttgactcctttcaccccatgccgtaaaggagcaaataattctctccatctatcagcatttataggccctccaaccttttcatcataccaaacgtcatccaacacaagtaaaaacttcttcatttttactttgttcttgagttcttcttggagcatgctaaaattgaaatttgttaggtcaatggtcttatcaatagatgttagaatttctttggtgattctgaccttatcaaagacatgtgagacacatatccatgccctcatatcataattattctctattcgtttatcattgtaaataagttgagttaaagtagtttttccaattccaccagtaccgactatggttattacctctggtgatactgatattgctccttcagttcttgacttaggtatgtctgcttgttccaacaatcggttcactagttcatctcgctccttctgacgaccgaccacaaactcatcaattgaaaatgagctggtaatacgccattggagtggttctggcaacatgtgtgaactagagttttctggtccaatcactctgacaagcatttcagcacattcctttaccctaatcaagcttttaagcatctttcttaacttggacctaaacttgtcatggccaaccaaacgcttagcaatggaaatagaactggagcctaagcttctaaggtttcgcttttcagcattttctttcagaagcatgtagtcaaattcatccaagatgtcctcagcatcatagacagcatctttcagttggtggagtaaagtttgctgattgcaatcaagtgttctccgcctttctgcagtgcccaccaccaataaaatttcagttaaaatagtctcgagctttttaaggtcatcctccaaattggactgccacttgtactgggttgatatatatgactggaccttctcaaccataagcttgatgacaggagaaactacccatccaactcctgtggctagtgataaagtggccat

SEQ ID NO: 29359 - DNA, 1404 bp, Oryza sativa
  Clone ID: PAT_MRT4530_3386C.1
atgggattcatttccggcatcgacgacttcgtcttcccttccgggcagatgtttcggttcggcagccttgacttcgtcaccgacaacttcggcaagatctctctcttcgactcggattcaaacaagtcggaaagagatgcgatcctcgactatgatgacttcggttacaactacgactttagcaacctcgacgatttcgacaaaagctatgaagacaattacacgcctctcttcttcggcgttttcatggccgacaatgagacagcggaacagcgccaagcccgtgaagcggaagaacaacgcatgcgacaggaagctgagcgtcaccgactggaagaggaacgacaagcacaagagcgataccggttgcagcgtcagcagcaggaatgcgagcgggccgcaaaggaggctgaggaccggcgacaacacaccctggaggctgggcgacaagcacgcgaactcatcgagcaacaagacgttgaaggcacagtgcttcacatgttaccccatggtacaattagatcttcggcagagcttcacaagcacttcatcaccaatttccaaggcaccttcgaccgtcccggcacccaattcgacctctacaatgtgatccagaagcccggtgaatccctttgggattatatccgatgtttttctgaacaacgcaataagatctctgacattaccgacaacatcatcatagcagctttcactatgggcgttcgtcatgaactcttagtcggcaaattcagacgcaagcatcccaggacggtcaagcagatgtttcaaaaagccaatgagtatgccaaagccgatgatgccgtcatcgtgtccaagcagtcgggtagcaattggaagcccaagaaagatgcgccagcagcagaggggagtggaagtacaaccataaggatcgcaagctgctcgcatcacccgaattcaaaccatgcggtcaaagattgcatcatctaccagcagttcacagagcaatacgccaagaaagcatggaagccggctgacggggagcaaagcacttcaaaaaagaaggataatgaagatgacggaccgactggctttctagactctcgcaaggaactcaaccatattttcggaggaccccaagcctacgaatcaaagcggaagcaaaagctaactgaccaggagatcaacgccgtccagcccgacacgcctcaataccttcagtggtcagagacaacaatcaagtttgaccgctcggatcatcttgaccgagtggtccacccgtggcggtatcccctagtactagacccagtgattcgcaacgtcaagctccgacaatccctcattgatggtggtagtgcactcaatattctttttgccaaaactggacgatatgcagatccctcgcacggagctgaagccgagtag

SEQ ID NO: 29360 - DNA, 274 bp, Oryza sativa
  unsure (1)..(274): unsure at all n locations
  Clone ID: PAT_MRT4530_33870C.1
gaaaatattctctntcccncacccccgaaaccctagcgcgacctcgccgccggcaatggccgcatgaccgatgcgcctccgccgaggagccgcccgcacccacccagcagcagcgtcgccgtgcccgccgccgcggcgnagatgnatcgcagccgccctcgcgtcctccttnctcgccctgctgcagccgccccggagacgaccccgagtcgccgcgggatccagggtcggcatgtcgaaggcgagggtcttacgncgacgtcaacgtgctgcg

SEQ ID NO: 29361 - DNA, 927 bp, Oryza sativa
  Clone ID: PAT_MRT4530_33871C.1
atgccgggccaaggagcggatctcggaataaagacatatccgtcactagcaatggttatcgaaaccttgaagggaatagacaagtacagtagggaaggaggtactccagggttaggaaagatgacaccctcgctcgtagtcatatcagcctctatcgtaggagtggtattgaaggaaaaccgtaccgggccaaatagattggtttttaaaataggggttcaaatcattccgcaaatccagaaactgaaatggggtattgctgccaataaggataccactcttactagcaagaaatcattaacggatgcagaactggatactctgcttaaagcaataagcctcccttggatagatcgaagaaagaagcactgtgcgttaccaggtgtagtggagaaagcaagggcaaaggaaggttggactacctcgaatggcaacatgctcgctgattcctaccactcctatctacataactgctccagagaagggaaggcagatgtcagtgaaacgggtaataatacaccctcgactactggctcgaattacttcggatctttcccgagagaagcaaaaattactttcgagggtttagttatggaagccctacccaacggaatgttccgcgttcgcctagagaatgacaccatcatcctgggctatatttcaggaaagatccggtctagttctatacgaatactgatgggggatagggtcaaaattgaacctatacttgaccttgcgtacaagcctattatcctatcgcttgtcttacccacctcttttggttccttagaaagaaagcttcaaacagcaccattggccgaagcagacctggaagctgatctgcgagtgaatgaaattgaacgattaatatcgcctttcatgctaaaatcggacgatttcgacctttccggatgtcgattgggataa

SEQ ID NO: 29362 - DNA, 1065 bp, Oryza sativa
  unsure (1)..(1065): unsure at all n locations
  Clone ID: PAT_MRT4530_33872C.1
gcacgaggcagaggtgggttggcttctcctccccctcccggctcggttcgggtccggttcaatttccgctaacacttcagatccccggttgatgggaaagcatggaaacacctgatcgcgaataccgatcactaaccagcacaactacccttctccacctccaaccgctacctatacaccttcgtacaccacgtcttttcacacacccaacccacaccaccaccaacgacctcagacacactcacaccacactctcctcatcacacctccgtccttcccacacaatatctctctaccacccttagacaccacatacacatactaccaaatctccccacatcacccacaaccaaaaaacacctcatatcaatctcacccatatacaccccctccccccccacctttaccattagttttatactccactcacctccccccccactaccaccccaataacattcataccttatcacttcctatatatacactactacctcatccaattcatttactttaccataatccaccttagaatatcaaacccaatttacgtatcatacacgacataccaatctctaaccagcccccaccaatacacaccaaacagcactttccacccaaatacaccaacaaaacactctatatcaacattcttctatacccccgctcccacctccatcatacagtatttacgcgaaacatatactccatccaactctcctcgcaactaccaatataagacacaactcaaccaacaaataacacacaactacccaccaccctaattcaaaatacacctcctgttcccaacctcgcgccatccacggctctagacacaccccccccaatcataaaagacattatatttctttaccatatctataacctatccacgatctcaacaacgcaccaattacatttcttcgctatacaaaagagtgattcccaccactccaccactcaatcctaccccacccccaccacctcctctcatccacacacatctctattagctccacacatttgttactatatctgacgattgatactacacccaccacactn

SEQ ID NO: 29363 - DNA, 803 bp, Oryza sativa
  Clone ID: PAT_MRT4530_33873C.1
ataactcaatgagccaaaatccaaacatagtcagcaaagcagtctttcatgcacatcaaaagaacatcagcccaataccttatacaaccaacctaataccccaaatacaaatactagtcaatatacctcaaccaacccaagctataccaatacaaaaccaaacatcacaatagaacatacaaaatatcatcgctcagttaatccatcaacaagacaaatcgagcttcacaatacaacccatcccacaacaaaacccacaactagtctcacatcaaacgtataaaacattgaactttgcaaaacaactttatcaccaatagtatcagtacacattgttccaaccttgttcacgaggagttcgatcaatcaatgaaaaatactctctaagtccagcattgcaaatgaaaccctagccaatgaaattcaaactttcaaacataagaaagctcaacagcaacacaggcgcaaatgaattcttgagagtatatgagacaacaataaaagccaccggtgaagatggcaacacaaatgcaaaagtcttgcgcacggtgctcaaagagatagttttgtcctagctcttcacaataccaacattattgctacactcatgggaacaattgagggagatgtttgaaaatggatttcaaagaacttgtgaggagttgaaaggggcagaagatttgatgcaatgaagtaattaacatggcaaatgattagagaatacatcacaatattcttaagggttcgatgccaactccatcacgcccaccctcgccaccggtgcctaggaaagggtcgagcta

SEQ ID NO: 29364 - DNA, 292 bp, Oryza sativa
  Clone ID: PAT_MRT4530_33874C.1
tgttttttttagtttttgaggggatcagatcgagatcaggattaaaaacgataccagatgctcactcaaatgatgatgctgcttttatacaaatgagcaaattgtggtgatactgtgctgatactcttttatgtctcagcacaattatctatgtagcgggcgtggtatagtaccacttaaaaacctctgaaaatcattaataagcctggtagaatcctcttgagaatttaagaacaaataagtaacaaatgtaccgctagaaagatcacatgttaagtgctgatgcatgcat

SEQ ID NO: 29365 - DNA, 1516 bp, Oryza sativa
  Clone ID: PAT_MRT4530_33875C.1
actagtggaccacgcgtccgaacgcgacaacgcagcagcaaaaccgcgagacacatgacgacggcgacgacgacgacgaccttgccggcggcggcggcgctgctgctgctgctgctgtcggcggcggcgcagctgtgctcggcgtgcccgccggcggcgagccagacggcggagaacaacccgcggctgcagcgggcgtacgtggcgctgcaggcgctgcggcggcgcgtcaccgacgaccccaagaacctcaccggcgggtggtgcggccccgacgtgtgccgctacttcggcgtctactgcgccgccgcgccggacgacccgtgcgccgccaccgtcgccggcatcgacctcaaccacggcgacctcgccgccaccctccccgacgagctcggcctcctcaccgacctcgccgtgctccacctcaactccaaccgcttctccggcgcgctccccgacaccctccccaagctctccctcctccacgagctcgacgtcagcaacaaccgcctcgccggcggcttcccggaccacatcctctgcctccccaacgtcaagtacgtcgacctccgcttcaacaacttctgcggcgaggtcccgccggcgatcttcgacaagaagatcgacgcgctcttcctcaacgacaaccacttcgacttcgagctcccggccaacctcggcaactcgccggcgtcggtcatcgtgctcgccaacatcaagctgaggggttgcatcccctccagcgtcgggaggatggcggcgacgctgaacgagctcgtcgtgctcaactccggcgtgcggtcctgcatcccgccggagatcggccacctcggggagctcaccgtgctcgacgtcagcaacaaccagctgcaggggacgctgccggagtccatggcgtggatgcggtcgctggagcagctcgacgtcgcgcgcaacgagctcgccggccacatcccggaggggatctgcgcgctgccgcggctcaggaacttcacctactcatacaactacttctgcggcgagccggagcggtgcctccgcctccgccgcgtcgacgaccgccagaactgcatcgccgggaggcccgaccagcgcccggccgaccagtgcctcgccttcctccaccgcccgccggtgcactgcgacgcccacggctgcttcgcgccgccgggccactactaaccgacggcggcggcggcggcaactccggcgagaagtgaaattcgttggtgaattattcctacacacaaaaatcagtcaatcactcaatcaagcatcgtatatatatacactgtaattttttttcttcttcttattctctttggattttttttctctttttttgttttctttttctttttcacagagaggttggtaattaataatgggatttgtaggaagagtacatgatacattacagtatatttgtgacttactgatcaaaaaaaaaaaaaaagaaagtagggaattttcgtatatactatagtagttaattagtaaaaaaaaaaaaaaaaaa

SEQ ID NO: 29366 - DNA, 2212 bp, Oryza sativa
  Clone ID: PAT_MRT4530_33876C.1
atggtgggcgccggcgagggggatcgcgttggcggcggggcggcggtagggggagggcagcagttcgtggaccggagcaaggtgaggattctgctctgcgacagcgacccaagtagctcacgggaggtgctccgcctcctctgcaactgctcataccaagtgacttgcgccaagtctccgaggcaggtgatcaacgtactcaactgcgaggcgggggagatcgacatcatcttggccgaggtcgatctgcccgtctccaagtgcttcaagatgctcaaatacatcgccaggaacaaggaattgcgccacatccccatcataatgatgtccaacagagacgaggtctctgttgttgtcaagtgcttgcgtctcggggcagccgagtacctggtcaagccactgcgcatgaacgagctgctgaacctctggacccatgtgtggcggcgaaggcggatgcttggtttgtcggagaaaaacttcttcaatgacaatttcgagttggcgttatcggaacctagtgacgccaataccaacagcaccactcttctctcggatgacacagatgataagccaaaagaaaacattaatcaagaaacaagcacctcgaatcaacatgaatatgagtctaatccttctgatgctgagcctaaacaaaaaggcacaccagagggtttactagtctctactgaaggcggcgaccaagcttcatctcccggagtaatgttttcacgtccaataaagactaacttgagggttgctgagtcttctgcttttctagcttatgttaagtcaagcaccccaactaccagctcatttgacagcgaactacaaaaaggtggaaatcggttagactcttcggatcacaggggtaatttctctagtacaactgacagaagtgacactggcactgatgtaaatattcgggataaagaagcctttgagatgccagtgcaataccctgtggtatgcttttcttcctctaacttgcatctggagcgaagcaatgaaggccaaaatgatgcttcaggaactcctcctgtatatcattttcccttttattacccagggatgatggaccacggtatgacacatcctccggtgcaaaatttccaagggaacataaacaacgctcaagtgcatacaccacaaacgttgctccctcagtataatgtttatccccaatgtcatggtgtatctatgatgccaccatttcagtataatcctgctggtatgagcattcaatcaaatcaactgccaacacaaaatatgtggccacaggcatcaagcacaccaatgcccgaggaaacatgtagtcggtctgaacggagagctgcagcacttgccaaattcaggctgaaaaggaaggaacgttgttttgacaagaaggtgaggtacgtgaataggaagaaacttgctgaaacaaggccgagggtgcgagggcaatttgttagacaggcaaactatacagatataaccagcactggagatgatatctcagaagatgaagatgatgatccatcctccagggaggtagagatggtttcttctccagagtagtttgaaaggttttcctatatgtaaaatagagtgcagatgattactgctcactttgcaactcattagatgtaggcaatacatttcttctgcttttaactaggcaatacatccactcgctcacacacaatacatcctttttgtcccccaaggaacttgtggcatatccatcactgttactatggacgttttggagaaaatcatctttgaaggtgagatgtaattatgctagttagtgatgcataggccagtctagatcgtaaccatcttgtttcagaatcttataggactttactcagtgctccttcttagacacgtttttacttccattttctcgatgttggaggctgtccatgtttgaacatcgtgttctaccacagaagtcgattttggaggttgtacatgtttgaactttgtgttctatcacagaagtttgcgagcaccattgaaaacaaggacactagcgacctgacctaccgtactgttctgagtagtgccaatatttctaggaaattgtccctttctaaggacaatttcgtttttccccccactttcatcttcaatattgattttgcccctatcaaaaactttactgctaatccatgtatattcgtgacaaatgtcgactatatattttgtagctgtactttgtcatgtt

SEQ ID NO: 29367 - DNA, 375 bp, Oryza sativa
  Clone ID: PAT_MRT4530_33877C.1
gtggcaaccacgaaccggaaggggaatggaaacaaaaaaaagggtgggtggtcaaccaaggccacgggatacctggggacaactgtttgaaaagacaaaaaaggccttggggcgccttttttgggggggtaaaaaacccttttaacgggggggaaaaaccaggggggcggggtcttaacgaccaccaaacggggggagatcagggttttcaagaccgggtccctacaggggggaaaatccgagccccggaaacaacaagttttgtgggggaaaaaaaaagccttgtgttagcaaaaagggggaatggggttcctaactaaaagggccaaaagggggcaggacacctttttttgaacaaaaacggaatggggaaaa

SEQ ID NO: 29368 - DNA, 1350 bp, Oryza sativa
  Clone ID: PAT_MRT4530_33878C.1
atgaagaatatatcatggacagtgatggaatctgtgaagaatatcacggacagtgatggaatcggtgtttaccacctctattcgtgcacaacaaactctgcactggatgtgccaagaatggagctgttcaggaataccatgaacacaaaaatatattattcagatcaaaagtggcaaagcttcacggggatcatgtcgcccggcgttctgtgcctggatcagtcagggctgcagttccctgtgccgccggaggcggagcacgccgcgttcctcggcctgggacccgccgcgtcgccactcgccatcggcaccgacgacgctggggagagaagaagaggaggaggaggaggaccaccgtgcttgcgcgtcgcggaacgcgcggcggcgaggacaaaggagagcggtgcgagggaggctcgaggtggacgtacgcctgctctgcggagactcggcggacggcggcgccggaggttggcgagggcgatgaggctaagaaaatggtttgtcatggataagaactcatatatgctagatctatataagcaccaaacacataacatctctgacaagcccacatacaaacctgtcacagttgacctctttcctatgacgggtgttgagtttgcactcgtcataggtgagtcacctgtgatgggttgcaatgccaccagtcaaaggggcattgtgctacccatcacgggcctaccatggcaaaaatcatatatcgagaagcataatagttcatcattaagagagatgcatctattttgggttcaaggtgccagttcatcattaagagagttgcatctattttggttcaagcattcatcggcgtcggcggtagcagcgctacaaacctgcagcaatcatgtggggatgcgtgcctcaagcgagcacaaggaagacggctctagccctggtagccaggcggggcatgatgcacgacggtcgacggggaaggtgctatgtctggaggcggcggccctgcgcctggaaggagattcagtgatacgtatcccgtatgtatcggcgcttatcggagaaggcgtatccgtatctgttcacgtatctgatactgatacgtcgcttgacagccgtatccaggaaaatatactttctgatcctgaaaaccctactaggatgatcgatgaacaactattggtgtattatctggtgtcgacatgttcgatgtgtggacagttggccctatgcattcatgacttcacattcttaaccccagctttatatcgagggcttgaggcaagcaactcgacgattcttgatattgatgatcaacaaccgcgattcacccatgctgattggcttggatttgcattgtttcgtgactaa

SEQ ID NO: 29369 - DNA, 1053 bp, Oryza sativa
  Clone ID: PAT_MRT4530_33879C.1
cgcaagcgcaagcccagccgcctcgtcgtgttcgcgttcgtcgcgcggctccgacctccaaagccgccgctacccttcccgtcttcgtcgtcgccgcgcacgcagatcgcgaaccagcccgcgcgccgcgcagcagcgccgcggagaggaaaggagagctccgccgcgcaccccccgccaccatcttgtagggagagatggggctcacgttcacgaagctgttcagccgcctcttcgcgaagaaagagatgaggattctcatggtcgggctcgatgcagccggtaagaccaccatcctctacaagctcaagcttggcgagatcgtcacgaccatccccaccatcggatttaatgttgaaaccgtggaatacaagaacatcagcttcactgtttgggatgtcggtggccaggacaagatcaggcccctgtggaggcactatttccagaacacacagggactcatctttgttgtggacagcaatgatagggagcgtgttgttgaggccagagacgagcttcacaggatgctgaacgaggatgagctgcgtgatgctgtgctgcttgtatttgcaaacaaacaagatcttcctaatgccatgaatgcagctgaaatcactgacaagcttggtttgcattccctgcgccagaggcactggtacattcagagcacttgtgctacatctggtgaagggttgtatgagggtcttgactggctttccaacaacattgccagcaaggcttgagcgttttggcagctggatatctgaacaattcactagtgccggtttacatattatataacatatacaccctaccacacatagtgtgggtgcctgtgaaggaaaaaactcctttgtggaggctagtaccagattgttccttttcgtgggcactataagtgcttatattttgtttggttttacaacatttactgtgctgtccatatgtacccgtttgttctgagatggtctagtaaattgatatgctttgtcacggacttggtgtgagcattgtattttagtttttctatgatctagtgccagtgtagatatt

SEQ ID NO: 29370 - DNA, 4677 bp, Oryza sativa
  Clone ID: PAT_MRT4530_3387C.1
atggccgaccacccacccaaccaccgcgaagaaggcatggacgattttgtggcagagttggctcgcatgaccatggtggtgggctaccacaacgcgccggagtactcgactgttccgccgctcagtggcgagcttccttaccgtgttcgtctggaggttcatggctatgtgggcacctgcctcgctaacatggtggttgaggcatctggaggcacagcagatcacgcctgtcaggaggcagcatatctgatgatggctagacttcgtgagcgccacaactacatcttctgcaacacagcataccgtttccaccctcgccgagcaagtggtggcggtgtcagcaccttccgtccgacagcgggcgagaacgacaccaccttcggtcacatgtgcgccgtgatgaggggaatggacaggatgcactcagatatgcacaaggcgtccaaggccttgaatgatgggaagctcgtgaggatcatagctctgaaggatgagatagcacgcctgaagaaggagaatgctcagttgaagggtctccccattcccggaggagtccggatccgcaccacgccccgcaagtcgatgactgcacccgtgcgcattcagcttgcgcccaggaacccacctccgcccgcagctcccgcagctcctctagttccgcctgcagttcccgcagctcctgcagctccagctccagtcccggctccagtcccagtgtcagctccctgcgtccgctctctccttcgctccagcatcagccgccaggggtccagccagtggcaatggaggttggttgcctgctactcccagtggcagccgcgaccacagcagcagcagttcagtggctcagagtcgggcagtggcgagacgtttgttcgcttgtggatggtcaacaccaggaatggcagccgtgcagtaggtgagggcagcaacggcgaagaacgcaccaacggtgggcatcccaacagcgcctccggcaatggtccgcccccgctccccgagaatccgactcttgcccaagtacggaggtcacttaggcagagttctatcgtagctttaggaaggcgcaggtgcccgacggggtcgtggcacaaaagaagagaattccgggcactccaccagggcaaccgaacggtgactgagtacctccatgagttcaatcgcctagcgcgatatgcaccagaggatgcccgcactgacgcagagaagcaggagaagttcctagcaggcctagatgacgagctgaccaaccagttgatctctggagactacgccgactttgagaagctggttgacaaggcaatccgtaaagaggatcagcgcaacaaaatggacgggaagagaaaggcagcgcagttccggtccaaccaaggaactccatcagcccaagccaaggagactggagcaaagccagggtcgtgtttcaactgtggcgagcatggccactttgctgacaagtgcccgaagccaaggcgtgctaggccaaggttttcccaagctcgtgtcaaccacgcgtctgcagaggaggcgcaagcagcaccagaggtcatactgggtacgtttcctgtcaacttagtccctgctacagtactttttgattctggtgcaacgcattgtttcatttcaaagaaatttgtggggatgcatgggttaagaaaagaagagcttagtacaccaatgagggttcatactccgggaaatagttcaacctcggtcagttatagcccttcagtgctaatagaaatacaccgatcacaatttctagccaacctcatccttctcgaatccaaagacctagatgtcattcttgggatggattggctgaccaagttcaagggagtcattgattgtgcaaatcgcacagtcaccttgaccaatgagaagggagaaaccgtggtgtacaagtcactagtctcaccgaagcagagaatctccttaaatcagattgaggtggaaatccctgtgaccaccgaggagaagagttcacggaaattggaggatatccccatagtctgcgagtatccagaagtgtttcccgaagacctcactagcatgccacccaagagagagattgaattccggattgatttggcaccgggaactgccccaatttacaagagaccgtacagaatggcagccaatgagctagcagaggtcaagaagcaggttgatgagcagctgcaaaaagggtacattcgaccaagtacttcaccttggggtgctccggtcatttttgtggagaagaaggacaagacgaagagaatatgcgtcgattatcgcgcactcaatgaggtcacaatcaagaacaaatattctttgccgcggattgatgatttgtttcatcagctgaaaggagctaaagtgttttctaaaatagacttgcaatcaggctatcaccagttgagaattcgggaagagaatattcccaagacagccttcaccactcggtatgggttgtatgagtgcacggttatgtcttttggacttaccaatgcacccgcattcttcatgaacttgatgaacaaagtgttcatggaatttctggataagtttgtggtggtattcatcgatgacattcttatctattccaaatcggaagaagaacatgagcgacatctctgtctggtactcgagaagttgaaggagcaccagttatatgccaagttcagtaaatgcgacttttggctatcggaggtcaaattcttgggtcacgtcattacagctcagggcgtggcagtcgatccgtcgaatgtggagtcagttaccaagtggaccccacctaagaccgtgtcacagattcggagttttcttggactttgtgacaagagttttgaggagctcaagaagaaattagtatccgccccagttctgattttgcccgaccagacgaaagacttccaagtctattgcgacgcatcccgtcacgggcttggatgtgttctaatgcaagagggcagagtggtcgcttatgcctcgcggcagttgcgtccgcatgaagggaactatccaacacatgacttggaattggcagcggtggttcatgctttgaaaatctggaggcattatctgattggcaaccgctgcaaagtatatacggactacaagagtctgaaatatatcttcacccaacctgatctaaatctccgacagcgaagatggttggagttaatcaaggattacgacatgagcattcactatcacccgggcaaagccaatgtggtggcagatgcattaagtaggaagagctactgcaatgctttgtgcaccgaaggcatgtgtaaggaattgcagcaggagcttgaacacctcaacttggggcttgtagaatacgggtacgtggctgccctagaggcacgacttacgctcgtggatcaagtcggagtagctcaggtaaatgatcctgaaatagcgaagctgaaaaagaatatgagggtcggaaaagcccgggatttccacgaagatgaacatggcacaatctggttgggagaaagatggtgcgtacctgacgacaaggaactaaaggatctgatactcatcgaggctcatcagactcagtactccattcatccaggcagcaccaaaatgtaccaagacctcaaagaaaagttctgctgggtcagcatgagaagggaaatagctgaatttgtcgcactctgcgacgtttgccaacgagtgaaggcagagcaccaaaggccagcagtgcataccacgtatacggggaagaaattggcagagctgtacttggcaaggatcatgtgtctgcatggagtacccaagaagattgtatctgatcgagggagtcagttcacctcaaaattttggcagaagctgcaggaagaattggggacccgtttgaatttcagcacagcctaccatccgcagacagatgaccagaccgaaagggtcaatcagatcttggaagatatgctgcgggcgtgtgcactcgattttggtggagcatgggataaaagtctgccttatgcggaattctcgtacaacaacagttatcaggccagtctacagatggcaccgttcgaagcgttgtttggccggaagtgccgcacacctctcttctgggatcaaacaggcgaacgtcaactgttcggaacagaagtgttaatggaagcagaagagaaagtcagaaccgtcagagagaggctgagagttgcccagtctcaacagaagagctacgcggacaaccgccgaagggagctcacttttgaagcaggggattatgtgtatctccgtgttactccgctccggggagtgcacagtttccagacgaaaggcaagttggcactacgcttcgtgggaccatacaaaatcttggaacgaagaggagaagtcgcctatcagctagaacttccatccaacatgatcggcaaccatgacgtgttccatgtgccccagttaaagaagtgcttgagggtacccgaagaacaagccgattcggagcacattgacatccaagaagatctgacctatgtggagaagccagttcgtatccttgagaccaatgaaaggaggactagaaacaaggtcaccaggttctgcagggttcagtggagccaccactcaaaagaagaagcaacctgggaaagggaaggtgagttaaaagccgcccatccgcacctcttcaccagctcttccgaatctcggggtcgagattccgtttaa

SEQ ID NO: 29371 - DNA, 156 bp, Oryza sativa
  Clone ID: PAT_MRT4530_33880C.1
atggttggcacctccctggacaccaattccaacatgttcatcatcctggacaccatggttttgatcttcttcctgaaccgcagggctaagttgctcattgagggggtattggcaccctttggcaccccctacctgcgccactgcaagctcgcctag

SEQ ID NO: 29372 - DNA, 620 bp, Oryza sativa
  Clone ID: PAT_MRT4530_33881C.1
atggggctcacgttcacgaagctgttcagccgcctcttcgcgaagaaagagatgaggattctcatggtcgggctcgatgcagccggtaagaccaccatcctctacaagctcaagcttggcgagatcgtcacgaccatccccaccatcggatttaatgttgaaaccgtggaatacaagaacatcagcttcactgtttgggatgtcggtggccaggacaagatcaggcccctgtggaggcactatttccagaacacacagggactcatctttgttgtggacagcaatgatagggagcgtgttgttgaggccagagacgagcttcacaggatgctgaacgagctacaaaattggaaaaaagatgagctgcgtgatgctgtgctgctggtgtttgcaaacaaacaagatcttcctaatgccatgaacgctgctgagatcaccgacaagcttggtctgcactccctgcgccagcggcactggtacatccagagcacttgtgctacctctggtgaggggttgtatgaggggcttgactggctttccaacaccattgccagctaggcttcaagcatcttggccgggcttaaatgaaaggaagacatggcggatatccctgagtgaac

SEQ ID NO: 29373 - DNA, 1412 bp, Oryza sativa
  Clone ID: PAT_MRT4530_33882C.1
tccgcgtgtccgtccacgccaccgatctcctctccctctccgcccatttctcctctccacctgcgatccatccgcgcccgcgaggaggagggagccggacgccgccgcggggagagcaggggagagaaggagaggaggagatcgccgtcgccgtcgccgtcgccgtcgccgatctcgagcgggagcggagatggggctcacgttcacgaagctgttcagccgcctcttcgccaagaaggagatgaggatcctcatggtcggtctcgatgcggccggtaaaaccaccatcctctacaagctcaagctcggcgagatcgtcaccactatccccaccatcggttttaatgtcgaaactgttgagtacaagaacattagcttcaccgtttgggatgttggtggtcaggacaagatcaggcccctgtggaggcactatttccagaacacccagggcctcatttttgttgtggacagcaatgacagagagcgtgttgttgaggccagggatgagctccaccgtatgctgaatgaggatgagctacgtgatgctgtgctgctggtgtttgcaaacaaacaagatcttcctaatgccatgaacgctgctgagatcaccgacaagcttggtctgcactccttgcgccagcggcactggtacatccagagcacatgtgctacctctggtgaggggttgtatgaggggcttgactggctttccaacaacattgccaacaaggcttgaagcatcttggccgggcttaaatgaaaggaagacatggcggatatccctgagtgaacgctgcctttttacgtatcgaaactatatagtcatgacagataatgatgtggatgttttgggaagataaagctctttaggttccaccaccaaaggagctagctatcagattgtttttcgtggggtgttaaaaaatcgtgcgtgtttcagtttggtttttaatcgaaaggcttacggtgcctgacttttgtacctctgtactcgccacagatgttgtagtattgacttgtcttgggcatagcgtattgttacgtaatcctgttctgtgcaaccaacaccaatatccttaccagtttatccccagttgccttcctggccagcattctgctgcctttcttcttggatggcacttcattccttttcagtagctttccgtatgtttatattgaagtaagcgcgttgtaacgtcagcctgaaaattgcaaaccgatcatttcctgtgggctgtaagggtttcttggaacataagaattttacaggaatgggttttgtatacctggtcaggctcaagagagttcttcaattcagagcatgcagcacgcaacacggcttgaggcaacgaggtctcggcaaagctgaggaggaagaagccgcgggccgcgcccgcagcccggggatccac

SEQ ID NO: 29374 - DNA, 461 bp, Oryza sativa
  Clone ID: PAT_MRT4530_33883C.1
ggggcctattaggggatccaaaaccccccctttttcggaaccccgggggccaaaacggcccccaaaaccaaggcccccgagcctattacaaggaaacccccaggaggggcccaccccgcaaacatcccgggcggaacccccaaaaccccggggggggggggttaaaaaaggtatcctgggggggagcggctatgcccccctcattcacttaaattttgggaccggggccgggattgcccccgcaaaaagcggaagggcccccccgctcaaacccgcccaacggacccccccatcaaagggccgggaaaggggggatcccccccccaggaaaccccctgggccccgggggacccccgggaaagggaacatcccgaacggcttaagggggggacccccgcccccagggaggtcccccccggtcccgggagcccctaaaaagcggggggcccccagggccaaaa

SEQ ID NO: 29375 - DNA, 1295 bp, Oryza sativa
  Clone ID: PAT_MRT4530_33884C.1
acctgtgattcaacggctgacgcaccgatgctccatcaccactcaagctctgccgacatgagggacccctgcacaggcgtcccccgccggccagtcttcgtgcgccgaagaccgcgccacacccatcggcagctcctcctcacaccgaggtcgcctcctccatcgccggctgcgcctctcatgccaagccggcctcctccaccggacgcgcccctcgcaccaatccggcctccctccctcggccgtgcctttcgtgccaagccggcctccatctccgccgcccgcgcctctcgcgccgagctggcctccgatgccatcggctgcgcctctctgcgccaagccggtctccaacccctccttcaaacgatgccgcgccgatcagatgcagccgtctgccacgccctcggctagccgttcgaggccgccatgccagtcaccgccaccgcagccccagctaccgaaaggccctgccgcctcgccgtcgccatcctcacttcctccgccgcagccacgtccatggtcgccacggccattgccacaagccgtccgccgtcgcagcctgtagtcaccggcacccgctgtcgctgcccgcgaggccactgcatcctccgccaccgtcgccagctgccgccgcagtaggcaacgccgcgagcacagccgccaccgccaccacgggccatagccgcggctgcctcaaccgctgccgtcggccatcgccgtcgactgccgccgccgtcaccacgacggcacctcatccccgctgccggcttaggagccgacctcccgcgccacccagccgtgcctcgccgcctcgtgccgcctcatcaccgcagccggctcgagagctggcctcccgcgccggggaggccggattcggacgagggtggccggatctggccaggggacgccaaatctggtgacgccgcgtcgctgtcgtcacccttgccgacaccgtctctgcccgttgttctggtcgtctccgcctcgccgtcgacgctgccgctctccccgttgccgccaccactgggagctagcccttcgcccagctccgtcgaggccgttggcaccccagatccaggtggggtcgtgggctccaaaccgcgtcctcgggggaagaaaggaggccccgccgccgccgtccttgcggccacgcagtttccagcggcccgctcgggtggcggcgaggcgaagaagggaaggaggcggggtggtagtgctgcggtggtggcggtcgccacccgtgtcgcccctgccctagcagcgacacgggggcaagaatccttaattgcagacat

SEQ ID NO: 29376 - DNA, 485 bp, Oryza sativa
  unsure (1)..(485): unsure at all n locations
  Clone ID: PAT_MRT4530_33885C.1
acccgggnncgacccacgcgcccggcgagagctagccggcgaaccaggggggagccagcccgccnnccagcgcccgcgcanccggccgcggcgcagccgcaaggcgnccaagagcgacaggggccggcngcncaacggcgcggcggcggnggagcncaacgcggagccgacggaggcgcggcccangccgnacgngggcacgcacgagggggggccccggagaacacccgcggcgagggccacggcagcgccggcgacgggcggacgcngggaancngccgccacgagcccacccacggcgccaccccgnncaagggcgccggcaaccgcgccacgcnccgcaacgncancgagcagccgcgccgcnncccccccgacggcggcgccagcgccgncgcgcgngaccncanccgcggccggcncgncaaggagccccacaagcggagcgcccgcaccaggggcgccaccgagagcaagcagcaccc

SEQ ID NO: 29377 - DNA, 169 bp, Oryza sativa
  Clone ID: PAT_MRT4530_33886C.1
atggcgctggactggcagctgctactgaccttggcttcactccaaatgagtcgggagcggactgaggagaagggaggaagtggcagcgtcgtcgggagggcactactggagaaacgactattaacgaccggaaatttggtcgttaaaagtccaaatgtggtcgttaaag

SEQ ID NO: 29378 - DNA, 1237 bp, Oryza sativa
  Clone ID: PAT_MRT4530_33887C.1
atgaggatacgggagctgcgggatggcgccgggggatcggaggaggcggaggaggacgagcgggaggaggcgaggggcgggggcgggggcggaggcgggggcgaggtggtcgccgtcgtgcggctgagggcgaagcgcgcgctcgtcggcgccggcgcgagggtgctgttctacccgacgctgctctacaacgtcctccgcaaccggttcgagtctgagttccggtggtgggatcgcatcgaccagtatgttttgctaggtgctgtccctttctctagtgatgtaccgcatctcaagcaacttggagtaaggggcgttgtcacactgaatgaatcgtatgaaactctggttccaacatccttataccaggctcacgggatcaatcatctcgagattcccacgagggactatctatttgccccttctctagaggatatctgtcaagctgtcgattttattcaccgaaatgcatcacaaggtggtagcacttatgtacattgtaaggctggaaggggacgaagcaccactatagttttatgctatttgattaagtacaggaacatgactcctgaagctgctttagatcatgcacgctgccatcaaattcagagttcaaaccgcacccacccagtaagattcagtgaacaatcaagtgaagctattgtggaggctgaagttgatgggttcaccaccgaattcgacaacgagcattttgttttgccgttatgggaaggtatgctagccaagccttcaagccccagcaggtccatcgatgcagtcgtagtaacagaggaagatctcgagggatacgaaacttatgccgatgctagcagtgacactgtatcagtggaagtggtaatccgtcagaagcccatgattaggaggctatcctgcttccttgggtcgttgaagcttaccagcaattgcgaaccatctcctccaagacgtcttgcggaggttcgtgcctgctaggtaaatgtccaaattttactgctttttccacgttgttagtcagcagagtgtaagtatcggcatgcatgatgctccacagcttgagggaatgccctccggagaaatttatactccttcatatgttgttgtactagtgtctgcgatgtacccgagagagagagagagagagagagagagaggagaggcgagttttgagagcttgtgatttcatttttccagtaataaaaaggggtgatgattttcttgggtgaaaaaaaaaaaaaaa

SEQ ID NO: 29379 - DNA, 2346 bp, Oryza sativa
  Clone ID: PAT_MRT4530_33888C.1
atgaggggaggaggaggaggagggaaggaggtggaggagagggggaaggtgatgggcccgctgttcccgcggctccacgtcaacgacgccgccaagggcggcggcccgcgggcgccgcccaggaacaagatggcgctctacgagcagttcaccgtgccgtcccaccgcttcagcggcggaggcggcgcgctcgcctcggctcggggcagcctggcgcgctcgacgtcggcggcgagccagagccaggtatatggatgtgacatgcctctttttgagccgttcaatgtgccttccaatggacctggccagtctgttgaaaagatgaattcaaattctgtcaacagacagattaatggttcaagaaaagattcggggatgttatccactcagcctaagggcattgataaatatggttcaggatcaagggctgagtgtgccccacagcaaagggtggaaaagggcataaagagttcttcgggaaggaaattggctgatgatgatgaattcattgtaccttctgttttcagtgccagatttcctcaatattctactaaagagcgtgcgggggttcaagaggaatcaacaccccttgttgctctcagtccgcacaaaagccctccagcagtgtccaaatcaccgacaaagtgttataacactgttagtaagaacttggagagaatcaatgtttctgatgtgaaatcaaggggttctcagaaagacaaggagacaggaccagcacaaacattgaaaaatgtggaagttgaacatttttcatcatttgaggcatccaaagatatgtttggaagcaaacatgctaaagtatgtcctaagacaggcactataaatgatttggatgagccacatttggaaaacagcgagcatcaagcgacaagtagaaacgggagttccgtgaaatttcagaaccctccagtgagaagaaatacaatatccgctaaaccatctcctggtattgaaaataccaatgggcattgtaatttacctcaaggaggcttaaaggaagctggtacaaagagaaaaaggttggaagcacaggataatgcagagaaaattgatgatttgtctgattcctcagtggagtgtataactgcttgggagatttctccagatgaaattgttggtgccattggtgcaaagcatttttggaaagcaaggcgggctatcataaatatatcattgatgaaagcaaaatataatgatatactgattcttctatatcaacagagggtttttgctgcccaagtttttgagctgcataagttggtaaaagttagttcatggatagaatttggtgtagagtatgaaaataaccaaaatttgtatttgacttacaaacaggtgcagaagttgattgcagcatcgccacatgtacttattgaaggtgatccttgccttggcaatgccttgttagctagcaagaaaaaaatggcggaagagaacttgaaagctcagcctgtgttagttgcaaccaatgatgatgtgcagccaagtctacaggaaccagaattatcgaaagaaaattctgaagagaacccaccctctcctcgtgatactgcacctgtcagtggtcatcatgatcaaactgcaaaaatcggtgcatcaaaaagcaatcttcgagctacgcccgttgcttctgataacagacagaataactgtggggttcaactacaaccaccgcagaatcagtggcttatccctgtcatgtctccttcagaagggcttgtctataagccttattctggcccatgtcctccagccggaagcatattggccccattttatgccaattgtactcccctgaggctcccatcgacaactggagatttcatgaattcagcatatggtgttcctatacctcatcaaccacaacatatgggtgctcctggcactcctaccatgcctatgaactacttcccgcctttcagtgtaccagtgatgaacccagttgcactagcatctgcagtagaacaaggcaggcatccttctatgccacagccttatgggaacttggagcaacactctcggatgtcatgcaacatgtcacatccaagtggcatttggagatttcatgcctcaagagatagtgaggcgcaagccagcagcgctagcagtccttttgacaggctccaatgcggtggaagtggtcctgtgtccgccttccctacagcatcagctcagaacacacagcctcagccctcatctggcagccgggacaaccagaccaatgttattagggtcattccgcataataattcacaaacagcttcagagtcagcagcacggattttccggtcaatacagatggaaaggcaacaagatgactcgtag

SEQ ID NO: 29380 - DNA, 2557 bp, Oryza sativa
  unsure (1)..(2557): unsure at all n locations
  Clone ID: PAT_MRT4530_33889C.1
atggaggccgcggcggcggcggcgtcggcggcgccgcacctgctgcactgcggtggcttcggccgtctgcctggtctcgcggcgtcgctgccgggccgtcggcgccggcgcccatcccgccgcgtcctcgccgtcgccacggagcccaagccctccgcctccgccccggcgcctcgctccaggtcgaggacgaggacccctaatgacatctcctccacccggttcggggaggtgtccaaggagatccagcgagtgcggaagcagatggaggaggacgagcagctcgccacgctcatgcgcggcctccgcggccagaacctccgcgactcccaattcgccgacgacaacgtccgcctccgcctcgtcgaggtttcatccatgaacaacaatgaggcgctgcctctcgtgtacagtcctgagatcatttctgcatactgggggaagcgcccgagggccgtcgccacacggatcgtgcaattgctgtctgttgctggtggtttcatctctcatctcatatcagacctcataaacaacaagctcaaggagaatgaagtagcgcgtgcgattgagctgagggaaattgtgacatctttgggtcctgcttatattaagcttggccaagcactaagtattcgaccagatattctgtcccctgcagcaatgactgaattgcagaaactttgtgataaggttccttcgttctccgatgatcttgcaatgactcttcttgaagaagagcttgggcggccgtggcacgaaatatactctgaattatctccttccccaattgctgccgcatctctggggcaggtttacaagggccgcttgaaagaaaccggagaacttgtagctgtgaaagtacagaggccgtttgtacttgaaactgtcacaattgatttattcatcattagaaacttgggcctggtactaaggagatttccgcaggtctccattgatgttgttggcctagtagatgagtgggctgctcgatttttcgaagaacttgattatgtgaatgaaggagaaaatggcaatcgctttgctgaaatgatgaaaaaggatcttccgcaggtcgttgtaccaaagacataccagaaatacacatctagaaaagttcttactacacaatggatagatggggagaagctgtcacaaagtacagaggatgatgttgggtcattggtcagtgtaggagtcatatgctacctaaaacagttgcttgatactggatttttccatgctgatccacatcctggcaatatgattaggacaccagatggaaaactagctattcttgattttgggcttgtaactaaattgacagatgaccaaaagtacggaatgattgaagcaatagcccacctcattcatcgtgattatgatgcgatagtcaaggactttgtgaagcttggtttcatccctgagggagttaacttggacccaatcttgcctgtattggccaaagtttttgatcaagcacttgaaggaggtggcgcaaagaatataaactttcaagagttagcagcagatctagcacagataacatttgattacccattcaggatacctccgtactttgctttgattatcagagccattggagtattggagggtatagctttggtgggtgaccctgaatttgccattgtggatgaagcatacccatatattgcgcagagactactaacagatgagtcacctcgtctaaggagcgccttgcgatacacaatatatggcaaaacaggtgtattcgacgcagaaagattcattgatgtcatgcaagctttcgagaattttattcgtgcagcaaagagtggtggtggggagaacttgaaaggcagcatggctgagctggctgagataggaactctaccaagcacaagtttagttcctgcatttccaatggccatatcacagcctgagcaaccagtcaaagctcgggctgctctttcttttctactctctgagaggggcgacttttttagggagttcattcttgatgagattgtcaaagccatagatgcagtttcaagggagcaactgatacaaattgctgcatcttttgggctaggaaatgctaccccagttttcagcatggttcctgtcagagctagagcactgcttcctacaatcacagaggaagacagggtcatcttgaacaatgttgagaaggttgtgaagtttttgacagctgggaacaatccaacaacaattgatggggatgtaaatgttgtgtatcttgtacaagagcttctacctgtgttgccgagcatttcgtcgaagatcctaccagaggtcatgagccggttgtcatcgcgagtatttgcacggttgatccgggaggcatttttgtgaagtgatttttcttacttccgacgggagattgcaaacagttatttctcccttttttgcaaacaatacatcacaaatgatgatagaactcatagaagattgtacagctaaacgttgtatagaaattatacacatatacgcagatttaaccaatttttaactagcaaaaaaaaaaaaaaaatggngnntaaaaaaaaaaaaaaaa

SEQ ID NO: 29381 - DNA, 2376 bp, Oryza sativa
  Clone ID: PAT_MRT4530_3388C.1
atggaaagacctaagagccctctgaatccttttcattgcatatgttctttgcaattggattttgttccgggaaaatggggatctgttcttgtggttcaagggaaaaatcttggtcgctcgtttaaaatggccggtcacccacccaaccaccgcggagaaggcatgattgatttcgtggcagagttggcacgcatgaccctggtggtgggctaccccgacgcgccggagtacacgacgattccgccgctcagtggcgagcttcctcaccgtgtccgcttggaggtccatggttacgtggggacttgcctcgctaacatggcggtcgaggcatctggaggcacagcagatcacgcctgtcaggaggcagcctacttgatgatggccagactacgggagcgccacgactacatcttccacgacacggcgtaccgctaccacccccgtcgagcccatggtgatggcgtcagctccttccgtccgacagctggcgagaacgacaccaccttcggtcacatgtgtgctgtgatgaggggattggaccagatgcactcggacctgcacaaggcgaccaaggccttgaatgatgggaagctcatgaggatcgtcgctctgaaggacgagatagcgcgcctgaagaaggagaatgctcagttgaagggtcttccagcaccaggaggagtccggatccgcactacgccccgtaagaggacgactgcacccgtgcgcatccagcttgcgcccaggaacccacctccaccagcagctcccgcagcacctccagttccgcccgcagctccggcagttcccgcagttcctccagctccagctcccgcgttcactctctccttcgctccagcatcagccgccagaggtccagccagtggtaccggaggttgcttgtttgggatggtctacaccaggactggcaaccgcacgacaggcgagggcagcaacggtgaagaacgcgctgatggtgtgcaccccaacagtgattctggcaatggtccgccaccacttcccgagaatccgacccttgcccaagttatggcacatcagactcagatgatggcagccatgatgcagcagatgcagcagcagcaccagcagatgcaccagaggatgatgcagcacgccgaacagcagcaccagcagtttggtccccctccccctcagtccaagttgccggagtttctacgtgtcaggccacccaccttctccagcaccaccaacactatggaggcaaatgactggctccatgcgatagagaagaagctgaatctcctgcagtgcaatgatcaggagaaggtcgctttcgccacacaccagcttcagggtcctgcgtcagcttggtgggacaaccacatggccacccgcccaccgggtactgaagtcacatgggcagagttctgccgtagcttcaggaaggcacaggtgccagacggggtcgtggcacaaaagaagagggaattccgggcgctccatcagggcagcaggactgtgacagagtacctccatgagttcaatcgcctcgcgcgatatgcaccagaggatgtccgcaccgacgccgagaagcaggagaagttcatggcgggtctggatgacgagctgaccaaccaactgatatctggggactacgccgactttgagaggctggttgacaaggcaatccgccaggaggatcaacgcaacaagatggataggaagaggaaggccgcgcagttcagggcacatcagggaagtcaccagaggccgcgcttcactcccgggcagcagggtggacctaccaccatgattgttcgtcaacaccgcccattcaaccccagcaacttccaccagggctccagtggcagccagaatcaccatggaagtcagcccaaccgcggtacagctccacgcccaccgatggcaccggcacagtcaggccagcccgcacaagccaagaaggagacgggagcaaaaccagggtcctgcttcaactgtggcgagcttggccacttcgctgacaaatgcccgaagcccaggcgtgccggaccaaggtttatccaggctcgtgtcaaccacgcatctgcggaggaggcacaagcagcaccagaggtcgtactgggtacgtttcctgttaactcaatccctgcaacagtactttttgattctggtgcaacgcattctttcatctccaagaaatttgtcgggatgcatgggttaataagagaggaacttagcacaccgatgcgggttcataccccagggaatagctccacttcggttcaattcagcccttctataacaatagaaattcaaaggtcacccggttttgccgagttcagtggagtcatcattcggaagaggaagcgacctgggaaagggaagatgagttga

SEQ ID NO: 29382 - DNA, 339 bp, Oryza sativa
  Clone ID: PAT_MRT4530_33890C.1
atggatgccatcgtcagcctcggcaggcgcagtgtcctcggtgcgtcattctggaggttcgcctacttcatcgacggtgatcttaggagcttcgtgtggctcggcgacgccgcggcgccggcgcaaggtggtggtcggaagagcaccactaccccgctcatcccagtcggcgtcgacaaggcgccgaacattgaccctaacctctacttcgtcgccatcaccggcatcaaggtcggcagcggcgagactgtcaacgacaaggccgccgcaatcatgaccactgataccatccatttcacgcttctcaacctggttcacttcgaccacctcaagaagtag

SEQ ID NO: 29383 - DNA, 2721 bp, Oryza sativa
  Clone ID: PAT_MRT4530_33891C.1
atgggatgttataggttatcacaggagggaggcatcacctatacaaatttaatccagcaagtctctgtcttacctaatgcaatttttcctggtgctcaggtggcaggtggtcttcccttgctccaaaacacttgtggcaatttcatgcagctattgcaagctcctattgaatcagagactgctctatatttgacatccaatagatttgagtatgacaacatcttttggggtttcgatcctcacaatggttatcaacaaaatgacctgcaaaatgcacaaacagacacctctcagatgtgcaactctttgccacaaagtgtagctgtgcatcctcttgtggcatcactggacatgctatatgatgaaatgcagaaatcaagtgctgatgttgataatcaagctgagatgtgcaggtcaacagtacaattgaaagcatcatctgtagaagtgatttataatgaaatgcagactcaaaccattgaggctgatgcctgttttgaccagcactttgagcaagcaacaaaagaggatttattgtctgatcatgcaatagttacatttcagcaagttgaggaaatagaacaagataaaagtgcagaaaatccagatcaaaattttagtgaggaagatataaacatatttctggagaatgaaagtgtaacagctgttcagagaggtggtcaggaagctaacagtgcacatgtgccgtcaatcaacaaagtttttgctgatgagaatgaagcttttgacttctacaatggttatgcttatatggttggtttctctacatgcaaagctagcaattaccacagtaggaaaactgatattgtgacaaggcacacattcaaatgcaacaggtggaggaaaccaagtgatccaaaggagaaggacctgcctgaggttgatgaagttgagaattgtctgcaaacaaacacaacaaatccattagtaaaaaatagaaaacagaacaaagtggtttacacaaattgcaaagctgagatggtgataacattgaagaggggcttttggtacattacaaggcttaatctagagcacaatcatccactatctccaccagaagaaagaaaattcctaaggtctcacaaacatatgacagatcaggagaaacttttgataagaactctgaacaaaatcaatgtgcccacaaggacgattatgtctgttttgtcatatgttaggggtggcttgtctacagttccttacacaaaaaaggctatgagcaattatagagattgtgttagaagagaaagtgggaaaaatgacatgatgcagtgtttggatttttttgagaagaaaagatcagaggatccattgttttattttagattcagaactgatgagaacaatgttgtgaagagtctgttttggtccgatgggaacaacagaaaattttatgagatgtttggtgacatagttttgacacgacggataactagtcatggtgacaattgcctatttggttatgcattcctacaagatgaaacaagtgagacttttcagtggttgttcaatacgttccttgattgtatgggtggcaaggctcctgctactattataactgatcaagacttggcaatgaaagctgctattgccatagtttttccagacactgttcataggaattgcctgttccatatgttatcaaatgcaagggacaaaacaggaaggacattcaattcagaggatgaagaagtttacaaggatttccatgatattgttacaaaatcccagacagaggctgaatttgaatatttgtggaaagatttcataagaagaaagaatctgtataatgttaggtattttcagcttatgtgggtcactagaaagagatgggcaccagtttacttcaaaagcaattggtgccctttgattcagacaacagcaaggagtgaggggacaaattcaaggaatattgttccagatacttggtcagaatatcaatttgagaagcaagctgcaaaactgtatactaggaagatattttgggcatttcagcgtatcttgcaaagctataccaagtatgatgtgactgtgaaagtgcacgattctatttttgaggtgtacaaatcagagattcatgcactgcaggatttcagaaaaaggaagtatattgtggttgttgatgctatagctgaagaatatgaatgtatttgttcaagatttaagaaggatggtattttgtgtgttcatgtgctcaaagtactcattcacttgaacataacaaaactacctgagaaatattttattgaaagatggaggctgaaagacaagaaccatgaattatttgtgccaaacacattgatgcctgctgctgttcttgaaagcaaccctttactcaggttcaacatcttgtcacagaaaatgattaagttggctttagatgcatcaaaaacaaaagaaaattttgtatatgtgatgaatgaaagtgacaagattgaagatgggttgaaggcaatgagtgacacggctcctaatgatgctactgttcatgttcaggatgcagcggcgacaacttatggtgtagcttctgttggtgctcaaactggtataccgatgggtcctagtggtgttggtattgatgctgagatcacaaagggtgcggttgctgaaactgaaacaacagatatggttggaattgcttctacttctgttttgctggatccaaaatgctctaatagcaaaggcataactgattgttaa

SEQ ID NO: 29384 - DNA, 1275 bp, Oryza sativa
  Clone ID: PAT_MRT4530_33892C.1
atggagggcacaaagacagaatcaaatgaagactacgggatgttattcagattatcacaagagggaggcatcacctatacaaatttaatccagcaagtctctgtctcacctaatgcaattcttcctggtgctcaggtggcaggtggtcttcccctgctccaaaacacttatggcagtttcatgcagctattgcaatctcctattgaatcagagagtgctctatatttgacatccaatagatttgagtatgacaacacttttgggggttttgatcctcacaatggttatcaacaaaatgacctgcaaaatgcacaaacagacacctctcagatgtgcaactctttgccacaaagtgtagctgtgcatcctcctgtggcatcactggacatgctatatgatgaaatgcagaaatcaagcgctgatgttgataatcaagctgagatgtgcaggtggaggaaacctagtgatccaaaggagaagggccttcctgaggttgatgaagttgagaattgtctgcaaacaaacacaacaaatccattagtaaaaaaaagaaaacagaacaaagtggtttacacaaattgcaaagctgagatggtgataacattgaagaggggcttttggggtggcttgtctgcagttccttacacaaaaaaggttgatttcagaaaaaggaactatattgtggttgttgatactatagctgaagaatatgaatgtatctgttcaagatttaagaaggatggtattttgtgtgttcatgtgctcaaagtactcattcacttgaacataacaaaactacctgagaaatattttattgaaagatggaggctgaaagacaaaaaccaggaattatttgtgccaaacacattgatgtctgctgctgttcttgaaagcaaccctttactcaggttcaacatcttgtcacagaaaatgattaagttggcttcagatacatcaaaaacaaaagaaaagtttgtatatgtgatgaatgaaagtgacaagattaaagatgggttgaaggcaatgagtgacacggctcctaatgaggctactgttcatgttcaggatgcggcggcggcaacttgtggtgtagcttctgttggtgctcaaactggtatactgatgggtcctagtggtgttggtattgatgctgagagcacaaagggtgcggttgctgaaactgaaccaacagatatggttggaattgcttctacttctgttttgctcgatccaaaatgctctaatagcaaaggcaggcacaagagtgagccatga

SEQ ID NO: 29385 - DNA, 2748 bp, Oryza sativa
  Clone ID: PAT_MRT4530_33893C.1
atgacggtgacgaccaccttcttctccgtctcgggctccttctcggcgcgcttctcacgcttcggcggcggcgggcgtgtcgccgccgccgtggatcgcacgccggctcgtccttggacgacggcggcatctgcttcttctgctgagtgtctgcttttccttatgcacaatagggtgactgaatttctaatagtgcacaactcagaatatcttgattcactaactgttaaaactgctctggttcaaggcacagagacagaatcaaatgaagactatgggatgttattcaggttatcacaggagggaggcatcacctatacaaatttattccagcaagtctctgtcttacctaatgcaattcttcctggtgctcaggtggcaggtggtcttcccttgctccaaaacacttgtggcagtttcatgcagctattgcaagctcctattgaatcagagactgctctatatttgacatccaatagatttgagtatgacaacaccttttggagtttcgattctcacaatggttatcaacaaaatgacctgcaaaatgcacaaacagatacctctcagatgtgcaactctttgccacaaagtgtagctgtgcatcctcctgtggcatcactggacatgctatatgatgaaatgcagaaatcaagtgctgatgttaataatcaagctgagatgtgcaggtcaatagtacaattgaaagcatcatctgtagaagtgatttataatgaaatgcagactcaaaccattgaggctgatgcctgttttgaccagcactttgagcaagcaacagaagaggatttattgtctaatcatgcaatagttacatttcagcaagttgaggaaatagaacaagataaaagtgcagaaaatccagatcaaaattttagtgaggaagatataaacatatttatggagaatgaaagtgtaacagctgttcagagaggtggtcaggaagctaacagtgcacatgtgccgtcaatcaacaaagtttttgctgatgagaatgaagcttttgacttctacaatggttatgtttatatggttggtttctctacatgcaaagctagcaattaccatagcaggaaaaccgatattgtgacaaggcacacattcaaatgcaacaggggtggcttgtctgcagttccttacacaaaaaaggctgtgagcaattatagagattgtactagaagagaaagtgggaaaaatgacatgatgcagtgtttggatttttttgagaagaaaagatcagaggatccattgttttatttcagattcagaactgatgagaacaatgttgtgaagagtctattttggtccgatgggaacatcagaaaattttatgagatgtttggtgacataattagttttgacacgacgtacaagaccaataggtgtgatttgccctttgctccatttgtagggataactagtcatggtgacaattgcctatttggttatgcattcctacaagacgaaacaagtgagacttttcagtggttgttcaatacgttccttgattgtatgggtggcaaggctcctgctactattataactgatcaagacttggcaatgaaagctgctattgccatagtttttccagacactgttcataggaattgcctgttccatatgttatcaaatgcaagggacaaaacaggaaggacattcaattcagaggatgaagaagtttacaaggatttccatgatattgttacaaaatcccagacagaggctgaatttgaatatttgtggaaagatttcataagaagaaagaatctgtataatgttagtgtttctgcattcctagcacagtatgaaaggattgcagaaacaatttatgagtgcttcaaagaacaggaatcgctgactaggaatactgttctagatacttggtcagaatatcaatttgagaagcaagctgcaaaactgtatactaggaagatattttgggcatttcagcgtatcttgcaaagctataccaagtatgatgtgaccgtgaaagtgcgcgattctatttttgaggtgtacaaatcagagattcatgcactgcaggattttagaaaaaggaagtatattgtggttgttgatactatagctgaagaatatgaatgtatctgttcaagatttaagaaggatggtattttatggaggctgaaagacaagaaccaagaattatttgtgccaaacacattgatgcctgctgctgttcttgaaagcaaccctttactcaggttcaacatcttgtcacagaaaatgattaagttggcttcagatgcatcaaaaacaaaagaaaagtttgtatatgtgatgaatgaaagtgacaagattgaagatgggttgaaggcaatgagtgacacagctcctaatgatgctactgttcatgttcaggatgcggcggcgacaacttgtggtgtagcttctgttggtgctcaaactggtataccgatgggtcctagtggtgttggtattgatgctgagagcacaaagggtgcggttgctgaaactgaaacaacagatatggttggaattgcttctacttctgttttgctggatccaaaatgctctaatagcaaaggcaggtacaagagtgagccaagaaaaaagaggctgatagatgtgattagaagcaagggttcagtgacatgtagtggttgtgggtcccatgaccataacattcggacttgtcccaaaaaaagagaagtcaaatgcaacagaagtgatgaaggagaggaaatctag

SEQ ID NO: 29386 - DNA, 342 bp, Oryza sativa
  Clone ID: PAT_MRT4530_33894C.1
cctctgcagcttttctcatgaattcatggatcgctcatgtcacgttaaggtactgcagaaaaaggagttgtgctgcggaaccatacaggggaggttatttttgctgctttttgtcatgttgatcgctgtagcagtgctctggaagcggaactcctcgcccgtagggatggtctcgccctcgccctacaatgtaccctgctgccaatagtgattgagacagactgcttggcgatgacccagcttatccgtgatgcagcaggtgctaaatcggagctggcgtttttaatcagggagattgcttctctcttgatgggaaatagggatattagtttcagtaagtgt

SEQ ID NO: 29387 - DNA, 2886 bp, Oryza sativa
  Clone ID: PAT_MRT4530_33895C.1
atggacaggaagaacctgagaaaattttacttaatggagggcacagaggcagaatcaaatgaagactatgggatgttattcagattatcacaggagggaggcatcacctatacaaatttaatccagcaagtctctgtctcacctaatgcaaatcttgctggtgctgaggtggcaggtggtcttcctctgctccaaaacacttatggtagtttcatgcagctattgcaagctcctattgaatcagagagtgctctatatttgacatccaatagatttgagtatgacaacaccttttggggttttgatcctcacaatggttatcaacaaaatgacctgcaaaatgcacaaacagacacctctcagatgtgcaactctttgccacaaagtgtagctgtgcatcctcctgtggcatcactggacatgctatataatgaaatgcagaaatcaagcgctgatattgataatcaagctgagatgtgcaggccaacagtacaattgaaagcatcatctgtagaagtgatttataatgaaattgtagcagttgttcagagaggtggtcaggatgctaacagtgcacatgtgccatcaatcaacaaagtttttgctgatgagaatgaagcttttgacttctacaatggttatgcttatatggttggtttctctacatgcaaagctagcaattaccatagcagaaaaaccgatgttgtgacaaggcacacgttcaaatgcaacaggtggaggaaaccaagtgatccaaaggagaaggacttacctgaggttgatgaagctgagaattgtttgcaaacaaacacaacaaatccattggtaaaaaagagaaaacagaacaaagtggtttacacaaattgcaaagctgagatggtgataacattgaagaggggcttttggtacattacaaggctcaatctagagcacaatcatccgctatctccaccagaagaaagaaaattcctaaggtctcacaaacatatgacagaccaggagaaacttttgataagaactttgaacaaaatcaatgtgcccacaaggatgattatgtctgttttgtcatatgttaggggtggcttgtctgcagttccttacacaaaaaaggctgtgagcaattatagagattttgttagaagagaaagtgggaaaaatgacatgatgcaatgtttggatttttttgagaagaaaagatcagaggatccattgttttatttcagattcagaactgatgagaacaatgttgtgaagagtctgttttggtccgatgggaacagcagaaaattttatgagatgtttggtgacatagttagttttgacacgacgtacaagacaaataggtatgatttgccctttgctccatttgtagggataactagtcatggtgacaattgcctatttggttatgcattcctacaagatgaatcaagtgagacttttcagtggttgttcaatacgttccttgattgtatgggtggcaagcttcctgctactattataactgatcaagacttggcaatgaaggctgctattgccatagtttttccagacactgttcataggaattgcctgttccatatgttatcaaatgcaagggacaaaacaggaaggacattcaattcagaggatgaagaagtttacaaggatttccatgatattgttacaaaatcacagacagaggctgaatttgaatatttgtggaaagatttcataagaaggaataatctgtataatgttaggtattttcagcttatatgggtcactagaaagagatgggcactagtttacttcaaaagcaattggtgccctttgattcagacaacagcaaggagtgaggggacaaattcaaggtacaaagctgacatttgttcatctcatagtgtttctgcattcctagcacagtatgaaaggattgcagaaacaatttatgagtgcttcaaagaacaagaatcgctgactaggaatactgttccagatacttggtcagaatatcaatttgagaagcaagctgcaaaactgtatactaggaagatattttgggcatttcagcgtatcttgcaaagctataccaagtatgatgtgaccgtgaaagtgcgtgattctatttttgaggtgtacaaatcagagattcatgcactacaggatttcagaaaaaggaagtatattgtggttgttgatactatatctgaagaatatgaatgtatctgttcaagatttaagaaggatggtattttgtgtgttcatgtgctcagagtactcattcacttgaacataacaaaactacctgagaaatattttattgaaagatggaggctgaaagacaaaaaccaagaattatctgtgccaaacacattgatgtctgctactgttcttgaaagcaaccctttactcaggttcaacatcttgtcacagaaaatgattaagttggcttctgatgcatcaaaaacaaaagaaaagtttatatatgtgatgaatgaaagtgacaagattgaagatgggttgaaggcaatgagtgatacggctcctaacaaggctactgttcatgttcaggatgcggcggcgacaacttgtggtgtagcttctgttggtgctcaaagtggtatattgatgggtcctagtggtgttggtattgatgctgagagcacaaagggtgcggttgctgaaactgaaacaacagatatggttggaattgcttctacttctgttttactggatccaaaatgctctaatatcaaaggcaggcacaagagtgagccaagaaaaaagaggctgatagatgtgattagaagcaagggtttggtgacatgtagtggttgtggatcccatgaccataacattcgcacttgtcccaaaaaaaagagaagccaaatgcaacagaagtga

SEQ ID NO: 29388 - DNA, 339 bp, Oryza sativa
  Clone ID: PAT_MRT4530_33896C.1
atgccacaggaggatgcacagctacactttgtggcaaagagttgcacatctgagaggtatctgtttgtgcattttgcagaagaagcagatgccgccgtcgtccaaggacgagccggcgtgcgatccacggcggcggcgacacgcccgccgccgccgaagcgtgagaagcgcgccgagaaggagcccgagacggagaagaaggtggtcgtcaccgtcatgaacggcgaggacgatgggtccgcggacaccaggcggcgccgctgcgtctgctccgccgccggccagccggccgggcacttccggtgtgtgcgcgcggagacggacggtgccgacgagtga

SEQ ID NO: 29389 - DNA, 156 bp, Oryza sativa
  Clone ID: PAT_MRT4530_33897C.1
atggcggagctgcgggtggagccggggccggtgccgaagcttcttctccggcgtcgcacgcaagcgcgaggccgcgtgggtgaggaggtggaggctgcgagatcggcgccctggccgggtgcgcaccgcgttggcaactgcagtgctaaaatttga

SEQ ID NO: 29390 - DNA, 2463 bp, Oryza sativa
  Clone ID: PAT_MRT4530_33898C.1
atggagggcacagagacagaatcaaatgaagactatgggatgttattcaggttatcacaggagggaggcatcacctatacaaaattaatccagcaagtctctgtctcatctaatgcaattcttcctggtgctcaggtggcaggtggtcttcctttgctccaaaacagttgtggcagtttcatgcagctattgcaagctcctattgaatcagagactgctctatatttgacatccaatagatttgagtatgacaacaccttttggggtttcgatcctcacaatggttatcaacaaaatgacctgcaaaatgcacaaacagacacctctcagatttgcaactctttgccacaaagtgtagatgtgcatcctcctgtggcatcactggacatgctatatgatgaaatgcagaaatcaagtgctgatgttgataatcaagctgagatgtgcaggtcaacagtacaattgaaagcatcatctgtagaagtgatttataatgaaatgcagactcaaaacattgaggctgatgcctgttttgaccagcactttgagcaagcaacagaagaggatttattgtctgatcatgcaatagttacatttcagcaagttgaggaaatagaacaagataaaagtgcagaaaatccaaatcaaaattttagtgaggaagatataaacatatttctggagaatgaaagtgtaacagctgttcagagaggtggtcaggaagctaacagtgcacatgtgccgtcaatcaacaaagtttttgctgatgagaatgaagcttttgacttctacaatggctatgcttatatggttggtttctctacatgcaaagctagcaattaccacagtaggaaaactgatattgtgacaaggcacacattcaaatgcaacaggtggaggaaaccaagtgatccaaaggagaaggacctgcctgaggttgatgaagttgagaattgtctgcaaacaaacacaacaaatccattagtaaaaaatagaaaacagaacaaagtggtttacacaaattgcaaagctgagatggtgataacattgaagaggggcttttggtacattacaaggcttaatctagagcacaatcatccactatctccaccagaagaaagaaaattcctaagttttgacacgacgtacaagaccaataggtatgatttgccctttgctccatttgtagggataactagtcatggtgacaattgcctatttggttatgcattcctacaagatgaaacaagtgagacttttcagtggttgttcaatacgttccttgattgtatgggtggcaaggctcctgctactattataactgatcaagacttggcaatgaaagctgctattgccatagtttttccagacactgttcataggaattgcctgttccatatgttatcaaatgcaagggacaaaacaggaaggacattcaattcagaggatgaagaagtttacaaggatttccatgatattgttacaaaatcccagacagaggctgaatttgaatatttgtggaaagatttcataagaagaaagaatctgtataatgttaggtattttcagcttatgtgggtcactagaaagagatgggcaccagtttacttcaaaagcaattggtgccctttgattcagacaacagcaaggagtgaggggacaaattcaaggaatattgttccagatacttggtcagaatatcaatttgagaagcaagctgcaaaactgtatactaggaagatattttgggcatttcagcgtatcttgcaaagctataccaagtatgatgtgactgtgaaagtgcacgattctatttttgaggtgtacaaatcagagattcatgcactgcaggatttcagaaaaaggaagtatattgtggttgttgatgctatagctgaagaatatgaatgtatttgttcaagatttaagaaggatggtattttgtgtgttcatgtgctcaaagtactcattcacttgaacataacaaaactacctgagaaatattttattgaaagatggaggctgaaagacaagaaccatgaattatttgtgccaaacacattgatgcctgctgctgttcttgaaagcaaccctttactcaggttcaacatcttgtcacagaaaatgattaagttggctttagatgcatcaaaaacaaaagaaaattttgtatatgtgatgaatgaaagtgacaagattgaagatgggttgaaggcaatgagtgacacggctcctaatgatgctactgttcatgttcaggatgcagcggcgacaacttatggtgtagcttctgttggtgctcaaactggtataccgatgggtcctagtggtgttggtattgatgctgagatcacaaagggtgcggttgctgaaactgaaacaacagatatggttggaattgcttctacttctgttttgctggatccaaaatgctctaatagcaaaggcataactgattgttaa

SEQ ID NO: 29391 - DNA, 516 bp, Oryza sativa
  Clone ID: PAT_MRT4530_33899C.1
ctttttgatgctatcgagattttaacacaatctctttcgagaaattgttctgggtttactctgcttgttttcatccttcatgtgatggctctgcagagactaaatgaccttaacaggcagattaatgcttttgattttttgcttgaagatgatacagatcaatttgacaaggagaatagtgaaggcactgagttattaaagaagtctagctgtctcgaggccacacaactcaccagttttatgatgagctatgtgagactattatcatcaggagaaaccggctctttttggtgttatgagattagttcttcctgggattcaagtctatgctctttagatgaattttcatttcctatagcaacttggcaactgctgtgtgaaaacattgatatttggagcccccatgcatctaaaaaggatttgaagaacttcttttctaatctgataaagtttgcttttgttgaaaagaggtcatgcaaagatgtggagaatagtggcagccaatcttctcaccga

SEQ ID NO: 29392 - DNA, 5342 bp, Oryza sativa
  Clone ID: PAT_MRT4530_3389C.1
atggccggtcacccacccaaccaccgcggagaaggcatgatcgacttcgtggcagagctggcacgcatgacactggtggtgggctaccccaatgcgccggagtacacgaccatcccaccgctcagtggcgagcttcctcaccgtgtccgcttggaggtccatggctacgtggggacttgcctcgctaacatggcggttgaggcgtcaggaggcacagcagatcatgcctgtcaggaggcagcctacttgatgatggccaggttacgggagcgccacgactacatcttccacgacacggcgtaccgctaccacccccgtcgagcccatggtgatggcgtcagctccttccgtccgacagctggcgagaacgacaccaccttcggtcacatgtgtgctgtgatgaggggattggaccggatgcactcggacctgcacaaggcgaccaaggccttgaatgatgggaagctcatgaggatcgtcgctctgaaggacgagatagcgcgcctgaagaaagagaatgctcagttgaagggtcttccagcaccaggaggagtccggatccgcactacgccccgtaagaggacgactgcacccgtgcgcatccagcttgcgcccaggaacccacctccagcagcagcagctccggcagttcctccagctccagctccagctccagctccagctccagctcccgctcccgcgttcactctctccttcgctccagcatcagccgccagaggaccagccagtggtaccggaggttgtcccctccagatggtctacaccaggactggtagccgcgcaacaggcgagggcagcaacggtgaagaacgcgctgatggtgtgcaccccaacagtgagtccggcaatggtccgccaccacttcccgagaatccgacgcttgcccaagttatggcacatcaaactcagatgatggcagccatgatgcagcagatgcagcagcagcaccagcagatgcaccagaggatgatgcagcacgccgaacagcagcatcaacagtttggtccccctccccctcagtccaagttgccggagtttctacgtgtcaggctacccaccttctccagcaccaccaaccctatggaggcaaatgactggctccatgcgatagagaagaagctgaatctcctgcagtgcaatgatcaggagaaggtcgctttcgccacacaccagcttcagggtcctgcgtcagcttggtgggacaaccacatggccacccgcccaccgggtactgaagtcacatgggcagagttctgccgtagcttcaggaaggcacaggtgccagatggggtcgtggcacaaaagaagagggaattccgggcgctccatcagggtaacaggactgtgacagagtacctccatgagttcaatcgcctcgcgcgatatgcaccagaggatgtccgcaccgacgccgagaagcaggagaagttcatggcgggtttggatgatgagctgaccaaccaactgatatctggggactacgttgactttgagaggctggtcgacaaggcaatccgccaggaggatcaacgcaacaagatggacaggaagaggaaggccgctcagttcagggcaccccagggaagtcaccagaggccgcgcttcactcccgggcaacagggtggacctaccaccatgatcgtccgtcagcaccgcccgttcaaccctagcaacttccaccagggcactagtggcagtcagaaccaccatggaagtcagcccaaccgcggtacagctccacgcccaccaatggcaccggcacagtcaggccagcccgcacaagccaagaaggagacgggagcaaaaccagggtcctgcttcaactgtggcgagcttggccacttcgctgacaaatgcccgaagcccaggcgtgccgggccaaggtttatccaggctcgtgtcaaccacgcgtctgcggaggaggcacaagcagcaccagaggtcgtactgggtacgtttcctgttaactcaatccctgcaacagtactttttgattctggtgcaacgcattctttcatctcaaagaaatttgtcgggatgcatgggttaataagagaggaacttagcacaccgatgcgggttcataccccagggaatagctccacttcggttcaattcagcccttctataacaatagaaattcaaaggtcaccatttctagccaacctcattcttctcgaatccaaagacctagatgtcattcttgggatggattggctgaccaagttcaagggagtcatcgattgtgcgagtcgcacagtcaccttgaccaacgagaagggagaaaccgtggtgtacaaatctctagtctcgccaaagaaaggggtctcgttgaatcagattgagacggaaatcccagtggacaccgtagagaagaacttgagaaaattggaagatatacccatagtctgcgagtatccggaagtgtttcctgaagacctcactaccatgccacccaagagagagattgaattccggattgacttggcaccgggaaccgctccaatttacaagagaccatacaggatggcggccaacgaattagcagaggtcaagaagcaagttgatgagcagctgcagaaagggtacatacgaccaagcacttcaccttggggcgctccggtcatttttgtggagaaaaaggataagacgaagaggatgtgcgtcgattatcgcgcacttaacgaggtcacaatcaagaataaatatcctttaccgcgaatcgacgatttatttgatcaactaaaaggagctaaagtgttttctaagatagacctgcgatcaggctaccaccagttgagaatccgggaagaggatattccgaagacggccttcaccactcggtacgggctatatgagtgcacggttatgtctttcggacttaccaacgcacccgcattcttcatgaatctgatgaacaaagtgttcatggaatttctggacaagtttgttgtggtgttcatcgacgacattcttatctattcaaagtccggagaagaacatgaacaacatctccgtctagtactcgagaagttgaaggagcaccagctatacgccaagttcagcaagtgtgacttctggttgacggaagtcaaatttctgggccatgtcattacaactcagggtgtggcagttgacccatcgaacgtggagtcagttaccaaatggaccccacctaagaccgtgtcgcagattcggagttttctaggactggcaggttattaccgccgattcatcgaaaatttctccaggatcgcccgacccatgactcagttgcttaagaaagatgagaagtttaaatggacagctgagtgcgataagagttttgaggagctcaagaagaagttagtatccgcaccagtattgattctgcccgacccgacgaaagacttccaagtctattgtgatgcatcccgtcacggacttggatgtgtcctaatgcaagagggcagagtggttgcgtatgcctcgcggcagttgcgtccacacgaaggaaattatccaactcatgacttggaattggcagcagtggttcatgctttgaagatctggaggcactatctgattggaaaccgctgcgaagtatatacggaccataagagtctgaaatacatcttcacccaaccggatctaaaccttcgacaacgaagatggttggaactaatcaaagactatgacatgagtattcactaccacccgggtaaagccaatgtggtggcagacgctttaagccggaaaagttactgcactgccctatgcatcgagggcatgtgtgaggaattgcggcaggagtttgagcatctcaacgtgggaattgttgaacacgggttcgtagccgctctggaggcacggcctacgctcgtggatcaagttagagccgctcaagtaaatgatccggaaatagcagaactgaaaaagaacatgagagtcggaaaggctcgggatttccacgaagatgagcatggcaccatctggatgggagaaagattgtgtgtacctgacgacaaggaactgaaggatctgatactcaccgaggctcatcatacccagtactccattcatccaggcagcactaaaatgtaccaagaccttaaagaaaaattttggtgggtcagcatgaggagagaaatagctgaattcgtcgcactctgcgatgtttgccaacgagtgaaagcagagcaccaaagaccagcaggtttactccaacctcttcaaatcccggaatggaaatgggaggagattggaatggactttataacaggactgccccggacatcatcgggacatgattcaatctgggtagtcgtggatcgactcaccaaggtggctcactttatacccgtacataccacctatacgggaaagagactggcagaattgtacctcgcaaggatcatgtgtttgcatggggtacccaggaaaatagtatccgaccgaggtagtcagttcacctcaaagttttggcagaaactgcaggaagaattggggacccgtttgaatttcagcacggcctatcacccgcaaactgatggtcagaccgagcgagtcaatcaaatcttggaggatatgttgagagcttgcgctcttgattttggtggagcttgggacaaaagcttgccatacgcggaattctcgtacaacaacagctaccaggccagtctacagatggcaccgtttgaagctttgtacggccggaagtgccgcacacacctctcttctgggatcagacaggcgaacgtcaactgttcggaacagaagtattagcggaagcagaagagaaagtcagaatcatcagggaaaggttgagaattgctcagtctcgacagaagagctacgcggataaccgtcgaagggagctcatttttgaggcaggagattacgtgtatcttcgtgtcactccgctccggggagtacaccgttttcagacgaaaggctagttggcaccacgcttcgtgggaccatacaaaatcttggaacgaaggggagaagttgcttatcagctagaacttccatccaatatgatcggcatccatgacgtgttccacgtgtcccaattaaagaagtgtttaagggtacctgaagaacaggctgattcggagcacattgatatccaagaggacctaacatatgtggagaagccggttcgtatacttgataccagcgaaaggagaaccagaaataaggtcaccaggttttgccgagttcagtggagtcatcattcagaagaggaagcaacctgggaaagggaagatgagttgaaagccgcccatccgcacctcttcaccagctcctccgaatctcggggccgagattccgtttaa

SEQ ID NO: 29393 - DNA, 633 bp, Oryza sativa
  Clone ID: PAT_MRT4530_338C.1
atggacagatcatcaaatccggagcggatcacggacgaacccatcgagatcacgagcagggaggaaaccctcgggtcggatcagaggccaggaaatctggaatcaagcatcccccagagagaacccaaaccaacccaagctcaaatcaatcttggaacacctctgacccccaggatctcgatgaggaggtgggagatgaatcccccacaacacaccacggagcacgcagaacatgcatttttcaccccccaacgatttgacttgatccaccgccagatcacaaatctcaccaaccccagagaagcaagaaccaagaagaaccccgaagcgcgcaagaacccaccctaccaaaccaagatcacgcgcgcgacggggagggagggagggagggaggagggactagagggatccggtcacctgttgatggtggaggccatggccaccaccggcgacatcccattgctcctcctctgcgccacaccgccgcaggaggacggcgatgcggtgtgggacgccgcgaacgccatgagcagcggcagcgagatctcggggatgattcttcccctcctcgcgttcttgtccacctggacttctgctagcaacagcagggggttagagaaggggtttgtgtaa

SEQ ID NO: 29394 - DNA, 663 bp, Oryza sativa
  Clone ID: PAT_MRT4530_33900C.1
ctgggtttgggtttttttttttttttttttttttttgtggttttttttttttttttttttttttttttttttttttttttaaaacaggcaaaaaggggtaacctttttttaggaaaaaagccccaaagggccggcttccggaaaaaaaaatttttgggaaagtaggaaaaccctttttctttaaggccccctacccaaaggaaaaggaaaacccttttccttcccaaaatccccccatttttgaaagggaaaccccttcaccttaaggggagggccccccccccccccccccgaaaaaaaagggtccccccaaaaaaaaccgatgctatgaacaaattttccccccttttttccttgaaatgattccggggaaaggcaaaggcccgaaaagtttctggggccccgccaccgggctcccgtttggggtggccaaaaaaaaaaccccccgggcctttggtggcggctttgggggttttttggaacccagccccccatggcgggggggccccttccctggagattgggaaacccatttctaaaccccgtaaaaaaaacccggagtccctgaaaaaaccccccccccagggttttccagcggggcccataaatgccaaaaaaaacctttttccccctttttcggcccccccgggggggggaagcccc

SEQ ID NO: 29395 - DNA, 212 bp, Oryza sativa
  Clone ID: PAT_MRT4530_33901C.1
gattgcaggaccaagcatgctcagaatttccagtgaaggaggcccttagccatggtgccaacagggctcctcaaccacccagcgcgatggccgtgcagtccctgaagcactcataccctgaattagaccctaacgctagcgccctaacaaaaccctatgctgtacctggacatggatcgatgggcaaccagaagatgcgctgctatcgatag

SEQ ID NO: 29396 - DNA, 207 bp, Oryza sativa
  Clone ID: PAT_MRT4530_33902C.1
cgcgacacgagcgcgagaggaaagcggaggagatcgaggagaaactccattttgtgggcccctcgccttctccgatttccctcgcgtggaatccccttggactcctccccctcccgccgccgcgcgagccgggcacggcgagcggcgccgccctgcccccgccgatctgctctgccttctcctcaggggcttgcaccgaggaggggg

SEQ ID NO: 29397 - DNA, 136 bp, Oryza sativa
  Clone ID: PAT_MRT4530_33903C.1
acggacacgtgggcaaacaccagcggcgggggcgactaatactatggcagaaacatcaaaatgtgtaaacattgggtctctcggacatcatccgatctttcaagatggtggtggtgtaaccaaatccggctctgag

SEQ ID NO: 29398 - DNA, 346 bp, Oryza sativa
  Clone ID: PAT_MRT4530_33904C.1
gtataccctctacccttggatatatgtcgtgtattgatatggtatacctgcacgtatacggacgctttatgtacacgttaaggaaatccatcacggagtccacagacggaaggagtcctactcgaatagaactgggtcgtcattgtattgtgtaggatccgatgtctccgagttctacttggagaccaactgacctgcggtataaaagggaccccctggtaggacctaaggcatcaaatctcatagccaagacaaccaccacagccttacgaagccggaacctacaggagccaaatcgccgggtgatctagtcgaatcaacttgactatggtctcgtcggtatcat

SEQ ID NO: 29399 - DNA, 423 bp, Oryza sativa
  Clone ID: PAT_MRT4530_33905C.1
cccacgcgtccgcccacgcgtccggccgaggtatcgcccttgctagaacgatggccgcgtcggcgctgcaccagaccaccagcttactcggtaccgtccgtcgtggggatgagcttgtccgccgggttggcgactccggtggccgtatcaccatgcgccggaccgtcaagagcgcgccccagagcatgtggtttggacctgaccgtcgcaagtacctgggcccggtctaggagcaaacgccatcataccttaccggagagttcccggcagactacgggtgggacacggcggcgctatgggccgacccggagacgttcgcgaggaacaagtggctaggagcgatccactcacggtgggctatgctgcgggcgctgggcagtgtttgccagagatcctggccaagaacggggtgaagttctggga

SEQ ID NO: 29400 - DNA, 594 bp, Oryza sativa
  Clone ID: PAT_MRT4530_33906C.1
atgggcttggggccatccaatacttctctggtgtaccagctggcaaagtcccaaaaatggaagaaaatgtttgctcactgccttgatggcaaaaggagtgggggcatatttgtgttaggccatattgtgggtccaaaagttagaaaaactcctctggatcaaacaagttctaggtaccgaactactttgctggaaataactgtaggagaaacttctctaagcctttcagctggaaatgttgagataaaaagtcaaaacatgacaatattggaaactggttctctgatttcttacctgccagagaaagtataccagtcgtttctagattctatattttctgatcttgaggatatcagtgtcataaacattggaggctattcatgtttccactatgaacgaagtattgatgctaggtttccagaggttgtatttcacttcaaggaactgcttactttgcgagtctaccctcatgaatatatgtttcacaatatggaggagcactattactgtcttgggtttttgagttcagaacaaaggaatcatcgagagaaggacttgttcattctgggcggcaagttactaagcctgtactag

SEQ ID NO: 29401 - DNA, 392 bp, Oryza sativa
  Clone ID: PAT_MRT4530_33907C.1
gcttttatccagcaacccacggatacgccaccggggacaccacctgctaactacgagttgaagcgaccagaggccgcggataatggacgggatgtctgggctcaaggagacagtgctggacctggccatgttcagagacatgggcgctcaggtctggcttaccggcgagaggacagacacagggacttgggagggttatgaccagattctaaacttggtgcttgatgaagaggttgattctgaatgagagcaaggggaggcctgggacctatcatgggtaacgggtctgcttgatgttattgcatgtcggggtacagcggagatggtagcatgggctgctgatggaacggaacagtttgagcatgtcattctaattgacacgagggctatct

SEQ ID NO: 29402 - DNA, 4362 bp, Oryza sativa
  Clone ID: PAT_MRT4530_33908C.1
cccacacgtcctcagcaggtgagctctttttccactacgcactagtagtagcactctggtattctcccatggcgactgcgaccgaggaggttgccgctgcggctgctgccgccggcgaggcgccgccgccgccgccgccagcggtggtagaggaggcgaaggaggctttggaggcaccgaagccggaggaggcgccgaaggctgaggagggggaggagaagaaggcggagggtgagaaggagaaggagaaggcgaagaaggagaggaaaccgagggcgaggaagccccgatcggcggggccacaccacccgccctactttcgagcatgatcaagggaggcgatcatggcgctggacgggcaacggcaagggcggggatccgaggcccgtacgcgattcgcccaagtacatcgggggagcagcaccagtgtggggcttctacccagggcgaaacttacccggacgcctgctcggggtgcacgatgcgcgacctttacgtcgccaagggccggcgggtgacggtcaaggcctcgttgcgtctgtgtgcgcgccgggtccgcacaggccccggcggccacgtcggcccaggtccagggctgtccagtggcgtcgtaggcggcgacaacagggtcaggaccctaccggcctccccccccgccggccgccaagaagcccgcgtcgtcaggcggaggcgaagaaggcggttccaccccgcccgcccagcccgcgccaagagggcgaggaaggccgcccccgcgaagccgatgcagccgcccaaatccatccgctccgccatctccaagaaggccaacaaggccagcgcctgatcatcgccgccgtctcgccgcccgtcgccgccgcgcgctgtatccctgtatagcctaggtgttgtcgcttacctagtagtagttcgccatcgtcgtctcgtctgcttcgatcgatcgagcgctctgtgtccggtgtgtgtgttgcgttgtagataaggtttgggtttctttttgcaagggaggaagaagctactgtagcatatcgccaagaagctgtagtaataagatgatctggcgctcgcagctttgccttatgatcaaaaaaaaaaaaaaaaaaaaaataaaaaaaaaaaaaaaaagaaggaagaaggtgattcctttatctgactaatgggtccaacctgcattcctgcaatcacacaaagattcaagcactggtattggttgtcacttcgaatcccaggtctgctggcatgtaccattatgggttaccgtgccagattgagggaaggaatgaaaagggtaaagcaaaggcaagcagcgactctgtggttgaggacttatacatgcggaggcaaccattaccattgatggatgcaatttatttcattcaaccaactaaggaaaacattcgcatattcatgtccgacatgtcagggaaaataccactgtataagaaagcctatgtgtttttcagttcacccgtacaaagagagttggtggcccaaataaaaaaagattcaaatgttagagcacgcataggtgcactcagtgagatgaatctggaatattttgctatcgatagccagggctttacaactgaccatgacaaggccctagaagagctatttagtgaaaatgcagaaggttcactcaagtataactcttgccttaacatgatggccactcgtattgctacagtattcgcatcaatgagggaatttcctcgtgtgcactatcgtgttgccaggacgattgatgcttctactttgacaacactacgagatttggcacccacaaagcttgctgctggtgtgtggaattgccttgcaagatttaaggctatgatacctgaattccctcagactgaaacatgtgaattacttatcgtagaccgatcaatagatcagatcgcaccaattattcacgaatggacctatgatgccatgtgtcatgatctactctgcatggatggcaacaagtatgtacaacaggtcccaagcaagtctggttcaggcactgagaacaaggaggttttgttggaggatcatgatccaatatggcttgagcttcggcatgctagtgaaagattgcatgagaagatgaccaattttgtatcaaaaaacaaagctgctcaactacatcaagcaagaaacatttatagtggtcaacagatgattactaaggtgaatagcggaaatggtggagatttatcaaccaaagagttgcaaaaaatggttcaagctcttccgcagtacagtgatcaaattgacaagcttgcgcttcatgttgagattgctggaaagctcaatagcacaattaaagagcaacaattgaaagatgttgggcagcttgagcaagatcttgtgtttggtgatgctgggacaaaagaactcataaatttcttcaggacacatttggatatcagtcgtgaaaataagctgcgtttgcttatggtttatgctgccatcaatccagataaaactcgaagtgataagggtgcaaagttgatgcagctcgcaggattatctgctgatgacatgattgcagtgagtaatatgcgttgcctttgtgggcatgattctaaaaagtcttcggcaggtggctttactctgaaatttgatctacgtaagaaaaggcatggtatcagaaaggagcggataggagaagaatcaaaatggatgttgtccctgtgtctctccctgtccctctctctttactctccaagcgttgctgctcagtgctcaactgctcacgctcttgttcaaccgggagaagatgccgttcaacgcatcggcagcggcgacggctcctccggccaagcacctggtcggcgttcggctcaacgcgatggcgtcaaggttgaggagctgatccgccgtcgacggcgacgggtgctcactctgtcgttctctctctcccatccggcgcgacgccaagggcggctactgggcggcactcaactgggagaagatgcagttcaacgcgccggcggcggcgacggctcctccgaccaagctcctggtcggcgttcggctcaacggcgatggcgtcaaggttgaggagctgatccgccgtcgacagcgacgggagcagtcgatccggcgacctcttcccctccttcacggatcccatggtctctccgctccctcttgcgcggatccgtcgtcggctgcgatgggaggggttagatccggcgacctcttcctctcccgctcggatcccgtcgtctctcagcgccccgctcacgctgatccgtggccggcgacgacgggagggtccagatccggtggtgtccactgtggtcgcggcttccctgccaccgccgcttctgcacgcgcgggccatacaccccacattgccgtcgacgccgtccccgagttagtatgccttgcatattccatggacgaagatgaggagtgtcctggcaccggcgacaccaacattgaggagtgtgtcgccgctggtgctggtgacgtgggttgtcactgtggttggagctggttgttgagctgattggagtcagagatggtggccaagatggagaggagatgtcacccgaagttgtctcggaagccgcaatgaaggcggagatggaggcggcaaggtggggctgctggcgttggatgttgcactcgcgttcccgcaggccacgacgtcccagttcccgcccgccggtgagacctcctctcttgctttcccggtgttctcaggttctcggtttcccattattttaaataatgagatattatgattgggtgaaactgtcttggccatctaattggagtatttgagagaggtgtgtgcactgtgcagtcggcctttgttgattcgtagttatcttcagtcttgggcagcttaatctggctccaagttggcagcaagcagtccctgttctgaaaactgctctcttacttaagtttgctgaagggatactccttacatcgaagttcattagctacacttctttggttagaaattgctctgttgctgttcaatatgtaccagcaaaataaatatgagaaatcactctagtgcttctaatagggagtcatctttcagcttctattaaacacggaacatttaagaattaccttccatcgtcgtataaatgtagtaaacgcagatgtgtcatgcccaacagggaattgagtagcgtcaagcgggagattgagtatccacaccaattattaggtgtatatatgagtcttgtttgtattttcagtttttttatataggttgagaagatgtttgcatcctacttagccatgtaattcttattcttggattctgtatgtaattcctgggttgtaattattgagccatgtaattgtatatgactctatttgggattctaaaaaaaacggacgcgtggg

SEQ ID NO: 29403 - DNA, 342 bp, Oryza sativa
  Clone ID: PAT_MRT4530_33909C.1
ctcgaagagtccgttttttcttcctcctactcgccccaatccaatccactccaccgtaccactcgccgccgccgccgccgccgacgacgaagccggcgccgccgccggagccgatcccccgcgggcccaccctcctacttcgcgcttcctcggccgaaatccctaccgggtcgaatcgccccgcggcgcgccgctggatccgcgccgccgcccctagccatcccggggacgggcggcggctgctgctgcttgcttgccgatgcatggttggtggtggcgggtaggtgagtaagagagtaggcgtaccatgtttgcagtgtctggagggggtgaagcagctct

SEQ ID NO: 29404 - DNA, 2037 bp, Oryza sativa
  Clone ID: PAT_MRT4530_3390C.1
atggcgatcctccccggcgactgcgtcgtgctcgacatcgacgacgccgccgcccaatccacgccggtgccgtacgccctcacgttcaccgacctctcctacaccgtcggcagccgccgcgccggcctgctgccgccgttgccgacggacgcgccgccggccaaggcgctgctcgacggcatctccggcgaggcgcgcgacggcgaggtcctggccgtcatgggcgccagcgggtccggaaagtcgacgctgctcgatgcgctcgccgggcgcatcgcgcgggggagcctccgcggcagggtggagctcaacggcgaggcgctccacggccgccgcgtccgggcgatctccgcgtacgtcatgcaggacgacgtgctgtacccgatgctcacggtgcgggagacgctgctgttcgccgccgagttccgcctcccgcgcgcgctctcgccggacaagaagcgcgcccgcgtcgacgcgctcatcgaccagctcggcctcgcgcgcgccgcggacaccatcatcggcgacgaggcccaccgcggcgtgtccggcggggagcgccgccgcgtgtccatcggcacggacatcgtccacgaccccatcctgctgttcctcgacgagcccacctccgggctggactcggcgagcgcgttcatggtggtgcaggtgctccgccgcatcgcgcagagcggcagcgtcgtcatcatgaccatccaccagcccagcgcgcgcatcctcaacatcctcgaccgcctcctcctcctctcccgcggccgcaccgtctacgccggcacgccggtggggctcaagcccttcttctccgagttcggcgaccccatcccggacaacgagaacccggccgagttcgcgctcgacaccatccgcgagctcgagcaccagcccgacggcgccgccccgctcgccgacttcaacgtcaagtggcagtccatgcacgccgcactcccggcagctgacagcaaggacagcaagcgatgcaccatgccactcgagctcgccatcacggagagcgtgtcgagggggaagctcgtcgccggcagcggctcggggacggcgtcgtcgacctcggtgccgacgttcgcgaacccgctgtccgtcgaggtgtgggtgctgatgaagcgatccttcacgaacacggggcgcatgccggagctgttcgtgatgcggctcggcacgatcatggtgacggggttcatcctcgccaccatcttctggcgcctcgacgacacgcccaagggagtccaggagcgtctcggcttcttcgccatggcgatgtccaccatgttctacgtctgcgccgacgcgctgccggtgttcgtccaggagcgccacatctacctccgagagacagcgcacaacgcgtaccggagactctcctacgtgttcgccaacgccgtcgtcgcgttcccgccgctggtgttcctgtcgctggcgttcgcggtgaccaccttcttcgccgtcggcctcgccggcggcggcggttcgttcctgttcttcgtgctgatcatcctggcgtcgttctgggcggggagcgggttcgtgacgttcctgtccgcggtggtgccgcacgtcatgctgggatacacggtggtcgtcgccatcctcgcctacttcctgctcttctccggcttcttcatcaaccgcgaccgcatcccgagctactggatctggttccactacctgtcgctcgtcaagtacccgtaccaggcggtgctccagaacgagttccgcgacgcggcgcggtgcttctcccgcggcgtcgagatgttcgacgggacgccgatcggcgccatgtccaaggccgtcaagctcaaggtgctcgacgccatcggcgccacgctcggcgcgccattgacggcggagacgtgcgtggtgaccggcgccgacgtgctggcgcagcaggctgtcacggacatcggcaggtggaagtgcttgctggtcaccgtggcgtttggtttctttttccggtttctgttctatatcgtgctgcactttggcagcaagaacaagaggcgctaa

SEQ ID NO: 29405 - DNA, 1224 bp, Oryza sativa
  unsure (1)..(1224): unsure at all n locations
  Clone ID: PAT_MRT4530_33910C.1
gtgtttttgaacatatactagattccttgacagcttggtatttatcatgggtgggctactcgatgctatcctactgcttctggtctcctgcgcgggagacagccatgccgcgttgccagcggagatgtactggaagatcgtgcttccgaccgctgccgactccgtaccgttggccaccgaaaagctcccggagatcctctcccagctctccgtccccgccggctccccggccgccgacgccatgagtgcgaggccgtgccgctcgccggcgaggcgaagcaatgcgcgacggcgctcgagtccatggtggagttcgccgcgtccagccttggcacccgcgacgtgcacgcagtgttcacggaggtcgacagggcagcgccgatcatgtattgggttgattcgagtttgtgccaatgttgcgtgcctgtccgccggatgatcaaggaggcgatcatggcgctggacgggaacggcaaggcgggatcgagcccgtacgcgatcgccaagtacatgggggagcagcacatgggggttctcccggcgaactaccggaaggtgctcgccgtgcagctgcggaacttcgccgccaagggccggctcgtgaaggtgaaggcctcgttcaagctgtcggctgccgaggagaagaaggcgacggcggcgaaggcggccaggtccaaggcggccaagggcgtcgtcggcggcgccaagaggaagaggaccccgcgcccctccggcgccgccgccaagaagcccgcgtcgtcggcggaggcgaagaagcgggttccccccgcccgcccagcccgcgccaagagggcgaggaaggccgccctcgcgaagccgatgcagccgcccaaatccatccgctccgccatctccaagaaggccaacaaggcagcgcctgatcatctccgccgtctcgccgcccgtccccgccgcgcgctgtatcccctgtataacctaagtgttgtcgctaacctagtagtagttcgccatcgtcgtttcgtttgcttcgatcgatcgagcgctctgtgtccggtgtgtgtgttgcgttgtaganaaggtttgggtttttttttgcaagggngggagaagctactgtagcatatccccaagaagctgtagtaataagatgatttggcgttcgcagctttgccttatgatcaaaaaaaaaaaaaaaaaaaaaaaaaaaaaaaaaaaaaaaaaaaaaaaaaaaaaaaaaaaaaa

SEQ ID NO: 29406 - DNA, 666 bp, Oryza sativa
  Clone ID: PAT_MRT4530_33911C.1
atgaggcgcctcctgccattcaccgtgctctgcgtccttgtcctgctctgcgtggcgagcctcgtggatgtcacggaagggcagcgaggcggaggcggaagtggaggacttgcaggcgccgcaggcgaggacagcataccattcggggccggagtcggcccgcgcggcctcagcagcggtacgtgggccgcatggtccgcctcctcgctgctcgccgcgaggagagaagcgccattggctccacatcgggaagatgagggggcagctgggaaggagggggcggcgggcagctgcttccaccacgccgggggagggaagcagccgccacagccgccgtcgccatgccgggaagggggaggagggaagcaaccgccgccgctgccgccacactcccacaccggggagaggcaacaggagccgccttcggctccacgtcggggaggggggcgtagcagatgccaccaggacggggaggggagcagccgccaccacgccgggaggaagagcagcagccaccgccagggagggagcagcagccgccagggcttaggattcgaggagacgggagagatggcgagagaggatggagatggcgagagaaggagaaaagaaagaggcgggtggagaaaaggcgaacctgcacgtcagcacgtggcatatgactcc

SEQ ID NO: 29407 - DNA, 413 bp, Oryza sativa
  unsure (1)..(413): unsure at all n locations
  Clone ID: PAT_MRT4530_33912C.1
ctatactgaaacttatatttccttttatatttggctttgtatatgtttatgaaatctgaatcacgctgttgaaccctctactataaatgagacctggagcccaaaattccaaagttataagcactctgcaggaaattccaaatctacactcaaatggttctctgcagatagttatacctagctaatttatcatgatggcctctgttttccatctgaattttaggagtccagcattcaaatgatattgtacacttcggatatcccaaggtatttatatnggaagttctgttttccagctgaattctgatgagtcatggttgtcattcaaccaagaagctaaattgctccataacaaggtgagttccttatttccagcatactcatccatgctattgccaaccaactctggtagg

SEQ ID NO: 29408 - DNA, 1036 bp, Oryza sativa
  Clone ID: PAT_MRT4530_33913C.1
atcctctctcgccatctctcctgtctcctcgaatcctaagccccggcggctgctgctccctccctagcggcggctgctgctcttcctccccggcgtggtggcggttgctcccctccccgtcctggtggcatctgctacgcccccctccccggctgccccctcccctccccgacgtggagccgaaggcggctcctgctgcctctccccggtgtgggagcgtggcggcagcggcggcggttgcttccctcccggcgtggtggcagcagctgccccccctccccgacattgtgttgacggtggctcctactctcccttcccggcatggtgacggcggctgtggcggctgcttccctcccccggcgtggtggtagcagctgcccgctgcctcctccttcccggctgcccctcatctccccgatgtggagccgaaggcggctcctgctgcctctccccggtgttggagcgtggcggcagcggcggcggttgcttccctcccggcgtggtggcagcagctgccccccctccccgacatcgtgttgacggtggctcctactctcccttcccggcatggcgatggcggctgtggcggctgcttccctcccccggcgtggtggtagcagctgcccgctgccccctccttcccggctgccccctcatcttcccgatgtggagccaatggcgcttctctcctctatcgcgacggagcaaggcgaccgcggcgagcagcgaggaggcggaccatgcggcccacgtaccgctgctgaggccgcgcgggccgactccggccccgaatggtatgctgtcctcgcctgcggcgcctgcaagtcctccacttccgcctccgcctcgctgcccttccgtgacatccacgaggctcgccacgcagagcaggacaaggacgcagagcacggtgaatggcaggaggcgcctcatcatgtaatgatctctacagtatccgtagcttctgacttctgacctctgctaacttcgactcgtcagccggatcgttgggcggacgcgtgggcggacgcgtggg

SEQ ID NO: 29409 - DNA, 1271 bp, Oryza sativa
  Clone ID: PAT_MRT4530_33914C.1
tccccccgctgcgggcgatgccccgcctgcgccgcgtcgcgtcccccacggctccgcccgccaccgctaccgcccgcggcggcgcccttccccgatcctcctcccccacccgtgcccgcgcgcccgcgggcccgcgctccgcgcgcagttgacgataaccattgagactatcaggaaaaggttcaaacgctcggcacacgcgcccgggggatttggaaattggaaatttcagatcccagatctcgtctcgccgatctccccctccgctaagccatgggttcggttgtggatgctccaacagttgtggctggacaggaggaggtcactgacaacatgttgggtgacaagaaagttacagttgtatttgttctaggtggtcctgggagtggaaagggcacacagtgtgccaacattgttgaacactttggattcattcatcttagtgctggagaccttttgcgtgcagagatcaaatctggctctgagaacggaactatgatcgagaacatgataaaggagggaaagattgttccatctgaggtaactataaaactcttgcaggaagccatgattaaaagtggaaatgataagttccttattgatggatttccaaggaacgaagagaatcgtgctgcatttgagaacgttacaaaaataactcctgcgtttgtgctattcttcgattgttctgaggaagagatggaaagacgtcttttgggacgcaatcagggaagagttgacgataacattgagactatcaggaaaaggttcaaagtttttgttgaatccagtttgcctgtcattgagtactataatgcaaaggacaaggttaaaaagattgatgctgcaaaaccaattcctgaggtgtttgaagatgtcaaagccattttcgctccatatgcgccaaatgctttgctctcaggtgtgactacaaatctgtgattacgaaaccgttgatatagaagagagttttggctcatatgagctacctgcatacccgtaggcaatttgatttgttacttgcaataattaattttgatccccatttcctgctagattaacttttacgagagttggcgtatcgtatgtaatgctgtacttgtaccaatgtatcatttacctcatggacgatgaaactttgtcctcccgccagtttctggtggtataatacagaaagtggaacttccgaatttttttttggttagtttctaaaacatgttcactgaacagctaataattattcaatttgttattgacaaaaaaaaaaaaaa

SEQ ID NO: 29410 - DNA, 423 bp, Oryza sativa
  Clone ID: PAT_MRT4530_33915C.1
acgccggcacgcccccaggccccagttcccgaattcacgccaccatccacgctgtctccttttttatttctagcgtgcctgttgttttgcacgcaactgccctcgaccagggccaaaatcaaaacagattccacagttttggctctaactgtgagctccagggcaccggggcccaccggatggaacatgcaattctagtggacgtgatcatgccctttgtaaccttccccttcatgaccctcatactgagaatctattccgatctccgccatcggaagacccgcatgatgatgattctggactcccagactctactgttggccgacaggccaatcaccaatgtactgatgatgaaccctgtgcagaatgcaccggctgaggctgcatcctaatatactgaaggaatacaccggtgtgtttctg

SEQ ID NO: 29411 - DNA, 1617 bp, Oryza sativa
  Clone ID: PAT_MRT4530_33916C.1
atgaccccaactctgatcgacatcactatgattactgtgttagatgtgacttcatcggctaaccccataagcctaaacaccaagaaccagtttgacttcaggaccaagagcatagggggcgggtctggctatgtagcagcatacatgggcaagggatctgtcacccctcgagaacacactgcctttctcattatgtggctcaagaagtttctcttttgtggatcgagctgtggtccgactaccaactggcaattcttagccgaagcccttgaaaccaaaaggcaatttctcttgggcaaaatccttcttggctatcaatacgaaatgttgagcaatgcatcggccaagatagccataggctcagtagtgggtgcaggtggaccatggtggctgctgcaaacatggctcaaccttgttgtcatgaaggttgtgaatcggccacttctgatagatgcacaattcccgaggctggagccgatcacaggtgatgatggagaagaactcactcaccgccgatgtatgtcatatggtgaagctgcatcaacaccagccgattctagagcaaagttatcggccgaactactcaaagactggttttgtagtttctacgagggattccagagagatgctcggatttggttcccttatgaggactcagtgaattttgacctcccggcagactttaggtttgaggacatcaactctgaaaagcatcaaaaatccagagaagtcttctcgactgccattagtccatgcattcttcctgttggcatccatcaaggaagaaacatacagacaacagaatcttctcctcctcgcaagagcaatagcggcagggacatagaatatgctgcaggccttctacctaacggaggtggattagctcctctagtcatcggctatcatgcccccagtacctcaagtctgcttcaaggacaaatgagagaaccaaccgatgttggcaggaagaggaagaccaaggcatcggccattgatccatcggctctggctcctaagaagaacgtgaagaagcacaaacccaagccagccgatgacttgcccaccttagatccatccatcgagcaagctctggatgaagaagaaatcgaagaagatatcgatcaagcagcagccgaattgagtgatataggagaaaaaacaccatcggcttcgcccaagcaaactcctcccattcctgctgctccagctcatttttcaaggcctcctcctccttcacctcctgtacaacaaacatcaagtgatcacactccatcggctacaggaagtcataatgtcggggaagaagaacaaccaattgctcctgctatcccagtcttagccgatctgttctctttcgatatcaaggattactttgatgagatagaggaagaaaccacaagcaaggctctagcccctctagatgaaactgtcaagaaaacacttgaagatatatcccttcggctagagtcatcattggataatctggtggctgactgtggtttaattcgggcacgatttgcagaaatccaagccctaatcccagacgatctggcaaacaccattactctagctgtattcctcgaacaacatcaattcaagctggaaaaggctaagtaa

SEQ ID NO: 29412 - DNA, 495 bp, Oryza sativa
  Clone ID: PAT_MRT4530_33917C.1
atggccggatgtcccgagcatgcagctcatcatgatactaagaggtctaatattgtaattatcccattgtgtgatgaggacctacctagctcctcacattcttctacaactgccactcccgatccaacaatctccaatgcgtataagggacctatcacacgagcacgtgcacgggaaattcaaaataaggtgaatatgttcctaagtactttgaattatgatattagtgagcataatttactacctaatagttgctcttttcttgtgctcagatttgaaggaatgatatcattggagaccgaaagacaagaggaagagctctctgatccaatattttgtttaatggcacaaacccataccaatattaccgagagggaggtgtggagggatggcaccagcgacaagatagaaaaaatcagcaccaacaacaaaggagagttgctgtaccggaaaactgaagataagaaggagaaggcccaactcggactcgggtag

SEQ ID NO: 29413 - DNA, 2354 bp, Oryza sativa
  Clone ID: PAT_MRT4530_33918C.1
atgcccgccgccgagagctgccactcccgcagcctctcgtggctcgtcaagtcctgcatccccgccgaccccgcccgccacatcgccgtccccgttctttgccccaccccgcaaccgccgcctccctcgtcgccgccggcacccccaatctccgccctccccgacgacctcctcctcgagtgcctcgcccgcgtcccccgcgcctccctccctccgctccccgccgtctcccgccgcttcgccacgctcctcgcctccgacgccttcctccacctccgccgcgcccacgcccacctccgcccctccctcctcgccctctccgtctccgacaacggctgcgccgcgcaggcgctgctccggttcgacgcctccgtgcccgtgctcgaggtcgccgcgctgccgttgcccccgaccctgctgcattgcggcggctccgtgttcgcgcacgcccgcgcggtcgtgctgggccgggatgtcttcctcatcggccgcggggcgacgctgcgcgtcgacgcgctcaccggcgcggcccgcgcgtgcgcgccgacgctcttcccgcggaagaagttcgccgcggccgccgtgggagaccggatctacgtcgccggcgggtccgcgcgcaccgcggcggtcgaggagtacgacccggaggtcgacgcgtggcgcgtggtcggcgaggcgccgcggcggaggtaggggtgcgccggcgcgagtgcgggaggcgtgttctacgtcgccgggggcgtcgcggtgtccggcgagggcgcgcgggcgctcgaggcgcacgtgtgcgccgggtcggtggacgcgctgcacgtcgcgtccggcacctgggcgcgcccccgtgcgctccccggcggcggctgtgtcgtgggggcgtgcggcgtcggtgaccacctgtacgtagtagccagccacgcggtggagctctccttctggaggtggtccggcgccaccggccgtggcggtgacggcagaggctggggcgggtgggtggcgctcgaggcgccgccgatgccgagggggtcggtggggctcggcatggcggtgcgcgtggcgatggctggcctaggaaccaacagggtggcggccgtgctccgccttaaattttgtcacgccattttcaactcatacgccgcacgcatcgcagctcgttcgtgccactatccagctgcaagctccacttcactgcagccgcagtctccatctatcccatttgatttgcccacgctgctgctacgaatgcacgcgtccatctccttcgccctcgcgcccgcatcttcgcccgacgccgcctccttcgcgcccaccgcagcggacgtcggcggcgctgtgtgcctcggctacggcatcgccatcgccgtcggcgtcctcgtcttcatctccaccgtcatgctcgcctcctacatctgcgttcgggccaaggctggagcagctgccgtgctcctcgccgacgacgacggcggcggcgccccggcagcgtccgccgtcgtggtgctaggcctcgacggcccggccatcgacgcgctctaccccaagctcctacacgtcggcgtcggtgacgacgacgacgcgtgcgcgggggcgcagtgcgccatctgcctcggggagttcgtagcaggcgacgcgctccggcgagggcacggctgcgggcaccggttccacgcggagtgcgcggagcggtggctgcgggtgagcgccacctgcccggtgtgccgcgactcgccgctgccgtcgccgatggccacgccgctcgcggaggccgtgcccctcgccgcgcacgctcgatgacacaggttcacatgtcacaaatgttactgctctgtagacaatttttgctctctcgaattttctttgcttcattcgaagcgtgattgatgtactccaaacatttcaatacactcactcgcatagtactactccagagtccatatagcttttctgacactggaagctttgggaaatagattagggtaagtgattagtgatagatggagtattacatttttcatagcacagatcatcaggacgatgtctgcggaacaagcaaagctagcgtggggtcgttttcatcaggcaacggacaatacaatacgtgcatcttattatgtgtgcacgttaactcgggagtggattctaatcactgagggatatcccttatgtatatttttcttctaaatttgatacaaatagttgtacggtgatatctatcgattcacccaaaaatcaaattcaaattcaatctacatatcgaggaaaaaatgcatatgcgaatagtatgctactattccaaaaaaaaaaaaaaaaaaaaaagaaaaaaaaaaaaaaaaaaaaaaaaaaaaaaaaaactcgag

SEQ ID NO: 29414 - DNA, 1401 bp, Oryza sativa
  Clone ID: PAT_MRT4530_33919C.1
atggcggtgatcgcgctcaagtgccccgacgtggaggtggtggtggtggacatctcggcgccgcggatcgaggggtggaacagcgagcgcctccccatctacgagcccggcctggacgatgtcgtcaggcagtgccgcggccgcaacctcttcttcagcaccgacgtcgagcgccacgtcgccgacgccggcatcgtcttcgtctccgtcaacacccccaccaagacccgcggcctcggcgccgggaaggccgccgacctcacctactgggagagcgccgcccgcatcatcgccgacgtctcccgctccgacaagatcgtcgtcgagaagtccaccgtccccgtcaagaccgccgaggccatcgagaagatcctcgcccacaacagcaagggcggcaacatcaggtaccagatcctctccaacccggagttcctcgccgagggcaccgccatccaggacctcttctccccggaccgcgtcctcatcggcggccgcgagacgcccgagggccgcgccgccgtcgccgccctcaagtccatctacgcccgctgggtccccgacgaccgcatcatcaccaccaacctctggtccgccgagctgtccaagctcgccgccaacgccttcctggcgcagcgcatctcctccgtcaacgccatctccgcgctgtgcgaggccaccggcgccgacgtcacggaggtggccaactccatcggcaaagactcgcggatcgggccgaggttcctctccgcgagcgtcggcttcggcggctcctgcttccagaaggacatcctcaacctggtgtacatctgcgagtgctacggcttgccggaggtggccaactactggcaccaggtgatccggatcaacgactaccagaagagccgcttcgtgaaccgggtggtgtcctccatgttcaacacggtggccggcaagaaggtggccgtgctgggcttcgcgttcaagaaggacaccggcgacacgagggagacgccggcgatcgacgtctgcaaggggctcgtcggcgacaaggcggtggtcagcatctacgacccgcaggtgacggaggagcaggtgcagcgcgacctagtgatgaacaagttcgactgggaccacccgcgccacctgcagccgatgagcccgtcgtcggcgaagcacgtcgccgtgtcgtgggacgcctacgaggcggcgcgcggcgcgcacgccgtctgcatcctcaccgagtgggacgagttccgccggctcgactaccagcggatgtacgacgccatgcacaagccggccttcctcttcgacggccgcaacgtcgtcgacccggacaagctccgccgcatcggcttcgtcgtctactccatcggcaagccgctcgaccactggctcagggacatgcccgccgtcgcctga

SEQ ID NO: 29415 - DNA, 5253 bp, Oryza sativa
  Clone ID: PAT_MRT4530_3391C.1
atggtcgaggtcctggaggtggaggaggcggtggcgtttacccccaccccgtccgggagtggggattctagtgggagccgcggccctcgtcaccgccaccgcaactccccaactcctccctgccgcgaaccctcgcggagggaggatgccacccgttcgggtggttcggccctctctccgctcccgggcagggggaggccacgacgcgtcggggcacgtcgccgcctcacttacggcgacggcgattcgccccgaggcgcacttcaggcggcgagtgcccttctgcggcatccccccgtaaactcggagccggagacccctgttcagcgttggctggacgacgtggctaacttggtcacctatgcccagcggcagttggccgcgggcggccgacctgccaccaccagtacgtcgcgtactcctattaccctctcctcgtcggcaacgaggagggcccgccgctcggccaccgcctcaaggcggtccacggcgccaacatcgtcaggggcctcgggaagccggaggcatcttgacggtctctatggggagcaggacgcttggattaacatcgagcgacgcagggacgagcgccgagctgcccgcatgggggaaggcgcctcctcatctggagagccacgttcctcctcacgaggcggccctccccccacgttcacccctggagggacgggttgtagggccttcgtggcgagtctccggaatgtccggtggctcccgaagtttcgccccaacctcacggagaagtatgatggcagcatcaatccttccgagttcctccagatctacatcacgattatcgtggcagcagggggtgacaaccgcgtcatggcaaattacttccccatggccctcaagggtcaggcgcgtggctggttgatgacccagccccccgtctccatccactcctgggaggatctgtgccagcagttcgttacgaactttcagggcacatatccccgcccaggagaagaggcggacctgcacgctgtacggcggaaggacgacgagtccctccgctcgtacatacagcgcttttgtcaggcccgcaacactattccatgcattccggcccacgcggtcgtgtatgcgtttcggaatggcgtgcggcataaccgcatgttagagaagatcgcctccaaggagcccaagaccaccgccgagctttttgagctggcggacaaggtggctcggaaggaggaggctgggcctggaactctcccggcaccggtgcggcggccacagctgcccccgagtctgccccccgctctaagcggcgagataggaggcaaaagaaagccggcccgctctgatgacgagggccatgtccttgcggcagatgggcccgcacgggccccgcgcaagggaaaggccaccgatgacaagccgagctccactgctccacccagcgagggccggtcggcagacaagtggtgctcggtgcacaacacttatcggcacagtctcaccgactgccgctcggtcaagaatttggccgagcgattccaaaaggccgatgaggagaagcggtagggtcgacgggagggcaaggcccccgcgacctcaaccggtgatcggcgagaagaggccaagaacaaggcccccgcagatgatggcgctcagggaaccatcgccacgctcgaccgggggggggggggcgtgcgctcacacctctcgccggagcttcaaggccatgaggcaagagcttttggctgctgttcccacgcacgaggtggctcggaaggcgcgctggtcggaggtgaagctcacctttgaccagagcgaccatccgacagccccagggatgaagctccagccgtcgctgccgatcatcggcgtgactccgggacatacgtggcctcttggccacgtcgagctcccggtgaccttcagcgactccaccaacttccgcaccgagtgaatcgacttcgatgtggcggacctcaatctgccctacaacgcggtcctgggcagacccgtgttggtgaagttcatggctgccacccactatgtctacctccagatgaaaatgccgggccatgctggtcccatcaccgtctttggcgatgtcaaagttgccctcgcctgcgcggagcaacgcgccgacaacctggcagtggccacggagccgcaggccccggaggcctctgcgtcccgtgtctccaagaagcgcctcacctcggctgatgaggaaggtgcgctcgtctcccttcctgcgggcaaattctgacgtcttcgcatggaagccgtcggatatgcccggggtccccagggaggtgatcgagcaccgccttgccgtacggccggatgcgcgacccgtccggcaaaaagtgcggcgtcaagccccagagcgacaggccttcatccgagaggaagtggcgcggcttctggaggctgacttcatccgcgaggttatccatccggagtggctggcgaacccggtggtcgtcccgaaggccaacggcaagctccggatgtgcatcgactacacgaacctcaacaaggcatgccctaaagatcccttccctctaccacgcatagatcagatagtcgacccactgcggggtgcgaccttttgtgttttctagatgcctactctgggtagcaccagattcgcatggctagggaagatgaggaaaaaactgtcttcattactcctgtgggcaccttttgttatacacctatgccttttgggttaaaaaatgcaggccctacttttcagcgcatgactcgtattactttgagtaatcaaatagggcgcaatgtagaggcgtatgtcgatgacctggtggtaaagacgcgccaccaggacacattgctgcaggatttggctgagactttcgatagtcttaggtccacacgcgtgaaactgaaccccgataagtgtgtgttcgtagtcgagcgcgaagagggcgaaccggaggcctctttaactcgagatgacccttcgtctcccgaaggcccggagcccgaagcccccagcccccgggaggaccccgaagcccccgtgggaggaagggaggctttggcaagtggtcccgaggcctatgatcccgacatgactcgagacccccccccccccggggccctcgagcaagggcaacccagatcacggcccctgacggtacgaaccggccccaccgaaaggtgcagcggcccgtctactttgtcagcgaggcgcttcgagatgcgaaaacctgatacccacaggccagaaaatgctttatgcagttttaatggcctcatggaaattgcgccactatttccaagcgcatcgggtttccgtagtgacatactaccctctcggtcaaatcttgcacaaccgagagggcactggacgggtggtgaagtgggccatcgagctggcagagttcgatctgtacttcgaaccacggaacgcaatcaaaagccaggtcctagctgactttatcgcggagtggaccccagtggacgaacctgttccacccaaggtcccctccctccccggagatgaagaggacccaaacgccgatattcgtggtgggcactaggttatgcattttgacggctccctcaaccttcaaggtgcgggcgccggagtcacgctgacttcgccaagcggggacgtcctcaaatacgtcgttcggctcgacttccgagccacgaacaacatggcggaatatgaaggactcctcgcgggattgagggtggcggccggaatgggcatccgccgtctcctggtcctgggtgactcccagctggtcgtgaaacaagtatccaaagagtaccggtgcaccgacccacaaatggacgcatatgtccgtgaagtgcagcgcatggaacttcacttcgacggactcgagctccggcacgtgccccgacgtgacaacacagtcgctgatgagttgtcgcgtatcgcgtcggcacaagccccactccccccgggaatattcgaagaaagactcgcgcagccatcggcgcaaccagacccctcgagggaccccgatgacacgccctccgccccgacccttggcgacccgtggccctcgaggcccgagggggtcaaccccgaccccccccccccccgtcaggtcgtttggatgaccgacatccgcgcgtatctcgacggcaatactcttcctgaggatcgcgcagaagctgagaagctcgcgcatatctccaagcggtacgtcctcgtagaagggaccctctaccggcgtgccgccaacgggatactcttgaagtgtgtttctcgagagcaaggcatcgagctcatagccgacacccattaggacatccttggaccattcaaggcggctcgagggggtatcagcacctgtacgtcgccatcgacaagttcaccaagtggcccgaagcttacccggtcgtcaagatcgacaagcattccgccctcaagttcatcaggggcatcacatcacgattcggagtgcccaaccgcatcattacagataacggcacccagttcaccagtgagctgttcggcgactattgcgacgacatgggcatcaaattgtgctttgcctcacccgcccaccccaagagcaacggccaagtcgagcgagccaatgccgaaatcctcaaaggccttaaggccaagacgtacaacatcctgaagaaacacggggattcatggctcgaggagttgcccgctgtgttgtgggcaaatcggaccactccaagccgtgccacaggggaaacaccatttttcctggtctatggcgccgaagcggtcctaccctcggagatttccctaagatcgcctcgcgtcgcgctgtacaatgaggccaaccaggatgatcttcgccgcgacgatctcgattatcttgaagaacggagaaggcgtgcagccctgcgtgccgcgcgctaccaacaaagcctgcggcgctaccatcaacgccacgtccgggcccggtcactgcaagttggcgatctcgtcctacgccgcgtccaatcgcgtctggggctgagcaagctctcgccaatgtgggaggggccatacaaagtgatcggcgttctccggccaggctccgttcgactaaccacggaggatggcacggagttgcctaacccctggaatatcgaacacctccgtcgcttctatccatagcgtcgagattttttgctttccaggagctcggcccaaccctcgcacaacccctcggtttgtacgggcttggccgggggctaccactgtgtatcctcttccctttacaagcaatgaatttttctactcactgt

SEQ ID NO: 29416 - DNA, 1371 bp, Oryza sativa
  Clone ID: PAT_MRT4530_33920C.1
atggcgcacaacgacgaagcgtcctcgtcgcgttccaccttcttcgccgccgcccaaccctcgccaccgccaccttcacgcctcgcccccgcccccgcctccgcctccgcctctcccatggacgcggcggcgcccgcgcgcgacttcatggcggaagccctccgcctcgtccacaaccgcctcacgtgcctcgtcgaccgccgcaccatggcccgcgtctgccacgactggcgcgccgccgtcaagccgctgcagaacgcgccgcatctccgcccgctcccgtggatcctcgtcccgcgcgccgacggcccttccttctcgtgcgccctccgcggctgcggcgggcacggcctcggcgtcccggacggcgcgcgcgccgcgcgctgcttcggcgcctacgacggcggctggatcttcctcggcgagacctgccgcaacacgctcctcagcctccgcgaccatcagctgcgcttcaacctccccttttttgtccgcccggacaagacggctgctgaattggggcggccagacggccctgtccctaacactggtgtgatcatgctcgccgcgacgctctcttcgccaccggaggacgaggattgggtcgccgccgccatcatcacctactggcccttccaggctgctcgacgcactcacgcattctggcgcgttcagtcagcaaatgcttcccaggatcaggttgcggcgatggggcatggccctagtgccatcgacgagccagctctggaggatgtcatacaccacaagggagccttccttttcctcaccgcagaagaagacctccatgttttcacagcacgggatttccatgaagacggcgacggcaacatgaagatggcgcccagggtgattcttcgcttctggcgtggccggcgcgattatggcggagacgtcgttgctcgctacctggtggagtcccgcggcaatctcctcatggtggtcaggcgcgttcctgctcctcttgccgcgccgccgacgacatcggcgttcaaggtgttcgagatggtgcagccgccgccgaggaagcggaacaaggccctgcacggctggaaggagctggagtcgctgggtgagcggatgctgttcgtcgcgcgaggctgctccagatcgtacgacgcgggtgactatccgggcgacgagttcggcgagggcgtctacttcctggatgacgggaggctctaccgcgagtcgacagtgttcgcttctcgcgccgtcgcggggaaatacccctgcagagacaccggcaagtggctaccggcggcggatgcggcgggggttccgcgtgtggacaagttcttgccggagcaaggcccgtcggactactcaccgccggcgtggcttctcccctga

SEQ ID NO: 29417 - DNA, 119 bp, Oryza sativa
  Clone ID: PAT_MRT4530_33921C.1
catgaggttccaagggcgacaccgcaattttgattacaaccatcctggcaggcaacataaacaggttcttgaaaggttagaagtcctttattcttgcaagaacataaactgggtctcta

SEQ ID NO: 29418 - DNA, 330 bp, Oryza sativa
  unsure (1)..(330): unsure at all n locations
  Clone ID: PAT_MRT4530_33922C.1
caccgntcnatcgagcaacantagtagganccatggcccntgcacagttggtgttggtcgccgttgtggcagctctgntcctcgccgccccgcacgncgncgtggccatcacctgcggccaggtcaactncgncgttgggccctgcctnacctangcncgaggggcgccggtcncgtcggngcantnctgcagagaggtgaggagcctcaagntcncagacancagaaccgctgncaggcntacnggtgtaactgactnaagaangcngncctggnatnangggnnattaacgtggcaangngncagtatgcctctaagtncggcgtcag

SEQ ID NO: 29419 - DNA, 358 bp, Oryza sativa
  Clone ID: PAT_MRT4530_33923C.1
atgtaccatgtggaaccaaaacccatccagccgttgattttgcaaggccgccgaacaaatgtccgccttctgaatcacgccacaaatctcgccgacgtcgccgcccgaaatcacatcgccgccggaaacatttgccgccccaaatcacatcgccgccggaagcatctgccgccacaaatcacatcgccgccggaagcaactgcagccccaaatcacattgccagaagcaactacggcgcactcatcgatccagatattgtgaaaagacatcagtgcctttgcaccaaacgttccaggtggtaccgcgtggtaccgtgaattcctaaccattagatctgtgcgaatcaacggcgcagat

SEQ ID NO: 29420 - DNA, 270 bp, Oryza sativa
  Clone ID: PAT_MRT4530_33924C.1
atgaggtggtaccggaatatttggagtggtggaaggccggcggcggcggctgatccgttcgaggcggcggcgaggtgctccgtgggaggcaaggcggcggcgggggaggcgaggcgacggcggcggctgatctgtaggaggcggccggcggcgaagtgctccgtgggaggcggaggcggcgtgatgcctagcgcggcgaaggcctggtgctgcggtgctgctggtgacgggcgcgacggtggcctggtgacggccgcgttcacgaggtga

SEQ ID NO: 29421 - DNA, 1437 bp, Oryza sativa
  Clone ID: PAT_MRT4530_33925C.1
atggcgagcgacggcgacgccgccgcgccgctcctcacgccgtccggcgacaacgacgacgagccccggcgccgccgcaacatgttcgccttcggctgcgccacgctcgcctccatgaccaccatcctcatgggctacaatctcgcgctgatgagcggcgcgcagctgttcgtccgggaggacatggggctgagcgacgccgagatcgaggtgctcgccgggtccatgaacgtgttcatgctggcgtccatcctcgccgccggctgggcggcggacacgctgggccgccgcggcacgatcgtgctggcgaacgcgttcctcatggccggcgcgctcgccatgtcgctcggcgccacctacgccgcgctcatggcggcgcggttcgtgaccagcgtcggcgtcgggttcgcccgcgtcgtcgcgcccgtgtacaacgccgagatctcgccggcgtcgactcgcggcgtcttgacctcgttgcttgacatgttcatcaacgtcggcatcctgctcagctacgtgtcgaactacgccttcgccggcctgccggtgcacctcggctggcgcgtcatgttcgccatcggagcggtcccgcccgtgttcctcgccgcggccgtgctcgccatgccggagtcgccgcgctggctcgccatgcgcggtcgccacgccgacgcgcgcgtcgtgctcgcacgcacctccgactccgccgaggaggccgacctccgcctcgaggagatcaagcacgccgtcgcggagccgcacgatgcgggcggcggcgtgtggcgggagctgctcttccggccgtcggccatggtccggcgcatcctcgccaccgtcatcgggttacagttcttccagcaagcgtccggcatcgacgccatcgtgctgtacagcccgctggtgttcaagaaggcaggcatggcgtcgaacacctccgtcctgggcgccaccatcgccatcggcgtcgtcaagacgtgcttcatcctcgtcgccacgctcctctccgaccgcctcggccgccgcccgctcctgctcgccagcacgggcggcatggccgtcaccctgacctcgctcgccctcacgctccgcgtcgcgtcgccgccgtccacggcgagctccgcggcgtgcgtggcgtccgtggtggcgttcgtggcggcgttctccgtcgggctcgggccgacgacggcgacgtacacggcggaggtgatgccgctgcggctgcgcgcgcagggcacggggctcggcgtggcggtgaaccggctggcatgcggcgcggtgaccatgacgttcatatcgctcgccgacgggatcaccatggccgggtgcttcttcctctacgccggcgtggcggcggcggcgtgcgtgttcgtctacgtgtggctgccggagacgagggggagaagcttggagaacatggacatggtcttctccaagtga

SEQ ID NO: 29422 - DNA, 1232 bp, Oryza sativa
  Clone ID: PAT_MRT4530_33926C.1
cactcatcccaaacaaaagaaattccaaaaactgataatcaaaacgatggaaagaatatggatcataaggtgctgctgctgtcacgcaccagccgccgtcgtcacctcgtgaacgcggccgtcaccaggccaccgtcgcgcccgtcaccagcagcaccgcagcaccaggccttcgccgcgctaggcatcactgcgcccgccacaacctcgccggcacgaacaacccggtgccgccgacacctgcgcctcaaatggattagatgccaccgccgcctccgcctcccacggagcacttcgccgccggccgcctcctacagatcagccgccgccgtcgcctcgcctcccccgccgccgccttgcctcccacggagcacctcgccgccgcctcgaacggatcagccgccgccgccggctacggatcagccgacgccgcctcctcccacaaagcaagtaggcgccgacagaagcaactcgccgccgccgccgccatctcccacgaagcaagtgccctgtgcccttcttccgccgccgccgggcttccctccgcttcccgttccagggctggccgacgagcccgtgtacgctgcgcccgctcgccatcttcctccgccgccgggcttccctccgcttcccgttccagggctggccgacgagcccgtgtacgctgcgcccgctcgccgtcttcctccgccgccggggttccctcccctccccccctgccgagctacaccgcgcaccagctcagcctcgtcgccgccacggccgtgtacacggcggccaagtacgaggaccaggggaccggctcttccccggtgcccgccacctcctccggcggtggcggttggccatgtctatctcgccgcggcgcggcatcccctcctgcgcccgcacgaaccgccgcaccagctccggcccctccacggccgccgcagccggcgccggcgccgccacggacaccggcgcagggtgcgccctggcatagcggcgctgctcctcgccatcatcgtcggcgccacggcgtcgacttggatgcccatgatcccgtcgtaggagcacagcggagcgcatatgcacacctccctcgcgaacgcggcggacgtcgtcttcagagacgacccccaccaccagcttggcctcctctccaccgcccccgccacggcagccgccggcggcggcggcgcagctatggcggcacgtcgcgccgacgggatcagcccacccaacgcccgcat

SEQ ID NO: 29423 - DNA, 2963 bp, Oryza sativa
  Clone ID: PAT_MRT4530_33927C.1
ccctcagtacactccccttcttgctctttacactagggatgaggaaaagacaaggagtgatgttttcaggtttgagatggggtggttccagcatccaaactttcatatcatttaattaaagttatgccaacaagattacagaaaagggtgttggattattggcatgtcttaatgcctattctgagaaggtggttaaggggttggggtgctaatttgaacagtgaacaaaaaagaagaaaaaaagctttagaaaggcaattggaagcaatcgacaaaagagcagatgaaagggacctttttgagcatgagtgggcagaaaggtatgaattagaaagagaattagaggatatttactctcatgaagagatttggtggcagaaaatatgtggagagacttggctgcttaggggagatgcaaacacctcctttttcacaggtctgctaatggtaggaaaaggaagagtttaattttctctctacaaaatgaggggaggtgatcacagataaggaacaaatcaatcagcatatatatgggtactataagaagctttttggtaaggaggacaactgcaacattcatctaaaaggggatgcttggggagataggcttaggttaagtgaagaggataaggtaagaatggtcagacctttctctatggaggaggtggagaaggtgatcaaaagtatgaaagcaaacactgcacccgggcctgatggctttccagttggtttttacaaacatctgtggagccattttgggggtctgatcaaagaaatgatgatgatttgcataaaggggagctagatattgataggattaactatggggtgataactttgcttcccaaaataaaagatgcaaataaaatcaagcagtatagacctatttgtttgcaaaatgtaattttgaagattttgactaagactgtgacaatgaggttttctgaagtggcaaataagataataagttggtcccagacggccttcattccagggagaaacattctagagggatgtgtcattctgcatgaagtacttcatgagttgaaaaggaagaagatgtcaagaattgtttttaagattgatttcgaaaaagcttatgatagagtcaaatgtgattttctctatgaggtcttagaaaaaaagaattttgatcttattatgattagttggataaagaagatcaatgaaggggggaaggtgagcattaacatcaatggggaacaaggagctttctttaaaactttcaggggcttgaggcagggggacctcctgtcccccttgatgttcaatcttgtaggggatgctcttgctgtcattcttgataaggctaaagaaagtggggtgttgcaggggcttgttacttgcaatacgctgatgacaccatcctttttgcccaagtatctgaccaaaacattatgtgcctgaaattccttctgttttactttgagatgtcaggaatgaagattaactaccaaaaaagtgagatgtatgtgctgggcgtgagtggggaggaggagattagagtggccaatatgatgaattgtaaggtgggggtgatgccctttacatatttaggtctgccaatgagtttggataaaatcaccatgaaagatttttgtttgatcattaaaagggtggaaaaaaggatgcagccttggaaaagtgggtatttgtcctatgggggtagggaaataaaaattaattcatctttgtcaagtgccccaatgtatgctatgggtttctactctctcccagagggctttcactccaaaatggactctgccagaagtagattttattggcaaggtgtaggggggggggggaagaaaaaatatcacatgattaagtgggaggcttttttaagaccgaaagactttggggggatgggttttttggacactagaattatgaatatttgcctcctcagcaagtggattatgaaattggataatagagctactgacatgtgctatgaagttctcaggagaaaatacttgaagggaagcttcttccagagtttagaggtagggggctctcaattctggaagggcttacaccattgtaaaagtcacttacaaagattggtgcaaaaaaatagtacatgatggcggtagggtggacttctggggggatgtttggcttggtgatgcacctctgaaagtgacctttcacaagctgtatgaagtgagtttacaacaaaaagctactgttagggagatgtgggctaatggcgactgcaatttgatttttaggagaagcctaaatttagagagagagggagaattacatggtgtgaaggatatcctccaatctgtccagcttgatggtaacagggatgaagtgatttggccttacacaaaaaataagtcttttactgctaaatcaatgtataggcttttaacttttgggggagttaaagatactgaaatgtggtctatctggaaaggcaagattcctttaaaaataaaacatttcctttaccttgtggggaggggaaaacttccttgtgcctctcagttagtcaaaaggaattggaagggtggggatgagtttttgcaaactttgcaaaagcagagaaacaactaatcacatcttgtatggctgtcctcttgcggtgttcacttggtgtgtagtgaaggaagttttgtgtctgaataataggcctacttctttctgggaatgtattagctttgtttgggagtactagctttgtttgggatagggggaagaagaatacttggatggttcttttagccagtgcttgttgggctctttggctgacacaaaacgattgggtttttaaagatattttggtttcatctccattgcaggttgtctacaggatgatctcctttgctcggaggtggaaggtttttctaaaggaagaagagcgaaaggtgctggaagcgtgacttgaagctgtactggacaaattgaagtcactaagaccgtttacgttg

SEQ ID NO: 29424 - DNA, 714 bp, Oryza sativa
  Clone ID: PAT_MRT4530_33928C.1
atgccgaggaatggtgacgccgccgccaaaaagcagccgtggtacatgcgggcgttgggtgggctgatcccgtcggcgcgacgtgccgccatagctgcgccgccgccgccggcggctgccgtggcgggggcggtggagaggaggccaagctggtggtgggggtcgtctctgaagacgacgtccgccgcgttcgcgagggaggtgtgcatatgcgctccgctgtgctcctacgacgggatcatgggcatccaagtcgacgccgtggcgccgacgatgatggcgaggagcagcgccgctatctctccctcgccaccgcggcgggcgtctccggccaggtcccctactgctggcgccgccggtggtggcggtcgccgctctcccgcatcgccgcggacggcgtcgtccccgaggtcgagcagggccagggcgcaccctgcgccggtgtccgtggcggcgccggcgccggctgcggcggccgtggaggggccgaggaagagggtctccttcagcggcggcgagtcgctgtggaacgacgagctggtgcggcggttcgtgcgggcgcaggaggggatgccgcgccgcggcgagatagacatggccaaccgccaccgccggaggaggtggcgggcaccggggaagagccggctccgccggatgtcactggcccatgtcgccgacgacgacgaagatggagagaccaacgctctggcctag

SEQ ID NO: 29425 - DNA, 183 bp, Oryza sativa
  Clone ID: PAT_MRT4530_33929C.1
atgggcgaaagcctgacagagcaatgccgcgtggaggtggaagcctggaaggcccacggccgaacgaccatggagcatcagggtaggcggtcttggcatgggaaggctggagctgtcgctgctcaacatcagtatgaccgcagggatatcaggacgttcttgcgcatgatcttgaacacatag

SEQ ID NO: 29426 - DNA, 3522 bp, Oryza sativa
  Clone ID: PAT_MRT4530_3392C.1
atgatcatggtcgaggtcctggaggaggaggcggtggtgttcacccccacttcgtctgggagtgaggatgctagcgagagccacggccctcgtcaccaccgccgcaactctccaactcctccccgccacgacccctcgcggagggaggaccccaaccgttcgggtggtttggccctctccccgcccccgggtggagggaggccacgacgcatcggggcatggcgccgcctcacttacggtgacggcggctcgccccgaggcacgcttcaggcggcgggtgcccttctgcggcatccccccgtgaactcggagccggagacccctgtccagcgctggttggacgacgtggccaaattggtcaccactgcccagcggcagttggccgcgggcggccgacccgccgtcaccgggggcgatgactgggtcatggcgaattatttccccatggccctcaagggtcaggcgtgcggctggctgatgacccagccccccgactccatccactcttgggaggacctgtaccagcagttcgtcacaaactttcagggcacatatccccgcccaagagaagaggcggacctgcacgctgtgcggcggaaggacgatgagtccctccgctcgtacatacagcgcttctgccaggtccgcaacactattccatgcattccggcccatgcggtcgtttatgcgtttcggaatggcgtgcggcataaccgcatgctggagaagatcgcctccaaggagaccaagatcaccgccgagctcttcgagctggcggacaaggtggctcggaaggaggagggaaaggccaccggcgacaagccgagctccactgctccatccggcgagggccgatcggcagacaagtggtgctcggtgcacaacacttatcggcacaatctcgccgactgccgctcggtcaagaatttggccgagcggttccagaaagccgatgaggagaagcggcagggtcgacgagagggcaaagcccccgcgaccccaaccgaagacctgcgaggggaggccaagaagaaggctcccgccgatgatggcgataacagcgaggatctggagttccagatacctcagggaaccgtcgccacaatcgaccggggggaggagggggcttgcgttcacacctcccgccgaggcttcaaggctatgaggcgagagcttctggccgccgtcccgacccacgaagcggctcggaaggcacgctggtcggaggtgaagctcacctttgaccaagagcgaccatccaacagtgctcgctcgagccgccttcgatgcgttcaaggccccggggatgaagctccagccgcgctgccggtcatcggcgtgactccgggacacacatggcccctcggccacgttgagctctcggtaaccttcggcgactccaccaacttccgtaccgagcggatcgacttcgatgtggcggaccttaatctgccctacaacgcggtcctgggcagacctgcgttggtgaagttcatggccgccacccactacgcctacctccagataaagatgctgggccctagtggtcccatcaccgtctttggcaatgtcaaagtcgccctcacctgcgcggagcagcgcgccgacaacctggcagtggccacggagccacaggccccggaggcctccgcatcccgcgcctccaagaagcgcctcacctcggctgacgaggaaagcgcgctcgtcttcttcctgcgggcaaactccgacgtctttgcatggaagccgtcggacatgcccggggtccctagggaggtgatcgagcaccgcctcaccgtgcggccggatgcgcgatccgtccggcaaaaagtgcagcgtcaagccccggagcagcaggccttcatccgagaggaagtggcgcggctcctggaggctgacttcatccgcgaggttatccatccagagtggttggcgaacccggtggtcgtcccgaaggccaacggcaagctccggatgtgcatcgactatacggatctcaacaaggcatgccctaaagatccctgccctttaccacgcatagatcagatagtcgactccactgtgggtgccgtcctagtagtcgagcgcgaagagagcggaccggaggcccccttgactcacgatggcccttcgtcccccgaagacccggtgcccgaagcccccaacccccaggaggaccccgaggcccccgtgggaggaggggaggctttggcgagtgttcccgaggcctatggtcctgacatgactcgagacccccccggggcccctaggcaagggcgccccagatcatctgcccctggcagcacggaccggctccaccgaaaggtcctagctgacttcatcgcggagtggaccccagtggatgaccctgttccgtccaacgttccctccctccccggagatggagaggacccaaacaccgacattcgtggtgggcactgggttatgcatttcgacggctccctcaaccttcaaggtgcaggtgccggagtcacgttgacttcgccaagcggggacgtcctcaaatacgtcgttcggctcgacttccgagccacgaacaacatggcggaatacgaaggactcctcgcggggttgagggcggcggccggaatgggcatccgccgtctcctggtcctaggcgattcccagctggtcgtgaatcaagtatccaaagagtaccagtgcaccgatccacaaatggacgcatatgtccgcgaagtgcggcgcatggaacgccacttcgacggactcgagctccggcacgtgccccgacgcgacaacacagtcgctgatgagttgtcgcgtgttgcgtcggcacgagccccactccccctgggaccttcgtggaaagactcgcacagccataacggcacccagttcaccagtgagctgttcggcgactattgcgacgacatgggcatcaaattgtgctttgcctcgcccgcccaccccaagagcaacggccaagtcgagcgagccaacgccgaaatcctcaaaggcctcaagaccaagacgtacaacgtcctgaagaaacacggggattcgtggctcgaggagttgcccgccgtgttgtgggcaaatcggactactccaagtcgtgccacgggggaaacgccctttttcctggtgtatggcgccaaggcggtcctaccttcggagctttccttgggatcgcctcgcgtcgcgctgtacgatgaggccaagcaggatgatcttcgccgcgacgacctcgactattttgaagagcggagaaggcgcgcggccctacgtgcggcgcgctaccaacaaagcctgcggcgctaccatcagcgccacgtccgggaccggtcactgaaagttggcgacgtcgtcctatgccgcgtgcagtcgcgtctggggctaagcaagctctcgccaatgtgggaagggccatacaaagtgatcggcgttctccggctaggctctgttcgactaaccacagaggacggcacggagttgcctaacccctggaatatcgaacacctccatcgcttctatccatag

SEQ ID NO: 29427 - DNA, 1212 bp, Oryza sativa
  Clone ID: PAT_MRT4530_33930C.1
ttatgccagagccagaagtagccatgtgtggccaatgctttgatgttcttcttcgccaagaagaagtaagtcgagacacttgctcttcaactccgagcagccgcacatcttggcatagcccagtgtcctcgccaccgtctccaccgacaagctctcctcgagttttcgggcgcacatgagcttcagcctgtcgagcttatactcgtgcgccgccgcgagcagccggtggagcgtgtcggtgttggtgtcgctgctgtcaggcgacgacgagtgggctcccgctggcaggaagtcgccggtgtacatgaagtgcagcaaagcttcgaacatcgctggcttgatgtcgttcagggtgatgctgcaggctgctgcctccgccgtggagctaaggagcagagccttgaagaccggcgagcacacggcaagcagggcccggtgcgcatggaacgtctcgccaccgacgaagaagaacacgtcggagccgttcaagtggtccacccggcacatgtgtatcgcggccgctccatcccccaaccctcgcgcgcgccgccggcaccgtgccgacgaggccatccgtactccccaacccccacctcctccgctactcctcttcttcatctccagcgaaatttccccaccccacctctcctccctcgtcttcggcggctcgcacggctgcccccccccccggctcctacgctctccaacgagaagcattcccagcctccgacgctgtcccgtcactatcctcatctcccgatctcccaccccagccttcggcgtccccacccagccatgtgtgatggatctcgtctccaatttcatcgagcacaaggtggaataccagccgtgcaacattcccagaggagtctgctggtaagcaaggcatcccagggcttccgctttgatgcctggtggcgcttcgtcaagctgagtgaacttgactctcgctatgtggttacattcatatgtggcctcatcattctgcgcaaccacaacgaacctattgcagtgccaccttccaacctggggaaccaactcggcatcatggtgggcagcgccaatggctcggacatctccttctctgttggcagcgagatgtttcatgcgcaccgggctagttccatcccgtgcgtcatgctggatgacctggagctggcgacgttcagagcactattgcatttcatatacatcgacgccttgctgctatga

SEQ ID NO: 29428 - DNA, 636 bp, Oryza sativa
  Clone ID: PAT_MRT4530_33931C.1
atgagggggaagggatgctggagcaaaggagaggagggtcaagaggagaagataaaaattaaggagaggatggaggagagaaaaaggtgcagcgtatctagagaaagtagtttctgcacatctgatacccacgccataggtatatttctagctcatttcaggactacccaattttatgaggtggatggtttcaatctttgtttggagttctggcaagcagaggcggaacgtttaaaacagcaactgcataacttagaaggaagtcaaaggcagttgttggcacatgatctctctggccttgaatggaatgacctgaagagtctagaaaatcaactggagacgagcttgcataacgttcgtctaaagaaggacaaaatcatggtcgaacaaattcaagaattgagaaagaaggagaacatcatgcaccgagaaaacatggaactccaccgtgagttcaacatgatccgtcaagatagtgtgaatttccagcgaaaggtttatggaaaacaagatgtaaatggaggacagggaagttctgttactcagaacaccaatactcaggatgatgcagacgaaattcgtcttgagctaagccaaccacaggttccggatgagaaaccagaagcagcagcataa

SEQ ID NO: 29429 - DNA, 759 bp, Oryza sativa
  Clone ID: PAT_MRT4530_33932C.1
cccacgcgtccgcttggaggcttctgagctcgaaccccccgccgccgccgccgtcgctcctccatccgccgccatgaccttcaagcgccgcaatggcggccgcaacaagcacggtcgcggccacgtcaagtacatccgctgctccaactgcgccaagtgctgccccaaggacaaggcgatcaagaggtttcaggtgaggaacatcgtggagcaggccgccatcagggacgtccaggaggcgtgcgtgcacgatggatacgttctccccaagctttacgccaaggtgcatcactgtgtgtcctgtgcaatccatgctcacatcgtccgtgtccgctcccgtgagaaccggagggaccgcaggcctccggaacgcttccgccgcagggaggataggccccaaggccctcgtccaggtggtggcgctcccgctcctggtggagctgctgctcctgcccccaacgttgctcgcacctgattgtctccggagtgataaaccttttttcagtcgtttccctaaatctagcatgataccagggtgttgaactttatctaggaccaacctgttctttttcaaatatcggatctgctgttactggtttcatctttactaaatgtggtttaccatttattcgattcgttctgttcctactcacgccgtgtcagacgttatgtgccgtgtgagtttttctgttcctgctcatgcttgtgagagcaacatcgtatgtctctcctaaatcccgagtatgttactttttcttt

SEQ ID NO: 29430 - DNA, 1158 bp, Oryza sativa
  Clone ID: PAT_MRT4530_33933C.1
gtcccatgtttctcggcagcagcccctctctgtaaaaagataggttgattcaccatgggccgcgcgatgaggtggttcaagaaggttctcaccggcaagaaggaaggaggagacagggatcggaaggagcacagcgccgccggaggcgccaatggtggcgtcgcgccgccgccgatggagaggaggaggtggagcttcgctaagccgaggagcagtttcgctgacggcagccgcaggccctcggtcaccgccgtcgtcgccggcgagctctcgcaggtccggccatgcagctgcggccagcaacgggaggtggaggcggccgtcatgatccagaaggccttcagaggatacctggctaggagggcattgcgcgctctcaaggcgcttgtcaagatacaagctctggtacgtggctaccttgtgaggaagcaagcagcgacgactctgcagaggctgcaagcgctcatgaggctccaagcctcctctcgcgccatcaagatggcctcatcgcggaaatccgtcgaacaggagaggattgtcgtgcaaatgcaaggagggcgggtaaagacattgacgttgccggtggtgcaccgccgtcgggtgtccgacggcggcgacatcaacttcgaccgcagcccgaggatcgtggagatggacacgtgccagctccggtgccggtcttcccggatcacgagccgctacgccgccgacccgccgccggacggcacgccggggtcggtgccgctgtcctcgccgcacctctactgctacaagccgccgccgtcgcgccacctccaggccgaggagcacgagcacgatgcgcgggcgcagccgaagacgacgcacaacacgccccggctcgccgccgcgctcccggcggggtaccacggcccggcgtcgccggcgaaggggcgcgtcgtgagcccgcggtacatggcggacacggcgtcgtccgtggcgcgtgcgcggtgccagagcgcgccgaggcagcggcacggcgccgccggcgagccgaggcctagcctggcccgcgccgggtcgaggaagtcgcggccggacagcgccatcagcttgaagagctcggagatgagccgccacgaggactcggagttcagcgacgacgtcactagagattattacctcgatcagctctggtga

SEQ ID NO: 29431 - DNA, 188 bp, Oryza sativa
  Clone ID: PAT_MRT4530_33934C.1
cagacacatccagttatcaattaactactagctataggagtcgtcctacaactatcagtgtgctgctaagcggctacatcttcttcagcgcattgtgaaggacaaatagcaggcatcacacgatttgctgatattggtcggtgagatttcggacgattcttgcggtccgggacgcgcttgtatgcgtg

SEQ ID NO: 29432 - DNA, 699 bp, Oryza sativa
  Clone ID: PAT_MRT4530_33935C.1
ccggccgggattattctctagacgggttaacagtcatcatgaagtttactgtttctttcgcggctcttgctgctggagcattccaggctgtggctggtcaaacagtttactttgccggcgactctactatggccagaagtggcgccaacgacggtgctactgatggctggggaaactacattggcaaatacctcaaggtcaacgccgtcaacaaggccatcggcggtcgatctgctcgctcatacaccaacgaaggtcgtttccaggagattgtcaacctcgtcaagccaggcgatgtagttgtcattgaattcggccacaacgacggtggttcacccaacaagaacgacaacttgcgctctgcttgtcccggtgctggcacagaagtctgcacctctgacaagactggcgaaaaggtgtatacctatgtcttttacatctcgcaagctgccaaggcccttgtcgccaagggtgcccaagtcgttctcagcacgcagactcccaacaaccagtgtggagactggcacatttgagcctggtgcccctcgctttagttggttatgtgtctactgcgcacagggctctggctagctccagcgtaacctgagttgaccactttgctgctgttaccaagatgtaccagaagctcggtaccaaaaagtcaactctttgtatcctcgcgacacactcaacaagtcc

SEQ ID NO: 29433 - DNA, 1371 bp, Oryza sativa
  Clone ID: PAT_MRT4530_33936C.1
atgagcacaaaaaagcgagcgaggtgggacccacctcctgaggaggaaaacggtgggcccacccgtcagtcggcgcaggtccggtactacagcactgcgagactgccggtggggccctcgggtctcaggtggggagcagttgctgccgtcctgcagccgcatccgcccaccccgtgcacccggtctaccgtacgcctccccctacctgcagatgggccctacctgtcagtgaaagtactgttcccggttcacgtgtcattgtcactactcgatagtatttcaaatttccgggtgctgtcttcaagcaatgcctcgaaaacagagctagttaagaaatattgccaaacgatggatggcatccttgatcacttggaggtggccctaaacagagcttttcctcagattactccagatggtgaactaagtaaagtgcttgaagaacttggcgctaccatcaatgaagcgactgagctagttggaggctggaatcaaatgatgagcaagatttattttgttattcaggctgattcaattattgccaagatgcagatatatgtattcgaattatgccaaattgtcaattctctcatgcagattgagtcaatgcatttggaggatcttgaacacgatagctgtggaaaaatttcagatgtcattagggaggcttccagggctttagcaggggaagttatgccaaattcagaggaatttggaaagattcaaactactttgagcttatccacaaatcaggagttgctgatggaatatgttgcacttgttaagattaaaacaaaaggtaatcatgaagataacaaagaaatggatgatattaacgatattgttgaattagtcaaccatatgcttgacaaacatgtggaagaaaagcaaacacgtagcattaatggagtgaccattcctgctgatttttgttgtcctctttcccttgaactaatgtcggatccagtgattgtggcatctggtcaaacgtatgagcatgtttttatcagaaaatggtttgatctgggatacaacatttgtccaaagacacgccaaatattgggacacaccaaattgattcctaacttcactgtcaaacagttgattgaaaattggtgtgagatgatagagtgtcatcatttgggccgtgtcgtgcgcgacggcggcggcctccggcgtggcgtaggaccccagccacagccgctcccgcgtgccgggcacccggatctccgacacccacttcccccaccgccgccgccgcacgcccctgtacctgcaccgctcctcctcctcgccgccgccgcactccgcccggctcattgcctcctccggcgagctgagatcaacctcaccgtgatctctctccgttcttga

SEQ ID NO: 29434 - DNA, 2636 bp, Oryza sativa
  Clone ID: PAT_MRT4530_33937C.1
ccgcctcctgcgacgaagcgaagcgagacgcctccgcctcgcgcgagccaccacgagcacctcgacacgggagtccgaatcctcctcctcccccctccatatgacgtttgtttgtggtggtgggcaagtgatggattcagtgtcattgtcactactcgatagtatttcaaatttccgggtgctgtcttcaagcaatgcctcgaaaacagagctagttaagaaatattgccaaacgatggatggcatccttgatcacttggaggtggccctaaacagagcttttcctcagattactccagatggtgaactaagtaaagttattcaggctgattcaattattgccaagatgcagatatatgtattcgaattatgccaaattgtcaattctctcatgcagattgagtcaatgcatttggaggatcttgaacacgatagctgtggaaaaatttcagatgtcattagggaggcttccagggctttagcaggggaagttatgccaaattcagaggaatttggaaagattcaaactactttgagcttatccacaaatcaggagttgctgatggaatatgttgcacttgttaaggttaaaacaaaaggtaatcatgaagataacaaagaaatggatgatattaacgatattgttgaattagtcaaccatatgcttgacaaacatgtggaagaaaagcaaacacgtagcattaatggagtgaccattcctgctgatttttgttgtcctctttcccttgaactaatgtcggatccagtgattgtggcatctggtcaaacgtatgagcatgtttttatcagaaaatggtttgatctgggatacaacatttgtccaaagacacgccaaatattgggacacaccaaattgattcctaacttcactgtcaaacagttgattgaaaattggtgtgaggtacatggtataatgctaccagatcctgttaaactcttgagtttgtgcttccctgtttccctcaacatcacagatggaagtgcaagtgcagacaagtctggatcaccagaacactgccaattggtagctgcattgcatccaaaagcacagtgcgcatcggatgatagtcatcattataatttgatacatgaaaactctgattcagatgatagagtgtcatcatttggagacacagatgattctgaacctgattctttaagattatcaacagaaactactgcagcaaacaaatctctacttgatgaaaaaactgatcgttctgatggtcttaagcaattgagagacaatggttttcaagtttctgatgaggaacagtatctcgaaaggaatggtaaaagtcatatcagcagccatcatcaacttgaagttgatggagagaatgtcagggtacaagcatcaagtgacatcaatgcatctgaagttatgcaagatgatccggtcaccacatgttcaaaggtatcagataaccctcctagattgggtggtgttcgttctcgaaatcagccaaactggtggagacagtctaataaaactattcctaggatcggattgtcatcttcgacagattcaaaaccagatttttctggcaatgatgctaaagtgcgtaatcttatcgaggaactgaaaagtgattctgctgaggtccaaaggtcagcaacaggagagctccgcattctttctagacacagcttggagaatagaattgccatcgcaaactgcggagcaatccccttcttggtgagtctacttcattctacagaccccagcacacaagaaaatgctgtgacaattctcctgaatttgtcattggatgacaataacaagattgccatagcaagtgctgaggccattgagcctctcatcttcgttcttcaggtgggaaaccccgaagcgaaagccaactcagctgcaactttattcagcctctcagtcattgaagagaacaagatcaagattggacgttccggtgccatcgaaccattagtagatttactgggagaaggtaccccgcaagggaagaaggatgcagctactgcactcttcaatctgtcgatatttcatgaacacaagacccgcattgttcaggctggggctgtcaaccacctggtggagctgatggatccagctgctgggatggttgataaagctgttgctgttctggcaaaccttgcgactgtgcatgatggaaggaatgccattgctcaggcaggaggcatccgagtactggttgaggttgttgagctgggttctgcacgttcaaaggagaatgccgctgctgccctgctacaactctgcacaaacagtaacaggttttgcaccctggttcttcaagaaggcgtcgtgccacctttggttgcattgtcgcaatcaggcacagcccgtgcaagagagaaggctcaggttcttctaagctattttcgcaaccagcgccacgtcagggttgggagagggtaagtctacgcaattaagcagcaatgcggcggtctgattatttgttccatgatccttgttggccgggcaattaagagatgtatattccatcctagtcgtagcatattttttctggtagtgattccaaatgattgatgtcacaagttgcttcctgtaaagaagacccatctattgtgtatacatggttttcacgataacaaaa

SEQ ID NO: 29435 - DNA, 336 bp, Oryza sativa
  Clone ID: PAT_MRT4530_33938C.1
atgagccgggcggagtgcggcggcggcgaggaggaggagcggtgcaggtacaggggcgtgcggcggcggcggtgggggaagtgggtgtcggagatccgggtgcccggcacgcgggagcggctgtggctggggtcctacgccacgccggaggccgccgccgtcgcgcacgacacggcccaaatgatgacactctatcatctgaatcagagttttcatgtatcaaattataatgatgactatcatccgatgcgcactgtgcttttggatgcaatgcagctaccaattggcagtgttctggtgatccagacttgtatgcacttgcacttccatctgtga

SEQ ID NO: 29436 - DNA, 1924 bp, Oryza sativa
  Clone ID: PAT_MRT4530_33939C.1
ttatgttgagtaacctgttgagtaaccagagcttccatcaatcgaagatgttggcctaggtgcaggaaccggtagagggcaagtagcgtcgctgttaagcaaaaccatgacatccaccattgtaggtctatctacagggttttgctgggcacataggagtccgatgttgatgcattttaccacctcagcctcattgtagtttcttcccaaggaatggtcgatcatctctgctgttgtcccctcttcccagtgcctccatactatgctcaatatatctacaccattttgctcagagaaatatggcccactgttccttctttggcctgtcacgatctctattacgagaatgccgaagctgaacacgtctgatttcgtagagtactgcccgcacatcacgtattcaggagatatgtaaccgaatgtcccagcaatgcggctcgtgacttctcgagtctggtcctgcgcgaagagcttagcgaggccaaagtccccaatcttagggttcatgtcagcgtccagcaaaatattgcttgccttcatatcacggtggatgatcttcttctgagagtcctcgtgaagatattggagtccccgagcggtaccttctatgatcttaaatcgtgtggcccagtctagctgtttcctttgctctgtgtcaaaaagatgggtgtcgaggcttttgtttggcatatactcatagacgagcagtctctcccctttttcgaggcaaaaaccaatgagacgaacaagattcttgtgatgaagtttggcaacaagaattagctcatttttcagctcttgtagcccctggtgagagtccttggccatccttttcactgctacttcttgtccaaaaagatgcccttatacactgcaccaaatcctccttcgccgagtttcttgctttcgtcgaagttatccgttgctacttgcagtgatcccagagttagcaaggttgacttgacactttcaaggtcctcagatggttcggacaaatgctctgcttttgtcgctctgctcttcttccgaacagtccacatgcagacagaaattgcagctacgattgcaactgctactatcggcaagacaattagcagaattttgcttgctgaattcttcgccgcggcagagcaggaggccgtagacggcgtccgggccggcgccgcggacgccggaggcgaagagggtgggggaggcggaggcgttcgcgcggagggtgcggtgtagaaggggcccagctcggacctcaggtagcagcgcgggccggcgaccctcgcccccttcccgttgagcgggaacgtcttccaccactggcccacgaggccgtcgaggcagctccggcactgcgccggcgacaggtccggcgagcaggcgaacagcttcgtggagttctccaccgcgtaccgcacggtggcgttgaggagctcggtgaccgcgcggtcgtagccggcgacgtcggtgctggtgatgttggtgccgcttatgaggaggctcacctcgccggagttgttggtggcggcgaggaagtcgcccctgtcggagaactgggcgtagcattggttgtagacgaggatggcgtccttggtgcggttgcaggttggccccgcgtccctccagacgttggtgccgcagtcgaagcagtcggaggggttcatgtcgccgcggcagagcaggaggccgtagacggcgtccgggccgacgccgcggacgccggaggcgaagagggtgggggaggcggaggcgttcgcgcggagggtgctcgcgaggcgcaggaggttggactcgtaggtgctccccgccgtgtagttgccgccgctggtgcaaaagaaagaaagaagaagagggaaaaagagagaaaaaaataaagaaaagaagagagaaaaagaaaaggaaaaataaataaaaaattagagagagattaagg

SEQ ID NO: 29437 - DNA, 2328 bp, Oryza sativa
  Clone ID: PAT_MRT4530_3393C.1
ccattctgcaagtgatccgttctgcatggcgacctccgcccacacggtgctcgacgtcgactccggcggcggcgcggcgaccgcggcggccggcccgccggtgccgtacctgctgtccttcaccgacctctcgtacagcgtcaggaagggcggcggcggggtcctgtcgtgcctgccgtcgagccgccgccgccgccacagcaaccgcctggcgtccgcggacgcgccggcgccgcccgacgcgcccaccaaggcgctgctcgacggcatctccggcgaggcgcgggacggcgagctgttcgccgtcatgggggccagcgggtccggcaagtccacgctggtcgacgcgctcgccggccgcatcgcgcgggagagcctccgcggcgccgtcgagctcaacggcgagccgctccatgggcgccgcctccgcgccatctccgcgtacgtcatgcaggacgacctgctgtacccgatgctcaccgtgcgggagacgctgctgttcgccgccgagttccgcctcccgcgcgcgctctcgccggacaagaagcgcgcccgcgtcgacgcgctcatcgaccagctcggcctcgcgcgcgccgcggacaccatcatcggcgacgaggcccaccgcggcgtgtccggcggggagcgccgccgcgtgtccatcggcacggacatcgtccacgaccccatcctgctgttcctcgacgagcccacctccgggctggactcggcgagcgcgttcatggtggtgcaggtgctccgccgcatcgcgcagagcggcagcgtcgtcatcatgaccatccaccagcccagcgcgcgcatcctcaacatcctcgaccgcctcctcctcctctcccgcggccgcaccgtctacgccggcacgccggtggggctcaagcccttcttctccgagttcggcgaccccatcccggacaacgagaacccggccgagttcgcgctcgacaccatccgcgagctcgagcaccagcccgacggcgccgccccgctcgccgacttcaacgtcaagtggcagtccatgcacgccgcactcccggcagctgacagcaaggacagcaagcgatgcaccatgccactcgagctcgccatcacggagagcgtgtcgagggggaagctcgtcgccggcagcggctcggggacggcgtcgtcgacctcggtgccgacggtcgggcacgatcatgccgtcgaggtgtgggtgctgatgaagcgatccttcacgaacacggggcgcatgccggagctgttcgtgatgcggctcggcacgatcatggtgacggggttcatcctcgccaccatcttctggcgcctcgacgacacgcccaagggagtccaggagcgtctcggcttcttcgccatggcgatgtccaccatgttctacgtctgcgcccacgcgctgccggtgttcgtccaggagcgccacatctacctccgagagacagcgcacaacgcgtaccggagactctcctacgtgttcgccaacgccgtcgtcgcgttcccgccgctggtgttcctgtcgctggcgttcgcggtgaccaccttcttcgccgtcggcctcgccggcggcggcggttcgttcctgttcttcgtgctgatcatcctggcgtcgttctgggcggggagcgggttcgtgacgttcctgtccgcggtggtgccgcacgtcatgctgggatacacggtggtcgtcgccatcctcgcctacttcctgctcttctccggcttcttcatcaaccgcgaccgcatcccgagctactggatctggttccactacctgtcgctcgtcaagtacccgtaccaggcggtgctccagaacgagttccgcgacgcgacgcggtgcttctcccgcggcgtcgagatgttcgacgggacgccgatcggcgccatgtccagggccgtcaagctcaaggtgctcgatgccatcagcaagacgctcggcaccaacatgacggcgaacacctgcgtcaccaccggcgccgacgtgctggcgcagcaggccgtcactgacattggcaagtggaagtgcctgctggtcaccgtggcgtgggggttcttcttccgggctctcttctacgtcgtcttgctcgtcggcagcaagaacaagaggaggtagagagagaggggccgatcatgttcagctgatatgatgtctgaattaatgacagcaagaaatgtgtgatatgctagtagtgtatttgtttgtgtaattttctcattttgttgaagatgcagttcatgtatgtgaatgtgttcagttttactggctgttatacactaaaacatacagaattacatgttgatatactgtttctcaat

SEQ ID NO: 29438 - DNA, 685 bp, Oryza sativa
  unsure (1)..(685): unsure at all n locations
  Clone ID: PAT_MRT4530_33940C.1
ccgcctcctgcgacgaagcgaagcgagacgcctccgcctcgcgcgagccaccacgagcacctcgacacgggagtccgaatcctcctcctcccccctccattggaggcctccgaggtgatggattcagtgtcattgtcactactcgatagtatttcaaatttccgggtgctgtcttcaagcaatgcctcgaaaacagagctagttaagaaatattgccaaacgatggatggcatccttgatcacttggaggtggccctaaacagagcttttcctcagattactccagatggtgaactaagtaaagtgcttgaagaacttggcgctaccatcaatgaagcgactgagctagttggaggctggaatcaaatgatgagcaagatttattttgtaactactttgtcctttccatgataaatctccctcattagtcactacatatacaatgctttaatttccatccaagtaggatttcccctattattcttcttaatatgctacttagtaaataactcactatgagtaatatattgggtgcaggttattcaggctgattcaattattgccaagatgcagatatatgtattcgaattatgccaaattgtcaattctctcatgcagattgagtcaatgcatttggnaggatcttgaacacgatagctgtggaaaaatttcagatgtcattagg

SEQ ID NO: 29439 - DNA, 234 bp, Oryza sativa
  Clone ID: PAT_MRT4530_33941C.1
atggatggatgggacgggcggcagtgcacccgattcgtgtcaagcggcgtgggggcaggcaatgtccaccctctccggaagggagaggtcaggggcgacccatgtgatatccccttcatctataaaaggaagaccctgccctacgagtcaaggggacgtctctggaagaaccagattccggagaaaggctggccaagccctagcttgcacatccagaacctggagactttgtaa

SEQ ID NO: 29440 - DNA, 240 bp, Oryza sativa
  Clone ID: PAT_MRT4530_33942C.1
atggcgtcagcggcagtgcgggttggaggaggtagcctcagatacgggagggagagggaggaaggcagccggccgcgccagcgggagagggggagaggaggccggcctccaagggggtcggcgcatggcaagcagaggggagaaattcgacatatgaggccttacagcgttggcaactactgctgcgatggcgatggcacgatgatgaccgaggcaaagagagtacactgtacggagtaa

SEQ ID NO: 29441 - DNA, 199 bp, Oryza sativa
  Clone ID: PAT_MRT4530_33943C.1
cttttttaccttgcacatagcgcttcttagaagcgggcctgacgcttttgtccttgatgcagcacaggccaaactcctggacttttgtccctgttcacgttgtttctgtgtcttgtttgctacctgagaacctgatgaactcgttacctgaaaatggagacttatcgttatgctgtaccaaaaaaaaaaaaaaaaaaaa

SEQ ID NO: 29442 - DNA, 403 bp, Oryza sativa
  Clone ID: PAT_MRT4530_33944C.1
ttaaagtgcggaggaggggcatgcggtggtacaacttagtcgcttcacgtcagatgtgcagcgtgctgaccagactctagcttcgacgacggacagttgtgaggattgacggatcgtataccctgagtggagactataaaggcctgcttagccaactagcggacaaggtgagggagctcgatatgggacctgcagagatactctctatagaattgtggaaaaggtgccagtagaagggcagctaagaagttagatactacttgtctgatgaagtgagatatactctatgagacatgatgactccttgacagcactacagttggagacatgacgatctatgctgagttcatggctgaggggtctggtcacgcagcataagaggtgacgttgcggtgaggacatg

SEQ ID NO: 29443 - DNA, 272 bp, Oryza sativa
  Clone ID: PAT_MRT4530_33945C.1
ccccttggaaaaaattttggccaagacccctaacataattttttaaaaaattttacaaaggctttttattttggggacggggaaataccccttactcctttaaaaggggccagggtgtttaccccccgaaaaacccctttaaaaaaggggggggttttataaaaaccccccggggaaaaaaaagcgtctcctgggacttgggggggtaaaaaaggggaaggcccgggttttcccaataaacactttttatgggaaaaacccccccggggaac

SEQ ID NO: 29444 - DNA, 650 bp, Oryza sativa
  Clone ID: PAT_MRT4530_33946C.1
ccggccgggaagccgcgagaggaggaggcggcgcaacgaagacgcgacggcgacggcacggctctctcctccggccgccaccttctctccggacaacttcagatttcggcccgggtcatctggcccaaccacgcaccactgccactgcggcagcaacatctcccttcgtattctctcctctctcggcggcggaaggtttggtgggagatggcgccaccgggatcgcggcggtgggcgtgcgtgcgggtgatgaccgggaccatcctcggcggcgcgctcggcttctacgtcatgcaccgcctcgagacctcccacaaggcgaagatggaggagaggctgcgcaagtacgaggcgcacatgagcatggtcgccaaggggaaggaggaggcgcagcagcggctgcaggacgaggcggcgctgcagcacaaggaccaggcccggctcttgccggactcatgaccttcatttagagtaatacctagcggctcagagcagtcccagatcctttcttcagaagtagatgagaaataacaaccagcatgtacttgagaaataacaatccggcattcctggcattatttgaacgcggcaagtgtttttgtttgagaatgtgaaaagaaaaaaaagctcttttttagtcttattgtact

SEQ ID NO: 29445 - DNA, 936 bp, Oryza sativa
  Clone ID: PAT_MRT4530_33947C.1
tttattagaagaagaagactatcatcttgagcttattcttccatttgctccatcttgaaatcatcagtaaccatggctaggaagtgctctagctgtgggaacaatggccacaactccaggacttgcagtggccaaagagttcttgatcacagcatcagcagcagcaacagtggtagtactactgctgctgctgctactgcctgtggtggcttgaggttgtttggggtgcagctgcaggtaggaggaggctcatctcctctgaagaagtgcctcagcatggagtgcttggcatcaccagcatactatggagcttctgcctcgccgtcggtttcgtcgtcgtcatcttcgcttgtttcgattgaggagaacactgagagggtctccaatgggtacctctctgatgggctcatgggaagggttcaggagaggaagaaaggagttccatggactgaggaagaacaccagatgttcctcgccggccttgacaagctcggaaaaggcgactggcggggcatttctcggcacttcgtcactacccggactccaacgcaggtcgccagccatgcccagaagtacttcctgaggcagaacagtatgacacagaagaagaggaggtccagcctctttgatgtggttgaaggtatcaagagggcagcagcaatgcccatttcaggatctgcatctgaactgcagatccccggcatgtcgatcggtgtcggcgtggtgaaggaggaggttgtcctgcctccatgtctgaacctgatgagtaacagttcatcagcatcacagcactcaccttccctgacattgctggcaaatcctcaggtgcagctccagatgcctgacctggagctaaagatgtccacatcccggttatctgaccaatccggtccgtcgccgagcacgcctttcttcgggaccatcagagttacctga

SEQ ID NO: 29446 - DNA, 1201 bp, Oryza sativa
  Clone ID: PAT_MRT4530_33948C.1
atgtattatgctattgaacttattaaattacatgtccttgcagaagaagttgacattggcattgtgcaagctctattgatgctatccaacctccacataaacattgtgccttcttttggtaatatgggcgctttaggcatagacctctgtagggatcttcatcctgtagtcaacggttttctgcagcaagcaagctggttacaatctgcaccaataagctttcaaggttttcgtccccaagaaagttggatgcactcaccaaatcaagttgtcgggtccgcctcatctcatggatccaaatcagcctctcagtgccctgcaagacaggaagagaacaatttggttaacatcgaagagtcaagtgacaatagccaagagacagggagaagagggacacgcgtcaaactggaccgaagaagaaaacttacgactcctcagctcttggttgaataactcactagattctataaatggcaatgacaagaagggagaatactattggagggatgttgctgcagagttcaatggtaatgcatctagcaataaccgcaaaaggacagtcgtgcaatgcaagacacattggggtggtgttaagaaggacattgcaaaattttgtggagcttattctcgagctagaagaacctggagcagtggattctctgatgatatgatcatggagaaagcccatgcattatataaatcagaaaacaatgataaaactttcacattagagtatatgtggagagaattaaaggatcaaccaaaatggcgacggatacttgaagaggacagcaagaacaagaggactaagatttctgaatctggtgcatatacatcatcatccaaccaagaaactgaggaggagaccagccgaaaagagaagcgtcctgaagggcagaaaaaagccaaagccaagcttaaagggaaaggaaaaaaacctgcaccgtctcctttgggggaccagccatctcaagattttgttctcctcaacgaagctgtaaaattgagagcagaagcagtgctgaaatctgcagaagcaaccaccaaatcagcggaagcaaagaaggaacaaactaggatggagaagtatcagacatatttaaagttgttggacaaagacactgccaattttagtgatgcaaaactcaagaggcatgaagctgtcctcgaaaagctagctacagaacttgcagaagaatag

SEQ ID NO: 29447 - DNA, 581 bp, Oryza sativa
  Clone ID: PAT_MRT4530_33949C.1
gactcctatagggcgattgggatcaacagagccggccgggatcgtcgagatgctgcgcactcctgacctgatcttcctccaggaggtccaggacaacagcggcgctgccaacgatggtgtcgtgtctgctaacaagaccctcgctgctcttgccgatggtattgaagcggccagcggtgtcgtgtatgagtgggctgaggttgtgcccgacaacaacgtcgacggtggccagcccggtggtaacattcgtcaggcgtacctctactgccctgacgttgttcagctcgtcaagcccaacgagggaagtgccagcgatgtcaatgctgttctcgacggccctacgctaaagttttttttggtcgcattgatcccgccaactctgtctgggacaacagccgcaagcctcttgccgcagaatggaagcctgtcaagggcaccaagaagtccttcttcactgtcaacgtgcactttggcagcaagggtggttcatcttccatacacggcgatgcccgtactcctgttaacaagggcgctgaaaagcgctctaagaaatctgaagtccctgctgttttcttcgcaca

SEQ ID NO: 29448 - DNA, 5130 bp, Oryza sativa
  Clone ID: PAT_MRT4530_3394C.1
atggccggtcacccacccaaccaccgcggagaaggcatgatcgacttcgtggcagagctggcacgcatgacactggtggtgggctaccccaacgcgccagagtacacgaccatcccaccgctcagtggcgagcttcctcaccgtgtccgcttggaggtccatggctacgtggggacttgcctcgctaacatggcggttgaggcgtcaggaggcacagcagatcatgcctgtcaggaggcagcctacttgatgatggccaggttacgggagcgccacgactacatcttccacgacacggcgtaccgctaccacccccgtcgagcccatggtgatggcgtcagctccttccgtccgacagctggcgagaacgacaccaccttcggtcacatgtgtgctgtgatgaggggattggaccggatgcactcggacctgcacaaggcgaccaaggccttgaatgatgggaagctcatgaggatcgtcgctctgaaggacgagatagcgcgcctgaagaaggagaatgctcagttgaagggtcttccagcaccaggaggagtccggatccgcactacgccccgtaagaggacgactgcacccgtgcgcatccagcttgcgcccaggaacccacctccagcagcagcagctccggcagttcctccagctccagctccagctccagctccagctcccgcgttcactctctccttcgctccagcatcagccgccagaggaccagccagtggtaccggaggttgcttgtttgggatggtctacaccaggactggcaaccgcacgacaggcgagggcagcaacggtgaagaacgcgctgatggtgtgcaccccaacagtgattctggcaatggtccgccaccacttcccgagaatccgacgcttgcccaagttatggcacatcagactcagatgatggcagccatgatgcagcagatgcagcagcagcaccagcagatgcaccaaaggatgatgcagcacgccgagcagcagcaccagcagtttggtccccctccccctcagtccaagttgccagaatttctacgcgtcaggccacccaccttctccagcaccaccaaccccatggaggcgaacgactggctccatgcaatagagaagaagctgaatctcctgcagtgcaatgatcaggagaaggtcgcttttgccacacaccagcttcagggtcctgcgtcagcttggtgggacaaccacatggccacccgcccaccgggtactgaagtcacatgggcagagttctgccgtagcttcaggaaggcacaggtgccagatggggtcgtggcacaaaagaagagggaattccgtgcgctccatcagggcaacaggactgtgacagagtacctccatgagttcaatcgcctcgcgcgatatgcaccagaggatgtccgcaccgacgccgagaagcaggagaagttcatggcgggtctggatgatgagctgaccaaccaactgatatctggggactacgctgactttgagaggctggtcgacaaggcaatccgtcaggaggaccaacgcaacaagatggacaggaagaggaaggccgctcagttcagggcacctcagggaagtcaccagaggccgcgcctcactcccggacagcagggtggacctaccaccatgatcgtccgccagcaccgcccgttcaaccctagcaacttccaccagggcaccagtggcagtcagaaccaccatggaggtcagcccaaccgcggtacagctccacgcccaccgatggcaccggcacagtcaggccagcccgcacaagccaagaaggagacgggagcaaaaccagggtcctgcttcaactgtggcgagcttggccacttcgctgacaaatgcccgaagcccaggcgtgccggaccaaggtttatccaggctcgtgtcaaccacgcatctgcggaggaggcacaagcagcaccagaggtcgtactgggtacgtttcctgttaactcaatccctgcaacagtactttttgattctggtgcaacgcattctttcatctcaaagaaatttgtcgggatgcatgggttaataagagaggaacttagcacaccgatgcgggttcataccccagggaatagctccacttcggttcaattcagcccttctataacaatagaaattcaaaggtcaccatttctagccaacctcattcttctcgaatccaaagacctagatgtcattcttgggatggattggctgaccaagtttaagggagtcatcgattgtgcgagtcgcacagtcaccttgaccaacgagaagggagaaaccgtggtgtacaaatctctagtctcaccaaagaaaggggtctcgttgaatcagattgagacggaaatcccagtggacaccgtagagaagaacttgcggaagttggaagatatacccatagtctgcgagtatccagaagtgttccccgaagacctcactaccatgccacccaagagagagattgaattccggattgacttggcaccgggaaccgctccaatttacaagagaccatacaggatggcggccaacgaagtagcagaggtcaagaagcaagttgatgagcagctgcagaaagggtacatacgaccaagcacttcaccttggggcgctccggtcatttttgtggagaaaaaggataagacgaagaggatgtgcgtcgattatcgcgcacttaacgaggtcacaatcaagaataaatatcctttaccgcggatcgatgatttgttcgatcaactgaaaggagctagagtgttttctaagatagacctgcgatcaggctaccaccagttgagaatctgggaagaggatattccgaagacggccttcaccactcggtacgggctatatgagtgcacggttatgtctttcggacttaccaacgcacccgcattcttcatgaacctgatgaacaaagtgttcatggaatttttggacaagtttgttgtggtgttcatcgacgacattcttatctactcaaaatccgaggaagaacatgagcaacatctccgtctggtactcgaaaagttgaaggagcaccagctatacgccaaattcagcaagtgtgacttctggttgacggaagtgaaatttctgggtcatgtcattacggctcagggtgtggcagtcgacccatcgaacgtggagtcagttaccaaatggaccccacctaagaccgtgtcgcagattcggagttttctaggactggcaggttattaccgccgattcatcgaaaatttctccaggatcgcccgacccatgactcagttgcttaagaaagatgagaagtttaaatggacagctgagtgcgataagagttttgaggagctcaagaagaagttagtatccgcaccagtattgattctgcccgacccgacgaaagacttccaagtctattgtgatgcatcccgtcacggacttggatgtgtcctaatgcaagagggcagagtggttgcgtatgcctcgcggcagttgcgtccacacgaaggaaattatccaactcatgacttggaattggcagcagtggttcatgctttgaagatctggaggcactatctgattggaaaccgctgcgaagtatatacggaccataagagtctgaaatacatcttcacccaaccggacctaaaccttcgacaacgaagatggttggaactaatcaaagactatgacatgagtattcactaccacccgggtaaagccaatgtggtggcagacgcattaagccggaaaagttactgcactgccctatgcatcgagggcatgtgtgaggaattgcggcaggagtttgagcatctcaacgtgggaattgttgaacacgggttcgtagccgctctggaggcacggcctactctcgtggatcaagtcagagcagctcaagtaaatgattctgagatagcagagctgaaaaagaatatgagagtcggaaaggctcgggatttccacgaggatgagcatggcacgatctggatgggagaaagattgtgtgtacctgacgacaaggaactgaaggatctgatactcaccgaggctcatcagacccagtactccattcacccaggcagcaccaaaatgtaccaagacattaaagaaaaattttggtgggtcagcatgagaagggaaatagctgaattcgtcgcactctgcgatgtttgccaacgagtgaaagcagagcaccaaagaccagcaggtttactccaacctcttcaaatcccggaatggaaatgggaggagattggaatggactttataacaggactgccccggacatcatcgggtcacgattcaatctgggtagtcgtggatcgactcaccaaggtggctcactttataccagtacataccacctatacgggaaagagactggcagaattgtacctcgcaaggatcatgtgtttgcatggggtacccaggaagatagtatccgaccgaggtagtcagttcacctcaaagttttggcagaaattgcaggaagaattggggacccgtttaaatttcagcacggcatatcacccgcaaactgatggcgaacgtcaactgttcggaacagaagtattaacggaagcagaagagaaagtcagaatcatcagggaaaggttgaggattgctcagtctcgacagaagagctacgcggataaccgtcgaagggagctcacttttgaggcaggagattacgtgtatcttcgtgtcactccgctccggggagtacaccgttttcagacgaaaggcaagttggcaccacgcttcgtgggaccatacaaaattttggaacgaaggggagaagttgcttatcagttagaacttccatccaatatgatcggcatccatgacgtgttccacgtgtcccaattaaagaagtgtttaagggtacctgaagaacaggctgattcggaacacattgatatccaggaggacctaacatatgtggagaagccggttcgcatacttgataccagcgaaaggagaaccagaaacaaggttactaagttttgccgagttcagtggagtcatcattcagaagaggaagcaacctgggaaagggaagatgagttgaaagccgcccatccgcacctcttcaccagctcctccgaatctcggggccgagattccgtttaa

SEQ ID NO: 29449 - DNA, 396 bp, Oryza sativa
  Clone ID: PAT_MRT4530_33950C.1
atggatagtggcggtgatgggattggcgctcgacggcggcagtggacttggcctcccctcttctcgctcgccgccgccgactgttctgcgtcttcctcgcggagcgcggtggtggcgagtctcgacgacggcgtggccaagctcgacaaatccagtggtgatggctcatcggggcgcgacgtgaggatggtcatggccatggcttcgtcgtcgccgccgtggttgccaccgcgctgccctcctcgcctacgccggcgagcccctcccctctttaccatcctacttcgccgggccgccgctcgctgcctcgaccccattgccggggagaccgacggcgacgacgacgtcccttgcagccggtccaactgcgtctcctgcagctgggttatcgtctga

SEQ ID NO: 29450 - DNA, 512 bp, Oryza sativa
  Clone ID: PAT_MRT4530_33951C.1
atggccatgaccatcctcacgtcgcgccccgatgagccatcaccactggatttgtcgagcttggccacgccgtcgtcgagactcgccaccaccgcgctgtgctgctccccgacaagccaccgccatcagatctggcgagccttgtcagtgccgcgccgggccagatccggtgagtcgcgcagctccagtcggcggtgacctccgcgaggaagacgcagaagaggcggcggcggcgagcgagaagaggggaggccaagtccactgccgccgtcgagcgccaatcccatcaccgccactatccatgttcgctgtcgtcaagttccatatccgccatcaccgaggtgggtaggggagggaggcactgacgtggtcgctgggatatgagaggagaggaatcggttacggaggggatgtgttaggatttttaaaaaggtaatgaggaaagacagggaagatgaaaaagtgtatgttggtggggcccattataattagcttgcactatgggttgagtt

SEQ ID NO: 29451 - DNA, 388 bp, Oryza sativa
  Clone ID: PAT_MRT4530_33952C.1
ctcaccacctctctttgatactatggcaccaccgctctcttccgtcgatgcgggtcacggatacacagctctctacccctcctcctcggctccgatctgtacgatcgatctagggttgggtcttatgtcgggggatggaagttgctctaccgcgcgaacgatcgacgccgcggcctgagggttagaggggtatgcgccctcccggcgcacgcccgaacccccacgatgaccggccggagctcgccgatgaacgaggggctcgcgcaagcgtcccgacaagagagacgtcgacctcaaagcgaagcatggcaaaactcttaagagggtcggagggaatgagcaaagaccacaagtcagccagaacttatccgctctccgggccaagatt

SEQ ID NO: 29452 - DNA, 639 bp, Oryza sativa
  Clone ID: PAT_MRT4530_33953C.1
ctagctgtccaaggccgccatgcctccggtgaccgctgtcgcggccaccagccaccgcctccgtgagccgcagccactgccagtggccgcttcgttgtcgccctctgccacgccgccgccaactggctgcacactgtcgtcgacgtgctggctggccgtcgccttgacggaggggatccggcctcccacgccggagaggacagatccggactggggggcgccggatccggcgaggaggttgccagatccggtgacgccgcgcgccgccggacctgccccgtccccactgccagctccacccccgtcctgttgctgccgccgccagcgcctcctcctccccgtcagccgccgccagcgcctccttgtcgccgccgccacctcctctgcccccccgccgccgctgcccccgccccggatctggccacctccgccgccacggcgccgggatgccccagctgcggcaccttcgagagaagccccgccgccaccgtccttgcgcccggcgagctttccggccggccactcgggcggcggcgaggcgaaggggagggggaaggcgcggcggcggccgacgcgtgtgggggcgctcgcatcgcccctggggctggagcgacgcgagccttcaaaactgaaagacat

SEQ ID NO: 29453 - DNA, 410 bp, Oryza sativa
  Clone ID: PAT_MRT4530_33954C.1
atcaacagatgatgccatcatagggatgtgataaccgctatatcaaaagtatcgatccatatcagtatgtctgtccagtatcgaaccactgcactatgtggccgcgaggtaagtcgaaaaggttatccaccactcatctagcatatcgtgacgataagcctatctcaagttctgcgatacaagcatagacattgtgaagttacgcctgagaggtctgaaacacaaatgtgcagacctgctgatggagacaagcggaattagcttaggctgtcatctagggcgagaacacctgggtagggtcttgccttccagcatagtccaagactagcagcatcgtcgggtaggagatgtgggtcatcttgtacggggcatcaccaagaacttctcgtagcgcatccaatggagatcga

SEQ ID NO: 29454 - DNA, 1777 bp, Oryza sativa
  Clone ID: PAT_MRT4530_33955C.1
tttttttttttttttttttattgtagactgatttcctgttcaaggtttattttataatgattggagcaaacccatcaaccaagacggatagggtcaagtttctgttactttactttttttttttgaacgactcgcacgagacagtgcgaagttctattgatagagcaggaaaaaattacaagattacaaccctagagggtcgtaaacaggaaaaaggaaaaaataccaccacccacacaccgacatcgccaacacacaagcccaggagaaggctagcatcggaccggccgccgctaagcgtgaccggctgccactagaccaacaaagggacaaccgagattgccccctaggggatgccaaaacgacgtcttcaagaagagaagcgacagaaaaactgccaccgcccgtccgtcgaaactcaaaggagccaagactgagctttcgtccggcaatcacccttgaggggtaagatccacagctgacacaccgatgctccaccaccacacaagctctaccgacatgtgggacccctgcaccggcgtccctcgccggccagccttcgtgcgccgaagaccgcgctacacccaccagcagctcctcctcacacctaagtcgcctccttcaccgccggccgcgcctctcgcgccaagccggcctctaactccgccgcccgcgcctctcgcactagccggcctccactgccatcggctgcgcctctttgcgccaagccggtctccgacctttccaccagacgatgctgcgccggccaaatgcagccgtctcccacgccctcggctagccgtccaaggccgccatgcctctggtgaccgctgtcgcgaccaccagccaccgtctccgcgagccaccgccactgctagcggccacttcactgttgccctccgccacgccgccgccaagtcctccgccggcgtcgtcggccgacgtcgccgccgccaactgccgcaaccacccgtcgccgccgttgccaactgccgtcaccagctgtcgcaagtcgaccgccgtcgccgaccaccacagccgaccaccctctagatccggtcgagaggcgcggatctggggaggcaccgccgtcatcgccgccgagcaccgcgccgtcgccgcacagggaccaatgccgctgtcttcgcgccgtgccggcctcaagccgcgtctctcacgcgggtcccgccgccaacgctgcgcccacacagccgccggtctctttcttccccgcctccacacccggctgcacactgtcgtcggtatgctggccggtcgccgcctcgacggaggggatccggcctcccacgccggagaggacagatccggactggggggcgccggatccagcgaggaggttgccagattcggtgacgtcgcgcgccgccggacccgccctgtccctgctgccagctccacccccgtcctgtcgccaccgtcgccagcgcctcctccgccccgtcggccgccgccagcgccgcctcgtccgccccgtcgccgccgccgcctcgtccgccccgtcgccgccaccttctctgccccgccgccgtcgcctccccagccccggatctggccgcctccgccgccacgggcgccgggatgccccgccgccgccgtccttgcgcccggccggctttccggtgggccactcgggcggcggcgaggcgaaggggagggggaaggcgcggcggcggccggcgcgtgtgggggcgctcgcatcgcccctatcccacttgtacatcattcttttcaagatcaacggggccaagtcggccat

SEQ ID NO: 29455 - DNA, 435 bp, Oryza sativa
  Clone ID: PAT_MRT4530_33956C.1
atgccggcagtcgcgagccgcgactcacacacgcaggtggagacgaacacatcacaggaaatagagacggcggcagccgcagacggccgacgacggcagatcgacgtaacgcagcggccagtggcgggcggtgtggaagggcaactggcagtgaccgctgaggaggacggcaccgggtggatgacgggaccgccagcggctgcggtggcgtactggcttgacgagctcctccctcgcttccgcctggccccgcactcgcgtcttgttggtgattggggactctgcaacggcgaggtcggcatccacaaggagctcgcctccggatcctccgctggcggattctccggcggcgcgattggcctcaacaacttcatcgccgagaaaccgccttccccaaaccggcccagaagaatgggctcgctagcagcggaatga

SEQ ID NO: 29456 - DNA, 1296 bp, Oryza sativa
  Clone ID: PAT_MRT4530_33957C.1
agtagagagaatcgatagagattgaaggtagaaacgatagaataagaggaaaaagaaaagatatagagatatgctaagtgattagagaagaaaactagaatgtagtatttaaaaatacatagatggaaaagtaagtaagggggtggagacaaggaaaaaaaagagtgaagatatatagaagaacagagaaaagaaaaaagtataagaagaacataaatgcaatcgacaaaataagcaaccaaccacatctacaccataggctctttctgcacgaaataccaccaaaagtttaaatacacctattatcacccagccctcaatttaccactcaccagccaatcacagcttggcgcccacacgatcaagggtcagacagatgaccatttactttcagcacaaccaatcatctttgcataagcatctactacatccagcagcatgaacatatagtgtttaaggtatcggacatggaagatacttaaatactaagccaaacggttcatatttcaaaattcagctaacacctcaaacggtttcactaatcatgcagatcacacttcatgccagatgttcacttcttatacttctttggtgccgccgcagtttgagcaggcactgctggagcagctggctctcttgggccctgagccaacctctcgtcacgcctggcaatcttcctctcacgactggccttgctcttggcacgcttagcctcaaactggtcagagagtgtcttctctcttgccttctcagccttagacttgtggatactttccatgagaacacgcttgttcttgaacatgttacccttgaccttcatgtacatgtcatgatacatgtgcttgtcaatcttcttggcctcacgatacttgcgcagcaaacgcctgagcacacgcatcctcctcatccacaggatcttggtggggagcctagactccctggtacccctacgcttaccatagccagagtgacgtcccttctgcttggcctcatgggctctccgtgcacgggacctggagtgaatcttctggggcttcttgataatgaacccatccttgaccaacttacggatgttctgacgggagttggccatggagatctcgttgacctcattggggtcgagccagaccttgcccttgccgcatttgagcacgctggaggcgagccgcttctgcagcttgagggaaaccatcgccgccgccgccgccgccgccttcgaggttcccttcctcctccctctccttacctgggtgggagtgtgtggtggaggcgcggacgcgtgggcggacgcgtggg

SEQ ID NO: 29457 - DNA, 1765 bp, Oryza sativa
  unsure (1)..(1765): unsure at all n locations
  Clone ID: PAT_MRT4530_33958C.1
tcgcacgagacggtgcgaagttctattgatagagcaggaaaaaaattacaagattacaaccctagagggtcgtaaacaggaaaaaggaaaaaataccaccacccacacaccgacatcgccaacacacaagcccaggagaaggctagcaccggaccggccgccgctaagcgtgaccggctgccactagaccaacaaagggacaaccgagatttgccccctaggggatgccaaaacgacgtcttcaagaagagaagcgacagaaaaactgccaccgccgtccgtcgggactcaaaggagccaagactgagctttcgcccggcaatcacccttgaggggtaagatccacagctgacacaccgatgcttcaccaccacaccaagctctaccgacatgtgggacccctgcaccggcgccccctcngccggccaagcctgtcgtacgccccaaagaccgcgctacacccaccagcagctcctcctcacacctaggtcgcctccttcaccaccggccgcgcctctcgcgccaagccggcctcactccaccggacgcgcctctcacgccaagccggcctctaactccgccgcccgggcctctcgcacgagccggcctccactgccatcggctgcgcctctctgcgccaagccggtccccgacctttccaccagaggatgctgcgccggccaaatgcagccgtctcccacgccactcggctagccgtccaaggccgcaatgcctctggtgaccgctgtctgcgaccaccagcacaccgtctccgcgagccaccgccactgctagcggccgcttcactgttgcccgagagagagagagagagaactagtctcgagtttttttttttttttttttttgaaaaaacaactttgcataagcatctactacatccagcagcatgaaacataatgttcaaggtatcagactttggaagatacttaaatactaggccaaacggttcgtatttcaaaattcagctaacacctccactggtttcactaagacgaccacacttcaagccaggtgttcacttctttgccttcttaggtgccgctgcagtttgagcaggagctgccgctgcaggagctgctggctctcttgggccctgagccaacctctcctccctcctggcaatcttcctctcacggcttgccttgctcttggcacgcttagcctcaaactggtcagagagtgtcttctctcttgccttctcagccttagacttgtggatactttccataagaacacgcttgttcttgaacatgttacccttgaccttcatgtacatgtcatgatacatgtgcttgtcaatcttcttggcctcacgatacttgcgcagcaaacgcctgagcacacgcatcctcctcatccacaggatcttggtggggagcctagcctcccttgtacccctacgcttaccatagccagagtgacgtcccttctgcttagcctcatgggctctccgtgctcgggacctggagtgaatcttctggggcttcttgatgatgaatccatccttgaccaacttacggatgttctgacgggagttggccatggagatctcgttgacctcattggggtcgagccagaccttgcccttgccgcacttgagcacgctggctgcgagccgcttctgcagcttgagggaaaccatctccgccgccgccgccgccgccttcgaggttcccttcctcctccctctccttacctgggtgggagtgtgtggtggaggcgcgagggggtgcaacccggccgg

SEQ ID NO: 29458 - DNA, 388 bp, Oryza sativa
  Clone ID: PAT_MRT4530_33959C.1
atgcatggccggctcttgttcaggcgcgagctagtagcatgcgcatgtggatgcgtaaggtgtattgatggcgagggagtgaatcgggtcggggttgggttgggtgcctggtgcgccgcagtaaattcggggagagagagccacgccattgatggcggcatttactccggcgacgcggttggtaatggatggatgggcgacgactcggcgctgggcgggcggagttgaggccgcgggcgccacctgtggctgcacgcgccggcggcggaggtggaggaggaaggctggaagggggtgtagttcagccgagaagttcagctaaagctcgcgcaccgacttctccatttcggcatttcgcgattccacggtcagaagcgggaaggattgg

SEQ ID NO: 29459 - DNA, 1269 bp, Oryza sativa
  Clone ID: PAT_MRT4530_3395C.1
atggcgacctccgcccacacggtgctcgacgtcgactccggcggcggcgcggcgaccgcggcggccggcccgccggtgccgtacctgctgtccttcaccgacctctcgtacagcgtcaggaagggcggcggcggggtcctgtcgtgcctgccgtcgagccgccgccgccgccacagcaaccgcctggcgtccgcggacgcgccggcgccgcccgacgcgcccaccaaggcgctgctcgacggcatctccggcgaggcgcgggacggcgagctgttcgccgtcatgggggccagcgggtccggcaagtccacgctggtcgacgcgctcgccggccgcatcgcgcgggagagcctccgcggcgccgtcgagctcaacggcgagccgctccatgggcgccgcctccgcgccatctccgcgtacgtcatgcaggacgacctgctgtacccgatgctcaccgtgcgggagacgctgctgttcgccgccgagttccgcctcccgcgcgcgctctcgccggacaagaagcgcgcccgcgtcgacgcgctcatcgaccagctcggcctcgcgcgcgccgcggacaccatcgtcggcgacgaggcccaccgcggcgtgtccggcggcgagcgccgccgcgtctccatcggcacggacatcgtccacgaccccatcctgctgttcctcgacgagcccacctccgggctggactcggcgagcgcgttcatggtggtgcaggtgctccgccgcatcgcgcagagcggcagcgtcatcgtcatgaccatccaccagcccagcgcgcgcatcctcaacatcctcgaccgcctcctcctcctctcccgcggccgcaccgtctacgccggctcgccgtcggggctcaagcccttcttctccgtgttcggctaccccatcccggacaacgagaacctcgtcgagttcgcactcgacaccatccgcgagctcgagcaccagcccgacggcgccgccatgctcgtcaagttcagctcaagatggcaatcatcgctcggcgctctcctggacaccaaggacgacaaggaccgcagtcagcgatgcaccatgccgctcgagctcgccatcgcggagagcgtgtcgagggggaagctcgtcgccggcagcggctcggggacattgtcatcgacgtcggtgccgacgtacgcgaacccgtggtacgtggaggtgtgggtgctgatgaagagggcgttcaccaacacgaggcgcatgccggagctgttcgtgatgcggctcggcacgatcatg

SEQ ID NO: 29460 - DNA, 352 bp, Oryza sativa
  Clone ID: PAT_MRT4530_33960C.1
acagaacagctttcgattatttacacaggtttgttcatacaagctaattatacaactgttaaagggtgaaaagatccaaactaatatatccttatttgaaatacaagaaaaatccaaacttttagttcactaaattacaactaataaactccaaagaaaatccacaggcaaaagctcgagtgtagactagcctagaaaaactcgtcgatgccgtagaccttgcttcttccttctgatcttcttggtagcagaaatcctccttatgacgaactcgctggcgtcgccgcgcgtggcatcagcttgccgtggtctcggaccggccttgcgcctgcctaccatgggccgcgcgagg

SEQ ID NO: 29461 - DNA, 312 bp, Oryza sativa
  Clone ID: PAT_MRT4530_33961C.1
acgcccacgcgtacgccggcggccaccttaacccggccgtgacgttcggtctcgccgacagcggtcacatcacgatcctcaccggactcttttactggatcgcccagctgctaggcgccttcatcgtctgactactcctgaagtttgtcacccacggcacggccatcccgacacacgggagttacggcatcagcgagctggagggcgtcgtgatggagatcgtaatcacgttcgcgctggtgtacacggtgcactccacggcgggagacccaaagaagggatcgatcgagcaccatcgcgcacatcgagatc

SEQ ID NO: 29462 - DNA, 391 bp, Oryza sativa
  Clone ID: PAT_MRT4530_33962C.1
ctaaagtgttgactcatagtcgacaacagggtagtcttcctcctcgagttcgtgcccggcgagatcagagacagcactagatcccggcggcagcaggtagacgacgtggcgacgatgaccggttggtggtttttccccgacaaggtgctgccgcacgagagatccagcgatggtaggcagcatcggggcaagtcatcggatgcagacatgtggcttgaggagaccctgcgtgtcggcgagagcctccgtgcgcgccgcgccgcctcgcccctgcgcgccggcaagagcccccacgcgcgccacgcctcgcccccgctcctgccaccgccacccgtgtctctgttagtaaccctaggaaggaacgaaggacagagaagagataagaacgaag

SEQ ID NO: 29463 - DNA, 252 bp, Oryza sativa
  Clone ID: PAT_MRT4530_33963C.1
atggcggtggatgttcttagcggcggtgtcctaggggcagcggcgagggcagtggacgatggtcgtcgatggctccgtgacgaggctgggttgatgataaggacgatggcaacggaggctcttgacggaggcgtcctagaggtggcaactgtcacgaactatggtgagttcaatagtctgcggaagacggtggtagggtggcaagcggcttcccggtgctctatggccgttcgaaatgcagcaaccgcataa

SEQ ID NO: 29464 - DNA, 196 bp, Oryza sativa
  unsure (1)..(196): unsure at all n locations
  Clone ID: PAT_MRT4530_33964C.1
aacactaaatgatgactattttcttacgggaccgctcaaaaaacaatgnctaaataaaactggtaggagacgccccggatttttaccgggggggtgctcttaacaccgactcccagcagcccgtcaaagagaggcggcacccacaagggagagatagtgcggggcacacatggcccaactcagcccctggagccgg

SEQ ID NO: 29465 - DNA, 326 bp, Oryza sativa
  Clone ID: PAT_MRT4530_33965C.1
tcacctccggacgtggtcgccgccggcctccatgatggcgttgatgagcttggtctggtcggggacatgggtcgcgcgcaccgcggagatgatggtgtcggcatcgcagatgagcgggcggaggagcgcgacgacgacggacgggatgacccaaccgagcgctggctgcgatggtgttggctttcgcgcagagcagctgcggctccgcgacgacgacggcgacgaggtccgcgcgggaaaagggagaggaaaaggccggtggagaggagggcgagcatggccaccatcgcggtcaggcgggcggaaaagcgcgacgacgcacggtc

SEQ ID NO: 29466 - DNA, 1277 bp, Oryza sativa
  Clone ID: PAT_MRT4530_33966C.1
catcatcaatcatctcatcatcagatgagtcaatccctttcttttgctttctcctttgagcttcttcctcttcctcctctctttcctcttcttcctcttcatcttcttcatcacagctagcactattgcaatcgtcatcgttttcatcgtcctcctcatcatccaattccacttcagtgtcatcatcatcctcttttggctcatcagacaatacctcgaaatatccttcatccgcatcacccccaaaattatcaccgtcgtcatcagcatcattatcattatcatcatcaaattccatctcatcctcagcttcccagtccactacatttgtatccaaatcagcaaattccatctcatcctcggcttcccagtccactccatttgtatccaaatcagcgccattgctgtaagcacgaatgacatctccgacaagcttttcctccaacatttcatcgtcgtaatcatcctcatcggaagccaactcttcattcactggatccaccactgataactccgtgttcccacgatcctctgtgccctccccagcgatgatctcaccgccatcacgattcgaattggcgacactggcttccacattaccgcagtgctcctcaattcgatccccaccagcgacgctggcttccccattcccgtagtgctcctcctcaattagatccccaccagcgacacttggacgctcctcgcttgcctgatcaatgccatccgcgttacacacgcgagactcgccattaccattgtgcgaagcgtcatcggctcgcccgctgctgccacccccgtcaacctgtgacacctccatcgattctccgcgagcgggagtccccgcctctgcttccgcttcctcctcagcctctgcttccgcttcctcctcatccgcctccgcctccttgcgcttgcgcgcaccacgcccgcccgctgaccccgaggatcgcacgcggcgcttcgacggccctccgccacccgcctccgcactcgccgcccccttcctcttcctcctcctgctcggcgcctcctccgccgcagccggcggcgtgacgggcgcctgctgcgccatcgccatcctccgcgatcgcgtccgcgtcgccacggcccccggaaccaccaccctcctcttcaccgccgccgccgctccacccccaccgccggcggagtcatcagcagcgtcctccccgtcgtcttcgacatcgatgaccaccaccggccccgcgtcgcctccgcggcggcggccccgcaccatgcgggtagtactttatcaatgc

SEQ ID NO: 29467 - DNA, 216 bp, Oryza sativa
  Clone ID: PAT_MRT4530_33967C.1
atgcggggtggcgccctgggaggtggcggcaagccccaggcgacggcaggcttgggaggtggcagcgccctgggagacgtggtgtctagattacgggatatcattatttggggttatatattgcggataagaggtggaccgctgatggtgacagctcagtacgggaactcggcagtcaggggtggcttctcgaagtaccaggagggcatcggatag

SEQ ID NO: 29468 - DNA, 1260 bp, Oryza sativa
  Clone ID: PAT_MRT4530_33968C.1
ttttttaaccccaaaacgagattgcaaacccgcctctcgtccctgttgatgatgcattcttgtttatatcgtttacaggcgtaaaaactcaagacagctactggattaacttatacagaaactagatcacaagttcacatccaggaaacatttaagattttgattatacacatatgcagtgatgctaaagatcggccccagtttcagcaaaagagcaggaagttcagattccagcctgaacttgcaccacaacagaagcagccaatctcacatagatactagggatcagaatatcagacaatctgatctgtcaaagataggcctggttaacaaactcgatgaaacagaattgcacaagccacaagggaggctgcaagggcgaatcatttgcggttcttggaacgctttttctcgagcctctgacgagcttgctcaaactcctcttccgtgggctccgagctgctgctcccctttgggtcacatttggacatgatggatgagagcaccgagtcgaaccggtccttccgctgcgccctgcgctgtgagatcgcgaggatcagatcgttctcctcgctcttcttcttgttcttcttcactcttctctctaatgggtttgtgggaggttcaatctcggagatcttcttggcccatttatcatatgcttttgttgacttcagctcaccttcagcaattgcctcatcaattatatctttaaagcgatgggaatcaagctttggatctgagcaaatcattgaacaaaaaagcctgttcatgttgcctttaaattttgtatatagatccttcaagtcctttttttcagaatctgaccctctgtacttagcttcaaattcttcaatatcagcctcagtaacctttttgtaaacagctctgaagtactcttgaagattgtctgcagcttctccaaccagtgcatcatcatcagcaattccagtctcatcatataatgcccttttctcctcatccccaagaatagatatcaccttctgaagctgctgaaatttctccttggcttcctcatctccaggattcttgtctggatgaagacgtaaggccaacttgtgataagccttctttatttcctgctgtgaagctgtcctctcaacccctaagatctcgtagaggctcttgctctctgcggcgaccggcgcgggctcctcctcctcctcgccgtcgccgtcgcgggaaaccctagccctcctcttgcggcccatctggtggaagcggcggggtgcctcgtgc

SEQ ID NO: 29469 - DNA, 4780 bp, Oryza sativa
  Clone ID: PAT_MRT4530_33969C.1
tttagctgaaactagtccgcttattcatattaagattgggtttagttcaacaaatattggaccaccagaaatgaaccaatagcattattatacatcgcatctggagattcattattatacacaagaagatttttcagccggcgaccttgtgccgattctagattggttgatgctttgcacccattatgtaagaactgactagtcctatttgatcatgcgtgacataatgcaacccaagatccattatttgatagagtatagggataccacagcctgctgcatcaggaatttctcagtgcatgccagtcaactagaactatttaactctggaccacggatgccatagcaatagtatgttcttccagtgcgattacacaagggttcaccttataattaatgaatcatcatcttaaagaatgaatccatctgatgccagtcattattaacttaactcaggagcaatctggttgtaagtaaaaacaatgtttgactcagttggtggataatgaatctttaaaaacatgcctttcagctggtcatgggaagtcatttcctccagaaccttatcctcggatatcaacttagaacagtgctccatttcagcttttgaaagcatgttcctaacattactgaactcgtcttctgtagagaagaccaacttggacaagtggtccttttctgcttgcctatcatatttgtcaccttcacctgttccataagttattaaattgtatgtatatacaaatttcttctgtcctatcctaaatgctctgctgatagcttgccttccaacagctggattccagacaacatctagaagaacaactctagaagcccctgttaggctaatcccttcacaacaagctcttgtagatgcaagtaacaccctcgcgtcactatccggattattgaaaacctcaattgaattttgacgatatctcgggaggatcttcccatccatttggagaatctcttttccttctctccatttgaaaatcttacgaagatgttcctttatcaattctaatggctgaataaattgactaaaaatcaataccttttctttcaatgcttcacacaaacgaacaacttccattacaaaccttgtttttactccttcataaggattagaccttaatctttcaagcataggtttatcaataagggaagcttcttcttccgtcatgttaattgcgtttacaagtgaaggatgtgtggaggctaaagaaataacatactcatgttcaaaattgttaccagatccaacattttctacctttctaatgatactcttttgaagcggtagaggtttcagaactatcacacactctctgagccccggaagagttcgaagaatagtcccattatggatatgaacaaatggtttcagtattgatcttaccttttctgcattatcatcagttacattactagttaaggaagcccaaactcctttctcatatttatcagaaaatttatcccgttgcttctttgagacacagtgccttcgacccactcttgttttagtcaaaaacatttcaccaaacctaggcctcaccaaacagagaatattgtaaagctcaagaaaattattttggaaaggagttccagatagaattatacgcttctcggttttaacttttcctagtgtcttccaaataacactgcgctcattcctaggtgtgtgcccttcatcgagaacaagcaaaccagggttctcaagaagaatagttctcactttgttttctccagtgcagccaaccttttcagatgttagtttcatatatagaccataactaattccaagaacaccatgacccctgttccatgaaaacagttttacaagcctagtcaacttttcagtccgatgctctttctttattaatctacatatatctctgtcttccttcccagagtaatcagtagtgttcattatatgaaaaggaacgttgacattccatttcttgaactcttgttcccaagcaaacagcatcccacgaggtgcaataatcaccggtcggcagtctgggaacaccttcatgtatgtctggataaacacaatagccaaacgagtctttcctgtccctggggcatgacagatcacacatcctccaacaacatcaggcttagccccatgctttatttcattaagcctaatatcacccactagatttgtccacataaactcaaatgcctcacgttgatgctgatacatatcagtaatgacgccaggaatgagatcccacacagttccatttatatggaaatcttgagattgtccatcaccagtccctgtttgttcataaagatcaggacacatcaacgcagtcttcaaacaagagctgtttcgccatgcaggtttctctgcaaaattggaggccagcaatggtaaaataaatctgatttccagatttaccaaggagcagtatttgcatctgattcctatttgctcatcaataataaattcatgcttccctctagaacaaggtgtaataggagcaagtgcatgatctagcagactgtcctcttggccctcatcatcataataagtcccaatgttctctgactctaaagtgaagtctaaatcagcccatagcatatcaagtgcagcatcttgctctgacctatcagttggactaggatcatcgtccccaaatgaaaaaaccaacggatgcaaatccttgaaactatactcaatctggggcttctggtcaaaaggagtagacttcccatcatcattgctacacatcttgtccatcagaagcttcataagagactgcctctttaacatgcggctggatttcttaccagattttgataatggattcttccttttcctcccagttctgtgatcaccactcccttgacatccattttttcgattctgactagaatctgatgagttggaatctgattccaggtctcgttcatacaaacgatgattcgtcatcatgccaagcttcagttttttcctcctctcaagctcccatgtaaatcgcgatctcttctgttgctccgtaaaagcctcgctgcccacaggggcctcactgccatctttctgaaaggtaagtggccgagtaaaatcaacctctgggtaatcctcctcccaatcaatgccacaatctacagcatcatcaatcatctcatcatcagatgagtcaatccctttcttttgctttctcctttgagcttcttcctcttcctcctctctttcctcttcttcctcttcatcttcttcatcacagctagcactattgcaatcgtcatcgttttcatcgtcctcctcatcatccaattccacttcagtgtcatcatcatcctcttttggctcatcagacaatacctcgaaatatgtattgtaagaaatcctctcctccttcataccccatgatgaccgagttctccatgcaacacaagatggcacaatcggtagcttcgctggtactaatggcttccttctcaaggcattccctgtgtcattgaccactttgacttcctcgtcagagtcaagaatttcaatataggagctcccttcattaaaactgagagatccttttccctttgactccatctcatccttgatagcctcctcatcctcatgaggcctcacttcactaacattaacattgtggctcaccaaatcttgtgtttccaccttagaaaagtcatgcatttgtacagatttgtcaccttcatccgcatcacccccaaaattatcaccgtcgtcatcagcatcattatcattatcatcatcaaattccatctcatcctcagcttcccagtccactacatttgtatccaaatcagcaaattccatctcatcctcggcttcccagtccactccatttgtatccaaatcagcgccattgctgtaagcacgaatgacatctccgacaagcttttcctccaacatttcatcgtcgtaatcatcctcatcggaagccaactcttcattcactggatccaccactgataactccgtgttcccacgatcctctgtgccctccccagcgatgatctcaccgccatcacgattcgaattggcgacactggcttccacattaccgcagtgctcctcaattcgatccccaccagcgacgctggcttccccattcccgtagtgctcctcctcaattagatccccaccagcgacacttggacgctcctcgcttgcctgatcaatgccatccgcgttacacacgcgagactcgccattaccattgtgcgaagcgtcatcggctcgcccgctgctgccacccccgtcaacctgtgacacctccatcgattctccgcgagcgggagtccccgcctctgcttccgcttcctcctcagcctctgcttccgcttcctcctcatccgcctccgcctccttgcgcttgcgcgcaccacgcccgcccgctgaccccgaggatcgcacgcggcgcttcgacggccctccgccacccgcctccgcactcgccgcccccttcctcttcctcctcctgctcggcgcctcctccgccgcagccggcggcgtgacgggcgcctgctgcgccatcgccatcctccgcgatcgcgtccgcgtcgccacggcccccggaaccaccaccctcctcttcaccgccgccgccgctccacccccaccgccggcggagtcatcagcagcgtcctccccgtcgtcttcgacatcgatgaccaccaccggccccgcgtcgcctccgcggcggcggccccgcaccatgcggtattcagccacggtcacgccgccgccgcggcgggcgaggcgcgcggcgcgatccat

SEQ ID NO: 29470 - DNA, 462 bp, Oryza sativa
  Clone ID: PAT_MRT4530_3396C.1
gagctagcggttgctaagaggacaacggtgacgattgccactgctggcagcgtcgggcagtcgcggagaagttcaaagccaccggcgagagctcagaagcgcagtgggaggatccggcgaggaggaaaggcaacggcaggcggatccggtgaagagggcgatggggcggtggctcgcacgtcgtcagcagcctggcgctgccggcggcatagggttgtccaaggggagacatcttcgaccctcgtgactgcctacgcgcaacccctctttgccgccggtgaagctggacctgttcattcgcctccttggccgatttgtctagatccacttactccttggccagatctactcggttggggctgggaggtcggtggcagcggcgccctgacctgcccatgggggcgcgaccatcccaccattggggcttccttctcccttggggcgtcgggggcgttgtattaa

SEQ ID NO: 29471 - DNA, 455 bp, Oryza sativa
  Clone ID: PAT_MRT4530_33970C.1
gtcaatgtgggaggaatgccgccagtgaaattgttgttatcaagcaacctgaatgacaagaacaatgggtaatcttgagcatgacataacagattaaaagtaatgaaacagtttgcaaatattatctaaggttatctttgccttacagatgtatgagcttcatatttgatttgaatagctggcttggtatggtgcctgatagctggttgaccccaaaatgactgaataaagagcagtccgaacattttccttagaatggaagcgagtgaactgaaagcctggtagatattttaagaaaggtactcacaaatgcagagcgtttgtcaaattgtccaatccagtattggttccatcagatactggaagtgatccagtcagacgattttcacccaagtcaagccagtacatatttgaaaggttgccaattgatggaggtataccttcagtaaacctgt

SEQ ID NO: 29472 - DNA, 295 bp, Oryza sativa
  Clone ID: PAT_MRT4530_33971C.1
tgcaaacccacccaccaacccaacccaatcccatcgagaggaggggacgcggcggcggcggctgatcggcggcgggggaaggaaggggatgggcggcggaggcggggagtaggacggcttccttctgtaactgtatctgatgaatgaaccgtttgcacttcttgccaccttggcgagtcttatgaagtactaccatgatagatactacgccttcttttaatactcatttatggcttacttcatcatgttcaaccttttgttaccgtttgatccaactttttttttttatttgtca

SEQ ID NO: 29473 - DNA, 303 bp, Oryza sativa
  Clone ID: PAT_MRT4530_33972C.1
atgaggcagtcgataacccgggggagaattttgtttttggtttttgccgcagttgtgaactggcggctgggttgggaggggaggagggctcgggttcttgtaggggaggaggacgccaccggggagggcagcgacccgaggtggcgcgtggcgggtgggaggagaggacacgtgggcggtggcgtcggggggcgggggcgtcgccatgaacctagccacgaatctagcccaaattggcactcatccccggagctcccaaagcagaaagcacccgacgagcaagagacagaggcaatgtggtga

SEQ ID NO: 29474 - DNA, 326 bp, Oryza sativa
  unsure (1)..(326): unsure at all n locations
  Clone ID: PAT_MRT4530_33973C.1
tgaacgacaacccgcgaacccactccgatcgcaaatactctctctcgccgatagcagcagcagcagcaatggccgccctcgccgccgnatccaccgncttcgncgncaagccgcgcctngnggcgcgccgtcgtccccggccgcgcggttctccgtgtcgtgctccgcgtcgggcaacaacggcggcgcnggcgagatngcgcantngcttgcggcgtcggncaanacgttctncgcggcgcttgcgctntnctnggtgctnctcttctnggcggcgacgttgcgccccccgncgncgncgacattgccgggtttacggcgttaaa

SEQ ID NO: 29475 - DNA, 266 bp, Oryza sativa
  Clone ID: PAT_MRT4530_33974C.1
cggacgcgtgggatataaaaaaatataaaccagacagaacatgaaagcgataaacatagaatgacgccaccgagtctgcggccgggtgctactatgtgtcctacttttactctctgcgatgcaatgtctcgtggtatgtctaccgttactgaggcgcaaatgatttgctggtggttgacaacgagctgacggcgaacaagtctgggtttacttatttctgcagctaggatgacatggctatttctgttgcaggcgaggggcgctag

SEQ ID NO: 29476 - DNA, 1482 bp, Oryza sativa
  Clone ID: PAT_MRT4530_33975C.1
tcaaatatttatgagaccatagaaatggccaaagcacaggatttcaatctccaccaacccaaatacccaatcttcaccaaccctacagcattttggtcccttccaagctgaaagcctctctttctctgaggcttgttgaagaagagaagcctggctaacatacttccccttccgcgattgataccgggtcttattggagaggaggggagtgcactgcttctgcttgtgccgcaatttcagcatgcttccttcccggataacaccgcttgtattattatctaaaaatagatcaatgtctgcaagtttagcatgcaaatcagaggaggatcttggtgattcaagtgcatcgcagccagcgaaaacagaaccactgttacaccaagccttcagcacctcttcagtgttcagattcaggcccaatcctatctttgggtccttcagcgccgaaattccagcatcaccatgatcaaagcccagagttccctcatcaccaaacttacattcaccaacagcaatggcattatccctttctatttccttcagtgacttcttcttactcttcttcttcttcttatctgaagcctgcaatggcatcggcactggcaccggcatagccaccgatggcgcaggaggcgccgcgatttccttcactggtatggcagggcacatccaccaatcactctcatcgtcatgccgcttcagtgcttggccggcgttgagccggccttgccggaacccgagaccgagcaccatgaggcttctaatgtatggatgtatggcggcgctggacaggacggcgtcggcgcgggacgcggctgcggagttcttctccatgctgagtttgcccatgattctatcgatgccctcggccacgccgtcatcgacggcgaggaaagagtcggcgtcgaatccgtcttcgtcttcgaaatcaagctccccgaggtagtcgtcgtcggtgacgtcggcgtcggcgtcgggcgttccgggcgacggcgccgcgtcgcggaactccctgaacacgctgcttacgggcgccggcgacgaacagctcttgatgggggcggggcaccgcggcgtcggcggcggcggcgtgtcgcggaggaggtgcgcggcgctgccgttcccgaggacggggaacggcgggaggagatcggaggaggaggggtcgtcggcgagcgcggtggcgaggccgagcagccgcggcggcgccgtcccggcgcccttgatgacggggaacacggaggggtacatggacgcgagcagcgccgccgcctcgttgtacgtctggttgggccgcttccgcggcgtgcgcgcccgcttcagcgacagcgacgccaccgacgacgacgacgagttcgacgcctccgacagcgtcgacgacgccgacgagtgcgccgccgccgacgagccaccgggcggcgccgccgcctttaccatctccaggtccagccggaggccggtggggatgcacgacgacgccat

SEQ ID NO: 29477 - DNA, 461 bp, Oryza sativa
  Clone ID: PAT_MRT4530_33976C.1
gtcaagagaaatgccaacgaccaaaaatggttaaggcagcaaagaatgtattgatctctcctgcagctcctcaaagcactgcttgattgtgtcaaacattacagtttcaattcccgtcaacacaaaatcaaagagaatacctaagaataatttgagtgataggactgaatacttttgcaccaaaaaatattgcaaggtgtagctttagctatgtcactactgaaataccttagcatgccagcaccattgaataatcactgcgaaaaaaaaaaatactgcaaggtatagctatgttccatgcaggtcattactcgaatcatgccacgccaccttgctggctcctctgcaaaccagttcaagtgttaatttacgtgtaaagattagtatatatgttctaatatcagtaattcacacctaatttatattagtggctatgatatgttctaatttacacctaaata

SEQ ID NO: 29478 - DNA, 652 bp, Oryza sativa
  Clone ID: PAT_MRT4530_33977C.1
gcaccacgcgcatagctcacacatcgccattgattctccactcgaagcttagctacacagagagaagcatctagtagtagtcgcatgggcaacagcttgcagctgccatgtccgtgccaggaggccacggcggtggccacctcgggagtcaagaagaggaggaagaagtcgccggccaccgccgctgtcaggagcagcaaggcggcggcggcggcgtcgtcgaggcacgtggttccggtgatagacacgccgggggaggaggaggagatgaggatggcgtggccggggtgccacgtggagccggccgtcgacggcggcgacggcatgcgggtgaaggtggtgatgaagaggaaggacgcggcggagctgatggcgaggctggaggagcggtgcgctgtcgagaggaaggccaagatggtggagctcaacgccgggctccgcggcggccacggccacggtcacggcggcggtggcgccagggacgcgtgggcgccgcggctcgtggccataccggagaactagcaaattaagcaagaactgcaactgcgaaaaaattctgcatgcacagtacagtagctgtaacatttttggagccctgataaaactacatatagctcgagtacattagctagcaagtttttaattagtgaca

SEQ ID NO: 29479 - DNA, 429 bp, Oryza sativa
  Clone ID: PAT_MRT4530_33978C.1
atggtaaaggcggctagatccagcaagggcacgccggcgcccacagtggaggcggccggatctggcaaaggcacgtcggcggacgtcgtggcagcccctacaaggagtcgaaggtcgtcgagatggccgcaagcgaacgaggatggcaaggcgacggcagagacggtcttgtggcctgaggatgacgcgggcaacaggatcatggcggagtcggcagttgcattgtcaggggggaactgcggttctttgacgggcttcaatccagacttttgtcctcttgcgacagcgcctttgccaacaaaagatggtcacgtcaggcaggctagtgtgcgggagaggggatcaattcttctctctcaccctctcctcatccaacccaattgcatggatggagctggagcgagccggggtcgagctcctcaacgatga

SEQ ID NO: 29480 - DNA, 1171 bp, Oryza sativa
  Clone ID: PAT_MRT4530_33979C.1
ccggccgggaacaagagagaggtagcgatcgatctatctcatcaacaagatcgagccaattaattaagggcgcatgacgatgaagatgaagcagcagatgatgaacaagctcggcctccttgtggtggcggtggcggtggcgatggcgcctgcagggagctttgcgtcgtcgtcggggaggggggctccgatggtgccggcggtgatcgtgttcggcgactcgatcgtggatccagggaacaacaacaacctaaagacgcagataaaggcgaaccatgccccctacggcatggacttcgccaacagtgaacccaccggccgctactccaacggcctcattcccaccgacttcatcgtccaggggcttaacgtgaagcagctgatgcctccatacctgggcgtggagctgagcccggaggatctcaagacgggggtgagcttcgcgtcaggcgcgacggggtacgacccgctgacgccggtgatcgtgagcgtgataaccctggaccagcagatcgaatacttccacgagtacaggaagcggctggtgggggttgtgggggaggaggagacggcgaggatcatcgacggcgcgctcttcgtggtgtgcgccggcaccgacgacatcgccaacacctacttcaccacgcccttccggagcgtggagtacgacatcccctcctacgtggacctgctcgtctccggggccgccaagctgctggaccaggtggcggcgctcggggcacgccggatcggcttcgtgggactgccccccatcggctgcgtcccctcccagaggacgctcggcgggggccctcaccgccgctgcgaggagaagcgcaactacgccgccaagctgttcaactcccggatggaggaggtgatcgccgccaagaccaatccggccaccaccaggatggtgtacgtcgacatctacaccatcctgcaggagctggtcgagaacggggacaagtacggcttcacggagaccacgcgcggctgctgcggcaccggcaccatcgaggtcaccggactctgcgacgcccgcttcgtcgacatctgcgacaacgtctccaaccacgtcttcttcgacagctaccaccctacgcagcgcgcctacaaaatcatcgtcgactacatcttcgacaactatctccagttcctcctcgcctag

SEQ ID NO: 29481 - DNA, 4056 bp, Oryza sativa
  Clone ID: PAT_MRT4530_3397C.1
atggtctacaccagaactggcacccgcacgactggcgagggcagcaacggcgaagaacgcgctgatggtgtgcaccccaacagtgattccggcaatggtccgccaccacttcccgagaatccgacactggcccaagttatggcacatcagactcagatgatggcagccatgatgcagcaaatgcagcagcagcaccagcagatgcatcagaggatgctgcagcatgccgaacaacagcaccagcagtttggtccccctccccctcagtccaagttgccagagtttctacgcgtcaggccacctaccttctccagcatcaccaaccccatggaggcgaatgactggctccatgccatagagaagaagttgaatctcctgcagtgcaatgatcaggagaaggtcgctttcgccacacaccagcttcaaggtcccgcgtcagcttggtgggacaatcacatggccacccgcccgctaggcactgaagtcacttgggcggagttctgtcgtagcttcaggaaggcgcaggtgccagacggggtcgtggcacaaaagaagagggaattccgggcactccatcagggcaacaggacagtgaccgagtatcttcacgagttcaatcgtctcgcgcgatatgcactggaggatgtccgcactgacgccgagaaacaggaaaagttcatggcaggtctggatgacgagctgaccaaccaactgatatctggggactacgctgattttgaaaggctggttgacaaggcaatccgtcaggaggatcagcgcaacaaaatggacgggaagagaaaggcggcgcagctccggtccaaccaagggtggacctaccaccatgatcgtccgcagcaccgcccgttcaactcaagcaacttccaccagggcgccagtggcagtcagcaccatggaggtcagcccaaccgcggtgcagctccacgcccaccaatggcaccaacacagtcagccccgtccgcgcaagccaagaaggagactggcacaaaaccagggtcctgcttcaactgtggcgagcttggccacttcgctgacaaatgcccgaagcccaggcataccgggccaaggtttgtccaggctcgcgtcaaccatgcgtccgcagaggaggcacaagcagcaccagaggtcgtactgggtacgtttcctgttaactcaatccctgcaacagtactttttgattctggtgcaacgcattcgttcatttcaaagaagtttgtcggggtgcatgggttaataagagaggaacttagcacacccatgcgggttcataccccagggaatagctccacttcggtacaattcagcccttctataacaatagaaattcaaaaatcaccattcctagccaacctcattcttcttgattccaaagacctagatgtcattctggggatggattggctgaccaagttcaagggagtcattgattgtgcgaatcgcacagtcactttgaccaacgagaagggagaaaccgtagtgtacaaatcattagtctcaccaaagcaaggggtctccttgaatcagattgaggcggaaatcccagtggtcactaaggagaagagttcgaggaaattggaagagattcccatacgagagattgaattccggattgatttggcaccgggaaccgcaccaatttacaagagaccgtacaggatggcggccaacgaactagcaaaggtcaagaagcaggttgatgagcagctgcagaaagggtacatacgaccaagtacttcaccttggggtgctccggtcatttttgtggagaaaaaggataagacgaagaggatgtgcgttgattatcgcgcactcaatgaggtcacaatcaagaataaatatcctttaccgcggatcgatgatttgtttgatcaactgaagggagctaaggtgttctctaagatagacctgcgatcaggctaccaccagttaagaatccgggaagaggatattccaaagacggctttcaccactcggtacgggctgtatgagtgcacggttatgtcttttggacttaccaacgcacccgcattcttcatgaatctaatgaacaaagtgttcatggagtttctggacaagtttgttgtggtattcatcgacgacatacttatctactcaaagtccgaagaagaacatgagcatcatctccgtctggtactcgagaagttgaaggagcaccagttatacgccaagttcagcaagtgtgacttctggttgacggaagtcaaatttctgggccatgttattacagctcagggtgtggccgtcgacccatccaacatggagtcggttaccaaatggaccccaccgaagaccgtgtcgcagattcgaagttttcttggacttgcgggttattaccgccgtttcatcgagaacttctctaggatcgcccgacccatgactcagttgcttaagaaagatgagaagttcaaatggacagctgagtgcgataagagctttgaggagctcaagaagaaattagtatccgcaccagttttgattctgcccaaccagatgaaagacttccaagtctattgcgacacatcccgccacgggcttgggtgtgttctaatgcaggaaggcagagtggtggcgtatgcctcacgacagctgcgtccacacgaagggaattatccaacccatgatctggaactggcagcagtggttcatgccttgaagatctggaggcactatttgattggcaaccgttgtgaagtatatacggatcacaagagtctgaaatacatcttcacccaaccggacctaaatctcctacaacgaagatggttggaattaatcaaagactatgatatgagcattcactaccacccggggaaagccaatgtggtggcagacgcattaagcaggaaaagttactgcactgctctatgcatcgagggcatgtgtgaggaattgcggcaggagttggagcatctcaacgtgggaattgttgaacacgggttcgtagccgctctggaagcacggcctacgctcgtcgatcaagttagagccactcaagtaaatgatccggaaatagcagagctgaaaaagaacatgagagtcggaaaggctcgggatttccttgaggatgagcatggcacaatctggatgggggaaagattgtgtgtacctgacaacaaggagctgaaggatctggtactcaccgaggcccatcagacacagtattacattcacccaggcagcaccaagatgtaccaagaccttaaagaaaaattttggtggacagatggtcagaccgagcgagtcaatcaaattttggaagacatgttgagagcttgcgctcttgactttggtggagcttgggacagatgtttgccatatgcggaattctcgtacaacaacagctaccaagccagtctacagatggcaccgttcgaagctttatacggccggaagtgccacacacctctcttctgggatcagacaggcgagcgtcaattgttcgggacagaggtattaacggaagcagaagagaaagtcagaaccatcagggaaaggttgagaattgcccagtctcgacagaagagctacgcggataaccgccgaagagagctcacttttgaagcaggggattatgtgtatctttgggttactccgctccggggagtgcaccgttttcaaaccaaaggcaagttggcaccatgtttcgtgggaccctacaaaatcttggaacgaaggggagaagttgcttatcagttagaacttccatccaatatgatcggcatccatgatgtattccacgtgtcccaattaaagaagtgcttaagagtacttgaagaacaggctgattcggaacacattgatatccaggaggacctgacatatgtggagaagctgattcgtatacttgataccagcgaaagaagaaccagaaacaaggtcaccaggttttgccgagttcagtggagtcaccattcagaagaggaagcaacctgggaaagggaagatgagttgaaagccgcccatccgcacctcttcgccagctcctccgaatctcggggccgagattccgtttaa

SEQ ID NO: 29482 - DNA, 5637 bp, Oryza sativa
  Clone ID: PAT_MRT4530_33980C.1
atgacgaccttcgaggacatgttcgagttcgagttcagggtcgccaccggcggcgaggtctcctaccagttccgcaaccttgacggctcgccgatgtcatgggtgctcctcaacgaatccggcgtcatgcaacgcatggtctgggaccggtcggcgatgtcgtggagtaacttctggtcggggccgagggaccagtgcgacaactacggcaggtgcggcgcgttcggcgtctgcaacgtcgtcgacgccaccgtctgcggctgcatcaggggcttcacaccgcgctcgccggcggagtggtacatgcggaacacgtccggcgggtgcggccagaggacgccgctgcagtgcactggcagcagcggaggtggaggcgaggacgggttctacctcctacgcggcgtgaagctgccggagacgcacggctgcgccgtggatgccacggtgactcatgaggggtgccgctggaggtgcctgtccaactgctcctgcacggcgtacgccggcgccgacatccgcggcggcgggagcgggtgcatacagtggttcggcgacttgatggacacggggttcgtcgacggtggccaggagctctacgtccgccttgcaaaatctgagctagctcccggtgcgccagctccggctcccggtgcgccacctccaggtgcaggtgcggcagacatggtgatgcaaatgtacggtcgacgacgaacagaagacgaggagcagtcgtgcggaagcactccccaaaaacctgatcacccgcctacccagtgcagatctcaggcgaaggatggagatgggaagcaaactccagacggctcagctcaaccgagtgacaaaggcgctaccgacggatctctaggaaatcaaggtgatggtgctcaaggattacagggaggagatcttaatcagaatagtgatgtggcacaagattttttcaacaatttccaagaccgggttgactacgccgtacatcatgctctgatcaatcagtctaggcagcagccaagtcagcagacacccccaattcaacaggttgtacaaccgattcagcaacaggtcatgcaaccagctcagcaaacagcaccaaggcagcagcctctgcagccgattcggcagacgccgttaagacagcaagtcattcagccgattcagcaccaaggttcaataagcgcattggccggcctcagggggccaactcaacctcagtttgcttctcagtatggtcagttcgagcccatccaacaacaggcacagggagcagctcagcaacgaccgtgggccgatgtgattgctgacgtaatgagggaacagttcgggcttaaacctaaagagactggaagcttgtatcagcagccttatcctgagtggtttgagagagttcctcttcccaatcagtttaaagttccggacttctctaaattttcaggacaagatggtgtgtcaacttatgagcacattagccgattcttagctcaatgtggtgaagcgtcggctgtggacgctatgaagttgggccgatttggagaagcagttccacagctatttctacagtgggtccacgggatgaaattatctgacttaacagcgattaagcagcggtatgatgaacctgtgcacgagtatattcagagattcagggagatgaggaataaatgcttcagcttgagtttgactgatgccctgttagccgatctagcctttcagggtatgattgctccgatcagggagaaattctcatctgaagactttggtagcttgtcacatctgatacagaaggtaactttgcacgagcataggtctgcggaagtcaggaaaagctccaagaaggttaatcatgtttgtccgtacatgtatgggttggatgatgatgaggacgattctgaaatagctgcagccgaatgggtgagaagtaaaaaggtcataccatgccaatgggtaaaaagttctggaaaagaggagagacaacagattcgggtggccattgagggaggcaaaattaagttcgatgattctaagaggccgatgaaggtggatggtaatccttttcctgttaatatggtgcatacagctggccaaacagccaacagggcccgtgcaaggggttttcagaggaggtatgacaagcagcaggagaagcatcatgagcaatacgatgatggttttgatcctcattggggttgtgagttctttaaattctgctggaatgaaggtatgaggctgccatctattgaaaactgccctgggtgcagtgacatcgtcgagagctcaagccaatcatataataggggtaatccgctaaggcaaacaagagtttctgtccatcaaagattgggtccggtgaatcacgatcatggccaagaggacaatgtaatcaggaagaatcagtggtgcccttcgggtatttttacaaagaatcagaaaagaagggttcaaaggttgaggagtagggaacatttccaggaggtcgagcaagaaattaatcatcggttgaagaaagcaaaaccaaggcaggagtggcgagttaagagtcagattcctgtagccgatgatgttgcaaccgatgaggcaaaaaggttggcaaaagggaaaagtattgtaacggcgtcagttaacatggttttcactttgccagccgaatttcggatcgaccaagctgatgttgatgaggtggaagaggagtcggctaagttggttctatcaccagaacaggcagcctttgaaaagcctgaggggatagagaatcggcatcttaaaccattgtatgtgaacggctacgtcaatgggaagccgatgtctaagatgatggttgatggtggagctgtggtaaatttgatgccttatgctacgttcaggaagttgggtagaaatgccgaggatctcatcaagacaaatatggtgctcaaagacttgggtggcaatccatcggaaactaaaggtgttctaaatgtggagctgacagtcggcaactatgcatcaatgcttgattcagtggcaaggcgacaagatagagattgtgctagccgacagatggagaacccaagctattactttgagggcgttgtggagggttcaaatgtctacaccaaggacgcggtagatgatctcgatgacaagcaaggtcaaggtttcatgtcggctgatgatttggaagaaatagatataggtccaggcgatcggccaaggccgacatttattagtaagaatttgtctccagagtttagaactaagctgatagagctcttgaaagagtctagagattgcttcgcttgggagtattatgagatgcctggactcaaccgatcgattgttgaacatcggctacctatcaaaccaggggttagaccacaccagcaacctccgaggagatgtaaagccgacatgctcgaacctgtcaaagctgaaattaagcgattgtatgatgctggttttattcgtccttgccgatatgttgaatgggtttctagcatagttcctgtcatcaagaagaacggaaaggtgagggtatgcattgattttagagatctgaataaagctacattgaaggacgaatatccaatgccagtggctgatcagctggttgatgctgcgtcaggaaacaaaattttgagttttatggatggaaatgcaggatataatcaaatctttatggccgaagaagacatccataagacagcttttaggtgtcctggtgcgatcggcttgtttgagtgggttgtgatgactttcggcttgaagagtgctggcgctacatatcaaagagctatgaattatatttatcatgatctaatcggctggttggtcgaggtgtacattgatgatgtggttgttatgtctaaacaaatagaagatcacatagccgatttgaggaaggtttttgagagaacaagaaaatatggattgaagatgaatctgacaaaatgtgcttttggcgtatcggctggccagtttttaggatttcttgttcatgagagggggatcgaggtgactcaaaggagtgttaatgcgatcaagaagattcagcctccggaaaacaagacaaaactgcaagagataatcggcaagataaattttgttagaagatttatttccaatctgtctggaagtcaattggcaggagagtatgagtgcaagaatgatacattgatagtctataatgagaaatgccaagaactgatgaaggaatttcggttagtaactttaaagcatgtatctcgagaacagaacattgaagctaatgatttagcccaaggagcatcgggatataagccgatgatcaaagatgttcagattgaggttgctaccataacagccgatgattggagatatgatgtttatcggtatttacaggatccatctcaatcggcttttaggaagttaaggaatagggttgatctgcaccggcaagatcaacaaccaacggagagttatcacaactcaccgaaagatcgggccaacaacagccttgagtgtcgagaggaactcagggttcatcatggagtgttacttaagtgcttgagtgccgatgaggccaaggttgcaatcggcgaagtccatgaagggatatgtggtactcatcaatcggctcataaaatgaaatggctacttcgacgtgctggatatttttggccgacaatgttagaggattgtttcagatattataaaggctgtcaagactgtcagaaatttggagcgatccagagagcgccggcatcggctatgaatcctattattaagccatggccattcagaggttgggggattgatatgatcggtatgataaacccaccatcaagtaaaggacataggtttatattggtggcgactgattatttcaccaaatgggtggaggcgattcctttgaggaaagttgattctggggatgcaatacagtttgttcaagagcatataatctaccgacttggtattcctcaaactattgcaactgatcaaggttcaatatttgtgtccgatgagtttgttcaatttgccgatagcatgggtatcaaattgttgaattcttcaccgtattatgcacaagctaatgggcaggtcgaggcatctaacaaaagcttgatcaagttgattaagaggaaaatttctgattatcctcggcaatggcatactcgtttagccgaagcattgtggtcttatcggatggcttgtcatggatcaatccaatttcctccttataagcttgtttatgggcatgaagctgttttgccatgggaagttagagttggctcacgccgaatagagttacaagatggtctgacagccgatgagtattataaccttatggccgatgaaagggaggacttggttcaatcacgtttgcgagctcttgctaaggtgactagagataaggaacgggttgctcggcactataataagaaagtggtgcctaagactttttcggaaggtgaacttgtatggaaattgattctgccgattggaactcgggataacaaattcggcaagtggtcaccgaattgggaaggaccgttccaaatttataaggttgtgtctaagggagcatatatgttgcaagggcttgatggtgaagtctatgggcgagcgctcaatggaaagtatttgaagaaatattacccaagtgtttgggttaacgcatga

SEQ ID NO: 29483 - DNA, 436 bp, Oryza sativa
  Clone ID: PAT_MRT4530_33981C.1
tgattgggaagaggaactctctcaaaccactcaagcaatcacatcggcccacggtcgttgctgagctgctccctgtgcctgttgttgcatgggctcgaactgaccatattgagacgcaaactggggttgagccagtccccctagttgatattgggcttgcggggaaggaggctgatattgataattcaagttgccctcttagtaattatgaaggttcggctagatattacgtgctaagtgctcaggaacaacttgaggcattactgtgccatccggctgctgctgccttggtggtgtttgctgaactgggtgcacaacctgttgctggattggttgtacaacctgttgaactgggagtgtctgttgaatcggttgctgctgtattggatcgacagcaggtggaggttccaaaaacgtggcaacaacctgatattgg

SEQ ID NO: 29484 - DNA, 647 bp, Oryza sativa
  Clone ID: PAT_MRT4530_33982C.1
acgtttttggaacctccacctgctgtcgatccaatacagcagcaaccgattcaacagacactcccagttcaacaggttgtacaaccaatccagcaacaggttgtgcacccagttcagcaaacaccaccaaggcagcagcctatggagccgattcagtagacgccgttaagacagcaaatcgttcagccgattcagcaccaaggttcaataagcgcattgcccgggtttgcaacgcttggtggtcagcctgtacaacaatttttaaatcaagttgtcccagaacacttggttcaccacatacagccggatggcacagtaatgcctcaagttgttcctgagcacttagcacgtaatatctagccgaaccttcataattactaagagggcaacttgaattatcaatatcagcctccttccccgcaagcccaatatcaactagggggactggctcaaccccagtttgcgtctcaatatggtcagttcgagcccatgcaacaacaggcacagggagcagctcagcaacgaccgtgggccgatgtgattgctgacgtaataagggaacagtttgggcttaaaccaaaagagagtggaagcttgtatcggcagccttaccttgagtggtttgagagagttcctcttcccaatca

SEQ ID NO: 29485 - DNA, 958 bp, Oryza sativa
  Clone ID: PAT_MRT4530_33983C.1
ggggggggccttttccaaaaaccccccccgggcaaaaggggaattgccgccaagggcataaaagggggaacccccggggttttccccccccccccgttttaaaacccccccccgagaatgaaaattgggggccccaaaaaaaaaataatacccccccaacccccgggagtaaaactgggacctctaaaacgggcccccctttttttttttttttttttattttttttaggttttccccattgaatttttttttttttttctttttttttgttgtttttttttttttttttttttttttttttatttttttttttttttttttttttttttttttaaattttttttttttgaacacaataaaatggctcgataacatgaaataacagtagaaaaggatgcatctctgcaacttaacagtattactgtgaactacatttcaactaggatggaaaattctgtcaacccaaacaaaactcaaattttgaagatagaaatgtatttaagcatttgcagcagcctgagcagcagcatctcgcttcctctgttcctcgatgatgctgagcttgatacccttgcccttagggagagacacccatggcttgttgcccttgccgatggtgaacacattgcccagacgggtggcgaaggcatggcccaatgcgtcctccacatggatggtctcaaaactgcccttgtgcttctccctgttcttaattactccaacacgaccagacgatggcttgggggcaaaagctccgccgagcttgtcgagcatccagtgcttgggcgcattgagcctcataagatgcttcttcaatcccctcgccatggttgcgagctcgagctacgtcgccggagggggagaccaccacgccgtccgtctgcgtcgctctcttccgccgccgccgccaaagcggacgcgtgggcggacggcgtgggcggaccgcgtgggttaccc

SEQ ID NO: 29486 - DNA, 1264 bp, Oryza sativa
  Clone ID: PAT_MRT4530_33984C.1
tttttttttttttttttttttttgaatgccaagctggaaggatgccaatagtctcccgggctgcagccatgcggcgccaggccccccctgttttgctgcttttttttttttttttttttttttttttttttttgatggctaattgctactgttcattataatgactgcatgatgataacggtctcagccattttggtagcttcaaggccaaaagatgaacacaataaaatggctcgataacatgaaataacagtagaaaaggatgcatctctgcaacttaacagtattactgtgaactacatttcaactaggatggaaaattctgtcaacccaaacaaaactcaaattttgaagatagaaatgtatttaagcatttgcagcagcctgagcagcagcatctcgcttcctctgttcctcgatgatgctgagcttgatacccttgcccttagggagagacacccatggcttgttgcccttgccgatggtgaacacattgcccagacgggtggcgaaggcatggcccaatgcgtcctccacatggatggtctcaaaactgcccttgtgcttctccctgttcttaattactccaacacgaccagtgttcctccctcctgtgaccataacgacattgcccacatcaaacttgatgaagtcaacaatcttgttggtctcaagatcaatcttgattgtgtcgttagccttaatcaaagggtccgggtagcggatggtgcgtccatcataggtgttcagatagggaatgcccttctgtccaaactggacagaccgaactttgcaaagcttgaacttggcatcctcatccttgacggactgaaggcggaagcgacccttggtgtcatagagaagcctgtagttctcaccagtctttggaatggaaatcacatccatgaaaccagcagggtaggtcttgtcagtcctgaccttcccatcaaccaagacatgccgctgcatcaggatagagataacctcacggtatgtcagcgcatacttcaacctgttcctgatgatgaggatcaggggcaggcattccctggacttgtgaggtccagacgatggcttgggggcaaaagctccgccgagcttgtcgagcatccagtgcttgggcgcattgagcctcttgagatgcttcttcaatcccctcgccatggttgcgagctcgagctacgtcgccggagggggagaccaccacgccgtccgtctgcgtcgctctcttccgccgccgccgccgcgtccgcccacgcgtccg

SEQ ID NO: 29487 - DNA, 1008 bp, Oryza sativa
  Clone ID: PAT_MRT4530_33985C.1
atggctgcagcttcgtctactacgactcgtttttgccttctccttgcgctcgtcctgccgatgatttcctccgccgccgccgggcgacgacgcgctgccgctgcccatgacaccgtcgtactaccgcaagtcgtgccccaacccctcgaggccatcgtgcgcggcaccatgctcagtgccatcaaagccgagcgccggatgggcgcctccatcctccgcctcttcttccacgactgcttcgtccagggttgcgatgcatcgattcttctcgacgacgtgccgtcgaaggggttcgtcggcgagaagaccgcggggcccaacaccaactccatccgcggctacgaggtcatcgacaagatcaaggccaacgtcgaggccgcctgccccggcgtcgtctcctgcgccgacatcctcgccctcgccgcccgcgaaggcgtcaacctgctcggcgggccgagctgggaggtgccgctggggcggcgcgactcgacgacggcgagcaagagcgaggcggacagcgacctgccggggccgtcgtccagcctcgccgacctcgtcgcggcgttcggcaagaagggcctggcgccgcgcgacatgacggcgctctccggcgcgcacaccatcggctacgcccagtgccagttcttccgcggccacatctacaacgacaccaacgtcgacccgctgttcgccgccgagcgccgccgccgctgccccgccgcgtccggctccggcgactccaacctggcgccgctcgacgacatgacggcgctcgccttcgacaacgcctactaccgcgacctggtcggccgccgcggcctgctccactccgaccaggagctcttcaacggcggctcgcaggacgagcgggtgaagaagtacagcaccgacccggacctcttcgccggcgacttcgtggcggcgatgataaagatggggaagatatgcccgctcaccggagcagccggccagatcaggaagaactgcagggtggtcaacagcagctga

SEQ ID NO: 29488 - DNA, 339 bp, Oryza sativa
  Clone ID: PAT_MRT4530_33986C.1
atggggatggcgttggcgacgggccgacgttggcgcctggcgacggggatggtgctggtgacggtggcgcctaggcgctggcgctggcgacgggccgaccgccgacggtggatggcggcggtgccggcgacgccaggggccgcccgcccgatggaggacgcgctgacgcaggggagtggggacggcaggcgacggtgccagcaatgccagaggcggcgcgctagaaggaggagcggtggcggcgctagcagcctgcaacggcgcatgttctatctacacacccacatggacatgtacaccatgaagtccacatggaggctgtccattacaagcccttga

SEQ ID NO: 29489 - DNA, 388 bp, Oryza sativa
  Clone ID: PAT_MRT4530_33987C.1
gcctagtgcagtccttgccactaaacgagaccttgtcttaaggggtggagaccgacatcacttccactctcatcgcgactatactcacagattactacaggcctgagagcacctatggattggctctgcacaaacagggcgcgtgcagaactacttgatcgacagaaacggggaaggtgtccaagtcacagattgatggtcttgtagcaaaggtgttctccaacgtggtagttgaggagaacaatgctgtacaagagagcactatctcatcagtatcattcaagaccatagaaggagcgttctcaactatccctgtggacagtcgaaggcaggagtagcaacatgctcgtgcaaaagcacaggctaagcaggagactacggcttttca

SEQ ID NO: 29490 - DNA, 154 bp, Oryza sativa
  unsure (1)..(154): unsure at all n locations
  Clone ID: PAT_MRT4530_33988C.1
acgagaggaacgataacgacgtacgtcgcggagacgctcaaactacaaaatccagtttcaatatcngttatagtcgacgtcagcgacaggacgatgtcgttgtccacgaatcgggtatattactcaagcattccgtcgtcataccgtatcgcgt

SEQ ID NO: 29491 - DNA, 283 bp, Oryza sativa
  Clone ID: PAT_MRT4530_33989C.1
atcgaaacggcggcacttcttgctccatcagcgcgaatttcaacgtgattcacgcctttgaccccccctaccaccgcaactaacctcgcgcagctcccgatcccgacgcccgcgaagactcgcatctcccaccagctcgcggagtacgaccccctccttctcgaccgtttcctcgacatccatcaagacccccaccgcgacgacccccgccagccccaccccccatgctccgagatccctgctcgccattaaggcaagcatgactcccaaacccttcttcaac

SEQ ID NO: 29492 - DNA, 2043 bp, Oryza sativa
  Clone ID: PAT_MRT4530_3398C.1
atggcgatcctccccggcgactgcgtcgtgctcgacatcgacgacgccgccgcccaatccacgccggtgccgtacgccctcacgttcaccgacctctcctacaccgtcggcagccgccgcgccggcctgctgccgccgttgccgacggacgcgccgccggccaaggcgctgctcgacggcatctccggcgaggcgcgcgacggcgaggtcctggccgtcatgggcgccagcgggtccggaaagtcgacgctgctcgatgcgctcgccgggcgcatcgcgcgggggagcctccgcggcagggtggagctcaacggcgaggcgctccacggccgccgcgtccgggcgatctccgcgtacgtcatgcaggacgacgtgctgtacccgatgctcacggtgcgggagacgctcatgttcgccgccgagttccgcctcccgcgcgcgctctcgccggacaagaagcgcgcccgcgtcgacgcgctcatcggccagctcggcctcgcccgcgccgcggacaccatcgtcggcgacgaggcccaccgcggcgtgtccggcggcgagcgccgccgcgtctccatcggcacggacatcgtccacgaccccatcctgctgttcctcgacgagcccacctccgggctggactcggcgagcgcgttcatggtggtgcaggtgctccgccgcatcgcgcagagcggcagcgtcatcgtcatgaccatccaccagcccagcgcgcgcatcctcaacatcctcgaccgcctcctcctcctctcccgcggccgcaccgtctacgccggctcgccgtcggggctcaagcccttcttctccgtgttcggctaccccatcccggacaacgagaacctcgtcgagttcgcactcgacaccatccgcgagctcgagcaccagcccgacggcgccgccatgctcgtcaagttcagctcaagatggcaatcatcgctcggcgctctcctggacaccaaggacgacaaggaccgcagtcagcgatgcaccatgccgctcgagctcgccatcgcggagagcgtgtcgagggggaagctcgtcgccggcagcggctcggggacattgtcatcgacgtcggtgccgacgtacgcgaacccgtggtacgtggaggtgtgggtgctgatgaagagggcgttcaccaacacgaggcgcatgccggagctgttcgtgatgcggctcggcacgatcatggtgacggggttcatcctcgccaccatcttctggcgcctcgacgacacgcccaagggagtccaggagcgtctcggcttcttcgccatggccatgtccaccatgttctacgtctgcgccgacgcgctgccggtgttcgtccaggagcgccacatctacctccgggaaacggcgcacaacgcgtaccggagactctcctacgtggtggccaacaccgccgtcgcgttcccgccgctggtggtgctgtcgctggcgttcgcggtgaccaccttcttcgccgtcaggctctccggcggtggcgcgtcgttcgccttcttcgcgctgaccgtgctggcgtcgttctgggcggggagcgggttcgtgacgttcctgtccgcggtggtgccgcacgtcatgctgggatacacggtggtcgtcgccatcctcgcctacttcctgctcttctccggcttcttcatcaaccgcgaccgcatccccagctactggatctggttccactacctgtcgctggtcaagtatccgtaccaggcggtgctccagaacgagttccgcgacgcggcgcggtgcttctcccgcggcgtcgagatgttcgacgggacgccgatcggcgccatgtccaaggccgtcaagctcaaggtgctcgacgccatcggcgccacgctcggcgcgccattgacggcggagacgtgcgtggtgaccggcgccgacgtgctggcgcagcaggctgtcacggacatcggcaggtggaagtgcttgctggtcaccgtggcgtttggtttctttttccggtttctgttctatatcgtgctgcactttggcagcaagaacaagaggcgctaa

SEQ ID NO: 29493 - DNA, 521 bp, Oryza sativa
  Clone ID: PAT_MRT4530_33990C.1
ttcttcgaaagagagagagaggggggcggcgggggcgttttcagagccgcgaggggtgaggcgccgccggtcgccggagcgagcgagcgatgagcagcagcgccgccacctccacctacgcggagagcgtcgcgtcctgccgcgctcccgctcccgccacccccaggcccccccacgccgccgtgaggcgccacctcgacttcgccgccggcgacggcggtgagctggatgacgacgaggtcgaggacgaggacgaggacgacttcctcttccgcgccgcggaggagacggagcggagccactacgaggcccagcgccgcgctttcgcacctcccccgccgccgtctcagcccccggctttcttcgagaggccgtgcatctgcggccgcggcggctgccatgtggaggagagggagctcgggcggtgggcctacgtctgcccggcgactccgaaatgcaaatattctgtttggtgtggagaagctgatattggttcaaatccacagcctgcttatatgagc

SEQ ID NO: 29494 - DNA, 390 bp, Oryza sativa
  Clone ID: PAT_MRT4530_33991C.1
acgaaagagagagagaggggggcggcgccgccggcgacagagccgcgacatgtgaggcccgccggtcgccggagcgagcgagcgatgagcagcagcccgccacctccacgctacggcggagagcgtcgcgtcctgccgcgctcccgctcccgccacccccaggcccccccacccgccgtgaggcgccactgattcccccggcgacgcggtgagtggatgacgacgaggtcgagacgaggacgaggacgacttcctttccgcgccgcggaggagacggagcggagccatacgaggcccagcgccgcgcttccgcacctcccccgccgccgtctcagcccccggctttttcgagagcggcattgcgccgctttagagatccaagctacgacg

SEQ ID NO: 29495 - DNA, 1964 bp, Oryza sativa
  Clone ID: PAT_MRT4530_33992C.1
gagcgaggaaaaacctatatatacacactcctccatttctggtcacgccgcaaggtttgctccaacaccaacagggaggtaggctgcagcttatcatggcggcaaggagggctgcttcctccctcctctctcgcggcctcatcgcgaggccttctgctgcctcctccactggcgactccgctatccttggagcaggctcagcacggggcttcttgcctggatcacttcacagattcagcgctgcaccggccgccgctgccaccgccgcagccactgaggagccgatccagccgccggtggacgtgaagtacaccaagctcctcatcaatggcaacttcgtcgatgcagcatctgggaagacgttcgcgacggtggatccccgcaccggcgatgtcattgcccgcgtggccgagggcgacgcggaggacgtcaaccgcgccgtcgccgccgcccgccgggccttcgacgagggcccgtggccgcggatgaccgcctacgagcggtgcagggtgttgttgcggttcgcggacctgatcgagcagcacgccgatgagatcgcggcgctggagacgtgggacggcgggaagacgctggagcagacgacggggacggaggtgccgatggtggcgcggtacatgcggtactacggcgggtgggcggacaagatccacggcctcgtcgtgccggcggatgggccacaccacgtgcaggtgctacacgagcccatcggcgtggccgggcagatcatcccctggaacttcccgctgctcatgttcgcctggaaggtcggcccggcgctcgcctgcggcaacgccgtcgtgctcaagaccgccgagcagacgccgctctccgcgctcttcgtcgccagcctgctccacgaggctggcctccccgacggcgttctcaacgtcgtctccggctttggtccgaccgccggcgccgctctctccagccacatgggtgtcgacaagcttgcattcaccggttcgacgggcacgggcaagatcgtgcttgagctggccgcaaggagcaaccttaagccggtgacgctggagctcggaggcaaatcacctttcatcgtcatggatgacgccgatgtcgaccaggccgtcgagcttgcgcaccgcgcgctcttcttcaaccaggggcaatgctgctgcgcggggtcacgcacgttcgtgcacgagcgcgtctacgacgagttcgtggagaaggccagggctcgcgctctgcagcgtgtggtcggcgacccattcaggacaggcgtcgagcaggggcctcagatcgacggcgagcaattcaagaagatcttgcagtacgtcaagtcgggcgtggacagtggcgccacactcgtggccggcggcgacagggcgggcagcagggggttctacatccagccaaccgtctttgcagacgtcgaggacgaaatgaagatcgcgcaggaggagatattcgggccggtgcagtccatcctcaagttcagcacggtggaggaggtggtgcggagggcgaacgcgacgccatacgggctggcggcgggggtgttcacccagaggctggacgcggcgaacaccctggcgcgggcattgagggtcgggacggtgtgggtgaacacctacgacgtgttcgacgcggccgtcccgttcggcggctacaagatgagcggcgttggcagggagaagggcgtctacagcctccgcaactacctccagaccaaggccgtcgtcacgcccatcaaggacgccgcctggttgtagctgtagtaatcgatcctttctctcctccatccccatcgccattgctgcgtgctatgactgctatcccgtgctcttccatatcagttgtcacttgtcagcgtgatgtctctgaacaacgccagagattgcgatgaataatggttaaatcgggcaatcttttgtacaacaaaaaaaaaaaaaaaaaaaaaaacaaaaaaaaaacaaaaa

SEQ ID NO: 29496 - DNA, 208 bp, Oryza sativa
  unsure (1)..(208): unsure at all n locations
  Clone ID: PAT_MRT4530_33993C.1
aaacctacatataggttttttctaccacactttaaagtctttctattatattatcttgaatctacatagaatagattactagattgaaatagtagtctaattcaatttcttttttcactgcatccacttaatttcaatctcgtcaaaaaaaaaaaaaaaaaaaaaaaaaaaaaaaaaaaaaaaagggngaaagataaaaaggatccaa

SEQ ID NO: 29497 - DNA, 272 bp, Oryza sativa
  Clone ID: PAT_MRT4530_33994C.1
gaacagaagggagccggcggcatcaatattcttggtgaaaatgtcgatggaggaaaccaaaggcttcacctttgcatggtgcgatttgcagcttgcacaaaccttgttgggacacaaaaaggacatggatgtataccaaggaatggcctgcacatttaaccaacagctaatatgtgcaccgtaaaattgccgggggaaaaaaactgatgacaggaaaaattttctctccctagcgttatattacaaaggctgagggcatctacgagaaccac

SEQ ID NO: 29498 - DNA, 1752 bp, Oryza sativa
  Clone ID: PAT_MRT4530_33995C.1
atggcggcaaggagggctgcttcctccctcctctctcgcggcctcatcgcgaggccttctgctgcctcctccactggcgactccgctatccttggagcaggctcagcacggggcttcttgcctggatcacttcacagattcagcgctgcaccggccgccgctgccaccgccgcagccactgaggagccgatccagccgccggtggacgtgaagtacaccaagctcctcatcaatggcaacttcgtcgatgcagcatctgggaagacgttcgcgacggtggatccccgcaccggcgatgtcattgcccgcgtggccgagggcgacgcggaggacgtcaaccgcgccgtcgccgccgcccgccgggccttcgacgagggcccgtggccgcggatgaccgcctacgagcggtgcagggtgttgctgcggttcgcggacctgatcgagcagcacgccgatgagatcgcggcgctggagacgtgggacggcgggaagacgctggagcagacgacggggacggaggtgccgatggtggcgcggtacatgcggtactacggcgggtgggcggacaagatccacggcctcgtcgtgccggcggatgggccacaccacgtgcaggtgctacacgagcccatcggcgtggccgggcagatcatcccctggaacttcccgctgctcatgttcgcctggaaggtcggcccggcgctcgcctgcggcaacgccgtcgtgctcaagaccgccgagcagacgccgctctccgcgctcttcgtcgccagcctgctccacgaggctggcctccccgacggcgttctcaacgtcgtctccggctttggtccgaccgccggcgccgctctctccagccacatgggtgtcgacaagcttgcattcaccggttcgacgggcacgggcaagatcgtgcttgagctggccgcaaggagcaaccttaagccggtgacgctggagctcggaggcaaatcacctttcatcgtcatggatgacgccgatgtcgaccaggccgtcgagcttgcgcaccgcgcgctcttcttcaaccaggggcaatgctgctgcgcggggtcacgcacgttcgtgcacgagcgcgtctacgacgagttcgtggagaaggccagggctcgcgctctgcagcgtgtggtcggcgacccattcaggacaggcgtcgagcaggggcctcagatcgacggcgagcaattcaagaagatcttgcagtacgtcaagtcgggcgtggacagtggcgccacactcgtggccggcggcgacagggcgggcagcagggggttctacatccagccaaccgtctttgcagacgtcgaggacgaaatgaagatcgcgcaggaggagatattcgggccggtgcagtccatcctcaagttcaggtttgcaacactagaattcccccgaattccatctgaccgtgacagattatcaactggaatttatacaaacaccttacgtgcaatgtgcagcacggtggaggaggtggtgcggagggcgaacgcgacgccatacgggctggcggcgggggtgttcacccagaggctggacgcggcgaacaccctggcgcgggcattgagggtcgggacggtgtgggtgaacacctacgacgtgttcgacgcggccgtcccgttcggcggctacaagatgagcggcgttggcagggagaagggcgtctacagcctccgcaactacctccagaccaaggccgtcgtcacgcccatcaaggacgccgcctggttgtag

SEQ ID NO: 29499 - DNA, 614 bp, Oryza sativa
  Clone ID: PAT_MRT4530_33996C.1
gaatctgttggtcgttcccaacttcccaccagcctgtgtggcttctgaaacaataactccttatgaaatatcataaatatggatttaaatacagtagagcgagaatgcgatttggctgcttttttatggcttcaattattgtctaattttatgtgaggggctccactggccgcactcgcacgcgggacccgcgccttgctgatggcgtgattaattgtgatataaaatagtccgcttaagaagtgtgtgtctggtggtggcggtgggaggggaggcagtacagaggcaaggccagatttgatcttttaatcttcgttggccacaattaaaacaaacccgatcgtggagcgccgcgatccctttgcataaaaacatatggcttttgctataaaaattatgactgcaaaacaccgggccattaatagcgtgcggagtgatttacgcgttattgttctgcgaagcgagcacgtgacgcgcgcggccaatgggggcgcgggcgccggcaacttattaggtgactgtacttcccccccctggtgccaccaagttgttacatgaaatctgcagtttcataatttccgcgggtcgggccgggccggccaggcgcggggcac

SEQ ID NO: 29500 - DNA, 551 bp, Oryza sativa
  unsure (1)..(551): unsure at all n locations
  Clone ID: PAT_MRT4530_33997C.1
aatgattgagagagatggggagagaggaggggaggaaaatagaccactcgagttaaatttgacgagggattagatttacactcgatttaagttgtgagacgtcgtaaatgtgatactcaaactcgattcatcgaacttttttttccagaaaaatatacctacacacaaaaaattcgctcattttatcggaagaagaaaagagagagagagagagaaacagcgcgagacgcggatggaatggcaagggaggaaactggtgggttgngggagtcgccacgacacgcggcgacgcacggctgtggtggccggtgacggtgagctgatcgactgcccctcccttccccttccccctccccctccgtcgcatcgcagctgcagctagctacacgaggagacctgctgctctgctcaatttcaacttgaattctgctcccgacgacgagacgagacgcaattcctcgctgcctccgccggatgtcggtggaccccgatgcttcccccctccgccggcactccgctgccgccgcccttcctcgccgccgctagcacct

SEQ ID NO: 29501 - DNA, 432 bp, Oryza sativa
  Clone ID: PAT_MRT4530_33998C.1
atggggaggaggagggggagggttagggatagtggcggcgcctctccccctccccggcggcgcctctcctccctccccggtggtgccgctccccctcgcctccctcgcgtgacagatccggcgacggtggtgtcggcgacgaccgtgggtggatccagccgcggtggtggcggccgaggacagatccggcggcggcggctccctccgactcctctcgcctccctcccgcgacggatcttacggcggtggtagcgtcgtccccctccccggtgtggcgacgtggccaggagcggtggtgggctcgggagcggcggcgggcttgggaaccggtcacagtggaaggctacgatgccgacaacggcggcgacggcggcggacgacggacgacggcgacgaccacgaggagggtggctctgggagatggctagggtt

SEQ ID NO: 29502 - DNA, 438 bp, Oryza sativa
  Clone ID: PAT_MRT4530_33999C.1
atgggtttgctgaaatgcaaagggtggctttccaggctggtcacaaaggaagtgcacagtgggagagatgtgagtttttggaaggatgtttggtgtgataatgtacctctgaaagtcaaatttcctgatctctttgaaattagtcatgatcaaaatgctactgtcaaggatacggtggtaggcagagaatggagcttggagtttagaagaaatttagatgaacaaagggttagagaggttagggagcttgtagagttaattggggaagctcaactaggaactgagaatgacaaggtggcctacaaagctctgtctttctctcagaagtggagcgtgctgttaagagaggaagaaagagtaatcttgggagggtggcatgaagctgggctagggaaactggttcaactaaaaccacaacatctaccatcatctatctaa

SEQ ID NO: 29503 - DNA, 3342 bp, Oryza sativa
  Clone ID: PAT_MRT4530_3399C.1
atggccatacgtccgccaggcatggaagtcacttgggcggagttctgtcgcagcttcaggaaggcgcaggtgccagatggggtcgtggcacaaaagaagagggaattccgggcactccaccagggcaacaggacagtgacggagtatctccatgagttcaatcgcctcgcgcgatatgcaccggaggatgtccgaactgacgcagagaagcaggaaaagttcctggcaggtctggatgacgagctaaccaaccagctgatatcgggaggctacaccgactttgagaggctggttgacaaggcaatccgtcaggaggatcagcgcaataaaatggacaggaagaggaaggtggcgcagttctggtccaaccaagggagccaccagcgaccgcgcttcactcccggacaacagggtggacctaccaccatgatcgtccgccagcaccgccctttcaatgccagcaacttccatcagggtgccagtagcagccagaaccaccatggaggtcagcccaaccgcggtgcagctccacgcccaccaatgcaaccagcacagtcagctccatccgcgcaagccaagaaggagactggagcaaagccagggtcctgcttcaactgtggtgagcttggccacttcgctgacaaatgcccgaagcctaagcgtgccgggccaagttttagcccttcagtgctaatagaaattcaaagatcaccatttctagccaacctcattcttcttgaatccaaagacctagatgtcattctggggatggattggctgaccaagttcaagggagtcattgattgtgcgaatcgcacagtcaccttgaccaacgagaagggagaaacagtagtgtacaaatcactagtctcaccaaaacaaggggtctccttgaatcagattgaggtggaaatcccagtggtcaccgaggagaggaattcgaggaagttggaagagattcccatagtctgcgagtacccagaagtgtttcctgaagacctcactaccaagccacccaagagggagattgagttccggattgatttggcaccgggaaccgctccaatctacaagagaccatacaggatggcagccaatgaactagcagaggtcaagaagcaggttgatgagcaactgcagaaaaggtacattcgaccaagtacttcaccttggggtgctccggtcatttttgtggagaaaaaggataagacgaagaggatgtgcgtcgattatcgcgcactcaacgaggtcacaatcaagaacaaatatcctttaccacggatcgatgatttgtttgatcaactgaagggagctaagctaagaattcgggaagaggatattccaaagacggccttcaccactcggtacgggctgtatgagtgcacggttatgtctttcggacttaccaacgcacccgtattcttcatgaatctgatgaacaaagtgttcatggaatttcttgacaagtttgttgcggtattcatcgacgacatacttatctattcaaagtccgaagaagaacatgagcaacatctccgtctggtactcgagaagttaaaggagcaccagttatatgccaaattcagcaagtgtgacttctggttgtcggaagtcaagtttctgggtcacgtgattacagctcaaggcgtggcagttgatccagcaaatgtggagtcagttaccaaatggaccccacctaagaccgtgtcgcaaattcggagttttcttggacttcaaggttattaccgccgattcatcgaaaacttctccaggattgcccgacccatgactcagttgcttaagaaagatgagaagtttaaatggatagccgagtgcgacaagaattttgaggagctcaaaaagaaattagtgtccgcaccggttttggtcctgcccaatcagatgaaagacttccaagtctattgcgacgcatctcgccatgggcttgaatggaattatccaactcatgacctggaattggcagcagtggttcatgctttgaagatctggaggcattatctgattggcaaccgctgcgaagtatatacagaccacaagagtctgaaatacatcttcacccaaccggacctaaatctccgacaacgaagatggttggaactaatcaaagactacgacatgagcattcactaccacccgggtaaagccaatgtggtggcagatgcgctaagcaggaaaagctactgcaatgccctatgcatcgagggcatgtgtgaagaattgcagcaggagcttgagcgtctcaaagtgggaattgttgaacacgggttcgtagccgctctggaagcacggcctacgctcgtggatcaggttagagccgctcaagtaaatgaccctgaaatagctgaattgaaaaagaatatgagggttggaaaagcccgggacttccttgaggatgagcacggcacaatttggatgggagaaagattgtgtgtacctgatgacaaggaattgaaggatctgatactcaccgaggctcatcagacacagtattccattcacccaggcagcaccaaaatgtaccaagacctcaaagaaaagttttggtgggacagcatgagaagagaaatagctgaattcatcgcactctgcgacgtttgccaacgagtgaaggcagagcaccaaaggccagcaggtttactccaacctcttcaaatcccggaatggaaatgggaggaaattggaatggattttatagctggactgccgcagacatcatcgggtcacgattcaatctgggtagtcgtggaccgactcactaaggtagctcacttcataccagtgcataccacctatacgggaaagaaattggcagagttgtacctgggaaggatcatgtgtctgcatggggtacccagaaagataatatctgatcgagggagccaattcacttcaaagttctggcagaaattgcaaaaagaattggggacccgtttaaatttcagtacagcctaccatctgcggacagatggccagactgagagggtcaatcagattttggaggatatgctgcgagcttgtgcacttgactttggtggagcatgggataagagcctgccatatgcggaattctcgtacaacaatagttaccaggttagtctccaaatggcaccatttgaagctttatacggccggaagtgtcgcacccctctcttctgggatcagacaggtgagcgtcaactgtttggaacagaggtgttaacggaagcagaagagaaagtcagaaccatcagggaaaggttgagaattgcccagtctcgacagaagagctacacggataaccgccgaagggagctcactttcgaagcaggagattatgtgtaa

SEQ ID NO: 29504 - DNA, 216 bp, Oryza sativa
  Clone ID: PAT_MRT4530_339C.1
gcttcagcttctggggtcaccgcctacaaaatgctgacgaatacacagggttggctaagtccatcagggtcatctgacccagagctacgtacaactgtggatccgcccctgattgcgataatgaacgtgcacccgctccaactggctgtccaggaggacacttcaactgtcgccaagtttgtatccaaaacgggtacaagggtgggtattgcctag

SEQ ID NO: 29505 - DNA, 1061 bp, Oryza sativa
  Clone ID: PAT_MRT4530_33C.1
gccccacaaataaagaatgactcgtgttaaaaagaatggaagaaataatacattgccaagttgatggaagaattacaacagcagagtacaagaccaagatcaaccgatctgtggtaacaaaatcccacacccacaggctgagcgagcctcagacagatcaatatgccaaaatgatcgtgaaacaactgtagataaactataggagtatatttctatgaacaactgagatcctctggatacacaccattcatgcaaatctctcgtcagctctattcttcgagcccatgcatgccatccccctgaatcaaatggttctcgatgcatcaattccgttgtacttcatacctagcatgaaaatatgatgttggcggatgatgatcaacatgcttaatatttttgccctggaggtgctggtggcaaacggtttggtgtgcgtcggctgccagagttaccaccattcacgtccccattttcatagcgtttgccacggctgtcagcacttcttgaccttgtttcattgtgtgaactggatcgatcaacagagccatttgatgcagaatcgaacgcagacctccagtcctcacctgactggccagaggtccgtgggctactctcagctccagaactatcattggtatacgatgcaacagaagctctattgtcatggatactaagctgacgagtaagctttgacaatagagatgattgtttttggtacttctcccgtctacgtttagcattgtggtcctcttggagaagttcttcaatctttgcattggtttgagcacttattttgctgtagagctgatttagcatatcttcctttgctttctccacttggcaaagtacgattgcctttggaacatttgctgccaaactgttcaaaacagcctctacataaccacgaacttcttgagacatccaccgaagttcttcttcaggatcagcaggcttccgggccatcgtatcaagggacccatcagaatggctttgcctcatggaaccaccctcaggagtatttaaacccttcacagaaccccctttgctttgaatgacacctc

SEQ ID NO: 29506 - DNA, 246 bp, Oryza sativa
  Clone ID: PAT_MRT4530_34000C.1
atggcgcaccgcgcaccggttgccgcggagtcgggcggcggagggagaggtccgatgtacccagcgtctgctgatcctgcttcggcggcaacccctgctacgttccaacgagttaatgatccaattgctcttgagctcctgagcaagtcaggcgagagatttcactatattatgaataagaagaaccttgctgctgtactccgcaactgcattgactggcaggttgatgtgatggaaaaggattaa

SEQ ID NO: 29507 - DNA, 1484 bp, Oryza sativa
  unsure (1)..(1484): unsure at all n locations
  Clone ID: PAT_MRT4530_34001C.1
tcacaacgacgaatttggagctggtaacaagaagttcaggagggcctcattgaaccgtttcgggtcctcctcctgtggcatatggccggtgttctttatgatttccaacctagcatttgcaccaagttgccttgctacttcaaatgccttctctatgggaaatatctgatcatgctctccccataatacaagaacttcctgaggaagtggagtgagctggaatttttctttgtcccccagtgttatccccttgatcagctctttcttttcttctattttgtcggtgtagagatacttgattggaagattattagcctggcaaagatggcaattacattcacacagtgtgagtgcctctgtgcttgtcaactgggcgaggtcccggagcacgaaggccggggtgaagctgaagcggcggggacggtggtaggcgaggccgagcagccggcgcatccgctccggcgtgcgcgggagcatcacgtcctcgacgcgctcggcgccgccacggcggagcagggcgcggtcgtcggcgtcggccttgagcaggtcggagctcgcgatcaccacccgcgccacggccgcggggccgagcagcctcgccacgtggtacgccacgaagccgccgtagctggtgcccgccacggacacgcgcgccgccgccgcccccacgaccgcggcgacgagcttcgccaccgcctcggcctggtgcgcctccgagcgcgcgtcggcggccgctgtgccggagccgccgaagaagaggaggtcaggcacgacgaggcggaaccggcgggagagcgggcccacctgccgccgccactgccacgtcgccggtggcccgaagccgtggaggaggacgagcacggggagctcctcgctcgcccccggcgggaagcgccagcattgcaccgtcgtggcgccgccgtccagcggaacggacgcctggacgaggcccgccgcggcgaagcggcggcggaagtaggcgtcgagcagcggcgcgatcccaagcgacggcatggcggcgagagggtggtgcagtgcaggggcgcggcggcttgtgattgtcgcgtcgttttaagaggggagtttggtgtcttacgggcgcacgagtcgtgtatttggatgctacgtacgcatgtcgtctacttgagaatccagtcgggacgaatgtagagaaaattaattaggcctaacagtgtaaagttaattagggataaacagggaggaaagtaaaagagtactgctatatgtatgagatccgagtaattntacggttcttgaagaggtaccatgaggtatcactttttctattgtaaatttaataccttttgatacctgggtactataaggtaccaaattntatactaattntttggtacctcctttagaaccgtanaattgctcatgagatnccagttgtacaactcatgtacaaactagagacaagcattatagatcaatcaaatgatagcatattcatatacact

SEQ ID NO: 29508 - DNA, 417 bp, Oryza sativa
  Clone ID: PAT_MRT4530_34002C.1
agtcgtgtccgacaaagacattttatgtattttgggtataaatatgatccgagacgatgtaaaaaaaaggacagttcaataatactttcggcacatcgccaccttttttctactttcattgtttcggcgagttcttgctttcaagttgggctgcatagggttcgatctccgacgaaaagcatatttcgaggcatagattatatatcattgatatctgcagatgattgagtagatctatctattcttatcttacatgtttttattgctgatctgacccatactacatcggcatgacactggacgatacgttatcggcagcctagctgatcggctatcgatcaaaccaactggcacgctcagaacccgaaagcaaatctttggacctgcactagattgaagcaaatctctcaggccagt

SEQ ID NO: 29509 - DNA, 317 bp, Oryza sativa
  Clone ID: PAT_MRT4530_34003C.1
ttgggtttttttttttttgggtcagaaacactgctttttttcttttaatttttgttgttaggttttaactcgtttttcttcacccagggggaacaattttacccccagtaccttctccatttaaaagacatttccccgcaacagattgtaccagcagcttaattttataaaaaagccacagacgccctcatccctggagggtgtttcccccattagaaccccaatttttagaaaaaaggaatggggatcaaaaaaacctgagtgaattatcccaatagttgctcaggaacaaccccctgctatggcgacagccttac

SEQ ID NO: 29510 - DNA, 146 bp, Oryza sativa
  Clone ID: PAT_MRT4530_34004C.1
attccaatcattccgagtttcattcatgaggggggctactttcaatgtgcgttgcacgctcataagacgaagaacaagtgcatagagttctaccacaaaagattatgtatctgcttacttacctagttcacaaaggacaactaact

SEQ ID NO: 29511 - DNA, 656 bp, Oryza sativa
  Clone ID: PAT_MRT4530_34005C.1
atgcgggccccacatggcaatgactcgggggggcggttcacggtggaccgggtccacggaccggggaggagcggcgcaccacgtggtgcacacgtggcgccgacgcggcgcacacgtggcggccacgtggcagccacgtgggcggcggggttgaacggccccgatctaccgcccggtagatcggacggcggaggcggctcgcggccgggcgcgcacgagcagggcccaagccgacccggcggcagtggcgcgcggcggcgcagcgcgacgcgacggtgacgcaaggcggcgagcggccaacggcggagagcggcggcgatcgacgacgagcggcggcgagggatgactggggagatgctcacaggggttcggccgacacgagggggcgacggtgaacggcggcgagggatgactgggggacgacggggaacggcggacggtctccggaaccacctagcgaacaagatgagaggggttagagggagaaaggaaaatgggagagggcgaggacgccggccgaaggcggcggccatggtggtgctcaccggcgcacggggcggaggagaggtggacgtgacgacccgcacgacggcgagcgcgacgacgttgatggcgcggcttggcacggtggctagcggcgctagcggctatgcggc

SEQ ID NO: 29512 - DNA, 599 bp, Oryza sativa
  Clone ID: PAT_MRT4530_34006C.1
ttttttttttttttttttttttttttttttttttttttttttttttttttttttttttttttttggactcttgggtttgaccctggtgaatccggcctcggtaccggaaggggaaccagcctgccaaaaagggaggcgaaaaaaaacggggggaaaaaaaggaaaaagaagacccctgtgaaaaatgggaaaccaaaaaaaaaggcaaaaaaaaaaggaaccggaaggaaaaagggaaaaaacgggggcgccaaaagagggagcaaaaaaaaaaaaaagggggggagcaaagggaccgctttaaagccagaaaaccgggcgggccacaagcataaaggaatggcccaacccccggggagaggcggaaaaaaaatagggcccaaggggggaattgattttaaccagtgaaacgggaaaaaagggatggaccttaaccgccggggccggagagagctcaaaaaagggggccacccagggtggcccaagaagggaaaaaaacgggagaaaggggggaaaaggggggaaaaaaaaggagctgtaaaggggggaagaagttgcgaaaaaggaaaaaaccgcccaaagaaaaaaagcattcttgt

SEQ ID NO: 29513 - DNA, 862 bp, Oryza sativa
  Clone ID: PAT_MRT4530_34007C.1
atgacgtcaccaccggcggcggcggctcggcggctcggacggcgcacgctcaccggcgaacggcggcgcttcggcacgaacggagggcaccaacgggtagagggcgacgcggcgaactcaccggtgaccaaaaccacggcggaagagcaacggacggcgccggcgacgaggaagaagcggcggcggagatcgggtcgacggcggcgacggtgctccggcgatcttcggcgacggcgaaggggcggacgaggacggcggcgacttggcgaccacgatggcggcctccccgagcgacggcgacgaccggaacggcggcgaaggacggctggagcggcggcgacgacggcggcgcgaggtctcacggcgctagagcgcttccgacggcgagaggcgaaggcgagggaggcagcgggtagaggagagctcggggatccttatataggggttggaaggtggcggcgaaggcccacggcgaccggcgacgagaaggaaagatcgggctcggagagagaatagccgatccgattcgacctcgaatcaaacactttccaagccgatttagccgatgtttccaaaggggaaaaggtggaggagatcccggagatcgtttcccctcaatcaattcggccggagaaggaaaggatcgaccgaatttggaaggagacggcggcggcttgcgctagggtttcgggcggcggcggcggcgcgaggaggaagacaggcctgacaaacgggccccacctgtcagcggctgagagagagaggagagcggcggctcggcggattgggccggactgggccgagggaaagagagagagagggttttgggccggctttcggcccaaagccaaaagaagacttt

SEQ ID NO: 29514 - DNA, 408 bp, Oryza sativa
  Clone ID: PAT_MRT4530_34008C.1
atggcccttgattattgccacctcctatcaaattccaagcatgggcaagagaagcaagagggctcactcgcatgggcgttgatcgattgtgctctaaaagcaagaaaggagcaactatcttggattaatgaggtactgttgtgccccgagggtgacaaggaggaccgctggagacacgtcggtgacctgcgcgtcctctccaccgtgagggtgatgaggagggccacctactccaccgtgccgccgtcgacttcaccccaccatgccgcctctaattctggccgaccggatctggtgggccggcgccatctccaagtcgtcgccgcatctatccctctgctcgtcaccgcctctctctccctcttcatcgtcaccgacgaagctcctcttcaccgccggatctactag

SEQ ID NO: 29515 - DNA, 684 bp, Oryza sativa
  Clone ID: PAT_MRT4530_34009C.1
gtggatcccccgggctgcaggaaaaccttttcacttgagttctgcagaaccagtggcagcagcagccggcggcgagccatggcaagaagccagcaagccgctccgccgcctcacctcccgtcgtcctcgccgcgccgccgcctgccgtcctatggtacgtagcctcctcgcgcgcctcgaaccccctcgtacgtcacgacggctgtgccctcgctgcagggaggcccccccccacccgttcggcgaaatgcgcagctggagcgctttgcctcggcttgtactctggcctcgatgccatgattatgtcggtctccatgggtgatgcattcccggccctgggatcctacccgcaaaagagctgctgtcccgcgaggccccgctcgatttctttcttgcccctgccagaaggaaaagcactgggaggggaataagtgcacatcaatggggattttctctggctggaaagcaagcaagcactataaatacgttgttgctatcttccacaccactacacacaaatagcttacagcccttgtctgcgaacaagaaaaatggccgttgtcctagatgcttttgcgtcctacctcagcgacctgctcttgcaggtggccaaagatgaggtgggcatgctgcttggtgtctctgacgagatcaccaagctagatgaaaagcttcaatttctca

SEQ ID NO: 29516 - DNA, 644 bp, Oryza sativa
  unsure (1)..(644): unsure at all n locations
  Clone ID: PAT_MRT4530_3400C.1
aattaagggggaataanagtcttggggtatacgcccttnggcaagggtgtaccactgggtgccgggggatattgcccccggggtgcatgacccactaactggctagtgcacagcttgtgcacgtgcatatgatgagattgccatatattgtgtgtgaancgtggtgtgggagctggatgcatccgagttttgtttgacagggcagcacacacgtttggccaaggtttctggtaaatggattgggaaaaagccacttgtggagtaaagnccttagatctggccttattggcctcgcaataatgccggatggaatgcccaacatgtgggataatgcctgaatggccagggccagggcagaccctatggtgtggcaccgggtggctgcctggatataccgccctggaataaccaccgggcanatgctggggcatggatgccggcatgggaggattttgcntgacctggtgatacgccctgatggaatatgctgtttgtggctgggaccaaagaatgctgntgcaaggtgaatgatgtgtaatgatgaatgtagtgagcngacagtgcaatggcacactgngtaaaataattctaccacactggaataaagccagggaattggttcccaaaaaaaaaaaaaaaaaaaa

SEQ ID NO: 29517 - DNA, 726 bp, Oryza sativa
  unsure (1)..(726): unsure at all n locations
  Clone ID: PAT_MRT4530_34010C.1
gggttatcgctaaatcaggtcaaaatttgccaaatggtctgtcccggaagatgctccattgcaacatgactataccaaagcactatctgctgcgaatcgttcccatgaagatgcacagcctgatgtggggaatacagaagcaccggacacaaatcctgattggcatgatcatacagatcatgccattgccaacgaggaccaaacgttagctgaggactctttggagaacgatgccaccaagtaacagtggaaactcgcacactgacggctgttctaacacacaaaacatcagctctgctttacatgcacgtgctgactactgaaataccatgggaagatcttcatattggagagcgcattggtctaggttcatatggggaactatatcatgcagatcgtaatggcactgaacttgcactgaacaaaattcttgaccaccatttatcgctacgaccaactaaatcaatccaaaagcgaagcttgggatcatgtcaaggctgaggcatccaaatgtagttctgctcttggaatatgtgacacaaccaccaaatctctagatatcaacagaataccttccaagagggagcctttaccgtccattggatatgccaaacagtcaaatcgatgaaactacgaatgctagaaatggcattgcatgtggcaaaagggatgaactacttgcatgctagacatcctactattgngcatcgtgactagaaatcccca

SEQ ID NO: 29518 - DNA, 343 bp, Oryza sativa
  Clone ID: PAT_MRT4530_34011C.1
aaaacggaatttttttaaaaattttctgacaccttttttgacaccctggcggacccctcggtccacaacccaataacggaccgccacccccagcaaaccaccattccctaaaaaaaggagtataaaaaacaagcgtaaaaataagaataacagctacccgcgtaaaaaaaatatccgcccaaaaaaccacacaacaaactacccgcaaaaaaaaaatgtaaaaccaacggggcccaaaaagtaaacaaacaaacaaaaaatacgtcacaacaactacccgcactacagaagagaaaaaagtcgtgccaccaacaaaaaaaaaacccccaacaccccacaagaa

SEQ ID NO: 29519 - DNA, 736 bp, Oryza sativa
  Clone ID: PAT_MRT4530_34012C.1
ctggacctaacatttcctcatttttcttttctgttttgcatgatcagaatttttgttttcacaaatgcaaaaaagcttatggagatggtgctgtgctagttaattagcagcaacacattgacatgtacatagacggggggagtgggaccacagggtgacggctatatatattccagggagcaaaagaaaacagtgccaggaaacaaaacatcaacctctgaacaatatttccagccaatgatatgggctgcgtacgatgctgactcatctctgatagaggctgatgataagtatttccaagcatccatgacatcatcttcgcatggctatctccattgatttctctctttcggcgcagtgataatgatggaataatacatgacataaacaccacctgcctctggttttcagaaaatcatctggtttagtctctgaaagcagcactgcaggtgacggccggtggatttcttaactttgacaggattaactttggattgtttgatcagtagctggagtgctggatccagcatggcactttggatttgccaacttggtattttccttctccaaagtagttgatcatgtggaattcttttgctgcagatcactgtcatcagcagccacttgactgattgaatattcagggggcatgcacctcctttatctgtacctgtggctctgcagtcttcagaactaggccctcttgagcatgtcagcaggtgtcaaggctaccata

SEQ ID NO: 29520 - DNA, 629 bp, Oryza sativa
  unsure (1)..(629): unsure at all n locations
  Clone ID: PAT_MRT4530_34013C.1
ggaattgtaatacgantcactatagggngaattgggtnccgggnccccccncnantttttttttttttttttttttcantcncaaaacacagtgcacatgttatcanaagttcacttatcagtncnaaaattcnaacanaaantggtccgaaanattcttgccaagctaaaataaangggngccatctcagggcttggaaaacataaacatgttatgttgcntgcatatatacncncntcnccgganaaatacgctagttaaaanctacggncttcttctctcggngtntgcgtncaccncgtcnttangaacgtnanaacaacacgtttaggncganttcncgaanccaaccctcntcttgccgtantcnaacacngtatggtangnncccntgaaaacgtccccangatcccaaaaagaaccccgggaagaaggatgttcatggctgtgaatcccctgatgcctgggnagcactccttccccaacttcaaaaaatatcttccggnttcctgccaacttttgccccatggngaatgaatcnccggctggatcaggngcncatccnaaangatcnccttggactggaactntcccaaacnatatttttcaaanaattcgatntntctcc

SEQ ID NO: 29521 - DNA, 1638 bp, Oryza sativa
  Clone ID: PAT_MRT4530_34014C.1
aaagaaaaacgtaattacaagccacccccacccaatccccccgcaccaccacaccaccattacacccgcaatcaaccgcccccaccaccaaaccacaccaccccgcaacccaaacgctaacgcaacaatcccctcctctccaaatccaattccaaatccccatccgccgccgctaatcggaatcgcggcggatcaccctccgcctccgacgagggttcgacccgatcgactccccctgccccggcgggctcgcgggcggcgggcggggggctgagctgagagctgaattcgggttcgatctgtggccatggacatggcgagcatcgagtgcgtctcctactccgacagcatggatgacgacgacgacgatggcgtcggcgtcggcggcgtctcccacctgccacgccccatcctcgtcaagccctcctccgccgccgccgccgtcaacgtggtcgtcgtctccgcgggcagcggagggggcgcggggggaggaggaggaggggtcggggtcgtggccggggcccccgccgtccccccggcgacgagcgtccacgagctgctcgagtgccccgtctgcaccaactccatgtacccgcccatccaccagttaggtcactgggagcctgaagaattaccaagcatgctttctgtgatcctgttagagtgccaaaatggtcatactctgtgttcaacctgcaaaacccgtgtgcacaaccgctgcccaacctgtcgacaggagcttggtgatattagatgtctagcattggagaaagtggctgaatcgcttgagctaccctgcaaatattactcactaggttgtccagaaatctttccgtactacagcaaactcaagcatgaatcacagtgcaatttcaggccatacaactgcccttatgctggctctgaatgctcagttgtcggggatattcctttcctagttgctcatctgagggatgaccataaagttgacatgcactcagggtgcacattcaaccatcgctatgttaagtcaaaccccagagaggtcgaaaatgctacttggatgttgactgtctttcactgctttgggcagtacttctgcttgcatttcgaggccttccaacttggagtggctccggtttacatggccttcctccgttttatgggcgacgaaaatgatgccaggaactatagttatagccttgaggttggcgcgaatggccggaagatgatatgggagggcactccccgcagcataagggacagccaccggaaggttagggacagccatgacggcctcataattcagcggaacatggctctgttcttctcaggcggagagaggaaagagttgaaattgcgggtcaccggccgaatctggaaggaacagcagaatcctgactcgggagcctgcattccaaacctattcagctgaactgaaataacaagagagaaggattcggattcggattcggtttaggtgtatattgggtgatgcgtgtggtgcacctgtgcccgcttctgtaatttgtttgtgttgcttccacttttcttccacgtagccgttgtggcctgccctaaattagttagggctgacgtgtgaggaccatgaaaaaaaaatacggcttgagctttgtgggttctgattgatcacatgat

SEQ ID NO: 29522 - DNA, 1053 bp, Oryza sativa
  Clone ID: PAT_MRT4530_34015C.1
atggcggcaccggaaggccagaacaagttcgcgggcgtccgcttcttgcccaaggacctggagctcctcgccatcctcgacgccaagctccgcggaagcccgttaggccccgtggaagccatcttccacgacacgcagatcctcgacttccacccgtacaagctctacgagatgtatgctgaggacgaggaggaggaaggctacatctacttcttcagcacgatgcagttcagatgcaggaagattgtggagcgcgcggcgcagggcggccggtggaaggtgaacaactgcgagactctggaggttggcggcgtcgccgttggccggaagttcaccatgaatttctacgagcatatcggcggcgacaacgacctcatctggaccaactggggcatgcaagagttcgccaggatcatcggcccaaacaaggagctcgcggatcttgccttgtaccgcctatacaagaagaaaataacaagggggacaggcgaggagaagccggaagacatcgccgcggctagcgatggcgataccgagagcagcatgaacaagcgtagacgtgtagaagcgtcggcggcggccatggcgctgccaccgccaccgccatcgccaggcctgcctggaacaatgatgttcatggcggcggaccaggcgaacgtggcctcgacctcgcaggaatggcacggccagttcgccaacggcgctgcggcggcgccgagtcctagcggctgctggccctgggcgccaccgccgacaccgagcgcagtggagcctttcagcttctgggccagcgcgtcggcggcgactcctcctgccgccgcgaactaccacccgtcgccgcagccgcagccgctgccgccgcagggcggcgagtactactccagacacggcgccttctcggtggcgcccgtgcccgcgtccgcctgctcgacgccgtccccggaggcggcgaccagctgcctcttggctacgacgtcacctctgccggcggcaggtactgagggcagtgacagtcagcagcaagaacccccctgcgaattgatggaattttga

SEQ ID NO: 29523 - DNA, 481 bp, Oryza sativa
  Clone ID: PAT_MRT4530_34016C.1
aacaatcaacgggccacagccggcctggagttaattcctggttgaacaaaaaagggccagagatcatacttcccccccagaacactgaagcacttgccatgcggggagaactttttttttatgaaaagaggataccgatcagttgcgactatgttacaccccccccatgtacaacgaccggaccccgaaacattatcctaaggcaaaactgggaggattggaggggcgctctaaaccttggagggggcaccaaaaattttttttttatttggaggaacagcgagcaccttgttttttggggttttaaaacacttcaagcctccaaaagccttggaataaaaacaacctttggggaaaggggcaagggacttgccacatgatcctttaaaaaggtcaatgccgtttggaaaggcaaccaatccatcaggagtttttccccaaaaaaaaggcaccttgccctttgggacaaaggcccaaaggg

SEQ ID NO: 29524 - DNA, 293 bp, Oryza sativa
  Clone ID: PAT_MRT4530_34017C.1
agaaaattaatgtaataaacatgacatttgcaaatggcagtgatcctagcatggtgataaacatgaatatgctaacatgaacaaaagcatctagcaacatgtttaacaccaagattagagtagtaaaatacccagagaacgctctagtagatgatgaggcattggtattgcctccgttgatgttgacattctcggttccgcctcctccagtgccatagttccctccttttccagtagtgccgtcattccctcctgttccagtatcgccggtgctggtggaagacatcacgatg

SEQ ID NO: 29525 - DNA, 869 bp, Oryza sativa
  unsure (1)..(869): unsure at all n locations
  Clone ID: PAT_MRT4530_34018C.1
aagaaacacnacaatggtactggttgtattcgacagtgaaattcagacgtttatagtatttcgcgtgcctccctttgttttttttccttcatcgaaagaaaaaggaaacagagggacaggtctacgttctgttctgcaaaggagtactagtacgtatcaagacaagtacagcagcatgtacagagattttgtcatgtcagaaaatggcaacgcccatgcgttcctctgcatctatgaggcagcagcagcagcagcagcaggagagcaggttcaagaggacctgcgtgttctgcggcagtagccagggcaacaagaccacctaccgcgatgccgccgtcgacctcgccaaagagctggtcgcgaggggcattgaccttgtgtacggcggcggcagcattggcctcatgggcctcgtctcccaggccgtctacgacggtggcagacatgtcattggggtcatccccaagactctcatgacccccgagataatcggagagacagtaggggaggtgaggccagtgtccgacatgcaccagaggaaggctgagatggcgaggcagtctgatgcattcatagccctgcccggaggatacggaacactggaagagctgcttgaagtcatcacatgggcgcaattaggcatccatcataaaccggttgggctgctgaacgttgatgggtactacaactccctgctcacattcatcgaccaagccgtggaagaaggcttcatcagccccagtgctcgccgcatcatcgtgtcggctccaacggcacaagaactcatggacaagcttgaggaatacgtcccttaccatgatagggttgcgtctgggctgaactgggagactggtcatctagggttctaa

SEQ ID NO: 29526 - DNA, 194 bp, Oryza sativa
  Clone ID: PAT_MRT4530_34019C.1
aagcttacgcaacaacaacaacaacaaaaatactatttcaataatatagagtaagctcttttctacttctcaatgatgaatgggtgataatatgaccacattaaatactagaagcaacctgtgagcttcttatgtgaaagtctggatctatactaatgagctatataagtggacctccgaaaaaaaaaaagctt

SEQ ID NO: 29527 - DNA, 4950 bp, Oryza sativa
  Clone ID: PAT_MRT4530_3401C.1
atggccggtcacccacccaaccaccgcggagaaggcatgatcgatttcgtggcagagttggcacgtatgacactggtggtgggctaccccaacgcgccggagtacacgaccattccaccgctcagtggcgagcttcctcaccgtgttcgcttggaggtccatggctacgtggggacttgcctcgctaacatggcggtcgaggcgtcaggaggcacagcagatcacgcctgtcaggaggcagcctacttgatgatggccagactacgggagcgccacaactacatcttccacgacacggcgtaccgctaccacccccgtcgagccaacggtgatggcgtcagctccttccgtccgacagctggcgagaacgacaccacctttggtcacatgtgtgctgtgatgaggggattggacaggatgcactcggacctgcacaaggcgaccaaggccttgaacgatgggaagctcatgaggatcgtcgctctgaaggatgagatagcgcgcctgaagaaggagaacgctcagctaaagggtcttccagcgccaggaggagtccggatccgcaccacgccccgcaagacgacgactgcacccgtgcgcatccagcttgcgcccaggaaaccacctccaccagcagctcccgcagcacctccagttccgcccgcagttcctgcagctccagttccagctcccgcgttcactctctccttcgctccagcatcagccgccagaggtccagccagtggcaccggaggttgcttgtttgggatggtctacaccaggaatggtagccgtgcaacaggcgagggcagcaacggcgaagaacgcgctgatggtgtgcaccccaacagtgattctggcaatggtccgccaccacttcccgagaatccgacccttgcccaagttatggcacatcagactcagatgatggcagccatgatgcagcagatgcagcagcagcaccagcagatgcaccaaaggatgatgcagcacgccgaacagcagcaccagcagtttggtccccctccccctcagtccaagttgccagagtttctacgcgtcaggccacccaccttctccagcaccaccaaccctatggaggcgaacgactggctccatgccatagagaagaagctgaacctcctgcagtgcaatgatcaggagaaggtcgctttcgccacacaccagcttcagggtcctgcgtcagcttggtgggacaaccacatggccacccgcccaccgggtactgaagtcacatgggcagagttttgccgtagcttcaggaaggcacaggtgccagatggggtcgtggcacaaaagaagagggaatttcgtgcactccatcagggcaacaggactgtgacagagtacctccatgagttcaatcgcctcgcgcgatatgcaccagaggatgtccgcaccgacgccgagaagcaggagaagttcatggcgggtctggatgacgagctgaccaaccaactgatatctggggactacgccgactttgagaggctggttgacaaggcaatccgccaggaggatcaacgcaacaagatggacaggaagaggaaggccgcacagttcagggcacctcagggaagtcaccagaggccgcgcttcactcccggacagcagggtggacctaccaccatgatcatccgccagcaccgcccgttcaaccctagcaacttccaccagggcaccagtggcagtcagaaccaccatggaggtcagcccaaccgcggtgcagctccacgcccatcagtggcaccggcacagtcaggccagcccgcgcaagccaagaaggagacgggagcaaaaccagggtcctgcttcaactgtggcgagcttggccacttcgctgacaaatgcccgaagcccaggcgtgccgggccaaggtttatccaggctcgtgtcaaccacgcatctgcggaggaggcacaagcagcaccagaggtcgtactgggtacgttccctgttaactcaatccctgcaacagtactttttgattctggtgcaacgcattctttcatttcaaagaaatttgtggggagatcaccatttctagccaacctcattcttcttgaatccaaagacctagatgtcattcttgggatggattggctgaccaagtttaagggagtcatcgattgtgcgagtcgcacagtcaccttgaccaacgagaagggggaaaccgtggtgtacaaatctctagtctcgccaaagaaaggggtctcgttgaatcagattgagacggaaatcccagtggacaccgtagagaagaacttgagaaaattggaagatatacccatagtctgcgagtatccagaagtgttccccgaagacctcactaccatgccacccaagagagagattgaattccggattgacttggcaccgggaactgctccaatctataagagaccgtacagaatggcggccaacgaattagccgaggtcaagaagcaggttgatgagcagctgcagaaagggtacattcgaccaagcacttcaccttggggcgctccggtcatttttgtggagaaaaaggataagacgaagaggatgtgcgttgattatcgcgcactcaacgaggtcacaatcaagaacaaatatcccttgccgcgaattgacgatttatttgatcaactgaaaggagctaaagtgttttctaagatagacctgcgatcaggctaccaccagttgagaatccgggaagaggatattccgaagacggccttcaccactcggtacgggctatatgagtgcacggttatgtctttcggacttaccaacgcacccgcattcttcatgaatctgatgaacaaagtgttcatggaatttctggacaagtttgttgtggtgttcatcgacgacatacttatctactcaaaatccgaggaagaacatgagcaacatctccgtctggtactcgaaaagttgaaggagcaccagctatacgccaagttcagcaagtgtgacttctggttgacggaagtcaaatttctgggtcatgtcattacagctcagggtgtggcagtcgacccatcgaacgtggagtcagttaccaaatggaccccacctaagaccgtgtcgcagattcggagttttcttggacttgcgggttattaccgccgattcatcgaaaatttctccagaatcgcccgacccatgactcagttgcttaagaaagatgagaagtttaaatggacagctgagtgcgataagagttttgaggagctcaagaagaaattagtatccgcaccagttttgattctgcccgacccgacgaaagacttccaagtctattgtgatgcatcccgtcacggacttggatgtgtcctaatgcaagagggcagagtggttgcgtatgcctcgcggcagttgcgtccacacgaaggaaattatccaactcatgacttggaattggcagcagtggttcatgctttgaagatctggaggcactatctgattggcaaccgctgcgaagtatatacggaccataagagtctgaaatacatcttcacccaaccggatctaaaccttcggcaacgaagatggttggaactaatcaaagactacgacatgagtattcactaccacccgggtaaagccaatgtggtggcagacgctttaagccggaaaagttactgcactgccctatgcatcgagggcatgtgtgaggaattgcggcaggagtttgaacatctcaacatgggaattgttgaacacgggtttgtagccgctctggaggcacggcccactctcgtggatcaagtcagagcagctcaagtaaatgattctgagatagcagagctgaaaaagaatatgagagtcggaaaagcccgggatttccacgaagatgagcatggcacaatctggatgggagaaagattgtgtgtacctgacgacaaggaatcgaaggatctgatactcaccgaggctcatcagacccagtactccattcatccaggcagcactaaaatgtatcaagacctcaaagaaaagttttggtgggttagcatgaggagagaaatagctgaattcgtcgcactctgcgatgtttgccaacgagtgaaggcagagcaccaaagaccagcaggtttactccaacctcttcaaatcccggaatggaaatgggaggagattggaatggactttataacaggactgccccggacatcatcgggtcacgattcaatctgggtagtcgtggatcgactcactaagcttgtggacaaaagcttgccatatgcggaattctcgtacaacaacagctaccaggccagtctacagatggcaccgtttgaagctttatacggccggaagtgccgcacgccgctcttctgggatcagacaggcgaacgtcaactgttcggaacagaagtattagcggaagcagaagagaaagtcagaatcatcagggaaaggttgaggattgctcagtctcgacagaagagctacgcggataaccgtcgaagggagctcacttttgaggcaggagattacgtgtatcttcgtgtcactccgctccggggagtacaccgttttcagacgaaaggcaagttggcaccacgcttcgtgggaccatacaaaatcttggaacgaaggggagaagttgcttatcagctagaacttccatccaatatgatcggcatccatgacgtgttccacgtgtcccaattaaagaagtgtttaagggtacctgaagaacaggctgattcggaacacattgatatccaggaggacctaacatatgtggagaagccggttcgcatacttgataccagcgaaaggagaaccagaaacaaggttacccggttttgccgagttcagtggagtcatcattcggaagaggaagcaacctgggaaagggaagatgagttgaaagccgcccatccgcacctcttcaccagctcctccgaatctcggggccgagattccgtttaa

SEQ ID NO: 29528 - DNA, 234 bp, Oryza sativa
  Clone ID: PAT_MRT4530_34020C.1
atggcggtgatgagctcgtctcaagcgcggcggcgactcggcgccggcgtcgcctccgtggtggagctcgccggcggaggatgcctccaccgtcccccgaccccgctcctcgccgtcctcttctggctcaacacaatgcccatggccgatagacgtttacgcgagcgagcactggagcgcgatcctttctccgttcgtgtgatgaagattgttcgcacactgcacacggcctaa

SEQ ID NO: 29529 - DNA, 2388 bp, Oryza sativa
  Clone ID: PAT_MRT4530_34021C.1
atggccggcacttcttcatcctccaacacctcaaccggtcgtctactgaccacgatcatccctaagctgtacacgctcatcagtgggcagtacaatctggaggagaccatccggcaagacatccgatccatcaagaacgagctggacatgatgttgagcgccatccaagattacagcagcttgctgatgacaacgcgaagcggagatggccgtcatcatcatcagctgggagcaggagctgtgcaggcgacatggatcgagaaagtgcgcaccctggctcatcagatggaggactgcatcgacagctacatctacgatcagatggctcctcatggctcccggaggcaaggccctgctcggtttgcatccgaggtcagggagctcaggagcagatcagctgaactatcccagctgaaccagcatactctatcctctgccgcaccgttgtcgacttctccagatgagctcgttggcatggaggctcgccggggggagctcctggagctggtaaacggcgaggggcagccggagcagcagcgcaaggtgatctccatcgtcagcttcggtgggctagggaagactgtccttgccaatcaagtgtattgcgacactgacgagctgaatttcagtcctcgggcatgggttagcgcggcagagaagacagctggggaggttctcatggagatattgcagagatttgaggtgcgagtaagggacatgccttatttcgaccaactcagcaagcgtctcagggaacaccttcgcaacaaaagtgcatcatattgtgagatgttcagtgcaagagtcaacaggtatctcatcgtaattgatgatataagggtagaacagtggtgtaatatggagcctgctttccctgccgatcatggtatcagcagcagaatagtggtgaccacgagtattcaatcaattgccaatgcatgcagcatcccaaaaggctacatctacaaaatggaaaaactagatgctgaatgctccaaaaacctgttcttcagaagcgcctctatcgaggaatgctcacctgacatagagagagacggacggtcaaacgtttggcacggaaaccagggtttgtctttttttgggacggagggagtaggttactatctggagaacgacaacaatgcattagcaagaatgcaagggttgcttgccaggagctatgcctgcctgccatgccatgatgccaaggcctgcttgttgtacctaggcatgtttcccagcaactacccgattcggaggagaagattgttgatgcgatggctggctgaagggcttgtcagaaaacggcctcaccctcggcttggcgacgcggcggtcaacaacttcaggacgttcatggaccggaacatcgttcatcctgtcggtgtgagcaccaacgacgaggtgaagacatgccagctgcccgggatgatgctcgagttcatcttgcacaggtccatatcggagggtttcatcacactggtttctgatgagaatgtgatgcccaggtatgcccctcgtcgtctcgctgtccaacttagcactgctgctgtgaaggacaggctaggaccaagaagtgatctctcttttgtccggtctctcatggtctccggcatagcatcccaatgtgttctggatttcagcaggtacaaactgctcaaagtcttggatctggaacaatgtgacggattgacggatcaacatctcgaaggcgtatccaatttgttgttgctcaagtatcttagcctcgggggagaagttaccatgctccccaagaagattggaacactaagtttcttggagacacttgatgttaggagagccaaggttgatgtgatggtgttcccggtcgaagcaatagtgcttcccaaattaattcacctctttgggaagtttaaacttttcggtaagattgaagacggcgatgacttgaacgatgcccgttctctgtctgtccatttcaacgaatgctctgaagacatcatgaatttttccctgcaaggagcctgcaatctttccacgctgaagctccaaggtgacctgcaccaaatacctccatttgttccctcattggtagctctcacagagctatctctgacatcgactactcttcggcaggaactcttaactagcttgactgaattgagatgtctagtttatctcaaacttgtcgcgcaaaatctcgagggttttgtcataaaagttggggcattccaaagccttcaacgactatgcatggtggttcagaatccatcattccttgaaatccaggatggagctctgccacagcttgtgtctctccagctgatgtatgaaaatttggcaaaccttcctttaatcaacattgggggcatcaagcgtcttagggaagtggtgcttgattctgcg

SEQ ID NO: 29530 - DNA, 392 bp, Oryza sativa
  Clone ID: PAT_MRT4530_34022C.1
aaatgaaattggcactgtcttgtgcctgttctttaaaataaataaagaaataattattgtacttaattttctaacgcagtacaataccaaacacacaaccgaactgttctgaacatatcagttctttatttctgaatccaacaagctaaactggaagcccttatatctaaattttgaacaagtacgctactgaataatgccaactcacgtaccgagcaacatggcaccgtatcactcccgtgcgacggcaacgagcttgttgccgatgctgctgctagtaaaaagcttgacaagtgctgccggtccatagtctagcccctaaactacaatccttgagtatgccacctttccttcctttaggtaccctgcaaatctgctcttttaatctggtt

SEQ ID NO: 29531 - DNA, 874 bp, Oryza sativa
  Clone ID: PAT_MRT4530_34023C.1
gcacgaggcttctttgctcaaatagccatcgcgagtctcgcgaacttccccagctgcctcaaagccggaggagctcgccgcccactccatgcctcgcgtgctccccgcggagccggcggcgaccaaggcggcgttggctcgcggtttctgacgagctcgcgggcgcggaggcggggcggtcggcgactcggcggcatcccctccctccctacgctgcaacatggacaggctgcagcagcagcggcggcggcatgaggcgctgaccgggcggcgccgtggtggtggcggagggatgtcgcggcggcacggccggttccggttcgccaccggcggcggcgacggcgacggcgacgaggaatgcgctggcgtggcggtggtggaccaggcggactgcacggcgcagtcgtgccggtcgtgcgtggcggtgtcgctggcggactgcatcgcgctcgggtgctgcccgtgcgcggtggtgagcctgctcgggctggcgttcgtcaagctcccgctggcggtggcgcggcggtgcgcgcgccggctgcggcggcggcaggggaggctgcggcagaagaagcgggtgcgcgacctggacgccgcgaagaacgcggcgggcggggggcaccaggagccgctccccggcggcgcggcggccgcgtcgaaaggcgaggacggcgacgtcgtggtggtcgccgccgccgccgccgcgtcccccggcagcgacgacgcggagaacgtgtggctggagttgtaccaggtgggccgctggggcttcggccgcctgtccgtctcggcggcgaacccgcccgtcaggccgtcctacgtggtggccaccgcccgcaacgccgactgcgccgccgacggcgacgtctcttga

SEQ ID NO: 29532 - DNA, 2482 bp, Oryza sativa
  Clone ID: PAT_MRT4530_34024C.1
cctacttccaaaaaagagagaaaaaaaaatccagcgattaggcggaggaggaagcgagcagaggttgcgagtggaagggaactgaggaagcggagcgcaatgtcggcggactcggcggcggcggggagggacgctctcctggacgagctgcgcgcgctcatggcggcccactccccgtcgctccacgcgcccgtcggcccctccgaggacgcccaccagagcgagtatgtgtcggagcgggacgagcggcggcagttagtctccgggttcaccgggagcggtcgtttggcgcttatcactatgaaggaggcgctactttggacggatgggcattacttcttgcaggcagagcagcaactcagtgatcgctggatattgatgtgcatgggagaagatcccgcaattgaagtttgaatagctgttcaccttgcagatgaagctgtcattggaattaagccatggtgcaattctgttgagactgcccacaggtatgagaatgcattttcaaagaagaactggacgctgtatctgttttcgtatgacttggtagatgaattatggaaggatcgtcctactgttattgctctgcatgtttttgtgcaacatctggagtatgctgggtgtagtgttaccgaaaaacttaaggagttaagagaaaaattacaacatgaaaaggctaggggcattataattgctgcgcttgatgaggttgcgtggttgtacaacattagaggaaatgatgtgcactacagcccagtggtccattcttattctattgtaaccttgcacagtgctttcttttatgtggataagagaaaagtatctgttgaggtccagaactacatgactgagaatggtattgacatcaaagactataatatggttcaatcagatgcaagcttgcttgcatctggacagctaaaaggttctgcagtcaatggtagctctcatggggaaaatgatatgaatgagaattcaaaagtttggattgattcaaattcatgctgccttgcactctactcaaaactggatcaatatcaagttctgatgctgcaatcacctattgctcttccaaaggctgtgaagaatcccgtagagctggatggtttgaggaaggcacatattcgagatggtgcggctgtcgtgcaataccttgcttggcttgacaagcagatgcaagaaaattatggagcttctggttactttactgaggccaagggatcacagaaaaaggagcatatgaatgtaaaacttacagaggtttctgtgagcgataaacttgaaggtttccgtgcatctaaagagaatactctctggatgacattatatgtattgttactatcacgtaaacacatgtatcttgatggtactacagacattacaagaactgtacattttggcaaaccctctgagcatgagaagtcctgctacacagctgttttgaaaggccacattgcactggacactgctgtatttcccaatggaaccacagggcatgctattgatattctcgcacgaacaccactttggagaagtggtcttgattaccggcacggcacaggccatggaattggatcttatttgaatgttcatgaaggtcctcatctaattagcttcagaccttctgctagaaatgtaccactacaagcatcgatgactgtaacagatgaacctggttactatgaagatggaagctttggtataagattggagaatgttctgatagttaaagaggccaatactaaatataatttcggagataagggttatttggcatttgaacatataacatgggctccataccagacaaaactgatagacaccactttgctgaccccggccgagattgaatgggtaaacgcatatcacgcagattgccgaaaaattttgcaaccatacctgaacgagcaggagaaggaatggctgaggaaagctactgagcctatcgctgtgagctgctgttaaaccatcaactagctggttggctctacatggacacatggcacagggtctcgaccggccattcgtgctagatgtgcagaacgacaaacgatttgtggcgtgccatgcgtagataaatggttatcccgcaattcaattgcttgcaataagtgtgaacagcagaataaacatcgcaattgattctttggcttgtcatgctgctgaggttcatgtgagggacttagaaataaagctaggactggaaagcttccctcccatgaatctgcaggtttcatgtgtacagttatattgttgggtatcgagtgcctaatatgatttgcaatgaaaaataaagggtttgaaaccgtcgtccaaaaaaaaaaaaaaaaaaaaaaaaaaaaaaaaaaaaaataaaaaaaaaaaaaaaaaaaaaaaaaaaaaaaaaaaaaaaaaaaaaaaaaaaaaaaaaaaagggggggccgttttaaagaaccaaagtttacttacccgtgaatgcaagaaaaaactttttttatggggc

SEQ ID NO: 29533 - DNA, 1365 bp, Oryza sativa
  Clone ID: PAT_MRT4530_34025C.1
ccacgcgtccgggaaaatgatatgaatgagaattcaaaagtttggattgattcaaattcatgctgtcttgcactgtactcaaaactggatcaagatcaagttctgatgctgcaatcacctattgctcttccaaaggctgtgaagaatcccgtggagctggatggtttgaggaaggcacatattcgagatggtgcggctgtcgtgcaatacctggcttggcttgacaagcagatgcaagagaactatggagcttctggttactttactgaggccaagggatcacagaaaaaggagcatatgaatgtaaaacttacagaggtttctgtgagcgataaacttgaaggtttccgtgcatctaaagagcacttcaaaggtctgagttttcctacgatttcatccgtgggaccaaatgcagcagtgattcattataaaccagaagcaagttcatgtgctgaacttgatgctgataaaatatatctgtgtgactctggggctcagtatcttgatggtactacagacattacaagaactgtacattttggcaaaccctctgagcatgagaagtcctgctacacagctgttttgaaaggccacattgcactggacactgctgtatttcctaatggaaccacagggcatgctattgatattctcgcacgaacaccactttggaaaagtggtcttgattaccggcacggtacaggccatgggattggatcttatttgaatgttcatgaaggtcctcatctaattagcttcagaccttctgctagaaatgtaccactacaagcatcgatgactgtaacagatgaacctggttactatgaagacggaagctttggtataaggttggagaatgttctgatagttaaagaagccaatactaaatttaattttggagataagggttatttggcttttgaacatataacatggactccgtaccagacaaaactgatagacaccaccttacttacccctgctgagattgaatgggtaaatgcgtatcactcggattgcagaaaaattttgcaaccttacctgaatgagcaggagaaggaatggctgaggaaagctactgaacctatcgctgcgagctgttaagccatcaatcaactagctggttgacgctacatggacacatgacacagggtcccaaccggttgcaactattcgtgctagatgtgcagatgatttctggcatgccatgcgcgtagataaataaatggctatccctcaatttaattacttgcaataagtgtgaatatatagcagaaaacatcacaatcgattcttttgcgttgtcattctgctaatgttgaatgtgaggatggaagtagagataataaggccgagtttagttcc

SEQ ID NO: 29534 - DNA, 207 bp, Oryza sativa
  Clone ID: PAT_MRT4530_34026C.1
atgattgtaagtaagcgaggtcacccaccagatgtagccgcgagctcgcccaagggcaggagggatagtgatgagcttcgagcattaaaggtcgacgagctctatacggtgggtggcaacaaggccatcctccgccttccagtgtcgtcgccgacttggatatagtcatacgcggtattgcaataccacgacactcactaccactga

SEQ ID NO: 29535 - DNA, 168 bp, Oryza sativa
  Clone ID: PAT_MRT4530_34027C.1
ttttgggtttttgaggatatcggtttttttttttttaccccaaacttttggttaaagaaacattccaaggatttcatggaaaaaaaaaaatttcgcccaagggccaagggaacaaaattttgaaccacgaaatggtagtaagggaacccggattatcttttttttcca

SEQ ID NO: 29536 - DNA, 291 bp, Oryza sativa
  Clone ID: PAT_MRT4530_34028C.1
atggcggctcggggtggacgacgacgacgaccgtggtggtggtcgtcctcctgccgctgctctccgctccttcagctggcgctgatcatcagcagctgcctgctgctgtggccgcaccaaggggtggctctggctccgtcgcgcgccgccgccaccgataccttggccgtcggccggccgctttcaggcgggcggaggctggtgtccaagggtggcaggttcgcggtaggcttcttccagccagacgagaatgcgacgatggctctcgaggaaggcagtggcaaggtctag

SEQ ID NO: 29537 - DNA, 264 bp, Oryza sativa
  Clone ID: PAT_MRT4530_34029C.1
atgggttccgtctccggcatcgacgacttcgtcttccctcccgggcaggcgtttcggttcggcagcctcgacttcatcaccaacgactttggcaagatctctcctcttgactcggatccaaaccagtcgggaaagaaccaggtctcagccccgtttggtattccgaacaaggccgagatctactccaagcttatctcgaccgagtcagcttcaaaccacacgaacgagatcccatctactccgacaccactagatcaagattga

SEQ ID NO: 29538 - DNA, 5291 bp, Oryza sativa
  Clone ID: PAT_MRT4530_3402C.1
atggccgatcacccacccaaccaccgcggagaaggcatggatgattttgtggcagagttggctcgcatgaccctagtggtgggctaccccaacgcgccggagtactcgaccgttccaccgctcaatggcgagcttccccaccgtgttcgtctggaggttcatggctatgtgggcacctgcctcgctaatatggtggttgaggcatctgggggcactgcagatcatgcctgctaggaggcagcatatctgatgatggccagacttcgtgagcgccacaactacatcttctgcaacacggcataccatttccaccctcgtcgagcaagtggtgacgatgtcaacaccttccgcccgacagccggcgagaacgacaccaccttcggccacatgtgcgccgtgatgaggggaatggacaggatgcactcggatctgcacaaggcatccaaggccttgaatgacaggaagctcgtgaggatcatagctttaaaggatgagatagcgcgcctgaagaaggagaacgcttagttgaagggtctctctgcgctaggaggagttcggatccgcaccacgccccgcaagtctacgactgctcccgtgcgcattcagcttgcgcccaggaacccacctcctcctgcagctcctcccgcagctcctcctgcagttcctgtagcgcccgtgtcagctcccgcgtctgctctctccttcgctccagcgtcagccgccaggggtctagccagtggcagccacgaccgcagcagtagcatggtcaacaccaggaatggcagccgtgcagcaggtgaggacagcaacagcgaagaacgcaccgatggtggacaccccaacagcgcctctggcaacggtccgccactgctccccgagaacccgacgctcgcacaagtgatgacccatcagactcagatgatggcagccatgatgcagcagcagcaccagcagatgcaccagaggatgcagcagcaaaccgagcagcagcagcagtagcagtttggtccccctctcccccagttcaagctgccggagtttctacgtgtcaggctacccaccttctctagcaccaccaaccccatggaggcgaatgactagctccatgccatagagaagaagctcaatctcctgcagtgcaatgatcaggagaaggttgccttcgccacacaccagctccagggtcccacgtcagcttggtgggacaaccacatggctacccgttcgctaggcacagaagtcacttgggcggagttctgtcgcagcttcaggaaggcgcaggtgcctgacggggtggtggtacaaaagaagagggaattccgggcactccaccagggcaacaggacagtgactgagtatctctatgagttcaatcgtctagcgcgatatgcaccggaggatgtccgcactgacgcagagaagcaggagaagttcctagcaggcctggatgacgagctgaccaaccagttgatctctggagactacgccgactttgagaagctggttgacaaggcaatccatcaggaggatcagcgcaacaaaatggacaggaagagaaaggcagcgcagttccggtccaaccaaggaagccaccagcgaccacgcttctttcctggacagcagggtggacctaccaccatgatcgtccgccagcatcgccctttcaactcaagcagcttccaccagggagccaatggcagccagaaccaccagggaggtcagcccaaccgcagtgcagctccgcgcccaccaatggcaccagcatagtcagctccatcagcccaagccaagaaggagactggaacaaagccagggtcctgcttcaactgtggtgagcatggccactttgctgacaaatgcccgaagccaaggcgtgccgggccaaggtttgtccaggctcgtgtcaacaacgcaacagtactttttgattctgcaccagaggtcgtactgggtacgtttcctgttaactcaatccctgcaacagtacttttcgattctggtgcaacacattcgttcatttcaaagaagtttgttgggatacatgggttaataagagaagaacttagtacaccaatgcgggttcataccccagggaatagctccacttcggttcaattcagcccttctataagaatagaaatccaaagatcaccatttctagccaacctcattcttctcgaatccaaagacctagatgtcattcttgggatggattggttgaccaagttcaagggtgtcattgattgtgcgaatcgcacagtcaccttgaccagcgagaagggagaaacattagtgtacaaatcaccagtctcaccaaagcagggggcctccttgaatcagattgaggtggaaattccagcggtcaccgaggagaagagttcgaggaaattggaagatatccccatagtctgcgagtatcccgaagtgttccccgaggacctcactactatgccacccaagagggagattgaattccggattgatttgacaccgagaactgctccaatttaaaagagaccgtacagaatggcagccaatgagctagcagaggtcaagaagcaggttgatgagcagctgcagaaagggtacattcgaccgagtacttcaccttggggtgctccggtcatttttgtggaggagaaggacaagacgaagaggatgtgtgtcgattatcgcgcactcaatgaggtcaccatcaagaacaaatacctgttgccgcggattgatgatctgttcgatcagctgaaaggagccaaggtgttttccaaaatagacctgcgatcaggctaccaccagttgaggattcaggaagagaatattcccaagacagccttcaccactcggtatgggttgtatgagtgcacggttatgtcttttggacttaccaatgcacctgcattcttcatgaacctgatgaacaaagtgttcatggaatttctggataagtttgttgtggtattcatcgacgacatacttatctattcaaagtctgaagaagaacatgagaagttgaaggagcaccagttatatgccaagttcagcaagtgtgacttctagttgtcggaagtcaaatttctgggtcacgtcattacagctcagggcgtggcagtcaatccattgaatgtggagtcagttaccaaatggaccccacctaagaccgtgtcacagattcggagttttcttggacttgcgggttattactgtcggttcattgaaaatttctccaggattgccagacctatgactcagttgcttaagaaagacgagaaatttaaatggacggccgagtgcgacaagagttttgaggaactcaaggagagattagtgtctgctccagttctgattttgcccgaccaaacaaaggacttccaagtctactgcaacacgtcccgccacgggcctggatgtgttctaatgcaagagggcagagtggtcgtttatgcctcgtggcagttgtgtccacatgaagggaactatccaacacatgacctggaattggcagcagtggttcatgatttgaaaatatggaggcgctatctgattggcaaccgctgcgaagtttatacggatcacaagagtctgaaatatatcttcacccaacctgatctaaatctccgacagcgaagatggttggagctaatcaaagattatgacatgagcattcactaccatccgggcaaagccaatgtggtggcagatgctttaagcaggacaagctactgcaatgctttgtgcaccgagggcatgtgtaaggaattgcagcaagagcttgaacacttcaacttggaacttgttgaacacgggtacgtggccgccctagaggcacgacctacgctcgtggatcaagtcagagcagcccaagtaaatgatcctgagatagctgaactgaaaaagaatacgagggtcggaaaagcccgagacttccttgaggatgaacatggcacaatctggatgggagaaagattgtgcgtgcctgatgacaaagagctaaaagatcttatactcactgaggctcatcagactcaatactccattcatccgggtagtaccaagatgtatcaagatctcaaagaaaaattttagtgagccagcatgaggagggaaatagctgaattcgtcgcgctctgcgatgtttgtcagctagttaaggcagaacatcagaggctcgtaggattgttacaacctcttcagatcccggaatggaaatgggaagaaattggaatggatttcataacaggtctgcccaggacatcatctggccacaattcaatctgggtagtcgtggatcgacttaccaaagttgctcatttcattccagtgcataccacttatacgggcaaaaggttggcagagctctatctctcgagaatcatgtgtctgcatggagtacccaaaaagatagatctgatcgagggagccaattcacttcaaatttctggcagaaattgcaagaggaattgggaacccggctgaacttcagcacaacctaccatccgcagaccgatggtcagaccgagcgggtcaatcaaatattggaggatatgttaaaggcttgtgcgcttgattttggtggagcatgggacaaaaacttgccgtatgtggagttctcctacaacaacagttaccaggctagtttgcaaatggcaccgttcgaagcgttgtatggccggaagtgccgcacacctctcttctgggatcaaaccggcgaacgtcaactgttcggaacagaagtgctaactgaagcagaggagaaagtcagaaccgtcagagaaaggctgagaattgcacagtctcgatagaaaagctacacagaaaaccgccgaagagagctcacttttgaagcaggggattacgtgtaccttcgtgttactccgctccggggagtacaccgtttccaatcgaaaggcaagttggcaccacgcttcgtaggaccatacaaaatcttggaacgaagaggagaagttgcttatcagctagaacttccatccaacatgatcggtatccatgacgtgttccacgtgtcccagttaaagaagtgtttgagggtacccgaagaacaagccgactcggagcacatcgatatccaagaagatctgacttatgtggagaagccagttcgcatccttgagaccagtgaaagaaggactagaaataaggtcaccaggttctgcagggttcagtggagccaccattcagaggaagaaacaacctgggaaagggaagatgagttgaaggccgcccatccgcacctcttcgccagctcttccgaatctcggggtcgagattccgtt

SEQ ID NO: 29539 - DNA, 418 bp, Oryza sativa
  unsure (1)..(418): unsure at all n locations
  Clone ID: PAT_MRT4530_34030C.1
gttgtcttaaaaagggannaaaaggaaaataaaagtgcacgccttcatctcctngactccctgcgggcactgatctagcccgggctcgggaggccctgcgcccctttccattcctctccagatggtcagcccatggggcccagtcggactccgcttcacccccacgaagctacatctccccggcaggagcaccggcaggcatgcacaggtgctgctatcgcatggcaagggccgtaagcaccaaagattcggctgctatattggagactgcaagaaaggacctgccacttgtattggcaaccttttggaccccttgcctcaaatacaccacttatgataggaacagaatcgcatgagaggtgcaatcagataggaaacggcagaacacacttcctaagcacaacgaagctgaccatgg

SEQ ID NO: 29540 - DNA, 992 bp, Oryza sativa
  Clone ID: PAT_MRT4530_34031C.1
atgcgagccccacatggcagtggctcggggtggcggtccgcggtggaccgggtccacagatcggggagggggcagcgcaccacgtatcgctgacgtggcgccgacacagcggccacgtggcagccacgcgggcggccatacggacggcccccgggtagatcggagggaggtgggagcacgcggctggcgcgcatggacggctcaagccggcccggtggccatggcgcacggcggcactaccgcggggcggcggcggcgaacggcggcgagcgacggcgaacggccgacggcgaacggcggcgcacggcgagcgacggcgacgcggccccgagtggcaagggcggcgacgctaagagggagaggggaaagatgacggggaggtgctcaccgagggttcggccggcatggaggggcgacggcgaacggcggcgagcgacggcgagcggcaattgcgaacgacggacggtccccggaatcaccaagcgaacaagatgagaggggttagagggattcaggaaaatggaagagggcgaggacgccagccgaaggcggcggccatggcggtgctcaccggcgcacggcgcggctcggcacggcggctagtggcggctagcggcaataggagcggtggcggcggtggcggagaggagggcgacggcgctagggcggtggagggcacgggggaactcggcgaaatggagaaaaagagagaggggagggcggtgatgcgcgggcgcgggcgggagagagagggagtgggcgcggggaacgtgggggaaggcggcgacgtgggcgacgtggcccgggaggtgcgggagcgagcggggcggcggttgcgagatgcggcggcgccggctagaggtcggggacgggcccgataggtgggccccacctatcagtgaccctaggagagagaggagggggcgcgggctgaactaggccgtggcctccggccggcccagcaaggcgtgggagagagaggaggaaatggg

SEQ ID NO: 29541 - DNA, 259 bp, Oryza sativa
  Clone ID: PAT_MRT4530_34032C.1
gcggacaccacatgcctccggcgcatccgcctccgtgcggggtcgcgcccgccgcggcggcgacctgccccctcttcctccgggcccgggggagcctgagccggagcctccacctccgcctccgccgcctctccctccccgccccgcgcgccccttccagcccacgacccgtctcttcgcggccgcgacgcggcgaccgtccggggctacctcccgaccacttggtgctatgcgcccactggccgcacccagctggtgg

SEQ ID NO: 29542 - DNA, 169 bp, Oryza sativa
  Clone ID: PAT_MRT4530_34033C.1
agcaggttggacactgaggtgagccctagccctgtgggagatgggtggccactatcgagctgaagcagaggagcctctatgaggaggcatctgaggcctctgcgtggaagctactggatgagctctccctctctgatgagcgctgggaggaagtgaatgctttcatctt

SEQ ID NO: 29543 - DNA, 606 bp, Oryza sativa
  Clone ID: PAT_MRT4530_34034C.1
ggagaaaccgcctgggtagggaaagggagaagggtgatgaggaaatggagcccgtctcgatgaccgaaaagggagcccatcatcccccgtcttcccagctccgcgccgcaccgaggagcttgctgtcatccccttctccacactgccaagaaggtcacgaccctcggtgtgtttgattcttattctgtgatgaacaattggcatataagattattggttttaatatttggagattattggcaaagtgatttgcaggtgatgaacagatactgctagattgtcgggtccggtcaaactgggcaggtgctaccggtcagaccggccagcccacgatcatagaagtaataaagttgtgatctactttgagagttcttcgatttgtgtttgctcaggctcagcggtccaactggcaagaccgatggcgtcggactggttagaccggcaggttaacggcggtcagaccggcggcggctataggcgatggcggctgattacagcggtcagacagctggagtgactactacggttagaccaatggtgtccaggcggttagaccagcgcatttaccctagtcagaccacgtgtcatcgattcgagggtaacttt

SEQ ID NO: 29544 - DNA, 452 bp, Oryza sativa
  Clone ID: PAT_MRT4530_34035C.1
gattcattgtaccagtacccagtggtactggagggatatagtgattctaattggatctccaatggtcatgagataaatgccactagtggatataggtggtggtgcatgctgttttgttgaggtcttgcaaacagaccactttgacgaggttagctatggaagcaggctggcaacatgatctaatgatggatccgcttgtggttaaaaaacttgtgttgactatcctcataaattatgacaatcatactatcattgacaaggtgaagcgtttcaaggataacatgaaattgtctagatatatgaagagatgattgaagtctgttaggacattgagaaactccaaagttataatgtttgataagatccaaatattagaaaatggtagatcccttcaaaaagggactatcacggaatgtgacaatacaccaaaggatatgggtataaaagccata

SEQ ID NO: 29545 - DNA, 456 bp, Oryza sativa
  Clone ID: PAT_MRT4530_34036C.1
atggccggcgaagtgggggagcgcggtggcgccggccggaggtacggggcaggcccgacaggtggggcccacctgtcggtgacccggaaagagagggcgcgggcggtcggcttgctgggcctcggcctcgggccggcccagctaaggcgcacgggggaaagggggagggagcaggacgtcaccgtccacacactagaaggggaagggaggggagccctcgcccctagatccgccatctggtccaaggtcgcgccaccaccgtctggtgtcgtggtggcacctaatccggaggcccacactgggggctcgccgtcgcagcctttgccttgcaagctcagtgttgttttcctcgcgcaaagggcctccccggtggctcaacgggatggcagtggcgacctctccttcctctcctttgattggtttttgactaaacttattgatgaatgttcgatgtga

SEQ ID NO: 29546 - DNA, 320 bp, Oryza sativa
  Clone ID: PAT_MRT4530_34037C.1
acctcccaagccttccgaccaattaagccttccgcccaattaagggaagaagggggaattttccggaaacgccccgccttcctttggctttagcttccgccttgccgaagtgaataccggaagtagtttcccggtgattgggagcgagccggaagaacccgaggccccgtcgacggccccttcgcgaggtttcgatctggatcgtgcgcgctcgggttgggaaggagtgacaagcacgagctcggagcagttcgtcatgccgctgtacgccgcgtcgtccgccatctagagatccaagctacgtacgcgttaacgacggt

SEQ ID NO: 29547 - DNA, 418 bp, Oryza sativa
  Clone ID: PAT_MRT4530_34038C.1
ctcgtcacgatttctcctcggggtcctcttcgattcgtaagatatgatgagatttttgcttcatccgtgttgctcactttgcaactggtggcctgtgtgcgtaattgatcttttggatgctttccttccttgcaatggtgccatgagcattccttcatctaggaatcgtgatggtgatgatgtttcttgtttgatgattgatgtgctgctaattagatgatgtatgtccatatctcccaaccagaagataaggtaatgacctcggtaagctaatgcacatgtatgtgcatgttgtataatcatgttgtactatatactatgtatgatgtatctagatttagggtaggaaggcctttgccatgttgggtgcgctcgcttggcaggccacaagacaataaaaagatattttccttatgtt

SEQ ID NO: 29548 - DNA, 867 bp, Oryza sativa
  Clone ID: PAT_MRT4530_34039C.1
gcgcgcccccgggctgtccaccgccggccggggctgccgcgcccgtggccatggccgccccccccgcggcgccccccccccctcccccgccccccgcctcccctcctccggggcccctccgcgccgcgccctccggcgacgcgcgtgccccgcccgtcggccgcacgggcccacgcgtgccctccgtgcggtgtcgctcgggtggacgctttccggccgcgcagggctgccgtgggcttcccttcgtcgccggctcctgagcctcgcgctgttccgcgcccgacgcgcgaggtgcccccaagggggtatatccatgaccgacccgtcctttccatagcaagcacgaaccgacttgttttccaccgccaaccagggcagccacgccggtatatatggtcttccccctcgcccctcttcctctctctcttcgtctcgtcacgatttctcctcggggtcctcttcgattcgtaagatatgatgagatttttgcttcatccgtgttgctcactttgcgactggtggcctgtgtgcgtaattgatcttttgggtgtggagctgtaaccatgtacgatgatttcttcgttaatgtcctctacagcgagactcctaagattttcctactatgcacagatgctttccttccttgcaatggtgccatgagcattccttcatctaggaatcgtgatggtgatgatgtttcttgtttgatgattgatgtgctgctaattagatgatgtatgtccatatctcccaaccagaagataaggtaatgacctcggtaagctaatgcacatgtatgtgcatgttgtataatcatgttgtactatatactatgtatgatgtatctagatttagggtaggaaggcc

SEQ ID NO: 29549 - DNA, 204 bp, Oryza sativa
  Clone ID: PAT_MRT4530_3403C.1
atggcgcggggacgacatggggatgacaccgccgacggggagctgttcgaggtgccattgccgtacctcgtcctgaacatgcccgaggaggagttcggcttcgcaggcgatgatggcaggatcacgttgccgagctatgcttgggtgatggagcatgtcatgtgtctgcttaggagagatgtctctgaagaggtcgagagctag

SEQ ID NO: 29550 - DNA, 414 bp, Oryza sativa
  Clone ID: PAT_MRT4530_34040C.1
atgacgcctattagtcgtggtggcaacgtggccagccgtgaagacgaaagcatcggccagccgtgcaggcggaaacaccagcggaaacaccagtcggcggcggacgaggcggccggcggtgaagttgtagacgcccaacaacagcggcataataggccagccgtgcaggcggagacaccagtcggcggcggcgaaggcaagccggtcggtgaagacgtagacgcccaacaacggcggaaacaccagtcggcggcggcgaaggccagccggtcggtgaagacatggataccatcagcaacggcggcggagtacaccaaccatggaggcaaagacaccagtcggcggcaacagacgcaggccagcggtgaagtcgtagatgcccaacaacggcggcataacaggccagccgtgtag

SEQ ID NO: 29551 - DNA, 523 bp, Oryza sativa
  Clone ID: PAT_MRT4530_34041C.1
tcgtgtgcggcgcaggcgctgcctctcctcgccccgttgcgcggcgccggcgccggcgcctctcaccgcatccgcccgcgccgccgcctcctctcgccgcagatgtcgccgcagcctcctgtcgccgcagaagtcgccgccgccgccgcctcacgtcggatctgcacgtgccgtctcaccggatctgcgggcgccgcatccctttgttccccggtgccggcgcctcctcccttcctcccacggtgcacgacctcggcgcagccttctcttctccccacggcaagcaggtaatggagctactgatagccttgcagtaatgccttctgctcttgcacttacggagaatttggatttttgggactcttactttctgtttgtatgaaatgaatgtaattagttttcagtggcttatcctagctgattgtggtgatgaatatgatgtttaaatgagtaaatcatgtattgtgaatgggtgactgattgtggtggctgaatggatatgatgcaagcaatttttagaaca

SEQ ID NO: 29552 - DNA, 1026 bp, Oryza sativa
  Clone ID: PAT_MRT4530_34042C.1
atggcgaagaacgcatgcaagctctgctaccgccgcttcgctagcccacgcgccctcgcggggcacatgcggtctcactctgtggcggccgccaacgcagccgcggctgcggcggcggccgcagccgcgaagctgcagatctcatcggcgtcgtccgcgtcgacgtcgttcaccgcggccgatgaggaggaggaggaggaggaggaagaggaggacgtgggattcaagaagcccctttccatctacgcgctccgggagaatcccaagcgcagcctccgcgtctccgagtacgcgttctccgaccgcgagagcgaggccgagtccaccccgacgcccgcagccaagggcttacgcgccggcggcggcggcggcggcggcgatggcgagcccatgagctcgttgtcgtacgcgggaacgccggaggaggaggtggcgctggccctcatgatgctctcccgcgacacctggccgtccgtcgagcgcggtggcggcgggggcgagtactcggacgacgggagcgacgacggctacgcgctccctccgccgtctcccgctccggcgccggcgccggtgccggagaagcggacgcggttccagtgccccgcgtgcaagaaggtgttccggtcctaccaggcgctcggcggccaccgcgccagccacgtccgcggcggcaggggcggctgctgcgcgcctcccgtcgctcctccccctcagccgcatccgcagccgccattgccggagcacgacgcgggcgaggaagacatggacgggaaggcgccgccgcacgagtgcccctactgctaccgcgtgttcgcctccgggcaagctctgggcggccacaagaagtctcacgtctgctccgccgccgccgccgcggcccatgcacagacacccggcggcggcgctcctccgccccagcccaaaattctcggcatgatcgatctcaacttcgcgccgcccgtggatgaggtggagctctccgccgtgtcagatccccacttcccctccaatccaccaggtccttga

SEQ ID NO: 29553 - DNA, 1236 bp, Oryza sativa
  Clone ID: PAT_MRT4530_34043C.1
ctgcaggaattcggcacgagggttgagagaggaaatcccacagctccgaatctccgatccatggatgcggcgatggaggacgcggcggcccaatccgagagggaatgggacggcggcggcggcggcggcggcgccgacgcggtgctgggcctcgccggcgccggcgcctcgttgtcgctgtgctaccacgaggcgtttggtcctcacgatgagctcatcctcctcgaggccgccgacgacctcctccccgatctcctacaaggccgggtgactgtgaggggacgccctgaagaagaagctgttctctgcacaccctctgcaacatatgccatgaagtttgtgggcaactccaattctgtatttctgatacctcctggtgaatcagctgctccaaccttaagacccaatggcgccgatggtgatgataatgttgccagtgccactgatgctgtagcttctatcatcaaagtggcatcaggtaacattgaattggtccggacagctccacggcttgataaacttcggaaacttctcaatgagagaccctatgtgcttgatgaagatcttggcagtgatttgcaacaaaaggggctctacacatggcaggacctttgtgaacttgttcaggccagtgacggtgagctgacagaacaactgagttccatatcagctgttgagattgatgggttctggaggatggtcgatgacagttctgcgaacacgattctggacatgatccttcacaattccgatgtcatggaatctgatggttttatgcgcaagattgtaacccattgcctcaacagatttggaacaaaggttgacaaggaagcaagaggttgctggagccttgatgagaggagggtgtgcttgcagtttgctcggagagcgcttggtgcagggaagatgaagcttgagaacttcatgggtaaatgggagagaagcattccttcaggaatgcgcgctgatcttcagatgcttgaaggggaagtgctgtgtgaaaagcttggcgcggagacctgggtgcatgctttcagtgttgctgatctgccattggcaccagctgataggtttgctgcactattccaagagcggccaaagtgggaatggaaagacctgcagccttacatcagggatctgcgtgtacctggtgtctcttctgaaggactgcttatcaagtacaccagaaaaacgcaaccaagcgcagatgcagagcctatttttactgcaagataa

SEQ ID NO: 29554 - DNA, 640 bp, Oryza sativa
  Clone ID: PAT_MRT4530_34044C.1
acgcccctgggcgcggcggggcccgcaggtgaccatcctgtcgcaccacgcgcgtcggtggcttcctcacgcactgcgggtggaactcgctgctggaggccatcgcccgtggcgtgcccgtggcgacgtggccacacttcgccgaccagttcctgaacgagcggctcgccgtggacgtgctcggcgtcggcgtgccgatcggcgtgacggcgccggtgagcatgttgaacgaggagtacttgacagttgatcggggtgacgtcgcgcgggtggtgtcggtgctgatggacggcggcggcgaggaggccgaggagaggaggaggaaggccaaggagtacggtgagcaagctcgaagggccatggcgaaaggaggctcctcgtatgagaacgttatgcggctcattgcgaggttcacgcaaactggagtggaataggatatcgcgttaatctcacaatgagacgatgagcttgtaagattttcaactgcatactccatatagcaatttctaccgagtagtcgcttgctttgttcaggttcgttttccaccgaaatccggaaatttcggggtcaccgaaatcacagaaatttcaggaatatcggaacgcttttttgcctcgagactagttctctccctcgtgc

SEQ ID NO: 29555 - DNA, 345 bp, Oryza sativa
  Clone ID: PAT_MRT4530_34045C.1
atgactgtcgttagatgtaccacacgccaacgcctactagagggggagaggattcaatgcgacattcgtgggaaaaaaattttgggaagtaagggcccctttgattcgcagaataggaaaaacacaggaattgaaattgaagtagggctactagatgcatgtgtaattgtgtatactgttgaaaagccggaaaatgaaaggagaataaagaagcatggtcgtcttaggggcctaagtcggttgtgtgaccgtctagggcccaagttggtatgggacccatcaccaaccaaggtggtcacaccttacgttcaattcccacgtggtcacaccttatttcatcgtggc

SEQ ID NO: 29556 - DNA, 244 bp, Oryza sativa
  Clone ID: PAT_MRT4530_34046C.1
acacgcgatgggtggaacggatcaccgaaagatcccataaacagaaagtgggagttttcgttacaggttggtgataatcgtacccgatcatccaccaatgagttgcctactgacagccaattctatctgggacaatccctgaactggggctgggctatgtatccatgacaacctgttgttgtttgccagtttcagctgaccggtgggtcccccttataaaaatgctttgaggatgtcacaaaaa

SEQ ID NO: 29557 - DNA, 2022 bp, Oryza sativa
  Clone ID: PAT_MRT4530_34047C.1
atggcgccgtggagcggcttttgggccgccagcaggcccgccctcgccgccgccgccgccggcggcacgccggtcgtcgtcaagatggacaatcccaactggtccatctccgagatcgacgccgacggcggggagttcttggccggcggacggcggcgaggcaggggcaagaacgccaagcagatcacctgggggctgctgctcaaggcgcaccgcgccaacgaggccgccgcgcgccgccgcgttgccgccgggcggacggacgacgccgacgccgagacgccggcgccgcggtcccggctctacgcgttcatcagggcgtcgctcctgctgtccgtcttcctcctcgccgtcgagctcgccgcccacgccaacggccgtggacgcgtcctcgccgcctccgtcgactcgttccactcctcgtgggtgcgcttccgcgccgcctacgtcgccccgccgctccagctcctcgccgacgcctgcgtcgtgctcttcctcgtccagagcgccgaccgccttgtccagtgcctcggctgcctctacatccacctcaaccgcatcaagcctaaacccatctcctcgccggcggcggcggcggcggcattgcccgacctggaggaccccgacgccggcgactactaccccatggtgctcgtccagataccaatgtgcaacgagaaggaggtgtatcagcaatcgattgcggcggtctgcaatcttgattggccgaggtccaacatcttggtgcaagtgctagatgattccgatgatccaattacgcagtcattgatcaaggaagaggtggagaaatggcggcagaacggcgcgcgcattgtgtaccgccaccgcgtgctccgggaggggtacaaggccggcaacctcaagtcggcgatgagctgcagctatgtcaaggactatgagtatgtcgccatcttcgatgccgacttccagccataccctgacttcctcaagcgcaccgtgccgcattttaaggacaatgaggagttggggttggttcaggctagatggtcatttgtgaacaaggatgagaacctcttgacacggttgcagaacataaacctgtgcttccactttgaggtggagcagcaggtcaatggcatattcatcaacttctttgggttcaacggcacggctggcgtgtggaggatcaaggcgctggaggactcgggaggctggatggagcgtactacggtggaggacatggacattgcggtccgcgcacatctcaatggctggaagtttgtgttcctgaatgatgtggagtgccagtgtgaactaccagagtcttatgaggcttacaggaagcaacagcaccgctggcattcagggccaatgcagctgttcaggctatgtttaccggacatcattagatgcaagattgcattctggaagaaggccaatttgatatttctcttcttcctgcttcgcaagctcatcctgcccttctactccttcacacttttctgcatcatcctaccaatgacaatgtttatacctgaagctgagcttcctgactgggttgtctgctacattcctgccctgatgtccttccttaacattcttcccgcgccaaaatcattcccgttcatcatcccgtacctgctcttcgagaacaccatgtctgtcaccaagttcaatgcaatgatctccgggctgttccagctcggaagcgcatatgaatgggtagtgaccaagaaatcaggccgatcatcggagggtgatcttatcgcattggcacccaaggagctgaaacaacagaagatccttgatctcacagcaatcaaggagcagtccatgctgaagcaatcctctccaagaaatgaggccaagaagaaatacaaccggatatacaagaaggagcttgccctctcattgcttctcctgaccgccgcggctcgcagcttgctttcgaaacaagggatacacttctacttcctgatgtttcagggattgtcattcttgttggtcggcctggacctcataggtgaggatgtcaaataa

SEQ ID NO: 29558 - DNA, 315 bp, Oryza sativa
  unsure (1)..(315): unsure at all n locations
  Clone ID: PAT_MRT4530_34048C.1
gaagaactagatggttcgctgcacaccanttcatatttgatattgcacaggttcaaactatgaaggagtctggatggaagaagaggtacttattttcatctttcctccagaactcaatgttacaaccaatcggatcaattgctaagctatcatctccttgctgccatgtgggggacatccttaatgacactggccggtgctcaacttgggcttcttcgcacagtgaagacctgttaatacttatgttctcattcatgttcagatatcaataaatgctgctttgcacaatttcctgactaccagctacccttattt

SEQ ID NO: 29559 - DNA, 492 bp, Oryza sativa
  Clone ID: PAT_MRT4530_34049C.1
atggcgggtgtggtgaagaggcggccagtggccggcgggcgtgacggcgctccatgccccccctgtcgcggcagagggcggcgaagtggagggtggaggcggccgcccttccgcttcgagcccccggcggccgccgccatcaccgccaccgcgcccgagttcgtcgtcgtcgtcgtcgtcttcaacctggggccgtcgatctctctctctcacccctctctctcgggccgtcgggaggtcgacgcgcgggtcaacatggccgtggccgccgccattgccgccaccgcgcccaacctcgccgtcgtcatcttcagtgacctcggcgccggccgcccgtctcgcccttcccaccgcgcccgccgaagctcggggattacgacggcgatgacggcggaggaggcgaggtcagccgcggaggaggcgaggcggcggcgaggcaggcagaaaggcggcggcggcgacgaggcgagcgcgaggcagggcggaggggcg

SEQ ID NO: 29560 - DNA, 335 bp, Oryza sativa
  Clone ID: PAT_MRT4530_3404C.1
catgcaactgggggggtaataacaccgaccattaagcacacaatcaaggctgcctatggctcatacgaaacatagcataacgcaattctctacaataatcacaccctgtatttaaaacaagacaacattaatgagccacaataaccaattggaagacataaatccagaaacccctgtataaaagaagattaaagatcgaggtatacgtttaactaacatgactttggactgcacttgttttatgagtagtatgcaccggaacagcgtatgtccaaggtgcagaccaggctgacgtggcctatgccgattgtccctggaggcaagcgccagatgta

SEQ ID NO: 29561 - DNA, 471 bp, Oryza sativa
  Clone ID: PAT_MRT4530_34050C.1
ttttttttttttttttcttttttttttttttttttttttttttttttttttttttttttttttggaatctttcgaaatatcaaaaataacttttttggcactgaaaaaaccccatggatgctgctaactcacaatgatatgggggctaaaggaaatgtaccgttgctgcacaatacaaattttgggggatgtaaaactaacagggtccaacacaaatgaaaaatagcaggggattcacaagccgtagttaagctaaactgtcgaaaactttttttccggggaaaaactttggcagctgcctccacggttttttcgatgccctgggaggggtgtgccaagctgggaaaacctgcctaaaactgggatggggctaggtacacacctttttaaagcatgccccggtagaacctcccaaacttgggggtgtcactttttttggggtcaccaaagttgtgaactgggccagcggtg

SEQ ID NO: 29562 - DNA, 1764 bp, Oryza sativa
  Clone ID: PAT_MRT4530_34051C.1
atggccgccgctgggcacggccccgccggccgccgccgcagcggccccgccggccgccggcggaatgggagggcaggggaggaggaaggggagggaaggggaggaggagagctctgtggatcgaggataagttgcccattggtctccagtgaggagagagtgtttagggcgcagtcaagcttgtcctctgttcgagtaaattctgttgcaaatttttccttttctctttcatgtgcacatcgaagaagatggtggcgtttgcctccttcatccccaaggtgtctggcaatggataaacacatgttggaccttgctcgcatctattgtctagctggcgaccatatattggcgcctcctcgatatccccttcctcccctggcccttccccttcctccttcccctctctgctcccccttcctatccccgcttcctcctcctccttcccctctctactgcggccgggcggcggcgacggagcgaggtggcggcgacggagcgaggcggctgcgcggcggcggctggtggggccgcgactgtgcggcggcggcggagcgaggcggccgcgcggcggcggctgtcttagccttagattacacacgttccctgagttcgatatccttttggggtcactcgaaggtgaagtactacagcggtatttcgtgtgcttgcggatttatctgtggtcaacgagaaggaatctctcggtgcagcctaggccaggttctcactgttaattcaatctggcccagacttgtctttacccgaccatgtgttgctgcaacatttcggtacgggttagacaaggagtctgctacaaatctcgatatttccgtgggaggatcattcgcatacaagataaccgccgaaggaagagaactcttagatctgatcttagagaacgattctttcggccgaagcgaagtcgtcccggaggtcgagattatccatgaggaacctctgcatgtggagtcggaacccgactcaattgctgaatcctcatcccagtcgcaggagctggaggaagaagaaattcatccttcagaaattccattcgaattcgaggagaatcttttcaaattttgttggaacacctcaaattattcctgcgagaagagaccaccgaccaaggtcaattctgatgaacctctcgataaagctatgcttaaagagacggtgaagaagttgaccaccatcatgagtaacaaatggttgagggaaggagagctctcatctgaagcaactcagatccgttgcccctcctcaaccgttacgtatctcattggatgtaatttggttcgtgctctctattatccctctgttggtgccaatgttatgtccgcaacctttccatttgattgcttagggtatagaccgttagaaccaaccgtcaaaaccgttcgaatttccacaaactctactaccgaaggccatcccatagagaaactcttagatatgcccgaaactagtgtcctcgacctgaaagtaggaagaaacggcacctttgtctctgtgttgcaatcaaccaattctttgacagagcctcttcctattcccaagtcaattgaggaagtgatggccatttctccatttgagcccctagactctaatctcgatgaatccatcaaggaattcaatgaaggggatgatgaatatgaagaaacgattgatctaccaaaaatggatcagcagtcacgagccccaattgagctaaagcccttgcctccaggcctacgctatgcatttctgaacggcgattcggagccc

SEQ ID NO: 29563 - DNA, 598 bp, Oryza sativa
  Clone ID: PAT_MRT4530_34052C.1
tccggcgaacgcggaccatgcggaagtaccaccaccaaaggaaccaggtgttctacacccccggggcccgctctgtcaagccaggaatgggctacccgatgtacccgctcccgcgttccgggcgttggtgaagcagccagtgcggtcgccagtggcacgccagcacagccgccgagcaggtccggcgagactgctgccaggcaagcttctgccagccgtctgacgacagctggtgcaggtgtccgaggcagatcagccacaattgctgggaggcatcttacagggagcttcggcagcaccccagatgtcgggcaccccatgtcacgaggtgttccagcggctgccggagaggggacttggagcagcagcggcggcgagcactcaccggcgttctgcaacgtggacatcaccacaacggcggaggtggtgtctgctactggctggcgagatctggctactagctaggctacatgtagctagctgtgcatgtatgtggtgtggttactaaaataattagtgttttccttttgtttggaagcatatgtgtggtgaataaatgatgaactccgatgttcctctctataaaaaaaaaaaaaaa

SEQ ID NO: 29564 - DNA, 327 bp, Oryza sativa
  Clone ID: PAT_MRT4530_34053C.1
ggggcaccccatggtccgagtgtgttccgcaggctgccaggagaggggacttggagcgcgcgtgcaggcgagcacatcacacggcgttcttgcaaacggtggacatcaccacaacggcggaggtggtgtcatgctactggctggcgagatcatggcataactagcataggctactgtagctagctgtgcatgtatgtggtgtggttactaaaataattagtgttttccttttgtttggaagcatatgtgtggtgaataaatgatgaactccgatgttcctctctataaatcttgatgattcgctagctaaaaaaaaaaaaaaaaaaa

SEQ ID NO: 29565 - DNA, 642 bp, Oryza sativa
  Clone ID: PAT_MRT4530_34054C.1
atggccatgggaggcggtagcccggcggtgtgcggcggatcgggcgggcgacgaggcgacggtgctgtcgccgaagccgcggggtcgaaagctggagatggccggcgaggcgggcggcgtcttgttggggcggtggcgagattggcacgcgaggcgagcggcggcggcggaatgcgcgaggagaggaatgggaggaaaaagttagggttaaggatgtgcacgaatcttaaagcatatctaacggtccaaaatttgaaagattggagaataaaacgcccgtacgtttacatggacgtgagggtgttcgaggcaatgctccgttacatctacaaagattcgttgtcggagatgaacgataatgaagtggcagccatggcacagcgaacagccacgtcaacgccagcacagcatcactgtgatggcctcatggaggcttgcttggaattccttgagagctgtcctgttgatctggatttgatcttcgatgtttcaatgataagagcttcagagaacacttccagctttatccctgacaaaacaagaattttgtttctacttattaaaccggccaaataccgccaacaaaatgaacgcggccctgatcggggctcgctagttctaattgagcacaaaactgaaatc

SEQ ID NO: 29566 - DNA, 332 bp, Oryza sativa
  Clone ID: PAT_MRT4530_34055C.1
agcagtgggaaaacgagaatgaggagaaggcgccgcagccggcaagctcgatctcgtcgcgcgcgccgaccgtcgcgccattggagcgccagaagcgggcgggtggcagcatggcaaaggcttcgggagctcctcaaccaccgccgaggcgctccgcttcgtcgagcaccgccagcgcccatgccgccgcgcgcttcccttttgccatacttcccctcgtcctcgccggcggcgaccagtggagcgcttacgtggcagaaccagaaccagacgtgcgacctcccatttgggaggaaacatggaaccccgaaccctccatctccaccatctag

SEQ ID NO: 29567 - DNA, 453 bp, Oryza sativa
  Clone ID: PAT_MRT4530_34056C.1
tcccgcgtttccgcggggcattggttgaaagcgccaagtgccgttcaggccctggcacggccccccccccgacaggtcacaggcgagactgctgccgcaagctcccgcacagtcgacagacagctggtcgcaggtgcgaggcgatcaccacatgctgggaggcatctacagggagctcggcgcccccgatgtcgggcaccaccatgtccgaggtgttccagcggctgccaggagaggggacttggagcagcagcaggcggcagagcctccacggcgttctgcaacgtggacatcaccacaacggcggaggtggtgtctgctactggctggcgagatctggctactagctaggctactgtagctagctgtgcatgtatgtggtgtggttactaaaataattagtgttttccttttgtttggaaaaaaaaaaaaaaaaaaaaaaaaaaaaaaaaa

SEQ ID NO: 29568 - DNA, 396 bp, Oryza sativa
  unsure (1)..(396): unsure at all n locations
  Clone ID: PAT_MRT4530_34057C.1
ttttctgcaacaaaaatatggcttccaacaaggtagtgttctcagtgttgcttctcgccgtcgtctccgtgctcgcggcgacggcgaccatggcggagtaccaccaccaagaccaggtggtctacaccccgggcccgctctgtcagccaggaatgggctacccgatgtacccgctcccgcgttgccgggcgttggtgaagcgccagtgcgtcggccgtggcacggcgccgccgccgagcaggtccggcgagacttgcttgccggcagcttcgccgccgtcgacgacaagcttggtgcaaggtgcgaggcgatcaagccacaatgcttgggaggcatctacaaggggagctttgggcgnccccgattgtcgggcaccccatgttccgaggtgtttcc

SEQ ID NO: 29569 - DNA, 830 bp, Oryza sativa
  Clone ID: PAT_MRT4530_34058C.1
ccgttcttgagatcactttagtctttatagctatatatagaaaccacccatagatagctatccctctcataaacaaattgatagttaagattttctgcaacaaaaatatggcttccaacaaggtagtgttctcagtgttgcttctcgccgtcgtctccgtgctcgcggcgacggcgaccatggcggagtaccaccaccaagaccaggtggtctacaccccgggcccgctctgtcagccaggaatgggctacccgatgtacccgctcccgcgttgccgggcgttggtgaagcgccagtgcgtcggccgtggcacggccgccgccgccgagcaggtccggcgagactgctgccggcagctcgccgcccgtcgacgacagctggtgcaggtgcgaggcgatcagccacatgctgggaggcatctacagggagctcggcgcccccgatgtcgggcaccccatgtccgaggtgttccgcggctgccggagaggggacttggagcgcgcgcgcggcggagcctcccggcgttctgcaacgtggacatccccaacggcggaggtggtgtctgctactggctaggttatcctaggaccccgagaactggtcactaggctactgtagctagctgtgcatgtatgtatgtggtgtggttactaaaataattagtgttttccttttgtttggaagcatatatacatatggtgaataaatgatgaactccgatgttcctctctataaatcttgatgattcgctagctaaaaaaaaaaaaaaaaaaaactcgagggggggcccggtacccaattcgccctatagtgagtcgtattacaattgc

SEQ ID NO: 29570 - DNA, 853 bp, Oryza sativa
  Clone ID: PAT_MRT4530_34059C.1
tcgggcttacattacaggtcatgcaggcgtactggatagctttaggatcgccacatcaccatgctggtaggaaaaacaacgaacaccttgtaggcagggcatcacacaaaacaaacacctcaaatcttggtggggaatagaaatgaaaatcaaatacaagtggacgatggcgtgatgcgatgagggcaagcttgatgcatccagagaacggctagacgatggagacaactcctcctccctctgatgaccagaaaaaaacaggagcttgccactgctcatggagcccccacatcactcgaaaatcaagtcatgcgccgccagaccgactcctcgccttcgagaactccgtgccgacgccatcttctcgcaagctcgaggcgtccgcctcctgggcccatcggcctacaccaccacgctggggacgccgccagcaacctacttcaggtcgacgccgccgtgcgctcctcctcccttcgccagatccgatcgctgcacggcagctaccaccagatcggaaggcagcgtggagcttgtattgagtagacaggcgtcggaggatggagcggcgctgcagggcatcggtggggcggggagaggcggcgcgaggagggtgaggctgcgcagcgacacgggggctagggaactacgaccgatctcggccgttgctgtgagggatcggacggcgccggagccgctcgcgcggacgctcgagggggatttctatgagcagaataaactgcaacctctgaaccaggaacatgccaagttggaatccataccattgggaggtgtaaatggcacaggagttggatatggggcaaggggaaccggcattgctgtgccagctgcctga

SEQ ID NO: 29571 - DNA, 473 bp, Oryza sativa
  Clone ID: PAT_MRT4530_3405C.1
aaaaaaaggaagggaaaaaaagagaggaaaaaacaaggggaggaaaaggaagagggggaagggagacgccactgccaaaccctagccgagcaccccctcccctcctcctcccccatcggagcctcctcgcctcgccctcgcccaccaagcccccgcgcgcgcgcacgtgcatccggcgatgcggaagtcgaagcagccgcagccgcagccgtcgccggagatccggtaccggggcgtgcggaagcggccgtcggggaggtacgccgccgagatccgggacccggcgaagaagaccccgatctggctgggtaccttcgactccgccgaggtggcggcccgcgcctacgacgacgccgcccgatctctccgcgggcccaccgcgcggaccaacttccccttggccgcgccgtccgcgcccccgccccggccgccggcggcggcggcggcggccgccacgtccagccacagcagca

SEQ ID NO: 29572 - DNA, 828 bp, Oryza sativa
  Clone ID: PAT_MRT4530_34060C.1
ccggccgggataaacaaattgatagttaagattttctgcacccaaaaatatggcttccaccaagtagtgttctcaagtgttgcttctcgccgtcgtctccgtgctcgcggcgacggcgaccatggcggagttaccaccaccaagaccaggtggtctacaccccgggcccgctctgtcagccaggaatgggctacccgatgtacccgctcccgcgttgccgggcgttggtgaagcgccagtgcgtcggccgtggcacggccgccgccgccgagcaggtccggcgagactgctgccggcagctcgccgccgtcgacgacagctggtgcaggtgcgaggcgatcagccacatgctgggaggcatctacagggagctcggcgcccccgatgtcgggcacccccatgtccgaggtgttccgcggctgccggagaggggacttggagcgcgcggcggcgagcctcccggcgttctgcaacgtggacatccccaacggcggaggtggtgtctgctactggctggcgagatctggctactagctaggctactgtagctagctgtgcatgtatgtggtgtggttactaaaataattagtgttttccttttgtttggaagcatatgtgtggtgaataaatgatgaactccgatgttcctctctataaaaaaaaaaaaaaaaaagggcggccgcctctagcggaccatccgtttcgtttattcccaaacaagtcaaacgatatatttataaactaaaagtaatttatttttatatacgtgtccttaacgatcaaaatcaatgctgaaaataaatttcgatgaagaaaaaaaaaaaaaaa

SEQ ID NO: 29573 - DNA, 1204 bp, Oryza sativa
  Clone ID: PAT_MRT4530_34061C.1
ggccggccggggtttaccattcctcgaacaccatcatccacaaacacacaagtacatctcgatcgaagctagctagactagagcacgcacacgtacgatctcgtccatggcgggcgtcgctcgcatgctcgcggccgtggtctgcgcgatcatgccggcggcggcgatggcggccggcggcgtgggcgcgctggagccgagcgggtgggtgagggcgcacgcgacgttctacggcggcgcggacgcgtcgggaaccatgggcggggcgtgcgggtacggcaacctgtacgcgcaggggtacggcacgaggacggcggcgctcagcacggcgctgttcaacgacggcctcgcctgcgggcagtgctacaagctcgtctgcgaccgcaagacggaccggacgtggtgcaagccgggcgtctccgtcaccatcaccgccaccaacttctgcccgcccaactgggacctccccagcgacagcggcggctggtgcaacccgccgcgcccccacttcgacatggcccagcccgcctgggagaagatcggcatctaccgcggcggcatcatccccgtcatctaccaaagggttccttgcatgaagaagggcggggtgcggttcaccatcaacgggcacgactacttccagctggtgctgctgaccaacgtcggggcggccggctcgatcaaggccatggacgtgaagggctccaagtcgccggactggatggccatggcgcacaactggggcgcccagtggcactcgctggcctacctcaccggccagggcctctccttccgggtcaccatcaccgatggccagacgctcgtcttccccaacgtcgttcgccccggatggaggttcggccaaacgttcgcgagcaacatacagttcaagggcttcatgagagctctcatggtcctcgccccagtacaacttcacgtggatgcatggcggcagtggcggcacgtgacactggtggacatgctgcccgccgaatggaacgacaagagatgcacgtggttctttgctgagcccgacattaatgcgaagaagaagaagaagaagaagaagaagaagaagaagaagaagaagaagctccagcaagccggcaacgccgagacctgtggatctacgttgtcgatctatccccgaaggtggatacgaaaagcacaaaataaatttcctaagaggctaggactaccttag

SEQ ID NO: 29574 - DNA, 997 bp, Oryza sativa
  unsure (1)..(997): unsure at all n locations
  Clone ID: PAT_MRT4530_34062C.1
ctcccgctccttggctactgcattgcagggaaggagaagctcctgctgtacgagtacatggagaaaggcgacctccaccggtggctgcacgagcttccagcagggcggcccgacatggaggacgacaccggcggtgacatctgggaggtggcggaggacaagcggtccatctccgactggccgacccggcaccgacatcgcgctagggatcgcccgagggctcgcgttcctgcaccaagggtgggcagggtcgggtcggccggtcgtgcacggtcatctggtcccaaccaacatcctcctcggcgaagacctagagcctcggatatccgacttcgggccaccctagcgacacgacgccagagggggatgtgtacagcttcggcgtgctggtgctcgagctcataaccggccaagccggctgggacgaagcgtcagttagctgggcgcgggggatcatccgcgaccagaagggtctagacatcgtggacccgagagtgcgggacgaggcgggcggcgggccggagacgtcgacggtggagcgggagatggtggagtgcctgcgggtggggtactctgcaccgcgcagtcgccggagaagaggccgacgatgcagcaggtggtgggggtgctcaaggacatccgggtggcacctgccagcagctcatccacttgacggtggtggagcagcgccatcgtgtgtgtccgtcgcaattgggacccgccgtcgcctgagaagagatcccagtgtggcagcctttcctgatctggtagacaagccttggtggtcggtagtagaaacacatgtgcatgtaacaattttttctcgccggtaaaacagttggtttcagagccccttgtctctcttgtttttactttggtggatttattgcgttgggcaggaacatcaacagttttggtactgtatttaattgcaagccgccatgaggnntnccgtaaaaaaaaaaaaaaaaaaaaaaaaaaaaaaaaaaaaaaaaaa

SEQ ID NO: 29575 - DNA, 379 bp, Oryza sativa
  Clone ID: PAT_MRT4530_34063C.1
gggagggcaaggaaacaagggcaaacacaaatatgggggtccaaattcacaactcaaacgggagccgaaaggaccaaaccgggaaaaaaaaaaaaaaaaccccccttttttagccgaaacccccccaaaaaaccagggggcctttggccctggaggaagggatccgcaatgggggggggtgaccggggaagatgaaaaaaaaaaattaacccccatttaaccccctgcctgcccgggggggggtaaaaaaatggcctagggacctaaaaaggggacccggtggggggagttaatttgggggggaaatttgggaacggggcccgacaaggggggggaacgatcgatctacaggccctgctttacgagggagtcaccgggc

SEQ ID NO: 29576 - DNA, 358 bp, Oryza sativa
  Clone ID: PAT_MRT4530_34064C.1
gaagaatccgcaatataaaacctcaattattatgatttgtttctaaaaaaaccctatcaacaataacaacaacaaaatcaatatttgggctcgttctgctgcattccccatggctggctgcgcgttgtagacctgtacagtgttcttgtgtcaacaacaagcgaatgcataggcttgttccctgcagacgaagaaaccgccattttttggaggctgaccagtattctcattcccttccaccaaaacgacccaaaaattgaatattccctttatcatgagtacagaagggtttgccccgatttgacccagatgaaacttactgccatgtccgaataaacacgtgacacaaaacggggag

SEQ ID NO: 29577 - DNA, 360 bp, Oryza sativa
  Clone ID: PAT_MRT4530_34065C.1
tcgttctcatcgacatcactgacggctccaccgccatcaccatctccaactcccacttcaccaagcacgatcacgtgatgctgttcggtgcacgcgacgactcgccgaaggacaagatcatgcaggtaacgctggcattcaaccactttggcaaggggctcgtgcagaggatgccgaggtgcaggtttggattcttccacatggtgaacaacgactacacgcactggctcatgtacgccatcggcggcaacatgaacccgacgatcattagccaggggaacaggttcagggcaagcgacgacatgaagcttaaggaggtgaccaagagggagtccacgagctacgactagtacaaggagt

SEQ ID NO: 29578 - DNA, 143 bp, Oryza sativa
  Clone ID: PAT_MRT4530_34066C.1
cctaaccatacggtcagaaagtccagttcgcattgttccatgatcatatatgactgtctaactgatgagcatcgacactattgtcagggagtgtgggtggagaaatactaatgtgttatatttccaccatgacccatgctcca

SEQ ID NO: 29579 - DNA, 723 bp, Oryza sativa
  Clone ID: PAT_MRT4530_34067C.1
atggcactccagctcaagaaacaagatggatcagtaacagcagaagcaggacaagaagaaaggaagagaagaggcaactgttgtaaattggatcaggaggcgacggtggccgctcctctccctcccacccgcgggccgctgagcgctgctcccccccgtgcgccgccgctcctctcccgcccgcccgcccgccgcctccgcctgcgcaccacctctcctctccctcactcctcggtggcctgcggcagcggcacccatgtggacgagggcgttagtggagacactacggaaggcggcgctagggttgacccgcgcccggcggcgaagaagcccgcggaggaggagcccgtggcggagaaggccccggctgccgaggcggtgctcggggcaagcacgtggcggctcagcgcgaggcagaggtggagatccaagctaggaagcgagcgtgctgacggtggaggcaactgctctgcttgttggtgtgtggtgttgcggctggccggtgttgttgcttgctggtgtgtggaggtgctgcggctggcctgctatgagtgtcccatggctgccgcctcaccccccggtatctcctccgcgctgcggccgtcgtcgtcgtcctattggcccgccgacgacctggtcatcctgctcagcggggcggcgctttgccaccgccggcctccctgccccctcgccagcctcaccgagcgccgttcgtgccactga

SEQ ID NO: 29580 - DNA, 567 bp, Oryza sativa
  unsure (1)..(567): unsure at all n locations
  Clone ID: PAT_MRT4530_34068C.1
ggacggtggggtnntnntnntntnagagatnattcggacgtgctctttgtttgttttttttttttttcatcaaatgtatatatgtatatagctattctggcgaaaaacatttgagcatatatatatgtaacccttattatgcgcacacacacgcactgctataccaaagaaagagttaattaattgaacaacttagtccaataataataaaaaaagtgtgcgagtagtggggattgtaagtatatgtaaccacaacggtgcgagaaccgtccgattcctgacacgtgtcgtctcttctgaccgtcgatcttccgtggcagacagcgtggtccatgcgtatacgtggccgtgtgacgtgtccggttacacttccgcgcgcccccggtctcgagtggtcacggggcgtcgccgccgaactcgtcgtcgagcgcgccgngccgaggtcgaagcaggactccggcatgtcccgcgacacgacccggatcgggaagctcgncgcggcgccgcgcgccgtccagcctttgcggcggcgtcggcagcgtcggctcgtggtggtggtggtggtgg

SEQ ID NO: 29581 - DNA, 336 bp, Oryza sativa
  Clone ID: PAT_MRT4530_34069C.1
atgagggcaaagcttgctagcgtgctcgaggaaagtgaggcgacaatggttggagagccctcggaagcgacgagaaggatgggatccccgcggggaggtggagaaggagaggtgggagaggatgacaacaagggaagaccagttggtggtggttggggagacaaacgacaacaaagagggggtgccgaagtcttgtataggcttttgatcggcgtaccctactggcgtgtggcattgatgattgatgaaaagatccagttccttggagttggaacttggaatgtctactggagactcttaactactttctctgtattgtatataataccggattaa

SEQ ID NO: 29582 - DNA, 135 bp, Oryza sativa
  Clone ID: PAT_MRT4530_3406C.1
atggcgtgtagcggtgctgtgcagcgtggcttcttcaacagccttgccaggagtggtcgctactcatatacacaatttgtggaaaatctcagagctgcaaagaaagaaagagaaaactacttgatggggctgatc

SEQ ID NO: 29583 - DNA, 468 bp, Oryza sativa
  Clone ID: PAT_MRT4530_34070C.1
agagggaggggaatagaggaggagggatgcctcactgagagtggccggcgcggaggaggatgacggcgaacggcgacggcgagcgacgggaggacaacggcggcgggcggacgaggtccggaatgccctaagggaggaaatgagagaggttagagggagggagatgaaccacggcgatcggaaaccatggccgaaggcggaggacatggcggctctcaccgtcgcacggtgggaacggcgctctggcggcgaacctcgacggagcaggggtggacggggtggatctcggtcacgcgaacccgacggcgatgacggcgcggtgcggcggcgagtctagcggcggctagcggcggccggagtagcggaagcggcggtggcggatgggtgcacggcgcgggagcgatgaggagcacgagagagttcggcgagatggggaaaaagagagagggggtggcggcggagcttaaa

SEQ ID NO: 29584 - DNA, 364 bp, Oryza sativa
  unsure (1)..(364): unsure at all n locations
  Clone ID: PAT_MRT4530_34071C.1
agtctatttttgtaaagngtgagggagncacgttgagctcagagaggttggcaatctgtggcccctgctggaatgctgagggaggctcaaagcgtgagcagtgttgctggttggtcgctgacccaatgtgaattgctgccatgtggttgtgctgttgaccttgttggttgttcgcttggtgtgcagtataggcgatgtgcgggtggttgttcgttgctgcggcctcagaatatgatattatgagggtgacgctggtctatcgtgtatagtgagattcgtttctggatnttagggtaaatatgacactgttgaaagcctgaaatgcgtatgcacccgttttttctaaaaaaaaaaaaaaaaaaaa

SEQ ID NO: 29585 - DNA, 2310 bp, Oryza sativa
  Clone ID: PAT_MRT4530_34072C.1
atgatgagcccgtgcgattgcttcctccatgccaccgcgccgccgctgaatccgccgtcgagtctcgcggctgcggcgccgggagctcgctggagggatagcaacctctcgttccagagcagcgcagtgtctgcgccggcgagaaacgtcgagacttcccccaatttggtggttccatgtacggttcatacgcaggctgctgaaaggaagaagagtgggaggtgggtgaagtatggcgggtcgattccggcgatgctggaggcgcttgagcgtaatgaggatatcggggaggcgctccggccatggagggacacgatgagcaaccgggagaggacaatcattctcaaggagcagaaggattggaggagagcggttgaaattttcaactggtttcgcaggaggaggcgccatgaggtcaatgtgatacactacaatgttgttctctgcgcggttgggagggcgaggagatgggaccttgttgctaggctatggcatgagatgcattccggtggtgttgcgccggataattcgacgtatggcacgcttattgatgtgcactgcaaagggggcagagagaggatggcattgctttggcttggcgacatgatcaagcgtgggttgctgcctgatgagattactatgagtattgtgcttcaggtacacaagaaggctggggagtatgagaaagccgagcttttcttcaagagatggtccttggagtcagatgtaaagatgaaagggcatccttgctatagtttgtatacttacaacaccttgatcgatacttatggaaaggctgggcaacttgagaaagtatcagatacattcaatcagatgttaagagaaggtgtttcaccaaatgttgttacatttaacacaatgattcatgtttggggtaaacaccgtagaatggagcaagtagcttctctgatgagaacgatggaggagtttcagtgccttccggacactaggacgtataatattctgatctcgctatacagagaaatcaatgatattgatgttgcggagtactatttcaggaagatgaaagctgaaaatctgcttccagatgttgtgagctgccgcactctcttgtatggatactctatcaagggcatggtcactgaagcacaagctcttcttaaagaaatgtatgagaggaacatggtgattgatgaatacacacaatcagctgtgacgaggatgtatgtcgatgctgggatgcttgagcaagcgtggtgttggtttgagaagttcaattatcagttaaactctgagtgcttttctgcaaatattgatgcatttggggagagagggcatatactccttgcagagaaggcttttatgtgctgcataaaaaggaagatgctaagcacttgtgtttgtaatgttatgatcaaagcatatggtttagtagagaagcttgacgaggcttgtgagattgctgatggcatggagaggtatggcattttgcctgattacttgacttacagttctctgattcatctaatgtcaaccgctaaattgccagagaaagctctttactatttgagaaagatgcaggcagcaaaattgctgattgattgtgttccttattctgtggtaatcagttgctttgctaagaatggcaatttacacatggtcgactgcctgtttagagaaatgatcacttcagggatccaagctgatacttatgtttactctatcttaattgatgcatatgctgaagttggagatgtccagaaagctgaagcatattttggtttgttgaaaaaggctggtttatgtgagagtgctacaatatataattctttgataaagctctacacaaaggtagtgtatcttgcagaggcacagaaaacgtacaagcttctcaaatcattaaatgcagacaccaacctttatgcgtcaaactgcatgattgacctctatagtgaccattgtatggtgaaggaagcacgtgagatttttgagaatttgaaggttacaggaaaggcaaatgaattttcacatgcaatgatggtgtgcttgtacaagaaaattgctcgctttgatgaagcccacaggatttctaagaaaatgcaagcttcaggatttctaactcaggcattaagctacaactctgtgatacaaatgtatgtgtctggtggaagaatggaagatgcccttaaaatatttcagaagatgttggcatcgaacacaccaccaaatgatgcaacattcaaggcactaaagattattttagtgaaacgaggagtttcaaataatgatattagaaggctagattaccgcagggatgcagcttcttga

SEQ ID NO: 29586 - DNA, 174 bp, Oryza sativa
  Clone ID: PAT_MRT4530_34073C.1
atggaccccacatgggagcggatgggcaggtgggtgacggagcaggcgagccgcgcacgagctgctccttcgacggcagcggccgcgcgtcacgggcgactgcgccagcgcgctgtgtcctgctccgtctccggcgagccgcccaccagctcattcaacacatgcaagtactag

SEQ ID NO: 29587 - DNA, 1158 bp, Oryza sativa
  Clone ID: PAT_MRT4530_34074C.1
atggacacgggttaccaatacattgacagctattatttagagataaaagctgctggtctttcacttggaatggaacagcttaggtggaaggcgaagaaggcccccttccggggggtgattgtgatagctgtggttgggcatccgagtgcttcaaatggcatgttgtttcttagtgcttccctgcgatttagggactccgcaatattattatatcctgtcattctttccctattgaagagtggttcgattccacctcagaacgaccttcacgaaagtgaaaaatcttcgtcctaccaaaaccggatctttagtcaaatgattgttttcaggtgggttctcggcttcaaatcgaagtttttaataaagtgggctctgaaatctcaatatgccttgcctcacccgagagttacctctctgatctactatccaactgccatggaagcaccactgaagactggcttctccgaccttccacccgatcctgggcgatcccggatcgacaagccgacgtcaaacgatgtagaggaacgggcgtacctggaatcagcttaccattggaactatgcctacgcgacgccctcccctctcctgaagatattgagacacgacctgctccccttcgagtccaagtatcagaatagaggccgggtggggaagcaaaagatgcaagagagcctttttccgggaaggaagggacgggctgaatggaggaatggcgatatagttatccctggaggcggcggaccagtaatttcaagccccttggatcaatttttcattgatccattatttggtcttgatatgggtaacttttatttatcattcacaaatgaatccttgtctatggcggtaactgtcgttttggtgccatctttatttggagttgttacgaaaaagggcgggggaaagtcagtgccaaatgcatggcaatccttggtagagcttatttatgatttcgtgctgaacctggtaaacgaacaaataggtggaaatgttaaacaaaagtttttccctcgcatctcggtcacttttactttttcgttattttgtaatccccagggtatgataccctttagcttcacagtgacaagtcattttctcattactttggctctagcaggggttcgaatcttcttgatgcggattatccaagcttag

SEQ ID NO: 29588 - DNA, 273 bp, Oryza sativa
  Clone ID: PAT_MRT4530_34075C.1
atggcgagacagctctgcaatgtcggcttggtgctggctgatcgatgctgcatgcatgcatgcgttgcactgttgtatacattggttgaaaattatataagatttgaaacccctaattcatcgaaagatcaaaaaaggccagagacccggcttatgttgaaagctatgaaaaataatttgttggaggggccaggccactggccgtccttctgtctcagccaccgaccaagaaagaactacactttggatgatataggttgggattatctttaa

SEQ ID NO: 29589 - DNA, 333 bp, Oryza sativa
  Clone ID: PAT_MRT4530_34076C.1
gtttttcgcattggacgtggagagcatgaaagggggattttttagagtgatgcggaaaaataatatccccaatctcatcatgctttcacacacccgcatcagtcttctcaaactgcaacccgagctacacatctgcagcgccggcgaccaacctgtcctgctgcgggagcggcagctgacatccacaatgcctgcgacagaacaagccgccttgcccctgcgccggctactccgtgtggacggcctcgtccacccctacacttgctcccaccggcttaagccttgggatctctatccacatctactgtcatcctgcgaacgccatccaatctt

SEQ ID NO: 29590 - DNA, 462 bp, Oryza sativa
  Clone ID: PAT_MRT4530_34077C.1
atggtgataaaatttcaccatccccgccccgtcaaccataacggggctacatttctccagtcccgatcaccacgtggtgaatttatccccgtggttacagcggacgacgtggcagcggacggcgtgctggcgagtggcgatggagggcgttggtggctcccggcggcgcgacgacagccgcaggcgctgcgcggcgcgacaccggcgctctcggcggtgctctcggcagcgagtcgacggagggacgggacaacacccgtgcctgtgccacgcaagaggaggcggcggcgtgcgcgtttcgagcagtggtgctcctggtggctagggagtggcagtgcacggcggtgtgcctggtggctggcagagtggcgaactggcgatgcacgcaggtgcagcgccgcaaccgagagcaggaggactggaggagagactggatctgaggatttggattatggagtttga

SEQ ID NO: 29591 - DNA, 157 bp, Oryza sativa
  Clone ID: PAT_MRT4530_34078C.1
cgcggatctggaggaaggggctgttacaaaatggatcagagcccgaccctccgggttgcgcgtacggttcagtgtgcgggcatatggggcatgggcaatgtgcgcactgtgtgacgcacaaggcatggaatatggcatcgacactggacgtacggat

SEQ ID NO: 29592 - DNA, 759 bp, Oryza sativa
  Clone ID: PAT_MRT4530_34079C.1
aaccaccaccacaacctccaatcaagcctaagccttgcctcctggccctcaaaatgttattctcgacggttgtcaagaaacaacctggatcttgcatgatgcatctcttgggaaggagaaccttcaggccatggacaaggttgagacatcgactctggaggacgagagaaaacattccacaaatgagtatgaaagtttctctttcaaaactccccaggattcatgctcacataaggaatctccaaagtcctgtatgattagtgcagctttcttgtgcggggaccataaccaccttacggtcctcatttctaacatgtttagaagggtggttgtggatgcttatgtttatcataaatactgcaaatatcatatatgtatgtggtactaatcttgcagcacaatgtctccatggtcgaacttgtgaccataaacaaagcactgctgggaggtagttcgtattatcatgttggcacttgcacatttgtccaaaaaagaagcatcctacgtatttatagcattgcgctagcagatcatgtctccaaggcataaggttcttgctcctgaggaaatagaatgacaaccaaggggcagtgtacaattacgtcgcaccgtcgttcgccggcgagcatgcgcgcccgagccgcctgagtcgccgccagtgctgacgtcatcgctaacgttgtcgctgacgtcatcgttgccgttccccgtggaccggtcgtggaccgattgatctcggccgtccgttttggatcaagt

SEQ ID NO: 29593 - DNA, 460 bp, Oryza sativa
  Clone ID: PAT_MRT4530_3407C.1
ggcggaaaaccggcagtttcgttaaactaaaccaaaacaggggagagggatcccaaagagaaagcccttgcattacaaacagaaacagggtaccttgaaaaacaaaaaaaaaggcctttcccgcaaaaaattcaaaaaaaaattcaatgccacccccctggaaaaaaccccactggggcgggagcaaaaaacatcgggggaaaaaccaaaaaaaatcgatatgggcaacaaaaaaaccaccggaatggccaaaaaacccccgctatttcgacccctagtaaaaaaacaaaattaaaaaatatggcccgcagccttaaaaaaaaggcaagccccacggcttttatttgaaggccatggaaccacgtaactggaattttttccttaaacttccaggcccagaaaaagcaaaaccaagggttggcccctgcccccccatgcaaaaaacgaggcaaagggctcc

SEQ ID NO: 29594 - DNA, 1638 bp, Oryza sativa
  Clone ID: PAT_MRT4530_34080C.1
ggcgggaagcagcagaagttggtgctcgacgccgccgacgacgggttgcacctcgccggcgtgggcgggaagcagcacaacttggtggtcgacgccggcgcgggcgggaagcagcagaagttggtgctcgacgccgccgacgacgggttgcacctcgccggcgtgggcgggaagaagcacaacttggtgcttgacgccgcccccgacggattgcacctcgccggcgtgggcgggaagcagcacaacttggtgctcgacgccggcacgggcaggaagcagcagaagttggtgctcgaggacgacgggttgcaccacaccggcgcaggcaggaagcagcagaagttggtgctcgacgccgccaacgacgggttgcacctcgccggcgtgggcgggaagcagcacaacttggtgctcgacgccgccgacgacgggttgcacctcgccggtgtaggcgggaagcagcacaacttggtggtcgacgccggcgcgggcgcgaagcagcagaagttggtgctcgacgccgccgacgacgggttgcacctcgccggcgtgggcgggaagcagcacaacttggtgctcgacgccggcgcaggcgggaagcagcagaagttggtgctcgacgccgccgacgacgggttgcacctcgccggtgtgggctggaagcagcacaacttggtgctcgacgccggcgcgggcgggaagcagcagaagttggtgctcgacaccgccgtcgacgtgtcgcagcacaccgtcgggggcgcggagcagaacttgctgctcgacagcactgatgacgggttgcaccacaccggcgcaggcggggagcagaacttggtgatcgatgacgacatcgacgggtcgaaccacaccgtcgggggcgcggagcaagacgatgggttgcaccccaccggcgctggctgggagcagaacttggtgctctgcaccgacgtcgacgggttgctccacaccggcgcgggcggggagcagaacatggtctgcgacaacgttggcaccatcgtctccgggttgcacgacactatcgcgcgttgggagaggaacttggtgttcgacgacgtcggtacagccgttccctggttgcgccacaccggcgttgatgggaagcagaacttggtgtaccacctcgccacggccaccgtgcagagcgtgtggcgggagaattgcatggagcagttcaagctcgtgctggaagcgcttcatcaacctcatcgccacctctatatcgccgtcgacatggagttcgcagcggacgccgccaccaacatgggcctcacatttgcattcgtcggtgaaggcgaacaagctccctcgccgctgatagcactggagatcaacttcgacttcaacgtcaattcgccaaagtaccatggcaagtcgatagatttcctatccagtcaaggccatgatctcacgcagcacagcaaaagaggcgtcgcgccggagtttgtttacgaggggctcctgcgccacctcccgttcggcgacggctccgtcacctgggtcgcctttcacggcgactatgacttggctttcctcctccgcttgctgcaagggggagaccatggcggcaattgcctcctgccgcctaagcttgagtattctatagtgtcacctaaatag

SEQ ID NO: 29595 - DNA, 571 bp, Oryza sativa
  Clone ID: PAT_MRT4530_34081C.1
ctctctctctctcgatctatctcctgtatcgggcatgttcgtggaggttgatgtcatggccggcgcgacggagctggacatggaggcggcggagcagctcatccagctgagcggttgctgcagcggcgacggcggcgggggcgagtcggagagcaggagcacggacagcgtgagcaagaataatcgctgcggcaagaaggcggcgaccggccgcaaggcggcggctgcggccgtggagagctgcagcaggaagagagccgcggctgccggcgacatcgacgaggtggttatcggtggggaggcgaggcggaggcccaggttccggtcgctggcggcggtgtacagggagacgaggagaccgaacgaccacgtcgtcgtcgtcgtcgccggggcggccgaggaggatggcgagaggacgacgacgacgacgacgacgaagagggcggcgaacgacgcggcggtggccggcaagggaagaagaacacaagttcacaacattgggggaaagagaggcctaagctacgcagacacgactttcccggttgaacgtaaatacacgcgcatacgttaa

SEQ ID NO: 29596 - DNA, 1312 bp, Oryza sativa
  Clone ID: PAT_MRT4530_34082C.1
atggtctgcggcaacgtcagcaccgtcgtccccatgttgcagcacaccagcatggccagggagcagaagttggtgctcgacgccgacgccgacgacgacgggttgcaccacaccggcgcaggcgggaagcagcagaagttggtgctcgacgccgccgccgacgggttgcacctcaccggcgtgggcgggaagcagcacaacttggtgctcgacgccggcgcgggcgggaagcagcagaaattggtgctcgacgccgccgacgacgggttgcacctcgccggcgtgggcgggaagcagcacaacttggtgctcgacgctggcacgggcaggaagcagcagaagttggtgctcgacgccgacgacgacgggttgcacctcgccggcgtgggcggaaagcagcacaacttggtgctcgacgccgccgacgacgggttgcacctccccggcgtgggcgggaagcagcacaacttggtggtcgacgctggcgcgggcgggaagcagcagaaattggtgctcgacgacgccgacgatgggttgcacctcgccggcgtgggcgggaagcagcacaacttggtggtcgacgccggcgcgggcgggaagcagcagaagttggtgctcgacgccaccgacgacaggttgcacctcgccggcgtgggcgagaagcagcacaacttggtgcttgacgccgccaccgacggattgcacctcgccggcgtgggcgggaagcagcacaacttggtgctcgacgccggcacgggcaggaagcagcagaagttggcgctcgacgccgacgacgatgggttgcaccacaccggcgcaggcgggaagcagcagaagttggtgctcgacgccgccgacgacgggttgcacctcgccggcgtgggcgggaagcagcacaacttggtgctcgatgccgccgacgacgggttgcacctcaccggcgtgggcgggaagcagcacaacttggtgctcgacgccggcgcggacgggaagcagcagaaattggtgctcgacgccgccgacgacgggttgcacttcgccggcgtgggcgggaagcagcacaacttggtggtcgacgccggcgcgggcgggaagcagccgaagttggtgctcgacgccaccgacgacgggttgcacctcgccggcgtgggcgagaagcagcacaacttggtgcttgacgccgccaccgacggattgctcctcgccggcgcgggcgggaagcagcacaacttggtgctcgacgccggcccgggcaggaaagcagcaaaagttggtgctcgacgccgacgacgatgggttgcaccacaccggc

SEQ ID NO: 29597 - DNA, 1927 bp, Oryza sativa
  Clone ID: PAT_MRT4530_34083C.1
gcgggaagcagcagaagtggtgctcgacgccgccgacgacgggttgcacctcgccggcgtgggcgggaagcagcacaacttggtggtcgacgccggcgcgggcgggaagcagcagaagttggtgctcgacgccgccgacgacgggttgcacctcgccggcgtgggcgggaagaagcacaacttggtgcttgacgccgcccccgacggattgcacctcgccggcgtgggcgggaagcagcacaacttggtgctcgacgccggcacgggcaggaagcagcagaagttggtgctcgaggacgacgggttgcaccacaccggcgcaggcaggaagcagcagaagttggtgctcgacgccgccaacgacgggttgcacctcgccggcgtgggcgggaagcagcacaacttggtgctcgacgccgccgacgacgggttgcacctcgccggtgtaggcgggaagcagcacaacttggtggtcgacgccggcgcgggcgcgaagcagcagaagttggtgctcgacgccgccgacgacgggttgcacctcgccggcgtgggcgggaagcagcacaacttggtgctcgacgccggcgcaggcgggaagcagcagaagttggtgctcgacgccgccgacgacgggttgcacctcgccggcggggagcagaacttggtgatcgatgacgacatcgacgggtcgaaccacaccgtcgggggcgcggagcaagacgatgggttgcacaccaccggcgctggctgggagcagaacttggtgctctgcaccgacgtcgacgggttgctccacaccggcgcgggcggggagcagaacatggtctgcgacaacgttggcaccatcgtctccgggttgcacgacactatcgcgcgttgggagaggaacttggtgttcgacgacgtcggtacagccgttccctggttgcgccacaccggcgttgatgggaagcagaacttggtgtaccacctcgccacggccaccgtgcagagcgtgtggcgggagaattgcatggagcagttcaagctcgtgctggaagcgcttcatcaacctcatcgccacctctatatcgccgtcgacatggagttcgcagcggacgccgccaccaacgtgagccataggccagtaacctccatcagctgctaccaacacatgcgcaggtacgtgaacggaggtggcatttttcagatgggcctcacatttgcattcgtcggtgaaggcgaacaagctccctcgccgctgatagcactggagatcaacttcgacttcaacgtcaattcgccaaagtaccatggcaagtcgatagatttcctatccagtcaaggccatgatctcacgcagcacagcaaaagaggcgtcgcgccggagtttgtttacgaggggctcctgcgccacctcccgttcggcgacggctccgtcacctgggtcgcctttcacggcgactatgacttggctttcctcctccgcttgctgcaagggggagaccatggcggcaattgcctcctgccgcctaagcttgccaccttcctgcaaaaagtgcgggagaagttcccagtcgtctacgacgtgcgcgtccttgggaagctggtgaaggatggcttcaatgggagcctcaccgcactagctgaataccttggaattccgcgtaacggcgacgaacaccacgccggctccgacgcgctgcttacattgtcctgtttcttcaagatcgtcagcctttcaggtcaccagatgcaccgcatggatgctcggcggggattgcttgctgggttggaggagtggaacatggctatcaaatgtgcacgccatattgacaaccatactggaagcatctacgttgtcaagatgctaccacataagttggatgaagaggcaagacgaattgaagagctggtggccagcaacttcaacatcgttggagtagag

SEQ ID NO: 29598 - DNA, 928 bp, Oryza sativa
  Clone ID: PAT_MRT4530_34084C.1
atggggaggggcaagatcgagatcaagcggatcgagaacgcgaccaacaggcaggtgacctactcgaagcgccgcacggggatcatgaagaaggccagggagctcaccgtgctctgcgacgcccaggtcgccatcatcatgttctcctccaccggcaacatcaaggggatctttgaccgctaccagcaagccatcggcaccagcctttggatcgagcagcaaaggatgggagaagatctggacgggctggagttcgacgagctgcgcggtcttgagcaaaatgtcgatgccgccctcaaggagtatcatgtgatcaccacacagactgaaacctacaagaaaaaggtgaagcactcctacgaggcgtacgagactctgcagcaggagctggggttgcgcgaggagccggcgttcgggttcgtggacaacaccggcggcgggtgggacggcggcgccggcgccggcgcggcggcggacatgttcgccttccgcgtggtgcccagccagcccaacctgcacggcatggcctacggcggcaaccacgacctgcgcctcggttgatatataattgcgaccgccgcccccgccgccggcggcctgcttgtttccggccggccggcccccggacaccggatcatcgctcgatttagataacaagccggcgaataaattccagtgctcgtgttacttaccggcatgggcatgcattactatcgatcaacccaagaacttcatttcatttaccaaaccccttgatgtgtgcaatgatccagcggttaaaccgtgtgttgtctcttgacattttggaccagttactaataatgttgtattatgtatgcgtggtgtccaactgtgcttggaaaatttcccccttatttgccaaaaaaaaaaaaaaaaaaaaaaaaaaacaaaaaaaaaaaaaaaacca

SEQ ID NO: 29599 - DNA, 1512 bp, Oryza sativa
  Clone ID: PAT_MRT4530_34085C.1
atgaagttggtccagcttgtttgttgttcgggctctttggcctcgcttgtgcttcaagtgccctgtgtcttagtgaaccggttcggtgacatcgacacctacgggtgccgtatcctccttggaggtgtcgtcttgataggttacgttgaggacaacaagggttacgtcgaggaggaatccgcccatgctcaaccagtagctatgtacgccaacaagaagatggcttcttctacttctaaccccatctccatctccatctccctcgcctccctcctcgccgcgcgcctccgcctccgcccccatctcgccggagcgccgccgcggtccgatcccgatccgcccgaggaagcgggatcagatcgcggatcaagggagtacagaaaaaaaaagcctgatcccttcctcaattcgccgcgctgcaggtgcccgacgatgcagccgccgatggggaacgacaggccgccgcagggggtgcccgggaggcccgtctccgccttcgtgcccggcgccgccaccgccgccccgccgccctcgtcgttcggcgctgcttccgccccgcgcgcgccgttcgtgccgcccccgcaggctgctgcgtcccccgcggcgccgttcgcggccgcgccacctgcggcaatggctgggtacaggggtcccccgcctccccagcgccccttcggcgctggaccgccccagcagggccccttcgccgccgcggcaccacccccgcagggccccttcaccagtgcaccgtcctctcagggtcccttcgccgcagcgccgcagccaccgtctcagggcccctttggcaccgcgccgccgccgtctcagggcccattcggcaccgcgccgccgccgtctcagggcccattcggcaccgcgccaccgccgtctcagggcccctttgccgccagcgtgccgccgtctcagggcccttttgcatccgcacagccgccttttcgccctccgccttcgctcgtgcagtcacctacagcgagtggtatggctccaccctcggcgtatgtgaggccaccaccgccagtacaatcacagcccccgcccatgcaaggtttttacggtggtccgcctcctgcaaaccaacagttcccgatgtcacgaccaacatttcagcagccagtgcagaccatgccgccccctcctatggcgggttttggcaatcaggcggcatatgcgactggggggcctcctacagggggcaccctccagagcttagtggaggacttccagtcgctctcggttagttctgcaccaggatcgcttgatcctggtgtcgacgtcaaagggctgccaaggccattggatggtgacgaggaaccaactaagggtttggaggcatatccattgaactgccacccgaggtacttccggctgacaacccatgcaattccagcatcccagtcgttggtctcaaagtggcatctgcctcttggggctgtgaaggttcccggtattaactttgggtcagctggtgtcaatccgttgcccaagatgtag

SEQ ID NO: 29600 - DNA, 335 bp, Oryza sativa
  Clone ID: PAT_MRT4530_34087C.1
tttttcctccgctggtgccccggctatcacgagggtgtgaccacgctgcatttggccatgtctcgcacgaaggtggggctatgcacgacgtacacacaggggcagctgaggcgacctacgcacatgctaagactgccatgcccggtcttggacggggcattcagtccaaccatgcaggggtcctaagggatgcttgatgggctctctaaggtgatgcagacggccatacacagatgctacagcccgtgaacgctgctgatgagtgcatcccctcctcgaggacatgctgaacaccatgtgagcaccccgcggtagaacccgttcttgcaccagct

SEQ ID NO: 29601 - DNA, 1131 bp, Oryza sativa
  Clone ID: PAT_MRT4530_34088C.1
atgcggcatcatcgcgtccaacaaccgcgggttcaaactctgtgtgttgccaaggaacaggatgcagcgacaacatcagatcggttcgtaggatatgttggaactaatccaaacgagtcgtccgtgctacacctcttggaagactacgaatcctcttcggagtcaccacgagatgtaaacatggtcggcaacactgagacgagtacgtccgcagcagcgagaacgcccgctcagcagttacgaaccctgcatgcgatattgagtgaaagtccttttgatccggtgataaacccagacgtcgaccaatgggcggcgcgactgcgggagaccgtgaccaacctcaatgcctgtgggatacacgacgcagcagttgagccatcgccaggtgatccgcccgaggagacggtgaaccatccgtcgacaacgcggagggagaaaaccccaccggaggacgaccttccggaaaccgatcacctcggccgaggcgagatcctactccaccacgtcacgagaaatgcgatcttcgcgaacacttggacaaccgctggagagacagaagagatcgcgacaataacgatcgtcatcgacatcgttctccttctctcagcagggataacactactcactgacgacaccgtcaccgctctccttcgcgacgaggaaggaacgatggtcgaggaggcgcccctaacgaagatcgagaccggtgggcccctagtgaccgccgcaacgacatcaataacgacaaccaacgagatcagggggctaatcgccgagatcgaaattcccaatctcccgaccccggtcgagatcgaggacacaatcgtcgttcgagaagccgggcccctgagccaagcgactcctcatcctcatcttcgtcatcttcttcgtcggatcggcctccccgacgacgtcatgaccgcgggctgccttccatcccagggagtcagtgcagagcattcacacccgcactccgggatgtgcgatggcccgagaagttccaaccaggcgcaatcgagaaatacgatggaagcacagacccagaagaatttccgcaagtctactccacaatcctctatactgcggatgcagacgataacgcgctggcaaactatctgccggctgcgttaa

SEQ ID NO: 29602 - DNA, 564 bp, Oryza sativa
  Clone ID: PAT_MRT4530_34089C.1
gggaagcaaaccccaaaaaaaaactttgttttttccacccccggcaaaaaaacaaaaatccctttttttgggggaacaaaagggaaaaaaatttaggggaatggccccccccgggggggaaacaagaaaaaaaccctggggaacaggtggctcaggggccccacaacccaaacatagggaaccttctaaaaaaacccaaaaaggttttttggggggcccccaaaaaaaaatggggggggaaaaaacgcaagggcccggccctttaccccgaaaaaaaggggtaacaaaccggccggccaaaatctttagctttaggggaccccccccaaggaaaacaacccccccccccccgtaaaaccccccagggggccaaaaaccccgggaaccgggggggggggggggaggggtaccggggccccctcaccgggggaaaaaaacccaaaggggcaaacgccggggggcctccaacccccatgggggggggggggtaaaaatcctttggggggggagccaaaccctcctttgggggggggggaaaggactcctgtttcggggggggggggg

SEQ ID NO: 29603 - DNA, 1645 bp, Oryza sativa
  Clone ID: PAT_MRT4530_3408C.1
tctttcgatacgatacattcggacggtgagggaggcgagtggagtgcgtgtcgacgtgtcctactcatccacgccacgtaaccaattccatctccggccgccgccgatggcctcgcgctcccggtggtcggcgctggcggcgagcgcgctcatccagtgcttcgcggggagctcctactgcttcgccgtctactccccggcgctcaaggcctcccagtcctacgaccagtccgccctcgacaaggtcgccttcttcaaggacgtcggcgccaacgccggcatcctctccggcctcctcgccgcatgggcccccgccggccgccgccgcccctggctcgtcctcctcgccggcgccgccctctgcgccgtcggctacctccccatctggctcgccgtcacgggggtcgccccggcgccgctccctctcctctgcctctacatgctgctcgccgcgcaggcgcagaccttcctcaacaccgccgatgtcgtcaccgccgtcgagaatttccccgatcgacgaggcaccgtcatcggcatcatgaagggctttctgggattaagtggagcaatactggtccaagtataccgcaccatccacattgctcccagcactttcatactgatgttggcgatattgcccactgccatcaccctgctgcttatgtattttgtcgatgtccaccgttctgatcatcaacggtacaacaagaagttcatggatgctttctccctcattgccattactgttgctggttatctaatgatcatcataatctgtgaccaagtattgaagataataagttcagctgtgcagactgtttgctttgtgatactcctactgttggtcctgtctccagtggctattgctgtgaaggcccagaagacagaatcaatgaagcaagaagaagaaaccagggatcaagctgaaagaatcggactactccaagagcaaattagtacaaatgccagctccagtagcgatgagcgatgtcaagaactgtcgacaggcaaagaaaacatgaatctggtgcaggcaatgtgcaagctgaacttctggctgctgttcctagcaatgtcctgtgggatgggatcagggcttgcaacggtgaacaacatcagccagatcggcggctccctcgggtactcgaccaaggagacgagcacactggtgtcactctggagcatctggaacttctcagggaggtttggtgccggctacatatccgaccacttcctccgttcgcggggagtcggtcgccctttcttcatcggcgtcacgctcctggtcatgagcttgggccacgccatcatcgcctccggcatcctggcgtcgctctacgtcgggtcggtgctcgtcggtctttgctatgggtgtcagtgggcactgatgccgagcatcacgtcggagatattcgggctgaaccatttcggcaccatcttcaacgtggtggcggtggcgagccccgtgggatcttacatcctctcgatgacatgcaaacaacgagaggatgtccccttgagggatgaaaattcacatctgccaaggccctgtaatagagctaggctatctggggaggccaaatccggcgacggcggcggtgggactactgatgtctggaactaccgtcgacacccaaatttataa

SEQ ID NO: 29604 - DNA, 248 bp, Oryza sativa
  Clone ID: PAT_MRT4530_34090C.1
ttaattttcttacccgcgttccaagagactagagtggggccagattaactatatggggccacatttgcaaggaactacatattataatgctttttgtgtgcactcatatcctatcgatgttcataactctttagatcgaattcttgaaaaccttcatgattgctattttcttctacatctatatgattatcttgaataaaatcatgattattagataattcttattgtttatgatgacaatcacttta

SEQ ID NO: 29605 - DNA, 258 bp, Oryza sativa
  Clone ID: PAT_MRT4530_34091C.1
aacagggaaacccgatacgtttgctatttctgtagaaaattaccaagaccacaccgtccatacaagctacaggaccgaccaaacacttatattattcacgtgaattgtgtacagaatgattcaaagtccctagacttattttttataccgaaatgagggctttaggaaggaatgtgtcagtccacgcagaattccccgttacacagtgcgcggccacgttaaaatggaaccagttcggatacaactgggcccgaaaac

SEQ ID NO: 29606 - DNA, 427 bp, Oryza sativa
  unsure (1)..(427): unsure at all n locations
  Clone ID: PAT_MRT4530_34092C.1
gaacgacgtctacaacctacaggtagttgtcgctgccacgttcatggttgctatggtgcgcttgccggtgtccctctccaagccggagatggtggagctctcgctggcgaggagaggtactccgacgccgacacgacagcgccgaactcgagccttagctcggcggcgagcagcacgaggagcctcgcgtggtgctcgagcctgttgcagctatccttcgactgctcgccgtcggccgctgtggcggcgacatcgtgctagccgccactggcgtcggtgttgttccggggcggcgacatcgngctagccgcataggtccggggatgtcgcgtgggccggaatccgcgcggcgtngatgaccttcgcggtggcactcaggtcgggggacttgtgcgacgcatggggagcggcgacatgttctcgatgg

SEQ ID NO: 29607 - DNA, 398 bp, Oryza sativa
  Clone ID: PAT_MRT4530_34093C.1
gagagaactaagaaaaaatcgtatgccttataatctcaagcagaggagtcatccggttcaactggcctttcttagtgaccattgacataagcataacgcggctggctggctaatatgctaagctcattcagaccctctctgcccagatacgctgatatcgctgctgtctggaaggtcacaaagaagctgggggtttgaattgagtagacagattgccatacgcctgaactgctgagagagcgtacaagtagtgagatggtgaacatgcggcttgtcacaattactaagcggcatgagcactttagatacgctcggatgccgaagaggtacacggagcatgcctgtgctgttcgtgtagagagtgctgctcgaactgggacgatcagaggacgcagcag

SEQ ID NO: 29608 - DNA, 1746 bp, Oryza sativa
  Clone ID: PAT_MRT4530_34094C.1
ggtaccttccttctccctctgctgcttgcaaactctctccttgacgtttctttcgattttggaagaggaggtaggagaagagaattagttgccgagtttatctgaacttgaggacataagcaattcttttctccataagatctgcatctatatcgtgaaactaggtgaccttttcagttgcacccttgtctactcacagtagatgatgaaaattttgacaacggtgaaatttctgatggaggtagcttgatagctacatttggtctgaaagactgaaactggacacagaagtatacgagaaaagtgattggctgggttttgatagggaaaatggtagaagcctcaaatccaacacaagatatgatagatataactggacatgtagtacatgatgatgtttcttacgacaaggatgttttggagataaaattgccagatactgttattacttctgattatggtggcaattttgtcaaggatgtctgcatcgatgaaggagtacttccgcatcggaaaatttcagcagaaaaaaagttagatgagaagtcaccaccaaattttgatttcctaatgatagacacgaatagtgatctaacatatggggggaaaggtgatgctaaaaaatatgcacatggacagaaaccaaaaactgttctcctacctgttggattcgctgctgacgataacacggagaaacaatgtgatcttgaaagcagggatactgctagtgatatcagtgagaagaaaataagtttgcatgagttacttaagcttgaaagtgcagaagaatccaaggaaagacttaaacttgaaagtgcagaagaatcccagacccagcatcaaagcacaacttctgcaataaatgaaaaaaacatgccccctgttcatgaagaggctattgcacaggtttccacaaatgactgcaatgatgttgcaactgcatcaaaaactgatgaacttattactagcaacgtatcaagtatcaataacaccaacggttcatcagcaacaatatctgacagacatgatgcaaccgcagcattagataaacccatgtccactgctgagactactgacggtttaattggctccaaacaatttaacgaagttggaacagcagaagccatgcctgatgctctgacatcaagtagttcttcagaagtccaaccatccgaaaagagcaacgaccaccccgaaagcttcaccagcgagccgatagcggatccacaggatgaaaatgcagtggccacatcctcatcacctcatgttgtagagtccagtgatgcaaataggcagatgaacaacaagaactctgacaacgatggtgctactgatgtgcatgatttcaaccagacagattcagagagctgcgcagacgcaacaaacgatggcagaattagcacgagttctaccgatgcgcaaaaggattccactcatgtggatgaactagatgtgcctgataataatgcaaagggaaaatctctgattggcaatgggtatccccttgagccatgctctcttgggcctagcatcatgtgcaacccagtgtcgacctctggtcacattggcaacatctccatccggtcagatagtagcacgacaagcacccggtccttcgcatttccagtttgggaggtatgtgctgctttggtggatgaacaggttacagtgggattggaacagcagcccggtgaggatggcgagagcggagcggaggcgaaacaagcggcgccgtggctggaataa

SEQ ID NO: 29609 - DNA, 672 bp, Oryza sativa
  Clone ID: PAT_MRT4530_34095C.1
atggcgagtgtgagcggcggtggttcttggggtgaaagtgcatgtgtgcatggaagtcgattccgaacgaaaaggatgcatgcatgtggtcttctagacttcaggatgctcaccgtgggtcgagctagggttgtcgaggtcttggcggcagcggtgacttgtggaacggctcggcgacggcgctcctcctcgggtgaacgacgacggctcgaacgggacaatgagctgcttcaagcaagcatgcacgagggttgtgaggtcaaggagatggtgtatgcgcaaggaatcgaacaatggctcaccgaggcagcggtaatcgatgatgacggcggaggcaattctagatcggcgccggtgaagaaaagatgtgttctccaagtccttcacatctccggctgggggcgttgtcagcgtggcttgcgttcccagcgatgcactgcacgagaggggtttaggtcaaaagaggaaatgctcggcattgtgtggagagatgggaacgcgaaagagatggaggtgaccttgactcaaacggagatggcgaaggtcgtcgtcactatgaccggcggcgaggttgaggatgacggagaggctgaggacctctccctcgacttcttcagctccagagtgatgtgtggagttgggcgactcggtctggaggagatggaggcatga

SEQ ID NO: 29610 - DNA, 559 bp, Oryza sativa
  Clone ID: PAT_MRT4530_34096C.1
cgtgggtcgagctagggttgtcgaggtcttggcggcagcggtgacttgtggaacggctcggcgacggcgctcctcctcgggtgaacgacgacggctcgaacgggacaatgagctgcgaggcagcggtaatcgacgatgacggcagaggcgatcctagattggcgccggtgaagaaaaggatgtgttctccgtgttcttgatgtttccggctggggttcttgaggcgttttgaagaggaggttgaggtgatgacaatggcgcagcggctttctctgaggtggatgagaatggccggacgacaacgatggttgaagcggcggcgctccggtgcgtgctccagggcatcgtcggcgtggtcgcgttccggtggctgtgatacacaaaacgggaggtggtcaaaagagaaatggttcggcactttacccaatcagcgatggcgatggtcgtcgtctccacggccggcggcaaggtttggggcgatggagaggcagagaacctcctccctcggtttcttcggctctgagtggtgaatggagaatggcgacgcgtctaggaggag

SEQ ID NO: 29611 - DNA, 957 bp, Oryza sativa
  Clone ID: PAT_MRT4530_34097C.1
atgaagagcaaaccccaaaatgcaaaaaagcagaggagatgttaccgagagcgtgatcacaagcgcgagggctcatacacacgcgctgctgcggcggagaatcaggcaaggggggttttggggggtcgaggggagagcgtacccggagaagatgagcgggagggaggggtggaagcagacgtcgttgacggcggcgcggtggcctcggagcaccgcgacggggtccggcgcaggtcggcggcggcgcggcgggttctcggcttcggccagggccatggctcgggctgcgagattagaactttctggaagcttcggcctggtggagcggcccatcggtgtatcgggtgggcgacgcctggagtggacgacaggcagcggctggagcaggctagcggcaagaagggcgccaagggccgggagccactctcctcctcctcctcgtcggtcgcgggaggggagatgtcggtggcggactcgacagttgcggcctcccctcgacggattctttcgggacggcggcggcggcaccagatgactcagcggaagggctcgtcgcctcctccacctcggcgccagaggtacccaccagggcctcctcctcctctggctctttcccctcttctctctcaccgaaccttagctactccgaccttcggcgacaatgtcgacgacaatggtggggttgtatcaatcgccagagggggagtgaagagggacgacttcacggtgttgggttcgccaccacgcgcggtcgttgaggaggcaacgatggagatgaggagcacaacggtctcagaaggaggtgctaggattgagatgaggagcacgatagtcacggagggcaatgctaggatagagatgtgtcgtgcgccgctcctcttctgtcgtccgccggctgcatgccactccaatcccgcggtcccgccgctcgccactccactcccacggcgtggctaa

SEQ ID NO: 29612 - DNA, 684 bp, Oryza sativa
  Clone ID: PAT_MRT4530_34098C.1
atggcgagtgtgagcggcggcggttcttggggtgaaagtgcatgtgtgcatggaagtcgattccgaacgaaaaggatgcatgcatgtggtcttctagccttcaggatgctcactgtgggtcgagctagggttgtcgaggtcttggcggcagcggtgacttgtggaacggctcggcgacggcgctcctcctcgggtgaacgacgacggctcgaacgggacaatgagctgcttcaagcaagcatgcacgagggttgtgaggtcaaggagatggtgtatgcgcaaggaatcgaacaatggctcaccgaggcagcgatcggcgccggtgaagaaaagatgcgttctccaagtcattcacatctccggctggggttcttgaggcatattgaagaggaggttgaggcgatgacaatggcgcagcggcttgctccgaggtggtcgagaatggccggacgacgacgatggttgaagcggcggtgctccggtgcatgctccagggcgttgtcggcatggcttgcgttcccggcgatgcacttgactcaaacggagatggcgaaggtcgtcgtcactacgaccggcagcgaggttgaggatgacggagaggctgaggacctctccctcggcttcttcagctccagagtgatgtgtggagttgggcgactcggtctagaggagatggaggcatga

SEQ ID NO: 29613 - DNA, 408 bp, Oryza sativa
  Clone ID: PAT_MRT4530_34099C.1
atggcggcagcaccgagacaaccgttgcccgccaccgcgccttccaccgtgacccgcgctagatctgatgcgacattgtcggatctgcccgcgtggggcggagcggcggctagatccgcgcagaaggaaggcagtggaggaggagggccgcccgaggttgccgagccagcaaagcccaccactgccgcgctcgccctctgccccataccaccgtcactcgtgaagcaccccaacctccgctacgtcaacctcagcggcaacatccccaccggcaccatcccaccggggctgctccatggccgtgcccacatccccagcgcggcagcgcgccacagccccgccgcccacgatacaagaggagaaagaaggaagaagacggagaaggaagaagatgcatggaaaacgtga

SEQ ID NO: 29614 - DNA, 913 bp, Oryza sativa
  Clone ID: PAT_MRT4530_3409C.1
attttatgattctccatcactaactatagctcactactacacatgttgtagattgagttccttgctgcactgcatgtaccagctagcttaaaggtaggttgttccaatatagagcaagcccggcatgcagtcacagatgatgtatgcaggtgagaggtcggcggcggcgagagagatggccatggagatgatggcaccggaccagaggcagatgggcagcagctgctctctcttgggcaggttcatatctagagtcttcaagtgcagagggcggcaaggacgcatgcggggcgagaggatggactactacggcgccacggcctaccctgccgcgcagacgtgctacgtcagcccggccgcgcccgcacgcgccgtggccttcgccaccgccaacgccatgcgcccggagccgatgcaagcccatgccgtggcagccatgcccatgcccggcgcgacgtacggcgccgcgtcgcctcggtccggcggcggcaagcgcaagaagaagtccaagaacaagcgcgtccggttcgcgccggcaggggcggagccggtgcccaccgacgcgccgccgcccgccgcgcactacgcaccaccggcggcggcggcggcgagcggaggcggccagctccaccaccagcagcactacccgtccgccgacgctgccgccgagccgtactccacggcggcgcacgggcacgggcacggcaggtacgcgtacgcgccgtcgccgctggcgcggtgggagatgctgggctcggcgggcacgccgcggcggcacgagtacttctccggcgagtaccggtggtgctacccgacgccggtgcgcgagggcatctacagcctcgccacggacgccaaccgcctcaccaccatcttcagcgaggagaatcccaacgcctgtgccatcgtctga

SEQ ID NO: 29615 - DNA, 1773 bp, Oryza sativa
  Clone ID: PAT_MRT4530_340C.1
atggcgaggtatggcggccgccatacctgcccaccggctgatcgcctcatcgcatcggctgttcgcctcctctcgtcgacagttgactcgtctcctgccgcgtgccgcccgatctccgactccagttacccagattgcgccatggaagaggaagaaccatctaataatcgccgacgccgactgcgcccaatttcagaagctacccagattgggaaaaaaataaaagaggggatcgatcgaatacttgggagactcaaatccacaaatttcgtcagcattgcgtgctgctgctgcaatactgtgtttattaacttccagttgactgcagatcagtgtttttttggtctaatggctaagcgaatgaatccatgtcatgggaaactggtccccaagaacaaaagagccatattacagtttgatgacattcctgaggatgtggtgttcttgataatccggttgctttcgctgactaatgctgcgcgtgtcagcatggtgtcgcaaaagtggctacaatcttggaggctctatcctaatttagagttcacctcgaaggcgttgggtttgaataaacgggtgcacaaacaagggaggagggctaaatttgtcaggtgtgttaacaccatcataaggcaccacgctggaacagggattaactcattcaccttgaagcgcaacctcaacaatcacaagtacgcacactatattgaccgttggatttactttgcagtccgatctggtgcaaatgaactgactattgacctaagtccacgatggtatgctcatcctcgtgatgtcaaatacagctttccatcctctaatgttgctgctccagaaccaacctctatagagcatcttaagctttgctttatgaatttgaggcctttaccaacttttagtggcctaagaagcttgaagactcttgatttggcccttgtatgtataaccacagaagatttagagagcttgttgagttatacccctgctctacaacagttgaagctaaggcaatgtccaatgctggaatacttgaagatcactgatgtactagctaagcttgtctacattgatatcgttccctgcttgtggctgaagattttggagatccatgctcaaaatcttgttgcgattaatacttacaatatctgtcacctaaaaatagtactgagtgaagcattagtgttgaagggggcacacattgagttagttctgtcatcagatgttattgagtatgcttttactgatcttgcaccactcatgccagacctcgagtcattgttcctgagtggctgtactgagatgattatatccaggagacctccaagcaatagattccattgcctgaagcaattggagttaaaattgcaggatatatcgacgaaatatgatcttctatttcttgctaagtttgttgatgctgctccagtcctagaagctctcgtttttcatctggaagatatagaggagccattttgttacatggaaaaggaagcagagttgagaagtctggagaaacattgtccacataaaaacctcaagttggtcaaaatgactggattttcagcaggccgttcaagccttgagcttgctctgtatttcgtggagaactcaccagcactagaactcctgattcttgatcatcggcttgacagatctgtttgccgaatcacttttggtggtgacttggatgcgaaatgctcgaaaggatatgaacacactatctccaaatatgttagcaatgcgattcctcgccgtgttagattatcatattcctaa

SEQ ID NO: 29616 - DNA, 561 bp, Oryza sativa
  Clone ID: PAT_MRT4530_34100C.1
atggcgagtgtgagcggcagtggttcttggggtgaaagtgcatgtgtgcatggaagtcgattccgtatgaaaaggatgcatgcatgtggtcttctagccttcaggatgctcaccgtgggtcaagctaggattgtcgcggtcttggcggcagcggtgacttgtggaacggctcggcgacagtgctcctcctcgggtgaacgacgacggctcgaacgggacaatgagctgcttcaagcaagaatgcacgagggttgtgaggtcaaggagatggtgtatactgaaggaatcgaacaatggctcaccgaggcagcggttatcgatgatgacggcggaggcgattctagatcggtgccggaaatgctcggcattgtgtggagagatgggaacgcgaaagagatggaggtgaccttgactcaaacggagatggcgaaggtcgtcgtcactacgcctggcggcgaagttgaggatgacgaagaggctgaggacctctccctcggcttcttcagctccagagtgatgtgtggagttgggcgactcggtctagaggagatggaggcatga

SEQ ID NO: 29617 - DNA, 180 bp, Oryza sativa
  Clone ID: PAT_MRT4530_34101C.1
ggtagaccggtagaggcatggccctacgcatatcacgacgtcacgcagatacagagttatagcggtgaagaggatgagcggcgagccacaagcaacaaagacaaacaatcaagggttggaatcatgcctagccctgagtgcttctttggtttgatggactacttatgggctaacgggtga

SEQ ID NO: 29618 - DNA, 646 bp, Oryza sativa
  Clone ID: PAT_MRT4530_34102C.1
tcccagacgcatcgccattctccattcaccactcagagccgaagaaaccgagggaggaggttctctgcctctccatcgccccaaaccttgccgccggccgtggagacgacgaccatcgccatcgctgattgggtaaaggtcatctccagggaacgtgaccacgccgacgacgccctggagcacgcaccggagcgccgccgcttcaaccatcgtcgtcgtccggccattcttgaccacctcggagcaagccgctgcgccatcgtcatcgcctcaacctcctcttcaatacgcctcaagaaccccagccggagatgtgaaggactcggagaatgcatcttttcttcaccggcgccgatctagaatcgcctccgccgtcatcgtcgattaccgctgcctcggtgagccattgttcgattcctcgcgcatacaccatctccttgacctcacaaacctcgtgcatgcttgcttgtagcagctcatcgtcccgttcgagccgtcgtcgttcacccgaggaggagcaccgtcgccgagccgttccacaagtcaccgctgccgccaagacctcgacaaccctagctcgacccacgaaccgccgccgctcacactcgccatcggcgctactccgatgtcctctaaccaagaaaac

SEQ ID NO: 29619 - DNA, 700 bp, Oryza sativa
  Clone ID: PAT_MRT4530_34103C.1
atggcgagtgtgagctgcggtggttcttggggtgaaagcgcatgtgtgcatggaagtcgattccgaacaaaaaggatgcatgcatgtggtcttctagccttcaggatgctcaccgtgggtcgagctagggttgtcgaggtcttggcggcagcggtgacttgtggaacggctcggcgacggtgctcctcctcgggtgaacgacgacggctcgaacgggacgatgagctgctacaagcaagcatgcacgaggtttgtgaggtcaaggagatggtgtatgcgcgagaaatcaaacaatggctcaccgaggcagcggtaatcgacgatgatggcgaaggcgattctagatcggcgccggtgaagaaaagatgcgttctccgagtccttcacatctccggctggggttcttgaggcgtattgaagaggaggttgaggcgatgacgatggcgcagcggcttgctccgaggtggtcaagaatggccggacaacgacgatggttgaagcggcggcgctccggtgcgtgctccagggcgttgtcggcgtggtcgcgttccctggagatgacctctacccaattagcgatggcgatggtcgtcgtctccacggccggcggcaaggtttggggcaatggagaggcagagaacctcctccctcggtttcttcggctctgagtggtgaatggagaatggcgacgcgtctggga

SEQ ID NO: 29620 - DNA, 889 bp, Oryza sativa
  Clone ID: PAT_MRT4530_34104C.1
tcacttcctccactgttccagccgagagaggaagagattgagcgagccgacgcgtggccgcaacgtgtcgtcgatctcggtttcccttttctcgctctctactcctcccagacgcgtcgccattctccattcatcactctggagctgaagaagccgagggaggaggttctctgcctctccatcgccccaaaccttgccgccggtcgtagtgacgacgaccttcgccatctccgtttgagtcaaggtcacctccatctctttcgcgttcccatctctccacacaatgccgagcatttcctcttttgacctaaacccctctcgtgcagtgcatcgccgggaacgcgaccacgccgacaacgtcctggagcacgcaccggagcgccgccgcttcaaccatcgtcgtcgtccggccattctcatccacctcagagaaagccgctgcgccatcatcatcgcctcaacctcctcttcaatacgcctcaagaaccccagccggagatgtgaaggacttggagaacgcaacttttcttcaccggcaccgatctagaatcgcctccgccgtcatcatcgattactgctgcctcggtgagccattgttcgattcctcgcgcatacaccatctccttgacctcacaaccctcgtgcatgcttgcttgtagcagctcatcgtcccatttgagccgtcgtcgttcacccaaggaggagcgccgtcgccgagccgttccacaagtcatcgctgccgccaagacctcgacaaccttaactcgacccacggtaagcatcctgaaggctagaagaccacatgcatgcatccttttcgttcggaatcgacttccatgcacacatgcactttcaccccatgaaccaaattcataactcccaaatccaa

SEQ ID NO: 29621 - DNA, 649 bp, Oryza sativa
  Clone ID: PAT_MRT4530_34105C.1
tccagaccgagtcgcccaactccacacatcactctggagctgaagaagccgagggagaggtcctcagcctctccgtcatcctcaacctcgccactggtcgtagtgacgacgaccttcgccatctccgtttgagtcaagtgcatcgccgggaacgcaagccacgccgacaacgccctggagcacgcaccggagcgccgccgcttcaaccatcgtcgccgtcgtcggccattctcatccacctcagagaaagccgctgcgccattgtcatcgcctcgacctcctcttcaaaacgcctcaagaaccccagccggaaacatcaagaacacggagaacacatccttttcttcaccggcgccaatctaggatcgcctccgccgtcatcgtcgtttaccgctgcctcggtgagccattgttcgattccttgcgcatacaccatctccttgacctcacaaccctcgtgcatgcttgcttgaagcagctcattgtcccgttcgagccgtcgtcgttcacccgaggaggagcgccgtcgccgagccgttccacaagtcaccgctgccgccaagacctcgacaaccctagctcgacccacgaaccaccgccactcacactcgccatcggcgctactccgatgtcctctaaccaggaaaac

SEQ ID NO: 29622 - DNA, 1489 bp, Oryza sativa
  Clone ID: PAT_MRT4530_34106C.1
atcttccaatccatgacttatacttttcaagaatcgcctttgcatctgtttccagaacaatccctccatcaacaacttcgtcaaggcataagaagataagatccaagttttcaagcgcagcccttctgtgcactttgtttctgagaaggtaatcaatagcttcagagaagccctgaagaacagatgctaaaatgagctcattctcttcatcacctccagttacaaaaaagtgtagatcttggatgaacttgtatacaacgaagtaactgtcaaacattactatctcagcttctgttctagcgctcgttttctgggttttagcaaagaccgacttctcgaaagcttgcttcgaggacaaagagggccagtcatcgctgtagtacttcaccgccacgcgcttcccttcggaatccagcacaagaatgttcttcaccgaaggacaggattccatctcggggaagcggatttgcagtataggggaagggatgggcgcgatgccgcgattggctggtggatttgtcgcggattgcttcaaaagcagcacggtatcttctgatcttgatgtcttgattgcattcagagttgcagacacagcaacagctgggtagttaagttttttctcttgacctgggcacatccttggtactgctatgtcatctatgatgcaatcgcattcgcacaaatcctcatttgatttcttctggatgaaccgtgtggagccagtattattgccatttgcaacaggtgttcgtacgcattggaacgcagtgtactgtgtacatcgatgttcagggccacgcgtgtcgtgggtcgagctagggttgtcgaggtcttggcggcagcggtgacttgtggaacggctcggcgacggcgctcctcctcgggtgaacgacgacggctcgaacgggacaatgagctgcttcaagcaagcatgcacgagggttgtgaggtcaaggagatggtgtatgcgcaaggaatcgaacaatggctcaccgaggcagcggtaatcgatgatgacggcggaggcaattctagatcggcgccggtgaagaaaagatgtgttctccaagtccttcacatctccggctggggttcttgaggcgtattgaagaggaggatgaggcgatgacgatggcgcagtggcttgctctgaggtggtcgagaatggccggacgacgacgatggttgaagtggcggcgctccggtgcgtgctccagggcgttgtcagcgtggcttgcgttcccagcgatgcactgcacgagaggggtttaggtcaaaagaggaaatgctcggcattgtgtggagagatgggaacgcgaaagagatggaggtgaccttgactcaaacggagatggcgaaggtcgtcgtcactacgaccggcggcgaggttgaggatgacggagaggctgaggacctctccctcggcctcttcagctccagagtgatgtgtggagttgggcgactcggtctggaggagatggaggcatga

SEQ ID NO: 29623 - DNA, 302 bp, Oryza sativa
  Clone ID: PAT_MRT4530_34107C.1
tcttttaaatacaacctaaaacaactcaaccgggggggtttttttaaaacaccggggggcacacacaaaacctacctatctaatccactcaacatggaaaaaccagccaacgtgatctaataagccaaaaacaccatcacgccaatccagataccactattctgaccagccataccacaccatttaaggctgcaaacccgctaaatgatcctcggaatgaacaccaggctacaacaagtaccgttaactatctagttcaatttaacaatactaccccttaaaactcgtttagaaactcttac

SEQ ID NO: 29624 - DNA, 290 bp, Oryza sativa
  Clone ID: PAT_MRT4530_34108C.1
tcgttaaaatgtagactgctgaggcatgacgagaggagaatgtgtccatggcacagcttgacgagcatggtgagcgctgcaaggaaatggacgagttcattgctaacgtggcacttaccactgatgttcgtgagctcacgctggtggaccggaacctgctttttgtgtcttacaagaacgacattggggctcaggacgcattgcacaagagcatctcttctattgaccagaaggaggacagcacgtggaacgaggcctatgtggcatcaattaacgacctccagctcagg

SEQ ID NO: 29625 - DNA, 750 bp, Oryza sativa
  Clone ID: PAT_MRT4530_34109C.1
atgacggttacttctatgcgaattgtccattctgcccctgaactgtcaataaggagtgatcctggacgtccacatggagggccagctagagctggagccaccagggttcggcggaaccctaggttcagccgaacctgggccggcccagaagcttcgcccctgaggggcgctgccaagaagaggaggaagagagtgcgggacggtggtgggctcgtaggtggaggagaggaagaggaggaacggtgggaggataagcacggcggcaggggcgcgtccacgtcgggctccagggacagagcggggaagccgctgccaccgccccagccgcagagcttgttcgtgcgctccgcgttgctctactacccgcacacgccctccatattcgtggccgacttgcccctgccatgtgggcttcccgtggcggtggcgctggacatgtgcctgcgccccgtcaaccactcaaggcgctcgggcgtcgttccgccggatgtgtcggccgaggcggagggcgacgacctctgtgatgtgttcctggagcagcaagcgcatctaccctggcgtcgaccccatctgcccgtgtcgcctctcgcctcctcctccccccacccattgccatcctcttctattctctatcgccatcctcttctcttctcttcttcatcgccatcgcggaaggaggcagtggagtcggggacgggaagggcagggacggcgtccctcatctccctcgccgggaggaggcagcggtga

SEQ ID NO: 29626 - DNA, 1620 bp, Oryza sativa
  Clone ID: PAT_MRT4530_3410C.1
atgtgcgaggctctcgttgaccggcaactcctccccccgtgcggttgcaatggcggcggcgacgtcgttgtcgttgtggtgccgaagacgtcggcggcgccggtgttggaggacaggccgaagacgtcggcggcggcggtgagcaagggcggcgaggcggcgtcgatcctgcggctgtcattgccgatgatcatgacggggctgatactgtacatccggccgatgatctcgatgctgttcctcggccggctcggcgagctcgcgctcgccggcgggtcgctcgccatcggattcgccaacatcacggggtactccgtgctgtccggcctcgccatgggcatggagccggtgtgcggccaggccgtgggcgccgggaacctccccctcgtcggcgccaccatgcagcggatggtgctcctcctcctcgccgtgtccgtgcccgtcgccttcctctgggcgtggatggagccgctcctcctgctgtgcggccaggacgccgccatcgccgccgccgcgcagcgctacattctcttctgcctccccgacctcctcttcctctcgctcctccacccgctccggatctacctccgcgtccagtcgatcaacctgccgctcacggcgtgcgccgcgctcgccgtcgccgcccacctccccatcaaccacctcctcgtctccgtcctcggcctcggcatcgagggcgtcgcgctcgcctccgcctgggccaacctcaacctggtcatcttcctcctcgccttcgtctacgtctccggcgtgcaccgcgacaccgggggattctcgctgccgcgcaagatgttcaaggacgtcgacgggtgggtgcggctggtcaggctggccgccgagagctgcgccagcgtctgcctcgaatggtggtggtacgagatcatgatcctgctctgcggcctcctcgccaaccccagggccaccgtggcgtccatggggatcctcatccagaccacgtcgctgctctacatcttcccgtcgtcgctcagcttcggcgtgtccacgagggtcagcaacgagctcggcgcgaaccggccgtccgccgcgcgcgccgcggcgagggcggggctcgcgctgagcgccgtccagggcctcgcctccctcgcgttcgccgtgtccgtgcgcggcgcgtgggcgcgcatgttcacgccggacgccgacatcctcgcgctcacggcatcggtgctgccgatcctcggcctctgcgagctcggcaactgcccgcagaccaccggctgcggcgtgctccggggcagcgcgcggccgagagacggcgcccacatcaacctcggcgcgttctacggcgtcggcacgccggtcgccgtcgggctcgcgttctgggcgggcatggacttcagggggctctggctcggcctcctcgccgcgcaggcggcgtgcgtcgcggtgatgctcgtcgtgatccagcgcacggactgggacgtacaagccaagctcgcgcaggtgctcgccggcgccgcggccagtggcggcgaccacggcgtcaacgaagccggtgggaatgacgcggtcgcgcacgtcaaggtcgcggcgccccacggcgacgaggactcgagcttgctcatcaccgtgagcacgtag

SEQ ID NO: 29627 - DNA, 852 bp, Oryza sativa
  Clone ID: PAT_MRT4530_34110C.1
atggctgtgtgcaaaatgtttgatgagcgtcctgtttggccaaggcagtcactttatgaatgtttgattgatgatggtttgcagatctcacaaagccaattcaaaaggcttctctttagagctggatattacttttctactggtcctttcggcaaattctggatcagaagaggatatgatcctcgaaaagacccagactcacgaatgtttcagagaattgattttcgcatgccccctgagctgaggaatcttccaaggaaggagcgtagacctgaaaagtggacagagatgtgcaagcttgaagtgatgccatcgaagagtttcatcttcctgcaattatttgaactgaaggatgactttattcaagcggaaattcgaaaaccttctcatcaaccaacttgctcacatttgacaggttggttttgtaagccgatgattaaaaccttgagattgcaattgagcatacggttattctcattatgccctaatgaagatgccaaaaactttttgaggaatgcctatgaacttattgaaaggtctaagaagcaggaagcactttgcagatctcagcaactaaaggaaaataaggaagcatctgacagacataatggaactgaggatcaagctggtggcaacaactctgatagtgaggatgcggaggatgatgaagaggaagataaagagtcagatggctatgaatctccacctatggcagatgatgtccctgatttcaccttggatgatccctgtatccttgacatgaatcttgatagattatgcttaatcgtagggatttactattttcaaactgatcctcgctttttattagtttttagttggtcagtgaagtaa

SEQ ID NO: 29628 - DNA, 300 bp, Oryza sativa
  Clone ID: PAT_MRT4530_34111C.1
tgccggggcttctccatcgacgtcgtcatatatagtactaccagttaccacctttgccgtcgccggcgaacgatcgacttgatcagaaattcagaattcaagaacacctcgacgaccctttcttcttcctccgacctcccttgccggcgatgcctatggtttgtagtagggtatggtggtttggtttggggcctattttcttcctctttatatagcggcaacacacctcgattccgttacgccccgatacgccgccgccgctgctgctgctgctgcttcccggggtcaaaagcgacagat

SEQ ID NO: 29629 - DNA, 231 bp, Oryza sativa
  Clone ID: PAT_MRT4530_34112C.1
agtgctgtgctggatcgagtcgcgcagctggctgcgcgcgcggtttgtggctctctgtgtgagtccggcgctgctgcttcaattccttcttccccagggcacctcccgtgagccgccatctccctccctcacctacctctggattcgctccagatccgcccatgagtaggcccccacgcccaccgcctgctcgccatcgcgcctccactccaccacaccatgccgatcccc

SEQ ID NO: 29630 - DNA, 292 bp, Oryza sativa
  Clone ID: PAT_MRT4530_34113C.1
attaaggggcatatcaaattataatctgtcttgggtatgccccgttcttataaaatgccccttttttttgggggggtggtttaccccctgatctggagtagtagtatcccggaagaacaaatagctgctgccccctacgttcatgacaaaacagatcagatttcaaaaccccaaaaaactggcaggcccccccctcattgggctaccccctcggcccctctctctctttaaccctctgcacaattatgccctgtattcggctccacaatcgccttttatatccctaagattt

SEQ ID NO: 29631 - DNA, 441 bp, Oryza sativa
  Clone ID: PAT_MRT4530_34114C.1
atgccaggtgtgtttgaggaggaggggattgaggagattggggagattggaaagatacgtaaaacggagattggggagattggaaagatacgcaaaacgagggacttaaaagttttagtcccatctaaacagggcctaagtaaagagggggatagttttaccgtccttctgaagtacggcaattatttactacctccagcaactcgacgctgtccattaatctccggaaaatcttcagcttccggcacgatccgtggtgacctcgcgatgacagcgtacacacgctactcatcagtcatcgtcaccgccatatccaccaggggcagcggcctcggatggatccccgacaacctcaaccgcggccatctcgactacttcttctggctgctcaccgttctcaatgctgtcaacttcgtcgtctacctctggattgccaactag

SEQ ID NO: 29632 - DNA, 358 bp, Oryza sativa
  Clone ID: PAT_MRT4530_34115C.1
aattgaacctttttcctttttaattttgtttgagtcaattccttttgggtatctatatatcaaaagtgatttttataacataccggtatgcagaaaaaaaaggccgttaatatatttagtccagaaaagcaaaatatactggacacgacagaagaggaggggcataggctctgttgaggcaccccaattggggggactcaaaccaccagtttgaaaaacctggcaaccacgtagcagggttattcaaaatggacccaaatattgttacaaaatgggaattccatagcaaggcccggttgcctcagtttagcgtttcgaattccttttgagttggggagaccttttaaccaaaacaaag

SEQ ID NO: 29633 - DNA, 543 bp, Oryza sativa
  Clone ID: PAT_MRT4530_34116C.1
atggatatctctgaggcaaatgaaggctatgcgagctgcggctcggggcagcgccctcccctccgcgggatccagcgggaggggaagcagcggcggcgcggtgtcccaacagcggcgcctctcccccttcgccgtggcggcgccgcacctcctcccccaccggcggcggcgtcgttccccctccccctcacacggtggcgggcggatgcggtgtcctccccgctgccggatccagccggaggggaggctccccttcccccacaggcggcggcgccgttccccctcccccttccacggtggcgggtgtgtgcggcgtcttccccgtcgccggatccagcgggaggggaggctcccccttccccaccggcggcggcgccgttccccctccccctccccctcccacggtggtgcgcagggacagcactctcccctcggccggatccagcgggaggggaggcagcggcggcccagcggccctacgacaacggcggcacccttcccttccagcgtctatgtttttgtgcctgtgatgttcttgtgtag

SEQ ID NO: 29634 - DNA, 666 bp, Oryza sativa
  Clone ID: PAT_MRT4530_34117C.1
atggcgagggcgcaggcgatccccacgtcgtgctgcggcatgttcgaggggctggacctggcgccgtgcctgcaggacgcggtcgccggcgccggcgccggcatcggcatcgcaggagggaacatcagcggcgcctgctgctcgtcgctgaaccaggcgctcgacgccggccaccgctgcctgtgctcgctgctgctgccgtcgaacggcggtggcgccggcgtgcgcgtgctggccagcctcgccgcggcgctccccacgctcccgctggcgctgccgctgcctggatgcctcctctacgctccccctgtcctgtcttgccaagtgccggtgcaggagcagacggacgcgccaccggcagcaacagaggcagcaaccgcgaccgagaccaccgtcgattcaccaccacctcaggccgtcgtaatgcctccatccaagaagtcgaagaggagcgccgacggtgagaatgctgatgacgatcaggggatgaacgggaactatggcaacggctacggcagcggcaacggcaaaggcaacggcggagctaagaagaagacagccagccgcagcgaagcacgccggcgtaccaacgtcgacgaggggatcagaacacacctcctgacgtttgtggtggtcatggctgcattttggttctcaattatatga

SEQ ID NO: 29635 - DNA, 2807 bp, Oryza sativa
  Clone ID: PAT_MRT4530_34118C.1
atggaggaggacgcggaggggatggaccggttcgacatggacggcgacttcgagggcggccggttcggcagggacggcgagttctactacgagcgccgccgcgagcgcgcgccgcagacgcgcgacgacgcgctctacggcgtcttcgccgagggcgactccgactacgactccgacgacggacaccgccgcagccgccgcaagcgccgcagggacgaggccgagcccgacctctcgcgccccgtccacttccagtccgccggcaagttcatgcccagcaaggagcccgagcccgagctcgaggagaggcccggccttggcgccgctgcctccgcctccgcctccgcctccgcggcgggtgaggatgatgcggcggaggaggaggaggatctcgacctgcccacggcgttcgggcagcggatcgcggagggcgcgagggcgaggcgggaggagagggcgcgggagcgggagacggccgcgcggcgcaggcaggcgtcgggggtggcctccgggaagccggcgccggctctggggagcctggggtccaacacgaaggtggccaagatgatggccatgatggggtacaaggatgggatggggctcggcaagaacgagcaaggtatagtcgcgccggtggagaccactctgcgccccaagaacgccggtctcggaagcgtcgaggggttcaaggagcccaagccattctttactaaggagaatttgccgcctccgcctccaccggcgcccgccaagaaggagcagcagaggtggtcgaagaaggccggtgcgaagaaaggccccgtgctgacgaagaacgagttgctggcgatgcgcagcgagcaggagcaggacgagcagcctacggttgtgcagaaggtgatcgacatgcgagggcctcaggcacgcgtgctaacggacttgaaggggctcaacgtggagcaggagatggaggcgaacgatgtgccgatgccagagttgcaatacaatgtgaggctgcttgtcgatgaggccaaggctgatattgtgaggctggatgggcagctgcgacgggagcaggagaaggtggcaagcttagtgcgggagaaggagaaagtggcaaaacaggaggctttgcagaaacgccaactacaagttatggagaagattgcaggagtgctggagcaggtccgagtggatgatactgcaggtattctctctctggaagggttgcttaagacctttcaggaattgaaggcatgctacgtggaggaattcaagatgtgcagtgttgcatggattgcctgccggtttgctcatccgctactaatccgagtcttccaggggtggcaaccactgcaaaatccgttgtttggcttggagatcatgtcatcatggaaagatttgctgcagggggatcaagcatatgacttctcaggtgatgttgaatcgatggctccatatgcacaattggtttgcgaggtcatcctacccgctgtgaggatatcaggaaccaattcatgggaggctagggatccagaaccaatgcttcggtttcttgaatcatgggaacggttgctgccccctatcgtgctccagtcaatattggagcatgtcataatgccaaagctttcagctgcagtagattcttgggacccacgcagggagaaggtaccaatccatgtatgggtgcatccatggttgccaatgctaggacagaggatagataccttgtgccattctattcgatacaaactgagtagtgttctccatgtttggcaagctcacgatgcatcagcctatgctgtgttgtctccatggaaggatgtatttgatgccgcaagctgggaagacttgattgtgcgttatatcgtaccaaaattgaaaatggcacttcaagaatttcagatcaaccctgcaaaccagaaactcgaccagttcaactgggtaatgatttgggcttctgcaattccagtacaccatatggtccatatgttggaagtagatttcttcagcaagtggcagcaggtcctgtaccattggctgtgttcaccaaatcctgatttcaatgaaatcatgaactggtacaagggctggaagggccttttcccaccagaattgcttgccaatgagcgcatacggatgcttttaacggctggccttgacatgatgaaccgagctgctgaaggccttgaggtggtgcaacctggcgctagggaaaatgtgggctacttgagagcaacagagaagaggcaatttgatgcagcacagcaagcatcacaatacatgactcaccatgcggtgccaggagcagccatggcggatatgagctttaaggagtctatccaggcatatgcaatggaccaaggcttattgtttatgcccagagttggtaaattctacaatggtatgccagtgtatgagtttggcaccgtaagtatttgcatcgactctgtgaagcgcctactctacgcacaacttcaagaaggaattgagagatggagtgctgtctctcttacacaattgatagaaatgaaccggaaggcgaggcaacgctagttgatcatcctattgtgtactattactaaaaggtgtcagttttgatcatcattgtagaatatttctaaagagcagatggtttaatgatgtatctgaacaggttgttgtttggcctagtaactttgtagtatttatattcatgctttaatatgcaccgtggtgcctttttcttgccatagaatgaacaaatgatttattaactattagttatccccatgacaattctatttggttgtgtcatcaatatttttatttcttggatgcgcctcttg

SEQ ID NO: 29636 - DNA, 1148 bp, Oryza sativa
  Clone ID: PAT_MRT4530_34119C.1
ttttttttttttttttttttaaacaatagccagggctcaggagttgcaatcaatttgggaccaaccttcttggcacaaaaatactaccagcaaagtccagcagaggtaggttacaagggatcaggaatggcacggtatagtcgactgcagaggatcctgatccggttacaagttgcaatatcttatggagatcagcagcagcagcaagaagcatttcatcctggtccacggcctctgccacggcgcgtggtgctggtacagggtggtcgccgcgctgcgcgccgcggggcaccgcgcgacggcgctcgacatggccgcgtcgggcgcgcacccggcgcgcgtcgacgaggtgggcaccttcgaggagtactcgcggccgctgctcgacgccgtggccgcggcggcggcgcccggcgagcggctggtcctcgtcgggcacagccacggcggcctcagcgtcgcgctcgccatggagaggttcccggacaaggtcgccgccgccgtgttcgtcgccgccgcgatgccgtgcgtcggcaagcacatgggcgtcccgaccgaggagttcatgagaagaactgcacctgaaggattacttatggattgcgaaatggtggccataaacaatagccagggctcaggagttgcaatcaatttgggaccaaccttcttggcacaaaaatactaccagcaaagtccagcagaggatctggcactggcgaagatgctggtgagacctggcaatcagttcatggatgatccggtgatgaaagatgagagcttgctcaccaatggcaactatggatcggtgaagaaggtgtacgtgatcgccaaggctgacagctccagcaccgaggagatgcagcggtggatggtggcgatgagccctggcacggacgtcgaggagatcgccggagctgaccacgccgtcatgaactccaagcccagggaactctgcgacattctgatcaagatagccaacaaatacgagtagaaaaatgccagtttggaaataatcagtgcttcttcgtcatgaagcctacttacagtccatcgctacaagtataaataatagaagtttggttctcattgctttgtttgatcttgtgtgccaataattaatgaaatctattaaaaaaaaaaaaaaaaaa

SEQ ID NO: 29637 - DNA, 368 bp, Oryza sativa
  Clone ID: PAT_MRT4530_3411C.1
tacatctcctccggctgtagtggagtatggaatgcttttttttcctcgtgccgaccaccaccaccgttacaatggcgggcaacgggccgatcaacaaggaggacccgctcaactggggcacggaggtgctcaagatggccgtgagccacctctacgaggtgaagagcatgttggcgcagttccgcgagccgctggttacgatccagggcgccaccctccgcgtgagccagggggccggccccaaccaggccaaggacgccgccagcatcgtctaacagcttgtcgaggaggcccgccccccgattaaggccacccgcgtgtggatcctcatctgcatcgcccacggtggcgacatctacggcgtgacc

SEQ ID NO: 29638 - DNA, 440 bp, Oryza sativa
  Clone ID: PAT_MRT4530_34120C.1
cgttaaataaactgaggagagcttggatttctcatctccattatcttgcattcttgttcttggtttgcatctcttcttgctctttggaggatttactactattgagtagtagtgatcatgagctaccaaggtcctcctcccggcactgcaggtattgaaatctcttggtttcttgatctgattggagaactccctggtttgtgatttagcacagagaaaataattgtgagagttgtgtgtcaggtctcctttttttttctttgtttctttttttttttgcctggtcgggaagaaacgcgaccaaattttattaagattaggagaaaatacatgcatcccgacattttttattttttttttctgagttcgttttgatggacaaattcatcagctgatgcatgtgtgattatctactgttgcagcgtacccgccaccgggga

SEQ ID NO: 29639 - DNA, 272 bp, Oryza sativa
  unsure (1)..(272): unsure at all n locations
  Clone ID: PAT_MRT4530_34121C.1
aaacagacagataactcttaggagttntctatgataattgacaattgtttgtagcaaacagggttgctacaatatattattgaaaaaacggtaacaaaggggtgactattattcatagacaccatgctggtttcaggaggagtcagacaggcatgcacacacaaaatggaagggatcttaatttaatcataatgaaaataggaagctgcatagttaaatcaaccatactttgttaaggaataagagaggggcgtaggtatgcactgcatttt

SEQ ID NO: 29640 - DNA, 270 bp, Oryza sativa
  Clone ID: PAT_MRT4530_34122C.1
atggctggccgtgtgggtggttcatccggcgcagccattgccggtggtgtgttgggcgtggaaggagccaccgtcacaggcgccgctggtggtgatggtggaggtgtgggtggagtagaggaggagagtgtggagttgtttgtgtggcaggaggtggccatcgtcgataaggtcaccgtcatcaaggacaaggcttctcaaggtgcggatcctacatccagatctgggcttgtgaccctgtgctcttgcattgtttgttttggagtttga

SEQ ID NO: 29641 - DNA, 252 bp, Oryza sativa
  Clone ID: PAT_MRT4530_34123C.1
ttttacgacagagcgtcaacagtggggggtcgtgacatcagtttcgacatggacaagatattgacgctgaagccaactcttgataagaactggccgtccttctactgctcatcctctttcacttggtccagaggcatggggcccttccgggctcatgagtgccagaaacatggaacatgcatcaaacccagcccctgaactaccatggatggcaacgcttccgggggctctcgacctctactccaaatacac

SEQ ID NO: 29642 - DNA, 192 bp, Oryza sativa
  Clone ID: PAT_MRT4530_34124C.1
atgggtgcacttatcaagactccagaggtggatggatggatggatggatggcgtgagtggtgggatgggtttgtttttgcatgcaatacgccatgtgcattagaactgttgtataggagatgggatggagaggcagttggcatgtcttcgtttgaggttccaaatgggggaggtaggcggtttatcgcctaa

SEQ ID NO: 29643 - DNA, 1263 bp, Oryza sativa
  Clone ID: PAT_MRT4530_34125C.1
ctgcaggaattcggcacgaggcctttttttttttttttttttttttttttttttagcaaaagtgcacttaagtagtgcattaaaaaatcttagctgctgtctagcataacatgccttactactattacatcaagcagcagctgttacaggcttacagctgataaagtagccagaaacaagctgtgcgtcaaacatatcagtgataagacgttcaaatggcatcctagtgcatactaatgctccaccaatccagtgatcagtgagaatatcactgtgtattgatgtgcagcaaagttcatgcagttcgtcttggtcaatgaaccccagtctggatcgagggtcaaaaggtatatttctgaaatcagtccaggaaaggttctcttcaataacagatctactggtagctggacttgacctggaaccttgttgtccagcatcacgaaactttgaagtcttgttcaaatccactattttgcatttcttcttgacaacctcccgaatggcagaaagaacataacagatagtttcattccaatgagggggtatgtaatccgcattaactacagggtggttaccattgtcttcttccacaaatgtccaaaaccgtgcttctctgccattcgtttgtgttaaagagtcaccagcctcaaccttggtgttgagaaagattctcccactgtaccatttgtcatctaggccatcatacttgaagttgtaattagagactgctacgccagaccaaggttgtgtaagcacagaaggatccttcagtagcttaagaacatctctttccgtgcgcttccatcccgtggcctgctttggtttcccaccggtaacacttgtttcctcagtaatcttccccaccacttccttgctggtgccgacgccgccttggccacccttgtagcctctgctcccgccttggccacccttgtcgcctcttcccccgccgcggccacccttgtcgcctccttccccgcctcccgccccgtccccaccaccacccccgctcccgtcgcagcctcgaccgacgcccttcttcacctcctccagagccaccatctccaccctcagctcccgtggttccgccgccggccacggccgcagcgccgcctccgcctcctcccccgccgcccgcgcgccgccccttccccgccgctcctccgccgcccgcgcctagctggcgccgccccgaccgttgcagcctctcgctgtgtgctcgccgccagcctccccgactgcggcggcggcgatggcggttgg

SEQ ID NO: 29644 - DNA, 473 bp, Oryza sativa
  Clone ID: PAT_MRT4530_34126C.1
gggcccggaacttactggctggaccgacgcatgcgttgacttggaggaagaggctgcaagaatgcacaaaaccggtatgcctgggcggaccgatacgggagtggctgcggtgacgctaatattggccgtgtgacctcatgccggggtgctgtctaagattggtgaagcaccagaatacaagaacagggaatgacaatcaccggtggatactgcggaaaagggaaagtgctacactcggctggcacacatatagatgacactgaacacacactacctgaacgagtacatgtgaggtggtgtacacattgctcaagaacgccttctgtccgtaatcagtactctttcactcataggatgatgatgacgatcgttgttttctaccctacttcagttctagaaactggacttgatattctcttctgttggtagcacggatggtgatgatgggaacacaacttggtggtgatgtgccg

SEQ ID NO: 29645 - DNA, 231 bp, Oryza sativa
  Clone ID: PAT_MRT4530_34127C.1
atgcagtcttccgccgccgccgtcgagatgcgccggaacccggaaggcatcattgcacctttgtccccaatttggatgccactaggaaagaatggattggctgccaccacatcagacaaggaatcaaaacatcgaaaaggaggtagcacgacccccgcgctgtcttcctcgatgcggctgggcgtgaggtaccgcgacctctcttacgccgcgttctgccgctcctacgcg

SEQ ID NO: 29646 - DNA, 255 bp, Oryza sativa
  Clone ID: PAT_MRT4530_34128C.1
atggcgcccggccccgaaaaccgccacgcagtcggccgagcaccgacgaacgccccggaacgccaggccacgagcacgagcagcgcggcggtcaccgtcgaacgcctctgctcctcctctcccatggagacggtcggctcgtcgagcgggcgaggtgcgaacggcgggcgcgacgcgcgcgccgccgggtcttcggcgtcgcgcgagccgcttactgcgactagttcatcacactgccgcttcaagaaagggtag

SEQ ID NO: 29647 - DNA, 345 bp, Oryza sativa
  Clone ID: PAT_MRT4530_34129C.1
atgacgaaggtgaagttggctgcggtggcagagatgatgccggtgtcggtaaagaaggcaatggtgccaacaccatcggatgtggcgcgaggcggggaggttggcgacgacggcgggatagagccggctgccggtggggaggacggcacgaggctaagaggatggcacatggcgcccgcgggcgacggtcctccgccgccgccggccaaggaagcctgcgtcgccggagcgatcggcgtgagctccgcctccgccaccgccgacggcgacgaactgcatctccgctccgctccgccgcctgcgatggataaaacggtgacccacttctcttctcttcttgcgtga

SEQ ID NO: 29648 - DNA, 333 bp, Oryza sativa
  Clone ID: PAT_MRT4530_3412C.1
atgcagtatcgtgtgagcgagcgcgtggtgcgaggcctaccgctgaattgcagatgggcacgctggttcggcttcggcacaaatggatcatattctaatgcatgtgcccgactcaaagagcccggtaccgtccaaatattgcgcccatgcgagagcaagtgtaccaatcgtgttttggtcgtgggaggctctcttgcgaacatcaacggtcatcacctcatctactccctcccattcatgatccgatgccgccagctaccatctgctccactcatgctcaaccacgatgccgtctgccgctgcattcttcgctcatgcttgaacaccgagacc

SEQ ID NO: 29649 - DNA, 111 bp, Oryza sativa
  Clone ID: PAT_MRT4530_34130C.1
ataatgaatgatttacaagaaaggattacagtttttagttacagtcaaagacttcagtatgcacatattttcgtctaaagctacattaaatggacataatttagggttaca

SEQ ID NO: 29650 - DNA, 927 bp, Oryza sativa
  Clone ID: PAT_MRT4530_34131C.1
tgttagaaacccaattctcctcctgatccaaacgcccctgtgcttcaatggacccacccagagtttttggccagtgcttacgtcttgaccctgttgaattcttattagtgtcaccaaattttaggaatataaaaaagctttgaccatagagttgagtgctacaagggttgatttgcctttagatattcaacagtatgaggttaagttgtgacttgtgagccaggcatggtatgtagggttcatatccctaaactgttgatatggggctgtgctgtgatcgttttgctgaggttggtactgttgaatggtaaaccgcgcacagtccctgcttgttgtgctgtgcacatgacagatcatacttttactcagctgttttagtactttctgccaggttccttgactgtttccatttcttgtcaattgaaagatcatattcggctgtgcacatcacagatcataatatattcagcttattgcatagtgcagtttttgatatgaagtatattcaaatgcaagttatttctatcagtatgctcatgttagactgtttactattttatttatcgtagaaagttgtatgctatctaataatgttgatgttagtattactttattgttgggatattcatattgaatctgagtcagttataatgtcaagttgtcaactgatatcaaaactgacgactaatactcagcttgctgatatctgagtagtcagcatatatatgagctgactgcaaatactgaacttactgctgaggctcagtgctgatttatcatctttttcttataagatatttttgtcagctctctaggcaacatgttcctgttgtgtgtaagatttgtgcattaacatttcagcgtgtaagatcgtctgtgttcctgttttgtacttgacttataatattctgatcttgtgattttagt

SEQ ID NO: 29651 - DNA, 1068 bp, Oryza sativa
  Clone ID: PAT_MRT4530_34132C.1
ccacgcgtccgcccacgcgtccgcccacgcgtaaaaaaacctcaccatcatcgacccacttgttcctagcgatctagaacgagagacttggcaatggcgggaagcggcgagctgaagctgctgggcgtttggagcagcccgtacgcgatcagggtccgcgtcgtcctcaacctcaagtcgctgccgtacgagtacgtggaggagaacctgggcgacaagagcgacctcctcctcgcctccaacccggtgcacaagagcgtccccgtcctgctccacgccggccggccggtgaacgagtcgcaggtcatcgtgcagtacatcgacgaggtctggccgggcggcgccgggggacgcccgtccgtgatgccctctgacccctacgagcgcgcggtggcgcgcttctgggccgcctacgtcgacgacaaggtccggccggcgtggctggccatcctgttcgggagcaagacggaggaggagagggcggcggcggtggcgcaggccgtggcggcgctggagacgctagagggcgcgttcggggagtgctccaaggggaagccgttcttcggcggcgacggcgtcgggttcgtcgacgtcgtgctcggcggctacctcgggtggttcacggcgatcgacaagctgatcggtcgcaggctgattgacccggcgaggacgccggcgctggccgcgtgggaggagcggttccgcgccaccgacgcggccaagggagtcgtgccggatgacgccgacaagctgctcgagttcaggcagaccctgcttcgctggagcgcatccaaagcaaagtgagatgacatgacacgactgttttcgccatggtgatgctgaatctaagtatgctgtacgtgtgtttgtataataacaaggagaaatgctgctgcacgattgagtttccttgatcgattcctcagcatagtttcttttttttttatctagctatatatttaatatatagcgccatgttcttcataataaaagggctattttaagctgtaaattgcatacatttgtatttacataataaaaaaatgaatcttacgttgtgttgttaaa

SEQ ID NO: 29652 - DNA, 862 bp, Oryza sativa
  Clone ID: PAT_MRT4530_34133C.1
atgtcattcacacccccatctccctctcttcatctctctcccctctcctctccccatcttccctcgcttcatctcccgccggcggagcttgcacgagcagcagcgagggttgatgttggtgcgacggcggtcccaggccgacaacgccgtgccagggtgcgacggcgacgtcggcagcgccggcgccggcagaggcgtggtaacccgaggccagcgtgacctcaccatcgcggtccctgcccccgtttccaccgtccttcgggcggccctccgacctcgacggcatcctctcccaccagcgccgccacacaccgctccctctctgtcgcgtcggagagagaggagaggggagagaatgcagtccggtggccggcggccgtcgataggcgacacggcgacgcgtgagaaggggcgacgcggcagcgcggcgacatgggagaagaggctacatggcagcggtggactcggcgggctcggcggcgcggaggtggactcgcatctcgagaacaagttctacgcctccgacctcgccaacaacctccagctggacaaggacgacgacgacgacgtcctcgtcgacggcagcgacaacgccctagccgaccaggtcgattgggactgggaggccacctacttcgtccagcaccgccacaagaacaatgccgccgacttcccagacatcccacccgcggcgagggagtccctggacgcgtacatcacgcaggcggtctccctcgccgagttgctggccggctgcatcagcaccaacctaggcctcggcgacaccgaccgcgtcagggacgccttcgccccgccgttcgtcggcacacgggatggagctagacgccgtggcactcggtga

SEQ ID NO: 29653 - DNA, 281 bp, Oryza sativa
  Clone ID: PAT_MRT4530_34134C.1
gggtcttcgccgcgtagaggatgccccggaccgccagccgacaccgccggagagtcatcctcgtacgccgtcgtcttagagttagcctctagactctcgatccatgacgcttcacgcgcaaactggcggatatgcatcttttcattttgtttttcctttgataagacggagataacaaaccacagtggacttgtgagattggttggtttattgactggagatgaaatgcaatgaatggaatgcactttgatatttacgtgttttaaaaaaaaaaaaaaaaa

SEQ ID NO: 29654 - DNA, 729 bp, Oryza sativa
  Clone ID: PAT_MRT4530_34135C.1
atggggaaagatctggtattttcaataaggctcagaggaggatcaaggcgtggtgatgtcccaacttgtggcgaaggagaggcgccgcggctgacactctctctccgaaagaggaggaacacgggtaacggggaggtgcattggcaagccgggcaaggatttcacctcggagtctcatccaaacaaagcaaccgcaatggaagccaccaaatgccacctacacaccaaaggtacctgttctatgcacacaaccacctgtacaccgttgacgacttgcttagccaccacgctagaccggtggagctcgtcggtgccacccggactccactaccgtcggtccgcactggcctcacgctagaaagcgcggagccgctagagaggcgccggatctgggcttatgtggccagatccggctgtccccgcgcagccctcgccaccggaccgagacgaggaggccgccgatgccaggtggggaggaggcaggacactggatgccccagatctggaggaaaggagggatggagagaagagagggatgaagaaggggagaggaagagggagggaggcgccggcgccaccggcaccgccttcgctggtggcggcaacaagagcggaacgcgattggggagccccgcgcactcaggcagtcgcctccgtgtcgcccaaggcaagcggcacgggagtcacgggaggaggaaaagcccatgtgatttaaaatactctagataa

SEQ ID NO: 29655 - DNA, 1248 bp, Oryza sativa
  Clone ID: PAT_MRT4530_34136C.1
atgggggacgagtcggagggggagacggaggagtacctgttcaaggtggtgatcatcggggacagcgcggtggggaagagcaacctgctgtcccgctacgcccgcaacgagttcaatctccactccaaggccaccatcggcgtcgagttccagacgcagagcatggacatcaacggcaaggacgtcaaggcccagatctgggacaccgccggccaggagcgcttccgcgccgtcacctccgcctactaccgcggcgccttcggcgccctcctcgtctacgacatctcccgccgctccaccttcgacaacgtcggtcgctggctccaagaactcaacagatgcatgactcttatctggaaagcacattcggacacgactgtagccaagatgttggtgggcaacaagtgtgatctggataatatccgtgaagtgccggtagaggaaggcaaagcacttgctgaagctgaagggctgttcttcatggagacctctgctctggactcgacaaacgtgaggacagctttcgagatcgtaatcaaggagatctacagcaacgtgagcaggaagatcttgaattcggactcctacaaggcggagctatccctcaatagggattggagcaaatgggctgaaaaatgcgtgggccgtcgattcacgggcctggaaaggatggactgttgttgttgtgttgcgggcttggggcatataccagggatgcgaaacattgcatgcatcgtcgtctccagctccggtgaccgacggattgatcagatgcagaagggtgggggtggcgcgtcgtcgtcggcggtggtggtgaggatggggccgtgcggcggcgacggtggcggtgcgagggacatggacatgcgcggcgtgggtcgcgtggtgagggtggccgtccggcacggcgccgccgtggacgccatgtccgtcctgtacgagcgcaacggccacgaggagtggaccgacctgtggggcggccctggtggcacactttccgagataagcttgcagccgggcgagtacttgacgagcgtggcggggcactacggccgactagacggcgacctcgtcgtcaggtcgctcaccttcgtcagcaacatgcgggcgtacggcccgttcggccatgaggacggcgtcgcgttcgacctcccggccggcggcggcggcggcggcaagatcctcggcttccacgcgcgctccagtcgccgtctcgacgcggttggcacctacgtcaagatcggatag

SEQ ID NO: 29656 - DNA, 372 bp, Oryza sativa
  Clone ID: PAT_MRT4530_34137C.1
cacttcgtgagccgacaccgacgcgccgacgctggcgttccccaccgagccgggcgcggcggtaaaggattccacggtctgcctccgcctctcgtacctcctcgccctgacatggcgctacttatactcattttagtgtccccgactcgccaatggcgcgacctgcataaaatgctgcacccccaacttaaacgcctgtgccagcatggcctttatgtcttgcgcgacaacagggaggacgcacgtggcgaacggcgttcccaccagctgcgtagactgactcgcgaatgcgaccgtgcctgtaccggactattaagcccgcggcttccgtgagcttcactgcatggctaccgctataattagcaccgacct

SEQ ID NO: 29657 - DNA, 221 bp, Oryza sativa
  Clone ID: PAT_MRT4530_34138C.1
cgactcacttagggtaagctggtccagcctagcacgtactcgcatcttaatttcaggttcgacccacgcattcaaccattcctaagcgaggtacaagcgggggaggaagcccatcccaggcgcggtggaaacggcggcgccggtgaaggagacgaacacttgaaagggcggcctccttacgtaatccgcacacgttgtcgtcgcacctgctgacgtggtct

SEQ ID NO: 29658 - DNA, 1033 bp, Oryza sativa
  Clone ID: PAT_MRT4530_34139C.1
catgccaaacacctacacttggattctgtgtacaacgctatcagcagattaccacattcaaaccagagaagttttggtccttgaaaacttatgttatcaaggatggtaatgaaattcagcttgagtgggataggaagaaactttttgattttgatgttactgtaatgttccaaaagatggtggccagtgatggtattttaaaagtaaccgacatatcagtgaaggaagagtgcaaagcccgcccgcctggccttaatacagttaatttgcttaaggttgcatcaagtgcactaggtattggacctcagacagcaatgcacttggcagaaaggctttatacccaaggattcatcagttatccacgtacagagagcactgcctatccttcatcatttgattttagaagtgcactcgctgcacttgctcataatcctttgtggtccaatgatgttcggacgttactggacactgggtttgttaagcccaaacagggtcatgatgctggggaccatcccccaataactccaatgagattggcaacagaagaagctttgggaactgatgcttggaggctgtaccagtacatttgtcagcattttattggcactgtcagtcctgattgtagatatacgaggacttccattgagttcacttcaggtggagagactttccactgtgttggcaaccgggtcacttctaaaggatttacttctattatgccatggctggctgtgagggagaataatatccctgcatataaaaagggcgatgctgttagcatccataaggttgacatatatgagggtagcaccacacctcctgactaccttagtgagagtgaattgatctctctcatggagaagaatggcataggtacagatgcatcaattcctgtgcatgtaaacaacatctgcgagcgtaattatgttcaggtgaattccggaagaagattagtaccaacacccctgggaactacattgataagagggtatcagtgcattgatgctgatctgtgcttaccagatatccgaag

SEQ ID NO: 29659 - DNA, 516 bp, Oryza sativa
  Clone ID: PAT_MRT4530_3413C.1
tgactatcatagccacatctctataatagacaaactcataagatgaaaattctcgaatcttttggtcatagtgactgtcaagtagtgatcaacatgatagagcaccaaaaggctctcatggtggagctgcgtggcatggtcatgccattacttccgagcgacaatgaacaagccaagcttgctcttcaactcttgggagatatattgagttgctcagataaggctatctccatgctagaacttggtggagacactaaaaagctgaccaatcttgttggaggcaacgccgcggtcctcgttgccgccgccttcttcttcacagagcgggcgcaccgtggcgtgctcgtcggaggcgagctggaccagccgctctgggctgctctccggccacgtctagtcgtgagctccggtggcttcacgtttccggtggccgtcggcgcggctaaggtggtgagcaccattggcgacgaactgccgcgtgagtcgctcgaggtgttccggcccatcgacgaatga

SEQ ID NO: 29660 - DNA, 521 bp, Oryza sativa
  unsure (1)..(521): unsure at all n locations
  Clone ID: PAT_MRT4530_34140C.1
ctggtggagagcctgtgtgacctattcgtgtactaacttacataggtgatacatacatgacatgcgtgatagtggagaaccttgnttctaagccttcgaaatgggatgcatctccttgccccctagaatccttttgctcggagactaatgccggaagcgaaatactcccacccctttgccacaggatgacgagcnaccaaggtggacatcacggttatccacgggaaagctatctggggaaacataaactgatgcactgtgcttacctttattgtgtggttaaaatccacgacccagatgtaacttaggtacttgtgttgaaaatgcctcgagtttctgagttgtatgcaacccaagctcttggctgtatttacgttgcacggcttgcactttttaaccccttacccttatctataaacccgtagacancttgctctcagggtatggattaccctgtgctatttatattatctttttgagcctggaacggctggtagatccaaaaaaaaaaaaaaaaaaaa

SEQ ID NO: 29661 - DNA, 203 bp, Oryza sativa
  unsure (1)..(203): unsure at all n locations
  Clone ID: PAT_MRT4530_34141C.1
ctcncactgaccgaagctacctagctnaattgcctagcttctttaccgatcatcattctatatctggcggctttgaacggtaaggcggtggcggccgtgatggaggtggcgccggagatggaggcagcggttgctccggagacacgctcacccagtgaatccacagcgcccacagattacacctcggagcacccaaaggggct

SEQ ID NO: 29662 - DNA, 1218 bp, Oryza sativa
  Clone ID: PAT_MRT4530_34142C.1
atgactgcccggaaacccgtgaggaggcgatgtacatgggaaacaacaacaacaacgggcatcgtccacaaggaggtcaggggtggaaccaaccacgcccatattatcaaggagaagatccacatcaacgtgccattgttagacgccatgcaagagccaacatacgcccgttatctcaaggacatactcaacagcaagagaccgctcccaacaacggaggtggtcaagctgacggaacaatgcagcaacgtaatactccacaagctcccggagaagaagaaagatgcggggtgtcctatgatcacctgcttgataggggcacaacagttcgaccaggccttgtgcgaccttggagccagtgtcagcgtcatgccaaaagacgtcttcgacaagctcaacttcacggtgttgttaccaacaacaatgcgccttcaactggctgattcgttagtccgttacccggcagggatagcggaggatgtgtcagttaagacacgggatttctttatcccggttgacttcgcggtgctggacatggacacaggaaaagagacgccgctcatcctggggcgcccgttccttagcaccatgggagccaacattgatgtgggaacggggagtatccgtttccacatcaacgacaaggaagagaagtttgagtttcaaccgaggacggaacaatgctccatggtcaaaataaagtacgggccaaacccacagaatattcaagaggtcgaagtggagccacccaaaatggacagcctgccagctcagaagaagccgctgtccgcaccaaaaccaaagaaggtgtggagggagaagccaaagacgcccgctccatcatctccggagacggatgtcttgatggaagacgccgaagctccgcgacgactcctgaacgacaccgaccttgaccttgtcagtgatcgggagagacaagcctactacatgctgagcgaccgggaatgtatgaggcaggttgggagccaactgaggacgcacccggatggacccaagctccacgtcatagtatcggagtctcaacctgggcaagcgccagtgaggactggtggcgtgcgcctcatgacatccaatggggggacaaccaaccctccagatcaagtgttcgccaacttcaacaacatgatgcagcaacagcacgatgaccttcaagcgtacttccgctttcaggggttcaatccttatcaaggaccctga

SEQ ID NO: 29663 - DNA, 320 bp, Oryza sativa
  Clone ID: PAT_MRT4530_34143C.1
caaacttgggtagggttaaaaaaaaaaataaacgatttattcacccatactaatattttttctacaggcatatgatttctcatattccatagaaaaaattttatacctcccaccggattatgttatattgaagaaaaatacaccacacccctttgaaaatttttaagaaaacattccccaccaccgccttggtaacaaaaattacagaatgggcaaaagaacactattctcctataaaatatgaatcgtgagattcctttacatcatttcttagacttcataaaccccctatattacgtatgcgttaacacacaccaccc

SEQ ID NO: 29664 - DNA, 1746 bp, Oryza sativa
  Clone ID: PAT_MRT4530_34144C.1
atggcggggaggagcgagctggtggtgagcttcggggagatgctgatagacttcgtgccgacggtggcgggggtgtcgctggcggaggcgccggcgttcgtcaaggcgccagggggggcgccggcgaacgtggccatcgcggtggcgcggctcggcggcggggccgcgttcgtcggcaagctgggggacgacgagttcgggcggatgctcgcggccatcctccgcgacaacggcgtcgacgacggcggggtcgtgttcgacgccggggcgcgcaccgcgctcgccttcgtcaccctccgcgccgacggggagcgcgagttcatgttctaccgcaaccccagcgccgacatgctcctcacccacgccgagctcaacgtcgagctcatcaagagggctgccgtcttccattatggatcaataagcttgatagctgagccctgccggtcagcacatttgcgtgccatggagattgcgaaagaagctggtgcgctgctatcttatgacccgaatctcagggaggcattgtggccctcccgtgaggaggctcgcaccaagatcttgagcatctgggaccaggcagacattgtcaaggtcagcgaggtcgagcttgagttcttgaccggcattgactcagtagaggatgatgttgtcatgaagctatggcgccctaccatgaagctcctccttgtgactcttggagatcaaggatgcaagtactatgccagggatcagaagaagcttgaggaagcgattaaatttgccaatgcgtgcggagcaatcaccgccacaaagaaaggggcaatcccatcactgcccaccgaagttgaggtcttgaagttgatggagatgctggaagcctggaagtattgtgatgcagtgatgctcctgcttctatatatgatgcaaaaactgccctggtgtttggtgtggtatgaggtggatgcaacttcacatgtgttcggctggaagcctgaagccgcttggccccgcgagccagcgcgcgtgcccgagccgcgccactccatccgccgcgcctcccgttgcaagccgcgcgcgcgtgccgtggtggccgaccgcccggtcgccgccgccgtcagcctctgcacgcgcctgtcgccagtgtcgccgctccgctccaaaccgccccgccgtcatcgccgtcgtcatcgcccggccccgccactccgcgcgcaagccgccaagggacagaggcagcatccctcctccctctgccgcgtcgcccccgctcacctcctcctttttcccgaatcggcaaaggggcaagccccctttctccccctccttttcccctttttcctcctcgccggcgtcatcctccctgtcgccgctttggccgcgaccgccgagcgccagctcgcgcccttgaccgcgcaagtcggttcccaaaccgacattgccgcccatttaaaccccagcctccccttcccttcctcttccattcgcctccgtgccattgccgccgcccccgtgctctgtctcgcctccgccgtccttcgccgagcgccgggagaaccggtgcgttcgaggacgcggaaggggacttcggccgcgctctcttcttcctcttccccggcccgaggccggagagattactcccgcgccgtcggcctctcgtcacagcgccccgtcccgcacggcgccacgtcggcgccagctcagccgaggtcgggacgggccgaccccggtcagtccctccccgtgcgcgcgttccaccgcgagccgtga

SEQ ID NO: 29665 - DNA, 1572 bp, Oryza sativa
  Clone ID: PAT_MRT4530_34145C.1
ctaaaaacgaaagtacgcctgaaggtcatcatgctgttgttgcatcatgttgttgatgttggggaattgagcatcagcagattgttgccattcttgcgtttgagctgtgtgttccgtgaggttgtactggatctcccccgtctgcatatcaagggtgtccatcctcctagtgatttcacccaagtcccaacgagaggaactcgagcgccattcacttggagatggaggcacaccacttgatctaggaggttgattgtccctcccagtggatgtcatgaggcgcatgccaccggtcctcactggcgcttgaccaggttgagactccgatgttatggcgtggagcttgggtccttccgggtgcatccctagttggtgcccaacctgcctcgtatatcgagtaatcagagaagtgcactcaacaagagcagagaactttatactttctaaccattgtcttatcatacatttcacaggagaaattttgatctttctaaccatggcaaacatgataattagttcatctctcctaatgggtctcagatcacttctaggaaacaaagtcaaagcaatccatttgtgcatgagcctaagtgtaggattatggatatcattcgttctagatttcttgcaaattggagcaccagaaatatcttcccaaaacctatttttctcgaacctagaaattcctttcatagcaaatctctgccaaccaacagctttccaaatagaacgaaatttaacatccatacctatctttttcagcaattccggtgagtattctcgtgtgtgagcatactcccggtcgctcagcatgtagtaggcttgtctctcccgatcactgacaaggtcgaggtcagcgtcgctcaggagttgtcgcggagcgtcggcgtcttccatcgaggcatcggctgatgaacgagtactagactcgtcatgacgacttgatggagagcccgaccccttgaacagatgagacagtcgcctcctcatacaggctatccgtcttgggtggctccacttcgacctcttgaatgttctgcgggtttggcccgtacttgattctgaccatggagcctccttcccgttgatatggaaacggatactccccgttcccacgtcaatgttggctcctgcggtgctaaggaacggactgcctaggatgagcggcgtctccttcctcgtgtccatgtccagcaccacgaaatcaaacgcgatgaagaaatcccgtatcttgactggcacatcctccactatccccaccgggtaacggactgacgagtcagccagttggaggcgcatcggtgttggtgccaacaccgtgaagttgagcttgtcaaagacatcttttgacatgacgctgacgctggctccatggtcgcacaaaggcatcgcctcctcacgggtttccgggcagtcgttcccagaatgacctgtgacgccgcagacttcacacttgatgtgagagtccaaggccttgacggtgccttgtggccgtttcttgtggtcgtccaatcgtttcatgaggaggtccagcttggcagcaagtaactccgtctccttgacggtgtgcat

SEQ ID NO: 29666 - DNA, 1496 bp, Oryza sativa
  Clone ID: PAT_MRT4530_34146C.1
agcaaaccaaaataaaacttccaacaaaaattcgcagtgccacgactacactgaccgttggaatccaacggtcgaaagtggggccgattgggcccaccaggggttcggccgaacacctggttcggccgaaccggccaggcaacggtcggctgcctccctctttgaggcaatggctagtgggccccacagtgatcgggaaagacaagcctactacatgttgagcgaccgggagtatgctcacacacgagaatactctccggagctgctaaaaaagataggtatggatgttgaatttcgttctatttggaaagtggttggttggcaaagatttgctgtgaaaggaatttctgggttcgagaaaaataggttttgggaagatatttctggtgctccaatttgcaagaaacctatgacgaatgatatccataatcctacacttaggctcatgcataaatggattgctatgactttgtttcctagaggtgatcttagacccattaggagggatgaattgattatcatgtttgccatggttagaaagatcaaaattgctcctgtgaaatccgctcgtccgtgtattgatgagacctatctagtgcaagggcatattctgaagcatggagtagatggatctttgatttactttttccccggttgtacaaatgaaatcccgttgccaaatgcggggtatcatttgtacaactgccatgaactaaccatttccctgcaaaccatagaagaatttcgtgtaggtggagcatacagggagacgcgcaacatgacaaggaatgaacgagagagttcatcatcctcaacacccgtacagatgtatgaagcaggttgggcaccagctggggatgcacccggatggacccaagctctacgccacagcatcggagtcttaacctgggcgagtgccagtgaggaccggtggcgtgcgcctcatgacatccaatggggggacaaccaaccttccagatcaagtggtgtgcctccattccttgatatgcagatgggggagatccagtacaacctcatggaacacatagctcaaacgcaagaatggcaacaatctgctgatgctcagttcgccaacttcaacaacatgatgctgcaacagcacgatgaccttcaagcgtacttccgttttcaggggttcaatccttatcaaggatcctgagcgaaagccaagcttggggaagacacctctccccctccccactaagccatcccctctcctaatcagtaaaggaaagatttttgggagaagaaaatcaagtggtgtgcctccatctccaagtaaatggcgctcgagttcctctcattgggacttgggtgaaatcactaggagaatggacacccttgatatgcagacaggagagatccagtacaacctcatggaaaatatagcacaaacgcaagaatggcaacaatctgttgacgctgagttcgcaaacttcaacaacatgatgcagcaacagcacgatgacctttaa

SEQ ID NO: 29667 - DNA, 852 bp, Oryza sativa
  Clone ID: PAT_MRT4530_34147C.1
atgacccccgtggggatcagccacgtcgggagacctccaagctttcatgacaaggcattttcaaagccgatacagggcgcggcccaagggaaaaggagcgaaccagccgagctaaatgggccggccggcccaaggcggcccaagtgcgcgcgcgcgggaggggaggagagagagggccggtggaccgggctcaccgtgcgcggtcccgggtgggacccgcttgtcagcggctcggctcaccgtgcggagggagcacgcggcgcacgcgcgcgggcgggggagggacgcggtgcacgcgcgcggtctgcggaggaacggaggcggcgggcccacgcgcagcctcacggctcgcggtggaacgcgcgcacgggaggggctgaccggggtcggcccgtcccgacctcggctgagctggcgccgacgtggcgcctacgtggctgccacgcgggccggcgggaggtagacgacgacgccggccggaacggacggcggacaacagcggcgagcggcggagcgaaccacggcgataccggcgaaagcgagcacaccgggtggttgcacgagacgaggggagacgagccaacggctcggattcgccggaggaagcttgacggtggcgaatcgcggcggcggcaaccggcggggagggaagagggaaacagcgacgaggtcacgaggggccgattcccggcggtgagagcatctacgcggccacgggaatccgatgctagcgtcggattgggcggagctacgccgagcgaggctggcgacgagcgggtgctacggagctcgagcggcgacggcggcgagcacacggcgggcgacggcaacggtcggggcggcgccggctag

SEQ ID NO: 29668 - DNA, 2048 bp, Oryza sativa
  Clone ID: PAT_MRT4530_34148C.1
cggcacgaggccccccccttttttttgtttgtttttttctttttttttttgttgggttggcatagtacgtgtggattttaagatccaactttctatcacatatttgacatacttgaatgcaacctgctgttgttcttctgttcaccaagtgttttaagcatgctactggatcttcactactacctagaattaggatagctactgttttctggattttccaggctagttattaatttatgtgctaataataataatcaagattcataatcatagggctcaaaaagagccacacaagggtcatcgtcgtactgcagaatggtggcagctcgctcaaactcctccctgagaaccctgattgtctgcctgtcgacaacacgaccgaggtcatggctggtctcgaaaggatcctcgatgcatatcagatggcgatcgtttccaacgcgagtcgtccagttcttctcctgcttgctgattgtgttccccatgcggacggagatgacatcgttcctgtaatcgtgatggaatgcccagtagtggaagaatgcccacagtaactcggcgatgctctccttgttttcagcaccaaaatctttaagctggtcaacttggtcgaagtatgcacattcagtgccatcgacaaccacagtatatgttggctccatcgcctgcaaacatggtagaatcttgggctctctttgctgcaagaagctaatgcacataagcacatatgcatagctcgaaagggttccacgatatgtttcattaacgccccttagtttggcccagtgctttacaatgaaggccagctgaagcaacctctcatctatctgggcataatccttgagaagctttgtgttagcaacagcaaagagattgttgacacagatatcacatgacaagccacttcctggatctgcaatcttcacaattggaactcgagcactggtaatagcctcaacattgtcgaaatcatccttgcgcaatgtctctgctaatgcgagaagaagctcagcaatgttctcttctgcagcagtgtcaatttggagacaaacatctacatcgctatgcgaatttccgaaggaattagcacacgatccatagagatgcagctgggcgttgggccactctttgctcacagaattcgtgagggattcgatgagctgcctctgcttggccttgtgctcctctgatggattgagggattcgtagagggagagcaatccgggcgtgaaggcgtcgatgtcatggcggcgttccaccctccaccgccgcgttccgactcgctggcgcggcggcggcggcggcggttgatccggcggcgatccgagctgctccattggtttctcgctgccggcgccatcggcgacgacggcgaggaggtcgtgatcggcggcgacgtcgaaagggtcatcgccgtcgccgtcgtcttgttcgtcgtcgtcgacgtccacctgctcgtccctctcatctccaccggcatagcccgcgcccatcgccgcctggtcctcatccccgccgccgcagtcctcgcccttcttctccacggcgacccacaccttcttctccctcttacgcaccaccgcccgcctctcgccgccggtggcctcgcctgcattcgctgctccgatgaagcctcctcccaccctccgccgctcgaagccacgacgtccaccattcccgacgaaacctccatacctccaccccaccaccccactccggccgccaaagcaaccaccaccaccattgcccatccgccgcggagggcaacgagtcggcggcggggccgtcgccgtcgccggcggaggtatcgagagaggcgggagccaggaagggcgcgtggggggcacgatgaagaggcgctcctcggggcggggtggctgggggagcggcacgggtggcgcgatgaggcggtggggcgggacgaacagcgcggcgggaggaggggtggtggtggtggtggtggccggcttcggcgaggggaggaggaaccggaagaatccatcgtcggcgagatgccgccgccgccgcaagggctcgccgccgaccat

SEQ ID NO: 29669 - DNA, 1536 bp, Oryza sativa
  Clone ID: PAT_MRT4530_34149C.1
atggcccggccggcccaaaaggcggcccagagcgcgcgcgggagggaagaaaagaggggaccggtggaccgggctcaccgcgcgcggtcccgggtgggacccgcttgtcagcggctcggctcaccgcgcggagggagcacgcggtgcacgcgcgcgggcggggaaggaacgcggtgcatgcgcgcggtccgcggtggacgcaggtgcggcgggcccacgcgcagcctcacggctcgcggtggatcgcgcgcacgcggagggaccgaccggggtcggcccgacccggtctggctgagctggcgccgacgtggcgcctacgtggctgccacgtgggctggcgggaggtagacgacgatccggccgcgaaaggacggcgggcggcggcggcgagcggcggagcgaaccacggtgatacgggcaaagcgagcacaccgggcggttgttcgtgacgaggggagacgaaccaacggctcggattcgccggaggttgctcgacggcggcggattgcggcggcggcaaccggcggcgggagaaggggaaaacggtgacgaagctacgaggggtcgattcccggcggtgagagcatctacgcggcgtcgggaactcgacgctagcgtcggattggacggaactacgccgagcgaggccggcgacgagcgggtgctacggagctcgggcggcgacggcggcgagcacacggcgagcgacggcaacgaggaagaagggggcgcccccggagtccctttccgcgtccacgaacgcaccggctctcccggcgcttggcgatggacggcggaggcaaggcagagcacgggagcggcgacaacgggcggtcaagccggcgagctggcgctccggctagcgtccaaagcggcgacaggaggtgacgctggcgagaggggaaaaaggggagaaaaagaggaaaaggagggagagaaaggggctcgcccctttgccgattcgggaaaaggaggagggagcggggcgactcggcagagggagaggggctctctgcctccgccccttggaggctagcgcgcggagtggcgggggccgggcgatgacgacggcgatgacggcggggcggtttggagcggcgcgacgacacgggcgacaggcgcgggctggcgcggcagagggtgacggcggcggcgaccgggcggtcggccactcggcacgcgcgcgcgggaaacaacgggcggcgcccacgcgggcgcgcgcgcgagcgacggcgcgcggcgccggctttgcgagcggggagctcgcgcgagaggagggggcgctcggcgcggctctcgcacgcgcgagcagcgagcgggggggggggggaaacgcgccggggaaagcgagagagagagagagagagggagggagggagcgctcggcgcggcggctcacgcgcacgcgcgcgcggcgtgcgggcgaggctgagcggggggggagagcgcgagagagagagagagagcgcccggggagagggggccgggggagagatgggccgagcggaaatcggcccatcgaacccggaggaggca

SEQ ID NO: 29670 - DNA, 531 bp, Oryza sativa
  Clone ID: PAT_MRT4530_3414C.1
gtcggcagcgtgggagcgtgggatagcgagctcgggacagatctggcgacggggcgttccaaatcgaggctgacaacaagggcagtcttctccggcgtggatctagccaacgcgagctcgactagggcggcggtctctccgtcctctctctccttctccatatacgcgtctctcctttcccttctccaccgctccgagagattgatgaggagtgatcgggtgaccattgtcatcgccatccccttccttatcgccaaggcagctcaggctgccgcctccgccgcccatcctccgacagcaacaggacacgcaaacctggcaaggtatggtctccacacccctttctcttccaccacaggcagaggctttgctcttgctccggtccaagccaaggtgggcgccccgcaagatatcttcttcttccccaaatcgaggacccgattgcggcagctccggtggccggagcagctccctggtcgacgcgtcgccgtctccgtcccgggtacccgcgctcgccgtttcatccggtga

SEQ ID NO: 29671 - DNA, 770 bp, Oryza sativa
  Clone ID: PAT_MRT4530_34150C.1
gaactaatgggatatcaaaagaagcgtcatctaatgactcggctgacaaggagattcagccagaaaagaccgtgccgcaggagtactgcgacacgcggttgctgctgtttccccaacggattaggaaaccgtcagtagacgagcagtttgctcgttttgttgaagtaatccaaaagattcacatcaacatgccattgttggacgctatgcaaatgccgacatacacccgttatctcaaggacatactcaacaacaagagaccgctcccaacaacggaggtggtgaagctgacagaacaatgcagcaacgtcgtactccacaagctcccggagaagaagaaagatccgaggtgtcccatgatcacctgctcgattagggcacaacaattcgaccaggccttgtgcgatcttggagctagcgtcagcgtcatgccaaaagccgtcttcgacaagcttaacttcatggaaacaacaatgcctaggaaccgctattggaggacgtcggtaaaatcacctgtaccggccaagaagttagagcagccggctcagaagaagccatcttccgcaccaaaatcaaagaaggtgtggaaggaaaagccgaaaacgcccgctccatcacctccagagacgggcgtggtgtctagattacgggatatcattatttggggttatatattgcggatgagaggtgggccgctgatggtgacagctcattacgggaactcgacagtctggggtggcttctcgaagtaccaggagggcatcggatag

SEQ ID NO: 29672 - DNA, 342 bp, Oryza sativa
  Clone ID: PAT_MRT4530_34151C.1
atgaagaagaaggacgccggcgtcgtcgatgacggcggcaatggcgtgcggctgcaggatcgggtggccatggcggagttctgctggatcgtcctcgggttcttccgctgcacagccgagggcgcgctcgtgagggtggtggccgtcttctacgtggtggtgctgctgccgatgctgtgcctcgaggtgttcccgcgggcgccgccgccggtgtcgcttctcaacgccgccatgggcgtcttgctcatgtacaggttgtaccttgtcctgcgcttcgagtacttcgaggagaagaagaagcaggaggaggaggatcaagcagcagcagctgcagcaagctag

SEQ ID NO: 29673 - DNA, 2241 bp, Oryza sativa
  Clone ID: PAT_MRT4530_34152C.1
atgactggtttcaacttgccggaaaacttcaaagaaaatccagaagctttcttccggagtgtcaggccacgagtcgctgctccgcagaaaactctaccgacagagaaatcagccgtaccagcgccaccgaccttcaagactatggcaaacaagactctccgcgaattcactgctccctctgctgacaatgtggccattgggccgcagatcaacatgggagacgtggatttcgacttgaagtccagcctcatcatgatggcgcaggctagcccgttctgtggcaagcctaatgaggatgccaatgctcatctgcaatacacgtacaccatcaagggcgtcagtccagacgccgttaggctaaggctgtttccgttctcccttctcgggagagcgaagcagtggttttatgccaaccgtgctgctgtcaacacctgggacaaatactctacggcattcctctcgaaattcttcccgatgggcaaaaccaatgcccttcgtagaaggattttaagtttccagcagacaagagatgagtctattcctgaagtatgggaacgactgcaggagtacatggccgcatgtcctcatcatgggatggacgactggctgatcctgcagaacttttacaatggactcaccccgatgtcccgcgatcaccttgacgcggcagctggaggagctttcttctctaaaacagttcaaggaaccattgatttaatagagaagatggtctccaatatgggttggagcgaggaacgactccagacccatcagcgaggcatgcacgccgtcaaggagacggagttacttgctgccaagctggaccttctcatgaaacgtttggacgaccacgagaaacggccacaaggcaccgtcaaggcgttggactcacacgttatgtgtgagctagctcagttggcatccttagtccctgcaaatgaaactgggaggattccggggcaacccgactcctccattgaaaatgtcaaggcgatcacgatgaggggaggtcccacatacgcccgttatctcaaggatatactcaacaacaagagacggctcctaacaacggaggtggtcaagctgatagaacaatgcagcaacttgatactccacaagctcctagaaaagaagaaagatccggggtgtcctacgatcatatgctcgatcggggcacaacaattcgaccaggccttgtgcgaccttggagctagtgtcagcgtcatgccgaaagacgtcttcgacaagctcaacttcacggtgttggcaccaacaccgatgcgccttcaactggctgactcgtcagtccgttacccagtagggatagcggaggatgtgccagtcaagatacgggatttcttcatcacggttgacttcgtggtactggacatggacacgggaaaagaaacgccggtcatcctggggcgtccgttccttagtaccgcagtagccaacattgacgtgggaacagggagtatccgttttcatattaacgggaaggaggaaaagtttgagtttcaaccgaggacagaacaatgctccgtgaatttcctagagaaggaaataacgatgcccaagcaccgttattggaagacgccggtaaaaccacccataccggccaagaagttagagcagccggctcagaagaagccgtcttccgcaccaaagccgaagaaggtgtggaaggaaaagccaaagacgcccgctccatcacccccgaagatgggtggaactaaatcagaaggaggaaattcttcaaatgaatctttcaaagcaaaccaaaataaaattttcaatgtaaatttgctgtgccacgaccacactgaccgttggaatccaacggccaaaagtggggccggttgggcccaccaggggttcggccgaaccagtgactggccaggccaacggtcggctgcctctctttttgaggcaatggttagtgggccccacagaatgaggaggcgactgtctcgtctgttcaaggggtccggctcttcatcaagtcatcatgacgagtctagtactcgttcatcagcagatgtctcgatggaagatgccgaagctctgaggcgactcctaaacgacaccgacctcgaacttgtcagtgatcgggagagacaaacctactacatgctgagcgaccaggagtatgctcacacgcgagagtactcaccggagctgctaaaaaagataggtatggatgttgagtttcactctatttggaaagctgttgattggtag

SEQ ID NO: 29674 - DNA, 1947 bp, Oryza sativa
  Clone ID: PAT_MRT4530_34153C.1
atggcgcaggctagtccgttctgtggcaagcctaatgaggatgccaatgctcatctgcaacaattcctggagatctgtagcacgtacaccatcaagggcctgagctttaataaaatgatagaaacacagctagctcagttggcatccttagtccctgcaaatgaaactgggaggattccgggggaacccgactcctccattgaaaatgtcaaggcgatcacgacgaggggtggaactaatgggatatcaaaagaagcgctatctaatgactcggttgacaaggaagttcagccagaaaagacagtgccgcaggagtactgcgacacacggttgctgccgttccctcaacggagtaggaaaccgtcagtggatgagcaattcgctcgttttgttgaagtaatccagaagatccacatcaacgtgccgttgttggacgccatcgtcatgccaaaagacgtcttcgacaagctcaacttcacggtattggcaccaacaccaatgcgccttcaactgccttcaacgccgctcatcctggggcgcccttttcttagcaccgcaagagccaacattgacgtgggaacggggagtatccgtttccacatcaatgggaaggaagagaagtttgagtttcaaccgaggacgaaacaatgttccatggtcaggataaagtacgggctgaacccacagaatattcaagaggtcgaagtggagccacccaaaacggacagcctggtgaaattcatgcagaatttcctggagctggaaacaacgatgcccaggaactgttattggaagacaccggggtccggctcttcatcaagtcatcatgacgagtctagcactcgttcatcagctgatgtctcgatggaagacgccgaagctctgcgacgactcctaaacgaaactgacctcgaccttgtcaatgatcgggagagacaagcctactacatgctgagcgaccgggagtatgctcacacgcgagaatactctccggagctgctgaaaaatataggtatggatgttgaatgtcgttctatttggaaagcggttagttggcagagatttgctgtggtagatgagcctggttctcgtttgcttactttgcaatttctgtgcagtttgaaagaaatagaagatggaatttcctttcgctttttccgtaagaagtacacagttacatggaaaggcttaagtactgtcacgaccggaattaacccaacaggcattccattcgtgcgtgtattattccttgtcctaggaggcaagactgagccacaaactaaaccttacccactagatatgtggaagtacggtagagctttgcaacagaggcccgaagaccggtccttatggtggccgaggtgctactatcaaaaccatgcacctcgagtccagcctaaaaccattttgagggttttgaatagagggggagccgaggggagggggcacgcaggccgggtccacaggagtggtgggcccaacgcggcagcctctcggtccacggtggaccgggtgcacccgcgggctcaccagccaatgccgtgggtcccatgcgtcagccgcacccgaaggaacgggtggctgatggccaggccccacgcggcggccacacggcgcgcccggaggcggccacgttggcgcggtcggcgggaggctgcgcccgcacccctatggtcgccgacggcggccataggcgcggcggagcggcggccaagagaggggaagggaagggggaaagaggcggcggtccacggctcaccccgggtcaagggagcgacggaggaggtggccggcgaggagggaggcggtggcgcagctcaggttgatggggacggcggtgtttcggcggtcggcgagctcggcgaggcggtggacggggtcgccgccggtgcgaaaaacccggaggggacgacgccgaggcgggggacggtcccggcgagcggataa

SEQ ID NO: 29675 - DNA, 305 bp, Oryza sativa
  Clone ID: PAT_MRT4530_34154C.1
aaacattaaataccacccgggggtaaacaacctaattttataattaattcacaacaccatatttcattatcaggttcaaaaccttcacaaaaatacacactacctgtacaaatttcacccttttttcaatactcgtacatccatccactctgtccacaccaatacttacatttatactgtacacttacttacatttacttcacctcgtacacacacccacacttttcttcaaaaactctcattgtcgtcaacctaactatcttaacttaaggctatgcttctccattgcaacactgcggcggctg

SEQ ID NO: 29676 - DNA, 603 bp, Oryza sativa
  Clone ID: PAT_MRT4530_34155C.1
atgactggtttcaacctgccggaaaacttcaaagaaaatccagaagcttttttccggagcgttaggccgcgagtcgttgctcagcagaaaactctaccgacagagaaaccaaccgtaccagcgccaccgaccttcaagattatggccaacaagactcttcgcgagttcgctgctgacaatgtggtcgtcgggccgcaagtcaacataggagatgtggatttcgacttgaagttctgtggcaaggctaatgaggatgcccatgctcatttgcagcaattcctggagatatgcagtatgtacaacataaagggagtcagtcctaacgctgtcaggctgcggctgtttccgttctccctcctcggtttccagcagacaagggatgatccattccgtaaacatgggtacgactgcaggagtacgtggccgcctgcctcattatgggatggacgactggctgatcctgcagaacttttacaatgggctcaccccaatgtcccgcgatcacctggacgcggcagctggaggagccttcttctagaggggatggagcgggcgtctttggcttttccctccacaccttctttgatttcagtgcggaagacg

SEQ ID NO: 29677 - DNA, 228 bp, Oryza sativa
  Clone ID: PAT_MRT4530_34156C.1
atggaggaggtgcaaatcgacagggagctgcggcaatgccgcgacgatgcaaccttcggtctcctttggcgtgcagactgcttgacaaacctgcttcaccgggctcaaccagaattcaccatggagttcgccgttgaatctgaggagcttgagctcaacccgaacaacaaaccctgcatggaagctgctacaaaaagaaactacgagaatgaaggaacccaaatctag

SEQ ID NO: 29678 - DNA, 383 bp, Oryza sativa
  Clone ID: PAT_MRT4530_34157C.1
aatacattgaggaattttgatccaagttccacacgcctataggatatatatgctgttaacatccacgcgtctagagaatacacgagcatcactcagtttgatgctgttactcacagatacaggcaactttctctgctgccgcatctcatgttgcagcaacagatgcttagcccatgcggtgagttcttaaggcagcaatgcggcgcaggggctacccccttcttgcaaacacccgtgtgtcaactgagaaactgccaagtcatgcagcagcagtgatgccaacaactcacgatgatcgcacaacattctgactggcaagccattagcagtgttcacgctattgtgcatgagctactgctacaacagttagctagcgtctactt

SEQ ID NO: 29679 - DNA, 644 bp, Oryza sativa
  Clone ID: PAT_MRT4530_34158C.1
gtggatccccgggctgcaggaatcggcacgaggctgtgaaatactgaaatattactgtttcttaccgagatgccaggaaacgaatccgtgcaccgcgaccacactggcaatgccttgagatgttacatcattagattgttttacaaattacaattacaaggcctccattgaccagtcaccattctagatcaacttactcctgaagttcacggatagctagtggcaccagatgattacgcgatttaagtacacgatggctcaaaacttttccccatgccatcctgcagttggcaggtaaaatcgttataagaaaagagttagatattcccaagtggaacactggcaatgccggcaacttgtaattaaaaccgaagcaacaattttcgaaatattttccatggaagattcgccgtctcatgcatgggccaccacctagatgagctcagccgtgacgtgatcgccggctacgtgggaatctatgctttctcactgaccgaggatcctctatggctagagcagccatcaagcaagcccagacctgatgacgttactgtgcatccgttcatacttcatctcgtaatttcgatgaccatgaaagtatcaaaaccatccgaaaaatctcttgtaattgttctcacatatca

SEQ ID NO: 29680 - DNA, 328 bp, Oryza sativa
  Clone ID: PAT_MRT4530_34159C.1
gtacgaacagaactgcacctgcttttatattccaagctatatactgctgcaaataaacagacttgtgagtatggcacaaagcacacacaccacttgtggagggtaccttgaggacagtgctactcgctcttcgggcatacaagaactaagctacacgggcatgattaaatcatcaaagcacttatcagaacaagtctgactaataagagctaaaactttttattttgagcaaaagattcttcttcacctccattgcaggatggggactgcatccaatctttaccagattttatcagagcaccgggggtgatggctgatcataccaatg

SEQ ID NO: 29681 - DNA, 2300 bp, Oryza sativa
  Clone ID: PAT_MRT4530_3415C.1
agtcacgcggcctcatcctgcttctgctcacgaaaagagaaaaatcggaggaggagagagagagaagaggggaggggcagaggagagggaggctctctactcctagcactgcccatgtcggcggcatcgtcgagcggcgccggcggcgccctcatcaacgacgtgctcaccgacgacgtgctccgcgcggtgctggcgcggctggtgcccgaggcggagcgggacgcgttcgggagctcgtgtgccgctcgctggcgtccggatccagagggcggcggcgccggcggctgctgattccgccgcctcgctgcccgctgccaagagcacccccggtgaatttgtgagatcagttgggagtaaggacatttcggctgctgtaaaattggttttcataagcagagcagcagatgaggctaactgttggccaagtgcatcgacatgtgcttgcattggcatcttcgcgatcatgcttcgtcctcggtgacaacctcccattgagaatgctttcattaccacgagcggttagatttcaccagaccgcttggcttggtactgaaacagtacaagataagagtgcttcactaactctagctagtcttgaagggcaaaacaaagttgaatatggtaagaaagaaaaagcaacacgcattggaggtccaaagccgtcttcaagggcttctgctcttaaggtgaaaccaaaagtttcttcatttaattccaaaccagcaaagagcaccttaccgaaatcagcagtagtgaagaagactctgaagatagatgaatctcttttctctgcaaaatcatttgaagagcttggtttgccgcctttgcttatagatcggttgaacaaggaaggtctaagtactccaactgaggtccagtctgctgctattcctatcatttcacaaaagcatgatgcagttatccagtcatatacgggctcagggaagacactcgcttaccttctccctattctttctgaaataggccccctaaagaggcctacagaacaagatggttctgataagagatcaggtgtagaggcagttattgttgctccttccagagaattaggaatgcagatagtgcgagaagtggagaagattttgggccctaatgataagaggcttgtccaacaacttgttggtggggctaatcgttcgaggcaggaagaagcattgaaaaagaacaagccacttattgttgtgggaacacctggtcgtatttctgaaatttcagcagggggcaagctacacacccatggttgccgctttcttgtactggatgaagttgaccagcttttgtctttcaattatcgtgaagatatgcatagaatacttgaacatgtaggaaggaaatcgggtacttcatctagagatattcttggccctcttgcaaggcggtctgagcgccagactatcttggtttctgcaacaataccgttttcagttatacgagcagccaggagttggggtcacgatccagtccttgttagagctatgagtgttgttccacttgattcaattactgttccaagacctgtgctgtcccagacagatgccaaccccaactctccatcaaattcagtgaatcaagctgcagttaacagcttaccaccatctttggaacattactattgtatatccaaggctcaacacaaagttgacactttgaggagatgtatccatgctctggaagctcagacagttattgcatttatgaacaacaccaagccattgaaagatgttgtatttaagttggaggcccgtgggatgaaagctactgagctacatggagatcttggaaagcttgcaagatcaactgtgctgaaaaagttcaaggatggtgaattcagagttctagttacaaatgagttgtctgccagaggactggacgtgccagaatgtgatcttgtgattaatctggatcttccaacagactctacacactatgcccacagagctggccgaacgggccgtctagggcggaaaggaactgtggtcacaatatgcgaagaaactgaaacatttgttgtaagaaaaatgcgcaagcaattagctgtacccatcaagccatgcgaattcacggaaggcaagttgcttgttcataatgaggaagatgtagaataagctctgcattgtcgaaatgacatttaatgtcttgaagtgttatttgtgtatgggcatttctcatagattgtattatcttaaaatgttatcaaccgatgtttttttgctcgatacaaatattcagataaatgggaatagttgtctttcctgggaaaaaaaacaaaaaaaaaa

SEQ ID NO: 29682 - DNA, 174 bp, Oryza sativa
  Clone ID: PAT_MRT4530_34160C.1
atgccttccctcaccgtgggctcgttggccgccactgtccctttcaccaccggctcgccccttgttgccacccgagacttcgccgccggccaagctccgcagtgggccacctcctgtgctaccccgcgcatcaccactaccgttgtgctctccaacgcctccagcctcgtctag

SEQ ID NO: 29683 - DNA, 273 bp, Oryza sativa
  Clone ID: PAT_MRT4530_34161C.1
atgaggtggccaggggacctcggggtgccacgtcatacccctcgggcccgtgaggcatgccgccccgaggccctcacccagccaccacgtggcggggcggacgcgcagcaccgcccgattgacgcatgcggagtgggggcatgtatgccccgtcccatcggcacactgccaagtgtgccccctgatgagtccaccaaaatctccatacatttaagagggaatgacagggatgtcccccgtgtcaggcggaggacggcgttgggccccacctag

SEQ ID NO: 29684 - DNA, 3216 bp, Oryza sativa
  Clone ID: PAT_MRT4530_34162C.1
atgggggcaatcacctcggccgagctcaacttcctcatcttccggtatctccaggagtccggtttcattcatgccgcattcacattagggtatgaagcagggatccataagggtgggattgatggaaatctagttccacctggtgctcttatcactatcgtgcagaaaggcctccaatacatagaactagaagcaaatacggatgaaaatgatgaagatcttgcgaaggattttgcccttcttgaacctcttgaaataatcacaaaaaatgttgaagagttgcaacagattgttaagaaaaggaaaagggagaagactcaaagtgaccgtgacaaggacaagggaaaagaaaaggaacgtatggaggagcatgaacgacgccctgggggtgaacgggagagggagcgccatgaccaagaaaaagagttagagaaggagaaagacagagctgaaagagacagggatcaagataaagagaaagaaaagctgcacacagagcgtattgataaggttaaggctgaagaagattctcttgctggtggagtggtgtggagctttgagtggaggaggggatggatcccttgggaggcgaggcgggcaagcaagagcgcatggagccagagcagcactggcacacggaagtggatgcaataccgccctgcaggggagacaagtttaacgctaccatgccagggtgtactaaatcttattgctacaggtcccacaccaatggatgtgttcgcttgtgcatggagtccagctggttcccttctagcgtctgggtggggtggttttcatgctggattttcttggaagcccaatgtttccaagagggtgcagtttccatgcatgtctgggtggtcaggagactcgacagctagaatctggacaattccagatggaccatgtggttccatcacacaatcatctcctccaggtgttcatgttttgaaacattttaagggtcgaactaatgagaagagcaaggatgtcaccacacttgactggaatggggaaggaactctattggctactggttcctatgatgggcaggcaagaatatggaatagcgatggagagttgaagcagactttgttcaaacacaagggacctatattttccttgaaatggaataagaaaggagatttcctcctaagtggaagtgttgataaaactgctattgtgtgggatacaaagacatgggagtgtaagcagcaatttgaatttcattcagctccaacactggatgttgactggagaaacaataattcttttgcaacatgctcaactgataatatgatctatgtttgcaagattggggatcagcgcccagttaaatccttcagtggtcatcagcacagctctcctgcattttctaaaaagaatagtgaagttaatgctatcaagtgggatccaactggttctctgctggcttcatgttcagatgattggactgctaagactgtatcagtcatgactttttacactaaccccatcccatcagtagtacagtcatattttattttgagtcttggtggcgtaaccagaacatcacataagcgatgtggcaaccaatcaagggtagagttttgcttgtggaatggaagtgactttgtttcgagttggttgctaaaacactttgctctataccttgcatggtactacgcttttctggcagactcaaggaataaagcaagccgaattaatctcatctactattttccatttcctcgtctccttccgattgcattcatcagcgccctgggtcgccgatctaccaagctccctaagcgtcggctgcctacatctcattcatatcctattcgatcattgccaggagctcgtgacaactttgtatcagaccatggaagaaacctccactgccaaacaaccgcttctggaaccctggtcccctcgacaagctgcaggacaatggtggatgtcctcgccagcatttcgctgctcgcgtccaagattgatatggttgatctcagtcgatcggtcgccgttgcgacttctcgcatcactgcacttgagcagttccaggttgcgtcgtctacatctacgtccaacaacgcgccctggcttcccacccgtcaacccacacccgcaaccattgagctctggcgcactgcaggactccaacacggtgatgccgggggcaacgttcctcgtttctataaacttgaatttcccaaatttgatggcaaggacgactccctgaagaccattgcgagcagttcttccagggccaaaagaccgacaacagtgaccgtgtctggctggcaacttaccatctcatcggtgaggcgcaagactggtacttccactacgagcagcagtagggaccgccggatcgggacacgttcaaggagctctgtcatggtcaattcggtcctcccatacgcaataatcctctcgggacttcgctttgtcatggccaatggtgatcgccttgtcagcccgggcctgtgtcgcaacctcgcgctcaacatcgatggcgaggccttctcggtcgactgcttcgcccttgacttgtgtgctgtcgacatcatcctaggcatgcaatggttgcaaacgttggggccaatactgtgggatttcaagaacatgcgcatggccatatggcgcagcacacgcgagcatctcctggcggaattagaggacctcttcgccgaaccccaaggcttgctgtcggcacgggctatcgactaccgcatccacctcaagcctggggccacatcagtcgccgttcgtccctaccgctaccgctatccctcaaggcataccatgatatggagtatgaagcaggataaatgtgtttatgattttaaggagcatactaaggaaatatacactattagatggagcccaacaggaccaggaacaaataatcccaatcaacagttgcttttggcaagtgcctcttttgattcgactatcaagctatgggaagttgagcaaggacgccttctgtacagcttggctggccacaggcaacctgtgtattcggtcgcatttagccctggtggtgagtacttagcaagtggttcccttgatcaatgcctacacatatggtccgttaaagaagggaggatcttgaagacatacagagggagtggtggcatttttgaagtgtgctggaataaagaaggcagcaagattgcagcatgtttctcgaacaacacagtctgtctcatggatttcaggatgtag

SEQ ID NO: 29685 - DNA, 4049 bp, Oryza sativa
  unsure (1)..(4049): unsure at all n locations
  Clone ID: PAT_MRT4530_34163C.1
gcacgagggctcctcccggcgcggctcgtccccttggccccccgcccctctcccctctcccctctcccctctcctccggagccttcccgtctcggcggcggccacgcgttcgtcgaccggcgcctatgggggcaatcacctcggccgagctcaacttcctcatcttccggtatctccaggagtccggtttcattcatgccgcattcacattagggtatgaagcagggatccataagggtgggattgatggaaatctagttccacctggtgctcttatcactatcgtgcagaaaggcctccaatacatagaactagaagcaaatacggatgaaaatgatgaagatcttgcgaaggattttgcccttcttgaacctcttgaaataatcacaaaaaatgttgaagagttgcaacagattgttaagaaaaggaaaagggagaagactcaaagtgaccgtgacaaggacaagggaaaagaaaaggaacgtatggaggagcatgaacgacgccctgggggtgaacgggagagggagcgccatgaccaagaaaaagagttagagaaggagaaagacagagctgaaagagacagggatcaagataaagagaaagaaaagctgcacacagagcgtattgataaggttaaggctgaagaagattctcttgctggtggagtggtgtggagctttgagtggaggaggggatggatcccttgggaggcgaggcgggcaagcaagagcgcatggagccagagcagcactggcacacggaagtggatgcaataccgccctgcaggggagacaagtttaacgctaccatgccagggtgtactaaatcttattgctacaggtcccacaccaatggatgtgttcgcttgtgcatggagtccagctggttcccttctagcgtctgggtggggtggttttcatgctggattttcttggaagcccaatgtttccaagagggtgcagtttccatgcatgtctgggtggtcaggagactcgacagctagaatctggacaattccagatggaccatgtggttccatcacacaatcatctcctccaggtgttcatgttttgaaacattttaagggtcgaactaatgagaagagcaaggatgtcaccacacttgactggaatggggaaggaactctattggctactggttcctatgatgggcaggcaagaatatggaatagcgatggagagttgaagcagactttgttcaaacacaagggacctatattttccttgaaatggaataagaaaggagatttcctcctaagtggaagtgttgataaaactgctattgtgtgggatacaaagacatgggagtgtaagcagcaatttgaatttcattcagctccaacactggatgttgactggagaaacaataattcttttgcaacatgctcaactgataatatgatctatgtttgcaagattggggatcagcgcccagttaaatccttcagtggtcatcagcacagctctcctgcattttctaaaaagaatagtgaagttaatgctatcaagtgggatccaactggttctctgctggcttcatgttcagatgattggactgctaagactgtatcagtcatgactttttacactaaccccatcccatcagtagtacagtcatattttattttgagtcttggtggcgtaaccagaacatcacataagcgatgtggcaaccaatcaagggtagagttttgcttgtggaatggaagtgactttgtttcgagttggttgctaaaacactttgctctataccttgcatggtactacgcttttctggcagactcaaggaataaagcaagccgaattaatctcatctactattttccatttcctcgtctccttccgattgcattcatcagcgccctgggtcgccgatctaccaagctccctaagcgtcggctgcctacatctcattcatatcctattcgatcattgccaggagctcgtgacaactttgtatcagaccatggaagaaacctccactgccaaacaaccgcttctggaaccctggtcccctcgacaagctgcaggacaatggtggatgtcctcgccagcatttcgctgctcgcgtccaagattgatatggttgatctcagtcgatcggtcgccgttgcgacttctcgcatcactgcacttgagcagttccaggttgcgtcgtctacatctacgtccaacaacgcgccctggcttcccacccgtcaacccacacccgcaaccattgagctctggcgcactgcaggactccaacacggtgatgccgggggcaacgttcctcgtttctataaacttgaatttcccaaatttgatggcaaggacgactccctgaagaccattgcgagcagttcttccagggccaaaagaccgacaacagtgaccgtgtctggctggcaacttaccatctcatcggtgaggcgcaagactggtacttccactacgagcagcagtagggacccgccggatcgggacacgttcaaggagctctgtcatggtcaattcggtcctcccatacgcaataatcctctcggaggccatgagtcttgctcgtgcatgagtgcaaggtggtcaagcacgatgggcaggcacaaggtcctcagctcagccctacttctgcgacgtggcgctagcagcgtcacctgtgcccgcaccagcaaccagggctcagccagccgaaaccctagccgatgcgcgccgcaacaacaatttcgtcgcctttctccggcagagttggtggaacgttgtctccaagggctctattaccattgcgacgagaagtttgtatgcggacacaagtgtgcacggttgttctacattgagtatgatgactccacggatgatgacggagccaacgacgatgcggtgccacaagtgaacacgctatcaggcattgacggagctagcaccatgaggcttccgggacttcgctttgtcatggccaatggtgatcgccttgtcagcccgggcctgtgtcgcaacctcgcgctcaacatcgatggcgaggccttctcggtcgactgcttcgcccttgacttgtgtgctgtcgacatcatcctaggcatgcaatggttgcaaacgttggggccaatactgtgggatttcaagaacatgcgcatggccatatggcgcagcacacgcgagcatctcctggcggaattagaggacctcttcgccgaaccccaaggcttgctgtcggcacgggctatcgactaccgcatccacctcaagcctggggccacatcagtcgccgttcgtccctaccgctaccgctatccctcaaggcataccatgatatggagtatgaagcaggataaatgtgtttatgattttaaggagcatactaaggaaatatacactattagatggagcccaacaggaccaggaacaaataatcccaatcaacagttgcttttggcaagtgcctcttttgattcgactatcaagctatgggaagttgagcaaggacgccttctgtacagcttggctggccacaggcaacctgtgtattcggtcgcatttagccctggtggtgagtacttagcaagtggttcccttgatcaatgcctacacatatggtccgttaaagaagggaggatcttgaagacatacagagggagtggtggcatttttgaagtgtgctggaataaagaaggcagcaagattgcagcatgtttctcgaacaacacagtctgtctcatggatttcaggatgtagtttcaaccacgtggatggatgaagtaatacaagcagatgcttggctatctgttcttccgtgatcagctggggagaacaggattattccttaactctaggttttaggtacctttagtttgccagtgcttgtcacagttatttccttgcggagaaactgaccataggatatagttatgtgtagagcgaaatctttccaacatcatgtcttccaatgctcatcgtatttagtactatattagtaacaattgtttattcgagattatctttgtcattaccatcaccnatgcttaattgctatggtaccaaaaaaaaaaaaaa

SEQ ID NO: 29686 - DNA, 1032 bp, Oryza sativa
  Clone ID: PAT_MRT4530_34164C.1
ctaaaaaaaattgtaatgcttctctatggaaaaattgaagtcctcaacatgcgccaaaaatgaccgcttttcttttctttctttaagcaacaacatcgacaaatttgaattcgtgagtaaccaaagtattggaatctcaccatgaaggcttgtggcatccaaagacccatcaggcctcatgctccagaaaagcaaagcatctcccatcttgggtttgacagccaaacccttcttagcacattcagacagctcattataaaatggtgatgagctgctgttagctttagaagaggggaaaatagtctcaccaccctcttcaacatcagaaagatacataagaagagttgctatacgctgccccccgtttttggtgttgaattcatcatggaagtaatcgaagtgaggttcatacttctgtccaacttcatagtggaggacttgaagaccctctccgttctctacaggtatgaaggtgtagtctgatatccttttctcgatcgtacggataattttgtcctgccctcttccaaggaacattcctgaactcgttcgaaccctgctatctttactccctccagttgatgcatcaacaacagtagatttcttcatgtgaggctttgccaatgaaatcagatactcacattcttccttcgagaggaaattgtgatacaagaacgcccggggctcccacgacagcacctccgtccacggctcccccttctcgcccccgcgcatctccagccccgactcgaacgcggcggatctgcggaagcgcgggcgcgggcgggggaggccgatgccggcgtggccgacgccgacgccgccgcccgagggcagcgagagcgcgccgagcgccacgaggaggagcagcgccaccgacgccagcagcagcgccgccaggatcaccgtcgtcgtgtacgacgacgacttcccccctccaccaccaccgccgccgccgccgccgccgcgtttcccgccccctccccccagcagcggcctccctccccgccccgccgccttgctccccgccat

SEQ ID NO: 29687 - DNA, 453 bp, Oryza sativa
  unsure (1)..(453): unsure at all n locations
  Clone ID: PAT_MRT4530_34165C.1
gcctccttctcctntggcgggacnggtggtgangctcggtggcaagcaagcccgatgttgggggangcggcggccngggcacatgcnggacnggcggcctgcggctcctccccttccctgcggcnaaanggaatcgcacgggcggcngatctggcggaacnggcgggcgggccactgctcctcccctcccttccccgggtggcgacnggancnccgcgggcttgccngatccngcnggcnggcgggtnncnaccgcacgccgccgtctccncctagattcggtggccggccgccctgcccccgccncggatccngcncttgaagcccggcngggaagccgncccccccnccgacnacnaccatnaccaagccggagcngcnactccaccnccgccnccnacgaagctnnanccgcggcgancaaccaatcttngggttttctgtttttttttt

SEQ ID NO: 29688 - DNA, 606 bp, Oryza sativa
  Clone ID: PAT_MRT4530_34166C.1
gtcaatgagtccatcaggcattatatcatgaatttcattacgactttaggagggcaattattatttatacattcgacacatccatcgctttgaaacgatcattgttcataagcaaagcgatgatcattgttcataagcctaagaagttagggtacaacatgttggttacagctaaaaaaaattgtaatgcttctctatggaaaaattgaagtcctcaacatgcgccaaaaatgaccgcttttcttttctttctttaagcaacaacatcgacaaatttgaattcgtgagtaacctctgaatctctagtttctgatgtctatatcttgtactcatgaacacgcatccactttgtcgatgaccatttgttaccttttatcactggacatccaccatgaaggcttgtggcatccaaagacccatcaggcctcatgctccagaaaagcaaagcatctcccatcttgggtttgacagccaaacccttcttagcacattcagacagctcattataaaatggtgatgagctgctgttagctttagaagaggggaaaatagtctcaccaccctcttcaacatcagaaagatacataagaagagttgctatacgct

SEQ ID NO: 29689 - DNA, 1264 bp, Oryza sativa
  Clone ID: PAT_MRT4530_34167C.1
atggcgccccccaccctccgcaagccccccgccaccttcgccccacccccctccgtcctccgaaactcccgccccgcccccaaggcccccgccgcacaaccgcctccgccgccgaccctccccatcgaaaccaccacctccacctccttccagcctgcccttgtcgccgtccagtccaccgtgatggaggagtacgacccggccaggcccaacgactacgaggactacaggaaggacaagctcaagagggccaaggaggccgaggtcaggaaggagctcgagcggcggcggcgcgaggaggaggagagggagagggagcgtgagctcagagagagggagggccgcgacgccctgaacatatccggcgaggaggcctggaagaggagggccgcaatgagcggctctgccgcgccgaggccgtcctcctctcctccccatggagacggcttcgctattgggaactcgtcttcctctgggctgggccttggcgccggcggacagatgaccgccgcgcagagaatgatggccaggatggggtggaaggaaggccaggggctcggcaagcaagaacagggaatcaccgcgcctctagtggctaaaaagactgataggagaggaggagtaattgtggacgaaaacagctccaagcaagaaaagaagccaaaatctgtcaactttgatggccctccgacacgagttctgctcctccgtaatatggttggtccaggtgaggttgatgatgagctggaggaagaagtggcctcagagtgtagcaagtacgggacggtgttgcgcgtgctgatatttgagatcactcaggcggacttccccgccgaagaggccgtgaggatcttcatactgtttgagagggcggaagaagcaaccaaggcgatgattgatctggaagggcgcttctttggcgggcgggtggtgcgtgccactttctttgatgaggagaggtttgggaagaaccagcttgcccccatgccaggtgaagttgccggcttcgactaggctgacaattttatgcagcggtagcaaatggagatgtaatcttacgctggactaatatgcagtttttcttttttttttcttttgccgtagattgttatgcggttgttgcattactgtgctgcaactagactagagcatatgcatgatggtccattgtaatatttagatgtttttacctgtgtgtgcttgtttcgaatggcatagcgtaacacgtgaagcttcagtttttcacccaaaaaaaaaaaaaaaa

SEQ ID NO: 29690 - DNA, 299 bp, Oryza sativa
  Clone ID: PAT_MRT4530_34168C.1
atgatggttgtggcagttggaatggtcggaattgccctccaaccgtcattggggagtgatccaagccatccaccagaaaccctgcatccaacggtgctagggggttcggccgaactccctggttcggcagaaccaagggctggcccaaccagcccaggttttggctggcggcctcctccgttgtttctctttgcagacttgtgaattttggcccaattcatcgtgtcatttctgagttcttggcccattcatacataagtctgattctcaacatcgtccgattgatttatcgtctgatt

SEQ ID NO: 29691 - DNA, 190 bp, Oryza sativa
  unsure (1)..(190): unsure at all n locations
  Clone ID: PAT_MRT4530_34169C.1
cctaacatcagnaatggcgccgtctccaacatcataaatggtaccattctgatgtgtagctgtcgccttaacaaaataatggtctcctgccaatctccacgccaaatactaggcctgaacggccaaattccatatcttgagtgccttaagattgagcttactgacataaatggcttctgtctcaaagcgc

SEQ ID NO: 29692 - DNA, 825 bp, Oryza sativa
  Clone ID: PAT_MRT4530_3416C.1
atgagaattttgactagtcaggaacatgagctaaaaaattcagtaaagcaggccttagcaaagttgttgagagaagaagaatttaaatggtaccaaagagctaaaacaaagaaaattatggaaggagacaataatactaaatattatcatatgattgcaaatggaaagcatagaaaaactaagatttttcagcttgacctagaagagggtgtaatcaaaggagatgaggagcttaggaagtatataactaagttctataagaacctttttggggcccccgaaagaaataatttttctatgttcgaggaccaaaaagacgatataccacaggtgacggtgacagaaaatgaaatgttaacaagagaattttctgaagaagtcaaaattgccatttttcaaatggaacacaataaagctccaggacctgacggttttccgggaaagttttatcaagtattctgggatgtaattaaagatgacttaacggcagtctttagggacttccatgggggcaatctttctctcgagagtttgaattttggaattattactcttcttcctaaaaataaggaggcaaggaaaattcaacagtacataccaatatgtttacttaatgtgagttttaaagtctttacaaaggttatgacaaacagggtcagtctagtagcacaaaatgtcataaaaccttcacagaccgcctttttgaaaggaaggaatataatggaaggtgctattattcttcttgaaactttgcacgagatgcataggaaaaagttggatggggtgattctgaagcttgtttcgaaaaggcatatgataagatag

SEQ ID NO: 29693 - DNA, 496 bp, Oryza sativa
  Clone ID: PAT_MRT4530_34170C.1
atgtttttgaccggaacgaaaatgttcaaaaagcacaaaaatatgatttttggacatattagagtgtattgggtgcgttcgtagcaaaaacccacttcgtgattcgcgctgcgaacttttgtcaattaatgccattattggcacacgagggtgtgatattttcgaccgaaatgacaaagttcaaaaaacgccaaaacatgatttttggacatattggagtgtattgggtgcgttcgtggccaaaactcacttcgtgattctctcggcaaacttttgtcaattaatgccaatattggcatatattggcacagaggggtgcgatgtttttgaccggattgaaaaagttcaaaaagcaccaaaacaagacttttggacatattggagtgtatttggtgcgtttgtagcaaaaactcacttcgcgattcgtgcggtgaacttttgtcaattaatgccaatattggcatatattggcccacgtgggtgcgatgtttttgaa

SEQ ID NO: 29694 - DNA, 213 bp, Oryza sativa
  Clone ID: PAT_MRT4530_34171C.1
ggctgcaggtcaattcattggctctgtgctagcttgggactgaatcctcctctcttgagggcgccgcgctatccgtccatggcgccgtcgtaccgcccctactccggggagtatcagtacggcaacggcaacgcggtggtgccgtatggcggtggcggcgagcggaggatgaaggcggtgtgtcggtgggtgcctggtgcgtggtggctgtcg

SEQ ID NO: 29695 - DNA, 375 bp, Oryza sativa
  Clone ID: PAT_MRT4530_34172C.1
tgtcagggttacgaataaggtataccctctacccttggatgtatgttgtataccaatatggtatacctgtgcatatacgggcagtttctgtatacgttaaggaaatctatcgcgtggcagaaatagaatccatacatgggagaactcctacgcggacaagactgggtcgttaccatatcgtgtggggtccgatatctccgagttcgacttagagatcaattgatccgcggtataaaagggaccccccgggaggacctaaggcatcgaatctcaccgccaacacatccaccacagcctacgaagtcggagcctacaggagccaaatcgccgggtgatctagtcgaaccaactcgactatggtctcgtcggcatcat

SEQ ID NO: 29696 - DNA, 396 bp, Oryza sativa
  Clone ID: PAT_MRT4530_34173C.1
atggcggtggtggtcctctccgagatggggcacgcctacgccggcgccatgggcgggctttgggcgctcccctgcggctccactgacgacatcgagcggctagcggaaaactgcagggatgacacgtttttggggagcgcaaggcacgactactcactgttcgtcaacgtctacttcgtcttcaccaacatgtcaaacactggagacaacggcaacactagagacaaggagaaggaggcttccgtcaacaccaacggaggcaatactgtctcaaactccagcggaggaccattcctggggacgcgggtgcttggcggcggcgcagcagctgggtgcgagagcaagggcgaatggcagcgtggatgcaacgcgtgcaggcgcggcagcccagcgtag

SEQ ID NO: 29697 - DNA, 1581 bp, Oryza sativa
  Clone ID: PAT_MRT4530_34174C.1
atggacgttgtgcctctcccgctgctgctcggctccctggccgtgtccgccgccgtgtggtaccttgtgtacttcctccgcggcggcagcggcggcgacgcggcgaggaagcggcggcctttgccacccgggccacgcgggtggcccgtgctgggcaacctgccgcagctcggcgacaagccgcaccacaccatgtgcgccctggcgcggcagtacggcccgctgttccggctccggttcggctgcgccgaggtggtggtggccgcgtcggcgcccgtggctgcgcagttcctgcgcgggcacgatgccaacttcagcaaccgcccgcccaactcgggcgccgagcacgtcgcgtacaactaccaggacctcgtcttcgcgccctacggtgctcgctggcgcgccctgcggaagctgtgcgcgctccacctcttctcggccaaggcgctcgacgacctccgagcagtccgggagggcgaggtcgcgctcatggtgaggaacctcgctcggcagcaggcggcgtcagtggcgctggggcaggaagcgaacgtctgcgccacgaacacgctggcccgcgccaccatcggtcaccgggtgttcgccgtcgacggcggggaaggcgcaagggagttcaaggagatggttgtggagctgatgcagctcgccggcgttttcaacgtcggggacttcgtgccggcgctccggtggctcgacccgcagggcgtcgtggcaaagatgaagaggctgcaccgtcggtacgacaacatgatgaacggattcatcaacgaaaggaaggccggggcgcagcccgacggggtcgccgctggcgagcacggcaacgaccttctaagcgtgctgctggcgaggatgcaggaggagcagaagctggacggcgacggcgaaaagatcaccgaaactgacatcaaagctctgctcctgaacctattcactgcggggacggatacgacatcgagcacggtggagtgggcactggcggagctgatccggcacccggacgtcctcaaggaggcccagcatgagcttgacaccgtcgtcggtaggggtcgtctcgtgtccgagtctgaccttccacgcctcccctacctcaccgcggtgatcaaggagacgtttcggcttcacccgtcaacgccgctctcactgcctcgggaggctgcagaggagtgtgaggtggacggctaccgtatccccaagggcgctaccctcctagtcaacgtctgggctatagcccgtgacccgacccaatggcccgacccgctacagtaccagccttctcggtttctccccggcaggatgcatgcagacgtggatgtcaagggtgctgatttcggcctgataccattcggagcaggacggagaatatgcgctggccttagttggggcttgcggatggtcacactgatgactgccacgctagtgcacgggttcgactggaccttggctaacggcgcgactccggacaagctcaacatggaggaggcctatgggctcaccttgcagagggccgtgccgttgatggtccagcccgtgccaaggctgcttccatcggcttatggagtataa

SEQ ID NO: 29698 - DNA, 367 bp, Oryza sativa
  unsure (1)..(367): unsure at all n locations
  Clone ID: PAT_MRT4530_34175C.1
ttcggtttagcggcacgcgcgcaccgacaccaccaccgagaataatggaggcggcggcggcagacgatgcgaacggggcggggggcaagaagatgggtcgccggggcgaccacacggatggtgacggcgctgctnaccgaccctcagcagatcagcaaggactacgactactgcaaggaccgcaaggacctgcaccgccccgagttggaggggcacttccggaaaaatccgctggggggggaatcaaccatactccgggggcttgaggagtgtctaagattcattgctaactacaagctgacagaaaccgaaataacagggctgggaccggtgcagcacaccagggaggaccggttcttcgagtacc

SEQ ID NO: 29699 - DNA, 795 bp, Oryza sativa
  Clone ID: PAT_MRT4530_34176C.1
aaaggaatttcttggttcgagaaaaataggtttggggaagacatttcttgtgccccaatttgcaagaaacctagaacgaatgatatccataatcctacacttaggctcatgcacaaatggattgctatgactttgtttcctagaagtgatctgagacccattaggggggatgaattgattatcatgtttgccatggttagaaagatcaaaattgctcctatgaaatgtataataaggcaatggttagaaagtataaagttccctattcctgttgagtgcacttctctgattactcggattgcaaaagggctaggggtcgttagcaaccaaattgcttttatttcagccactcgtccgtgtattgatgagaattatctagtacaagggcatattctaaaacatggagtagatggatctttgatttacattttccccggttgtacaaatgaaatcccgttgccaaatgcggggtatcatctgtacaactgccataaactaaccattcccttgcagaccatagaagaatctcgtacaggtggagcatacagggagacgcgcaacatgacaaggaatgaacgagagaattcatcatcctcaatacccgtacagatgtatgaggcagattgggcaccaactgggatgcacccggatggacccaagctccacgccacagcatcggagtctcaacttgggggttcaattcttatcaaggaccctgagcgaaagccaagcttggggagagacatctctcccctcactaaggtaagtgctctctcaaaggctaaatatgagtag

SEQ ID NO: 29700 - DNA, 2371 bp, Oryza sativa
  unsure (1)..(2371): unsure at all n locations
  Clone ID: PAT_MRT4530_34177C.1
ttccaattgcttgtgtcaacggaactattcatctacctggggagagccgttggtttcacaatgcttgggcccttccggtggtgctcgatcgacgggctcgccgccgccgtagctgcacgccgccgngcgccatgtcaggcgagctctccacgcgcgcgtcgacctcctcgtcgagcagctcccctcccggcgacgcgcgggggccggaacatggagggacgccgcgtggcgaggtgtcgtccaagcgccgtctggtgctgcggcggcggcagcggtgcgcggcgtctcggcggcggcgccgcggcgtcgtgggcggcggcggacccgcgggcgaggtgggtcagggagtggaaccgcgcgtacctgctggcctgcgcggcggggctcatggtggacccgctgttcctgtacgccgtgtcgctgagcgggccgctcatgtgcgtcttcctcgacggctggctcgccgccgcggtcaccgcgctccggtgcatggtggacgccatgcacgcgtggaacatcgtgacgcagctccgcgtctcgcgcgccgggcgggagcgggcgtgcgccgccggccccgacgaggagcagcctgaggataacacaccgtttataaaccgtttgaaaagcgtgcacgtgaaaaacgaggtggtggtttgggtggcggcgccggcgatgatacgggcggggtcgacgacggcggtgatgacggtgatgctggtggcgttcatgttggagtacctgccaaagatctaccactccgtcgtcttcctccgccggatgcagaaccagtccggccacatcttcggcaccatctggtggggcatcgccctcaacctcatagcctacttcgtcgccgctcacgcggtgggcgcgtgctggtacttgctgggggtccagagggccaccaagtgcctgaaggagcagtgcttgcttgccgggctgccggcgtgcgcgtcgtccacggcggcggtggcgtgcgtcgacccgctgtactacggcgccgccgtggcgtccgtcggcggcgaccggctcgcctggggcgggaacgcgacggccaggaacgtgtgcctcagcagcggcgacaactaccagtatggcgcgtacaagtggaccgtcatgctcgtctccaaccccagccgcctcgagaagatgctcctccccatcttctggggcctcatgaccctcagcacgtttgggaatctggagagcacgacggagtgggtggagatcgtgttcaacataatgacgatcacggggggcctgatcctggtgacgatgctgatcgggaacatcaaggtgttcctgaacgcgacgacgtcgaagaagcaggcgatgcagacgcggctgcgcgggctggagtggtggatggagcacaagggggtgccgcacgggttccggcagcgggtgcggcagttcgagcggcagcggtgggcggcgacgcgcggggtggacgagtgccagatcgtccgcgacctccccgagggcctccgccgcgacatcaagtaccacctctgcctcgacctcgtccgccaggtccccctcttccaccacatggacgacctcgtcctcgagaacatctgcgaccgcgtcaagtccctcatctcccccaagggcgagatcattgtgagagaaggggacccggtgcagaggatgctgttcatagtgagggggcacctgcagtgcagccaggtgatgaggaacggggcgacgagctggtgcacgctggggccggggaacttcagcggggacgagctgctgtcgtggtgcatgaggcggccgttcatggagcggctgccggcgtcgtcgtcgacgctggtgacggcggagagcacggaggcgttcgggctggaggccggcgacgtcaagtacgtgacgcagcacttccggtacaccttcaccagcgacaaggtgcggcgcagcgcgcggtactactcccacgggtggcggacgtgggcggccgtcgccgtgcagctcgcgtggcggcggtacaagcaccgcaagacgctcgcctcgctctccttcatccgcccgcgcaggccgctctcgcggtgctcgtccctcggggaggagaagctcaggctctacaccgccatcctcacctcccccaagcccaaccaggacgacgacttctaaatgactcctgttgcatcagatcagctgcctgtacacggattcaagaatggggaagcgttgggatcttgtatttaggggtgaaaacgggcgggtattttccgcacccgcctgacccgacggttgcgggaatgatacgatagtggaaaatatattgtatgagttctatttgaatccgtgaataaatatgagttagaataaaaaaaaaattatttctacctgaagcccgaggatccactag

SEQ ID NO: 29701 - DNA, 514 bp, Oryza sativa
  Clone ID: PAT_MRT4530_34178C.1
gtggtcggtttccgaagcttgatacagtataaacatgtcggtttccgaatcattagcctgccttttttttttagggtgttacagtatcatacgatttctaccacgtatcgtatgatactcgtgaggtatcatgtgatacttatcaggtatcagacgatttttaccacgtatcgtgtgatactcgtgaggtatcatgtgatacctgtaaggtatcagacgatttctaccacgtatcgcgtgatactcgcgaggtatcatgtcaggtaccgacgatttctgctatgtatcacgtgatacttactaggtatcggatgatacctaccaggtatcaggtgattcctgctagatataactggacatcccgttggggagaggagcatcccgacgcgcggccggccacctgcagtcgtcccttgtagacggcgacgacgacggcggcggcgacggtggtggacgggcgcggcggcggcagcggcggcgagggacggcgacggcggcgatgggggcgggcgca

SEQ ID NO: 29702 - DNA, 1941 bp, Oryza sativa
  Clone ID: PAT_MRT4530_34179C.1
ccatggctactatagatacaaccataactcacatcatggatgaacaagatgatatcaagatcaagtcctccaagtgctggaatccgattcggccacctgctacactgctgacttcaaacggctaccgaatctgcatacgacctccgttttcggcccatgagtacttgatggaaagttctcggagtcctctttccaacagatctggcctcatcagcagactccatctcgtttggccgcaaatacaaaaacaaggtgctgcgtcacctgtcatgggccaatggacttgtaacttcgtttgggaccccggcccaagtggggcccatgtggggtgcgccccaaccaggtggaggacgacctagaggtcctcccacctccttaaatagctaggaatagggttgatctgcaccggcaagatcaacaacccacggagaggtgtatcgatcgctaaggcgcaacacaacgtctcgtacgctcaactcaccgaaagattgggccaacaacagccttgagtgacgagtggaactcagggttcatcagatggtatcagagctttcgttgctcgcgtttagttcgtttagagtttcgagttctggtcacgttttgtaccactgtcatcatcgtcgtcgtgtgctttgggaaacaagatggtcatgctcaatgtcaacatcttcaccatcaacgagatatagcgacttcttcacgcatgatactgacatataatcatataggccaattgttcatgcttgcttgcattgttgagcgcaaaattttggagaatccaacggagcaacaagatatgcttgtgcctcctatcactgatgttttgcaggaagttcagaaaagtctccaaaatgagaagaacgatatgtttgagatgtcacttccatcactcgcgaatgaggagaaggctgatgcagctacattatctgaagagggcataaaaggtaaattaaatggtgcagaaattactcaaggtgagtatgcttctaatgaattacatttttccactttccatgctgacctagagcaaactttagtggaacctacttctgaattgcctttgtcacaagttgatttgcattctgttccttgtgataaagaagagttgtgcgatagtacttcacttatatccatgccataactagtgaataaacatactatatctagtgtttcattgtgtgctaattttaaacatgttgttcacattgatgatgaagtagaggagagtgaattgagatcttctttcaatattttgggctatgttcattttgatgatttttgtgagctcgataatttgaaggagaaattatttgctaagtctgatttgccatgtccaactaatgctattttccatatctttggcgaatataatgatagaggaatatatttggtgcatagagttttcatttgttcggatttagagaaacatgttattgctaatcacacaacttcgagtttctctagttttgattggatgaaacaggttattttgaatggactatgtggcgagcaccatatggaaaaaccgaggacggttttccgtgaagaaggggaggatgatgtgaccatggctactacagatacaaccatagctcacatcatggatgaacaagatgatatcaagatcaagtcctccaagtgctggaatccgattcggccacctgctacactgctgacttcacacggctaccgaatctgcatacgacctccgtttttgtcccatgagtacttgatggaaagttctcggagtcctctttccaacagatctggcctcatcagcagactccatctcgtttggccgcaaatacaaaaacaaggtgctgcgtcacctgtcatgggccaatggacttgtaacttcgtttgggaccccggcccaagtggggcccatgtggggtgcgccccaaccaggtggaggacgacctagaggtcctcccacctcct

SEQ ID NO: 29703 - DNA, 1206 bp, Oryza sativa
  unsure (1)..(1206): unsure at all n locations
  Clone ID: PAT_MRT4530_3417C.1
aacagcaaggaccgatggctcccagatcaagtaagcctttttcagtcgctcccgagggagaagacgggcagatntgctgccgccccagcagccgcggcatcccctcccgcgggatatgacggaggggagggcgccaccgntgccacngtnggnnngcnacngcctcccctccctcagtcgggcctccagatctggcggagggaaggcgctcccaccatccangctgtcntccgccaccacgcctcccttcccgcgcctcccctctcgcccctgccggatctgacgggatggcgccgccgcccctgccaggccggcgccggcgcagccgccctctcggcccctcgtccccatcacggcaccaatctcgaggcgccgccctgcgccgcccgccacctggcagaagctgccgccgccgccgttgcagcagtagccgctgaccacgaccccgccgccgccgccgctcgtagtcgcgacgctctccgccgtctccgccggcgcagcccccccctccgccgcccgcggcatcgccggcgggagccgcctctggtccgtgcgcctcctcttctccggcgacgacgtctgtggcccctccgcctccgccgcctgctgctccttgctcacctcccacatgaccatggcacgccgccgcccctcgaccttcgcgagctcctcttcgcacaccgccgccgctcctcctccgtcaccagatccgtagtcctccctatcgctggatccaccgctgcagtcctcctcatcgctagatccgccaccaccgtcctccccaccactggatttgccatcgccgagtcccccaccatcgtcgtcgccgttgctgagcccgccgccgccgctgccggaaccgcccgcggtggccgccaccgccgacggatccaccctcggacgaagccaacgccgccgtcgccgtcgacgccgacggggagagggagagggggagggacggccgtcgccgccgtctccgctgcaccccgtcgtcgctgcgccatgccggcgagacgggaaggagagccgccgccgctagcgtggggaagggcgccgccgccgctagcgtgggggaagccgccgccgccgccgcagccgtccgccaccgcagccctccgtcgccgccgccgcagcccgccgtcgccgcgccgtgccggcgagaaaggaaagggaagcggcccccgtggggggaaagccggaatgaga

SEQ ID NO: 29704 - DNA, 3669 bp, Oryza sativa
  Clone ID: PAT_MRT4530_34180C.1
atgtcgatagggaacatgcttgcagatctctcttccgtcaatggctaccacgagggtcttcccatggtgtttgcccacattgccacctacgccgcgcttgctcttcccccaactgtcgacgtccggcaccatagccgccgaggccaagaagatctggaccatctggtcatctttggcgccatgaatccggccacttccgccaacggggctgctgccatcatcgacccgccatctcgtacgtcccgtaattgcgagtatatcttggtggcagtcgactatgtatctaagtgggttgaggctaagctgtgcagcgccgcggatgcgaagcatgataaaaatatgttcttagaaatcatcttcccaagatttggcaccccaagattggtcataagtgatggaggcttgcacttcatcgacgaaaccttccgacacctcctacgagatatgggcgccaaacacaatgttgctacaccttactatcctcagaccagcggtcaagcagaaacatcaaacaaacaaatcaaaaatattctacagaagacggtcaacaaaatgggcataggatggaaggacaagctgccagatgcactatggtcataccggacagcgttcatgacacccattggaatgtccccttatcatatagtttatggagaatggagaaaaatgcagttggctgagctagaagagtggagagagaaagtgtatcacaattccaaaatatacacagaaagaacgaagcgctggcatgataaacagataaaaatcaagaaattcaagccaagagacaaggctagcccgttctgtggcaagcctaatgaggatgccaacgctcatctgctacaattcctggagatatgtagcatgtacaccatcaagggcgttagtcctgacgctgtcaggctgcggctgtttccgttctccctcctcaggagagcgaagcagtggttctatgccaattgtgctgctatcaacacctgggataaatgctcgacgtcattcctctcgaagttcttcccgataggcaaaaccaacgcccttcgtggacgaatttccagattccagcagacaagggacgagtccattcctgaagcatgggaacgactacaggagtacgtggccgcctgtcctcatcatgggatggacgactggttgatcctgcagaacttttacaatgggctcaccctaatgtcccgcgatcacctggacgcggcagctggaggagccttcttctctaaaacggttcaaggagccgttgaactcatagagaagatggtctccaatacgggttggagtaaggaacgactccagacccgtcagcgaggcatgcacaccgtcaaggagacggagttacttgctgccaagctggacctcctcatgaaatgcttggacgaccacgagaaacggccacaaggcaccgtcaaggccttggactcacacgtcacgtgtgaagtctgcggaggcacgggtcattctgggaacgactgcctggaaacccatgaggaggcgatgtacatgggcaaaaacaacgagtatcgtccacaaggaggtgaggggtggaatcaaccacgcccatattatccaggaggcaacaataacggtaacttctctaaccagccctccttgatggatcttgtttttgcgcaagctaaaaccactgatgcactaagaaaaaagcttgctgccaatgataagatcttagagaacataaatgtcaagctagatggcttcgcttctgcatttcaaaaccagctgagctttaataagatgatagaaacccagttagctcagttggcatctttagtccctgcaaatgagtccgggaggattccggggcaacccgactcctccattgaaaatgttaaggcgatcacaacaaggggaggtaagtccactcgtgatccgccgtatcctaaccctgcaggaactaatgggatgtcaaaagaaacgccatctactgactcggatgacaaggagatccagccagacaaaacagtgccgcaggagtactgcgacacacggctgctgccatttcctcaacagagtaggaaaccgtcagtggacaagcagttcgcttgttttgttgaagtaatccaaaagatccacatcaacgtgccgttgttggacgctatgcaagtgccaacgtacgcccgttaccttaaggacatactcaacaacaagagaccactcccaacaacggaggtggtcaagctgacggaacactgtagcaacctgatactgcacaaactcccagagaagaagaaagatccggggtgtcccacgatcacctgttcgatcggggcacaacaattcgaccaggccttgtgcgaccttggagccagcgtcagcgtcatgccaaaagacgtctttgacaagctcaacttcacggtgttagcaccgacaccgatgcgcctccaactggctgactcgtcagtccattacccggtagggatagcggaggatgtgccagccaagatacgggatttcttcatcccggttgattttgtggtgctggacatggatacagggaaagagacgccgctcatcctaggccgtccgttccttagcaccgcaggagccaacattgacgtgggaacggggagtatccgtttccataccaacgggaaggaggaaaagtttgagtttcaaccgaggatggaacaatgcaccatggtcagaataaagtacaggccaaacccacagaatatccaagttgtcgatgtggagccacccaagacggatagcctggaaccgttattggaggacgctggtaaaatcacctgcaccagccaagaagctagaacagccggctcagacgaagccatcttccgcaccgaaatcaaagaaggtgtggaggaagaagccaaaaacgcccgctccatcacctccggaaatgggtggaaaatccacgaactaaatcgaaaggagaaaggaatttctgggttcgagaaaaataggttttgggaagatatttctggtgctccaatttgcaagatacctagaacgaatgatatccataatcctacacttaggctcatgcacaaatggattgctatgactttgtttcctagaagtgatctgagacccattaggggagatgaattaattatcatgtttgccatggttagaaagatcaaaatttctcctgtgaaatgtataataagacaatggttagaaagtacaaagttcactgctcctgttgagtgcacttctctgattactcggataacaaaagggctagggatcgttagtgaccaaattgcttttatctcagccgctcgtccgcgtattgatgaggcctatctagtgcaaaggcatattttgaaacgtggagtagatggatctttggtatactttttccccggttgtacaaatgaaatcccattgccaaatgcggggtatcatttgtacaactgccatgaactaaccattcccctgcagaccatagaagaatctcgtgcaggtggaacatacagggagacgcgcaacatgacaaggaacgaacaaggaagttcatcatcctcgacacttgtgcagatgtatgaggcaggttgggcaccaactggggatgcacccagatggacccaagctccacgccatagcatcggagtctcaacttgggcaagcgccagtgaggaccggtggcatgcgcctcatgacatccactag

SEQ ID NO: 29705 - DNA, 1625 bp, Oryza sativa
  Clone ID: PAT_MRT4530_34181C.1
atgactactatggatacaaccataacttacatcatggatgaacaagaagatatcaagatcaagtcctccaagtgctgcaatccaatttggccacctgctacactgctgatttcaaacagccgctgaatctacatacgacctccattttcggcccgttgggaaccatcataatctcatgtctaaaaaatggcagaaaggtgcaaaaaaaaaagaaaagccgcatcaaaaataaaaaaagaaaaagaaaggaaagaaaaaaagagagtaagaaagaagaaaaaaaagagggaaaatgagctcttatctttgattgagctaccactaccttattttgaaggaaattatgatcctcgtgcttatattgattgggagctagcggttgatagtgaatttaaaaagcatggcttgtctgagaaacaaaatgttaagtatgcctctagtgttttacttaaaaatgcttcttatgattggaaacatctttgtaggcattgcaaaatacctcaaccttagaaagacctgaaacaatatttgggagatgctgacattgtgttcaacaaaccgcaatgtttaaaacatgataacagaactgttagttcatactataatgatgtgcatacttgtttattacattgtggtttagatgaatgcgaagaagctacagaattgaggttttcacgtaggcttaacaaataaattcaggacatgcttgcttgtcaacgatataaatctctttctcatttgttacaactttcttgcaatgtggaaaaacaaattgaggatatgaataagcaacaagttgtgcccgtgcctcctgttactaatattttgcaggaagtgaacaaccgcaacaaggaggagagaatcatgacggagctgcttttctcatcgcttcaactgaagtccaatgcacctccgtcatctaaaaagagcatcaaaggtaaattaaacgatgttgagattaataaaggtgagtgtcccattaagcaaccattagtggagattcctttgtcacaagttgatttaattattgttctttgtgataaagaagagttgtgtgataattcttcacctatatccatgccacaactagtaaacgaacatgctattcctattgttaattcttactgcgctgattttaagcatgttattcatattgctaatgaagaagaggaacatgatttgctatcttctttaaatactttgggctatgtttagtttgatgattttttgagttcgataatttgaaggagaaattatttgctaagtttgatttgccatgtccaaccaatattatttctcatatctttggcgaatataatgatagacggatatacttggtgcatagagtttacatctatttggatttagaaccacctgtagatgtggataaaatttgcaatctagagagtcattttgttgctaatcaatttacttcaagtttctctagttttgattggatgaaacagattattttaaatggactatgcgaagagcaccatatggaaaaaccgaggacggttttccatgaagaaggggaggatgatgtgaccatggctactatggatacaaccataactcacatcatggatgaacaagaggatatcaagatcaagtcctccaagtgt

SEQ ID NO: 29706 - DNA, 2196 bp, Oryza sativa
  Clone ID: PAT_MRT4530_34182C.1
atggccagcaagactcttcgcgagttcgctgctccctttgctgacaatgtggccatagggccacaggtcaacataggggacgcggatttcgacttgaaatccagccacatcacgatggcgcaggctagcccgttctgtggcaagcctaatgaggatgccaatgctcatctacaacagttcctagagatctgtagcacgtacaccattaagggcgtcagtcccgacgtcgtcaagctacgactgtttccgttctcccttctcgggagagcgaagcagtggttttatgccaaccgtactgctgtcaacacctgggacaaatgctctactgcattcctctcaaaattcttcccgatggaagcatgggaacgactacaggaatacgtggccgcctgtcctcatcttgggatggacgactggctgatcctgcagaatttttacaatggactcaccccgatgtcccgcgatcatctggacgcggcagctagaggagccttcttctctaaaacggttcaaggagccgttgaactaatagagaagatggtctccaatatgggttggagcgaggaacgactccagacccgccagcgaggcatgcacaccgtcaaggagacggagttacttgctgccaagctggacctcctcatgaaacgcttggacgaccatgagaaagggccacaacgcaccgtcaaggccttggactcacacgttatgtgtgaggtctgcggcaacacgggtcattctgggaatgactgcctggaaacctgtgaggaggcaatgtacatgggcaacaacaacgggtactgtccacaaggaggtcaggggtggaaccaaccacgtccatattatcaaggagtccctgcaaatgaaacggggaggatcccggggcagcccgacccctccattgaaaatgtcaaggcgatcacgatgaggagaggtaagtccactcgtgatccgccatatcctaaccctgtaggaactaatgagatatcaaaaggagcaccatctaatgactcggctgacaaggaggttcaaccagaaaataccgtgccgcaggagtactgtgacacacgtttgctgtcgtttccccaacggatgaggaaaccgtcggtagacgagcagttcgctcgttttgttgaagtaatccaaaagatccacatcaacgtgccgttgttggacgctatgcaagtgccaacatacgcccgttatctcaaggacatactcaacaacaagagaccgctcccaacaacggaggtggtcaagctgacggaacaatgcagcaacctgatactccacaagcttccggagaagaagaaagatccggggtgtcctacgatcacctgctcgatcggggcacaacaattcgaccaggtctcgtgcaaccttggagccagtgtcagcgtcgtgctaaaagacgtcttcgacaagctcaacttcacggtgttggcaccgacaccgatgcgcctccaactggccgattcatcagtccgttacccggctgggatagcggaggatgtgccagtcaagatacgggatttcttcatcccggttgattttgtggtgctagacatggacacggggaaggagacgccactcatcctggggcgtccgttccttagcaccgcaggagccaacattgacgtaggaacagggagtatccgtttccatattaacgggaagaaggaaaagtttgagttccaaccgaggacggaacaatgctccatggtcagaataaagcacgaatttcttggagaaggaaacaacgatgcccaggaaccattattggaagatgccggtaaaatcacccgtaccggccaaaaggctagagcagccagctcagaagaagccgccgtccgcaccaaaatcaaagaaagtgtgaagggagaagccaaagacgcccgctccatcacctctggagacgggtggaaaatccgtgaactaaatcagaaggaggttgggcaccaactggggatgcacccggatggacccaagctccatgccatagcatcggtgtctcaacctgggcaagtgccagtgaggaccggtggcatgcgcctcatgacatccaatagggggacaatgaacctcccagatcaaacggggaaaatccagtacaacctcacggaacacatagctcaaacgcaagaatggcaacaatctgctgatgctcagttcaccagcatcaacaaccggatgtag

SEQ ID NO: 29707 - DNA, 186 bp, Oryza sativa
  Clone ID: PAT_MRT4530_34183C.1
atggcacggcgaagcagtggtgctatatcgtccgtcgtcaatcctctcctagctttggaagagtgggggccggggacagagggtgcgaaagggatgataaaagttagtggctatgagacgatggttggctatgactatgatacacgcgttgccgttccccttgttcgaaagagaatgatgaggtag

SEQ ID NO: 29708 - DNA, 222 bp, Oryza sativa
  Clone ID: PAT_MRT4530_34184C.1
atggctgggctcctcccaaaccacacgttcccaatagccatgggccatgcgtttcctctcctcccgctgctccgccaagatcaactttcacctgagcgtggggaagatggcaacgccgccggcgaaggtatcatcgtggatgtcgacaacaagatggaggcgccgatgtatctcgatgatgtgatggcgcccggtggacagcttctccagtcggctatttaa

SEQ ID NO: 29709 - DNA, 327 bp, Oryza sativa
  Clone ID: PAT_MRT4530_34185C.1
atggcgcggacgagaaacggggaggattggggggggaaagaggaagggagggcgcctggggctttaagggcggcaatgtcggaggaggggagcggggcgtcgcggcagagggaggaggggctctgcctccgtcccttggcggcttgcgcgcggagtggcggggccgaggcgatgacgacggcgatgacggcgggacggtttggagcggagcggcgacacgggcgacaggtgcgggctggcgcggcagagggtgatggcgacggtgaccaggcggtcggccaccacggcacgcgcgcgcgggatgcaacgggaggcgcggcggattga

SEQ ID NO: 29710 - DNA, 2817 bp, Oryza sativa
  Clone ID: PAT_MRT4530_34186C.1
atggggaaggtcgaccagagggggaggtgggcgcccccagggtaccaaatgacggctatggggaggaacagggtctccaagggtaacagatcactcggcacttcatcaagtgccgactggctcctattaaagagagtggtcagcttctcgcatcaattgccatcggtgccgtataacgccttcaaccctcctctagcggagctgatcctccaactgcccaacgtcgatctccacggtgtcctcaaggccaagctaccgggggcccgaagatccaacccgagctccgagctagctgccaactcggaaacagctagagaaaagactggttctgccgctgctactaggaccgaacccttcaaagaagaccatccgattggcagtcagtcggccaccggtgaagctgagactagcgacgagcccccgactggaaaccagtcggcatctgccgagacaagcacaaaccaggagcccctgactggaaaccagccgggtgaagatacagagaaccccgagcagccaaataaagacatccctgagacagaagggcaagcaagcagtcctcccttgaaccaagatgctgatgctggacctgaagcaagcactttcgataaggtagaaggacctgcacggccaccaccaaggattatcacaggcccaatgatcagcgacgaagaggaaattcttcggattcgatcagctgaagattctcgaccgcctattttagttaaatggtgggacgacgagatgcagccgcagggcattgtgatcaataagccgctagaagacgaggaagtgtctttactgacaaagactcttaaccaggccactcgtctggcaaatagaatccatctttggaacgaggcgaaaaccgcgacccttgagaagcttgttcctcatcttggaactctggaagaaaccagagataaactgcacgaaaccaagaaggaggccaggagaacagaacatacacttagggaccggatcgccgagctccaagaagccaattttgaactgagtggttcttcaaaagtccaagctgccaaaattgtcgagctggaaaggcaagttagtatctgggtagtgcatgactggtttcaacctgccggaaaacttcaaagaaaatccagaagctttcttccagagcgtcaggcaacgagtcgttgctccgcagaaagctctaccgacagagaaaccagtcgtaccagcgccaccaaccttcaagactatggccagcaagactccgcgagttcgctgctccctctgctgacaatgtggccattgggccgcagactcaccccaatgtcccgcaatcacctggacgcggcatctggaggagctttcttctctaaaatggttcaaggagccgttgaactcatagagaggatggtctccaatatgggttggagcgaagaacgactccaaacccgtcagcgaggcatgcacatcgtcaaggagatggaactgcttgctgccaagttggacctcctcatgaaacgtttggacaaccacgagaaaaggccacaaggcaccgtcaaggccttggactcacacgtcacgtgtgagaaacccgtgaggaggcaatgtacatgggaacaacaacgggtaccacaaggaagtcaggggtggaaccaaccacgcccatattataaaggaggtaacaataacggtaacatctccaaccagccctccttgaaggatcttgtttttgcgcaagctaaaactactgattcgttaagcaaaaagcttgctgccaatgataagctgagctttaataaaatgatagaaacccagttagctcagttggcatctttagtccctgcaaatgaaactgggaagatcccggggcaacccgactcctccattgaaaatgttaaggcgatcacgacgaggggagttaaatccactcgtgatctgccgtatcctaaccctgcaggaagtgaaaggatgtcaaaagaagcgccatctagtgactcggctgacaaagaggttcagccagaaaagaccgtgccgcaggagtactgtgacacacggttgaagccattccctcagtggagtaggaaaccgtcagtggacgagcagttcgcttgttttgttgaagtaatccagaagattcacatcaacgtgccgttgttggacgctatgcaagtgccgacatacgcccgttatctcaaggacatactcaacaacaagagaccgctcccaacaacggaggtggtcaagctgatggaacaatgctgcaacctaatactccacaagctcccggagaagaagaaagatccggggtgtcctacgatcacctgttcgattggggcacaacaattcgaccaggccttgtgcgaccttggagccagtgtcagcgtcatgccaaaagacgttttcgacaaacttaacatcacgatgttgtcaccgacaccgatgcgcctccaactggctgactcgtcagtccgttacccggcagggatagcgcaggatgtgccagtcaagataaaggattttttcattccggttgactttgtggtgctggacatggacacagggaaggagacgccgctcatcctagtgcgtccgttccttagcaccacaggagccaacattgacgtgggaacggggagtatccgtttccatatcaacgggaaggaggaaaggtttgagtttcaaccgaggacggaacaatgctccatggttagaatcaagtacgggccaaacccgcagaatattcaagtggtcgaagtggagcgacccaaaacggatagcctggtggaattcatgcaaaatttcctggagaaggaaacaacgatgaccaggaaccgttattag

SEQ ID NO: 29711 - DNA, 1876 bp, Oryza sativa
  Clone ID: PAT_MRT4530_34187C.1
atgcggagggagtacgtggctcatgcgcgcgggcgggggagggacgcggcgcacgcgcgcggttcgcggtggacgcgggctgagctggcaccgacgtggcgcctacgtggctgccacgcgggccggcgggaggtagacgacgacccggccgcgaatggacggcgggcggcggcggcgagcggcggagcgaaccacggcgatacgggcaaaagcgagcacaccgggcggttgctcgagacgaggggagacgagccaacggctcggattcgccagagggagttcgacggcggcgaatcacggcggcgacaaccggcggggagggaagagggaaacgccgacgaggtcacgagggaccgattcccggcggtgagagcatctacgcggcttcgggaactcgatgccagcgtcggattggacggagctacgccgagcgaggctggcgacgtgcgggtgctacagagctcgagcagcgacggcggcgaggacacggcgagcgacggcaacgggagcagcgatgccactgttgtcgatgagctcgcgctcctctccttcaagtccatgctgtcaggcccatccgatggtttgctcgcgtcatggaacacctcaatccactactgcgattggacaggggttgtctgcagtggccgtcggcaacctgaaagggttgtcgcgctgctgatgaactcctccagcctttcgggccgcatctcgccgttcttgggtaacctgtcctttctcaacaggttggaccttcacggcaacggatttattgggcagataccatcggagctcggccatctcagcaggcttcgggtgctgaatctgagcacaaattctctggatggaagcattcctgtggctctgggaaggtgcaccaatctcacggtgcttgacctcagcagtaacaaactccgagataagataccgactgaggtaggagccttggaaaatcttgttgatctgagacttcacaagaatggtttgtcaggagagatccctttgcacatatcaaatttgctatcggtggagtacctgtatttgagagataactggttctctggtgagataccacctgctctgggcaatctcaccaagctgcggtatcttgaccttgcgagcaacaagctatcaggatctattccttcatctctggtgctctctgtccaagtaaatatgctgagtggaacaataccgccaaatgcgttcgatagtctgcctcgtctccagagcatttcaatggataccaacaagtttgaaggctatatccctgcatcacttgctaatgcttccaatctgtcctttgttcaactcagtggtaactctttacgcggtattgttcctcccaagattggaaggttaagcaatatcaattggctgcagctttcgaacaatttgcttcaagctaaggagacgaaagattggaacttcatatcggcattgacaaattgctcccagttagaaatgttggacttgggtgctaacaatttagaaggctggctgcatcctgacaaaaatgaccaaacagaccagaggtacttaagtctccttgagagagtttgtgtactgcttgatgtggcttatgggttggattaccttcactgccatggcccaacacctgttgtgcattgtgatcttaagtcaagtaatgtgctcttggatgctgatatggtagctcatgttggagactttggcctcgcaaaaattcttgttgagggaagctcaatgttccaacagtcaacaagctcaatgggatttagagggacaattggttatgctgccccagagtatggtgctggaaatatggtatcaacaaatggagatatctacagctatggaattctagtgttggaaacagttaccgggaagaagcctgctg

SEQ ID NO: 29712 - DNA, 2715 bp, Oryza sativa
  Clone ID: PAT_MRT4530_34188C.1
atggctgaattctcgtcagcgaaatgctgcatgaaatctcggcggacaccagaagcaacctggtgtgattttggtgtgatgaacgaggagaagagggcgagggtgggggatactgccgagaccccgcggaaatcccctcgcctggatcggccagctgcggcggcggcggcggcggcgccgttaaccagcaacggcgtgatgggcgagaagaagaagaagaatgcgacgcgggatgtgagcgattggtgttggtgggggaaagcggcggcattactatccggcggcgaccgccgtactcgacggtgccgccatgtcttgtgtgagcaggctgacattgatgtggccataacactgatcaagacccgcgttgacaccccggtgtgttgtgttaacaagtgtgatgatactgaggggagggaaatctcggtgtgtttggattgccagttgagtttctgcacggcacacgggaagccgcacgtctttatgaacgaccattggattgctctggtgtacaagaggcccaatgtggcgcattgcttcgcgtgtgaagagtgctatttcatcagaaccgacagtctcggggagggaatggcggtcggtgagaatggcttctccatcggtacccataagaaggatgagaagggaatgacgacggtcaacaatgaggcaggtgttcatgcatctatggtgtctgattatgaaagcgccctcatggtggctttactcagtgatgtcggtactccacggtgcaggcatgacatgtataacaaggatgaggttgatttggtccaaagacggatcatgttctgcgatatcaccagaatgtgtagtgattgtgacaacatcagtgtgcttatgatctttgtgtgcttgggatgtgaaaagcctttctgcactgtacactccagtttacatgctgagagcaccaagcatttggttggtctggtgtaccataacccgtatgtggcgtgctgcttcctgtgtagtgaaacctttgtcctcattggtgagggggataagaggatgccagttgacaaagcggcaggtggttatgcatctgagtcagttattgggcatgcccatgctatcaaagggataccgaatcttggaaacacttgctacttgaattcattgatgcagtgcctccttgtgcttggaaaactgcgggcaaggatgttaggaccggacgctccatcagggacccttggtactgcattgcatgacctctttgagcaaacatacagtgtgaataatgcaacaggcctgctggagacgtcattgctcttggattgtgtatgcaatttggacccacagttcgtaggaggttttatgcatgataaccatgaattgctttgctgtttacgtaaaaatttggatgaggaggagaggatgaggacgcctcctaacatgcaagacagttctgctggtgcagtgcctcctacggtttttaattccattttcggtggtcagctatttgttaccagatcgtgcaaatgttgctcgttttgttcagtttcccacgctgtattctatgatctctcagtaccagtaccaccgaagaagcctccagccaaaagtgttgaatcaacaccatggattgaaggtcacagatctcaaccgaagatttgtatcaaccagtttgaagcaatacataagaggaacacagaaaagactcatagaattgttgaagatgccgattctgatcctgcttcagaattgaaagatatggtcatggtgaaaacatcagagccattggaagttgattatactgaagtggaacagatctcacaaagcaaggactatgtacaagatcctcaaaatgtgttggctgatgtcaaaactgcaggaatggatgcgacaacaacagatacccgcattccagaatatatagggccacatccacctgtctctcaattaagggaagagaatgcacagttagaatcatgcaatgatgtggggaaagatggcaatgctattctcgaaatgatagaatggacctgtgagaactgctccaaaggtgctcggaagtcagatgtcactgaaggtacatacagtgaacagatgctgtcaagtactaatgaggacacagcagttggtggataccagagggaacagtcagagaagataacatgccaaagtgagcaatccaacaaaaaacctgaatgccctgaaggtgttcaagacgctgtacctcattgtgtcccagctgagagacaggacaacctgttgagcagtcaggatcaaaatgccaccacactagatgaaggaaggggtaagcaaaagcttcatcatagtgcacaccaagtcgaagaatgccaaaatgagcagaaagataggaataaaggtgctactcaaacacggattagcaagttgccacttgtgttaaccattcatctgatgagatctttgttggggcctgataaggtgatgggacatgtgagctttaaggaaatccttgatatgggactgttcatggaccccagctctgaagacaaagataattccatttatcgtctagctggtgttattgagcaccatggccgcggcaaagattcagggcactttgttgcttatgtgagaccaagtcctcggcagcagaccaatggttcttcctcatggttttgtgcaagtgataccgacatcagagaagtctctttagaagaagttctcaagtgcgaggcttaccttcttttctacgagaggatggaaggctga

SEQ ID NO: 29713 - DNA, 1512 bp, Oryza sativa
  Clone ID: PAT_MRT4530_34189C.1
atgacatggtgcaacagcttcaacgacgtgcgcgccgtggagaacaacctggccaccgccgccgccgtggccgcggccaagaagcagcagcagcagcagcaggtctcccagcacgtcaacctcatcaagacctgcccctcctgcggccaccgcgcgcagtatgagcaggcagcggcggcggcgacgatccaggacctgccggggctgccggccggggtgaagttcgacccgacggaccaggagctgctggagcacctggaagggaaggcgaggcctgacgcgcggaagctccaccccctcatcgacgagttcatccccaccatcgagggcgagaacggcatctgctacacccatcccgagaggcttccaggcacccgtcaggacattggaactggagtcggcaaggacggcctgatccggcacttcttccaccgcccgtcgaaggcgtacacgacggggacgcggaagcggcggaaggtgcacaccgacgagcagggcggcgagacgcggtggcacaagaccggcaagacgcggccggtgttcaccggcggcaagctgaaggggtacaagaagatcctggtgctctacaccaactacggcaagcagcgcaagccggagaagaccaactgggtgatgcaccagtaccacctgggctccgacgaggaggagaaggacggcgagctcgtcgtgtccaaggtgttctaccagacgcagccgaggcagtgcggcggcggctcggcagcgacggccaaggacctctccgtcgacctcgtcgccggtaacaacatcaaggctagcaatgctgctgctgaacaccaccataacgacggcgtcggcggcggcggccacggtggcaacaacagcagcatgctgaaggaagctgcaggcattgtagatttctacaacccagcggcggcgctaatcggctacagccaggcggctcctaacaacagggcggctgcttctgctcatttgacgatgcctaactttgaggctcaagatgttcaaaggtggcttgccttgctcgagatctggagcttgatcctcgaaatcctcgcactgcgggctgagctggcgccgacgtggcgcctacgtggctgccacgcgggccggcgggaggtagacgacgacccggccgcgaatggacggcgggtggcggcggcgagcagcggagcgaaccacggtgatacaggcaaaagcgagcacaccgggcggctgcacgtgacaaggggagacgagccaacggctcggattcgtcggaggttgctcgacggcggcggattgcggcggcggcaaccggcggcgggagaagagggaaacggcgacgaggtcacgagaggtcgattcccggcggtgagagcatctacgcggcgtcgggaactcgacgctagcgtcggattgggcggaactacgccgagcgaggccggcgacgagcgggtgctacggagctcgggcggcgacggcggcgagcacacggcgagcgacggcaacagtcggggcggcgccggctaa

SEQ ID NO: 29714 - DNA, 813 bp, Oryza sativa
  Clone ID: PAT_MRT4530_3418C.1
atggcgcagcgacgacggggtgcagcggagacggcggcgacggccgtccctccccctctccctctccccgtcggcgtcgacggcgacggcggcgttggcttcgtccgaggtccacgagacgactcgggcgacggcgacagcggcgggctcagcaacggcgacgacgatggtgggggactcggcgatggcaaatccagtggtggggaggacggtggtggcggatctagcgatgaggaggactgcagcggtggatccagcgatagggaggactacggatctggtgacggaggaggagcggcggcggtgtgcgaagaggagctcgcgaaggtcgaggggcggcggcgtgccatggtcatgtgggaggcggcggaggcggaggggccacagacgtcgtcgccggagaagaggaggcgcacggaccagaggcggctcccgccggcgatgccgcgggcggcggagggggggccgttcatgcgcgcggagcgccgcggcgggcggctgatactgaccgaggtggcgcgagggcccgaccggcggcgggaggtgttccgcgcgtcccgcgccggcggccgcctgcagctgcgcttcgccggagttgaagaagaagaagaagaagaagcgcccgacggcgctgacgccgacgccgagcctgctgcgccggcggagacggcggagagcgtcgcgactacgagcggcggcggcggcggggtcgtggtcagcggctactgctgcaacggcggcggcggcagcttctgccaggtggcgggcggcgcagggcggcgcctcgagattggtgccgtgatggggacgtga

SEQ ID NO: 29715 - DNA, 137 bp, Oryza sativa
  Clone ID: PAT_MRT4530_34190C.1
gacaaggaagtccagacttgctttgtagtttaacccttttctttcatctggtataaactacaaagcaagtctggacttccttggcagtttataccaaatgaaagggcgggcgctccagagtggccatgctggggggg

SEQ ID NO: 29716 - DNA, 1200 bp, Oryza sativa
  Clone ID: PAT_MRT4530_34191C.1
atggatgttgaattttgttctatttggaaagctgttggttggcagagatttgctgtggtagatgagcctggttctcgtttgcttactttgcaatttctgtgcactttgaaagaaatagaagatgggtatcatttgtacaactgccatgaactaaccattcccctgcagaccatagaagaatcttgtgcaggtggaacatacagggagacgcacaacatgacaaggaacaaacaaggaagttcatcatcctcgacacccgtgcagatatatgaggcaggttgggcactatctggggatgcacctggatggacccaagctccacgccatagtatcggagtctcaacctgggcaagcgccagtgaggaccggtggcatgcgcctcatgacatccactgggggacaatcaaccttccagatcaagtggtgtgcctccatctccaagtgaatggcgctcaagttcctcccgttgggacttgggtgaaatcactaggagaatggacacccttgatgcgcagacgggggagatccacccaaggcaatgagaagcagtgtctcgtgggaatcaggggtaagggtatagtgtttgcttatgcaattactctatgtcatgacgatgatattagagtagtatctggtagtttagacgtggtgtctagattacgagatatcattatttggggttatatattgcggatgagaggtgggtcgctgatggtgacagctcagtacggatattccttcgcgcctatatataatcctaagttaatttcctggggaggagtttggacagcagatagattgcaagcaagaaactggcaaaaccaagtcatatgcccgctttgtcgcgccgagccggaaacagcagtccacctcttagcccactgccgcctctccaaaagaatatgggacgctgtacgtgattggtcactccttcatatccaaccatcagaatgggccaatgttgaaacagtacaagattggtggattcaaatcacctcagcacaaaacatgccaaagaaagctctcaagtcgataattatacttgttgcatgggaattatggaaggagaggaactcaaggatcttcaggaaccttgcaaacactccggcctccatcatggcaaaaataagagaggaagcacacatgtgggtaatagcgggggcaaagtgcctaacagagctctactcgttatgtgagtaa

SEQ ID NO: 29717 - DNA, 831 bp, Oryza sativa
  Clone ID: PAT_MRT4530_34192C.1
atgggccggccggcccaaaaggcggcccaaagcacgcgcgcgggcggggaggggagagagagccggtggaccgggtccatcccgcgtggtcccgggtgggacccgtttgtcgacgactcacgagcccacgcgctagggttcggggagggagacgcggtgcatgcgcgcggttcgcggaggatgcggtgcggcgggcccacgagcagcctcacggctcaccgcggaccatgcgcacgggggagggggaggaaacggagggagcggctggccgggtcagccgatccggtcgcggccgaggtggcgccgacgtggcgcctacgtggcagcgacacgggccggcgggaggtaggcgacaacgccgaccggaacggacggcggacgacagcggcgagcggcggagcgaaccacggcgatacaggcgaaagcgagcacaccgggtggttgcacgagacgaggggagacgagccaacggctcggattcgttggagggagtgcgtcggcggcaaccggcggggagggaagagggaaacggcgacgaggtcacgaggggccgattcccggcggcgagaacatctacgcggctacgggaatccgttcgtcccatgcgcgggaagcaacgggcggcgcggcgatttgagcggcgtggcttgggcacgtgtgctggctcgcggggccgagcggctgcgcggcagggcagcggggccgggcggcgcagacggcgcaggcgcggcacgggcggcgaccacgcgggcgcgcgggaagcggcagcgagggagtggagagggagggctcggctcggcgcggctcacgcacacgcgcgcgcggcgcgcg

SEQ ID NO: 29718 - DNA, 2094 bp, Oryza sativa
  Clone ID: PAT_MRT4530_34193C.1
atggcgcaggctagcccgttctgtggcaagcctgatgaggatgccaatgctcatctgcaacagttcctagagatctgtagcacgtacaccatcaagggtgtcagtcccgacgccgtcaggctgcgactgtttccgttctccttctcgggagagcgaagcagtggttctatgccaaccttgctgctgtcaatacctgggacaaatgctctacgacattcctctcgaaattcttcccgatgggcaaaaccaatgcccttcgtggaaggatttcaagtttccagcagacaagggatgagtctattccggaagcatgggaacgactgcaagagtcattctgggaatgactgcccgggaacccatgaggaggcgatgtacatgggcaacaacaacaacgggtatcatccacaaggaggtcaggggtggaaccaaccatgcccatattatcaaggagtaatccagaagatccacatcaacgtgccgttgttggacaccatacaaatgccaacatacgcccgttatctcaaggacaaactcaacaacaagagaccgctcccaacggaggtggtcaagctgacggaacaatgcagcaacataatactccacaagctcccgaagaagaaggaagatccggggtgtcctacgatcacctgctcgatcggggcacaacagttcgaccaggccttgtgcgaccttggagccaatgtcagtgtcatgccaaaagatgtcttcgacaagctcaacttcacggtatgggcaccaacaccaatgcaccttcaactggctaattcgtcagtccgttaccctgtagggatagcggaggatgtgccagtcaagatacgggatttcttcatcccggttggcttcgtagtgctggacacggacacgggaaaagagacaccgctcatcctgggcgccctttccttagcaccaatttcctggagaaggaaacaacgatgcccaggaacgctggtaaaaccacccatacgggccaagaagctagagcagctggctcagaagaagccgccgtccgcaccaaaaccaaagaaggtgtggagggagaagccaaagacgcccgctccatcacctccggagacgatagaaaatccgcaaactgaactagatggagaaatagaagatggaatttcctttcattttttccgtgaagagtttacacttacatggaaaggcttaagtacacttcttggttttcacgattcctgtaaaatcgatctccagaaaggaatttctgggttcgagaaaaataggtttcgggaagatatttccggtgctccaatttgcaagaaacctagaatgaatgatatccataatcctacacttaggctcatgcacaaatggattgctatgactcagtttcctagaggtgatatgaggcccattatgggagatgaattgattatcatgtttgccatggttagaaagatcaaaattgctcctgtgaaatgtatgataaggcaatggttagaaagtataaagttctctgctcctgttgagtgcacttctctgaatactcggatagcaaaagggctaggggtcgttagcgaccaaattgcttttatctcagccgctcgtccgtgtattaatgaggcttatccagtgcaagggcatattctgaaacatggagtagatggatctttgatttactttttcctcgggtgtacaaatgaaatcccgttgccaaatgtggtgtatcatttgtacaactgccgtgaactaaccattcccctgcagaccatagaagaatctcgtgtaggtggagcatacagggagacgcgcaacatgacaagaaatgaactagaatgttcatcatcctcaacaccgtgcagatgtatgaggcaggttgggagccaactggggatgcacccggatggacccaagctcgacgtcacagtatcggagtctcaacctgggcaagtgccagtgaggaccggtggcatgcgcctcatgacatctagtggggggacaatcaaccttccagatcaagtggtgtgcctccatctccaagtgaatggcgctcaagttcctctcgttcggacttgggtgaaatcacttggagaatggacacccttgcactag

SEQ ID NO: 29719 - DNA, 214 bp, Oryza sativa
  Clone ID: PAT_MRT4530_34194C.1
ttacccggaacctcctgtccctgaactccggatgtttcgggctgcctgccaggaagttccgggccctcggtgagtacggtgtcagtgagcgtggatggctcttcctcctcgccccgactccatgcgactccgggatagtggtgctctgcagcagagcaagaggacgaagctgggttgggagggtgaggtggtgcggcggtggagataggggcag

SEQ ID NO: 29720 - DNA, 399 bp, Oryza sativa
  Clone ID: PAT_MRT4530_34195C.1
caggagaagtataaaaggcagaatagctcacacacaacttgtccagtatatgaatccattacaaatttctgttatcgcaacatcttatgaatggtgagccacaaaacgagaacacaatggtgatgtaaattcatccccgtttgtatcttctaggtcatcacctaatttgtccctaaagtctctagacatccatgttacatgctgcatggtttcaaacgaaacgaaaaagaaggatgctacaaactgcagcccatactgaatagtatgcttagccacttctttgtggcagatggggggataaactgtatgttcgacggatgaaaattcctcagatgctggtggaaacagagcagatggttactgaaacatgttgtcaagcttctgtctgtactgagccaa

SEQ ID NO: 29721 - DNA, 153 bp, Oryza sativa
  Clone ID: PAT_MRT4530_34196C.1
atggctctgtggccacgaacttcacctgccattggaggctttaagctcgtcgacgacgacgaccctgagggcgacgagcagccacgcaacccagggaagtggaaactggaaaaagaattgacattcatacagctaggaacagcaggagggtaa

SEQ ID NO: 29722 - DNA, 734 bp, Oryza sativa
  Clone ID: PAT_MRT4530_34197C.1
aggggcacgtttcaggcatcatatgatagaacaaccagattctccatacagctgcaaaaagctactttcgcccaaaacatacgccatcggtctgaaactctgaatcctgtcggcactcactcagctcaagttacatctctgttaaaaccatgcatcctacaacaagcaacactcaaggatctgaatctagagaaacaacactataaccctggaaaaagggggttgacattcagaggattccaagaaagctagtagctgaaatcacccgtcgctggttaatgtcaaggcaaggacaacacaggtcagggtgaaaatgatcgtagccgcggcgaaggccaggatggccctctgagagacgccctgcttttcttggccggccagctcaacctctttcagcaggcctctgatctcatcgacgtccgagtccttcgccgcatggattagcctgttatgaacctcatcgagtttggcgagccttctagctcggctggcgtctctggcagaccagatgaacctcgtcatcctccacaggagtatgccgacgtagatcgccacgacacaatccacggtgtagtgatggcgttctcgtatctccctttgcgcgctatgcaggacaagaagccatattgcgacggagatccagcccccgtatgcttccgtccacgccattgcagtaagaacagcaacaagcatgtgcccactgtacataagatcattgcaaccaccactagctt

SEQ ID NO: 29723 - DNA, 294 bp, Oryza sativa
  Clone ID: PAT_MRT4530_34198C.1
ccgcagcgtaccactccccccgtttggtgatctctactttgatcggaatctggctccagctccagctctattggcttttaacgtgccctctagatatggtatttcccctaggtactatggtgccccccgtccccttacccacccttggcggtgtcttgtaatgagttttcccagtatagtggttccggaagttaaaataagctccagatatccatcatatgtgaccatgtgaaactttgggtgatataaatagaaataaagttgttctttcataatttaaaaaaaaaaaaaaaa

SEQ ID NO: 29724 - DNA, 799 bp, Oryza sativa
  Clone ID: PAT_MRT4530_34199C.1
atggccgccggccgccattcccgcctccgtttcgacctcccccgtggccgactccctcccctcatctataaaatggaaccccctcgccgcacctcccgccacgaccgtgcgccgtccggttgcgccgtcgccaccctcggcctcgcagtggcgttgctaccactgcaccacctccggcagccccttccgtcgtgcccgagcaccgaccgacgtcgccgcctcctccgtcgacgtcgcagcgtcgtcctcttctctggctgctcctctgtttcgcccagaaaaccgctgcaagtcgccgccaacccctccaccctcctcgccgaagtcccttcggccgccccttcctcctcgcccgtgcaacagtcggccgcacctccaccaccttcagcatcacagcggcaaggtcgtcctcggcctcgcctcccctccatccgaaccccgccggtctttgtcgtcgtcctctcgtcgttcccggttgcgctcgtcgtcggccctcccttcgtcaagccgtgctcgttcgtcgtctgcgtccgtcaagtaagccgctgcagccccgtcgtcgtcttcgtcctcggctccgcgtcgtcaagccttgtgccggcctcgtctcgtcttcgtccaaggatcgccgccgaagtagtcccctcgccgttcgtctccgccgtccccgagccgtctcaaccgcgcccgctcgtcgtcgtcgtttcgcgcctcgttgcatggtgctttgcttgtgtgcttcgtgtagcttctgttgttctggaggttcctaaagcgtggttcgcggtcgtcgccgaag

SEQ ID NO: 29725 - DNA, 1506 bp, Oryza sativa
  Clone ID: PAT_MRT4530_3419C.1
atggctatagatctaaacatattagcagaagaagaggaagatggaggggctttacctgacctcaatgaagcacaagccaatctagaagaagaagttcctggaaggtatgttatccaggtagatgaccttgctcgagttgcttgccatggaaatgatcaagttgtacattcttttgatctcaacttgggagcttttgatctcaacttggaagcaacagaagaacaagaacaactgcatccagacaatgacaatgaattgcaacatgagctggaagccttggaggatgatcttcgggactatggcgtgtatacagatactgtcaatgttgtctttgatagagaggagttgtcagactcagaagaagaagaagatgcaaatgcaaatccaaatccagatgcaaatggaaatgaggaaaacagttctagagaattgacaaacacacaaaggcaaagaatttatgaattgttgcttgcaaaaagtaaggatggaaaactagaaaaagacaccacacgtgcagttgctcaagtgttcaatgtcagcatccgtacagtccagcgtatttggaagagagcaaagctttgcatcgcacatggagtacaagttaatgttgactcgaggaagtgttacaattgtggccgcaaaaaggttgtaatagacttgtcggttgtatcagctattccattgcgccaaagaagcactatacggtcacttgctgaagccctaggtgtgtcaaaaagcacattgcataggttgttcaaagaagggcatctacgacgtcactctaactcactaaagccttatttgaaggaggcaaacaaaaaaraaaggctgcagtggtgtgttgttgcgaggcctaggtatgatgctgaaggcaattgtacttttgatggtaagataggcatttggccttttgttagaaaggaacccgcacaaaggagaagccgtaatagagagagggggacacttgtaacaaagacaattaaggttgatagagacactatgagatcatttataatctctaaagttctcccagctattagagcatgttggcctctagaagatgcaagaagaacaatatttattcaacaagacaatgctagaactcatgtaccaattgacgatgagcagttcagtgttgcagtagctcaaatggggcttgatattcgcctcgtgaatcaacctcccaattcccccgatatgaattgtctagatcttggcttctttgcatcacttcagtccttaactgctaatagggtgtctaaaaacatggaggagctaatagagaatgttcagaaggaatataatgactacgatccaaagactctgaatagagtgttcgtgacactacaaagctgttgcattgaagtaatggaagctaatggagggaataagtacaagatccctcacatgaacaaagcgaggctagaggcacttggcattcttcctaaagcccttcgctgtgatcgtcagttgtatgagaaagtcatacaacttctaggcaactaa

SEQ ID NO: 29726 - DNA, 298 bp, Oryza sativa
  Clone ID: PAT_MRT4530_341C.1
gggccccggtccggggtcttctggtcgaccgatatgtgcgactacgcacatcgcgagggcgacctccgcgacgtggtggaggaagagcaggcacttgtgggggcggaagctgtcggaggcggttgatcgcaggacgtatctcggcgctcgcgacaagaggccgttgctcgtgcgcgccgtggcaacctcgcgcggcgaggccacctgcaacctcgcggagctcataacaacctcaccaagaagcgcatcttccgggccgcgatcggtacgcgcgacggctaggggcacgacgagttca

SEQ ID NO: 29727 - DNA, 494 bp, Oryza sativa
  Clone ID: PAT_MRT4530_34200C.1
cggacgcgtgggcggacgcgtgggtttttacaggaacactgcaaggcatatgagctcagatgttcccctctccttaaaaaaaaaaaaaaaaaaaaaaaaaaaaaaaaaaaaaaaaaaaaaaaaaagaaaaaaaaaaaaaaaaaaaaaaaaaaaaaaaaaaaaaaaaaaaaaaaaaaaaaaaaaaaaaaaaaaaaaaaaaaagggggggcccctttaaaaaaaccaaaattaacgcccccggggaaagcaatgaaaaaacttttaaaaagggcaaccaaaaaaaaatcactggcccgagttttaaaaacatggaaaaggaaaaaaccttggggtaaccaaaaaaaatgccctggaaaaaaaaccccttttacccagttgggaaaaaaccaaaaagccccgaacaaatcccctttcaaaaaaattgccacccttaaatggaaaagggacccccccctgaacgggacaataaaccgcgggggtggggggggaacccc

SEQ ID NO: 29728 - DNA, 1212 bp, Oryza sativa
  Clone ID: PAT_MRT4530_34201C.1
atggcccagcccatcctggcaccgttggatgcagggttcggcgtggacgtccaagattgcatcccaatgacggttggagggcacttcgaacaattcccctttcacaaccatcataactacctctatatggacttcaccttctcacttcactcacacacctcaagcaagatctctctcatttctcacaagtttagtttagtagtatctagctggtggaataggaatagagtagaaatcaggagtacgaaagtcttcggaagagttcggccccatcccgcgctctcccgtggccgccccgcctctccccgccttctccttctctctctccggcgccggccgacctccagccgcacctcctgccatgaccgtgcaccgtccggttgcgctgtcgccaccctcggcctcgcaggtgcatcctcttccccggcgtcgcctccgtttcacggggaaaccatcggagacgcgtcctcaccggtaaacagtggcgttgccgccactgcatcacctccagcagccccttccgccgtgcccgagcaccgaccgacgtcgccgtctcctccgtcgacgtcgcagcgtcgtcctttcctctggctgctcctctgtttcgcccggaaaaccgctgcaagccgccgccaacccatccgccctctcgccagtcccttcggccgccccttcctcctcgcccttgcaacggtcggccgccccttcctcctcgcccttgcaacggtcggccgcacctccaccacctttggcatcacagcggcaaggtcgtcctcggcctcacctcccctccatccgaaccccgccggtctttgtcgtcgtcctctcatcgttcccggttgcgcttgttgtcggccctcccttcgtcaagccgtgctcgttcgtcgtccgcgtccgtcaagggagccgctgcagccccgtcgtcgtcttcgtcctcggctccgcgtcgtcaagccttgtgccggccttgtctcgccttcgtccaaggatcgccgccaaagtcgttccctcgccgttcgcctacgtcgtccccgagccatctccgccgcgcccattcgccgtcgtcgttcccacgccttgttgcgtggtggtaagggtctgtcctctcgctgcccccgtcctcgtcctttcggtgtcgcccgtgacaattgtgcggttgtcgaccccggtacccgtgtaccggtgtcggtagtcgtttgtgtgtgcgtgtgg

SEQ ID NO: 29729 - DNA, 1103 bp, Oryza sativa
  Clone ID: PAT_MRT4530_34202C.1
atgaagggaatagtgggaagtaaactgaatgtaaagaaagtgaatccgagttgcctgttcgtgggaactattcccagttatgaaccaagtgaaatgttcgaagatagtctatagaggagatcgagccaagcagtccagagtggagaagtttagttagataagtttgttatagaagatgaagcggaagaagtcagacaagaagagaagaccgcccaacctatcttcttgctagcctcctcgaatctcggggacgagattcccaaagtctctcctccctccctctcttttccttccgtccctccttcccggccggcccactccgtcctctcctcctcccgcctgggcctgccccggcccaagccgagcggctgcctccctccagcgcccctcacgcgcgccgcacgcgcgctgaccgcgcgcctaaccggtgggtcccacccacccggtcgtctccttcctcccgcacggcctcctctctcacccgtgaaccctagcgccgattcctcctccaagtccaccccattcaagccgggtgccaaacccggccgctttccatggccgccggccgccattcccgcctccgtttcgacctcccccgtggccgactccctcccctcatctataaaatggaaccccctcggtccgttctccagttttagccccctcccgcgctctcccgtggccgccccgcctctccccgccttctccttctctctctccggtgccggccgacctccagccgcacctcccgccacgaccgtgcgccgtccggttgcgccgtcgccaccctcggcctcgcaggtgcatcctcggtaaacagtggcgttgctaccactgcaccacctccggcagccccttccgtcgtgcccgagcaccgaccgacgtcgccgcctcctccgtcgacgtcgcagcgtcgtcctcttctctggctgctcctctgtttcgcccagaaaaccgctgcaagtcgccgccaacccctccaccctcctcgccgaagtcccttcggccgccccttcctcctcgcccgtgcaacagtcggccgcacctccaccaccttcagcatcacagcggcaaggtcgtcctcggcctcgcctcccctccat

SEQ ID NO: 29730 - DNA, 423 bp, Oryza sativa
  Clone ID: PAT_MRT4530_34203C.1
atgcccctggggccattggtggaggtcaagttggagggaattttcgtcaagttagatggaaggccaccggggctgctcccggaggcgcagttcgcggcgttcgtgcgacggcactggcgggagtactctggaccagaggagtacgcgtggcggctgcgcgtgttcgccgccaacctcacccgcaccgcggcacaccaagtgctcgacccgactgcgcgccacagcatcaccccttctccgacctcatccgggaagagttcgaggcgcggttcacgggcctcgctgccaacggcgacgacgaggcggccgatgccggccacggaggaggtggccgtcctccctgctagcttcgatttggcgcgacaggggcgccgtgaccgacgtcaagatgcagggcacatgcgcctcctgctgggcctttag

SEQ ID NO: 29731 - DNA, 326 bp, Oryza sativa
  unsure (1)..(326): unsure at all n locations
  Clone ID: PAT_MRT4530_34204C.1
gcggggggagggaggccatgatgccgccggcgataagcttggctcgctctccgacgtcgtccgcctccgcttctcctctctaccccgtccgccgatccgccgcagtcgccgtccggcaccaccgctgcccgtccttcgccaccaaacccgctgcaggagtttgctgtnccagcccggcggttgaattgttgccatctttgagcccaganatcctggttcgagatgcgcggctagaggattnctgggaagtagctgatactcattgcagctngttctttccagattacanttttccactggaccttgttctacgtattgatcgttaa

SEQ ID NO: 29732 - DNA, 141 bp, Oryza sativa
  Clone ID: PAT_MRT4530_34205C.1
aattgtaacattatatttagtacgtaggttaaaaataaagtcatacattattatgtgcgactgttgaaacttagggccatataaatgtaaataaaattatcttacctatttactataatataagaaacaattagaacacat

SEQ ID NO: 29733 - DNA, 264 bp, Oryza sativa
  Clone ID: PAT_MRT4530_34206C.1
atggggctcaagctaccatggctgcatactgttgcgctctgcatggtgagggtttaccaaaccgttctgggtggagttagcgccatcccacggtttaacgatcatcacgaggtgtaccgtaattttaaaactgagaagggagttttcgattatggaagaagctctccaaacaagttcaacagtgtctgtgtgagcctggtggagcctgtgcggtgcgtttgcaaggacagggcccttttcaggggtggcagcggcctccattga

SEQ ID NO: 29734 - DNA, 512 bp, Oryza sativa
  Clone ID: PAT_MRT4530_34207C.1
agacaaagcaggcacgcctgcgggtgccgggacgctatacagcggtcgacctacgcgttcgatctcgttgaaaaatgaacaggagatgtgtttgtgagaggggggctcacactgcatccttcgacaatcgtccatcaccccaacatagtttataaattatgacctacacctgtgtgagaggctgttcataggcagtgcactgcccccgctccatgtctcggggacattggacacaagcattaattcctgcctaacattgttgaatctgccgttgggtcgcatgaactcaacaaacattaaccccattaggatatgttcgaaaaagacataacaatgtataagggtatttcagcaagagaggaccataccgtcggcttaggatcatatgcatgcaaccaatctatactgggcattgattggatcattatactgatcaatgatgactggtcctgacaaacttggatcatatggactgatgcaactagttgctactaacagacattatacgatca

SEQ ID NO: 29735 - DNA, 420 bp, Oryza sativa
  Clone ID: PAT_MRT4530_34208C.1
atggagctgtacgcggacctggtccccctcaccgcggagaacttccgcgccctctacaccaagaagccgctccactacaaagggctttgtctttcacagcattatcccaggatacatgtggaagggcggcgacttcgtcaaggaccatggcaccggcggcgagttcatttgcggcgacaccttcccaatgagaatttcctacttccacacgaccgcccgtggttacccaacggctccgccgaaaacaacatctcacagttctttacccgcgtgccctggttcgatggcaactacgtcgtcttcggctgtatcatctccggcttccacaacctcaaggccatcgaagcggaggtggaggtcaagattgccaaccgtggcgaggtcgtcattgtcccgccgccgtcgttaactactaattaa

SEQ ID NO: 29736 - DNA, 1231 bp, Oryza sativa
  Clone ID: PAT_MRT4530_34209C.1
ccggccggggaacccggatgctggcgcatcgcacgcacagagggagaggggggtgaggggatcacacctttctctcgctttctctctcgttggcgagcggcggcgcgggcgctcgagctgacggtcggtagagacggcgccgggcatctggaggttaggaggctgatctagtgagattgtttttcaacggaccgcttcctgtgttgtcaagctaggatatggacaccaacaacggaaagggagttgtagcctcatggacatcatccatgtcatctttgatgctctccaatttggccaatctggtggctagtggcacaaggacatcggctggttttaagcaggtgcatctcaatgcatgtgctagagttgtgaatgaaaagttttcgacaacactcaccggggatcagattagaaatcatttgaagacatggcataagaagtttcaaaagattagtcgtcttaggaaggtgagtggagctatttgggacgaagagaacttcattattagccttgacgaggagcactacaatgactatatgcagcataacaacaagagcgatgctgagtttttcaacaggcctattaccaactatggtgagatgcttaccatatttggtagtaccatggctataggaaattttgcaaaggactcaagctcagttctaggcactgaagatgtcgagggtacagagaatgaagtgaatgaagatgctcccacaatagatcatgatgagagatcatcggctagcaagcccaagagacaaaagacatatgcacatgacgatgatggtttggttggtgcatttgacagagctagtgacaaactagcaaatgccataataaggtctagcacagttgggaatgaactacctgatgatctatgggacaacttgaatagccttccaggttttgagcaacatcacatctctttctactatcactatttggttgctaatccacatattgctagagctttcaacggtcttccatttgcgaacaaacttgattgggttgctatgtacatcagcgagaagtttcccggtgctatgtaggataccatcttcatggaaagattggttatttcactattatgaactatttgtaccctctcattttgtattgtgtgtgcaccgttaatttgggctatgtgtaagacttcatgcaattatctactattatgtgagactttgaattggaaaatttgtggatttcaatttaaaaaaaaaaaaaa

SEQ ID NO: 29737 - DNA, 785 bp, Oryza sativa
  Clone ID: PAT_MRT4530_3420C.1
caggtcctccaggacggggagccgcgacgggacctgatcggcgaagcggccgccgagcgacacgtcggcgaggtgcagcctccggaggcggctgggaggtccaggtcgacgagccgccgggcgccggcgaagcagtgctgctgtgccgctggcggttacgcgggcgcgcttgctcccccgccggcaaggcctaatccttcggccacccctatgtggagtgcctcctggagcgattcttgcaggagtcgttgtcttcgccagcgacgcgggtgcggcgaggagtgaatggtggtgggatggtcggggagcaagaaaaagcgtacggcgacctgtgcgcgatggtggaggcgcacaaggcacggcgggagagggaggagaagatagagatggagcgcgcggcggggaggtggccgccgatagacgcggatgtgggccgcatgtcgccggaggagctgatggctttcgggatggggctcatggctgtgcaggctgccgtccggtctcgccggccgccggaccccgtcggcccaactattctgggctacacgtactcccctatcccgttcgggcccacctatatgggcctcacatactctgcggcatcgcttcggcccaaggaagccttcctcagaaactcaattccgccttcgcctaagggttacggaaagcattgtctttctctagttttgcatctgccgtctccgacgaggcgacgaggcggcgggtggcggcgcctccgccggcgtacggctgcccggacgctttcgtctccggtgctcgcctaa

SEQ ID NO: 29738 - DNA, 426 bp, Oryza sativa
  Clone ID: PAT_MRT4530_34210C.1
atgcggctacgggaactcgatgctagcgtcggattggacggagctacgccgagcgaggctggcgacgtgcgggtgctacggagctcgagcggcgacggcggcgagcacacggcgagcgacggcaacgcgaaggacggcggtggcgagacagagcacgggggcgacggcaatggcacggaggcgaatggaagaggaagggaaaggggaggctggggtttaaatgggcggcaatgtcgggccgggcccaaggccatgacgacgccgatgacggcggggcggtttggagcggagcggcgacactggcgacaggcgcgtgcagaggctgacggcggcggcgaccgggcggttgcggggatcgtccgcgggtggggcggtcgcgtccgctggttcgtgatagttgttgatgtccggcgtgagcccgagtaa

SEQ ID NO: 29739 - DNA, 863 bp, Oryza sativa
  Clone ID: PAT_MRT4530_34211C.1
ttttttttttttttttttttttttttttttttttttttttttttttttttttttttagaggcctaacgtgctgccaacgcttgtaattctctgattcaaagtgcataacattcgaacaaaatttagctgatcctggcacttgagtaataacaacacaagaactctgaaactcaaacaagagctatgtagcccattcagtgcaaccacacgaatagcaggcgataacttagaccttgaagcctttgctgttcctccttcctctcgccttctcaaacttccttccctttgagcgcacgtaaggcttggtgttgctgtgtggcactccaggagcaggaccaaagtgcttcactgcttccctggcgttcttaggacccctcaggagaaccgtgttctggcccagaggagcgcggagcgccagctgatcgaaggtaaggcactctccaccagtattcacaatgcgagccctcgcggtctcggtgaacctgagcgcggccaccttcatcgccggcacctcgtagaccctcttgtcgtcggtaacggtgcccacgatcacggcgatctggttctccttgccctccatgaacctgacgaggcggcggagcgagagcggcgggcggttggtcttgctcatgaagagccgcctcaggatcacggcgttgaaggggctcttggtcctccgcaccaggaagcggtagagcttgacgatgagcttgaggtagacatcgtcggacttgggcgccgtgcgcttggtcttcttgttccggccgccggcgacgaggtcgatacccatggcggcggcgtgcggcggcggagggggaggtgatttcttctagggttttgcccggccgaggcgggccggccgg

SEQ ID NO: 29740 - DNA, 660 bp, Oryza sativa
  Clone ID: PAT_MRT4530_34212C.1
atgacctctaagcaaaaaggaaagaaaaggggagagggagggaatatagacttccctagggcggctagggcgcggcctgagagaaagggcggctcggccgagcttaacgggccggccggcccaagaaggcggcctagagcggcccaagacgcgcgcgcgcgggagggaggagagagagagccggtggaccgggctcaccatgcgcggtcccgggctgagctggcgccgacgtggcgcctacgtggctgccacgcgggccggcgggaggtagacgacgacccggccgcgaatggacggcgggtggcggcgccgagtggcggagcgaaccacggcgatacggacaaaagcgagcacaccgggcggttgctcgtgatgaggggagacgagccaacggctcggatttgccggaggaagcttgacggcggcgaatcgcggcggcgacaaccggcggggagggaagagggaaacggcggcgaggccacgaggggtcgattcccggcggtgagagcatctacgcggtttcgggaactcgatgctagcgtcggattggacggagctacgccgagcgaggctggcgacgtgtgggtgctacggagctcgagcggcgacggcggcgagcacgcggcgagcgacggcaacggtcggggcgacgccggctaa

SEQ ID NO: 29741 - DNA, 2130 bp, Oryza sativa
  Clone ID: PAT_MRT4530_34213C.1
atggccagcaagactcttcgcgagttcactgctccctctgctgacaatgtggccataaggcaacaggtcaacataggggacgtggattttgacttgaagtccagcctcatcatgatggcgcaggctagcccgttctgtggcaggcctaataaggatgccaatgctcatctgcaacagttcctgaagatctgtagcacatacaccatcaagggcgtcagtcccaacgccgtcagggacaagtgctctacggcattcctctcaaaattcttcccgatgggcaaaacgaatgcccttcgtggacgaatttccagtttccaacagacaagggacgagtccattccagaagcatgggaacgactgcaggagtacgtggccgcctgtcctcatcatgggatggacgactggctgatcctgcagaacttttacaatgggctcaccccaatgtcccgcgatcacctggacgcgtttgttggaggagccttcttctctaaaacggttcaaggagccgttgaactcatagggaagatggtctccaatgatcttgtttttgcgcaagctaaaaccactgatgtgctaagcaaaaagcttgctgctaatgataagatcttagagaacataaatgtcaagctagatggctttgcttccgcatttcaaaaccagctgagctttaataagatgatatccctgcaaatgaatccgggaggatttcggggcaacccgacgcctccactgaaaatgtcaaggcgatcacgacaaggggaggccttgtgcgaccttggagccaatgttagcgtcatgccaaaagacgtgttcgacaaactcaacttcacggtattggcaccaacaccgatgcgccttcaactggctgattcatcagtccgttacccggtagggatagcagaggatgtgcctgtcaagatacgggatttcttcatcccggttgattttgtggtgctaaacatggacacggggaaggagacgccactcatccttgggcgcccgttccttagcaccacaggagccaacattgacgtgggaacggagagtatccgtttccacatcaacgggaaggaagagaagtttgagttccaaccaaggatggacaatgctccatggtcaggtggtcgaagtggagccacccaagacggacagcctggtgaagtttatgcagaatttcctggagaaggaaacaacgatgcccaggaaccgttattggaggatgccggccaagaagttagagcagccgactcagaagaagccgtcttccgcaccaaaaccaagaaaggcatggaaggaaaagccaaagaggcccgctccatcacctccggagacaggtggaaaatccgtgaactaaatcagaaggaggtacggtcttgcacgtcggactttaaacgacgcgacctttgccaacagaaaggaatttttgggtacgagaaaaataggttttgggaagacatttctggtgctccaatttgcaagaaacctagaacgaatgatatccataatcctacacttaggctcatgcacaaatggattgctatgactttgtttcctagaggtgatctgagacccattaggggagatgaattaattatcatgtttgccatggttagaaagatcaaaattgctcaggatgggcaccaactggggatgcactcggatggtcctaagctccatgccatagcatcggactctcaacttgggcaagcgccagtgaggaccggtggcatgcgcctcatgacatccaatggggggacaatcaacctccccgatcgagtggtgtgcctcaatctccaagtgaatggttctcgagttcctctcgttgggacttgggtgaaatcactaggagaatggacacccttgatccagtacaacctcacgaaacacatagctcaaacgctagaatggggttcaatccttatcaaggaccctgagcgaaagccaagcttgggggggggagacatcgctccccctactgagttgctctgttttatatctctgatatatgggttcttgatacttctcatgctctatgatcaagatcatatacccacatttatgcacatgctaaactcctacactgggagctatacaaaattccattccatttccatattaccaccaaaataa

SEQ ID NO: 29742 - DNA, 405 bp, Oryza sativa
  Clone ID: PAT_MRT4530_34214C.1
atgcggtgccgggggcccacgcgcagcctcacggctcaccgcggaccatccgcacggggggaaaaacggagggagcggctggccgggcgaaagcgagcacaccgggtggttgcacgagacgaggggagacgagccaacggctcggattcgccggagggagtgcgtcggcggcggatcgcggtggcggcaaccggcggggagggaagagggaaacggcgacgaggtcacgaggggccgattcccggcggcgagagcatctacgcggctacgggaatccgatgcaagcgttggattgggcggaaacgcatcgagggaggccggcgacgagaggcgcttccgagctcgggcggcgacggcggcgagcacacggcgagcgacggcagcagtcggggcggcgccggctag

SEQ ID NO: 29743 - DNA, 789 bp, Oryza sativa
  Clone ID: PAT_MRT4530_34215C.1
atggaggtggctgcgacggatccgggcacgccggagacggatccgacccccccgggcgcggatgtggccgatgacggtgctctgcgtccggctgccagtagaggcgggcagcgcgtcggctgcggccggcgagcggaggtggtggcagctcgcggcgacggcggccgacggaggcgcgcggaggtggcttccgctgtgcagcggcggagctcgtgcggaggtggctggccggcgacggcggaggctagcggctgcggaggccagcaccgtggtggaggcgctgcggcggccggcagcacgcgcctagatggtagtgcaaagggagctggcggcagtgggtcgtcttcctcgttgccggtcggcaccctcgcccttcttagagctcctccccttttttgtggggagtttctaggttggattgaggcggcagcttgtcaacgggggaagcccaggttgctgaagcaatgccacccagtccagggttctcctttggccagatttggcgaggagactggcgggtggtggatcggaaggttcgttgaagtcagtcgatggcggggcgttggtgctgtgtggtggcagtcctgtcgttggcaggactggaagctggccggcggaggggcgtcggtcaatgacttcgccttcaggcgtggtaaccctcctgagggcactgttgaggtacccatcctccctcagcaaggagctctgggtgaaaaccttgtccaattccttggacggatgacgacggcgtctttcggcgtcgcaaccctcgtgagggcgtcgttttag

SEQ ID NO: 29744 - DNA, 2388 bp, Oryza sativa
  Clone ID: PAT_MRT4530_34216C.1
atggccagcaagactcttcgcgagtttgctgctccctctgctgacaatgtggccattgggctgcaggtcaacataggagacgtggatttcgacttgaagtccaacctcatcacgatggcgcaggctagcccgttatgtggcaagcctaatgaggatgccaatgctcatctgcaacagttcctggagatctgtagcacgtacaccatcaagggcgtcaatcccaatgccgtcaggctacggctgtttccgttctcccttctcgggagagcgaagcagtggttctatgctaaccgtgctgctgtcaacacctgggacaaatgctctacggcattcctctcgaaattcttcccgatgggcaaaaccaatgccctttgtggaaggatttcaagtttccagcagacaagggatgagtctattcctgaagcatgggagagtctgcaggaaaaaggccacaaggcaccgtcaaggccttggactcacacgtcacgtgtgaagtctgcggcgtcatgggtcattctgggaatgattgcccggaaacccgtgaggaggcgaacgtacatgggcaacaacaacgggtaccggccacaaggaggtcaggggtggaaccaaccacgcccatattatcaaggaggtaacaataacggtaacttctctaatcagccctccttaaaggatctcgtttttgcgcaagccaaaactactgattcactaagcaaaaagtttgctgctaacgacaagatcctagagaacataaatgtcaagttagatggccttgcttctgcctttcaaaatcagctgagctttaacaaaatgatagaaacccagttagctcagttggcatctttagtccctgcaaatgaaactgggaggattctggggcaacccgactccacaattgaaaatgtcaaggcgatcatgacgaggggagtgatccgaaagatccacatcaacgtgccattgttggatgctatgcaagtgccgacatacgcccgttatctcaaggacatactcaacaataagagaccactcccaacaatggaggtggtcaagctgatggaacaatgcagcaacaagctcccggagaagaagaaagatccaggttgtcctacgatcacctgctcgatcggggcacagctattcaaccaggtcttatgtgaccttggagccagcatcagcgttatgtcaaaagacgtcttcgacaagctcaacttcacggtgttggcaccgacaccgatgtgcctccaacaggctgactcgtcaatccgttacccggcggggatagcggaggatgtgctagtcaaaatacgggatttcttcatctcggttgacttcgtggtactagacatggacacagggaaggaaacgccgcttatcctggggcgtccgttccttagcaccgcaggagctaacattgacatgggaacggggagtatctatttccatatcaacgggaaggagaagaagtttgagtttcaaccaaggacggaacaatgctccatgaacttcctagagaaggaaacaacgatgcccaggaaccgttattggaggacgccggtaaaatcacccataccggccaagaagttagagcagccggctcagaagaagctgtcctccgcaccaaaaccaaagaagagatttgctgtggtagatgagcctggttctcgtttgcttactttgcaatttctgtgcactttgaaagaaattgaagatggtatttcttttcgctttttccgtaaggagttcgcactcacatggaaaggcttaagtacacttcttggttttcacgattcctgtaaaatcgatctccagaaaggaatttctaggttcgagaaaaataggttttgggaagatatttctagtgctccaatttgcaagaaacctagaacgaatgatatccataacactacacttaggctcatgcacaaatggattgctatgactttgtttcctagaggtgatctgagacccattaggggagatgaactaactatcatgtttgccatggttagaaaaatcaaaattgctcctgtgaagtgtatgataaagcaatggttaaaaagtataaagttctctgctgctgttgagtgcacttctctgattactcggatagcaaaagggctaggggtcgttagcgaccaaattgcttgtatctcagccgctcgtccgcgtattgatgaggcttatctagtgcaagggcatattctaaaacatggagcagatggatctttgatatactttttccccggttgtacaaatgaaatcccgttgccaaatgcggggtatcatttgtacaacggccatgaactaaccattcccctgcagaccatagaagaatctcgtgcaggtggaacatacagggaaacgcgcaacatgacaaggaacgaatga

SEQ ID NO: 29745 - DNA, 1065 bp, Oryza sativa
  Clone ID: PAT_MRT4530_34217C.1
gaggtggcttccgctgtgcagcggcggagctcgtgcggaggtggctggccggcgacggcggaggctggcggctgcggaggccagcaccgtggtggaggcgctgcggcggccggcagcacgcgtacggtcaggcgtgtgcggggtggctatcaccagcgctgaccaatgcgggtgagctccctcttcgcccgtggtggcctatgcgtggctaggtgaggcaaggaggctggacaaaggtggcgccggagacggagcggcagcgtttccggcgtcggcgcaggcctagatggtagtgcaaagggagctggcggcagtgggtcgtcttcctcgttgccggtcggcaccctcgcccttcttggagctcctccccttctttgtggggagtttctaggttagattgaggcggcaggcgggtggtggatcggaagggtcctgggccagttctcagggatggaggttcgttgaagtcagtcgatggtggggcgtcggtgctgtgtggtggcagtcctgttgttggcaggactggaagctggccagcggaggggcgtcggtcaagtgtggcggaagccatgtgccgccgatgtttagatggtggtttcggattgggcgacggaccacggcggtagggggttctgagcgaaagcttagcccaatttctttgggccaacagtgacttcgccttcaggcgtggtaaccctcctgagggcactgttgaggtacccatcctccctcggcaaggagctctgggtgaaaaccttgtccaattccttggacggatgacgacggcgtctttcggcgtcgcaaccctcgtgaaggcgtcgttttagagtattcgtgtcgtggtggtgttgttggcccggtggcgatcggtctcgcatagcgatggccggttcggtgcttggcttccctctctgtagcgtgtgtttgggcggttggcatatggttcggggcgtgtgctctggtgcacatccttcctcgacagccagctgtcgatgtaaaacttttcttgtaacatttttcttcctatcttaattacattgaatgacctccttcggtcattccagc

SEQ ID NO: 29746 - DNA, 1361 bp, Oryza sativa
  Clone ID: PAT_MRT4530_34218C.1
tcaccgtgcggagggagcacgcggcgcacgcgcgcgggcggggttgggacgcggtgcacgcgcgtggttcgcggaggaacggatgcggcgggcccacgcgcagcctcacggctcaccgcggaccatgcgcacgggaggaaaaacggagggagcggctggccgggtcagctgatccagtcgtggccgaggtggcgccgacgtggcgcctacgtggcagccacgcgggccggcgggaggtagacgacaacgccggccggaacggacggcggacgacagcggcgagcggcggagcgaaccacggcgatacaggcgaaagcgagcacaccgggtggttgcacaggacaaggggagacgagccaacggctcggattcgctggagggagcttgacggcgacgaattgcggcggcggcaagcggcagcggaagaagggggaaaaggcgacgaggtcacgaggggccaattcccggcggcgagagcatctacgcggccgcgggaatccgttgctagcgtcggattgggcggagctacgccgagcgaggccggcgacgagcgggtgctacggagcacgggcggcgacggcggcgagcacacggcgagcgatggcaacggtcgaggcggcgccggcttgctacggggaggctactcgagctaataccgaaaactaagggggagagatggaacgaggaaggagaacggggagatgcactaccgtgcgagacggggcgcagtgacgagaggccgacggcgcgggagtaatctctccggcctcgggccggggaagaggaacgaaacggggggggggggggggaatcgatgggagggcgccttggtttataggggcggcaatgtcggtttgggagaggggaaccgacattggacggtcaagccgacgagctggcgctccggctagcggccaaaacggcgacaggaggtgacgccggcgagagggaaaaagggaaaaaggagggagagagaggggagcgggggcgacgcggcagagggaggggaggggctctgcctccgtcccttggcggcttgcgcgcggagtagcgggggccgggcgatgacgacggcgatgacggcggggcggtttggagcggagcggcgacacgggcggcaggcgcggcagaggctgacggcggcggcgaccaggcggtcggccaccacggcacgcgcgcggagcggaggaggggcgctcggcgcggctcacgcgctcgcgcgcacgcggcgcgcgggcggagcggagcggagcggagggagagagagagagagagagagagagagtgagagagggcgccggggaggggaggggaagatgggccgagagagattcggcccatcgaacccgggggaggcaaaa

SEQ ID NO: 29747 - DNA, 780 bp, Oryza sativa
  Clone ID: PAT_MRT4530_34219C.1
cggcacgaggctggaatgggtaattcttcacacagcttgaatggttatccttctgcacaaaggttgtggcgcactacttgagcacagtttaattatgtgttttttaggaaaatcagcttaagatgtccagcagctggtgttagaaaagagatatccaatactattgctgatattactcctagaacccacgcgattctaatcaagagggttttcaacttgcagttacacgaactttgagcctgctgctttcagcaaggtgagttttgtttgtgcatcttgatatatttgtccttgtctagcatcaatgttggtttatttctatacaaatatgttgtttgataaatgtttgcagtatctgagatggaaaattggaaactacaaacaattgcagcaaagcttaatattattaccatcttatgacatatatcacatttgcaaagctgtttgaatggttttagttaattccatttgtatatggaaaaaagagggctagcacatttataatattattgtaccacaagtcagttctgctttcagagttttactactagtacattatcttcaaggtagaattctattaatcttgtatagtaggtaaatcttttaacttagacacaacaatggtagtttaactagtattataaagtgcgattgagttacaaaagactaaagcgaatgacttcaatggcgtaactggtactgtaaagtataaccacagggatttggggctgccctcatgatccatgaccttggtgaggcatctcaaatcatgggtcacta

SEQ ID NO: 29748 - DNA, 1650 bp, Oryza sativa
  Clone ID: PAT_MRT4530_3421C.1
ctagaagttgtatgactttctcatacaactgacgatcacagcgaatgcctctagcctcgctttgttcatgtgagggatcttgtacttattccctccattagcttccattacttcaatgcagtagctttgtagtgtcacgaatactctattcagagtctttggatcgtagtcattatattccttctgaacattctctattagctcctccatgtttttagacaccctattagcagttaaggactgaagtgatgcaaagaagccaagatctagacaattcatatcgggggaattgggaggttgattcacgaggcgaatatcaagccccatttgagctactgcaacactgaactgctcatcgtcaattggtacatgagttctagcattgtcttgttgaataaatattgttcttcttgcatcttctagaggccaacctgctctaatagctgggagaactttagagatcataaatgatctcatagtgtctctatcaaccttaattgtctttgttacaagtgtccccctctctctattatggcttctcctttgtgcgggttcctttctaacaaaaggccaaatgcctatcttaccatcaaaagtacaattgccttcagcatcatacctaggcctcgcaactgctgatagaaacattactttctcaattgcattcttattttggacaggtctatagtgttcctcctcaaggggatgcaggtagaaagtcctgttctttttggtggcattgaaccatttttcatctatatggacaatgttttccatttcaataaacttggggtcgtttggtaacgtacgatgatctagcataccaacacaccactgcagcctttcttttttgtttgcttccttcaaagaaggctttagtgagttagagtgacgtcgtagatgcccttctttgaacatacctagggcttcagcaagtgaccgtatagtgcttctttggcgcaatggaatagctgatacaaccgacaagtctattacaacctttttgcggccacaattgtaacgcttcctcgagtcaacattaacttgtactccatgtgcgatgcaaagctttgctctcttccaaatacgctggactgtacggatgctgacaatgaacacttgagcaactgcacgtgtggtgtctttttctagttttccatccttactttttgcaagcaacaattcataaattctttgcctttgtgggtttgtcaattctgtagaactgttttcctcatttccatttgcatctggatttggatttggatttggatttgcatcttcttcttcttctgagtccgacaactcctctctatcaaagacaacattgacagtatctatatacacgccatagtcccgaagatcatcctccaaggcttccagctcatgttgcaattcattgtcattgtctggatgcagttgttcttgttcttctgttgcttccaagttgagatcaaaagctcccaagttgagatcaaaagaatgtacaacttgatcatttccatggcaagcaactcgagcaaggtcatctacctggataacatgccttccaggaacttcttcttctagattggcttgtgcttcattgaggtcaggtaaagcccctccatcttcctcttcttctgctaatatgtttagatctatagccat

SEQ ID NO: 29749 - DNA, 432 bp, Oryza sativa
  Clone ID: PAT_MRT4530_34220C.1
atgcggctgagctccctcgtcaccgtggtagcctatgcatggctaggtggggcaagaaggtcggacaaaggtggcgccggagccggagcggcagcatttccggcgtcggccttgtcaacgggggaagcccaggttgctgaagcaatgccacccaatcccgggttctcctttggccagatttggcgaggagactggcgggtggtggatcggaagggtcctgggccagctctcagggatgaaggttcgttgaagtcagttgatggcggggcgtcggtgcggtgtggtggcagtcctgtcgttggcaggactggaagctggccgggggttccgagcgaaagcttagcccaatttctttgggccaacattgacttcgccttcgggcgtggtaaccctcctgagggcactgttgaggtatccctcctccctcggtaa

SEQ ID NO: 29750 - DNA, 336 bp, Oryza sativa
  Clone ID: PAT_MRT4530_34221C.1
atgacattactaacccggatcacccagcccgtggggatcagccacgtcgggagacctccaagctttcatgacaaggcatttcgaaagccgacacaggtttaccatatgccgacgagaggggtcccagaccaacaacagttcgcaagcaccgacccaggtgtcgggttttccaagtctcttgtaaaactccagttttacccaagttgttactcagattttaagtttgaaggcgaccgtcgatactcgcacagagtgcacgaatatcgaggcgcaactgggtggttacaaggggacatgacgggacaacagattaagtgtgatcctatcaatgcataa

SEQ ID NO: 29751 - DNA, 1812 bp, Oryza sativa
  unsure (1)..(1812): unsure at all n locations
  Clone ID: PAT_MRT4530_34222C.1
ttaagaattgggatgatgagttggcatttggagtccaccgttacatgtgccttccttgggcaacttagtgcacatcatgacctccagaaatgtggtactgattatcataacagatattatagctccataaatcactttccatgagatgttggtgtcacttaactcaataccaagaacaatgttaatggctgccaagaaaatacaaatcctacctaaccaatggtggtactggttccaacatttccgcacctgagaatccttattaggatgaaggaaaaatgcaataacctgaagagaaccgagagcaagaactgaaatgccaaggcttctatgcgtagtaaaatttgaataggtcctgttgtacaatgcaatgccagaaacaacacccgcaaacccaatgatgtaaccaagaaattgcacgaggacatgaaggtaataccaaagtgggtccttatgtctgagataacgagcagcaattgctcccagtggtaccagaacaccccagccaaaaattgcaaatgcaccatggttcctcttcaattggtatggataataagtactaacagaatcacctgatgagaagtcaaaagacagagtcgttttgtcatcatgttctgcgaggtggaacttatttggtgatatcttcgaaaaagccaaaattacggactgtcgagcaatgtgaagagggaatttgacttgaaatactaagtaaatattgtctccatagagcacagctgcagaaggaacgtctgttgtgagcaacttgccttcatctactttaactcctgagctagtctgattacttaagtagtattgcttgatgtatgctctcccttgattatcaatccagccaaccatagcacttgacccaaccatctttccgtcatttgagaaaccaatcccaacccatccagatgaatagggtgctgaaagtacaatgctggtgatgttatcttcactcttcaattttgaatacattatctgaagatcaaagtatgaacctcgcccttcttggagctcctccccttctttgtggggagtttctaggttagattgaggcggcagcttgtcaacgggggaagcccaggttgctgaagcaatgccacccagtccagggttctcctttgggcagaattggcgaggagactggcgggtggtggatcggaagggtcctgggccagttctcagggatggaggttcgttgaagtcagtcgatggtggggcgtcggtgctgtgtggtggcagtcctgttgttggcaggactggaagctggccagcggaggggcgtcggtcaagtgtggcggaagccatgtgccgccgatgtttagatggtggtttcggattgggcgacggaccacggcggtagggggttctgagcgaaagcttagcccaatttctttgggccaacagtgacttcgccttcaggcgtggtaaccctcctgagggcactgttgaggtaccccttatccctcgacagggagctctgggtgaaaaccttgtcccgtttttgggacggatgacgacggagtttttggcgtcgcaaccctcgtgagggcgtcattttagagtcttcgcgttgtggtggtgttattggcccggtggcgatcggtctcgcatagcgacggccggttcggtgctcggcttccctctctgtagcgtgtgtttgggcggttggcacacgttcggggtgtgtgctctggtgcacttccttcctcgacagccaactntgtaaccttttcttccaatcttaattacattgaatgacctcctttggtnnttccggcaaaaaaaaaaaaaaaaaaaaaaaaaaaa

SEQ ID NO: 29752 - DNA, 1363 bp, Oryza sativa
  Clone ID: PAT_MRT4530_34223C.1
ctactccctagctctcattaaacaacaagttctcagcctcctccggtcctcctcagatccgatctggctagtcttctcctctccccttcctccccttcccctctcctcccctaccccacctcctcctcctcccataccagagcgagcccaggcggctgagcccgggcggcggcggcggctggcatagagggtgccgcggtggcggctggcggcgggcggcggcgtggctgcgtggagggcgacagggagcgcggcggtggcgggagctgacgtgtcacgccccgaactagtaccgaccggaactagcctgtgacgctccaaattaacaatcaagtcgggctgcggacagatcccgagctcacaatcatcgtagccggcttgctcctggaagaactcctcgtcagcgggattcgcttcatcttcttcagcaaccggatcacccagcccgtggggatcagccacgtcgggagacctccaagtgtgccaggaagcccaggggtcctccccgacaccaccccagtgaatccacatgtctctcggcatcaaggctcccaggctcaagatgttcaaaggtggcttgccttgctcgagatctagagcttgatcctcgaaatcctcgcactgcgggtcttcgggctccgaaactctaagcgtgccattagatagatctcgagatttgaggaattttggaaggcgcggcccgagagaaaaagcgcggctcggccgagctaatgggccggccggcccaaaaggattcggcccagtagggcgcgcgggaggagaggagagagggagccggtggaccgggctcaccgtgcgcggtcccgtgtgggacccgcttgtcagcggctcggctcaccgtgcggagggagcacgcggctcacgcgcgcgggcgggggagggacgcagtgcacgcgcgcggttcgcggaggaacggatgcggcgggcccacgcgcagcctcacggctcaccgcggaccatgcgtacgggggaaaaacggagggagctgctggccgggtcggatgatccggtcgcggccgaggtggcgccgacgtggcgtctacgtggcagccatgcgggccggcgggaggtagacgacgacgccggccggaacggacggcggacgacagcggcgagcggcggagcgaaccacggcgataccggcgaaagcgagcacaccgggatgacgaggaagaaggagagggagcgagccaacggcttggattcgccggagggagcccgtctacggcggatttcggcggcggcaaccggcggagagcaaagggggaaatggcgacgaggccacgagggaccaactcccggcggtgagagcatctacgcggctacgggaatccgttgctag

SEQ ID NO: 29753 - DNA, 846 bp, Oryza sativa
  Clone ID: PAT_MRT4530_34224C.1
aggtactccaagcagcgtgatgacgactgatgaggaattgaggaggaagacgacgacgtacgacgcctcaagctgttacatttttggatggttcgagctgcagcagcgaagcgccccggccgcgcggcgtgtgagcgtggcgcgtggtggtggtggtggtgcgagcagtgcagtgcagggcaagggcgcgcgcggttgggtccgggttttccgcgcggcaactggctgtggctgtgcctgcagcctggcaggctacaggaacgatggtgttaacaaccaaatttggtaatctgagtatcggagatggtgataaagtcgaagcagaattcaagatggagatcgttccgcaaacagagtaagaatggactaaagtccgaatcggctgcgaccaggatcgacagagtccaagttggacaaggttagctgattgagccgaatccgataatatgatatgtttgggcaaaaatctgccgcaaagacttatggtatcttagagtttgttagaaatgcgagtcgtgtccgacatggacgtattttgatcaaatcaactggcacgctcatacatctaaaagcaagctttggacctgcactggagttaagcagatctcccaggcctcgtgtttttacatcaacagatggctggtggtggtaaaaaggaatacgtcagcagtggagacagcaaaaagctagatacatacagcagccggctataagcacaagcttcaatgtatttatactcccaccaaccaaaactagccgttgggggcgaaatcccccaactcagtgctctgccagtctgacgggagtactcattcttgagtactgttctcaggaaagtgtggaggc

SEQ ID NO: 29754 - DNA, 183 bp, Oryza sativa
  Clone ID: PAT_MRT4530_34225C.1
acaaacaagctgattctatcttgatttattaggctggcgcaaacgcgctcacaacaaagttcaaaagaattcacagttcattggactagtaaaaaccatcgaacccgagtgaaacaccgcgaacagttgacagtgaacatgcctgacacgccttgaccttgagaaactgccgttttcaccatt

SEQ ID NO: 29755 - DNA, 1798 bp, Oryza sativa
  Clone ID: PAT_MRT4530_34226C.1
ttggtgcacagcaaactactactgctttacaagtttgctattctacagttttcttatctatgcagttctttaagaatgtcatatatagtgtggaatcagtcgttacaatatctgaagttgttcttcaaaatgcaacaaaccaattagtcagacaatatataccagcacaaaatacaaacatgctgtatgatttgcatgctgatattccattttagagtatgttcaggttgagcaagagagagggctaggcatagagggtctacccgttgcgtgaccctcgcgtcgccctcacgcgggcgactagggggagaaaaccctagccgcccgcgccgccacctcgccggcctctagccgccttgccgccgccggagccagccgccggaaaccgcgcggccggccgggaaggcggcggcggggagaacatcctcggggagcccttcctcggcgttggaggcggagcagcgtcgacggggcggtggtcgacggaggcggcggtcgatggaggtggctgcgacggatccgggcacgccggagacggatccgacccccccgggcgcggatgtggccgatgacggtgctctgcgtccggctgccagtagaggcgggcagcgcgtcggctgcggccggcgagcggaggtggtggcagctcgcggcgacggcggccgacggaggcgcgcggaggtggcttccgctgtgcagcggcggagctcgtgcggaggtggctggccggcgacggcggaggctagcggctgcggaggccagcaccgtggtggaggcgctgcggcggccggcagcacgcgtacggccaggcgtgtgcggggtggctatcaccagcgttgagcaatgcggctgagctccctcgtcgccgtggtggcctatgcgtggctaggtgaggcaaggaggccggacaaaggtggcgccggagccggagcggcagcgtttccggcgtcggcgcaggcctagatggtagtgcaaagggagctggcggcagtgggtcgtcttcctcgttgccggtcggcaccctcgcccttcttagagctcctccccttttttgtggggagtttctaggttggattgaggcggcagcttgtcaacgggggaagcccaggttgctgaagcaatgccacccagtccagggttctcctttggccagatttggcgaggagactggcgggtggtggatcggaaggttcgttgaagtcagtcgatggcggggcgttggtgctgtgtggtggcagtcctgtcgttggcaggactggaagctggccggcggaggggcgtcggtcaagtgtggcggaagccatgtgccgccgatgtttaaatggtggtttcggattgggcgacggaccacggcggtagagggttccgagcgaaagcttagcccaatttctttgggccaacagtgacttcgccttcaggcgtggtaaccctcctgagggcactgttgaggtacccatcctccctcagcaaggagctctgggtgaaaaccttgtccaattccttggacggatgacgacggcgtctttcggcgtcgcaaccctcgtgagggcgtcgttttagagtattcgtgtcgtggtggtgttgttggcccggtggcgatcggtctcgcatagcgatggccggttcggtgcttggcttccctctctgtagcgtgtgtttgggcggttggcatatggttcggggcgtgtgctctagtgcacatctttcctcgacagccagctgtcgatgtaaaacttttcttcctatcttaattacattgaaaaaaaaaagtatgttcaggttaaaaaaaaaaaaaaaa

SEQ ID NO: 29756 - DNA, 1621 bp, Oryza sativa
  Clone ID: PAT_MRT4530_34227C.1
gagaagaaaacggaatacaaaataatagcaggaatggccggcaacgagtactccaccaaggcggcggcggtggaggcgatcgacggcggcgaggaggtcgtggtcctggcggggaagctgctgctgccgagggaggtggtcgacaagatcctggccatcaagaggaggcccttctccttcggcgacgacgacatcggctcggacgacgacgagctcagggagctggccgtgcagcacgaggccttgcaggacaagttcgccgcgtgccaggccatgatccgggagcatcgccacgagaacaagggctacgccattgtcgacgacgagttgcaggaaccccaatattaccttccacttccttcatgacaaacttcctcctcttctcatcgtacacttcgatgtaatcgccgaactcgccgtcctcgatcgtgggaagaatatcagccatctcctccgcgagcatctccgcccacaacgccctccgctcctccctcctatgctgcctctgctcgaagttatcgtagtaggactccggcaggggatcctccgcgccggggacgccggaggggctctggaggaggaaggggatgtacctcgagatgtcgggcgcgtcgtcgccgcacagctccttccgggcgaggatccagtcgacgttttcctgcgacagccgcagcttcgccgtcgccgtcgccggaacctcctcgtgggaaccagttgccgccgcagccatatatacttactttttatcttccatcttctatcttctactattatttgggaactaggccgaaaccctaaaactcatcgtagccggcttgctcctggaagaactcctcatcagcaggatccgcttcatcttcttcagcaactgggggggattatttatacagagcaaggtttgttaacctctgcagagggggtacactttacccacacgacattactaacccggatcacccagcccgtggggatcagccacgtcgggagacctccaagctttcatggcaaggcatttcgaaagccgatacaggtttaccatatgccgacgagaggggtcccagaccaacaacagttttacctaggttgttactcagattttaagtttgaaggcgaccgtcgatactcgcacagagtgcacgaatatcgaggcgcaactgggtggttacaaggggacatggctgagctggcgccgacgtggcgcctacatggccgccacgcgggccggcgggaggtagacgacgatccggccgcgaatggacggcgggcggcggcggcgagcggcggagcgaaccacggtgatacgggcaaaagcgagcacaccgggcggttacacgagacgaggggagacgaaccaacggctcggatttgccgggggttgctcgacggcggcggattgcggcggtggcaaccggcggcgggagaagagggaaacggcgacgaggccacgagaggtcgattcccggcggtgagagcatctacgcggcttcgggaactcgatgctagcgtcggattgggcggaactacgccgagcgaggccggcgacaagcgggtgatacggagctcgggcggcgacggcggcgagcacgcggcgagcgacggcaacggtcggggcggcgccggc

SEQ ID NO: 29757 - DNA, 2241 bp, Oryza sativa
  Clone ID: PAT_MRT4530_34228C.1
atggtctccaatatgggttggagcgaggaacgactccagacctgtctgcgaggcatgcacaccatcaaggagacggaactgcttgctgccaagctggacctcctcatgaaacgattggacaaccacggcaaacggccacaaggcaccgtcaaggccttggactcacacgttatgtgtgagccctccttgaaggatctagtttttccgcaagctaaaaccactgatgcgctaagaaaaaagcttgcggccaatgacaagatcctagagaacataaatgttaagttagatggtttcgcttctgctttccaaaaccagctgagcttcaataaaatgatagaaacccagctagctcagttagcatccttagtccttgcaaatgaaactgggaggattccggggcaacccgactcctccgttgaaaatgttaaggcgatcacgacaaggggagtaatccagaaaatccacatcaacgtgctgctgttggacgctatgcaagtgcgaacatatgcccgttatctcaaggacatactcaacaacaagagaccgctcccaacaacggatgtggtcaagctgacggagcaatgcagcaatgtgatactccacaagctcccggagaagaagaaagatccggggtgtcctatgatcacctgctcgatcagggcacatcagttcgaccaggccttatgcaatcttggagtcagtgtcaacgtcatgccaaaggacgtctttgacaagctcaacttcacggtgttggcaccaacaccgatgtgcctacaactggctgactcgtcagtccgttacctggcagggatagtggaagatgtgccagtcaagatacgggatttcttcatcctggttgagttcgtggtgttggatatggacacgggaaaggagacaccgctaatcctggtgcgtccgttccttagcaccgcgggagccaacattgacgtaggaacgggaagtatctgtttccatatcaatgggaaggaggaaaagtttgagtttcaaccgaggacggaacaatgctccatggtcagaataaagtacaggcctaacccgcagaatattcaagtggtcaaagtggagccacccaagacggacagcctggtgaagttcatgcagaatttcctggagaaggaaacaacgatgcccagaaaccgttattcgaggacgccggtaaaacaaaccacaccggccaggaagctagagcagccggctcagaggaagccgccgtccgcaccaaagccaaggaaggtgtggagggaaaagccaaagacgcccactccatcacctccggagacggccaaaagtggggccggttggacccacaaggggttcggccgaacccactgtatcgggccgaaccggccaggccaacggtcggctgcctccctttttgaggcaatggctagtgggccccacagaatgaggaggcgattgtctcgtttgttcaaggggtccggcccttcatcaagtcctcatgacgagtctagtactcgttcatcagctgatgtctcgatggaagacgtcgaagctccgcgacaactcctgaacgacaccgacctcgaccttgtcggtgatcgggagagacaagcctactacatgctgagtgaccgggattatgctcacacgcgagaatactctccggagctgctgaaaaagatatgtatggatgttgaatttcgtgctatttggaaagctgttgaatggcagagatttgttgtgaccatagaagaatctcgtgcaggtggagcatacaaggagacgcgcaacatggcaaggaacgaacgagaaagttcatcatcctcaacacccgtacagatgtatgaggtaggttgggaaccaactcgggatgcacccggatggacccaagctccacgccacagcatcagagtctcaagctgggcgtgtgccagtgaggaccggtggcgtgcgcctcaagacatacattggggggacgaccaaccttccagatcaagtggtatgcccccatctccaagtgaatggtgctcaagctcctctcgttgggacttgggtgaaatcactaggagaatggacacccttgatatgcagacaggggagatccagtacaacctcgcggaacgcatagctcaaatgcaagaatggcaacaatctgctgatgctcagttcgccaacttcaacaacatgatgcagcaacagcacgataaccttcaagcgtactttcgctttcagggattcaatccttatcaaggaccctga

SEQ ID NO: 29758 - DNA, 228 bp, Oryza sativa
  unsure (1)..(228): unsure at all n locations
  Clone ID: PAT_MRT4530_34229C.1
agctacgtgccgaattcggcaccaggttgaaatctccgaagctgcnatggnantgggtgctgaannactttcatgagctggtccaacgacgcctacnangatgcacntcngaggantgtccaagccatgaaggacangatggcngatctggcacanatcttaagaatgccaccnggccttggtgatggactcnagtgatactgtggtccntgaatgcnnttcaatggg

SEQ ID NO: 29759 - DNA, 540 bp, Oryza sativa
  Clone ID: PAT_MRT4530_3422C.1
ttctctctcctctgaattgttttccagtgtgggagggtcttgtaaagatcacggggcgaggctttccagtgtgttgtgtagtgctttagtgcttgtgtggtggtgtatagctttgcttgtgttgtgttgtgccaaccttgagttgaataaagcttggggctttagagtttgctcttctttttcacatccaaggtgctgcatatattcaggctctgggcttttggactctagtaattgctggttgctacctcaactttcggcatcaagatccaagaaagatcagtagccaaaaaaaaaaaaagtcttgagctgcaatcatttggatttggattgtggagattctcttgtagcttactccttctccccttactgttcttgctctggcatttggatcaaagagtacactgtttctcaagggagaaggacaagctcaggaagcagcatgctctcctcaaggagttgttttggaagaagagattcaggtcatagaggagctcaacaatcataagttcaagtggtgaggaaaaaagcagatgaagc

SEQ ID NO: 29760 - DNA, 240 bp, Oryza sativa
  Clone ID: PAT_MRT4530_34230C.1
atggtcccggggatgcatgctcgcgtcgctcggcgcagccaacctcgtccgcgcaccttcgcgctcctcacggcctgcctcgcattgccgctttattttgttgtgctagccggccaagcccaagcccactccctcctcgcccaccttagcattagcaggagcgagttgtacgagcgcggctcggaggttacgtacgtgcctctcgatagcactatcgagatggagaacctgggcgacgca

SEQ ID NO: 29761 - DNA, 404 bp, Oryza sativa
  Clone ID: PAT_MRT4530_34231C.1
gaaatactatttttccatcaaactatcatcccagtaaattcaacataagccatgacaccagctacactagcacgagtacctcctactccacagctgcggccggtgccactgctggcaatatttcctcgagagtttattctggagcctccgaaaattccctttatggaagtagaaatagtggttattaactgtgtttgcttgcaaatgaaatcacctcattagagtcttgccagggtactgtttagaaattttaatattaatttgatttttatgattttccatccatatctatgaactttttactctgctttatgtaactcaaaaaagagaaaaagtctgaaatggagtaaggtttataatttattcctacttttcatttttaattgaaaaaaaaaaaaaaaaaa

SEQ ID NO: 29762 - DNA, 153 bp, Oryza sativa
  Clone ID: PAT_MRT4530_34232C.1
atggcggtgactgccaaacctgcgccgttccggccagatctggcggggtggctggctacggggaaggcggtggggacgggtgatggtggcggtcgaggtaccctcgatgtgcatatgacatttggtggctcctgccatggatgctatggttga

SEQ ID NO: 29763 - DNA, 507 bp, Oryza sativa
  Clone ID: PAT_MRT4530_34233C.1
atgcagattagatccctcggcggtttttatggcgaggaccacgtgaggtccaccgtgccgaggctcgggaaggccgatggcgtgcaggaggcggacctcgccgtcgacgccgccgcctgctccgtgcactgccacacctacgtcgccaaggacacatccaaaaatcgattggatcaagcaggtgctgcggatgtgcggcttccaatgaaacctcgtctacacgcgcgcgtgcatgtgcctcaacatcatccctctctcccggccgtgcgcgatcaggtggcggtgctcgtcggcgagaagggcgatatcgacagggagcgcctcctcccggggctgcacaggacggtgatcctgccggggatggtcgccgccggcagcgaagagctcctctgcgacgaggacgggtttaccacggaggacgtcgtggccatagagtcccccaacatcgtcaccctcgctgacggccaggacatcgccgccgccgccgacctcctcaaggccatctga

SEQ ID NO: 29764 - DNA, 368 bp, Oryza sativa
  Clone ID: PAT_MRT4530_34234C.1
atgataaaaaaatattgcaagccagtaaattcaatatcaggcaaagggaaagaaacaaaaagaaccagaaacaggaacgacaagaacgtctagaaaacctctacaaagaagaccttgatataaattcgtaatatatcaaatagagagctttgatcttttttattgaaagagccaacaagccgctaccggagatacctgtgagataacactacacctacacccagaaaagctcttccttgattaatcacctttcaaccaccatgcatcttaccaaacaaaatgcaacgacataaccctccttactaagataggcggttggagaaaaagaagaccaagcaaacttacaatatatccaaacacacaacaat

SEQ ID NO: 29765 - DNA, 132 bp, Oryza sativa
  Clone ID: PAT_MRT4530_34235C.1
atggccgtgccgctgtgcgtgtaccggtttttgggatacttctacaaacagggcacaaaaatgactggactggggggaagtaagtacaacccgtacgagccattcgtgagatggaacaaacagaaatactga

SEQ ID NO: 29766 - DNA, 4040 bp, Oryza sativa
  Clone ID: PAT_MRT4530_34236C.1
atgtgggccccatatgtcatcctctttctcccctctcatctctatcctctctctgtctctccggtgggagaggaccacgtgaggtccgccgtgccgaggctcgggaaggccgatggcgcacaggaggcggacctcgccgtcgacgccgccgcctgctccgtgcactgccacgcctacgtcgccaaggactcttccacgtacctgtcgatacagtggggcatcgacctatccaaggtggcggtgctcgtcggcgagaagggcgataccgacagggagcgcctcctcccggggctgcacaggacggtgatcctgccggggatggtcgccgccggcagcgaagagctcctctgcgacgaggacgggtttaccacggaggacgtcgtggccatagagtcccccaacatcgtcaccctcgctgacggccaggacatcgccgccgccgccgacctcctcaaggccatctgagcgagctggatgctctgctctgctctgctcagcttcacttcacttttgcaaattaagcttgcttccatagaatattggaatggaagtataattaatcgagtcggctcaacggcggcacgcggctgcagcggcaaccggcgaggggaagaggaaggggcctcccgcagcgcctccttcttcgcaaggagggcgacgatggcggcctccatctcccccgtcgtcatctccataggcaggccgtgcagccccggcgtgccgcccggagatcctcggtgtcgaggtggctgcggcggagacggtctcccgctcctgctgccgcccgccacggcctcccacggcggagacgaccgttgagaggcaagaggggagctaggaggcgaagcggcggcgagggatgtggcggtggcaggagcggcggcggagtcggtggtggtgttgcttggcccagcccggccgtgccaggcagcccatttggccattatagagagaacagtatctggcccaattatgttcttcaggatcaggatcaggctcagggctactaaagtcagaagcagatgaaccaagccaacaacaaccagtgcagtaattgaagcagacactgcaccaaatggcgcggtttcttgccaaattccaactcccgcctctggttcaaaacttcgccttaattgtgtttgcagtaaaagtataacaaggagaaaaattataaggcgtacctgaaaaggtagttccataggatgcttgctttcagtcatcactgaatcaacccaatgactatcatatgcattgtcaaggacaacaattgggcaagacatatcccatccaccacaatcgcaacctccaccagtcttcaggcggtcaagtagaggtgatgggctgctttcatcatccctcggtaaaccatgtgccccgcctgctgcagccactttaatggtaccggatgatgagccgtctttcaattctttggattgggttttgtggaacggcacttggattacaatagcagcaacctccaaatgaggatggagatcttctcgggaccaaagactagatgttgatgcatccgagttattccttgtattattttgccgctccatcagattattcctctctagagaacccctagatatcgaattatttacagcactgcagaattttggtttgctggaatctgtacattgaattctttcaacagcagaacttcgtctcgcatgagcaatatcgtacaagacaaactcactgatggctgagttattcagaacaccattttgtccaacttcagagtacaaataggaagacacatgcatttggcctacaattggaggcaaacatccccgtctatcctttggggtctttccaacagtacttgttcgcttccctgtgctatggaaagtgtaaatccaattcaattcgtttccggctttccaaatgttagcataaatggattcttctgggcccttggtacagaactcaaaaccaaaagaatcattagtgggatccagtttaagaaccgcatgaagatgagttggtgatgaagtaaccgtcaaaacttgagcttccttactttgctggcaattaggtgtgaggctttgttcagtccttgagataccgctcaacaaagatttccgcaatacacggccttttccttcaaccagcaggctactatgtttggcatcttccttttccataagagacggattcctaagagacttggacttcatgataggatccagaattttcttgaatggactagatcgagcttttgtggtgctgttagcaccatgagtactctctggtggacatgtagcatcaaaaacaccaacctttgttgacaaggacttgggcagtttatttactaggtcaccttcaccatgcttactcccatcagaataaacatcaaccgaatgttggcaattcgatcttgcatctttgctacaggttccttctatctgtctcgtgtggacacttttgctggtgtcttcatcaagagatatctccaggaaatcatctcctgcacaatctttcagcagattgcagtccttgcgtggcctcccaagtcttgaatgttcatcaggaagctcacgcaatgaaagactaaggaactccctggtagcctgttgaactttactacttgcatctatggaagaactcggtttgcacgaacggctctgttgccgcgataagtaaggtccacttgtgctaggctgagaggatgagtccacaatctcaaaggacataaatgaatctctactgagtgcagaatctattttcctccttccttcttggagtttcctcagtctgctaacatcactagaactctggtacatagagccgcgcttgtgcatgatgctatcatcttggtatgcctcacgtcggcttgaaggcaaacttttgcaatggaaatttggaatctgctcgaggtgcagttctggttttccatctgggcatttcaacatgtggtgtctgcccggttgcacttccctgctaggactgtctgcctcctcattgatagattgcattgcttccttagctactcgttgtcgagaacgatttcccatagataaaaccaagagaaattggggtaacaaactggatgctgggatgcaaaacgagatagacaatagaagaaatgttgaaatgatgccctcatcagtaaaggaaaaggtgggcgcagtggcgtcatccctaatcttagaaccataaaaggcaactactataaactccatattagtagccacctcaagaacacagccagccaagaacaacatctcccatgaactgaaaaacctttctccctcttgagcgagtggagtgaggatgcaagaggcattgggggcagtcgccagcacactcttcttggtttcgcctctcctcttcctgagctgagcttgctgctggcggcttggagtgatggaccagtgcggcgttgagaaaattttcagctcaagacacgagaagaaataatcgccatcctggtggttgcttgcaacctggacgatctgaaattctgaatgctgttcgtctacctcgagccggaagaaatcataacgccgctccacccacgtgggctccactcgccagtcgccactggtttctcttcttctgccccctatcatcatccacctccagaatctcctctccacctttgcctctctctccctttcagcttttgatgattcgatcacctgcagaaacctcaaccctgtagcctgtaactctctgcaataaccaaacaagcgcttggttcccttgctgacgagcaaaaaactggccccctccttcccgctaaggaacctccgcgagctcgccttcatcaaccccaaggtatcgaccgccggcgagaccgcgagttccttaaggccatcctcggcaagctctagggcaaccccgacgtcttccaccgccgccgccttcttcgccccaccgtcaccactgcgccgcagctcggggggattcggcgtgcaccagggtgcatcgttgaacgaggaggcccctaccgctctctcgatggacgcctctccctgccagccgccaccacctcggggggattttgcttccaccttcgcctccgccat

SEQ ID NO: 29767 - DNA, 1966 bp, Oryza sativa
  Clone ID: PAT_MRT4530_34237C.1
gaaatgcttctcttcctcctcttcctcctcgccgccggcgaggccgcggcggcggcggcggccaccacgctcaccgcgacgccggcgaagctcacccagtccgaccgcgagatcacgatccggtggtcgggcctcccggacccggacggcctcgactacgtcggcatctactcgccgccgacctcctccgaccgcgacttcctcggctacctcttcctcaacggctcggccacctggcgcacgggcaccggcgagctcaccctcccgcgcctccccaacctgcgcgcgccctaccagttccgcctcttccgctggcccgcgagggagtactcctaccaccacatcgaccacgacgggaacccgctcccccacggccgccaccgcgtcgccgcctccggtgaggtcgccttcgactccccctcccgccccgaccaggtgcacctctcgttcgccgacggggtcgacgagatgcgggtcatgttcgtctgcggcgacggcgggaggagggtggtgaggtacgggccggcgaaggaggagggggagggctggaaggaggtggccgcggaggtgaggacgtacgagcagaagcacatgtgcgactcgccggcgaactcctccgtcgggtggagggatccagggttcgtcttcgatggactcatgaagggattggagcccgggaggaggtacttctacaaggttggtagcaactcttcaggatggagcgatacgtacagcttcatttcacgtgacaacgaagccaatgaaactattgcatttctctttggtgacatgggcacttatataccatataacacctatgtccgcacgcaagatgaaagcttgtcgactgtaaagtggatacttcgtgatattcaagcccttggagataagcctgcatttatttcacacattggggacatcagctatgctagaggttatgcttgggtatgggatcacttcttcaaccagattgagcctattgctgccaataccccataccatgtctgcataggaaatcatgaatatgattggccattgcaaccttggaaaccttggtgggcaactggtatatatggaacagatggtggaggtgaatgtggcataccttacagcgtaaagttcagaatgcctggcaattcttttgtgcctactggcaatggagctcccgacacccgaaatctttactactccttcgattcaggggttgtgcattttgtttacatgtcaactgagactaattttgttcagggcagtgaccaatacaacttcataaaagctgacctagagaaggtcaaccgaagtagaactcctttcattgtgtttcagggccaccggccaatgtatacatcaagcaatgaagctagggattttgctcatagacagcagatgctccagaacctggaaccactcttggtaacatacaaagtgacccttgcactctggggacatgtccacaggtacgagaggttctgccccatgaaaaacttccaatgtgtcaacatgtcatcaagcttcgtataccctggtgcccctgttcatcttgtgatcgggatgggtggtcaagattatcaaccattctggcagccaaggaaggatcaccctgatgtacctgtctatccgcagcctgagaggtctatgtaccgtggtggggagtttggatacacaaaacttgtagctacaaaggagaagttgacactaacgtacatcggcaaccatgatgggcaagtccatgatatggtggagatattctctgggcaagtatctaataacaatggtgttcctgaggtgatcgatgatacaaagctcagcacaggggtcagcaccaaactgaaaatccctctgttctccttggaaattgtaggcagcgtgatgtttgcactggttctgggtttctctcttggatttctgatcagaaggaagaaagaagctgcacagtggaccccagtgaagaacgaggagacctaaa

SEQ ID NO: 29768 - DNA, 463 bp, Oryza sativa
  Clone ID: PAT_MRT4530_34238C.1
tcttctgcgaagatgacttttggagtctattagatatccaaccccgaagtcaagatttgattaagttgccatgtttctcttgcttagtctagttttgcaggttgaaagcttctatggtagcaacggctactggctgttcttttttactgcaaggacaaagatggaagcgtttcttaatttgaacttccagaatgccagcaaaattcatgtttggtcaaatgcccactgtctttaacttcggctttccaattattggtgaacgtgaggcatgtatatgtaatgtttgatacaaactcttaagactccagtgtctctagtttgcactctgtagttgtgtgcttcctttccagctgagatgttgcattttgactgcacaagttacagattgcaagttgcaactgtcactggttcgaacattgtaaagaatctgatggatctagtcatatctgatgcatatgccagt

SEQ ID NO: 29769 - DNA, 422 bp, Oryza sativa
  Clone ID: PAT_MRT4530_34239C.1
aacggggaaaacccttttaaagggggaaaaaaaaaaccccgggcccccgccaaaaaaaatttcttcacttttttgggggggggggtacaaccccccacgacggtttacaagaggtttttttacgggcctccgctccactacgggaaaagctggccttttttaagggcaaatgaatttggatcacaactcaacaaactccaccttgaaacaaatttttttttggagcatgaaaaaatccttccccctgaacccaacaaagacaaaaaaaccctttcggccccaaatagccttttgggataaacccctttcccaattaagcttgagcaaagctcaaacttaacaacaggaacaggctttgtcattatttcagcgggattttcatgaggccttattttgcatacctttagcttaccttacacaaa

SEQ ID NO: 29770 - DNA, 1257 bp, Oryza sativa
  Clone ID: PAT_MRT4530_3423C.1
tcccgggcttgcaggattcggcacgaggtgctattctcacacaaattctgccgttcctccacgcctactcgcccaccccgtcgcctataaaaaccccctaaaacccctgacctatcaccaccaacacccccgctccatcacagtctgctcattagctcgagacctggtcagctcgccgccatggcttctgccaagctgcttctcctggtcgccacctcgctcctgagctgcggcgtcatcctcgccgactacgcgccgatgacgctgaccatcgtgaacaactgcccatacccggtgtggccaggaatccaggccaactccggccacgacgtcctcgagggcggcggcttcttcctcccggcgctctcccaccgctccttcgccgcgccggcccacccttggtccggccgcatctgggcgcgcacgggctgcactggcgccggcgcgcagctccactgcgccacgggcgactgcggcgggcggctccagtgcgcgggcctcggcggcgcggcgcccgcgacgctggcgcaggtctccctccaccacggcaacgaccagacctcctacggcgtgagcgtggtggacggcttcaacgtcgggctgtcggtgaccccgcacgagggccggggcaactgccccgtgctggcgtgccgcaagaacctgaccgagacctgccccagcgagctgcagctgcgcacgccggcggggagcgtcgtggcgtgcaagagcggctgcgaggccttccgcaccgacgagctctgctgccgcaacatgtacaacagcccgcgcacctgccgctcgtccaagtactcggagttcttcaagcgcgagtgcccgcaggccttcacctacgcgcacgacagcccgtcgctcacccacgagtgcgccgcgccgcgcgagctcaaggtcatcttctgccactagaatccagcgcgccaaggcgtactcggtaggatcccttccggggtgtctgtgactgtgttctaatgttcgattagctcgcgggtttagatgctggagtcgttacttacgttcgattagcccgtaatcggtgtgctgctgcttgtgttggctgcagggatgtctgtgactgtaatggtgttactgccaggtttccagcctgaaataacatgttcctagtgtgttcagatgtttaaaaaaaaaaaaaaaaaaaaaaaaaaaaaaaaaaaaaaaaaataaacgaaaacccatatattgcgcctccccccgtgccgaattcggcacgaggcctcgtgc

SEQ ID NO: 29771 - DNA, 1241 bp, Oryza sativa
  Clone ID: PAT_MRT4530_34240C.1
ccggccgggaaggcagccagccgcccggcctcccgccgcctctgctgtctcagtcccgagtcgcgagtcgcaacgccaccacgaggagccgaggaggaggaggaggaggaagaagaggtgttgtccgggcgtgaggaggatcggaggaagggaagctatggggatcgtggaggaggcgcacaacctgcgggtggtgggggaggggaagcgcggggtgatcgtgctggcgcacgggttcgggacggaccagtcggtgtggaagcacctggtgccgcacctggtggccgactaccgcgtggtgctcttcgacaccatgggggcggggccgaccaacccggactacttcgacttctcccgctacgccaccctcgagggctacgcgctcgacctcctcgccatcctccaggagctccgcgtcgcctcctgcatctacgtcggccactccgtctccgccgtcatcggcgccatcgcctccatctcccgccccgacctcttctccaagctcgtcctcctctccgcctcgcctcggtacctcaatgatgtcgactactatggaggatttgagcaggaggatcttgatgagctctttgaagccatggggtcaaactacaaggcctggtgttcaggctttgcgccactgtgcgtaggaggggacatggaatcagtggcagttcaggagtttagccgcacactcttcaacatacgtccagacatagccctgagtgtcgcccagacaatcttccagagtgatgtgcgaagcctcctaccacttgtcaccgtaccatgccacattgttcagagcaccaaagatcttgctgtgccggttgtggtgtctgagtacctgcacaagcacctcggtggcgactcaatcgtcgaggtaatgccgtctgagggccatctaccccaacttagctcaccggacatagtcatccctgtcttgcttcgacacatccagcatgacattgcggtctaggtggtgcaaccattccgcctagagctgttcatcagaagttgtataatttcagtatctgtactccactgaatcacccgacttaggatccatctactgttgttgtaataagattctccatatgttgtaaattgatggcggtggagaagtagtctatggtgtttgtaaaccactgcacgtatgatgttcattataatgttggatgttttaacgtaaccgagtccttcagaattaaaaaaaaaaaaaaaaaacccgcggtaccacgagctgc

SEQ ID NO: 29772 - DNA, 1901 bp, Oryza sativa
  Clone ID: PAT_MRT4530_34241C.1
ccccccccgggttttttaatccaacagtagtatcatgtcattcccacagtaaaaaatgcgccaacctcagcaatagccctatggaagaagaaccaaccaaggcacaagctgaacgttaatcctgtcaatttttttacaaccttactaatgacccccatgttcttatttctgtgagattacactgtcactctacttttaacctccctccagacaaccaaaactgcctcaaattcttcctgtaattcgatttctcctctattatatacatgaacacacacactgatcatcagaattagactgtatataaaaatgcctctagtttcacctacactgctgcctcctgaaatttctcgcattcatcatcttgttgagcatggccctgagcctcctggaccctgcaccggcctttatcatgcccttcctcccggcctcctgcgggttggagcacagcctgacgcccccctcggagcaccacccgccgtaggcgaaagcccggcccggggcggcgccgtcgcggcggaggatgtcccggtcgatcctgtccaggacggggtcgtcctccctgaacttcctggcgaagggcgcggcgctgagcagcatccggcggtagtccctggggccgaggtagagcgggtgctgcttgggcgggctgtcccaccggatgaagtgcaggtcgtggttcaccgtggtgttcctgaaccgccgggagttgcaggccagcgtctggaagtagaactccggcgaggagacgaagttggtgtagtagagcagcagcgtccgcggcaggttgtcgtcgtagccgacggtgaagtactcggcgaactgccgcgacatcatcgtccacgctgaacctgctccattgactagatacggtttcagataagattttctttttgtatgccagattccaaggtgagtactgcccgtgcctgtgaagagcttgaaggcggtggggagatttcgccggttggtggtgaggttcgccggacggatgagctccgaccggtcggcctcgtacagcgccgtgtcgaggatcaccggccgcgccctcttctttatcttccagccaaggtggctggtatgctgtatgaagttgagatccctaggcaacctggagaacacatccatcaaatcgtcctgggtgacgagcgggtagtcggaggcgctgaggttgacgaaccagtcccaccggcggccgagccggagcagcatcgccaccgcgtgcagcgtcgtggacagcatcgtcgggccgcggtaggtgacgaggttggggcgccccacgatccacacgttcccggcgcgcgcgtacacgggctgcccggacaccagctccgccagccgccggtgctcctccgccggcgcctcccggtccaggtggagcaggtagcagttggccgggtggtacagcgccgccagcagccgcgccgcccgcgccgcgtcgcccgtcgacgccgagatgaggtacgcgaacgacaccgggtagtaacccgcgccgccgccgctcccggtggtggagtcgtccctcgccgccgccaagaacggccagctcttgtacgccgggccggtgaggaggagcgacgggagggagaggatggagaggacgaggagcgcggtgaagacgccggagaccaccacctccctgcggcccaccggagacctcatctcaccctcaccacctcgcacgcacgcatccaccacctatgtatatatcgatagccgatctagctccgccactctcgccaagtggacgatgccacgccggtgcagctggtgggctcttccggcgaatggcggcgggcaggatggtcgccggagctggtggggagagagagagagagagagagagagagagaggcagcctgcgcgcccgtctcgtgccgaattcggcacgagctcggccg

SEQ ID NO: 29773 - DNA, 500 bp, Oryza sativa
  Clone ID: PAT_MRT4530_34242C.1
gagctcgcgtcgcctcrtgcatctacgtcggccactccgtctccgccgtcatcggcgccatcgcctccatctcccgccccgacctcttctccaagctcgtcctcctctccgcctcgcctcgggtgagaataggggatcttgcttcaaaggggtacctcaatgatgtcgactactatggaggatttgagcaggaggatcttgatgagctctttgaagccatggggtcaaactacaaggcctggtgttcaggctttgcgccactgtgcgtaggaggggacatggaatcagtggcagttcaggagtttagccgcacactcttcaacatacgtccagacatagccctgagtgtcgcccagacaatcttccagagtgatgtgcgaagcctcctaccacttgtcaccgtaccatgccacattgttcagagcaccaaagatcttgctgtgccggttgtggtgtctgagtacctgcacaagcacctcggtggcgactcaatcgtcgag

SEQ ID NO: 29774 - DNA, 1274 bp, Oryza sativa
  unsure (1)..(1274): unsure at all n locations
  Clone ID: PAT_MRT4530_34243C.1
ngagcgngnancngcgtgtcncgacgggcccctctgaatccatccttaaagactaaaccctccataagcctcctctctctctttcttccaggagacaggtgacaagggggatagatacacaacgatactccgcagcgcaggaggaggacacatccttgatttctgccatcggaggagctcctgcctcggagatacacgaagctgctacatcttcttccagctcaatcgtatcgacgcttgcatctcttttgctcagagtgatcgtcgtttttcacagcttgcaggaaaaaaagggcaagaaagactgagagcagcagaagaggaagatgatgatgaccgaggtcgccaatcacagcaaaaggaaccacaatgaaagctacttcaccgggaaagcagcagtcaccagcagctcggaggagtttgggagcatgacatccaagaagccgaggaacacaagcccgagagacgctcccgtctccccgaaggagaagaaggataagattggtgagagagtggctgcactgcagcagctagtgtcaccatttgggaagacggacactgcttctgttcttcaggaggcctcagggtacatcaagtttcttcaccagcagctcgaggttcttagctccccttacatgcgtgctcctccggtgcctggcgctgcgcctgaggatcccgaccactacagcctgaggaaccgtggcctctgcctggttccagtggaccagacgctgcagctgacgcagagcaacggcgccgacctgtgggcgccggcgaacacgaccaggcgcaggtgaacggaggaaccggcctggaggctcgggggtctaagaggcctagaggaggaggggagcacttttgtctgggggcggtgtagagttccaacttccaagtgtctgacccgattcatcaaatctcctaacaaagcaaaaactaataagcaaaccgtgtttcactctcgtcggatctcttgcctgtaatatagtagtagctgcaaccctgcctgcaggtcggtgtgagaccgtgagagtgtgctactgatgagtctgtgttagcgccggacatatgtgtgtaatcatcatacatagcgaggtgatagtactagactacctgatgtgcccatatgtgatatgtaactatgtgtctcttcagtaacatgatagtagcagcatgttgctgctagcaaccaagttcaaaaaaaaaaaaaaaatcagccctgctgtagtttttgtaagaagtgctcagtttctgctagaagcaaaaaaaaaaaaaaa

SEQ ID NO: 29775 - DNA, 270 bp, Oryza sativa
  Clone ID: PAT_MRT4530_34244C.1
ggccgccccttttttttttttttttttgcgttaaaacatccaacattataatgaacatcatacgtgcagtggtttacaaacaccatagactacttctccaccgccatcaatttacaacatatggagaatcttattacaacaacagtagatggatcctaagtcgggtgattcagtggagtacagatgctgaaattatacaacttctgatgaacagctctaggcggaatggggtgcccacctagtccgcgttggcatgccgggtgtggcctg

SEQ ID NO: 29776 - DNA, 2228 bp, Oryza sativa
  Clone ID: PAT_MRT4530_34245C.1
ccaggggggtgccccctaacctttccctgctttccactgaaatctcctatccgcaaccatacagttgctcaattctggtctcagcctaagccccaatcattcatcgttatataggtcactataccctcccttgcatttcccaccaccaccccttgaagccatgaatcgctgaagaagtcgtctgcgctactgctaccaccggggaaggattagctgcgcagaattgtgcgagcgaagcctgccagccgtgcgaatttcaagctccgaggtcctgcattgcactgaaatggggaggcattcttgctgctacaagcagaaattgaggaaggggctctggtcccctgaggaggatgagaagctcatgaatcacataaccaagcatggccatggctgctggagttctgttcctaaacttgcagggctccaaagatgcggcaagagctgcaggctgaggtggataaactatctgaggcctgacctccagagaggtgcattctctccatggggagaaattcctactgctacaatcagaggctgacgtaggggctgtggtcacctgaggaggatgaggatctcatgaacgacataacacagcatgaccattgcttctggtgcaccgttccagaacttgctcggctagagagatgttgcaaaagctgcaggctgagatggataaactacttgaggcctgacctaaagagaggtgcattctctcaggaggaagaggacctcatcgttgagctccatgctgttctgggaaacaggtggtctcaaattgcaacacggctgcctggaagaactgacaatgagatcaagaatctctggaattcatgcatcaagaagaagctgcggcagaaaggcattgacccaaacacccacaagccccttgccgaggttgatcgaagcaaagcaactcccaccatcagcaatgacaggacctctgaatccagcgatgttgacccatctagtggcgttgctcttcacaacttgagccatcttctgagcgagacggcgcaatcatcagagctgctgccagtgaaggtaactaaacctcgcacacaagctccgggcttggcacgtctgaaggtgccaccgaaggaactatttctagaccagcttacttctggccatgagaacctccctagctgccgttcatctggcccaattcccaatttcccgttccagcagctgttgtgctacaataatgattttaacagcatggacgttggaaacaggaattcactctggtataaccagaatgagtccagtagcagcacaatttccactgtgatgcccccagtttcaccatcaactctctcgacatcaacaggccttaatccatcaccagacaatgcaaactctcgaggcactggcatccacaattcccaattctattgggacaccaacaatcctagcagcagtagcagtacagggagtagtggtaacaacgggttgggattcgagctgcaaagcacaagctcccttttggagaccaacatattcccatggtcagatttagcaccagaaaaggatagccaagcacaactagaggaagaactcaagtggcctgacttgctccatggaacgttctcagagatgccagcgcccatgcagaaccttagccagtcactgtatgaagacgttgtcaaagcagagagccaattcaacatggaggggctctgtgcagcttggtctcaaaacctgctgccacagcaacatcttccagtagtatcagatatgtatgacaaggatttgcaaaggatgtccttgtcttttgagaatatctaggaaccatgttccagcatgcagggaacagagcaccacatgaaaattgagagttgaaagcttaggaagcacaatgtttcttcagagatacgtttacagtgtactcagttgtttgtggataaattattgtgagtgttcacatagatgcattcttttggtaagacatgaatgaacatcaaagagcaattcttcagttgaaagaaaatgtagtgcagtgggaaaaaagagacgagttgggtttaagttgcagaaaaatgtatagaaatgttccggagtttaccttgtttcctttgaaaaaattattgtcttcatttatacaagcaagtagatcgacttttttgtattcttgagtttccgcatgctcctttcttatcaataaatactaagaggcatgggaaaaccacatgtgtcggcagtacttagaaaccataaacctcgtgccg

SEQ ID NO: 29777 - DNA, 957 bp, Oryza sativa
  Clone ID: PAT_MRT4530_34246C.1
atggttgttgttgttgttggggctctgctgtttcatctcgtagtgacagcattggccgcgccggtagccttgcctggctgccccgagacctgcggcaacgtcaccgtcccttaccctttcggcattggccacggctgcttccgcgatggcttcgagctcgcctgcgacgagacgcaccctgctgcaccaccgaagctgcgtttcgcaagaaacggcgtggaagtgatcgacatctccctgccgtccggcacggtgagagtcgccaccaggatgctgggcacggactcctcgtcgtcgctgccgcggcagctcaacggctcgtggccggccggcctgccggcaaatggctccctggcggtgtcgaccaggcacaaccggttcgtcgccatgggctgcaacctcctcgccaacctcgtcgccaacgacgacgacgactacatcagcgtctgcgccgcgctgtgcgtggtccgatccgcgctgccgagggacgccgccgccgcctcaagctgctccggcttcggctgctgccagacgccggtggcgaggggcctcccgtcctacggcgtccacctcaacgacctgacccagaggtcggtcaccgtggggtcgtacggggcggcgttcatcgccgacggcgagtggttcgccggcgagcaacgctccctgcagctcggcttcgtcgctgacccgcggaagctggccgactcgacggcggtcccgacggtgctggagtggtcgctggacatggaccgcgatcaggacatgttctggtacgacaccagggtctctcaatggacgcgatgtgtcagcgtgcacagcgccatcgacgacgctgttgacgggaacctttacggccgagcacggtgcaattgctccaaaggatacgagggaaacccttacctagccaatggatgccaagattgtggtccatgtgtggatgggccagattgtgaataa

SEQ ID NO: 29778 - DNA, 393 bp, Oryza sativa
  Clone ID: PAT_MRT4530_34247C.1
atggaggagttccaagaagccgacgtcctctggccggaccaccaccagcacctccgccgcgacgacgacgcccgccgccgccgccaccaggagcagcagcatggtggcgtggacgacgccgacgactcgcgtggcggcactggcacgccgtcggcgcccgtgggcatcccggtgacaagggcgccgacgacgcggaggatcagccacgggagcacggcgccggcggcggcgttcgtgccgccgcacgagctggtggcggcgagggcgcggcggtgctcggaggagagggcggcgttctcggtgtgcgtggggaacgggcgcacgctcaagggccgcgacctccgcgacgtccgcaccgccgtgctccgcatgaccggcttcctcgagacctga

SEQ ID NO: 29779 - DNA, 277 bp, Oryza sativa
  Clone ID: PAT_MRT4530_34248C.1
agaatcttgagaactttctaaccttggaagctgttagggggttgtaatcgacagttacaccctagtggtgcgagcatgaattcagtatgtgtttccttagttcaaggcaaccagtataagttccaggaatcatttcaaggtttctcagaagttgaaaaaaaaaaaaagaaattgttccatacatgggtcagaagtatatagagtcaagtccagaaatgtgtagtcaagtagggtatatggcagagtatccccttttaacggatcatcttcaccaaaa

SEQ ID NO: 29780 - DNA, 405 bp, Oryza sativa
  unsure (1)..(405): unsure at all n locations
  Clone ID: PAT_MRT4530_34249C.1
cccttgttgctttccctatgcttttcttttcttttttttttttttcttgctttcttttttttccgtctttttctttttttttttgcccaaaaacgcaactttttttaggggccccaaaaccccagccccgcaccccagaatgccctttgccggcccaggccttagggggggcccctatgccgccttaaccccccaatncccgaattgctgtgacacctttaacaacccgggcccccccacttcccccaatccctcaccgggccccccactggccacccccaagctttatccggggcccatgggccccaaacccggccccaaaacaacccccctaaacagggggcctcccccgggaaccccccccccgggaaaaccgcctttccattaggggaggccacccggccc

SEQ ID NO: 29781 - DNA, 301 bp, Oryza sativa
  unsure (1)..(301): unsure at all n locations
  Clone ID: PAT_MRT4530_3424C.1
tgggaaaacaactaaaaaaaatctcgcagatcagcagctgtaggttaagnaagagcagactacctacctggtgaggaggagaggttgaagaagagagtcgcctctaaaatntaagttaaatttcgatccgtttcatgnaggagaaatcaacggatcgactcgttctattgttactctttcttgttcngtacgctcaattttcgctttcnaatttttttcggtcggnacggattttgggttggaaagacaaggtcgggatctcttttaaaaaaaaaaaaaaaaaaaaaaaaaaaaaaaaaaa

SEQ ID NO: 29782 - DNA, 510 bp, Oryza sativa
  Clone ID: PAT_MRT4530_34250C.1
ttagggcaaatccactaacccatcttgctgcggctgctgctgaagatgattcatgattctggacttgtggttgcaggacaaatcaattggacactggcgtttcagctgcgtcatgtcgttcccctggaggcctattctgtccggtaagtgcgtgccatttaacatgtccttccttgctttcttgctagatgttgcgtcgttgtgcctgacgaactgacggattttactgtcgtccaggcatgtcgagcactggaacgtccccaagatggcactctgcagcatccccgccaggtttcccaaaccgtcagggccgggattaccacgtcccgtgggttttttattactgtaccccgtggtaagactggtaaccgacgtaatgtaaactctgatcctcgcaatccaggaatcggaatcctcgaaatcaattgaaaactctgatccccgcaatccaggaatcggaatcctcgaaatcaaatggactgtaatgtgtaacgtgccaggattacacat

SEQ ID NO: 29783 - DNA, 354 bp, Oryza sativa
  Clone ID: PAT_MRT4530_34251C.1
atggcgcgcaagggcacggcgccggcagcagcagcagcaacgttgctgctcctctcatgcgccgtcgcggcgagccacaccgccgctgctgcagcggccgagggatcgacatcgccgccggccgcgccgcagctggggatgccgaggtcggcgacggccggtggtgggatgaggacgggaaggagggagtactatccaacagggacgctaccgagcttccagctgccgccgatcccggtacagttcccgacgctgccggtgccggtgccggggatggccgccggctggaacttccccaacctgccgctgctgcagccgcccaacccgccgtcgccgccgtccggccgggactaa

SEQ ID NO: 29784 - DNA, 238 bp, Oryza sativa
  Clone ID: PAT_MRT4530_34252C.1
caccgcccccgccggcccggcgccaccgcgcctccactgctgcccctacacagagaaagagagaagtggaagaaatagagaactggagaagagggagccggccggccttatctcctcctctggatgcctcaccgatgacggcatcccgtatgacccgtcaaaggtgacggtcatcacaatcatcgttggtaatgagcgcgtggttgcaatgtttctgggaccccacggatgcctctaa

SEQ ID NO: 29785 - DNA, 3018 bp, Oryza sativa
  Clone ID: PAT_MRT4530_34253C.1
atgatggtgccaaagaatccggaggttggtgtgtggaaggagaatcggagtgaagcttcaagttctaaagctcctagtaagactaaggtgaccttcgatatgcttttggataagtatgagaagcaaagtggtgagaaggctcgcaacaaaggaaaaagaccaagatcgcctcctggggagcgatttggtcattcaccaagtgtggagattgtggataccccatacccacacggcatcctcaaaccactcggacgagatctcatctacttcgacacgaccaaatcaagacgatgcggctatccaccgatcctgatgaagctccctgacgatttggctgttgttttcaccacaaaggcatcttcttctcataggtctagatgggacctggcctcggcctcgatgcaatcttgcttcagggaagtcggcgtcatacttcagcccctcgggacggtttcaacagaagagttggatagctacctcagctctccaggcgttgattcacagccaacagagatccttgactacgatgacttcagcgtcaactccatgaagcagaagaacaacgtacacgacaagaagccgagcggcgttgattggaagaagagcgacaagtgcaagagtgagaccggctgcagtgacgtcgaagggacagcgttttttctcaccccacagcagaatgcaatagcagcaatcactctctgggatactctgctccaggaagatgcgcccaaccacgtcctcaacattatcaaccagatgaagaccatgatcgccgcctcggacccagtcaacttagcaagcgtttgcacgccgactggcagccaggttccgcctctccgatctcaagattatcaccaaccaagccttagcatgactgcttcaggatctaatcacaggagcagggattatgccgaacgttctgttcactcgcctgctgatagatacagagaacgctgtgttgaacagcctcgctctccacgtcgtcggcaacccgtcgatcttcgcgaaacactcaaccgacaccttgcagaaagaggctaccaaccataccgttcaccaaatcgctacgacgacgatgaagatggagtcgcatcctttacaagtgacctgtgtcgagtggattggtcggctagtttcaagctgactggtatcgagaagtatgacggcaaaacaaatggcgagtcatggctcaccgtctatggcctcgcaatccacgcagcgggaggagatagcaaggctatggcaaattacttgccattagatctagtagattctgctcggtcctggctttatgggttaccccgtggcacgattggatcttgggcagagcttcatgagcacttcatcaccaattttcaaggcacctttgaacgtcccggcacccacttcgacctctacaattttgcggagaaatacgccaagcaagcgaagaaggctatagatggagatcagagcacctcaaagaagaaagatgataaagacgatggaccgactggttttcaagattctcgcaaagagctcaaccatatctttggtgggccccaagcttatgagtcaaaacggaagcaaaagctgattgatagggagatcaacgccgtccagcccgacacgcctcaatatcttcggtggtcagagacaacaatcaagttcgaccactcggatcatcctaatcgagtggtccacccggggtggtaccccctggtactggacccagtggttcacaacttcaagctccgacgatccctcattgatggtggcaggttgtcctctactccactcggccagatcactctgctcgtcaccttcggcactcaggagaactttcgcacagagaatatttgcttcgatgttgctgattttgagacggtgtatcacgctatacttgggcgcctggcgttagccaaattcatggtagtcccacactacacctacatgatcatgaagatgccaggacctagaggagtcatatctttgcggagcaacatcaagcaagctatcacctgcgacaaagaaagctgtgagatggctcagacatcacttggaggacgtgatctcggtatcttcttgttcatccatgatgtgagcaatggttgcatccatggtagccatggtcacatcaccggagaagacgacgccaagaccaagaagattccctttgatctatctgatccctccaaaactactgtaataggcggcttcatcaaggaagttttacatcctgactggctggcaaacccagttttggtttggaagaagacaggacagtgccgtatgtgtgttgattacaccgacctcaacaaatcatgtcctaaggatccttttgggttacctcgcattgaccaggtggttgattcaacagccggctgcgagctactcagttttttggattgttactcgggttatcaccagatcaacttgaaggaattcgactgcttgaagacctcatttatcacaccgtttggagcttatttctatatcaccatgcccttcggattaaagaatgatggagcaacctatcaacgcatgatccagagatgtttttcaactcaaattggtcgcaatgttgaagcctatgttgatgatgtagtcgtcaagaccaagcagaaggatgacataattgctgatctagaagaaacctttgctagcatccgtgcttttaggatgaagttgaatcctgaaaaatgcaccttcggagtaccgtcagggaagctgcttggctttatggtgtctcattttgtcgccgagtggaccgagtgccaagaagacacacctgtggagaagctggagtattggactattcattttgacgggtcgaagaggctttcagctgtggacaaattttccaagtggatcgaagctaaaccagtcgtcacaatcactaccgacaaagctcgagattttttcatcaacatcgtgcaccggtttggggtcgaatgcgccaatggtatggtagttcaaggcatcaaagcacgggtttttgaccgactgcgcccttatgccggcaaatgggttgattag

SEQ ID NO: 29786 - DNA, 2212 bp, Oryza sativa
  Clone ID: PAT_MRT4530_34254C.1
atgcaatcttgcttcagggaagtcggcgtcatacttcagcccctcgggacggtttcaacagaagagttggatagctacctcagctctccaggcgttgattcacagccaacagagatccttgactacgatgacttcagcgtcaactccatgaagcagaagaacaacgtacacgacaagaagccgagcggcgttgattggaagaagagcgacaagtgcaagagtgagaccggctgcagtgacgtcgaagggacagcgttttttctcaccccacagcagaatgcaatagcagcaatcactctctgggatactctgctccaggaagatgcgcccaaccacgtcctcaacattatcaaccagatgaagaccatgatcgccgcctcggacccagtcaacttagcaagcgtttgcacgccgactggcagccaggttccgcctctccgatctcaagattatcaccaaccaagccttagcatgactgcttcaggatctaatcacaggagcagggattatgccgaacgttctgttcactcgcctgctgatagatacagagaacgctgtgttgaacagcctcgctctccacgtcgtcggcaacccgtcgatcttcgcgaaacactcaaccgacaccttgcagaaagaggctaccaaccataccgttcaccaaatcgctacgacgacgatgaagatggagtcgcatcctttacaagtgacctgtgtcgagtggattggtcggctagtttcaagctgactggtatcgagaagtatgacggcaaaacaaatggcgagtcatggctcaccgtctatggcctcgcaatccacgcagcgggaggagatagcaaggctatggcaaattacttgccattagatctagtagattctgctcggtcctggctttatgggttaccccgtggcacgattggatcttgggcagagcttcatgagcacttcatcaccaattttcaaggcacctttgaacgtcccggcacccacttcgacctctacaatgtgatccagaagcccgagacaacaatcaagttcgaccactcggatcatcctaatcgagtggtccacccggggtggtaccccctggtactggacccagtggttcacaacttcaagctccgacgatccctcattgatggtggcaggttgtcctctactccactcggccagatcactctgctcgtcaccttcggcactcaggagaactttcgcacagagaatatttgcttcgatgttgctgattttgagacggtgtatcacgctatacttgggcgcctggcgttagccaaattcatggtagtcccacactacacctacatgatcatgaagatgccaggacctagaggagtcatatctttgcggagcaacatcaagcaagctatcacctgcgacaaagaaagctgtgagatggctcagacatcacttggaggacgtgatctcggtatcttcttgttcatccatgatgtgagcaatggttgcatccatggtagccatggtcacatcaccggagaagacgacgccaagaccaagaagattccctttgatctatctgatccctccaaaactactgtaataggcggcttcatcaaggaagttttacatcctgactggctggcaaacccagttttggtttggaagaagacaggacagtgccgtatgtgtgttgattacaccgacctcaacaaatcatgtcctaaggatccttttgggttacctcgcattgaccaggtggttgattcaacagccggctgcgagctactcagttttttggattgttactcgggttatcaccagatcaacttgaaggaattcgactgcttgaagacctcatttatcacaccgtttggagcttatttctatatcaccatgcccttcggattaaagaatgatggagcaacctatcaacgcatgatccagagatgtttttcaactcaaattggtcgcaatgttgaagcctatgttgatgatgtagtcgtcaagaccaagcagaaggatgacataattgctgatctagaagaaacctttgctagcatccgtgcttttaggatgaagttgaatcctgaaaaatgcaccttcggagtaccgtcagggaagctgcttggctttatggtgtctcattttgtcgccgagtggaccgagtgccaagaagacacacctgtggagaagctggagtattggactattcattttgacgggtcgaagaggctttcag

SEQ ID NO: 29787 - DNA, 2742 bp, Oryza sativa
  Clone ID: PAT_MRT4530_34255C.1
atgcaatcttgcttcagggaagtcggcgtcatacttcagcccctcgggacggtttcaacagaagagttggatagctacctcagctctccaggcgttgattcacagccaacagagatccttgactacgatgacttcagcgtcaactccatgaagcagaagaacaacgtacacgacaagaagccgagcggcgttgattggaagaagagcgacaagtgcaagagtgagaccggctgcagtgacgtcgaagggacagcgttttttctcaccccacagcagaatgcaatagcagcaatcactctctgggatactctgctccaggaagatgcgcccaaccacgtcctcaacattatcaaccagatgaagaccatgatcgccgcctcggacccagtcaacttagcaagcgtttgcacgccgactggcagccaggttccgcctctccgatctcaagattatcaccaaccaagccttagcatgactgcttcaggatctaatcacaggagcagggattatgccgaacgttctgttcactcgcctgctgatagatacagagaacgctgtgttgaacagcctcgctctccacgtcgtcggcaacccgtcgatcttcgcgaaacactcaaccgacaccttgcagaaagaggctaccaaccataccgttcaccaaatcgctacgacgacgatgaagatggagtcgcatcctttacaagtgacctgtgtcgagtggattggtcggctagtttcaagctgactggtatcgagaagtatgacggcaaaacaaatggcgagtcatggctcaccgtctatggcctcgcaatccacgcagcgggaggagatagcaaggctatggcaaattacttgccattagatctagtagattctgctcggtcctggctttatgggttaccccgtggcacgattggatcttgggcagagcttcatgagcacttcatcaccaattttcaaggcacctttgaacgtcccggcacccacttcgacctctacaattttgcggagaaatacgccaagcaagcgaagaaggctatagatggagatcagagcacctcaaagaagaaagatgataaagacgatggaccgactggttttcaagattctcgcaaagagctcaaccatatctttggtgggccccaagcttatgagtcaaaacggaagcaaaagctgattgatagggagatcaacgccgtccagcccgacacgcctcaatatcttcggtggtcagagacaacaatcaagttcgaccactcggatcatcctaatcgagtggtccacccggggtggtaccccctggtactggacccagtggttcacaacttcaagctccgacgatccctcattgatggtggcaggttgtcctctactccactcggccagatcactctgctcgtcaccttcggcactcaggagaactttcgcacagagaatatttgcttcgatgttgctgattttgagacggtgtatcacgctatacttgggcgcctggcgttagccaaattcatggtagtcccacactacacctacatgatcatgaagatgccaggacctagaggagtcatatctttgcggagcaacatcaagcaagctatcacctgcgacaaagaaagctgtgagatggctcagacatcacttggaggacgtgatctcggtatcttcttgttcatccatgatgtgagcaatggttgcatccatggtagccatggtcacatcaccggagaagacgacgccaagaccaagaagattccctttgatctatctgatccctccaaaactactgtaataggcggcttcatcaaggaagttttacatcctgactggctggcaaacccagttttggtttggaagaagacaggacagtgccgtatgtgtgttgattacaccgacctcaacaaatcatgtcctaaggatccttttgggttacctcgcattgaccaggtggttgattcaacagccggctgcgagctactcagttttttggattgttactcgggttatcaccagatcaacttgaaggaattcgactgcttgaagacctcatttatcacaccgtttggagcttatttctatatcaccatgcccttcggattaaagaatgatggagcaacctatcaacgcatgatccagagatgtttttcaactcaaattggtcgcaatgttgaagcctatgttgatgatgtagtcgtcaagaccaagcagaaggatgacataattgctgatctagaagaaacctttgctagcatccgtgcttttaggatgaagttgaatcctgaaaaatgcaccttcggagtaccgtcagggaagctgcttggctttatggtgtctcattttgtcgccgagtggaccgagtgccaagaagacacacctgtggagaagctggagtattggactattcattttgacgggtcgaagaggctttcagctgtggacaaattttccaagtggatcgaagctaaaccagtcgtcacaatcactaccgacaaagctcgagattttttcatcaacatcgtgcaccggtttggggtacctaatcgtatcattatagatggtacccaattcactagtgatgtgtttaaagacttctgtgaagactttggtatcaagatttgttatgcttctgtagcacattctatgaccaatagacaggtcgaatgcgccaatggtatggtagttcaaggcatcaaagcacgggtttttgaccgactgcgcccttatgccggcaaatgggttgattag

SEQ ID NO: 29788 - DNA, 320 bp, Oryza sativa
  Clone ID: PAT_MRT4530_34256C.1
atgttccagctccgtccgttaataccacgtcggagcaccgtgaggaggtatgtgaactcccccgaagagtttcgtgtgtcggagccaccaccgccttccccagacccattcctgctgtcgccctcgatggaagcagatgacacgatgttcgctgaagattttgggtacatgtcaactccacgcccatctccaccatcggacattgatgacctcaacccacctgattcggacgtcgaggatgtttgcttggaacactgccttcgaccaatcgatggcagcgacccgatcgaggtcagcggcaacccatacatcactcttgg

SEQ ID NO: 29789 - DNA, 267 bp, Oryza sativa
  Clone ID: PAT_MRT4530_34257C.1
atggcggagccagagaaggcgatgggttccccggccgcgaaggagctggagaagacgccgcctcctcctgcaactgatggccccagcggtgacattatgcagcggcagtataagaaggacgccgacgccacccatggcacacttgttggcgacgacgcggacgaggcgcgccgcctcttcctcgcggacgtggtggagcgactagacgcggtcaagaggctcgaagcgaggatccgcgagatcgctgaagaaatattcccagtttga

SEQ ID NO: 29790 - DNA, 1425 bp, Oryza sativa
  Clone ID: PAT_MRT4530_34258C.1
atggcgtccgccgcggctaagattgccgtcgtctgtctggtggttttgtccgtggggcagtccatgatgatgacggcggcggcaactactgccgccaccggcgccacgacgtgcaactgcgacacaagcggttgctacaattgcatgctggatgtcgtcaccaactggtgcaaaggcagagatttcaactggatggtgttcaccgcctgcttgatcaaatactccaaggaaaaccagtgcttcagcaagtaagcggcgcaacttcttcatcaatggctggagatgaagcaacacataggaagccaaaaaggaagcggcgggctaagtcggccgatgaagacgcatcaggcgatgagccacccgaatcaaaggggcccaacctgacatgttgcagcgccacgttagcgtcggaggcttgtcgtgtgctgtccaatacacaccacgagaaattgggggaaatcgggctagacgccgtggcttgcatgacacttgaaagtctcaagaagaccaaccccgacacaatgtgtccttccattgatggtgaacggaagattcagatcacccctcgcaccgtgaagcttgtgatggggaccccattaggcggacatgatattgtaatcccacctaacaaggttgtgcgaagcgtgcacgacaggatcacacaagaattgggaattgcacggaatggtcggatctcagctaaaatgctgattgaagtgatcaagaaccagaaagacaacccctcggcagttcgtttcttagtcatggttcttatgtccaagctcctactcccagacaaccgacttttacatacccaagagtgatgtatgggttgccgctgacctcgatcgggtcgctgccatcgattggtcgaaggcagtgttccaagcactgagcgataccatcagatgttggcgacaaaagcccacatcgtcaatcacatcttgtgttgtatttttggtggttcggttctgtatcttgacaacatcctcgacgtccgaatcaggtgggttgaggtcatcaatgtccgatggtggagatgggcgtggagttgacatgtacccaaaatcttcagcgaacatcgtgtcatctgcttccatcgagggcgacagcaggaatgggtctggggaaggcggtggtggctccgacacacgaaactcttcgggggagttcacatacctcctcacggtgctccgacgtggtattaacggacggagctggaacatgttcttcggaattagtcgctttggcggtagatgtttgggcaatctcatccatgggatgagttgggtctgtgttgggcacttgtgcagaagccgtgatagtcaagtttataaaagggaatgcaaaccttgcaaacagaaatcacgggatctgatccgtgctaatccagggagtaatcgaagatattttctagcggattag

SEQ ID NO: 29791 - DNA, 1137 bp, Oryza sativa
  Clone ID: PAT_MRT4530_34259C.1
atggcatccttcctcctcattgagccactgtcatggagccgcatcgaccggcgtaggagagacgcgggcggcagcggattcggtcgcgacagaggcatgggcggcggatctggccgttggattgccacgggaggggcgctgcaattcgaccaggccttatgcgaccttggagccagcgtcagcgtcatgccaaaatacgttttcgataagctcaacttcacggtgttggcaccaacaccgatgcgcctccaactggctgactcgtcagtccgttacccggcagggatagcggaggatgtgccagtcaagatacgggatttcttcatcctggttgactttgtggtgctggacatggacacgggaaaagagatgtcgatcatcttggggcgtccgttccttggcaccgcgggagccaacattcacaatattcaagaggtcgaagtggagccacccaaaacggatagcctggtaaaattcatgcataatttcttggagaaggaaacaacgatgcccaggaaccgttattggaagacgccggggtctggctcttcaccaagccatcatgacgagtctagtactcgttcatcagctgatgtctcgatggaaaacaccgaagctccgcgacaactcttgagggacatcgacctcgaccttgtcagtgatcaggagaggcaagcctactacatgctgagggaccgggagtatcctcacacgcaagaatactcaccggagctgctgaaaaagataggtatggatgctgaatttggttctatttggaaagctgttggttggcagccatttgctgtggttgggagccaactaaggatgcacccggatggacccaagctccacgtcactgtattggagtctcaacctgggcaagtgccagtgaggaccggtggcgtgcgcctcatgacatccgctggggggacaaccaaccctccagatcaagtggcagcagctcgaagggaggggaggtggcgcctggctcggctcggctccaagccggctggccatggaggggcggcggcgcgcgcggagctggcggcggtagctggcggcgaccggcggcatgcggcgacgcggcggcgtgacggtgaagcgccggacggcgacggcggcgcggctcggcgctag

SEQ ID NO: 29792 - DNA, 393 bp, Oryza sativa
  Clone ID: PAT_MRT4530_3425C.1
atgtcgccgaggtccatccagcgcgtcgcggccgccgcggcggcggcattcgacgccgccgccgccgccgtcgtcgtcgacgaaagctgctcgtgcagcgccgaggcgatgtcgtcgacgccgacgtcgggagcgacctcgctgtccacgctgggaagctccggcggcggtgacgtgctggaccacgcgacgacgccgtcgtcgtcgtcgtctgccgcggccaacgtttgctcgccgccgctggagggggaccatgagctgtggacggagctggacgcgttcgcgtcgccgaagttcatggatctaatggccgccggcggcacggcgttctcgtcgccgtgggaggagcccgaggaggacggcgagctgatgaggctgtggagcttctgctag

SEQ ID NO: 29793 - DNA, 2094 bp, Oryza sativa
  Clone ID: PAT_MRT4530_34260C.1
atggagcttcggcgggttccacggcagggaaactcctccgtcaccgccttcctcaccttgtccggccgcctgccccacttcctctacacccctcatctccgtatcgcccttccccgtcgtctgaacactgatcaagcggcggtcattgacggcatcagattaagctcgttgtctctggtgttcaagaagcagttagccgcaattcttgattggttgctagtactaatagttcattgttgcattcgtccgtcgtcgcagcgtgcgttcctcgtctggccgtctggtctatttgtgcggttgaaccggctgtcgactgtcgagacgcacgacgcggaggtgctccggcgaggccttgatgaggcggattgtgtgcaggtgacttgaggtcagccttggtcaatggtgaggaccgggactatgctcagggaggagcagaggtctagtgcggtcgggataccatgtgagaaggtgactagagtctggattcttggaggtcaacttcggtcaacggtggggatcggaactaaactcagggaggagttgaggtccagacggtcaagaataccgggtgacgaagttggatatgagatggcacacggtggatggacaccatgtgggagagatctttacaacgggcttcacgaggtgtgcgtgcaagtgccggtgttcgcgaaggagattggagtgagaaatcgagaaaaggcggcggcgctcggacgaggccttgatgaggcggttgaaggccggaagaccttcgatcgcttcgcttgcactgacgcccggcatagcatagatccctcgcccgcgagcggcgcggcgtgcgtcgtggcgtggatcgcagcgcacgttccccgtcgcatttggaccaacgaaggcggccacgacgcgatcgagatcactcgcgccgcggctgcctgcctgctcatgccgctgggacatcacgatgagatattcctgatgcattcttctgacctcacctgcgagcgctgcgatcagctcatggctgtgtcgagatcctgccgcagtgctcacgccggtgtggcggtggctgctcctcgtgtgcgcacgcatccgccggagacgagggctcctaaccaggagacgcacgatgcggcggcgctccggcgaggcctcgatgaggcgggtgtggacaaggacaagagaaagttgatacttgttggtgcctctgctttatgttgggctctgtgtcgccggtgtcgccgccccgctccaagccgcccccccgtcatcaccgtcgtcatcgcccggcccccgccactccgcgcgcaagccgccaagggacggagccgcgcccctcctccctctgccggcacgagcaaggacgcggaagaggactccggccgcaccctctccttcctcttccccggcccgaggccggagagattactcccgcgccgtcggcctctcatcacagcgcccctcctcttctcgttagccggcgccgccccgaccgttgccgtcgctcgctgcgtgctcgccgccgtcgccgcccgagctccgtatcacccgctcgtcgccggcctcgctcggcgtagttccgcccaatccgacgctagcatcgagttcccgaagccgcgtagatgctctcaccgccgggaatcgacctctcgtggcctcgtcgccgtttccctcttctcccgccgccggttgccaccgccgcaatccgccgccgtcgagcaacccccggcaaatccgagccgttggttcgtctcccctcgtctcgtgcgccacgtcggcgccagctcagcccagaccgggtcgggccgaccccggtcggtccctccgcgtgcgcgcgttccaccgcaagccgtgaggctgcgcatgggcccgccgcacctgcgtccgccgcggaccgcgcgcgtgcaccgcgttcctccccgcccgcgcacgtgcgccgcgtgctccctccgcacggtgagccgagccgctgacaagcgggtcccacccggggccacgcgtgagcccgaagacccgcagtgcgaggatttcgaggatcaagctccagatctcgagcaaggcaagccacctttgaacatcttgagcctatcattgaaatttaattatattgcttga

SEQ ID NO: 29794 - DNA, 987 bp, Oryza sativa
  Clone ID: PAT_MRT4530_34261C.1
atggaagacaccgaagctccgcgacaactcctgaacaacaccgacctcgaccttgtcagtgatcgggagagacaggcctactacatgctgagtgaccgggagtatgctcatacatttgctgtggtagatgagcctggttctcgtttgcttactttgcaatttctgtgcactttgaaagaaatagaagatgggatttcctttcgctttttccgtgaggagtttacacttacatggaaaggcttaagcacacttcttggttttcacgattcctgtaaaatcgatctccagaaaggaatttctgggttcgagaaaaataggttttgcgaagatatttctggtgctccaatttgcaagaaacctaggatgaatgatatccataatcctacacttaggctcatgcacaaatggattgctatgactctatttcctagagaaagtatcaagttctgtgctcctgttgagtgcacttctctgattactcggatagcaaaagggctaggggtcgttagcgaccaaatggcttttatctcagccgctcgtccgcgtattgatgaagcttatctagtgcaagggcatatcttgaaacatggagtagatggatctttaatttactttttccccggttgtacaaatgaaatcccgttgccaaatgcggggtatcatttgtacaactgtcatgaactaaccatacccctgcagaccatagaagaatctcgtgtaggtggaacatacagggagacgcgcaacatgacaagaaatgaacgagaaagttcatcatcctcaacacccgtgcagatgtatgaggcaggttgggcaccaactagggatgcacctggatggacccaagctccatgccacagcatcggagtttcaggctgggcaagtgccagtgaggaccggtggcgtgcgcctcatgacatacattgggggaacaaccaaccctccagatcaagtggtgtgcctccatctccaagtgaatggcgctaa

SEQ ID NO: 29795 - DNA, 1254 bp, Oryza sativa
  Clone ID: PAT_MRT4530_34262C.1
atggcggaggaggcagggctggaggccggagcaatggaagagggggaaggggtcacgaatgacgacgatgacatggaggcagagaggaagggggcggtgactgcgatgggggtcagccggcggggcgaggtggagggcggcgccgcggtggcggctagtggcagcaacgacgggggagaaggagggtgccaccgtgcgtgcgagctcggggttgaagaggcctgggaagcgggagaaggaggatggcgtcacgcgtcgtcagcggcggtgacgcaggagaaggggagggcatcgctgcgcggacgagctcgaggacgaagacctcggcaacgaggtcaggtgccacgtctgctcgttcccggcatcgaggaggctcccctgcctccgacacgcgcgagattttgtgctagggaacttgtcaatggccacatggattttatgctgctcgcgcgcgacaaggtgttggccgtggaagcaactggccgcaccaccatctacgacgacagcttccgcgtcgtgagaagcggccctgttctcaaggcacccttgtactggcccatctccgtacctgtcgacgacagcggcgtctacgtcctcgacagcaaacactgcttccagaagttagtccacggcaattcctcatttgaggattggacctgcgaggcactcccggcggcgccccgagaagtgcgcggtggatcccgccgagcctacgccgtggtcggcggcaacagcatctggatctccaacgacggcgacggcacgtatgcatacgacatctcgcgcctcgcatgggcgaagcatgcagagtgggcgctccctttctccggccgcgcggagtatgtctccgagcacaagctctggttcgggcttgcaaggaatagcacaggtaaccccatgtgcgcctgtgacctcgccgctgccgccgaacagggttctccgccggtccagcgcaacatctggcagcaagatgtcaggccgcgaaaggggtgggtgcctcgttactccaacctcttgcacctgggctccgctaggttctgcatcgtcaggattttcgccaagccatcgccggagacggagtacaagtcagagtgggacgggcccaagcgtgaggaagtgttcgccgtcctgaccgccgtcgaggtggtgcggtccggcgagcttggcaaagggcttcggatggtcaagcacaaatctgtccgctatagcctcggagatggatactgcaaggttcaaccgctcatggtgtattaa

SEQ ID NO: 29796 - DNA, 1344 bp, Oryza sativa
  Clone ID: PAT_MRT4530_34263C.1
atgacaaaaaccttctccggcaagcagcggatgatgacgagcatcgcttggcagcgttgcgtcgtctacggactcaggcggctcgacgacgtccccggcaactccgacgagatggcttgcgacgtagctggagctggagacgccttgcgggcaccgagtagtggcgctccggtcggcgttctcctcgagcaaccagccgatgagttcgaagaagatggtaacgtcgacgagagcgagcggacgtcagtgatgtcgcgaagaggaggctgcgaccggcaaggcgacaacgtccagcgtctcggcgacatcacatcgccaggcggcgatgccgccgcccgagctcgcctgccgctcccgtgccacctgcccccgctcccaccgccgctcgccccggtcccgccgcagcctgctcccgctcccgctcccaccgccggccacccccgctctcgccggatccgagcgggacaaggcccgccaccgccggatctggacgggatgaggcccgccgccgccggatccgggagggacgaggcccgcgtcgccgccccgtcgctgcccaatcgtcgttgtcgtcgggatcgtcgttggggtcgtcgtcacgccgctctcggccgcctccgcccaccggatccgggcacccactcgtcgtcggggtcgtcgtcgtcgtcgcgccgctctctgctgcctccgcccgccagatccgggcgcccagtcgtcgtcgccgcccagtcgtcgtcggggttgtccgcatcgaggtcgtcgtcgtcgtcgcgcagctctcggccgcctccacgcgccacgcgccacgccgctcccacccgacgccaccgcgcgccttccaccgccgctcacccgcgcgtgcccgagccgcgccactccatccgccgcgcctcccgttgcgacccgcgcgcgcgtgccgtggtggccgaccgcccggtcgccgccgccgtcagcccctgcacgggcctgtcgcccgtgtcgtcgcgccgctccaaaccgccccgccgtcatcgccgtcgtcatcgcctcggccccgccactcccgcgcaagccgccaagggacagaggcagagcctccctcctccctctgccgcgacgcccccgctccctcctccttttcccgaagaggcaaggggacaagcccctttctccccctcctttttcccctttttcctcccgccggcgtcatcctccctccctcctgtcgccgttttggccgctagccggagcgccagctcgcgccttgaccgccaaagcgccacgtcggcgccagctcagccgaggtcgggacgggccgaccgcggtcagcccctccccgtgcgcgcgttccaccgcgagccgtga

SEQ ID NO: 29797 - DNA, 407 bp, Oryza sativa
  Clone ID: PAT_MRT4530_34264C.1
agggggtacactttacccacacgacattactaacccggatcacccagcccgtggggatcagccacgtcgggagacctccaagctttcatgacaaggcatttccaaagccgacacaggcgtccgtcgatactcgcactgggtgcacgaatatcgagacgcaactggatggttacaaggggacatgggcgcggcccgagaggaagagcggctcggccaagcttaacgggccggccggcccaagaaggcggcccaacggctcggctcaccgtgtggagggagcacgcggcgcggcgctagggtggggaagggacgcggtgcacgcgcgcggttcgcggtggacgcggatgcggcgggcccacgcgcagcctcacggctcgcggtggaacgcgcgcacggggagggactga

SEQ ID NO: 29798 - DNA, 630 bp, Oryza sativa
  Clone ID: PAT_MRT4530_34265C.1
atgaatggcaccgacctcggccttgttggtgatcgggaaagacaagcctactacatgccgagcgaccgggagtatgctcacacacgagaatactctccggagctgctgaaaaagataggtatagatgttgaatttcgtgctatttggaaagttgttggttggcagagatttgttgtggtagatgagcctggttctcgtttgcttactttgcaatttctgtgcactttgaaagaaatagaagatgtaatttcctttcgctttttccataaggagtatacacttacatggaaaggcttaagcacacatcttggttttcacgattcctgtaaaatcgatcttcagaaaggaatttctgggttcgagaaaaataggttttgggaagatatttctggtgctctaatttgcaagaaacctaggacgaatgatatccataatgctacacttaggctcatgcataaatggattgctatgactttgttttctagaggtgatcttagacccattaggggggatgaattgattatgatgtttgccatgttcgcaaacttcaacaacataatgcagcaacagcacgatgaccttcaagcgtacttccgcttccaggggttcaatccttaccaaggaccctga

SEQ ID NO: 29799 - DNA, 1531 bp, Oryza sativa
  Clone ID: PAT_MRT4530_34266C.1
ttactcgccggcgacggcgacggccagtccccttcttatctcttgattatttttttttttttttggattagtttctcctattcattattgtcaccatcttattcatgtattcaatttattacttgttgtaatgggcattgaagttttctgggtagagaatacggattagttggcaaaaaggagccatgaaacaaccataaccaagaagagtatactgccgatatgctcgctgcctggtcagccatagaatccaaaacacctgcaaatttgtagaatcggtttgtatcctcgctaaccagcccagtgttgccgtccgggggatctcaaactgtaacccgggaaattggctcgtcgtcagatttgaacttctaagtgtatatcgtatccaagacgaagtatcatttattgaaccaatctctacacatccccaacgagatgctgggagccagtcaccaggacctgaaaagaagttgatcggttttgtcgggcatttttcctcagccactccattgccagcctggaacgtgattcaaaaaccagactgttctcacttggaatttgtgttgttcaaacctttcatcaccatgaagtaatttctggaacactctttgaagcgtgtgcaacttggagtgaaacacccaattctgaagccctttgtttcagagcaatcattgcctcttctggctgtggagcagtgtaggccggaactcccttcagcaatttctccaagtgtgtttcctgctcacagggcacatggcaaaagcatgaaactacttttccaagaatttccatatggtcgtatccaagggaagctattccacaaaccacaggtgcttcaacctgcatatgtgcaaagttatacaccacattagttgcatcaaacttccctccaaggccaacctcgagaacagcaacatcaacctgttcagctgagaatatcttgaatgctaacaatgcaaggaatctgaagtaggttggcatgggaatatcatcatcagtcttctccttgagcttattccagcaccaccagaagtatttcaaaaacttttcttcggaaatatccaccctgatgctctcacaattaggagcaaacagaagtaaactattgcataggtaaacattaatgtgcagattggttgcattaagattctttcctttggtcccggcaacgtgaatcaccttcatccgcgcgatcggctcctccagctccagaatctggaggtaatgcgccatgaggtcccactggtttccccggttgccgctgtgcgcccgcaccttctgcgtgatgagcgaggagagccgccccatcacgtcctcgtactccgctgccgccacagcaccacctgcctgcgcggcggcggcggcggcggagacggaggaggaggccatggcgcgaggggaggagaggcggcgggcggggacggggacggggacggaggagcaaggcaggaggaggaggcggcggagctgagccaggtgagggcggtgaggcatatgccgcgtgcaggtgcagcgcaagctcaggcgagcg

SEQ ID NO: 29800 - DNA, 1114 bp, Oryza sativa
  Clone ID: PAT_MRT4530_34267C.1
cgcctgcccgcgcctgtcgcccgtgtcgtcgcgccgctccaaaccgctcgccgtcgtcaccgcccggcccccgccactccgcgcgcaagccgccaagggacggaggcagcatccctcctccctctgccgcgtcgccccgctcccccctcctttttcccgaatcggcaaaggggcaagcccctttttctccctccttttccccttttttttcctcgccggcgtcatcctctctgtcgccgctttggccgcgaccgccgagcgccagctcgcgcccttgaccgccctaagtcggttcccaaaccgacattgccgcccctttaaacccccagcctccccctcccttcctttcctctcccattcaccccctcgccattgccgccgctcccgtgctctgtctcgcctccgccgtccatcgccaagcgccgggagagccggtgcgttcgtggacgtggaaggggactccgggcactcgtctccttcctcttccccggcccgaggccggagagattactcccgcgccgtcggcctctcgtcacagcgcccctcctcttctcgccgcgtagatgctctcaccgccgggaatcgacctctcgtgacctcgtcgccgtttccctcttctcccgccgccggttgccgccgccgcaatccgccgccgtcgagcaacctccggcgaatccgagccgttggctcgtctcccctcgtctcgtgcaactacccggtgtgctcgctttcgccggtatcgccgtggttcgctccgccgctcgccgctgttgtccgccgtccgttccggccggcgtcgtcgtctacctcccgccggcccgcgtggcagccacgtaggcgccacgtcggcgccagctcagccgaggtcgggacgggccgaccccgaccgcgcgcatgcaccgcgtccctcccccgcccgcgcgcatgcatcgcgtgttccctccgcacggtgagccgagccgctgacaagcgggtccaccccgggaccgcgcacgtttcggagcccgaagacccgcagtgcgaggatttcgaggatcaagctctagatctcgagcaaggcaagccacctttgaacatcttgagcctatatttgaaatttaattatgttgcttga

SEQ ID NO: 29801 - DNA, 1761 bp, Oryza sativa
  Clone ID: PAT_MRT4530_34268C.1
atggccagcaagactctttgcgagttcgctgctccctctgctgccaatgtggccgtcgggccgcaagtcaacataggagatgtggatttcgacttgaagtccagcctcatcacgatggcgcaggctagcccgttctgtggcaagcctaatgaggatgccaacgctcatctgcaacaattccaggagatatgtaccacgtacaccatcaagggcgttagtcctgacgccgtcaggctgcggctgtttccgttgtccctcctcgggagagcaaagcagtggttctatgccaaccgtgctgctatcaacaccagggataaatgctctacggcattcctctcgaagttcttcccgatgggcaaaaccaacgcccttcatggacgaatttccagtttccagcagacaagggacgagtctgttccagaagcatgggaacgactgcaggagcacatggccgcctgtcctcatcatgggatggacgactggctaatcctgcagaatttttacaatgggctcaccccaatgtcccgcgatcacttggacgcggcagctggaggagccttcttctctaaaacggttcaaggagccgttgaactcatagagaagatggtctccaatatgggttggagcgaggaacgactccagacctgtcagcgaggcatgcacaccgtcaaggagacggagttacttgctgccaagctggacctcctcatgaaacgcttggacgaccatgagaaacggccacaaggcaccgtcaaggccttggactcacacgtcacgtgtgaagtctgcggcagcacgggtcattctgggaacgactgcccggaaacccgtgaggaggcgatgtacatgggcaacaacaacgggtatcgtccacaaggaggtcaggggtggaaccaactaagcccatattatcatgagtccctgcaaatgaatccgggaggattccggggcaacccgacccctccattgaaaatgtcaaggcgatcacgacgaggagagaagatccacatcaacgtgccgttgttggacgctatgcaagtgccaacatacgcccgttatcttaaagagatactcaacaacaagagaccgctcccaacaacagaggtggtcaagctgatggaacaatgcagcaacgtgatactccacaagctcccggagaaggagaaagatccggggtgtcctacgatcacctgctcgatcagggcacaacaattggaccaggccttgtgcgaccttggagccagtgttagcgtcgtgccaaaagacgtcttcgacaagctcaacttcacggtattggcaccaaaaccgatgcgccttcaactggctgattcatcagtctgttacccggcaaggatagcagaggatgtgccagtcaagatacgggatttcttcatcccagttgattttgtggaagtgaagtttgagttccaaccatggacggaacaatgctccatggtcaggataaagtacgggccgaacccacagaatattcaagtggtcgaagtggagccacccaagacggacagcctcgtgaaagcagccagcttagaagaagccgtcttccgcaccgaaatcaaagaaggtgcggaaggaaaagccaaagacacccgctccatcacctccggagacgggtggaaaatccgtgaactgaatcaaaatgacgcgaccttcgcaaacaggtggaacatacagggagacgcgcaacatgacaaggaacgaacaaggaagttcatcatcctcgacacccgtgcagatgtatga

SEQ ID NO: 29802 - DNA, 2184 bp, Oryza sativa
  Clone ID: PAT_MRT4530_34269C.1
atgcacaccgtcaaggagacggaactgcttgctgccaagctggacctcctcatgaaacgtttggacgaccaagagaaaaggccacaaggcaccgtcaaggccttggactcacacgtcacgtgtgaggtctacggtggcacgggtcattctgggaatgactgcccagaaacccgtgaggaggcgatgtacatgggcaacaacaacgggtatcgtccacaaggaggtcaagggaggaaccaaccacgcccatattatcaaggagctcagttggcatctttagtccttgcaaatgaaactgggaggattccggggcaacctgactcctccattgaaaatgttaaggcaatcacgacgaggggaggaactgataggatgtcaaaagaagcgtcatctagtgactcggctgacaaagaggttcagccagagaagacagtgccgcatgagtattgcgacacacggttgctgccattccctcagcggagtagaaaaccgtcagtggacgagcagttcgctcgttttgttgaatgccgacatacgcccgttgtctcaaggacatactcaacaaacaagagaccgctcccaacaacggaggtggtcaagctgacggaacaatgcagcgacctgatactccacaagctcgcggagaagaagaaagatccggggtgtcctacgatcacctgctcgatcggggcacaacaattcgaccaggccttgtgcgaccttggagccaatgtcagcatcatgccaaaagacgtttccaacaaacttaacttcacggtgttgtcactaacaccgatatgcctccaactggctgactcgtcagtctgttacctggcagggatagcggaggatgtgccagtcaagatacgggatttcttcattccggttgactttgtggtgctggacatgcacacagggaaggagacgctgctcatcctggggcatccgttccttagcaccgtaggagccaacattgacgtgggaacggggagtatccgtttccatatcaacgggaaggaggaaaggagaaggaaacaacgatgccaggaaccgttattgaaggacaccggtaaaatcacctgtaccggccaagaagttagagcagccggctcaaaagaagccgtcttccgcaccgaaatcaaagaaggtgtggaaggaaaagccaaagacgcccgctccatcacctccggagacgggtggaaaatccgcgcactgaaccgaaagaaggtacggtcctacacgtcggacctaaaacgacgcgatcttcgccaacagtggggccggctgggcccaccaggggttcggccgaacaccctggttcggcggaaccggccaggcaatggctccctgccactttttgcaagaatgaggaggcgattgtctcgtctgttcaaggggtccggctcttcatcaagtcatcatgacaggtccagtactcgttcatcagctgatgtctcgatggaagacggcgaagctccgcgacgactcctgaacgacaccgacctcgaccttgtcagtgatcgggagagacaagcctactacatgctgagcgaccgggagtatgctcacacgcgagaatactcaccggagttgctgaaaaagatagaaatagaagatggtatttcttttcgctttttccatgaggagttcacgctcacatggaagggcttaagtacacttcttagctttctcgattcctgtaagatcgatatccagaaaggaatttcagggttcgagaaaaataggttttgggaagatatttctagtgctccaatttgcaagaaacctagaacggatgatatccataatcctacacttaggctcatgcacaaatggattgctatgactttgtttcctagaggtgatctgagacccattaggggagatgaattaattatcatgtttgccatgaccatagaagaatatcgtgcaggcagaacatacagggagacgcgcaacatgacaaggaacgaacgagaaagttcatcatcctcaacacccgtgcagatgtatgaggcaggggagatccagtacaacctcacggaacacatagctcagacacaagaatggcaacaatctgctgatgcccagttcaccaacatcaacaacatgatgcagcaacagcatgatgaccttcaagcgtactttcgctttcaggggttcaatccttatcaaggaccctga

SEQ ID NO: 29803 - DNA, 5352 bp, Oryza sativa
  Clone ID: PAT_MRT4530_3426C.1
atggccggtcacccacccaaccaccgcggagaaggcatgatcgactttgtggcagagctggcacgcatgacactggtggtgggctaccccaacgcgccagagtacacgacgattccgccgctcagtggcgagcttcctcaccgtgtccgcttggaggtccatggctacgtggggacttgcctcgctaacatggcggtcgaggcatgtggaggcacagcagatcatgcctgtcaggaggcagcctacttgatgatggccagactacgggagcgccacaactacatcttccacgacacggcgtaccgctaccacccccgtcgagccaacggtgatggcgtcagctccttccgtccgacagccggcgagaacgacaccacatttggtcacatgtgtgctgtgatgaggggattggacaggatgcactcggacctgcacaaggcgaccaaggccttgaacgatgggaagctcatgaggatcgtcgctctgaaggacgagatagcgcgcctgaagaaggagaacgctcagctaaagggtcttccagcgccaggaggagtccggatccgcactacgccccgcaagacgacgacggcacccgtgcgcatccagcttgcgcccaggaacccacctccaccagcagctcccgcagcacctccagttccgcccgcagctccggcagttcctgcagctccagctccagctccagctccagctcccgcgttcgctctctccttcgctccagcatcagccgccagaggtccagccagtggcaccggaggttgttccctccagatggtctacaccaggactggtagccgcgcaacaggcgaggacagcaacggcgaagaacgcgctgatggtgtgcaccctagcagtgattccggcaatggtccgcccccgcttcccgagaatccgacgctagcccaagttatggcacatcagactcagatgatggcggccatgatgcagcagatgcagcagcagcaccagcagatgcaccagaggatgctgcagcacgccgaacagcagcaccagcagcttggtccccctccccctcagtccaagttgccagagtttctacgcgtcaggccacccaccttctccagcaccaccaaccctatggaggcaaatgactggctccatgcgatagagaagaagctgaatctcctgcagtgcaatgatcaggagaaggtcgctttcgccacgcaccagcttcagggtcctgcgtcagcttggtgggacaaccacatggccacccgcccaccgggtactgaagtcacatgggcagagttctgccgtagcttcaggaaggcacaggtgccagatggggtcgtggcgcaaaagaagagggaatttcgtgcactccatcagggcaaccggactgtgacagagtacctccacgagttcaatcgcctcgcgcgatatgcaccagaggatgtccgcaccgacgccgagaagcaggagaagttcatggcgggtctggatgatgagctgaccaaccaactgatatctggggactacgccgactttgagaggctagttgacaaggcaattcgtcaggaggaccaacgcaacaagatggacaggaagaggaaggccgctcagttcagggcacatcagggaagtcaccagaggccgcgcttcacttccggacagcagggtggacctaccaccatgatcgtccgccagcaccgcccgttcaaccctagcaacttcccccagggcgccagtggcagtcagaaccaccatggaggtcagcccaaccgcggtgcagctccacgcccaccaatggcaccggcacagtcaggccagcccgcgcaagccaagaaggagacgggagcaaaaccagggtcctgcttcaactgtggcgagcttggccatttcgctgacaaatgcccgaagcccaggcgtgccgggccaaggtttatccaggctcgtgtcaaccacgcatctgcggaggaggcacaagcagcaccagaggtcgtactgggtacgttccctgttaactcaatccctgcaacagtactttttgattctggtgcgacgcattctttcatttcaaagaaatttgtcgggatgcatgggttaattagagaggaacttagcacaccaatgcgggttcataccccaggaaatagctctacttcggttcaattcagcccttctataacaatagaaattcaaaggtcactatttctagccaacctcattcttctcgaatccaaagacctagatgtcattcttgggatggattggctgaccaagtttaagggggtcatcgattgtgcgaatcgcaccgtcaccttgaccaacgagaagagagaaaccgtggtgtacaaatctctagtctcgccaaagaaaggggtctcgttgaatcagattgagacggaaatcccagtggacaccgtagagaagaacttgagaaaattggaagatatacccataatctgcgagtatccagaagtgttccccgaagacctcactaccatgccacccaagagagagattgaattccggattgacttggcaccgggaactgctccaatctataagagaccgtacagaatggcggccaacgaattagcagaggttaagaagcaagttgatgagcagctgcagaaagggtacatacgaccaagcacttcaccttggggcgctccggtcatttttgtggagaaaaaggataagacgaagaggatgtgcgtcgattattgcgcacttaacgaggtcacaatcaagaataaatatcctttaccgcggatcgatgatttgtttgatcaactgaaaggagctagagtgttttctaagatagacctgcgatcaggctaccaccagttgagaattcgggaagaggatatcccgaagacggccttcaccactcggtacgggctatatgagtgcacggttatgtctttcggacttaccaacgcacccgcattcttcatgaatctgatgaacaaagtgttcatggaatttctggacaagtttgttgtggtgttcatcgacgacattcttatctattcaaagtccgaagaagaacatgaacaacatctccgtctagtactcgagaagttgaaggaacaccagctatatgccaagttcagcaagtgtgacttctggttgacggaagtcaaatttctgggccatgtcattacagctcagggtgtggcagttgatccatcgaacgtggagtcagttaccaaatggaccccacctaagaccgtgtcgcagattcggagttttcttggacttgcgggttattaccgccgattcattgaaaatttctccaggatcgcccgacccatgactcagttgcttaagaaggatgagaagtttaaatggacagctgagtgcgataagagcttcgaggagctcaagcagaaattagtatccgcaccagttttgattctgcccgacccgatgaaagacttccaagtctattgtgatgcatcccatcacggacttggatgtgtcctaatgcaagagggcagagtggttgcgtatgcctcgcggcagttgcgtccacacgaaggaaattatcccactcatgacttggaattggcagcagtggttcatgctttgaagatctggaggcactatctgattggaaaccgctgcgaagtatatacggaccataagagtctgaaatacatcttcacccaaccggacctaaaccttcgacaacgaagatggttggagctaatcaaagactatgacatgagtattcactaccacccgggtaaagccaatgtggtggcagacgctttaagccggaaaagttactgcactgccctatgcgtcgagggcatgtgtgaggaattgcggcaggagtttgaacatctcaacgtgggaattgttgaacacgggttcgtagccgctctggaggcacggcctacgctcgtggatcaagttagagccgctcaagtaaatgatccggaaatagcagagctgaaaaagaacatgagagtcggaaaggctcgggatttccttgaggatgagcatggcacaatctggattggagaaagattgtgtgtacctgacgacaaggaattgaaggatctgatactcaccgaggctcattagacccagtactccattcacccaggcagcactaaaatgtatcaagacctcaaagaaaagttttggtgggtcagcatgaggagagaaatagcggaattcgtcgcactctgtgacgtttgccaacgagtgaaggcagagcaccaaagacccgcaggtttactccaacctcttcaaatcccggaatggaaatgggaggagattggaatggactttataacgggactgccccggacatcatcgggacatgattcaatctgggtagtcgtggatcgactcaccaaggtggctcactttataccagtacataccacctatacgggaaagagattggcagaattgtacctcgcaaggatcatgtgtttgcatggggtacccaagaagatagtatccgaccgaggtagtcagttcacctcaaagttttggcagaaactgcaggaagaaatggggacccgtttaaatttcagcacggcctatcacccgcaaactgatggtcagaccgagcgagtcaatcaaatcttggaagatatgttgagagcttgcgctcttgattttgttggagcttgggacaaaagcttgccatatgcagaattctcgtacaacaacagctaccaggccagtctacagatggcaccgtttgaagctttatacggccggaagtgccgcacacctctcttctgggatcagacaggcgaacgtcaactgttcggaacagaagtattagcggaagcagaagagaaagtcagaatcatcagggaaaggttgaggattgctcagtctcgacagaagagctacgcggataaccgtcgaagggagctcacttttgaggcaggagattacgtgtatcttcgtgtcactccgctccggggagtacaccattttcagacgaaaggcaagttggcaccacgcttcgtaggaccatacaaaattttggaacgaaggggagaagttgcttatcagctagaacttccatccaacatgatcggcatccatgacgtgttccatgtgtcccaattaaagaagtgcttaagggtacctgaagaacaggctgattcggagcacattgatatccaagaggacctaacatatgtggagaagccggttcgtatacttgataccagcgaaaggagaaccagaaacaaggtcacccggttttgccgagttcagtggagtcatcattcagaagaggaagcaacctgggaaagggaagatgagttgaaagccgcccatccgcacctcttcaccagctcctccgaatctcggggccgagattccgtt

SEQ ID NO: 29804 - DNA, 571 bp, Oryza sativa
  Clone ID: PAT_MRT4530_34270C.1
aagtgatcaatctatttctattgagcttaggatcctttgtttggcatgccttcctataaaaggactttggatttgttatttgcaatcaagcaaacaaagaatctctctctctctctctctctctctctctcgcataacagtgcctactcaccttcgtccccccgtcaaccacaactactgcggtactgcctccattcttctgaccacccttgagtgaaacacacgacagtggcacactggcactccataatatcatctatactgttgattacagtgtgacggtgaagtgtgtcagattcccaaaattatgcattgctgtcctaaattgactttgaagcttcaatgctgaacagtaaaatttccatggcgattataaaagggatctgttgttaggatgatttattccttggcctccttttggttttaggcttttagcagtacagtagtggtccctatatatcatgcccaccatcagagctgtgctgtgcaatggtatttccagacagtatattggcttcactggccatattgctgctttgcttgtgacttcattaatataatatacgatttc

SEQ ID NO: 29805 - DNA, 378 bp, Oryza sativa
  Clone ID: PAT_MRT4530_34271C.1
atggcacaattggcccaaatagtttgggcttcgatttggagtccggaggactggccttatgccaacatatcccgagctcacaactgcattacaaaaggaaaacggaagccaggacttggaccattcatcacagagggggtacactttacccacacgacattactaacccggatcacccagcccgtggggatcagccacgtcgggagacctccaagctttcatgacaaggcatttcgaaagccgatacaggtttaccatatgccgacgagaggggtcccagaccaacaacaggctcaagatgttcaaaggtggcttgccttgctcgagatctggagcttgatcctcgaaatcctcgcactgcgggtcttcgggctctga

SEQ ID NO: 29806 - DNA, 509 bp, Oryza sativa
  Clone ID: PAT_MRT4530_34272C.1
cactagctcacacccaacgtaaaatgcctgatccggtgttccacttatccaggcaaggcttcgtattgagacgcaactattccgtcctctaagaattaattaacttggtgcatagttaagcagcatctatccgtatatcgaatgagagctgacttgaaacgggacaccgagccacccggggaactttaagaagccgcaatttctaagtgtaccataataatagcttacgatccccgctgcgcagctgactcgctttagaatacgccgttggtcttcttattggccagtacagccttcttccaaagggagatcacctggcgctggtgttccatatgcctatcgctcgccgaccaggggcaggcgtcaacagcattggcaacagaccctgcgagaagcgcgtttagctcgagcatcacctcgcttacgtagatcacgaagcactgaatgagcgtgcgggtgatgccctggcggatgactacacatagcaccgggactgcctgagcgcctga

SEQ ID NO: 29807 - DNA, 271 bp, Oryza sativa
  Clone ID: PAT_MRT4530_34273C.1
ttgttttttaaagtttggggggtttttttttttattgttttctcatattttttgcaacagctcaagttgtcgacacaattgtccataatgcaaggccacataaggaatgaatacatgcaggggtaaacatacgttacgtgcgaagaccacggactatgagagcaactgactatccaagaacacgaactgagaagctgctgactgggacgctaagttagacccactatacatcggccatttgctggaggaaggaaactcggtcttctgacga

SEQ ID NO: 29808 - DNA, 397 bp, Oryza sativa
  Clone ID: PAT_MRT4530_34274C.1
gggcgggaagccccctttccacaaaagaaagggaagggtacagcatcccaggaccaatagctttatacattgggaaagaaagagaaaacgggatgctaaaggcaaaacaataaattttacatacaattattgggtaacagcaagcctagaagcccatgaatttgcccagaaggggagaagttttacaaaatgcttttcactcaagaaaaaccccatgtccaggggaaacagggcgatgaaagcaactttttgtttgagagagattaagttgtcagcaatccaggctttatcaccttacttgccggggctttggccctttgctccacataggccgatgggaacccgccagcttttcctttggattccccttcaaaccacccattgggagccacctggc

SEQ ID NO: 29809 - DNA, 1023 bp, Oryza sativa
  Clone ID: PAT_MRT4530_34275C.1
atggcttcagaatctctgcaatgcaaggttttggctctcagagtgtccatccactgcgagggatgcaagaagaaggtgaagaaggtgctccagagagttgaaggcgtgtacagatgcgacgtcgatggccggagcaacaaggcgacggtcaccgtcaccggcaaggtcagcgccgacactctcgtaaggaagctgaggagggccgggaagcacgccgagcaatggccggaggagcagcagcagcagcaacccaatggtggtcagtgccaagaagaaaccaagaaccaagctgccgagccgggcatgtccggcgagccggctgagccggagaagccggcgtccggcgacgccgcggagccaagcgacccaaaggtgacgcatgaagaacccaagaaggtcgccggcgagggcgccgccgccgtggcgccggctgaagacggtggcacggagatcaccgacgccaatgtcagtgagagcgccggcgacggcggcggcggcggcggcggcgtcgagacggtcaaggcgcagcagcccagtgagcccaagaggagaaggaagcagcagccgccgcagcagcagaaagaggagaaggcaggtgaagccaccatggccacggcggcggcggcggcggcatcaacgcagggcaaccacacgagccaccacttcccggcggcgccattgcagcagcagccggtgcacgtcatgagctacaacgtggcgcggccgagctcgagcgcggcgtactacgccgccgcgcgtcctgcatccgccgcgaggcctccacctccattgccgccggcgccgccgcaggagcactcgtacgcgtactcgccgtactactcgcagtctcagccgtcgccttaccgctacggcggctactacagctactactactacggcggcggcggcggcggcggtggcggcggccagaggacgccgcagaggagcgcggcctcgccggcgaggaactcctacggcgaccttttcagcgacgacaacgccaactcttgcagcgtcatgtga

SEQ ID NO: 29810 - DNA, 288 bp, Oryza sativa
  Clone ID: PAT_MRT4530_34276C.1
ccctaggaggagaggggacaacatagacgaaacaacagaagacacaacatacaagccaacatacgccaagacaagacgccggatatcgacttcagagataggcacggctagtcccctacggtatctccggataccgataggagagacattgcgctgtctctaatctcgccgggcacggattcgaggaggaagactaccctgttgtcgattacgagtcagaccttcagaccaccatgtcgacaacagttagataggctaccccaaatattgtactggtgtgattatgat

SEQ ID NO: 29811 - DNA, 1191 bp, Oryza sativa
  Clone ID: PAT_MRT4530_34277C.1
atggcaagtctagtctcaacgctgctgttgatgtgcttgatccctctgacgcgcgcgcacgaactccggcgaggtctggagctcgccgacgacgcgacgacggcgcggccaggaggcgtgaccgtgcccgtccacttctcgcaagcgttctacgtggtgaacctcaccatcggcacgccgccgcagcccgtgtcggcgatcatcgacatcggcggggagctcgtctggacgcagtgcgcgcagcactgccgccgctgcttcaagcaggacctgcccctgttcgacacgaacgcgtcgtccacgttccggccggagccgtgcggcgccgccgtgtgcgagtccatcccgacgcgcagctgcgccggggacggcggcggcgcgtgcgggtacgaggcgtccacctcgttcgggcgcaccgtcgggaggatcggcaccgacgccgtcgccatcgggacggcggccacggcgaggctcgccttcgggtgcgccgtggcgagcgagatggacaccatgtggggatcctccgggtccgtcgggctagggaggacgaacctgtcgctcgccgcgcagatgaacgccaccgcgttctcctactgcctggcgccgcccgacaccgggaagagcagcgcgctgttcctcggcgcctccgcgaagctcgccggcgccggaaagggcgccggcacgacgccgttcgtcaagactagcacccctcccaacagtggcttgagccgatcttacctgctgcgtctggaagcgatcagagccggcaacgcgacgatcgccatgccccagagcggcaacaccatcacggtctccaccgccacgccggtcaccgccctggtggacagcgtgtaccgggacctcaggaaggcggtggcggacgccgtcggcgcggcgccggtgccgccgccggtgcagaactacgacctctgcttcccgaaagcgtcggccagcggcggcgcgccggacctcgtgctcgcgttccagggcggcgccgagatgacggtgccggtgtcgagctacctgttcgacgccgggaacgacacggcgtgcgtagcgatcctgggctcgccggcgctgggcggcgtgagcatcctgggaagcttgcagcaggtgaacatccatctcctcttcgacctcgacaaggagacgctctccttcgagcctgcagattgcagtgctctatcctaa

SEQ ID NO: 29812 - DNA, 6779 bp, Oryza sativa
  Clone ID: PAT_MRT4530_34278C.1
agcctgataaaataaattaggggtagattgtagtcaaaataaaccttaccaaattttgacaatttgacaatattgtcaagttttggcagaatttcttatgtatttactaaagttcgattaaaaaaactaaataaatgcacatgtttaacaactttagcaataatagtatttgaaatagcatcaatctgaacagcttgtagatgtcaccatttccgatcttcgtagcctggaacatttttagatagaggccattgcagcctgtaactgaagttctcatctgtatgctgagaagatgtgccaccttgctatccaacagcgtctagcaaacacaactataaacaagcgctcaatcaggtactagcagtcagcagaaggggaggaacctcttgcgatagtacctttctgaaaatattattgatttatctggaatggaggagagcaagtcaaaatactcaccaccttctttgcaacgtcttacaagctgatcattgctgacactgcaggaatataaatgtaggtattcgagggtcgggagccgctggaggagaccctccggaaatttctctatccccgacaaccatcaagatgtaatttcctcagggaagtgaggccatccattccatcgggcagcaatttcagggactcacactttattacgatgaaattccttagacttgccaaatttccaaggtttggaggcagtggtacgaccaaattctggcaactttgaataaacaattcctcgagcgatgcaggcaacttcgggatctccactattccggaacaactagttatatttaattcctctagacaggataaataaaggatttcctcggacaaagaaaaatttattcccaggctggtaaacttaaaaatatgaagggagcggaggcgaatcaagcacctgagctcctccgttggccagcggacaatatcatggcaatctccaatcaccaaatgctccacaaaggcaaagtgtacccatatcccatggtgcaattcagagaaaccggataccgtcgtgaagcatttggggccatgtagattcaaacgccgaagatttacgagattactttctccttggttttgttggtcctccagagaaatcaccatgtttgcgagagaccttacttttaatctcatgagtgatgaccatgagcccagcggcatggtcatagaatcaaagccttctgcgtcgtaactgagataggacaaacttgttacgtgtgcgagcgagctgacagcaatatttgaacatctatctatattcaggtctcttagaaccgggcaatctggaatgcctgcaagtttagggcagtcactgattcttagtatctcgagctggggaagcgtgatgaagctactaggatctcctgaaatattgactgcccatctctccaagtttggtagatttcttaagaacatcttcttaagcttggggaaaatttgcagagaggtaccacatccctcagcttctacatcatcattcgtacataatgtggttaggttatccatgcaagacaaggacaactcctcaagagagaccaagagccatactggtggtagatccttgcatcttggacagtttgaaatgttgagttttgatatacgctggaacgtgtgtgggtctctcatccattcagggatttcaacaccaccatatccatgtaactccaaaactttgaggttactacaataaggtgcaagtgactccaacacacgctcctcgttataggcattgtcattaggcatgcaacgtttttgtcggccccagaaaaacaatacttcacttagatttttcttctggtacatattggcttgttttgccttctcttcgctttttactttgtgcaaattgtacagttccaacctgttggtaaggtgttgcaagtctttgagctcctcaattccacagccttttggcaaatattctagctcatcgcaactattgagcctcagtgattgtaagttatataacatgcatattgaatctggcaatctaacgatactagtctcggaaaggtcgagaaaccgtatatgctttgcatttgtgatagcactattgataacagaacaacgcaatgctctcactgatgccaaattgaattccacactaacattccataatgttgatcgccatgatcggtctatcagagtatgcagagatgatgtgcctttgaataactcggtcatcgtttcttccatttcttcaggaattcgcaagtgacggacatcttttatcgagcctttcagctgatccaactcttttgttgtactagcacattcatcagtaacatcttttgctaggtcatgcattaaatcatgcattttacaaacaattgaatcacagtgataaccgattatgaactcctctttcacgtcttggaggaacgatctccataccaaatcatggaagatcatttctcctttatgtgtcaaatccatgttctcctcttcttgaataaaaccatttgccatccatagttggattagttcgtctttaaccatctcgtaatcttgggggaaaattgcacagaacgcaaagcattgcttcatttcaggtgataggtgtctatagctcaatttcaatatgtccatgacatcatttttaccttggaccctagccccaatattactttctgcaatgacctcccattctgagactgattgctttgaactcataaggccacccatcgtcttgagagcaagaggcacccccctgcatttcttgacaatacgtgtgccgatggaaaccaactttgcttgctcctgtacttgtttaccaaacgctctcttggagaacacctcccacgaatcatcttcattcagacaccgtagctcataaggttcaagtgtgcccattatagatgccactcgttggctccgagttgtgacgacaatgacacttcctgcaccgccaacagagttcagtagtggctttaggtcatcagcccacttgttttcctcgtcgttccatacatcgtcaagaacaagtagaaaccttcttcggccaaaggcttcctcaagttgccgtcgcaacagctcgatggtgttgattagttggcatcttctatttgtagccaattcaacgatggatttcagaagggaaccaacttcaaagttctctgagacacagtgccacatcttcagttggaaatgttcctggacactggggtcattgtatatcagcttggcaagcgtcgtcttgcccaaacctcccatccccacgatggggagaacctgcaaattctgctgatcatgctgatccagcgtcagtttcaccaacacctctttgtcatgctctcgcccaaatatgtctgctgactcgtccagccccgagtgtgttagccgataaggaagctgtggcacctctacgtgttccatcaggccaaacttgttcatctcttcgaccagctcgttgatcttcttgaggacatcacccagcttcctactcatggtaacacggaacaggagtgggctatgcggcgtgaagaagccgagtaccttgcgggtggtggagtcgccgatcttgacctcgcggcgcagcgcctcgtactcgaagtcgtcgaggacgtcgtcggcctcgtaggcgacggccttgaggtccttcatccagcgcttgacggcggggttggtctcgctcttcgcctcggcatcggccagcttgcactggacggccagaagctggcgctccagcttgcggcggtcgccgtcgatgccgcacatgcgagtgacgctctggacgagcgcgtcggccgccttgccggccaccccacgcaccaccgggagaagtagcgattccgccatgttgcgttgcacagcattacagtcacagcatgaggcgttctcagttttgcgatgtaaaactgaaagctcgactatcttttgcctagtgcattcgtgtcgtggaatccaccagtttggttgcagtttcgttgaaagctcctcggccctcgccgtcttattcttatcagcaaaaacacacttttgctgaaacaaactggcacggtagtcggcaatgccttcgggcttcgaatatgaatgatccgaacgacaagccacttgctcatcttctggaaatgtatgcaggccccgtagacctgcaggaaggccagatcgttcctgtctgactccatttgcagaaacagcatgcatggatgactgcccaggtcgaacttcatctgaaaagccattctcctggatgtcttttactttacttgcaattgttacatcaccaatcccctgaacaatgttataaccaacactatcgttgggttttgggatatgtccacccttgtcaaactgatctccaaagctagcagtggtagacccatttctagatggcattacatttgaagatctggaatcaacaacaggtcctctcttttgcctagtgctttgtgccacgggagtgacagcaactgaaggtaacaatgagtaaggagccgaagatgcaacagcggcaattttggcggcagctgtagtagctgaaatgatctgctgtgctccttcccgaaggtgaatgaagtctccttcaatcacaaagagctctggatggctagccacaaaatcatctagcttcccatagtgcttcttatagtcatgccaatgaagaggagccaacattttgccaagcctatttggtagagttgtgctaatcttgattcggccatcaggtccagcaggaactgcacgtacaatgcaagccagaagggatctctcatctagaagggaaggctcctttggtatgcgaggtaagagtgaacccaaaccaccaccagcagaagtatgcgtgtcagtctgattcccaacgttagcagtgaactctgctgcaccacctttcaagtggatttgagtagttgatgcatcaaaatctgaagctttatgctgatgcctagctacctgctcctccgactggttgcccgatgcaactttttcatcctggtgtacatagagctttgatataagatgcttgaattcatttgtttgctcttgatgttcaaattttcgaatagggctgacaattgaagatgaatcctgggccttttgttgctcattgtaaactaaatgttcagttacattggattccacaacctgtaacttttgttcatgagtggattcagaaaccacacttgggaaacgttgttgttgctgttgtttcccatgggctgtagctgtaagatgttctgcacgggttgcctgattctgcttcaaagaaagctcatcattattaccagcagcttgttgcaatgccttctgatctggtggggatgtgtgatagtttgtttcatctggtgtctgagaggcattctgagcttcctgttgattgggccactgcatgtttggttgaattgtcgactgtgactggaaactaccaaactgaggaacagcggagttaggcgatgctaaagatggaggaacaccttgaggatgcatcatataagaatgcatcccggcaatctgcgcagaaggaacaaaaccacctatacccaacagtgatgaaggaacaacaggtacaggagaggcattactgtttccctttgtggaacaatctggaactccattacttttcactgactgactactatctgttgttccactaccatttgcagccatgttgttccctttgttctgaccaagtgttgactcggccgaactctcctgtgcagtttgtgaaccatcttttggtgctccagttcggtctcttaattcatttagttctagctgaagttgttgtatggtatgcagaaaacccctttgcatctcaacatactgttgttggaaactaatccaatattgattgaattgctcagtacgatcacgtaactcagcttgcattgtctgagactgtaaagtatccatttcttgaactcgtgccatccaagcatgagcttccctcaattgttcatctttgtaaataatgttatcttgagcagccctatgctgttcctctaatgcaagcatttggctttccttttctcgcagatgttcttggagatcatggatttgtttaagatgctgtgccctttcagcttcagaattgtcacgttcccttctaaaagttgcaagctcttttgtctgttctctaagaagatcttgatttgcccacaccgtttgatggtcaatcttcaaagcatccagttccctgtccttgtcatccaatttcatttcgagctcaaggatgtacttttcccgttcatgcagttgttccttcagctttgccgcggccgttacatgctccttggcagcagcctcgaagctgcgctgcgcctcgatgatctgcgggtgggcgatgacctgagctcgcagctccatctcaagccgctgaagctcctcccgctgatgcacgacgctctgcaggcgctgctggatgatgtcctcgctgaggcccccgcttccgtcgatggtgatcgagcagtaatcatccagtcttccacccccgtcctcgtacatggctctgtcctcggattgccccatcttgccatgctccccgggatccagcagcagcagcaaccaacggatgggaggggaggggaggggaaccgacgtcggcgccatcgcggcgtccatccctgcgagcggggccacttccccccacaagcgggatcgggatctgggcgacggggggtgctagggttttgggggtccctatctctcccccgcacgcgcggggtcggggtcgaggcggggagcgacgtcgccactcaccgcggtcaagctggagcgcgagcgtggcggtggcggtggcggtggtggtggcgatggctagggtttacggc

SEQ ID NO: 29813 - DNA, 622 bp, Oryza sativa
  Clone ID: PAT_MRT4530_34279C.1
ttttttttttttttttttttaatctggaacactatagaacacacaatctgattaaaaatatcgagtacaataagttaatctgggacaatgtagagcacacaatctggttagaatagaatagcatagcataagtcaatttgatgcaggattcgccgccattgtggagtgagagaaataaaaaaatccaagtgcgaaagcagagtattccatctcaagcataagctagcaagatcagcagcagtcttccggtgaagtgacataaattcttcggtagtacctatacacaaaagctgatgtcatcacgcctaactcctctcactgatgactctctctagaaatccaaagtaaaagaagaaaaaaaaaattagttattgaacaccagagaagaaaagaagaaagcccacgctaaaaaagagataagaatgcagcaattaattattaactgcaattagatgagcatctgaggcaagaaagaagatggcggctacgctccactgctcgatcggatccagaaatccaacacggatcttgggttcagtagtcgggcatgaggtgggagatcttgccctcctcgccgggcatggtggccgtgcggtcggtggcgcgtagccagaggcagacg

SEQ ID NO: 29814 - DNA, 2157 bp, Oryza sativa
  Clone ID: PAT_MRT4530_3427C.1
atggcccttcgtcccctgaaggcctggtgcccgaagcccccaacccccgggaggacccccgaggaccccgtgggaggaggggaggctttggcgagtaatcccaaggcctatggtcctgacatgactcgagaccccccaagggccctcgggcaagggcgccccagatcatctgcccctgacagcacggaccggccccaccaaaaggtgcagcgacccgtctactttgtcagcgaggcactccgagacgcgaagacccgatacccacaggcccaaaagatgctttatgcaatcttaatggcctcaagaaaattccgccactacttccaagcgcatcgggtttccgtagtgacatcctaccctctcggccaaatcttgcacaaccgagagggcaccggtcgggtcgtaaagtgggccctcgagcttgctgagttcgacctgcacttcgaaccacggcacgcgatcaaaagccaggttctggctgacttcatcgtggagtggaccctagtggacgaccctgttccgtccaacgttccctccctccccggagatggagaggacccgaacgccgacattcgtggtgccggagtcacgctgacttcgtcaagaggggacgtcctcaaatacgtcattcggctcgacttccaagccacgaacaacatggcggaatacgaaggactcctcgcggggttgagggcggcggccggaatgggcatccgccgtctcctggtcctaggcgactcccagctggtcgtgaatcaagtatccaaagagtaccagtgcaccgacccacaaatggacgcatatgtccgcgaagtgcggcgcatagaacgccactttgacggactcaagctccgtcacgtgccccgacgcgacaacacagtcgctgatgagttgtcgcgtgtcgtgtcggcacaagccccactccccctggggaccttcgaggaaaaactcgcgcagccgtcggcgcgaccgaaccccccgagggaccccgacaccacgccctccaccccgacccttggcgacctgcgggcctcggggcccgagagggtcggccccgacccccctcgtcaggtcgtttggatgactgacatccgggcgtatctcgacaaaaatactcttcctgaggatcgcgcagaagctgagaagctcgcgcgcatctccaagcggtacgtgctcgtagaagggaccctctaccggtgtgccgccaacgggatactcttgaagtgtgtttctcgggagcaaggcatcaagctcatagccgacacccatcagggtgagtatggggcccattcggcctcacgcactttggtcggtaaagccttccgacaaggtttttactggccgactgcgttgcaagatgcccaagaatgggtccggcggtgcaaggcgtgccagttccacgccaagcaagcccaccagccagcccaagccttgcaggtcatcccactctcttggcctttcgcggtctgggggctagacatccttggaccattcaaagcggctcgaggcgggtatcagcacctgtacgttgccatcgacaagttcaccaagtggcccgaagcttacccggtcgtcaagatcgacaagcattccgccctcaagttcatcaggggcatcacgtctcgattcagagtgcccaaccgtatcattacagataacggcacccagttcactagtgagctgttcggcgactattgcgacaacatgggcatcaaattgtgctttgcctcgcccgcccaccccaagagcaacggccaagtcaagcgagccaacgccgaaatcctcaaaggcctcaagactaagacgtacaacgtcctgaagaaacacggggattcgtggctcgaggagttgcccgccgtgttgtgggcaaatcggaccactccaagtcgcgccacgggggaaacgccctttttcctagtgtatggcgccgaggcggtcctgccttcggagctttccctgggatcacctcgcgttgcgctgtacgatgaggccaaccaggatgatcttcgccgcgacgacctcgactatcttgaagagcggagaaggcgcgcggccctacgtgcggcgcgctaccaacaaagcctgcggcgctaccatcagcgccacgtccgggcccggtcactgcaagttggcgacctcatcctacaccacgtgtag

SEQ ID NO: 29815 - DNA, 598 bp, Oryza sativa
  Clone ID: PAT_MRT4530_34280C.1
cccacgcgtccgcccacgcgtccggttagattgccagattcaatatgcatgttatataacttacaatcactgaggctcaatagttgcgatgagctagaatatttgccaaaaggtatgagaacaatgaggaagcttatccatatttatctatattggtgtgacagtttgcgacggatgcccccaaatatcggtctgctgaataatcttcgtactctgacaacatatgttgtggacactgaagcaggctgtggaattgaggagctcaaagacttgcaacaccttaccaacaggttggaactgtacaatttgcacaaagtaaaaagcgaagagaaggcaaaacaagccaatatgtaccagaagaaaaatctaagtgaagtattgtttttctggggccgacaaaaacgttgcatgcctaatgacaatgcctataacgaggagcgtgtgttggagtcacttgcaccttattgtagtaacctcaaagttttggagttacatggatatggtgggtgttggaatccctgaatggatgagagacccacacacgttccaacgtatatcaaaactcaacatttcaaactgtccaagatgcaaggatcta

SEQ ID NO: 29816 - DNA, 690 bp, Oryza sativa
  Clone ID: PAT_MRT4530_34281C.1
ccggccggggcccacgatcgtctttactaacctgcagctcaacagaaactcctattcacgatgggtagagttattcgcaaccagcgtaagggtcgtggatccatcttcacggccaacacgcgcctgaacaaggctcctgccaagtttagaaacctcgattatgccgagcgccacggctaccttcgaggtgtcgtccgcgagatcgtccacgatgctggtcgtggtgcccctctcgccaaggtcgtcttccgtcacccctaccgattcaagcaggttaccgagaccttcatcgccaacgaaggcatgtacaccggccagttcatctacgccggaaagaaggctgccctgaccgtcggcaacgtcctccccctcggtgagatgcctgagggtaccgtcgtctccaacgtcgaggagaagatcggtgaccgtggtactctgggccgaacctccggcaactacatcaccattgtcggccacaaccctgatgagggcaagacccgcatcaagctcccctctggcgccaagaaggtcgtccactccggatcccgaggaatgatcggtatcgtcgctggtggtggccgaactgacaagcccctcctcaaggcttctcgtgccaagcacaagttcgctgtcaagcgtaacagctggcccaagactcgtggtgttgccatgaaccccgtcgaccatccc

SEQ ID NO: 29817 - DNA, 5498 bp, Oryza sativa
  unsure (1)..(5498): unsure at all n locations
  Clone ID: PAT_MRT4530_34282C.1
gttctcaaaagctagaaattcagtagaatcacttttcatcaaaactaagaaacgagaagggcgggtgaggaaaacagtattctgctatnttcataatctgagcatgaacactctattaagctttcagaaataaaggtacaatcggctaggctattacaaaactgacaaggtataacggatccatcccttgcacatgaattacgactgggcataggttctgcactaattcaacttctcaattaattcattgattttatcttcgcggttccctgagtcaccaccatccttgaagggtttcttcttcatctgcaacctcctctctctaatgataaccatcttcgcccctttcccaatgcaaggatggcaccaggtaaggcatattcccatggtgaagaacaccaatctggtcgaggaaccacgccttgaagcgggcggagtcggcgagtgctcggatccccgtcagcctctcgaacaccggcgccatccaccccgccgcctcctccgccgctttctgtcgttgactcagtttaacatgcggtgccaagccgaaatactctccaccctcttggaagcgtcttaccaaaaatggacagtcacgtatcatcagggatttcagggccgggagacgtcgaacgagaccctcagggaacttcttttttttttttttttttactaaaaaacgctggtactgtatagatgctggctaaaattcaacagtttaaaatgtggcgtaacaccatggaagggcacagatgctatcattcgggtgccccacgccacggcacgcaggcatagacaagttacaatggttgcaaaacttcctcagtattttctgatcgggaactagtttcagtacaacttgccaaaacatggcccaatacaggcgctgcgaaaagcaattggtgcggaattaaattcacaacaattcattctggtcatcttcgacttcaacccttttaaaccttaaaccaaaacatagcttcacatgatttgctcactgcccttcaaaccaactggaccgaacgacaagccacttgctcatcttctggaaatgtatgcaggccccgtagaccttccctgttgcttcccaccataaccatgcctggtattacctgcaggaaggccagatcgttcctgtctgactccatttgcagaaacagcatgcatggatgactgcccaggtcgaacttcatctgaaaagccatgcacctctaggtctgtgactcaatcatcccatcgggcagcctctcatgcctgaaccatgttatccatgaaatacctgagtctgggcagatttcccaggtgcgaaggcagtgccactaaacttcggcaatgtgaaacttccaaattcacaagtgacgtcggcatcttgggtatgtccagtaaattgtcacaatgcgatacttcaaacctctctagttggggcagcggaagggcttcatccgatgattcccctccaacttaaaaagatgtcgaaggcaaatctagcaacggtgctcctccattggccatggagatgcccaacaagggtccaaaggcatcctcatagagtcaatatcacctgctttgtaataaaggtcagacaatgatgtgagatgtgaaagtgagaaaattgagaggctgtgacaccccagagcctccagccttttgagagccgggctttccggaacacttgaaattttcatgcaactcttcaattctaggctttcaagctccgggaaaatgatcacatcattattctccccctcactgttttctgcccacctctccaagttcggtaaaacaaataatatcaactccttcaactttggaaataactgcactggggtgttcccatcaatgttcttacataatgagatcaaactagtcatataagacaaggacaaatactcaagagaggctgatagccacactgttggaatgtccttacatcttggacatcgttcaataatgagcctttttaagcaccggaacatttgagggtctctcatccacactgaggctttacttccaccataaccatataaatccaaaattttaagcttgctgtgaggtttaagagattccaacatttcttcctcattattgtctttgtctccaggcatgtaggatgacatgcagccccaaaataatcgtaatatactcagctcttgtttctgatggagattggcttctttcgcgttcgatgtactctttatttttctcaaattgtacagccccaacatattggtaaggtatctcaactgtttgagctcctcaattcccctgccagcatcggtgtccacgacaaacgttgttagtgtcaatagattgttcagtagactaaaatttgggggcatccgttttaatctatcgcatcccaacagataaaggtggttgagtttccttagatttgccatgccttcaggtaaacattctagatagctgcagccattgagcctcagtgattgtaagttatacaatgcacatattgaatctggcagtctatgtatattagacctttctaagaaaaatgacctcagttccaacacttcaagacccctgtataatggtaattccatcaacaaagtgcggagagatgttgtacctttgaatgatccactgatttgttttaattcaccttctgatatttgcacatgccaaacatcttcagatggtgctttctgttgaatcagttcttctgtagttgcacattcacttgaaacgtcttttgctaagtcatgcattaaatcatgcattttacatacaacaaagtcataatctaagcttctgaataatattgttttaacatcttgaagaaatgatctccaaaccaactcattgaaaacaaactcgcctttttgtgacaactcaattgtgccctcttcttgaataaaaccatttgctatccatagttggatcaacatgtccttctccatctcatagtccttgcagaaaattgcacagaaggtgaagcattgtttcatttcagatggcaagtgtttgtagctcaattttagtattgataagatttcgtcttttcctttgacactatcaccaatattacttcttgcgatggcttcccattccttgacttggtgtttggaactcattagaccgcccatcgtcttcagagcaagtggcagccccttgcatttatgtacaatacatttgccaatggtgaccaaatcttcttgctcttgtacgtctctaccaaacgctctcttcgagaacaattcccatgattcatcttcacttagacatgctggcttatagggttgaagggtttccattatagatgccacccgccgattgcgagttgtgatgactataatgctccctggacccccgacagaattcagaagtggccttaggtgttcattccacttgttgtcgtcctcattccatacatcatcaagaacaagtagaaaccttttcctgtcaatgactccttcaagtcgccttcgcaacaactcaattgagtcaggtaggtcacattttctatttgtagccaactcaatgatggatttcacaatagaaataggttcaaagttctccgaaacacagtgccacatcttcagttggaaatgtttctggacaatcggatcgttgtacaccatcttcgcaagcgttgtcttgcccaaaccgcccatccccacgatggggagaacctgcaaattctgttgatcatgctgatccagcatcagtttaaccaacacctccttgtcatgctctcgcccaaatatgtctgctgactcgtccagccccgagtgtgttagccgataaggaagctgtggcgcctctgtgtgctccatcaggccaaacttgttcatctcttcaaccagatcgttgatcttcttgaggacatcgcccagcttcctactcatggtaacacggaacaggagtgggctatgcggcgtgaagtagccgagtaccttgcgggtggtggagtcgccgatcttgacctcgcggcgcagagcctcgtactcgaagtcgtcgaggacgtcgtcggcctcgtaggcgacagccttgaggtccttcatccagcgcttgacggcggggttggtctcgcttagggttgtaagtggacccttagtctcgctcttcgccttggcatcggccagcttgcactggacggccagaagctggcgctccagcttgcggcggtcgccgtcgacgccgcacacgcgcgtgacgctctggacgagcgcgttcgccgccttgccagccaccccgcgcaccaccgggaagcgattccgccatgttgcgttctcagcaccatccttgaagggtttcttcttcatctgcaattttctttttcttagtgctttgttctatgtttttgttaggaaatcagattctcaattatcaaattctgagcatgaccacactattaagttttcagaaataaggggtagctggaatgatctgctgtaaacctgccagggggtaaaggatgtctccttcactcataaagagctctggacggcgatcctcaaaatcacaactcctcccatagtgctttgaagatgccaacgcagatgacccaacattcagcaaagtctaagtgttagagttgtgctaatcttgatctgtctagaaggtccagcaggaactgcacgagcaatgcaagccctaagcgatcgtctctagaagggaggctcctttggtatgcgaggtatgacaaacatctgatccccaccagcagaagtatgcgtgtcatctgattcccaacgttagcagtgaactctgctgccctcctgtcacctggagttgagtcgttgaagcatgaaaatttgaagctttctgatgtgggaacccataagtcacctccgaattgtgggccgatgcgatttcatgcacaagatcttccaaacatatgatgccatattctcccagagccttctcaatgagatcattgctggtaagagggaaaggttccttgtccaggaacccacggcccttcttgtaaataagatccttcacattcttcaaatttgggaacccataagtgataaacggctccacaacaagaagcctcttcatagtagcgtcagtggccttgaggaacacgccggtgaggacctgcgtcagccgcagcttgcgcaaaatcctcctcatgtgtggatgcaagtccattgtgccagggatgcgaatcgcgaagacgagcttggagttgagggtctcggcgggggggagcttgcggaccttgaggcgggtcttcatccggacgaagtcgagctccttgttgcggaactccctgacgaagtcctcgggcctcttgatggcgcccttgccgtcgtcgcggcggcgctgcctcttggccgccttccgctcccggttcttgaccgcccagtcctcgttcaccttccgcttcttcagcaccgtctcccgcacgtacggcagctgctgcgtcccctcctccgccatcatcgtcgccgctatctctacgcaagcttcgccctggacgacggcggcggcggcggaacgacgcgagggagaagggtttccccggccgg

SEQ ID NO: 29818 - DNA, 357 bp, Oryza sativa
  Clone ID: PAT_MRT4530_34283C.1
gcccgctgttcgtgtccatgttcagcccgatgatgctgctggtcgtggtcattgtcggctgcacgatcctctgcgagaagatacacgtgagcagcgcgatcgggtgcgcgctgatcgtcgccctgctgtacatggtgctgtgcatgaaggcgagggagatgggctcgccatcggacctcgactgcgacctcgacggcggcggcgtggtggagctgaacgggaaggtcaacgacaccggcacgaccttgccgatgatctggaccaccaccaacaagcacgagacgacccggaacgggtgcagcaactgatgctgatggcgcacctgagcatatgcatggcggatcacctgattatata

SEQ ID NO: 29819 - DNA, 288 bp, Oryza sativa
  Clone ID: PAT_MRT4530_34284C.1
gtaccatggacctgtgtggaggtgtgaaactggtcgatgggtgtggccccaatattgggcctgcccaattgtcccgagatttagaagaacttgcccctgttccatgatattctgtgcccccccctcgggggatttttaaggacccaatgcccggaatttgatcaggcccaacccagacaaccaacagttccccttggaaacgatggtggtgttgtcccccgggagagccatccttttgcccattacccgatgacaccagtggtcgatatttgctacgagtttaaaaaa

SEQ ID NO: 29820 - DNA, 465 bp, Oryza sativa
  Clone ID: PAT_MRT4530_34285C.1
atggcagtgactcgggtggtggtccacggtggactgggtccacggaccgggaaaggggtggcgcaccacgtggtgcacacgtggcgccgacgtggcgcacacgtggcggccacggtgtcagccacgccggtgccgggattggatgggccccgatctaccgcccggtcgatcggacgggggaggcggctcgcgggcacggctcaagctggcccgacgcccatggcacgcggcggtgcggctcgacgcagcggcggcgaccggccggcggcggagggcagcggcgtcgcggtgacacggacggcggtagcggcggctaagcggctggaggagggctcaccggcgcacagtgcggagtgggttccggtggcggaatccgatgggagaggggtggacggggtggcccgcacgatggcgaatgcgatggcgtcgacggcgtggctcggcgcagcggctagcgacggctag

SEQ ID NO: 29821 - DNA, 1918 bp, Oryza sativa
  Clone ID: PAT_MRT4530_34286C.1
ccggccgggacgtccgcacgcccgccgaccacctacacgacgcctttccgctcgcctttcctccccaaaaacgcggcacgaagcgatccttccttccttgtttcccacgcgtccgcacgaagaaacacgtacgaaatccgcagggcagcttagcgttttcttcttctccgatccgatcggattcccctgcccccgatcgcgggagctgccatggcagaaggcgacgcctacgccgcctcggccgcggcctccgcggcgtcgccgcggacccccgcgccgccggagacgccgtcgacgcagaagaggaggcagcgcgggctcgtgtcgcgggtgtggaaggggatattcgggcggcgcgaggacgtcgagaagctgctccaggcgctctccaaggaggaggaggccgtgcgctcccgcctccgccgccgcgcccgcgcctcccgccagtccgcccacaacgtcctcgccatcgccgccgcgctcgagattgcggctgttggatatgcgattatgactacaagatcaccggacctcagctggcagatgagagcaacccgggtgctgcccatgttcctgattcctgctttagctgctctcatttactcaactattacaagcgtcacgaaaatgcttgacaacagagatcaacatactcttgaaaacctccgtgctgaaagacaggctaagattgatgagttgaaggagagaacgaattactacactactcaacaacttatacagagatatgatcttgatcctgctgcaaaagctgctgcagcaactgttttggcatctaaactgggtgctgattctggattgagagtcttcttgggagatgagtcgaatagggatgcaacattgagtaaaagtaatgatgcccaaactactggaccgaggcaaagaaaaccaggacacttgagcaacagcactggaaggacatacggccctgagtcattaggcggttcatatgcctatgatggtaatgaaggtgtcaccactccaaatcagaggactgttgaccacttcagaggtccagctggtcttgcaaggaaagaggactttgcattcattacatattactgcccgcactgtaatgccctcaatggaccacggcagcatgatgagcatgaaatggtatctcctggtaaggagactcctatttctcattccgatggcagcattggccacgccggtgcaaaccttgcaaactcaggtgccggcagccctatcgtgaaagacttacccacggttgaagaattacctgcggaaagttctgttgctactaacttaccatctgccgaagaactacctgcagaaagtcctattgccaacaacttaccagcagttgaagaattagctgcagagagtcctgttgccagtagcacacctgctattgaagaactacctgcagaaggtaccgtggagaaggcaagtattgatcatcctgccagttgatcttttgtaaagtaactgcatatgtatttgttcatggagggcttttaaatggctcacggtggttttatagtttgctgcactgctcgttgctcagaaagcacacagcttctgttccaaacttccaatgttttgtgcttgctacatagcatatgcatgttgcaggatagtggttttcactggtagtgctagataggatgttttccttgtgtttcgggcacggggcaaggctcatttttcaagtccagtaacagatcttgattaaaggggtgttcttgcatttttcttttctggagtgtatatgattgtacagtagtactatttgaggtgcgatgaggggtcattttcggctttttaataatggattataatttttgttgtacagttgcagtatttactatgtcaacaacacgcaacattggtttctgttcaaaaaaaaaaaaaaaaaacctgcagcccggggatc

SEQ ID NO: 29822 - DNA, 511 bp, Oryza sativa
  Clone ID: PAT_MRT4530_34287C.1
ccggccgggctctctctcttctcgtcgtgcgcctcctccccgcggcgacggcttccgcgagccgcgtaaaccctaaccctaaatcggtgagcgaagcagcggcagcggcagaggcggcggcggaggaggaaggtggcgatggcggcgaagcgggagctctcgagcaccctcaggaacctcaagtttatgcagcgggcggctgttgcacagaaggttgaggagaagcccaaggttgaggcggcggcggcggaggaggaggaggtggtgacggtgcctagcggaggtgttggctcgtcggttaaagtcgctcggaagtggtatggggattgaaaggctcgtttttttaatcgtttatgctgagttggtgtttttagcatggtattagagattttgactctagggtagcatgggatgttttgtatgctatataacaaggtgcgatgaagaattggagattatgtttgagttaagctgaatctgttagacgaaaaaaaaaaaaaaaaaagcggcc

SEQ ID NO: 29823 - DNA, 309 bp, Oryza sativa
  unsure (1)..(309): unsure at all n locations
  Clone ID: PAT_MRT4530_34288C.1
atatatttttttaaataaaccnccataatcccaggatcgggggcatttatatatacgcaaaactttccaataaccaaatctaatcaaaatccacacatacaagtattatacagatttttctacacatagatttattncacaacctaaacactagttatttatatcaaaccctctacaaaacattcatttcatcaaatacattattaaccacttattttctcaacttaaacataattaattcactatacttttaactttttccatccatctcaacctttaaactttactacccaacttctacatttccct

SEQ ID NO: 29824 - DNA, 3108 bp, Oryza sativa
  Clone ID: PAT_MRT4530_34289C.1
tccccgggctgcaggtttttttttttttttttttttttttggtctttctggcagcatttcatctattaattataagttctacaatgatatacataaattcagctttccgtacaggggttggctatatgaagactactaaaagaagctacgttcacaaagaaccaaatctgcacaaggtattcagctgccaacaatgtccatggcaagtcaacatctctgaaatctaactagtagctggccttattcagttctctgtggtatgtcttccaacctaatagaactgggacctatttttaggtgccaaaaatactccagaatgtccaaggtaccacagcaagcggtacattgaacaaaccaaataaataaaacaacaaaaatcgattacaattgcgacaaacatcatacctagcgacgtgggtacagatcccaacctaagtctggctcttttcgcttcaatactggcaccccagagctgccaccctgtgacatgttacccatgcgctcgtccacaaacatggtctgaccttggaaagacacaggccaatagcttgcaccttccctacgtgcaccttcatatgaccttccatagttgagatccatgctgggatgaaaatagctcaattcactagagggtgggattgctctgctgccgagagatggatgagatgtgcccactcctaagtttggcaccgttggtacaccgaaacctggcaatggaggtataactggcgtgccctttgcatcaaccatataaggaacagtccctggtgcatagaaaggtgacgggaaagacaaagcagaatgagacgaatagctgacaacactataatcagggggtgtatgcccgtaagattgcatagaccttgcaggatctcttgattccacacttggcccaagaaagttatgctcattttgatggctatgttccttctgtccaagaactattctcttgcccagaattgtcactgcagaatggtctgacacatccctcccagaagtcttgacagaggactcatctgcacctcgtaaaaagccatccacgattggtgtgttgtcattcaagtcaaagttccttactgcaggttgccttgaagatgaagaggaagaagggtgactccaatcgccattacattgttgtcgattccaaaatgatggtacattacttgtggtgattgcagcttcctcatcgtcacatggacaattaaggtcaagttcaaggctattcaggccaacagttgcagaggcatcctttcgcactatgtcagaagaaagcggaaggatggctgctgaaagtggttcaccagcagtagcattgtcactttcagaaacattcaagtcaaacagagcattgcctgttctctgtgaagaggcagatactgatttctctccatcgggagtacaccgaggagaagccggtcgaaaagcactggtggctgcagaacctttccatcccagttcaccttcaaagtgcaatcgagctgggaatacagatgaggttcttgaggcagccacagctataggtgttgataaattaattgaattactaagcgtggacttcgtatgacaatcaacttcctcagtgcactggttttcattaagatcaatgcctcccagcttcatgcttcgcgtatgttttctactgaaagtaccactgtcatccgtgatgcctgaaccatcctccttcatagatgaggaacttcctgaatcctcccctgtagtggaggatttattatcattatccggttcatccatgggcggttcaggctgccggcgtgcttctaagtcgggactatcagaccgtctggaattaatatcaggggaaccacaaaatggtcccctgtagtcaatgacttcccgctctacctcaatagcaaccagacgagctacttccagtgcatcagtatcatcatactcagctaatggtgttgatgtatctcccttttctgctttcgatttcttgtctgctgcctttgaggaatccccaaagctcgtcatgcatctcttcaacctcaattcattgacagcgccctttacatctgtatcagatgatgatgtaggcccctcctctttccttgtactttcatcatctgatgaatcttgcatgtcaaggggggctaggtcccagcctcccactgtattcttctcagagtgtggcatatcttccaaaaaggattcacctttcttgatatccacgctaatagaaacattttggtcctgcacatccattttgttactaacaaatggattttctggattattagtcccagaagacttggcctctgcagttccatctggcagtgagacttgtgcagcaccactttttgcatcattgttagcagaagactcctccgtcacaggtacattttctaaaccattacgacatgcaagtgatggtactgaggggttcccatcaccaataatggcatttccatcggagtttgggggtatcatcaccagcgactgcttcactatatcacagttatcattggtctgggagtgattaggcaaaggaacactcgagcagaccatcacctcagacttcgacttatctcctgcaattgcagcttcatttgccccaccagactcaggtttaggttctgggagtttgagttgatctgggttccgctcttttgctaccatgtcatggacatcagaagtgcatttcggtacacttctccatttatgacaaagcactcctgcctttttgttgatatcagtattgctatgagaaagtagatgctcaacagtatgcagaacaccacaagaagtaatttgtgcattttcaactggaagacactccagtgcagacaatactgcaactattaggtcttctgctgcattgctgatatcctcaccacagttctgagcatcctgaagccattgatggaggaaaccgacaccatttagctgaacaaaatgctgaagacactcttcatttttggtggacgctagagtgtttgcagccgttgcacactgccttatcaagtcagcggtgttaagttcagcagcacttttgagcttcttgatctcagataccagttctccaattcgtgctacagttgaaatgccatccttcatctcagtaagagtaaagaaatcctcaagcat

SEQ ID NO: 29825 - DNA, 382 bp, Oryza sativa
  Clone ID: PAT_MRT4530_3428C.1
cagacgcgagagcggctccacgaggcccgatcctatctggaggactaccacctggttgagaagctggtcaacttcgacaggaagcgtatccctgagcgcgtggagcacgcccaaatgggcagcagcaagggctttttccaggttacccacgacattacccaccttaactgggccgaattccttcgggccccgggcgtccagaccccggtcatcgtgcgcttcttcacacgtattcacgatcgcggcaggccggagaccctcccgaaacactgtggcttaaacatcaaggtctacacccgggagggcaaattggaccttgtcggcaacaactttcccgttttatttatacacgacggcatgaagttcccggacatggtgcact

SEQ ID NO: 29826 - DNA, 120 bp, Oryza sativa
  Clone ID: PAT_MRT4530_34290C.1
ttgttccggacagaagcttgttcacattggagacaatgcagatgcttacaaacgacaccagaaaggtcttgatgtggttcttggagatgaaagtgttgcagtgattcttgatgacactga

SEQ ID NO: 29827 - DNA, 435 bp, Oryza sativa
  Clone ID: PAT_MRT4530_34291C.1
atgccgccgggcggtggaggctgcggcggagcggacccatcaccggccaccgtggggaggccgaatccgtcgcctgccaccacggggaggctggatccatcgcctgccaccgcggggacgacgatggtgggcctcgggcaaggcggcgatgacgacggtggtgacggtggcgatgccggtggtgaaggcgtgacagcggcggcggtcgctggattaggccgaatggaggaggctggcagcggcaaaggggtgatggcggtggtggtcaacagcagtaaaagggtggtggcggtggccaaggggccagatcacacggtggaagaaggggagcagcggtggaggccgcagcagcggagacgtttgatgacatggatccgagccggcggcagtgacggtggaggggaggaggtggcccgccatgctcgagaccactag

SEQ ID NO: 29828 - DNA, 1014 bp, Oryza sativa
  unsure (1)..(1014): unsure at all n locations
  Clone ID: PAT_MRT4530_34292C.1
tccagctctcctccgcaccgcagtccgcaaaccccagtttctcaagcatcgaagaatggaaagaggagatggcgctatacccttccgcgccaccaacatcgccgccgccgccggcacgcccacctctgcttctactgcgggccgcccccagcaaggggatagggaaaatgctgtcagtgctgagattgagagggttaacaaactgccagccaatagttcctatgccatacaccgcttgaaggttctaaacaagcttcgccatctattatctatcaagagaacaacatctcaagatgaggagcttgaacttctttttgcaagcctttcaatttaaacactatcggactatcctgtatcctccatatgttacatatggtagctgggtgctccgttttggcatttctgctgtccgtcgaacatgtttccagtacggttttctgaagttattggaaatcacccttctattttgtagaactttatgagtggatggtgttgaaactatgatgtatggagtatatgatcttccgtacgcaaatgtcactcttaaccataacggaacttctataggtctattgtagatgcccaaaactttaaaaattgtatgacattattaggtggtgctatgttggcaatggagcaaacaatctggatttatgctacactttggaagtgtagcataaattcaaaattttcccctncnaatcaatantatctataaaaaatttncctgtcccttcctttttttactaataataactannnnacccttgggggggggccggggcccaaattccccctataggggtggtattgcgccccctactggccggggtttacaaccgtgagacggggaaaactcggggtccccaactataatgtttggcggcaaatccctctttgcccaggtgggggataataaaaaaagcccccccgaatggcccttcccaacattgggccaacctctgagtggaaagggcaccccccttgtgggcgctataatagcccgcggtnggc

SEQ ID NO: 29829 - DNA, 618 bp, Oryza sativa
  Clone ID: PAT_MRT4530_34293C.1
atggaagctgagctcgaggacgacgacgacggcactgttggcggcgatggaagcattgagcttgaaggttgtggcagcacgtccacttcggatcgccattcattcgcatccgacggccgcaactcgttctttgttgttcggtccataatcgcgctcggttcagcccacctggagacgaaaacgaggggaagaaacagcgttgatttgtttgccatcgccgccggccgctcgtccgcgcgccatggtcaccggctgcttgtcgcctccatgtcccttgctcccacgtcctccgagccttctgccctcagcatcgtcgtcgtcgccgcctcctcgtctactttcgacgctgctaagccgtccggttcgggtttgtgcatcgccaagcagtgggagaaggcccaggagctcaaggccgctctgcctcgacctccaactctccaagtcggaggcagcagagctcccgcgagggaaggacgcagggacaagggatgggcaggagctgaggagggcggcgacagagggggctgcctccagtacctgctccacctgtgcccgcaccacgggaggcgacaagcagccgacgaccatggcggacaagcggcggcgatgtcaaaatga

SEQ ID NO: 29830 - DNA, 1474 bp, Oryza sativa
  unsure (1)..(1474): unsure at all n locations
  Clone ID: PAT_MRT4530_34294C.1
acgggccggccggcccaagaaggtggcccagagcggcccaagacgcgcgcgcgcgggagggaggagagagagagccggtggaccgggctcaccatgcgcggccccgggtgggacccgcttgtcagcggttcggttcaccgtgcggagggagtacccgcttcatgcccccaaccgggggagggacccggtgcacgcgcgcggttcgcggtggacgcggatgcagcgggcccacgcgcagcctcacggctcgcggtggaacgcgcgcacggngagggactgaccggngtcggctcgacccggtctaggctgagctggcgccgacgtggcgcctacgtggctgccacgcgggccggcgggaggtagacgacgacccggccgcgaatggacggcgggcggcggcggcgagcggcggagcgaaccacggcgatacgggcaaaagctagcacaccgggcggttgttcgtgatgaggggagacgagccaacggttcggattcgccagagggagttcgacggcggcgaatcgcggcggcgacaaccggcggggagggaagagggaaacgccgacgaggtcacgagggaccgattcccggcggtgagagcatctacgcggtttcgggaactcgatgctagcgtcggattggacggagctacaccgagcaaggctggcgacgtgtgggtgctacggagctcgagcggcgacggcggcgagcacacggcgagcgacggcaacggtcggggcggcggagcgcccggagtccccttccgcgtcctagtgcgcaccggctcctccggcacacacgcgacggctgcggtcggcgagagggacggcaatggcgcgggcgagaaacagggaagatcgctccggctagcggccaaaacggcgacaggagggagggaggatgacgccggcgggaggaaaaggggaaaaaggagggagagaaaggggggctcgcccctttcttctttgggaaaaggggaaggggagcgggggcgtcgaggcagagggaggagggctcggcctccgtcccttggcggcttgcgcgcggagtggcggggccgaggcgatgacgacggcgatgacggcggggcggtttggagcggcgcgacgacacgggcgataggcgcgggctggcgcggtagagggtgacgggggccgcgaccagattggggcgtactcggcacgcgcgcgcggcttgaatgggagggcgaccacgtgggcgcgcgcgcgaacaacagcgcgcgggggccggctttgcgagccgggagctcgccagggagaggagaaggaaagcgaggggaggaggcgctcggcgcggtgactcacgcgcacgcgcgcggacagagcggaggaggaggagcgctcggcgcggctcccggagctgagggagaggggagagggagcgcgccgggaaggggagggggcgagagagagcgagagagagggagagagagcgggagcgcgccgggggagag

SEQ ID NO: 29831 - DNA, 2725 bp, Oryza sativa
  Clone ID: PAT_MRT4530_34295C.1
gcacacaagaactaatctgagaagttcttttcacgtagagacctgtcaatacataggtaatcattcctaacaaaacgactacatttacaacttataagtggtagtatgctcagacatcctcggagctagcagaatcaacatggtcctatctaaatagcatccgtatatattaactctctcttccatatgatccctacaccagcagggtgcaatagaataaatagaatctttcacctccggcacgcaatgtgcagttggggggtcattccttctgttgttgtttttgttgttagatgccgacacactttgcccatctgaaccagcatgagatcttctcaggcaaccggtacggctccagcgacgcagggtccatctccagcgagtttggatctgaccagatgtacaccccgcgctcctgcctgctgcctggcaccgtgttgtcgaggatcaaggcgacgaggagagccaccaccacgtttatggataggagcgcgttcaccgcaaagtttagcccgttgctgccactgcgaaccggtccgcttgaagctgcggcgtatggaaggagatagcttggtagaataagattggtgctgggttcatattgctggaaataagctgggacagacatggagatgaacagcgtaaacccgacgattatcatgtttctcgagcttgcggcttgggtgtatcgcaatgtggacaagccaagcgcgacgattagtgcccaggtgaagcacagaacagaggcagccaaagcaacaggaatggaggcaaggagggctccaatttttccaaagaatgaaaaaatgaccaacaggactgcgccaaactgcaaggctcttctgctggccattttggtattctcaagggtatgtatgttctctgttagagttgtcgagccagttcctgtaccccatactccagcgataagagtggaaatcccttcaaagccaatccctctgctaacaactccacgtgttggcggacttaaattgaccagcaatgacgtagcatgatacgaggaaagcgaatcaactgatgcaaccagtgaaactattaccataatgatgctcgttttgaaatgaaatgtaggagggccccactggaatggatagggaaccctcacccaggcagctgttctccaagcattagaagcatcagttcgacaacgcctcatggtttctagatgccttttgcatgaatccattagtatgtttgaactgggtatatttgagttgcatcccttgaagttatatgctccaccagcagtgaggaagaatgcatatgcccatacaacggcaacactgaagggcaccgcataaatgaggaagatacggttgccaaacagggatacttttctcaaatacagggtgcacagaagaaccaataaaataaggggcatgctgatttctacacaactgccagcctgagggaaaccataactgaaaaaggctaaaccaacggcagcaattgtcggtgccacgacgactgggtttattaaccttagaaacagtgacataagaccactgtatcccaaaatgatctggaaaactgaaccgacaagtatagctccctgcagttccctcattatgtgcttgaacttattttcactaagatttctgaattcctccgagtttgaaatcaccaatgcaggagccaaatatacaaaagaacttccttgaatcaatggaagccgagaaccgaaaaaagtatgaagtattgttgtaagaccagacactaataagatggtggaaatgactgttgctgtgtcctcatcagatccacccatggtcggtaccaatatcaaaggaacaaaaacaagtgaaccagctattgacaagtaatgttgtatgccataaaaaatgaggggcacccacccggggttctcggtgacgccgcaccggagcccggactccccgtacagcggcgccgtctcgctggtgacggccggggcgccgccctcgccgccaccgtcctcctcgttggcccattgctcctggtagtacgcggccagctcggcatccctctcctcctcctccttcttcctcctcgcctccgcctcctccgccttccgcttcgcctccgcctcctccgccttcttcctcgcctccgcgcccgccgctgcgtgcgcgccgccgccgttgccgttcctggcacccccgttcaccgccgccacccgctcgacgccgttcgccctcctcgcgtccgcgcggcctcccctcgccggcgccggcgccgggtcctcctccgcggccggcgccgcgtccgggatctcgagctcgagctccccacggaggtcgattcggcggcgcggcggcggcgggcggccccctcgcgcaccgcgcccgccgcgcacgccgcgctcgaggtcgaggcgcgggcgcgcggggagatcggactcctcgtcgccgtcctcctccgtgtccagctcccgttccggtgctcgcggcgggcggcgcgaggtggccggtgggggaggaggcgggggcggctgcggcatcacggaggaggcgaacgaggaggtggacaccgccgactcgccggagaagaacgtggaggggtggaaccccgtccgccgcgcccacgaccgcagctcccgcgggttgtggtccgcgttgttccccgcgaacggcggcaccgccctccccccacccccaccatcaccatccccacctcctcctcctcctccgccgccgcgagcggtggttcgccgtgagcttggcat

SEQ ID NO: 29832 - DNA, 675 bp, Oryza sativa
  Clone ID: PAT_MRT4530_34296C.1
ccggccgggctactactactccgtcctcctcttcaccggttagatcggcggcggcggcggcgatgatgagggcacggtgggcggcggggatgctgcgccgcgctagctctggcgaggcttcgctcgccgcgcgcgcggtcttcgcgcgcggcttcctcggcctcaacatgaaggcgagtaaggagaccatcgagaagaaggagaaggataaggccaggcttatggatgaaatgagcagggggtacttcgccgacatcgcagagatacgcaagaacggcggcaagcttgcgacagcgaataagatcatcattccggaaatcgcagccgtgaagttccctgatctttctgtgaagtcccctgatggcaggacagtgaatttgccgcttgtcgcacctccgcgaaacgatgatccccagactggcaatacagtggacacacaaaatgatgattgtaaggctggtgatatggtggttcctgatgcttcattggtgtgcctttcctttcgcgcgagctcccagaaaatggcagaaacgtggagcctaccttttcttgatgcatttagttctgctgggaatattcaagtgtatgaggtctcatttattgattcatggctgttatcatcaagtcctgtgagacaggtattcctcaaggtgatgacaaaatccaacaatccac

SEQ ID NO: 29833 - DNA, 783 bp, Oryza sativa
  Clone ID: PAT_MRT4530_34297C.1
ttacaccactactttcaagttccaacgactatcaaaatccttgggctcatgcttccaactatagatttcagcggtcccgccgttgccaccacttccaacgatccaaatcccagtgctcccaccattgccatctcctctaactctccgaatacaagggctcccgttattgctatctggctctgtcatggccttaacgacatcaccaacaaggttacactggtgccgatcgatttcatgcgcatgatgttcctttcgtcgtccacctgtccatgcctttgattcatcccggattgtgttgatgtgcacatgaacaaaagtgcacattcctatcccggaagcaaataaatcatatgacttttccgaagcaaagaagaagatgacggctctggacgcctggacggcgatgcgatggagtggaaatgaaaggtcgccggtaagacaatgagaactataacagagggcttgttgatggagatggaagctgagctcgaggacgacgacgacggcactgttggcggcgatggaagcattgagcttgaaggttgtggcagcgtagaatgataaaagttgtgaggtcaaattaactatgaccggagtgacggcaacgccgagcccgtactcaggggaactggctcctctgacgtagacgtccacttcggatcgccattcattcgcatccgacggccgcaactcgttctttgttgttcggtccataatcgcgctcggttcagcccacctggagacgaaaacgaggggaagaaacagcgttgatttgtttgccat

SEQ ID NO: 29834 - DNA, 333 bp, Oryza sativa
  Clone ID: PAT_MRT4530_34298C.1
atgcaggtttaccatatgccgacgagaggggtcctagaccaacaacaggaatcggtccttaagtgcgagagcgggaaaccgtacacccggcgaccgtcgatactcgcacagagtgcacgagtatcgaggcgcaactggatggttacaaggggacatggcatagcaattaacaatggaaggatcaaatgcgacaagttaggtgttcaaaggtggcttgccttgctcgagatctggagcttgatcctcgaaatcctcgcactgcgggtcttcgggctccggaactacacgcgaaacggaacaactcaacaaacggcgaaaataaagccctattaa

SEQ ID NO: 29835 - DNA, 336 bp, Oryza sativa
  Clone ID: PAT_MRT4530_34299C.1
atgtcggtttgggagaggggaaccgacattggacggtcaaggcgcgagctggcgctcggcgcttgcggccaaaacggcagggaggaggggctctgcctccgccccttagaggctagcgcgtggagtggcggggctgaggcgatgacgacggcgatgacggcggggcggtttggagcggcgcgacgacacgggcgacaggcgcgtgcagaagctgacggcggcggcgaccgggcggtcggccaccacggcacgcgcgcgcgggaagcaacgggcagcgtccgcgcgggcgcgcgcacgcgaacacggcgcgcgggaagcggcagcgagggagcgtag

SEQ ID NO: 29836 - DNA, 405 bp, Oryza sativa
  Clone ID: PAT_MRT4530_3429C.1
atggcgcgggcgcggctgcgcgtcgcggcgggaagcttcttggaaagggaaggcgagacgagacggacgcggcttgtcgggtcaatcagcttcgtggttgatgaactgaaatcagttgacgaacagagctttcttgacggtacgtatgacagaaaatttcagagggctctcctggtcacggtgttgatagtgaagggttcgaagtttgaaccctcgccgttccacgctagatccgtccctgttgcgaaccctggttgcattgctgcttgctcttggcggcggcagcagcagcagctggttcagggcatggagagccatactggtataaacggtgtggcattgaagatttcacattacctgttgaactacgcggccatgtcacgaggagttaatgacagcatttag

SEQ ID NO: 29837 - DNA, 420 bp, Oryza sativa
  Clone ID: PAT_MRT4530_342C.1
atggccctacagtctacagaggcaggggcacgcaaattaaaacggaaatcggggctggacccgtcgacctggcggatggtcctgatgcgtcatgcggttgcacggtaccaccacgactatgaccgattcgatcggattagcccatgcgcaagcgaatcagcggcggcgaaagcgccaccacacctaattaagcgcttgcagatttgtcatctgccatatcgcacccagaggcacatgacatcgaccagcgtactcaccaaccgttgccgtttctcctcgcgaacgagcatcgtaggcgaatttcgggctgcagcagaaccgtcgaaagcaaaccagagttggttccggttcaaccgcatagccattggtcttggtcggtacggtcaatttcccatttccctagtgaccctgagtggccgt

SEQ ID NO: 29838 - DNA, 945 bp, Oryza sativa
  Clone ID: PAT_MRT4530_34300C.1
atgaggaggcgactgtctcgtctgttcaaggggtccggctcttcatcaagtcatcatgacgagtctagtactcattcatcagcagatgtcttgatggaagacgccgaagctccgcgacgacttctgaacgacaccgaactcaaccttgtcagtgatcgggagagacaagcctactacatgctgagcgaccgggagtatgctcacacgcgagaatactctccggagaatgctcacacaaagtataagttctctgctcctattgagtgcacttctctgattactcggatagcaaaagggctaggggtcgttagcgaccaaattgcttttatctcagccgctcgtccgtgtattgatgaggcttatctagtgcaagggcatattctgaaacatggagtagacagatctttgatttactttttccccggttgtacaaatgaaatcctattgccaaatgcggggtatcatttgtacaactgtcgtgaactaaccattcccctgcagaccatagaagaatctcgtacaggtggagcatacagggaaacgcgcaacatgacaagaaatgaacgagaaagttcatcatcctcaacacccgtgcagctgtatgaggcaggttgggagccaactggggacgcacccggatggacccaagctccacaccacaacatcgtagtctcaacccgggcgagtgccagtgaggatcggtggcgtgcgcctcatgacatccaatggggggacaaccaaccttccagatcaagtggtgtgcctccatctccaagtgaatggcgctcaagttcctctcattgggacttgggtgaaatcactaggagaatggacacccctgatattcagacgggagagatccagtacaacctcacggaacacatatttaaacgcaagaatggcaacaatctgctgatgcgcagttcaccaacctcaacaacatga

SEQ ID NO: 29839 - DNA, 910 bp, Oryza sativa
  Clone ID: PAT_MRT4530_34301C.1
atggcgatgtggagggcaccgtcggcggcggggcagctgctcggccgcgcgcttgcatctacggctgcgcagacatcagcaggcagcaagaaggtcgtgggtgtgttctacaagggtggcgagtatgccgacaagaatcccaacttcgtcggctgcgtcgactccgctctcggcattcgcggctggcttgaatctaaggggcatcgctacattgtcaccgatgacaaggaggggataaactgcgagctggagaagcacatcgaggatgcccacgtcctgatcaccaccccattccacccagcctacatcaccgcagagaggatcaagaaggccaagaacctggagcttcttctcacggccggggtcgggtcagaccacatcgatctcccagcagccgcggcagcaggtctaaccgtggcggagatcaccggcagcaacaccgtctccgtggctgaagaccagctcatgcgcatcctgcttcttctcaggaacttcttgcctggtcaccatcagatcgttaatggcgaatggaatgtcgcgggcattgcccacagaacctatgatcttgagggcaaaactgtgggcactgttggtgctggtcgcatcggcaggctcctgcttcagcgtctcaagcccttcaactgcaacctgatgtaccatgacagggtgaagattgacccggagcttgagaaggagattggggccaagtatgaggaggatctcgatgccatgcttccaaagtgtgatgtcgttgtgatcaacatgcctcttacggagaaaacaagaggtatgtttaacaaagagaggattgcaaagatgaagaaaggtgtgaccattgtgaacaatgctcgtggagcaatcatggatacccaggcggttgctgacgcttgcgccagtggtcacgttgcag

SEQ ID NO: 29840 - DNA, 1448 bp, Oryza sativa
  Clone ID: PAT_MRT4530_34302C.1
atttcgaaagccgatgcaggtttaccatatgccgacgagaggggtcctagaccaacaacaggttaggccccagaccatactgtgccaggaagcccaggggtcctccccgacaccaccccggcgaatccacatgtctctcggcatcaagggaaatttagacgcgggcggggaggaacgcggtgcatgcgcgcggtccgcggcggacgcagatgcgacgggcccacgcgcagcctcacggcttgcggtggaacgcgcgcacggggagggaccgaccggggtcggctcgacccggtctaagctgagctggcgccgacgtggcacctacgtggctgccacgcaggacggcgggaggtagacgacgacccggccgcgaatggacggcgggcggcggcggcgagcggcggagcgaaccacggagatacgggcaaaagcgagcacaccgggcagttgttcgtgacagggggaggcgagccaacggctcggattcgccggaggtcgctcgacggcggcggattgcggaggcggcaaccggcggcggaagaagagggaaacggcgacgaggccacgaggggtcgattcccggcggtgagagcatctacgcggcttcgggaactcgacgctagcgtcggattgggcggaactacgccgagcgaggccggcgacgagcgggtgctacggagctcgggcggcgacggcggcgagcacacggcgagcgaaggcaacggggaaggagagggcgcggccgaagtccccttccgcgtcctcgaatgcaccggctctcccggcgctcggcgaaggacggcggaggtgagacagagcacggggcggcggctatggcgcggagacgggcgcgagctggcgctccggctagcggccaaattggcgacagggaggatgacgccggcggggaggaaaaggggaaaaggggcttgcccctttgtcgatttgggaaagaggaggaggggagcgggggcgacgcggcagagggagggggggcgctgcctccgtcccttggcggcttgcgcgcggagtggcgggggccgggcgatgacgacggcgatgacgacggcggtttggagcggagcggcgacattggcgacaggcgcgggcaggcgctgacgacggcggcgaccgagcggtcggccgcgcgcgtgggaaaacagcgggaggcgcggtggtttgaacggcgcggctcgggcgacaggcgcgggctggcgggaccgggcggcagcgcgggcgcgcgtgagcaacggcacgcggggagcggcagcgagggagagagacgctcggggcggctctcgcacgcgcgagcagcgcgcgggcgaggctgagcaggggggaaggagcgcgccgggggggggaagagagagagaaaaagagagcccgggagagagagagagagatgggccgagcggaattcggcccatcgaaccccgggggaggcaaac

SEQ ID NO: 29841 - DNA, 1530 bp, Oryza sativa
  Clone ID: PAT_MRT4530_34303C.1
cccccgcccctgcgacccgccccgaggccccccccccccgccacccccgcccccgcttccccccgcccccccgatggcgtcctcctcgtcggcggcggcgctctggacggcggcgccccacccccacggcagctgcatcaggatccacgccatcttccaccagcgtcaccagcggagggggaggaggccggtcgtcgtcgcctcgtcggtgaggccgctgcaggccgcgagcctggcggtggccacggcgccggtggccgtggcgtcgaggaggacggcggcggaggaggccgtctacgaggtcgtgctgcggcaggcggcgctggtggaggaggccacccaccgccgcggcgcgggggcgccgcggtgggcggaggaggacgccgtcgactggggcctcctcctcggcgacgcctaccaccgctgcggcgaggtctgcgccgagtacgccaagaccttctacctaggtactcagcttatgactcctgaaaggcgcaaagctgtctgggcaatctatgtatggtgcagaagaactgatgaactggtagatggccctaactcgtcttacattacaccaaaggcacttgatcgatgggagaagagattagaagatctcttcgaaggcaggccatatgatatgtatgatgcagccctctcggacacagtgtcaaagtttccagtagatatccagccattcaaagacatgattgaaggaatgaggcttgacctgtggaaatcaaggtataggagctttgatgagctctacctctactgctactacgttgctggcacggttggtctcatgacagtaccggtgatggggattgcccccgactcgaaggcctcaaccgagagcgtgtacaacgctgcgctagctcttgggatcgccaaccagctgacgaatattctcagagacgtaggcgaagactcaaggaggggaagaatctaccttccattggatgaattggcagaggcaggtctgacagaagaagacatattcagagggaaagtgactgataaatggaggaagttcatgaagggacaaattctgcgtgccaggttattctttgatgaggcggagaagggcgttgcgcatctagactctgcgagtagatggccggttctggcatctttgtggttataccggcagatccttgatgctatcgaagcaaacgactacaacaacttcaccaagcgcgcgtatgtaaacaaggcaaagaagctgctgtctttaccggtcgcttatgcaagagcggcagttgcatcatgaacaatcactagatcagatgccttattattttttttctttcattttcttttcttttgatttcgcacgatttcttggctgttgtatatattcaagcagctacctgtatgccataagcctgccacagtttttctttagttcaagggactgatttcaggtccctcaatactcaactcttgttagaaacaaatacagagggggtaagccccacagttcaagaagcatattaaaaaaaaaaaaaaaacaagaaaaaaaaaaaaaaa

SEQ ID NO: 29842 - DNA, 585 bp, Oryza sativa
  Clone ID: PAT_MRT4530_34304C.1
atgcggcgggcccacgcgcagcctcacggcttgcggtggaacgcgcgcacgggaggggctgaccggggtcggcccgacccgatctcggccaagctggcgccgacgtggcgcctacatggcgcctacatggctgccacgcgggctggcgggaggaagacgaaggcgccggccgcgaatggacggcgggcggcggcggtttctccggggcgccttgccaccatgaagggcgacggggcgtacaccgggatgacgatggagaaggagagggagcgagccaacagcttggattcgccggagggagcccgtcggcggcggatttcggcggtggcaaccggcggagagaaaagggggaaacggcgacgaggtcacgaggggccaattcccggcgcgacgaacggcgacggcgaaacagaggggcggcagcaatggagtggaggcgacgggacaacgagaggagaagagagggagggcgcccggggctttaaagggcggcaatgtcggtttggaaccgactttgggcggtcaaggcgcgagctgtcgctcggcgctcgcggccaaatcggcgacagggcggagggaggatga

SEQ ID NO: 29843 - DNA, 1074 bp, Oryza sativa
  Clone ID: PAT_MRT4530_34305C.1
atgccacgcctgcgccgcccgtgccgcgcctgcgccgcccagccccgctgccctgccgcgcctgtggccgcgctgtcgctcggccccgcgagccagcgcacagctagcgccatggcagaggggcagccgcgccgcgccagcccgtcctctgcgccgtttgaccgcgcccgtgatgccccgttccttcccctcgaagctccatcccgcgcccataaaatccgccctccccctctcgttcggttccccttcgctcgcccgagttcgctccaagccgccgcgccattgtcgccctgccctgctcgccgccgccgctcgtcgtcgcgcgtgtcggaggagccggcacgagcgaggacgcgtgacgtggactctgggcgcaccgtctccctcctcttccccggcccgaggccggagcgatcacgccccgcgccatcgaccatcgtcacggcgccccttcaccccgcacgccgcgaccgggtcaagctgaccccggtccgccgctcccctctgccccgctcgcgcgcgcggtccatcgcgaaccgtgaggctgcaccctcacggctcaccgcggaccacacgcacggggagaaacggagggagcggctggccgggtcggcttatccggtcgcggccgaggtggcgccgacgtggcgcctacgtggcagccacgcgggccggcgggaggtagacgacgaaccggccgcgaatggacggcgggcgacagcggcgagcggcgtagcgagccacggcgataccggcgaaagcgagcacaccgggtggctgcacaggacgaggggagacgagccaacggctcggattcgctggaggttgctcgacggcggcggattacggcggcggcaaccggcggcgagggaagagggaaacggcgacgaggccacgaggggccgattcccggcggtgagagcatctacgcggcttcgggaactcgacgctagcgtcggattgggcggaactacgccgagcgaggccggcgacgagcgggtgctacggagctcgggcggcgatggcggcgagcacacggcgagcgatggcaacggtcggggcggcgccagctaa

SEQ ID NO: 29844 - DNA, 336 bp, Oryza sativa
  unsure (1)..(336): unsure at all n locations
  Clone ID: PAT_MRT4530_34306C.1
tcctgcatgcatacgtactaccttattttttatattgcagcctaactaaaattaattgagtcggccgttttacatccatcgtgactggctaaaaccatcccttgggggttcgtnaggggggttcctncacatacatcctttctccagcctgcttactaactaaaaggcccgccccnatcgaccttccttacaatcgctcaccctgactggctaatgggacgcaccttctctctggccattaatcacgcccggtgtgtgtgtttctttcaccgtgactgttccatttgctagcgacctacctaccgctctttttttttgtttcccttcctttctttg

SEQ ID NO: 29845 - DNA, 1425 bp, Oryza sativa
  Clone ID: PAT_MRT4530_34307C.1
atgcacaccgtcaaggagacggagttacttgctgccaagctggacctcctcatgaaatgcttggacgaccatgagaaacggccacaaggcaccgtcaaggccttggactcacacgtcacgtgtgaagtctgcggcggcacgggtcattcagggaacgactgcccggaaacccgtgaggaggcgatgtacatgggcaacaacaacggtaatccaaaagatccacatcaacgtgccgttgttggacgctatgcaagtaccaacatatgcccatttctcaaggacatactcaacaacaagagaccgctcccaacaacggaggtggtcaagctgacggaacactgcagcaacctgatactccacaagctcctggagaagaagaaagatccggggtgtcccacgatcacctgctcgatcggggcacaacaattcgaccaggccttgtgcgaccttgaagccagcgtcagcgtcatgccaaaagacgtctttgacaaactcaacttcacggtgttggcaccaacaccgatgcgcctccaactgactgatttatcagttcgttacccggcggagatagcggaggatgtgccagtcaagatacgggatttcttcatcccggttgattttgtggtgctagacatggacacggggaaggagacgccgctcatcctgggccgtccgttccttagcaccgcaggaaccaacattgacgtgggaacggggagtatccgtttccatatcaacgggaaggaggaaaagtttgagtttcaaccaaagacggaacaatgctccatggtcagaatcaagtacgggccgaacccgcagaatatccaagtggtcaaagtggagccacccaagacagatagcctggtaagatttatgcagaacttcctggaaagggaaacaacaatgctcaggaaccgttattggagaacgccggttaaagcacctgtaccagccaaaaagtcagagcagccggctcagaagaagccgtcttccgcaccgaaatcaaagaagaccatagaagaatctcgtgcaggtggaacatacagggagacgcgcaacatgacaaggaatgaacaaggaagttcatcatcctctacacccgtgcagatgtatgaggtaggttgggcaccaactgggatgcacctggatggacccaagctccacgccatagcatcagagtctcaacctgggcaagcgccagtgaggaccggtggcatgcgcctcatgacatccactggggggacaaccaaccctccagatcaagtgacgggggagatccagtatgacctcacggaacatatagctcaaacgcaagaatggcaacaatctgctgatgctcagttcaccaacatcaacaacatgatgcagcaacagcacgacgaccttcaagcgtactttcgctttaaggggttcaatccaccctga

SEQ ID NO: 29846 - DNA, 491 bp, Oryza sativa
  Clone ID: PAT_MRT4530_34308C.1
ggagagagagagaactagtctcgagttttttttttttttttttttgggcaacaaagagagtcaatcctctctgatatcaaactaaaacgaataattacaagcagtaagtagatgcccacaagaatgaccctaccgccccaccacacacaaccaacatggtactactacactactctacaggttaacatcagcacgcacattccaggggtccaaaaactggggcaaatgcaacaagctcctactgaaaatgtgggggcactgagacagtcatgtagcatccactgaaatctgagagtatggcccctccacgcagggccgtttctcggtagcgtcctccgaacctttgggttcggcatgcgttagaaggtcttcgtagagtttgacggaatccttggagaattcggtcagcgactcgaatatgctggccaggccgatcttgaacccgttgagagtaacatcgtgcgtatcgcgcatacaggcgtggtgcttcg

SEQ ID NO: 29847 - DNA, 667 bp, Oryza sativa
  Clone ID: PAT_MRT4530_34309C.1
gcgacgacgacagattaaccgagagcgatcgatcaaccaaatcagaatcagggcaagaaacaatggcgcagctggtggacaaggcgaaggggttcgtggcggacaaggtggcgcgggtggagaagccggaggcggagctggccgagctgtcgttccagagcgtgggccgcggcggcgccaccctcgcggggcgcgtggacgtgcgcaacccctactcccactccatcccgatctgcgaggtgagctactcgctgaagagcgccgggagggaggtggcgtcggggacgatgcccgacccggggtcgctcaccgccggcgacaccacgcggctggacatcccggtgaaggtgccgtacgacttcctggtgagcctcgccagggacgccggcagggactgggacatcgactacgagatgagggtcggcctcaccgtcgacctccccatcctcggcaacttcaccctgccgctcaccaagtccggcgagctcaagctccccaccctctccgacgtcttctaaatcggcatcgtgcacacgtacgggccgagtgtacgagaacttgtgtatttccagacttctggagtaataataaagaacacgagtggttggttaaaaaaaaaaaaaaaaaaaaaaatctgtaacgtacgtttatgtgtggacgttatgct

SEQ ID NO: 29848 - DNA, 5450 bp, Oryza sativa
  Clone ID: PAT_MRT4530_3430C.1
atggccggtcacccacccaaccaccgcggagaaggcatgatcgatttcgtggcagagttggcacgcatgacactggtggtgggctaccccgacgcgccggagtacacgaccattccaccgctcagtggcgagcttcctcaccgtgtccgcttggaggtccatggttacgtggggacttgcctcgccaacatggcggtcgaggcatctggaggcacagcagatcacgcctgtcaggaggcagcctacttgatgatggccagactacgggagcgccacaactacatcttccacgacacggcgtaccgctaccaccccagtcgagccaacggtgatggcgtcagctccttccgtccgacagctggcgagaacgacaccaccttcggtcacatgtgtgctgtgatgaggggattggacaggatgcactcggacctgcacaaggcgaccaaggccttgaacgatgggaagctcatgaggatcgtcgctttgaaggacgagatagcgcgcctgaagaaggagaacgctcagctaaagggtcttccagcgccaggaggagtccggatccgcaccacgccccgcaagacgacgacggcacccgtgcgcatccagcttgcgcccagaaacccacctccagcagcagctcccgcagcacctccagttctgcccgcagttcctgcagctccagctccagctccagctccagctcccgcgtccgctctctccttcgctccagcgtcagccgccagaggtccagccagtggcaccgggggttggttgtctgctactcccagtggcagcagcgatctcagcagcagcagctccagtggctcgcagtcaggcagcggcgagacgtatctgccaggctccaggagtcgctcagagggacctgatggtctacaccaggactggcaaccgcacgacaggcgagggcagcaacggcgaagaacgcgttgatggcgtgcaccccaacagtgattccggcaatggtccgccaccacttcccgagaatccgacccttgcccaagttatggcgcatcagactcagatgatggcagccatgatgcagcagatgcagcaacaacaccagcaaatgcaccagaggatgatgcagcacgtcgaacagcagcaccagcactttggtccccctccccctcaatccaaattgcctgagttcctaggagtcaggccacccaccttctccagcaccaccaaccctatggaggcaaatgactggctccatgcaatagagaagaagctgaatctcctgcagtgcaatgatcaggagaaggtcgctttcgccacacaccagcttcagggtcctgcgtcagcttggtgggacaaccacatggccacccgcccaccgggtactgaagtcacatgggcagagttctgccgtagcttcaggaaggcacaagtgccagatggggtcgtggcacaaaagaagagggaatttcgtgcactccatcagggtaacaggacggtgacagagtacctccacgagttcaatcgcctcactgcgatatgcaccataggatgttcgtaccgaccccgataagcaggagaagttcatggcgggcctggatgatgagctgaccaaccagctgatatccgggtactacgctgactttgagaggctggttgacaaggcaatccgtcaggaggaccaacgcaacaagatggacaggaagaggaaggccgctcagttcagggcacatcagggaagtcaccagaggccgcgcttcactcccggacagcagggtggacctaccaccatgatcgtccgtcagcaccgcccgttcaaccctagcaacttctaccagggcaccagtgacagtcagaaccaccatggaggtcagcccaaccgcggtgcagctccacgcccaccagtggcatcggcacagtcaggccagcccgcgcaagccaagaaggagacggaagcaaaaccagggtcctgcttcaactgtggcgagcttggccacttcgctgacaaatgcccgaagcctaggcgtgccgggccaaggtttatccaggctcgtgtcaaccacgcatctgcggaggaggcacaagcagcaccagaggttgtactgggtacgtttcctgttaactcaatccctgcaacagtactttttgattctggtgcaacgcattctttcatctcaaagaaatttgtcgggatgcatgggttaataagagaggaacttagcacaccgatgcgggttcataccccagggaatagctccacttcggttcaattcagcccttctataacaatagaaattcaaaggtcaccggttctagccaacctcatccttctcgaatccaaagacctagatgtcattcttgggatggattggctgaccaagtttaagggagtcatcgattgtgcgaatcgcacagtcaccctgaccaacgagaagggagaaaccgtggtgtacaaatctctagtctcgccaaagaaaggagtctcgttgaatcagattgagacggaaatcccagtggacaccgtagagaagaacttgagaaaattggatgatatacccatagtctgcgagtatccagaggtgttccccgaagacctcactaccatgccacccaagagagagattgaattccggattgatttggcaccgggaaccgctccaatctataagagaccgtacagaatggcggccaacgaattaacggaggtcaagaagcaagttgatgaacagctgcagaaagggtacatacgaccaagcacttcaccttggggcgctccggtcatttttgtggagaaaaaggataagacgaagaggatgtgcgtcgattatcgcgcacttaacgaggtcacaatcaagaataaatatcctttgccgcgaatcgacgatttatttgatcaactgaaaggggctaaagtgttttctaagatagacctgcgctcaggctaccaccagttgagaatccgggaagaggatatcccgaagacggccttcaccactcggtacgggttatatgagtgcacggttatgtccttcggacttactaacgcgcctgcattcttcatgaatctgatgaacaaagtgttcatagaatttctggacaagtttgttgtggtattcatcgacgacatacttatctactcaaaatccgaagaagaacatgaacaacatctccgtctggtactcgagaagttgaaggagcaccagctatacgccaagttcagcaagtgtgatttctggttgacggaagtcaaatttctgggtcatgtcattacagctcagggtgtggcagtcgacccatcgaacgtggagtcagttaccaagtggaccccaccgaagactgtgtcgcagattcgaagttttctaggactggcaggttattaccgtcgattcatcggaaacttctccagaatcgcccgacccatgactcagttgcttaagaaagatgagaaatttaaatggacagcggagtgcgataagagctttgaggagctcaagaagaaattagtatccgcaccagttttgattctgcccgaccagatgaaagacttccaagtttattgcgatgcatcccgtcacggacttggatgtgtcctaatgcaagagggcagagtggttgcatatgcctcgcggcagttgcgtccacacgaaggaaattatccaactcatgacttggagttggcagcggtggttcatgctttgaagatctggaggcactatctgatcggcaaccgctgcgaagtatatacggaccataaaagtctgaaatacatcttcacccaaccggacctaaactttcgacaacgaagatggttggagctaatcaaagactatgacatgagtattcactaccacccgggtaaggccaatgtggtggcagacgctttaagccggaaaagttactgcactgctctatgcatcgagagcatgtgtgaggaattgcggcaggagtttgaacatctcaacataggaattgttgaacacgggttcgtagccgctctggaggcacggcctacgctcgtggatcaagtcagagccgctcaagtaaatgatccggaaatagcagaactgaaaaagaacatgagagtcggaaaggctcgggatttccttaaggatgagcatggcacaatctggatgggagaaagattgtgtgtacctgacgacaaggaattgaaggatctgatactcaccgaggctcatcagacccagtactccattcacccaggcagcaccaaaatgtatcaagacctcaaagaaaagttttggtgggtcagcatgaggagagaaatagctgaattcgtcgcactctgcgatgtttgccaacgagtgaaggcagagcaccaaagacccacaggtttactccaacctcttcaaatcccggaatggaaatgggaagaaattggaatggactttataacgggactgccccggacatcgtcgggtcacgattcgatctgagtagtcgtggatcgactcactaaggttgctcacttcataccagtacataccacatatacgggcaaaaggttggcggagctttacctttcgagaatcatgtgcctacatggagtactcaaaaagattgtatctgaccgagggagtcagttcacctcaaaattctggcagaagctgcaggaagaattggggacccgtttaaatttcagcacggcctatcacccgcaaactgatggccagaccgagcgggtcaatcaaatcttggaagatatgttgagagcttgcgctcttgattttggtggagcttgggacaaaagcttgccatatgcggaattctcgtacaacaacagctaccaggccagtctacagatggcaccgtttgaagctttatacggccggaagtgccgcacacctctcttctgggatcagacaggcgaacgtcaactattcggaacagaagtattagcggaagcagaagagaaagtcagaatcatcagggaaaggttgaggattgctcagtctcgacagaagagctacgcggataaccgtcgaagggagctcacttttgaggcaggagatcacgtgtaccttcgcgtcactccgctccggggagtacaccgttttcagacgaaaggcaagttggcaccacgcttcgtgggaccatacaaaatcttggaacgaaggggagaagtggcttatcagctagaacttccatccaacatgatcggcatccatgacgtgttccacgtgtcccaactaaagaagtgcttaagggtacctgaagaacaggctgattcggaacacattgatatccaggaagacctaacttatgttgagaagccggttcgtatactggataccagcgaaaggagaaccagaaacaaggtcacccggttttgccgagttcagtggagtcatcattcggaagaggaagcaacctgggaaagggaagatgagttgaaagccgcccatccgcacctcttcaccagctcctccgaatctcggggccgagattccgtt

SEQ ID NO: 29849 - DNA, 1320 bp, Oryza sativa
  Clone ID: PAT_MRT4530_34310C.1
atgccgtcaggctgcggctgtttccgttctcccttctcgagagagcgaagcagtggttctatgccaaccgtgctgctgtcaacacctgggacaaatgctttacggcattcctctcgaaattcttcccgatgggcaaaaccaatgctcttgtggaaggatttccagtttccagcatacaagggacgagtctattccggaagcatgggaacgactgcaggaaatttttacaatggactcaccccaaagtcccgcgatcacctggacgcggcagctagaggagccttcttctctaaaacagttcaaggagccgttgaattaatagagaagatggtctccaatatgggttggagcgaggaacgactccagacccgtcagcgaggcataaaaggccacaaggcaccgtcaaggccttggactctcacatcacgtgtgaggtctgtggcggcacggatcattctgggaacgactgtccggaaacctgtgaggaggcgatgtacatgggcaacaacaccgggtaccgtccacaaggaggtcaggggtggaaccaaccacgcccatattatcaatgagatgagctttaataagatgaaagaaacccagttagctcagttagcatccttagtccctgcaactgaaactgggaggattcttgggcaacccgactcctccattgaaaatgttaaggcaatcacgacgaggggaggaactaatgggatatcaaaagaagcgtcatctaatgactcggctgacaaggagattcagccagaaaagaccgtgccgcaggagtactgcgacacgcggttgctgctgtttccccaacggattaggaaaccgtcagtagacgagcagtttgctcgttttgttgaagtaatccaaaagattcacatcaacatgccattgttggacgctatgcaaatgccgacatacacccgttatctcaaggacatactcaacaacaagagaccgctcccaacaacggaggtggtgaagctgacagaacaatgcagcaacgtcgtactccacaagctcccggagaagaagaaagatccgaggtgtcccatgatcacctgctcgattagggcacaacaattcgaccaggccttgtgcgatcttggagctagcgtcagcgtcatgccaaaagccgtcttcgacaagcttaacttcatggtgttgtcaccgacaccgatgcgcctccaactggctgactcgttagtccgttacccggcaaaatattcatgtggtcgaagtggagccacccaagacggacagcctggtgaaattcatgcaaaacttcctggagaaggaaacaacaatgcctag

SEQ ID NO: 29850 - DNA, 6101 bp, Oryza sativa
  Clone ID: PAT_MRT4530_34311C.1
ctaagggagcagctccgggaactcggcgcggagaagatcttctcgctcccaggttgcctcatcttcagaatgattgctccattggaccttgtagaacttgacggtcttccttcgagtctgacgttctgcctcttcaagaaccttgatcggtctttccttgtaggtcagattcttttccagctcgatattacccaggggaacttgttcttctagaactcgaagacatttctttaactgggatacgtggaatacgttgtgcacatctgcgagaccttcaggtaactcaagttgataagccacttcgccacgtctggcggttacgaggtaggggccgatgtagcggggtgctaacttgccggacatcccaaacctcataccacggaggggtgatacccgcaggtacacatgatctcctttttcgaactcaaggtcacgcctccgattgtcagcgtaatttttctgacggttctgcgctgtctttaagcgttctcggattagcttaacttgttcttctgctgacttgagtatgtcaggaccgaataccagcgcttcgcccacctcattccagcacaagggagtgcggcactttcttccgaacattgcctcattcggcgacatctgaatgctggcctgataactgttgttgtatgagaactcagcatacggcaaacaatgatcccaagtgccttcgaaatccagggcacacgcacgtagcatgtcttctaggatttggtttaccctttctgtctgaccatcggtctgcggatggtaggccgtactaaaatttagatcggttccgagggcttcatgcaactgcttccagaaccttgaggtgaactgagtgcctcggtctgacacaatcttcttgggacagccaaatctacatacgacatgggtcatgtagagttctgctagtttctttccatcaaaggtggttttcactggcacgaaatgagctgatttcgtgagtcggtccacgattacccaaatggagtcgtacccgccaggggttcttggcaaaccggtgatgaaatccattccgatctcttcccatttccactcgggaatcggtaggggttgcagcagaccagctggcctctgatgttctgccttgactctttggcaaatgtcacacaaggctacgtattctgcgacatctcgcttcattccagcccaccagaagtatgccttgatatcttggtacatcttcgtacttcctggatgaatggagtaggcggactcatgagcttcttttaggatgagatctcttaactcctttttggccggtacacagatgcatggaccgcaccaaactgtgccttggtcgtctatggagaaatcggtgtctttcttctcttgtattctttttattaactcctttatcccttcgtcgtctttctgagcttcccggatttgcgactctagggtaggctgtactgtcaagctggcagggacacctgactgtaccacggtcagcctcaacttctccaattctctgcacaggcgatcttggtcaggccatatttgagctacgttgcaatagactttgcgacttagcgcatcagcgaccacgttagctttactggggtgataatgaattccaagatcgtaatcttcacatctgttcccgattaaatagtgcctccagatcttaagagcatgaaccacagctgccaactcgagatcatgggtgggataattgacttcatgaggcctgagctgcctggatgcataagccacaacctttcgttcttgcattaggacacatcctaagccttgtcttgatgcatcacagaagatctcgaaatgctttcggatatctggcaaggtgagaactggggcagtggtcaaccttttcttcatttcttgaaagctgtcttcacaggctgcagaccattgaaatttcttttccttctttaacagctcggtcatgggtctggctagtttagagaatccttcaatgaatcttcgataatatccagctaagccaaggaagctgcgaatctctgacacattcttgggcgggttccaagcaagtacagcttcaaccttgctgggatctacttcgacaccgttggaggagatcacgtgtccaagaaatgctactcggtctaaccagaattcgcatttcgagaatttagcgaatagtcgatgatctctgagcttttccattatcagcctcatgtgttcagcatgttcttcctcattcttggagtatatcaggatgtcatcaatgaacaccacgacaaactggtccaggtattccataaagattttgttcattaagttcatgaagaatgctggagcattggtgagtccgaaggacatcactgtgaactcatatagaccataacgcgttgagaaagcggtcttcgggatatcttcagatctgattttcaattggtggtaacctgatctcaagtcaatctttgagaaaactcttgctcctttaagttgatcgaacaaatcgtcaatccgtggcaacgggtacttgttctttatagttacttcattcagggctctatagtcgattaccattctctcagagccatcctttttcttaaccagaagcactggggctccccaaggagatgagctaggtcgcacataacctttactctccaattcttcgatttgtcttttaacttctgctaactcattagctgccattcggtagggtctttttgcaattggtgcggtgcttggcgccagttctatggcgaactcaacgtcgggatattcacagactatgggcaccgactccaaggaggtgacttgtaaacaggttaggatagaccgacttgcggtaggggtgttagaggtaaagcgggcttgctttcctccaggtccttgcaaggtgatggacttttcggcacaatctatctgtcccttgtgcttagccaaccaatccatccctaggatgatgtccaagctttgcgagtctaggactatcggtttggctaggaagtcaacttcctcaattctaaggttaacttccgggcatatttgagttgcccttatattgctcctaggggaatgtactatcattggtacacgtaaattttgggttttccaaccatttcttttcacaaaagcttgtgatatgaaagaatgggaagctcccgaatcaaacagaactattgcgggtacggagttgacagagaacatacccatcacaacgtctggagcatcctgagcggtttcagcttgaatgtggttcatccggcctcgaccaaagttgttggaagcacgagaaccttgtccacttgcctgagagctaggacgagactgagctgccgctggagtaggagttctggcagtgctgccattagcatgccctgagctggtgttggtaggattctgagggcactgtctggcatagtgacccatctggttacaccggaaacactgaactgctgacggtccctgcggtgacttgaaagaggtaacactgtttggcgcagtattgccactaggggcacgctgctgtggctgaggtgccggacggttcatctgaggacgaggggcgtagcctggctggcggttagcctgagtgaccgactggtggtattgcatgggttgaccgtagcgagggcgaggtgcgcctcgggaagaatttccctgatggttagacttgcgtttcttgtattcttcggtagcctcttttctggcatcctcaagtagaagtgccttgttgatcatatgttgaaaagtggggaagtcatgagcaagcaactggagtctcattccaactgcgatccctttcaagaatttcctgatcttcttcttgtctgtgtccacttcctcaggggcgtaccgagccaacttgttgaacatgcttaggtactcattgacactgctgttgccttgcttaagtctgttgaattcctctttcttcatgtcaatagtgctttcaggcacatgagctgcacggaaagccgtagcaaactcatcccaagcaatgttagtgggttcagggtgtgcattgcagtaattctcccaccaatctgcagcaggtcctcttagctggtgagaggtgtagagcgtcttctctaccggagtacactgcactaagttgagttttctatcaacatctttcagccaatcgtcagcctcgacaggctcgatggtctgagagaattctggcggacgagacctcagaaaatctgtcagcttggatctattgttgctcatgtgagggtggccatttccatgcgcattatgctgaaaaccggctacggctgcggctaatccttgcaagatttgtgtctgaactgccattaagtgctgcatgttgttttccacatgaggtggggaagggaggcgttcttctccagaattgtgactggcagtgcggtgagagcggtgggactgttccatctctgcattacgggaagctgtgcgatgcgagcggttgatgcggcggggttgctcaacttctgcgttgcgggaagcagtacggtgcgaacggttgctgtggtgagaccgctcattagctgactcatgattttcttctggctcaactctaccttcctcaaaaacgaagcgggctggtgcacgagctgcacggcgggggcggctagccatctgtcgagggccgacagcagcaagggccactggcggtgggggagctgggtagtcgaaacggaacacggtggaagaaccaacaacacgcttccgcgcagtgcggataaagcgtgggccacggcgggacgaagcaactggggtgtgtccgggggtgtaggaagggctaactgggtttgggtagggggagtacactggtgagtacggcgcacgcgagctgggggagagcgggccactgggagtgcgggcagagccgcgggagctatgggaggacaggtggatggcgtggcagaggcggcctgagtcccaggagacagtgtcaactgaggtgacaccctcctcggccagacgggcctccaaagcggcgtagcggcgggcaagggagcggtaagcctcaaggagtaggtcgtgctgagtggcctgagcctccgaaagctcaaccatgcgagtcagcactggctgagactcgctgtacggacaagggtacctggcgactacgtggccagaaggaaggcgtggaagctgccggaaggcggagcccccgagacggtggctgtagtcgtgggccaggcgacgaagcgcagtccaggagaggtcctggtactcgatctggagagggggcctggccacggtgaagtggtgtgggcgaaggccagctccgtgtatacctccacgagggtaaaggtacacagagagctcacagcgagggggaacacggtccacggagtaccccgtgtactcgggacacgagaagccaaggaaacgggcgaggtcacgaagctgagcgatgtggtgaccctcaccaaaaccgtgggaactgaagctggcgttcactgccatcgtagctggcttgctcctggaagaactcctcatctgcaggatccgcttcatcttcttcagcaactgagggggggattacttatatagagcaagggtgattaacctctgcagagggggtacactttacccacacgacattactaacccggatcacccagcccgtggggatcagccacgtcgggagacctccaagctttcatgacaaggcatttccaaagccgacacaggtttaccatatgccgacgagaggggtcccagaccaacaacagttttacccaagatgtttatcatattttaagtttgaaggcgaccgtcgatactcgcacagagtgcacgaataccgaagcgtgactgggtggctataagggaacatggccgaggtggcgccgacgtggcgcctacgtggcagccatgcgggccggcgggaggtagacgacgacgccggccggaacggacggcggacgacagcggcgagcggcggagcgaaccacggcgatacaggcaaaagcgagcacaccgggtggttgcacgagacgaggggagacgagccaacggctcggattcgccggagggagcttgacggcggcgaattgcggcggcggcaaccggcggcgagggaaggggaaacggcgacgaggtcacgaggggccgattcctggcggcgagagcatctacgg

SEQ ID NO: 29851 - DNA, 623 bp, Oryza sativa
  Clone ID: PAT_MRT4530_34312C.1
gcctgttgcccgcccggcgcgctggccgcacgccgcatatttccacgcccgtcgtgagagaagcctgccttgtgatgatgtcaaccatggtggcgagctggggaagctcgtcgggaggatcaacgccagcgcgtcggcggcgggcggaggcgggagggaggtgacatggatggtcgccgacgtgaacatggcgtgggcgtttcccgtggcggcgaagaagagaagctcggcctccgcgtcgccgtcggctgcttctgcccttcgtcggtggcgatgtccgtgacgaggattaggatccctgagctggtgagggaggcgttcttgacgagagcggcctgacgaggtggcgccgcgcgttccggcttgctccggcaggctcttgctgacctcccgcccattcctgtgggtggtgaggccggccgggcaccgtgagcgagctgtgcctcgacgggctaagccgccgcgtcggagctggtgcccgcagcagcgtccacggcgtgcttcgtcttccactgcagctgactcacatggccaaacaactctttcacgtcacaacactttcacgtcctttggttagtgtgggatattatttgaccatgccgatttaaccaacgtggtaagat

SEQ ID NO: 29852 - DNA, 1552 bp, Oryza sativa
  Clone ID: PAT_MRT4530_34313C.1
ttctgtggtccttgatcgggccagcgataaactagcaacaatccgcaaggagagggggaagaacattgatatgttagaatctctgttgagagatacatccacaaagatcttccagggtggtgggattgatagccctgttgtcactaagcgccgttctaggatgtgtgtcggtgttaaagcttcacacaagcatctggttcctggtggaattgttttgagttccagtggctctggcgcaacatattttatggagccaagggacgccatcaggctgaacaacatggaagtaaagctctcaggtgatgaaagagctgaagaattagcaatattgggtctacttacttcaagcatagctgactccgaaatgaagatcaagcatttgatggggaaaatattggaacttgacctggcttgtgccagaggttcatacgctttatggataaatgctgtgaggccagcctttactgacagggatagtgatactcaactgaatccaaatagtgaatgctcagtttttatcgagggcattcagcatcctttacttcttgaacagtctcttagtatggtaaaagaatcaaccagagtagggaaaggacagctttctgatgaacatcttgtctctccaatgcctattcctctggacatgcagtcgctggagcatagcctctctactttcagtgggcacatatcacgtcttcgcaagattgtacaagttgtgtcaaaagattctctggttcttattgatgagatcggcagtggtacggatccgtcagacggtgtagccctttcaacaagcatcttgaagtatcttgctagtaggcttaatctggccattgtgacaactcattatgctgatctaagtcgtttgaaagctgttgacgatcgatttgagaatgctgcaatggaattttgtttggaaactctgcaaccaacatatcagatcttatggggcagtactggtaattcaaatgcattgagtattgccaagtccattggttttgatcagaaagtgcttgctcgtgcacaagaatgggttgagaaacttttgcctgacaaacaaaaggaacgccaaggtttactctatggttctttgctagatgaaagaaaacttctggagtctcaggcaaatgaagcagcatctgttctttcagacgttgagagactgtacaatgagattcgctctgaagatgatgacctggatagtcgagtagcagctttaagggcaacagagtctgaaaaggtgccccaagagttacagtttgtgaagtctcagatggaccaaataatcaagaactttgaatctcaactcaagaattcagaacttgaacagtacaattcactaatgagaaaagcagaagctgccactgcttcattggctgctactcaccagccaactgattttaccttcggtgatgaagaaaatgagagctcatatgttcctgaaatcggagataaagtgtacgttgaggggctgggaggaggaagtatggctagtgttgtcgagacacttggggaggatggtagctgtatggttcagtatggaaaaataaag

SEQ ID NO: 29853 - DNA, 2670 bp, Oryza sativa
  Clone ID: PAT_MRT4530_34314C.1
atggcggccgccgccgccgccgcgaaacccaaccttcttcttccagtctccgtggctatcccctcttctagggtttctcttcccaccggcctcgtatgcagcgcacggaccccgccgccacgcctcagggccgccgccgccgcctcccaggccctaacgtcgcctgtcgcggcggagactccggaggcgaagcagatgcgggtagagacggaggccgccctggaatggggcggcgtgtgcgcgcggctggccgggttcccctccaccgccgcggggcgcgccgcctgcggagaggggcgggtgcccgtcgggcggagccgggaggagagcgagcggctgctcgaacagacggcggcggccgcgctgctgcctgctccgctggatttcggcggcgtggaggacgtgtcctccgccatcgccgcggcggctggggcccggctgcttgcggtgagggagatatgtggagtcgggcgcagcatccgtgccgcacgcagggtgttcgaccaattgaagacgctctcagaggagacaccagatggaaggagctacactcctcttctggatataatgcaagactgtgacttcttgacagaacttgtgcaacggatagagttttgccttgattatactctttctgtggtccttgatcgggccagcgataaactagcaacaatccgcaaggagaggaggaagaacattgatatgttagaatctctgttgagagatacatccacaaagatcttccagggtggtgggattgatagccctgttgtcactaagcgccgttctaggatgtgtgtcggtgttaaagcttcacacaagcatctggttcctggtggaattgttttgagttccagtggctctggcgcaacatattttatggagccaagggacgccatcaggctgaacaacatggaagtaaagctctcaggtgatgaaagagctgaagaattagcaatattgggtctacttacttcaagcatagctgactccgaaatgaagatcaggcatttgatggggaaaatattggaacttgacctggcttgtgccagaggttcatacgctttatggataaatgctgtgaggccagcctttactgacagggatagtgatactcaactgaatccaaatagtgaatgctcagtttttatcgagggcattcagcatcctttacttcttgaacagtctcttagtatggtaaaagaatcaaccggagtagggaaaggacagctttctgatgaacatcttgtctctccaatgcctattcctctggacatgcaggtgagaaacgatactaggataattgtgatctctggacccaacactggaggcaaaactgccaccatgaagacgttggggttggcctctctgatgtcaaaggctggaatgttcttcccagccaaaggaacccctaggcttccatggttcgatcaagttcttgcagatatcggtgatcaccagtcgctggagcatagcctctctaccttcagtgggcacatatcacgtcttcgcaagattgtacaagttgtgtcaaaagattctctggttcttattgatgagatcggcagtggtacggatccgtcggacggtgtagccctttcaacaagcatcttgaagtatcttgctagtaggcttaatctggccattgtgacaactcattatgctgatctaagtcgtctgaaagctgttgacgatcgatttgagaatgctgcaatggaattttgtttggaaactctgcaaccaacatatcagatcttatggggcagtactggtaattcaaatgcattgagtattgccaagtccattggttttgatcagaaagtgcttgctcgtgcacaagaatgggttgagaaacttttgcctgacaaacagaaggaacgccaaggtttactctatggttctttgctagatgaaagaaaactactggagtctcaggcaaatgaagcagcatctgttgtttcagacgttgagagactgtacaatgagattcgctctgaagctgatgacctggatagtcgagtagcagctttaagggcaacagagtctgaaaaggtgcaacaagagttaaagtttgtgaagtctcagatggaccaaataatcaagaactttgagtctcaactcaagaattcagaacttgaacagtacaattcactaatgagaaaagcagaagctgccactgcttcattggctgctactcaccagccaactgattttaccttcggtgatgaagaaaatgagagctcatatgttcctgaaatcggagataaagtgtacgttgaggggctgggaggaggaagtatggctagtgttgtcgagacacttggggaggatggtagctgtatggttcagtatggaaaaataaagggacgaacaccgaagagatcagcagcagaagccaaccaagatggcaatgtctcctttggcccggttgtgcaaacatccaagaacacagtggatcttcggggaatgagagtcgctgaggcatctcatgagcttcagatggcaattgacgggtgcagaagttaccaggtcctgtttgttgtccatggcatgggcactggagctgtcaaggagtgtgcccttggtatactccgaaaccatcctcgagtagccaagttcgaagacgagagccctctcaactacggctgcaccgtcgcctacatcgaataa

SEQ ID NO: 29854 - DNA, 3082 bp, Oryza sativa
  Clone ID: PAT_MRT4530_34315C.1
atggcggccgccgccgccgccgccgccgcgaaacccaaccttcttcttccagtctccgtggctatcccctcttctagggtttctcttcccaccggcctcgtatgcagcgcacggtccccgccgccacgcctcagggccgccgccgccgccgccgccgcctcccaggccctaacgtcgcctgtcgcggcggagactccggaggcgaagcagatgcgggtagagacggaggccgccctggaatggggcggcgtgtgcgcgcggctggccgggttcgcctccaccgccgcggggcgcgccgcctgcggagaggggcgggtgcccgtcgggcggagccgggaggagagcgagcggctgctcgaacagacggcggcggccgcgctgctgcctgctccgctggatttcggcggcgtggaggacgtgtccgccgccatcgccgcggcggctggggcccggctgcttgcggtgagggagatatgtggagtcgggcgcagcatccgtgccgcacgcagggtgttcgaccaattgaagacgctctcagaggagacaccagatggaaggagctacactcctcttctggatataatgcaagactgtgacttcttgacagaacttgtgcaacggatagagttttgccttgattatactctttctgtggtccttgatcgggccagcgataaactagcaacaatccgcaaggagaggaggaagaacattgatatgttagaatctctgttgagagatacatccacaaagatcttccagggtggtgggattgatagccctgttgtcactaagcgccgttctaggatgtgtgtcggtgttaaagcttcacacaagcatctggttcctggtggaattgttttgagttccagtggctctggcgcaacatattttatggagccaagggacgccatcaggctgaacaacatggaagtaaagctctcaggtgatgaaagagctgaagaattagcaatattgggtctacttacttcaagcatagctgactccgaaatgaagatcaggcatttgatggggaaaatattggaacttgacctggcttgtgccagaggttcatacgctttatggataaatgctgtgaggccagcctttactgacagggatagtgatactcaactgaatccaaatagtgaatgctcagtttttatcgagggcattcagcatcctttacttcttgaacagtctcttagtatggtaaaagaatcaaccagagtagggaaaggacagctttctgatgaacatcttgtctctccaatgcctattcctctggacatgcaggtgagaaacgatactaggataattgtgatctctggacccaacactggaggcaaaactgccaccatgaagacgttggggttggcctctctgatgtcaaaggctggaatgttcttcccagccaaaggaacccctaggcttccatggttcgatcaagttcttgcagatatcggagatcaccagtcgctggagcatagcctctctaccttcagtgggcacatatcacgtcttcgcaagattgtacaagttgtgtcaaaagattctctggttcttattgatgagatcggcagtggtacggatccgtcagacggtgtagccctttcaacaagcatcttgaagtatcttgctagtaggcttaatctggccattgtgacaactcattatgctgatctaagtcgtctgaaagctgttgacgatcgatttgagaatgctgcaatggaattttgtttggaaactctgcaaccaacatatcagatcttatggggcagtactggtaattcaaatgcattgagtattgccaagtccattggttttgatcagaaagtgcttgctcgtgcacaagaatgggttgagaaacttttgcctgacaaacagaaggaacgccaaggtttactctatggttctttgctagatgaaagaaaactactggagtctcaggcaaatgaagcagcatctgttctttcagacgttgagagactgtacaatgagattcgctctgaagctgatgacctggatagtcgagtagcagctttaagggcaacagagtctgaaaaggtgcaacaagagttaaagtttgtgaagtctcagatggaccaaataatcaagaactttgaatctcaactcaagaattcagaacttgaacagtacaattcactaatgagaaaagcagaagctgccactgcttcattggctgctactcaccagccaactgattttaccttcggtgatgaagaaaatgagagctcatatgttcctgaaatcggagataaagtgtacgttgaggggctgggaggaggaagtatggctagtgttgtcgagacacttggggaggatggtagctgtatggttcagtatggaaaaataaaggtccgtgtcaaaggaaacaagataaagctggtccaaagaggcacgaaggacacgtcagcctcctctcctgtaaaaggaaagggacgaacaccgaagagatcagcagcagaagccaaccaagatggcaatgtctcctttggcccggttgtgcaaacatccaagaacacagtggatcttcggggaatgagagtcgctgaggcatctcatgagcttcagatggcaattgacgggtgcagaagttaccaggtcctgtttgttgtccatggcatgggcactggagctgtcaaggagtgtgcccttggtatactccgaaaccatcctcgagtagccaagttcgaagacgagagccctctcaactacggctgcaccgtcgcctacatcgaataagcacattatacggcttcatcgaaaacttatggcaaagatcgtcttatgcacacttgcacgatactagctggattatacaggattgtatgccacgtgagatgaaattttgaagccgtatggttgccatgtgacaactgatttggacaaggtggcccaggaactaatggagcttggagctgatctgtgcgctgatacatgcacaatggtggcattcaagattagcctgtgagtacgaattcttgcatgtgttacctttgacttcttaatccatggcagatatatgcatagttttgtacaaaaaaaaaaaaaaaaaaaa

SEQ ID NO: 29855 - DNA, 1455 bp, Oryza sativa
  Clone ID: PAT_MRT4530_34316C.1
atggcgcttcgtgtacagctcgtcctcgccgtcgccgtggttgtgccggcgttgggggtggcggcgggtggtgctaccttgggggtgaactatggccaggtcgccgataacttgccgccgccgcaggcggcggccatgctcctccgctcgctgaacgccaccaaggtgaagctctacgacgccgacgcgcgcgttctcagcgcgttcgctggctccggcgccgacttcaccgtcggcctcccggaccgcctcgtcccgcgcctcgccgccgacccgtccgccgccgcggcgtgggtgcgcgccaacatcctgccccacatcccggcgacgtccatcaccgccgtcaccgtcggcaacgaggtgctcaccggcaacgacagcgccatgctccggtcgctcctcccggcgatgcagtcgctccacgccgcgctcgccgcttgcaacctcacctcgcgggtggtcgtcaccacggcgcactccctcgccgtgctctcctcctcgttcccgccgtcctccgccgcgttccggcgcgagctcctcccgtacatggcgcccctcctcgcgttcctcgccaagaccggctcgccgttcctcatcaacgcctacccgtacttcgcctacaagggcgacccggagcacgtggacctcaactacgtgctgttcgaggccaatgccggcgtcggcgacccggcgacggggctgcgctacgacaacatgctgcacgcgcaggtggacgcggtgcgcgccgcgatctgcagggcaaactacggcaaggcggtggagatccgggtgtcggagaccgggtggccgtcgcggggcgacgacgacgaggccggggcgacgccggagaacgcggcgaggtacaacggcaacctgatgcggctggtggcgcaggggaaggggacgccggcggcgcccggcgaggcgctgcaggtgtacgtgttcgcgctgttcaacgaggacatgaagcccggcccagcgtcggagcggcattacggcctgttcaagcccgacggcacgccggcgtacgacgtcggcgtgaaggctccgacgattggcggcagctggaaggggagagccaatggcactagcggcggcggcgccggcgggctggtcgtggcggaagggcccggaggggcagacggtgcagggcagggcactggattctacaccgtgtcagcagcagcacacaagtttattggtgggcttgacagcccatctgagagtgaagctttggtaggcctttgcaaggatggcccgcagaaacgaggcctcttctgctctttgttctcactggccgtgaaaatgaaaagaaacagactgacggccggcgacatccgcgaagagggggagagggagaggtcggtggcgatggatccgtcctcccgcacccccacttctcggcctccgcctcctaagctcgacttccgcccctattgttggagcccgaggtga

SEQ ID NO: 29856 - DNA, 1797 bp, Oryza sativa
  Clone ID: PAT_MRT4530_34317C.1
atggaggagtacctcaaggagatcacacaggaggcgctgatgagggcatgcactaggactcgtcaaggcgtgatcatcaagcccgggccacgtcctaagctcgctcccgatttggtaagcattgaagaggtaacacaatctatccaacaacaagtagcatctacaatagattcatctatgactgtttttaaagataagttagatgcaacttttgagggtaaatttgatgagtttttaagatttaaattcggccctcttatggccgattacatgtcaaaagataaagcctctaccactgctaaccaacctcctatagaccaaacgggtagcggaaccgatggagcggcgcacacggccggtccgaccagacctgatggccggtcagaccgcgacttcaccgtcggtccgaccgggactcaagccggtccgactgctcctctgcatgccgatcagactgggccctgggccggtcagaccggcgcgattataccggtacaggggatagatccaacgactaatgctagttatttgtatcatcttagaacatttgatcctcctgtatctactgctgcaaatagtccccaagttcccccgcatgttcctaatgcttataatgatgttgctagggggtatcctcccgatactagacaaggccaatataatcatattgcgccacaaacacaacctatttggccaccaaatccaccgccaaatcagcataggcctgataatatggaggatatatttagtgagattattagggataaattcgggattgaaactaggaatcgtgctagggtttacaaaaagccatatcctgactattatgataatgtgacgtttcctcgtaattatagagttcccgaatttaccaagtttagtgctaaagatgagaaacaaattagattacctaaaggccatgtcataccatctcaagaagaattgaaacgtcgagcttattgtaaatggcatgattctcattctcattatactaatgattgcaatgtgtttcgacgacaggttcaatcggccatagatgaaggacttgatcatgatccttttccggtgaatacaattaatttcaattataagaaggtgttgattcggccggagcaagctgaatctagtaagagaaaaggggtggttattggcgaaccaaggccaaagatgatagtgccaaagaagccggaggttggcgtttggaaggagaataagagtagagctttgacttctaaagcccctaggaagaccaaggtgacttttgatatgcttttggagaaatatgagaagcaaggtggtgagaaaattcgcaacaaagtcatatgcctccaatacaactcaaccaagggtggggaggaccgaggaggccaattcatgcgcgtttgtcttcaccaaacaacggccggttttatgcgccggtttgatatgaggtttgcaaagggcgatgtgagggcttcatcgtcttcgaacaagaccaatagaggacattatttacctcctggaacagagctgattcctaagtggatgcctaaggatttgacggctactcagaagagaaggttgcaacgtcttcgggctcaagaactaagagagaaaaaggctgaagagcaaggagataaaaggttcatagagttgcgaccaccaccggtgtggaggcataaatccatagaaaaggaaaaaccggttgttgtagaggagaaggaggaacaatcggttgataaaggtgaatcgtctccaaaagaagacgtggatatcaacatggccatgttgatgggaagccggtttctaggatgctag

SEQ ID NO: 29857 - DNA, 267 bp, Oryza sativa
  Clone ID: PAT_MRT4530_34318C.1
atggctgcttctttcatggctcgcgtcgtgctaatcctagtgctgtccctctggctgctgccgtcgcttctgcccggttctctcgccgccggcgcttcatcagccggcaacgagcttttgccattgagcggtggcagctccaggcggatggcgatggtgagaagcagggagaggaaagacggctatggtttaagtatcgcgaaatcagcacggcgatctctccggcttacacccggttatgaacacaggacttcacacaagcagtaa

SEQ ID NO: 29858 - DNA, 544 bp, Oryza sativa
  Clone ID: PAT_MRT4530_34319C.1
gagactctatggtgttcagttaatacttcgcccatatccccatagcccaaggggtggcctccagttttggaaattttgttgttttggagataccggataaagaaattaccatacgcatgggaggatgcatgctacttgactcggatgtctcttaagatacctgctaatacatgggaaaatatttgatgattattaggaaggagaatcttgtcatgaaacgcctctgggaaaagaacaatatggagaggtatatttgccagagatgagaaaggaatcaagcgtagaagatagctgtagcatattcaacaagaacgtggaccgagaaccccctggatgtcacaacccaactcctatttgtcaagcttgtgtgacgtacgttgctttattcccttttagggattaaaaccaagagattaggagctagtttaccatcgtcttccctccacccatctgtcactccaaacttggtaatttcccattcccaacctgtagttttgaaaaacatcaaaagggtgttttgatggataaaaaaaaaaaaaaaaaa

SEQ ID NO: 29859 - DNA, 2334 bp, Oryza sativa
  Clone ID: PAT_MRT4530_3431C.1
atggtctacactaggaatggtagccgcgcaacaggcgagggcagcaacggcgaagagcgcactgatggggtgcatcccaacagtgattccggcaatggtccgccaccacttcccgagaatccgacactagcccaagtgatggcacatcagactcagatgatggcagccatgatgcagcagatgcagcaccagcaccagcagatgcaccagaggatgctgcagcacgctgaacagcagcatcagcagtttggtccccctccccctcagtctaagttgccagagtttctacgtgtcaggccacccaccttctccagcaccaccaaccctatggaggcgaatgactggctccatgccatagagaagaagctgaatctcctgcagtgcaatgatcaggagaaggttgctttcgccacacaccagcttcaaggtcctgcgtcagcttggtgggacaatcacatggccacccgcccaccaggtactgaagtcacttgggcagagttctgccgtagcttcaggaaggcgcaggtgccagacggggtcgtggcacaaaagaagagggaattccgggcactccatcagggcaacaggactgcgacagtgtatctccatgagttcaatcgcctcgcgcgatatgcaccagaggatgtccgcaccgacgccgagaagcaggaaaagttcatggcaggtctggatgacgagctgaccaaccaactgatatctggggactacgctgactttgagaggctggttgacaaggcaatccgtcaggaggatcaacgcaacaagatggacaggaagaggaaggctgctcagttcagggcagatcagggaagtcaccagaggccgcgcttcactcccgggcagcagggtggacctaccaccatgatcgttcgtcagcaccgcccgttcaaccctagcaactttccccagggcgccagtggcagtcagaaccaccatggaggtcagtccaaccgcggtgcagctccacgcccaccaatggcaccggcacagtcaggcccgcccgcgcaagccaagaaggagactggagcaaaaccagggtcctgcttcaactgtggcgagcttggccacttcgctgacaaatgcccgaagcctaggcgtgccgggccaaggtttatccaggctcgtgtcaaccacgcatctgcggaggaggcacaagcagcaccagaggttgtactggtcaccttgaccaacgagaagggagaaacggtagtgtacaaatcaccagactcaccaaagcgaggggtctctttgaatcagattgagacggaaatcccagtggacaccgtggagaagaacttgagaaaattggaagatatacccatagtctgcgagtatccagaagtgttccccgaagacctcaccaccatgccacccaagagagagattgaattccggattgacttggcaccgggaaccgctccaatttacaagagaccgtacagaatggcggccaacgaattagccgaggtcaagaagcaggttgatgagcagctgcagaaagggtacattcgaccaagtacttcaccttggggtgctccggtcatttttgtggagaaaaaggataagacgaagaggatgtgcgttgattatcgcgcactcaacgaggtcacaattaagaacaaatatcctttgccgcgaatcgatgatttgtttgatcaactgaaaggagctaaagtgttttctaaggtagacctgcgatcaggctaccatcagttgagaattcaggaagaggatattccaaagacagccttcaccactcggtacaggctatatgagtgcacggttatgtccttcggacttaccaacgcacccgcgttcttcatgaatctgatgaacaaagtgttcatggaatttctggacaagtttgttgtggtattcatcgacgacatacttatctattcaaagtccgaagaagaacatgagcaacatctccgtctggtactcgagaagttgaaggagcaccagctatatgccaagttcagcaagtgtgacttctggttgacggaagtcaaatttctgggccatgtcattacagctcagggtgtggcagttgatccattgaacgtggagtcagttaccaaatggaccccaccgaagaccgtgtcgcagattcgaagttttcttggacttgcgggatattaccgccgattcatcgaaaacttctccaggatcgcccgacccatgactcagttgcttaagaaagatgagaagtttaaatggacagctgagtgcgataagagttttgaggagctcaaaaagaaattagtatccgcaccagttttgattctgcccgaccagatgaaagacttccaa

SEQ ID NO: 29860 - DNA, 1674 bp, Oryza sativa
  Clone ID: PAT_MRT4530_34320C.1
atggcaggattgcgcaaggagaaacaagatggtcatgctcaacatcgacttcttcatcatcaacgagatatagcgacttcttcaagcattgcatctaaggtacatgataatgatcttgcaagggtagaatctaatttgccagtttttgatggtaaatatgattccgccgcttatgttaattgggagctagcagtagacaaacaatttgatgaatatgatttctctaatgctcaaatgattaaggctgctagtaataagtgtaccggttctgcatccttttggtggtatactgttggcaataagcttgaaacttgggatgaatgcaaaacaatgatgaggaaaaactttgtgttttcatattataaacgtactctccttgagaaattagagcatctaaaacaaggtgacaaaaccgtgcgggagtactttcataactttaaaatttgtatcacttatagtggtttaaaagaaagcaatgagaacacaatgactagattttttagagggcttaattatgatattcaagctgggcttattaacgtgacatataatcatataggccacttgttcatgcttgcttgcagtgttgagagcaatattttaaagaacccaagggagaaacgagctatgcttgtgcctcctattactgacattttgcagggagctcagaatattcaccatgaggaaaagagcaatatgctcgagatgtcatctccatcgctcacgaaggaagaagagaagactgaagcacctatattatctgaagagggcataaaaggcaaattaaatggtgctgatattactcaagagttgtgtgataatgcttcacctatatccctgccacaactagtgaatgaacatgctatttctagtgtttcattgtgtgctgattttaagcatgttattcacattgttaatgaagtagaggaacgtgaattgacatcttctttaaatattttgggctatgttcagtgtgacgatttttttgagctcgatagtttgaaggagaaattatttgataaatatgatttgccatgtccaactaatgtcatttttcatatctttggcgaatataatgatagacagatatacttggtgcatagaatttatatatgtttggatttacaacctcctatagatgtggataaaacatgcaagctagagagacctattattgctaatcatattatctcgagtttgtcttgttttgattggaagaaaaaggttgttctaaatggaccatgtgacgagcaccatatggaaaaaccgaggacggttttccgtgaagaaggggaggatgatgtgaccatagctactacggatacaaccgttgctcacatcatggatgaacaagatgctatcaagatcaaagtcctccaactgctggaatccgattcggccacctgctacactgttgacttcaaacggccaccgaatattcatacgacatccgtttttgacccgaataaggttggtctgcaccgacaagatcaacaacccacggagagaacttttacatcaagtacttataatttacatcttccaccattgccgatgatcactgtcaagcttatttgtccatctgcggagctaatggattcatcaattctccaggttatattctatgatggcatcctcagttcagtaccaacggtgcagtttgtctctcattaa

SEQ ID NO: 29861 - DNA, 1802 bp, Oryza sativa
  Clone ID: PAT_MRT4530_34321C.1
atggcaaggttacgcaaggagattggagcagctcatgcaaaacgtggatattttcatcttcgacaacaaatggtaggtgatccacatggcgcatataaggtacatgataatgatcttgcaagggtagaatctaatttgccagtttttgatggtaagtatgatttcgccgcttatattaattgggaactagcagtagacaaacagtttgatgagtatgatttctctaatgcttaaatgattaaggctgctagtaataagtgtaccggttctgcatctttttggtggtatactgttggcaataagcttgaaacttgggatgaatgctaaacaatgatgaggaaaaattttgtgttttcatattataaacgaactctccttgagaaattataacatctaaaacaaggtgacaaaactgtgtgggagtattttcataacttcaaattttgtatcacttatagtggtttaaaagaaagcaatgagaacacaatgactagatttttcaaagggcttaattccgatattcaggcttggcttattaacatgacatataatcatataggccacttgttcatgcttgcttgcagtgttaagagcaatattttaaagaacccaaaggagaaacaaactatgcttgtgcctcctattactgacattttgcaggaagctcagaaaattcaccatgaggagaagagcaatatgatcgagatgccatctctatcgcttatgaaggaagaagagaagactgatgcacctacattatctaaagagggtataaaagataaattaaattgtgctgatattactcaagtagagcaaattttggtggaaactacttctgatttgcctttgtcacaagttgatttacttgttgttccctgtgataaagaagagttgtgtgataatgcttcacttatatccatgccacaattagtgaatgaacatgctatttctagtgttccattgtgtgctaattttaagcatgttgttcacattgctaatgatgttgaggaacgtaaattgataacttctttaaatactttgggctatgttcagtttgatgatttttgtgagctcgataatttggaggagaaattatttgctaagtatgatttgccatgtccaactaatgctatttttaatatctttggcgaatataatgatagaggaatatatttggtgcatagagttttcattttttcggatttagagaaacatgttattgttaatcacactacttcgagtttctctagttttgattggatgaaacaggttattttgaatgaactatgtgaagagcaccatatgaaaaaactgaggacgattttccatgaagaaggggaggatgatgtgaccatggctactacggatacaaccgttgctcacatcatggatgaacaagaaaatatcaagatcaagtcctccatgtgctggaatccgattcggccacctgctacactgttgacttcaaacagccgccaaatctacatacgaccaccattttcatcccgtgagtacttgatggaaagctctcggagtcctctttccaacggatccagcctcatcgccaaattccatccaagtcatccttcacctgtgcttgcaggaatagggttgatttgcaccggcaagattaacaacccacggagaggtgaatcgatcgctaaggcgcaacgcaacgtcttgacaaggaggcaagcccgcctccaggttgttgtcgccgccgttcgccgccttggccaattgatcggtcgatcgatctcctgtaggctgctgctgctcatgtattgtttcaattggacttg

SEQ ID NO: 29862 - DNA, 1464 bp, Oryza sativa
  Clone ID: PAT_MRT4530_34322C.1
atggcaggattgcgcaaggggaaacgagatggtcatgctcaacatcaacttcttcaccatcaacgagatatagcgacttctttacgcattgcatatgaggtacatgataatgatcttgcaatggtagaatctaaattgccagtttttgatggtaagtatgattccaccgcttatgttaattgggagctagcagtagacaaacaatttgatgagtatgatttctctaatgctcaaatgattaaggctgctcataataagtgtgccggttctgcatcttttttgtggtatactgttggcaatatgcttgaaacttgggataaatgcaaaacaatgatgaggaaaaattttgtgttttcatattataaacgtactctccttgagaaattagaatatctaaaacaatgtgacaaaaccgtgctggagtactttcataactttaaaatttgtatcacttatagtgatttaaaagaaagcaatgagaacacaatgactagattttttagagggcttaattccgatattcaggctgggcttattaacatgacatataatcatataggccacttgttcatgcttgcatgtagtattgagagtaatattttaaagaacccaagggagaaaaaagctatgcttgtgccttctattactaacattttgcagggagctcagaacactcaccatgaggagaagagtaatatgatcgagatgccatctccatcgctcacaaaggaagaagagaagactgatgcacctacattatctgaagagggcataaaaggtaaattaaagggtgttgatattactcaaggtgagtgtggtcacatttgtccactatccatgctaatctagagcaaattttggtggaaagtacttctgattttcctttgtcgcaagttgtgtgataatgcttcacttatatctatgccacaactagtgaattaacatgctatttcaagtgtttctttgtgtactgatttcaagcatgttgttcacattgctaatgaaatagaggaacgtgagttgatatcttctttaaatactttgggctcaataatttgaaggagaaattatttgttaagtctgatttgcaatgtccaaccaatgctatttttcatatctttggggaatataatgacaaaggaatatagtaggtgcatagagttttcatttgttcggatttagagaaacacgttatttctcatcacactacttcgagtttctctagttttgattggatgaaacatgttattttgaatggactatgtgaagaacaccatatgaaaaaaccgaggacggttttctatgaagaaggggaggatgatgtggccatgactactatggataaaaccgttgctcacatcataaatcaacaagaagacatcaagatgcatgtcacgtacacgtgccgcttggcaagacaagcgagcgtgcacatttccttctaattctcacaaccacacatat

SEQ ID NO: 29863 - DNA, 272 bp, Oryza sativa
  Clone ID: PAT_MRT4530_34323C.1
gctgtaactggttatggtcaaccttgtgttttgtgttaagaaatgcagcaccaacggacccgccttgggataatctaatttctttgaaacgagctgcccttattgctccttcattgcaaatccagaccccacaagcggggttatttctcctagaaccatctatgattcaggataaataccccttttgggcggcctgttaaaggccaacaaagcttggacttacatttgattttcatcaaaataaacaaccccccccttctgcagctgtagtt

SEQ ID NO: 29864 - DNA, 255 bp, Oryza sativa
  Clone ID: PAT_MRT4530_34324C.1
gggctagggcagccggcggcaagcatcaagccatcaagcaagcaagcagcggctgccgccgtgcccgtgcagcgcctggccggtagccacctacacctgacacaaggcctgactcctgagcacctcgtgtcctcgtcgatcgtcggcagtcggctcgtcctcgactcctcgtgcggattgcggaacgagcggtgcacggtgggcgaagagaatgagggaaggaggaagggggagatccgtacgtatagggggtag

SEQ ID NO: 29865 - DNA, 249 bp, Oryza sativa
  Clone ID: PAT_MRT4530_34325C.1
atggggcgaggcgtgcgtcagatcgcctgtcgccacctaacccgcgatctgaccgaaacccacaaggggtcggggcgcctcggccctctgggccgaggcgggagcggtccgaccccctcggggagacaaagaggagggcgaacacatcaccctcgggcccgacgccccccgagggtgccaggccacgtgggcgattgtgtctgcctcaagcctctagtcatgatactcccggtcccatgtcaccgacac

SEQ ID NO: 29866 - DNA, 543 bp, Oryza sativa
  Clone ID: PAT_MRT4530_34326C.1
gcttttctgggattggagctggcaagagttagctgaatatgaccttttagcaatgctaggctatgtgtatacagtcacacagtccaaaattctatatgtggggcattcacagggaactataatgggtttggcggctttgacgatgcccgaaatagtaaaaatgattagctctgcagcacttctttgtcctatttcttatcttgatcatgttagtgctagttttgttctcagagcagtcgccatgcatcttgatcagatgcttgttactatgggaattcaccagctgaacttccgtagcgacatgggggttcaaatagtagattctttgtgcgatggtgaacacgtggattgcaacaatttgctatctgcgattacaggtgatggttgcaaaaataaattacttggttgcttttttcctgtattggtcctaaagaaaggtattgttgttctgcatagttcacatttgggtgtgaaacattatatgcatctttcattgattgagggtacagaccaaacatgcactagtattactggactatgaaa

SEQ ID NO: 29867 - DNA, 176 bp, Oryza sativa
  Clone ID: PAT_MRT4530_34327C.1
tccgccgctgctgccgattcgggagattggatcggaagcttctaggaagtttccgtgggcgatggcgatccgcgcgaggtcttcctcctcctacgccgtcgcggcggtcgcgctcgcgctcgcgctggcgtccgtcgccgctctcgccggcgaggtcttcttccacgagaagttcg

SEQ ID NO: 29868 - DNA, 2071 bp, Oryza sativa
  Clone ID: PAT_MRT4530_34328C.1
tggcgctcggctcgccgggaagcagagcagcagcagcgaacccctctctcgccgcagatcccaacgccgcacacacacgcacacgcacccgcacgcgcacgcatttccagctcgcgacgacgcccatctcgacgcgacgcgatccccgccaagtcaaaatgtcgtgcccgatcgtaccaaaccaagtcacgaggcagaggcagagcccacgccgcgcagatccacctctctccgccctggattccgcggagcaggaggcggtcaagccgtcgccgccgccgccgggccgcatccgctaccgcacgccctcctccccggacctcctcctcgccccgccctccgacgccgacgccaagaacatgcgccgctactccgcgctgcccggcggcggcgcccgccccgacacgctcgccgaccgcctccaccgctaccgcggcgtcctcctcgtcatcctcgccccgctcgccctcgtctccctcgtcctcctcctcatgccgcgctcccccgcctcctcctccgccgccgccggcaggaggtggggccccctcgacgccaacaagtacgccgtcattttcgacgccgggagctccgggagccgcgtccacgtcttccgcttcgacgccaacctcgatcggctccacattggcgaccagatcgagctcttcgtccagaaaaagccggggcttagcgcgtacgccaagaacccgcaggaggctgccaaatcgctcgtctctctccttgaggatgccaaacgagtggttcccgcggaattgcgcggccagactcctgttagagttggggccaccgccgggctaagagcgttgggagcagaaaaatcagaggagattttgcaagcggtcagggatcttcttcgcgaaaagagttcgttcaagacccaaccggattgggttacagttcttgatggacctcaggaaggcgcatatgaatgggttaccatcaattatctgctggggaaattgggaaagacttacgcagacacagttggagtggttgatcttggaggtggatctgtgcagatggcatatgcaattgcagagaaggatgcagtgaaggctcctaaaccatcagagggtgaagattcatatgtgaagaaactgtttcttaaaggaacaacatattatctttatgttcacagctatttgcattatgggttgctggctgctagagcagagatcttaaaagccggcaatggcaaaggttacagctactgtacattggaggggcatcaagggcaatacaaatatggcaatggcaaatttgaagcgtcggcttcaccatctggtgctagttattcaaaatgcagggatgatgtagtgaaagctcttaaagttgaccaagcatgcactcacatgaaatgttcttttggtggcatttggaatggtggtggtggcgctggacagaagaatttgtttgtggcatcatttttcttcgacagggcagctgaggctggatttgtgaatcccaaggcacctgtggctaaggttaaaccttcagattttgaaaaggctgccaagcgtgcatgtaagttaaacttgaaggacgccgaagctgcctaccctggtgtccaaaaggataacattccatatatctgcatggatctcgtttaccagtacaccttacttgtggatggatttggtgttggttctcaccaagagatgaccttggtaaagaaagtcccttacagcaacgcgtttgtggaagcagcatggccactgggaagtgccattgaggttgcatcttgatagacagacagcagaaagttcagcaagggagctacgatcagagggcgtcatcgcccgtaaagttttggatctggagggtgttcgcttgctcggcgctgcgcacgccccaagtgaccattttgttactgaaatcgattgatttaacctgcttctatacagtagcctgataatgagtgatacacaaggacccgccagcttgcatagttgcatacttgcatgcaaggggtatatacatttttttttgtaccattgaaagtaagacgagcctgtcattcttttcttgatctaactactccattctgtccgga

SEQ ID NO: 29869 - DNA, 2037 bp, Oryza sativa
  Clone ID: PAT_MRT4530_34329C.1
atgactggtttcaacctgccggaagctgtctttcggagcgtcagaccacgagtcgttgctccgcagaaaactctaccaacagagaaaccagccataccagcgccaccgaccttcaagactatggcgagcaagactcttcgcaagttcgctgctccctctactaacaatgtggccattgggccgcaggtcaacattgggggtatggatttcaacttgaagtccagcctcattacgatgacgccggctagcccgttctgtggcaagcctaatgaggatgccaatgctcatctgcaacagttcctggagatctgtagcacgtacaccatcaagggcataagggatgagtctattccgaaagcatgggaacaactgcaggagtacgtggccgcctgtcctcatcatgggatggacgactggctaatcctgcagaatttttacaatggactcaccccggtgtcccacgatcacttggacacggtagctagaagagccttcttgtctaaaacggttcaaggagccattgaactaatagagaagatagtctccaatatgggttggagcgaggaacgactccaatatgcgctaagcaaaaagcttgctgccaatgataagatcctagaaaacattaatgtcaagttagatggcttcacttctgcttttcaaaaccagctgagcttcaatcaaatgatagagacccagttagctcagttggcatccttagtccctgcaaatgatactgggaggattccggggcaacctaactcctccgttgaaaatgttaaggcgatcacgacaaggggaggtaagtccactcgtgatccgccatatcctaaccctgtaggaactaatgggatatcaaaagaagcgccatctaatgactcggctaacaaggaagttcagctagaaaagaccgtgccgcaggagtactgcgacacacggttgctgtcgtttcctcaacggagtaggaaaccgtcaatggatgagcaattcgctcgttttgttgaagtaatccaaaagatccacatcaacgtgccattgttggacgctacgcaagtgccaacatacgcccgttatctcaaggacatactcaacaacaagaaaccgctcccaacaacggatgtggtcaagctgacggaaaaatgcagcaacctgatactccacaagctcccggagaagaagaaagatccagggtgtcctacgatcaccagctcgatcggggcacaacagttcgaccaggccttgtgcgaccttcgagccagtgtcagcgtcatgccaaaagacgtcttcgacaagctcaacttcacggtgttggcaccaacactgatgcgccttcatctggctgactcgtcagtccgttacccggcagggatagcggaggatgtgccaatcaagatacaggatttctttatcccggtagacttcgtggtgctggacatggacacgggaaaagagacgccgctcatcctggagcgtccgttccttagcaccgtaggagccaacattgacgtgggaacggggagtatccgtttccacatcaacggcaaggaagagaagtttgagtttcaaccgagaacggaacaatgctccatggctgagctggcgccgacgtggcgcctacgtggcggccacgtgggctggcgggaggtagacgacgacccggtcgcgaatggacggcgggcggcggcggcgagcggcggagtgaaccacggcgatacgggcaaaagcgagcacaccgggcagttgttcgtgatgaggggagacgagccaacggctcggattcaccggagggagcttgacggcggcgaatcgcggcggcgacaaccggcggggagggaagagggaaacggcgacgaggccacgaggggtcgattcccggcggtgagagcatctacgcggcttcgggaactcgacgctagcgtcggattggacggagctacgccgagcgaggctggcgacgtgcaggtgctacggagctcgagcggcgacggcggcgagcacacggcgagcgacggcaacggtcgcggcggcgccggctaa

SEQ ID NO: 29870 - DNA, 539 bp, Oryza sativa
  Clone ID: PAT_MRT4530_3432C.1
gcacgaggcctcgtgccgaattcggcacgagtctgattcgtgttcgcttctccgactcgactcgatcgactcctccctcctcgccgtggtgcggcggcggcggcggcgaagcgcattggtggtccactccggcggcggggggagtgagaagtcaccagtaaggaggagtagaggatggcggcgagcggaggcagctgcccggcggcgatgaaggcgacgtcgcagggggcgttccagaaggagaacccgctggacttcgcgctgccgctcatcatcctccagatctgcctcgtcgtcgtcgtcacccgcgtcctcgcctacctcctccgccccctccgccagccccgcgtcatcgccgagatcatcggtggtatccttcttgggccgtcagcgctgggccggagcagcaagttcttgcacaacgtgttcccgccaaagagcatgaccgtcctggacacgctggccaacctcggcctcctcttcttcctcttcctcgtcggcctcgagctcgacatctccgccatccgccgcaccggcaa

SEQ ID NO: 29871 - DNA, 1803 bp, Oryza sativa
  Clone ID: PAT_MRT4530_34330C.1
atgacaaggcatttccaaagccgacacaggtttaccatatgccgacgagaggggtcccagaccaacaacaggttagattttaagtttgaaggcgaccgtcgatactcgcacagagtgcacgaatatcgaggcgcaactgggtggttacaaggggacatgcgggaggtagacgacgacgccggccggaacggacggcggacgacagcggcgaacggtggagcgaaccacggcgatacaggcgaaagcgagcacaccgggtggttgcacaggacgaggggagacgagccaacggctcggattcgccggagggagcttgacggcggcgaatcgcggcggcgacaaccggcggggagggaagagggaaacggcgacgaggccacgaggggtcgattcccggcggtgagagcatctatgcggctacgggaactcgatgctagcgtcggattggacggagctacgccgagcgaggctggcgacgtgcgggtgctacggagctcgagcggcgacggcggcgagcactcggcgagcgacggcaacgggcgcgagctggcgctcggcggtcgcggccaaagtggcgacagggaggatgacgccggcgaggaggaaaaaggggaaaaggagggggagaaagggggcttgcccctttgccgattcgggaaaaggaggagattagttatagattatttggagctagtaatggctcttctcctaggtggagtagagaaagtggggccgtggtggtcagtgtcttccgtaacactagcgcttgggctgattggtcggaagcaaaagcagaggaggggactaggggagggcgtggtgcacgcgcggccgcaattgcacgttacctcgcacgctaagcaaacgtggcattcaccgggactgtggatcgatccaaatgccgcggttggccagatgaatctagagcggcaagcgagcgatttggcacatatcgggtcgagtttttcagccatggaccatgggcgagtagcctcgcaagatgcaggcaagcgggattggagaaacattaacggagctgaagattggcgagcgatggcgtgcggcggcgcggcgaagatcttgtccggcatgcaacggagaggaagaggaaaacgcacatgggatcggacgaacttattgtacctgctctcatactccctccgattagtattcggccgggcagctcgcgctaatccttctataattgccccagcagacagacttcgcttcgcttttcccgcgtgtgtctgtgagtgtgagtgtgtctcctcgccttgtcttgctgcacgcctgcacgtaccgtgtcggcgcctatttggcgcgggctcgtgcgcttttgataatgcttttgctgctgctttggctttggcagttggcacaccggcgcaggaaggagaggcaagagcacgaggaaatcgagcaaatccggcgacactttattttctggtgattttctccctctattttgcgttagaaaaatcgttgacatccgaacgcgaaggcgcgcgccttccaagctccaaagcatgtggaaaaaggcaggcaaaaacgcatgcaaaaggtgaaaaaaacacaaaaccaaaaggcagagaggggttagctggtgcctcgctttcgcctttacgacgcagctcggcagctggctttgcttttgcttcggctgcaggagcgctcgtggctagcgttgataatttcgccgatgatggattcatacgcagccacgcaggctatcaccgcgactcgctagatctggcgccgtcctatcccgtgcgcacgccaacaaaaaaacctacgatcatggct

SEQ ID NO: 29872 - DNA, 1922 bp, Oryza sativa
  Clone ID: PAT_MRT4530_34331C.1
ggcagaccccaaatatattactcatttatcaacaattttatcctagttttccagggacaatgataatcacaacattcatttttgcagccaacaaatgaggaaagttctttgaaccatatggtaaaggaaacccgtaggggggggggggggaaacaagtttgggcatggggtttcataacaagagatttttccattaggaacatttacacaattacatcgacaatagggcatgagaaacacttacaggggcactacaacattaatcgtgggagaaagtagtacagtacttgggatctgatccctttcaatagcttaacaatacaccatccccattccctccagctatccccacagtacttggctaatcctgaccaccatggcctcctaataatggaggagaagcattaaattaacatgggttggctgtgcctagcacacccccctcatataacacattggcgccagctcatgttcagcttcccaataatggtcagattctacaccttaaatgtgagaacatgcaagttgcccttcggcacaaacaagcatcggcttcgcaaagtaaaaataaaatccagccgtcctatggtccggcagcaggcaagaaattgaacccacaatgtcgccgagcatgctctggtatcaacctgttgatgagctctggcgatatattcgctagttcttgcttaaagttgaacagtggggggaatggacgtccatttggcaaccttgcgtggggttctcgcaattcatcaaagaatgaatgtgcacatgcttcgagggcagtgcatcgtagatttggtgcatactggagaagacgtgatgcaaggtcaattgcttctggaggcatccgcttgtggaaaatcttgtgccatgggtgagctttaatctgaggaaatctgaattctgtgtagttgggattcatgcagcggatttcctcacgtgttggagtaccaagaacctttataatctcgacaagctgatccactgcactttcaccaggaaagagaggctggccaaggagcaactcagcaagaacacacccagctgaccatatatcaattgatgtcgtgtattcggttgccccaaatatcagttctggagcacggtaataacgtgaacatatatacgatatgtttgcttcacctttaaccaacatttttgcgctcccaaaatcacatattttgacttggtgagtaagaggatcgaccaaaagattctgaggcttcacatccctgtggcaaactccaggtacagtatgaatgtaagccaaaccacggaatatctggtaaacatacaatttgacatatataagtggcatcctttggttcatgttgctataatgcttcaacacacgatacagtgactcaggaacaaattccatgaccaggttaaggaaaagttcatctctgcttgttgtagagaagaagcaatgcttcaaagaaacaacattgcaatgatccattgatcgcataatctgcaactccctgttcttgtaacgcttgtcctgtaaaaccttcttaatggcgacagtctcaccagtctccaaacattttgcctgaaagacgattccaaatgatccagttcccacaactcgttctgccatgtagctaatcgtccttttaggttctccattcttccctccaatcgttgtggagattatgtggccggtgacaggatcactcccttccataagagaagcaccgtgcttttcaccggcgggggcgaccgctgcggcggccgcggcggagcgcggctggtcgacctgcatcgggtccgccgcggcgccgcctccggtggggtggggcccgcccggcagcgtggccatgggggggggggcaaatggagcggcctcctctctctctctctcctcctcctcggcttctctctcctctcgtctcctctcctctccggacgcgtgg

SEQ ID NO: 29873 - DNA, 2355 bp, Oryza sativa
  Clone ID: PAT_MRT4530_34332C.1
atggtgtctagattacgggatatcattatttggggttatatattgcggatgagaggtgggccgctgatggtgacagctcagtacggggaaaccagccgtactagcgccaccgccttcaagactattgccagcaagactcttcgcgagttcgctgctccctctgctgacaatgctagcccgttctgtggcaagcctaatgaggatgccaatgctcatctgcaacagttcctggagatctgtagcacgtacaccatcaagagcgtcagtcccgacgccgtcaggttgcgactgtttccgttctcccttcttgggagagagaagcagtggttttatgccaaccgtgctgttgtcaacaactgggacaaatgctctacggcattcctctcgaaattcttcccgatgggcaaaacgaatgtccttcgtggaagaatttcaagtttcccacagacaagggacgagtctattccggaagcttgggaacgactgcaggagtacgtggccacctgtcctcatcatttgatggacgactggttgatcctgatgaatttttacaatggactcaccccgatgtcccacgatcacctggacgcggcagctggaggagccttcttctctaaaatggttcaaggagccgttgaactaatagagaagatggtctccaatatgggttggagcgaggaacgactccagatccgtcaacgaggcatgcacactgtcaaggagacggagttacttgctgccaacctggaccacctcatgaaacgcttggacgaccacgagaaaaggccacaaggcaccgtcaaggctttggactcacacgttacgttccctgcaaatgaaactgggaggatcccggggcaacccgactcctccattgaaaatgtcaaggcgatcacgacgaggggaggtaagtccactcgtgatccgccatatcctaaccctgcaagaactaatgggatatcaaaagaagcgccatctagcgactcggctatcaaggaggttcagccaaagaagaccgtgccgcaggagtactgcgacacacggttgctgccgtttccccaacggatgaggaaaccgtcagtggatgagcaattcgctcattttgttgaagtaatccaaaagatccacatcaacgtgtcattgttggacgccatgcaagtgccaacatacgcccgttatctcaaggatatactcaacaacaagagaccgctcccaacaacggtggtggtcaagctgacagagcaatgcagcaacctgatattccacaagctctcggaaaagaagaaagatctggggtgtcctacgatcacctgctcgatcggggcacaacaattcgaccaggccttgtgcgaccttggagccagtgtcagcgtcatgccaaaagacgtcttcgacaagctcaacttcatggtgttggcactgacaccgatgcgccttcaactggctgattcatcagtccgttacccggcagggatagcagaggatgcgccagtcaagatacgagatttcttcatcccagctgattttgtggtgctaggtatggacacggggaaggagacgccactcatcctggggcatccattccttagcaccgcaggagccaacattgacgtgggaacggggagcatccatttccatatcaatgggaaggaggaaaagtttgagttccaaccgaggatggaacaatgttccatggtcagaataaagtacgggccgaatccgcagaatattcaagtggtcgaagtggagccacccaagacggacagcctggtgaagttcatgcaaaacttcctggagaaggaaacaacgattcccagcaaccgttattggaggacgccggtaaaatcacccgtaccggcaaagaagttagagcagctggctcagaagaagccgtcttccgcaccaaaaccaaagaaggtgcgccgtggtgagaggaatctcggccgcccgttccccttcgccgtcgaccaccggagccccctcgtcgccgtcgaccgagccgccgccgccatcctcctcgtcgccggccgtcatcggtcatcttttggcactttggatgggcaccaacaggggatgcacccggatggacccaagctccacgccatagcatcggagtctcaacctgggcaagtgccagtgaggaccggtggcatgcgcctcatgacatccaatggggggacaatcaaccctccagatcaagtgtacaacctcacggaacacatagctcaaacgcaagaatggcaacaatctgctgatgctcagttcgccaacatctacaacatgatgcagcaacagcacgataaccttcaggcgtactttcgttttcaggggttcaatccttatcaaggaccctga

SEQ ID NO: 29874 - DNA, 338 bp, Oryza sativa
  Clone ID: PAT_MRT4530_34333C.1
acaggggaatttatgttggccctttggggttaccttcttttaggtagagaaataaaaccaccgggcaaattttacagaacacatgggcccctgttaataggcgggcgatatccaataaaggaccccggccacactttaaaaaaaaacctccggggggtgaaagctagcaagtccattatatttaattgtttaatctcacccggcggtaaaaagcgttattctggggaccccctgatttggcccgaaatcttacaagaccaaccgaagataaggttaagggctcccctggggggctagggttggggcactaaggcgctgattggggcttggcctggggc

SEQ ID NO: 29875 - DNA, 384 bp, Oryza sativa
  Clone ID: PAT_MRT4530_34334C.1
ggcgtcaaataaacgctatgctgcaatcttttttttttgcctccggaacagaaatcaacagtacagtgtagacagttctatacttggacactaactgtgcccccatcgtaccccacccggagatactccgagatatcaaccgagcgaacacatctgtcactagatcacccccttaggccatgttgcttcgatccggccaccgaccgggcacagcccgccacggccatcatgggcgatgccaggaccggaggcgcacgtagatggggcggaataccgggccgatgagctccgtccacggcctgtggcaaccatggaccgctggcagaagactaccttgagctcgacgggggcgaggcatggctgaggcacggcgtcgacgacgct

SEQ ID NO: 29876 - DNA, 984 bp, Oryza sativa
  Clone ID: PAT_MRT4530_34335C.1
atgaccgtgggcacggctgttcgaacacccgtggggatcagccacgtcgggagacctccaagctttcatgacaaggcatttccaaagccgacacaggaaacggtccttaagtgcaagagcgggaaaaccgtacacccggcgcccttcggtactcgcacagattgcacgatttcagaggcgcaactgggaggttacaagggaacatgggcgcggcccaagggaaaaaggagcggaccggccgagctaaatgggccggccgacccaaggcggcccaagtgcgcgcgcgcgggaggggaggagagagagggccggtggaccgggctcaccgtgcgcggtcccgggtgggacccgcttgtcagcggctcggctcaccgtgcggagggagcacgcggcgcacgcgcgcgggcgggggagggacgcggtgcacgcgcgcggtctgcggaggaacggatgcggcaggcccacgcgcagcctcacggctcgcggtggaacgcgcgcatgggaggggctgaccggggtcggcccgtcccgacctcggctgagctggcgccgacgtggcgcctacgtggctgccacgcgggccggcgggaggtagacgacgacgccggccggaacggacggcgggcaacagcggcgagcggcggagcgaaccacggcgataccggcgaaagcgagcacaccgggtggttgcacgagacgaggggagacgagccaatggctcggattcgccggaggaagcttgacggcggcgaatcacggcggcggcaaccggcggggagggaagagggaaacggcgacgaggtcacgaggggccgattcccggcggtgagagcatctacgcggccacgggaatccgatgctagcgtcggattgggtggagctacgccgagcgaggctggcgacgagcgggtgctacggagctcgagcggcgacggcggcgagcacacggcgggcgacggcaacggtcggggcggcgccggctag

SEQ ID NO: 29877 - DNA, 1512 bp, Oryza sativa
  Clone ID: PAT_MRT4530_34336C.1
atggcgcaggttagtccgttctgtggcaagcctaatgaggatgccaatgctcatctacagcagttcctggagatctgtagcacgtacaccattaagggcgaatacgtggccgcctatccttatcatgggatggacgactggctgatcctgcataacttttataatggactcaccccgatgtcccgcgatcacctggacacggcagctggaggaaccttcttctctaaaacggttcaaggagccgttgatttaataaagaagatggtctccaatatgggttggagcgaggaacgactccagacccatcagcgaggcatgcacaccgtcaaggagacggaattacttgctgccaagctggacctcctcatgaaatgcttggacgaccacgagaaacggccacaaggcaccgtcaaggccttggactctcacatcacgtgtgagatctgcggcggcacaggtcaggggtggaaccaaccacgcccatattatcaaggaggtaacaataagggtaacttttctaaccagccctccttgaaggatcttgtttttgctcaagctaaaaccactgatgcattaagcaaaaagcctgcggccaatgacaaggtcctagaaaatattaatgtcaagttagatggcttcacttctgcttttcaaaaccagctgagctttaataaaatgatagaaacccagctagctcagttggcatccttagtccatgcaaatgaaactgggaggatcccggggcaacccgactcctccattgaaaatgtcaaggcgatcacgacgaggggagtcatccagaagatccacatcaacgtgccgttgttggacgccatgcaagtgccaacatacgcccgttatctcaaggacatactcaacaacaagagatcgctcccaacaacggaggtggtcaaactgacgaaacaatgcagcaacctgatacttcacaagctcccggagaagaagaaagattcgaggtgtcctacaatcacctgctcgatcggggcacaacaattcgaccaggccttgtgcgaccttggagccagtgtcagcgtcatgccaaaagacgtcattgacaaactcaatttcatggtgttggcaccgacactgatgcgcctccaactggctgattcatcagtccgttacccggcagggatagcggaagatgtgccagtcaagatacaggatttcttcatcccggttgattttgtggtgctagacatggacacggggaaggagacaccgctcatcctagggcgtccgttccttagcaccgcaggagccaacattgacgtgggaacggggagcatccgtttccatatcaacgggaaggaggaaaagtttgagtttcaaccgaggacggaacaatgctccatggtcagaatcaagtacgggctaaacccgcagaacattcaaatggtcgaagtggagccacccaaaacgaacagcctggtgaaattcatgcagaacttcctagagaaggaaacaacgatgcccaggaaccgttattga

SEQ ID NO: 29878 - DNA, 1315 bp, Oryza sativa
  Clone ID: PAT_MRT4530_34337C.1
ggcgagggcgcggcccgagagaaaagaggcggctcggccgagctaaatgggccggccggcccaaaaggcggcccaaagcgcgcgcgcgggcggggaggggagagagagccggtgggccgggtccatcccgcgtggtcccgggtgggacccgcttgtcggcgactcggctcaccgtgcggagcgagcacgcggcgcgcgctagggttcggggagggagacgcggtgcacgcgcgcggttcgcggaggatgcggtgcggcgggcccccgcgcagcctcacggctcaccgcggaccatgcgcacggggggggggggggggggaaacggagggagcggctggccgggtcagccgatctggtcgcggccgaggtggcgcctacgtggcagccacgtgggccggcgggaggtagacgacgacgccggccagaacggacggcggacgacagcggcgagcggcggagcgaaccacggcgatacaggcgaaagcgagcacaccgggtggttgcgcgagacgaggggagacgagccaacggctcggattcgccggagggagtgcgtcggcggcggattgcggcggcggcaaccggcggggagggaagaggggaacggcgacgaggtcacgaggggccgattcccggcggcgagagcatccacgcggctacgggaatccgtcccttgtgccggattaggaggaaacgcatcgagggaggccggcgacgagaggcgcttccgagctcgggcggcgacggcggcgagcacacggcgagcgacggcagcagtcggggcggggcgcgcccggagtccccttccgcgcccttgctcgtgcgggctcctccgacacgcgcgacggcgaaaggcggcagcgaacagagcacgggaggcggcgacaatggagtggaggcgagagacgaaaacgagggagattggaggagggaggagcttgggtttataggggcggcaatgtcggtttggaggggctctgcctccgtcccttggaagctagcgtgcagagtggcggggtcgggttgatgacgacggcgatgacggcggggtggtttggagcggggcgacgacacgggcggtaggcgcggcagaggctgacggcggcggcgaccaggcggtcggccaccacggcgcgcgcgcgcgggaagcaacgggcggcgcggcgatttgagcggcacggcttgggcacgcgtgctggctcgcggggccgagcagctgcgcggcagggcagcggggcagagagagagagagccggggagggagggggagatgggccgagagaaattcggcccatcgaacccgagggaggtaaaa

SEQ ID NO: 29879 - DNA, 522 bp, Oryza sativa
  Clone ID: PAT_MRT4530_34338C.1
gatgaatccaacttaaggaaaaaaagaggcttgatcattattagtataacgactgcgcagaacagtagcatccaaacatgagcttggcttctattcaattatggattttttatacccaagcccccctaagacgattttgccgatttatataaccactgggctacttttgtatttgcttggggagattgcccctgcctccccccctcttttgtgcttgaaactatccagcttttttcttgagatgccagacgcatttcgtaaaacactctttcgtacagcgcggaggatgggactctttcccggactgcgggttaccctagagtttgccgtggacttggatgccctgcatgcgcaaccctctctttgcgacttctttacaactgtataacggtgagtgattataaactgctgtccgcggccaagatcaccgttgcacaatgtgtttccattgttgttggcaccttgaaccccggcccgccttgaaggatatacaccacgcttggagcgtcggtgctccaaaac

SEQ ID NO: 29880 - DNA, 221 bp, Oryza sativa
  unsure (1)..(221): unsure at all n locations
  Clone ID: PAT_MRT4530_34339C.1
acccaattcccttctcaccttaactcctccaaatccaacctcatcttattcttcctcctccacccccatcgncgatccgatcccccaaantngcagtccacttcctcccgcggagaaccatccaccaccagccgncagccgncgcggagagagattaagattngtcgttatcttggttgtttgaggaggaggaggaggagggacaagatgggggcatggat

SEQ ID NO: 29881 - DNA, 4908 bp, Oryza sativa
  Clone ID: PAT_MRT4530_3433C.1
atgggttgcaagatggccggacacccacccaaccactgtggagaaggcatgatcgactttgtggcagagttggcacgtatgacgctggtggtgggctaccccaatgcgccagagtacacgacggttccaccgctcagtggcgagcttcctcaccgtgttcgcctggaggtccacggctacgtgggtacctgcctagctaacatggtggttgaggcatctggaggcacagcagatcacgcctgtcaggaggcagcatacctgatgatggccagactacgggagcgccacaactacatcttccatgacacggcgtaccgatttcaccctcgtcgagccagtggtgatgatgtcagtaccttccgtccgacagctggcgagaacgacaccacctttggtcacatgtgtgctgtgatgaggggattggataggatgcactcggatctgcacaaggcgaccaaggccttgaatgatgggaagctcatgaggatcgtcgctttgaaggatgagatagcgcgcctgaagagggagaatgctcagttaaagggtcttcccgcgccaggaggagtccggatccgcactacaccccgcaagacgacgacgaaacccgtgcgcatccagcttgcgcccaggaacccacctccgcccgcagctccggcagttcctgcagctccagctccagctcccgttcacgtgttagctcccgcgtccgctctctccttcgctccagcatcagccgccaggggtccagccagtggcaacggaggttgcttgtttgggatggtttacaccaggaatggtagccgcgcaacgggtgagggcagcaacggcgaagagcgcactgagggtgtgcatcccaacagcaattccggcaatggtccgccaccacttcccgagaatccgacgctagcccaagtgatggcacatcagacacagatgatagcagccatgatgcagcagatgcagcagcagcaccagcagatgcaccagaggatgctgcagcacgccgaacagcagcatcagcagtttggtccccctccccctcagtccaagttgccagagtttctacgtgtcaggccacccaccttctccagcaccaccaaccctatggaggcgaatgactggctccatgccatagagaagaagctgaatctcctgcagtgcaatgatcaggagaaggttgctttcgccacacaccagcttcaaggccctgcgtcggcttggtgggacaatcacatggccacccgcccaccaggtactgaagtcacttgggaagagttctgccgtagcttcaggaaggcgcaggtgccagatggggtcgtggcacaaaagaagagggaattccgagcactccatcagggcaacaggacggtgacggagtatctccatgagttcaatggcctagcgcgatatgcaccagaggatgtccgtaccgacgccgagaagcaggaaaagttcatggcaggtctggatgacgagctaaccaaccagttgatatctggagattacgccgatttcgaaaggctgatggacaggaagaggaaggccgctctgttcagggcacctcagggaagtcaccagaggccgcgcttcacccccgggcagcagggtggacctaccaccatgatcgtccgccagtaccgcccgttcaaccctagcaactttccccagggcgccagtggcagtcagaaccatcatggaggtcagcccagccgcggtgcagctccacgcccaccagtggcaccagcacagtcaggcccgcccgcgcaagccaagaaggagactggagcaaaaccagggtcctgcttcaactgtggcgagcttggccacttcgccgacaaatgcccaaagcctaggcgtgccgggccaaggtttatccaggctcgtgtcaaccacgcatctgcggaggaggcacaagcaacaccagaggttgtactgggtacgtttcctgttaactcaatccctgcaacaatactttttgattctggtgcaacgcattcgttcatttcaaagaagtttgtcgggatgcatgggttaaggaaagaagagcttagcacaccaatgagggttcataccccgggaaatagttcaacctcagtcagttttagcccttcagtgctaatagaaattcaaagatcaccatttctagctaacctcattcttctcgaatctaaagacctagatgtcattcttgggatggattggctgaccaagtttaagggagtcatcgattgtgcgaatcgtaccgtcaccttgaccaacgagaagggagaaacggtagtgtacaaatcaccagactcaccaaagcgaggggtctctttgaatcagattgagacgaaaatcccagaggacaccgtggagaagaacttgcggaaattggaagatatccccatagtctgcgagtatccagaagtgttccccgaagaccttactaccatgccacccaagagagagattgaattccggattgacttggcaccgggaaccgctccaatttacaagagaccgtacagaatggcggccaatgaattagccgaggtcaagaagcaggtggatgagcagctgcagaaagggtacattcgaccaagtacttcaccttggggtgctccgatcatttttgtggagaaaaaggataagacgaagaggatgtgcgttgattatcgcgcactcaacgaggtcacaatcaagaacaaatatcctttgccgcgaatcgatgatttgttcgaatttgatcaactgaaaggagctaaagtgttttctaagatagacctgcgatcaggctaccaccagttgagaattcgggaagaggatattccaaagacggccttcaccactcggtacgggctatatgagtgcacggttatgtctttcggacttaccaacgcacccgcattcttcatgaatctgatgaacaaagtgttcatggaatttctggacaaatttgttgtggtgttcatcgacgacattcttatctattcaaagtccgaagaagaacatgagcaacatctccgtctagtactcaagaagttgaaggagcaccagctaacgccatgttcagcaactcagggtgtggtagttgatctgtcgaacgtagagtcagttaccaaatggaccccaccgaagaccgtgtcgcagattcgaagttttcttggacttgcgggatattaccgccgattcatcgaaaacttctccaggatcgcccgacccatgactcagttgcttaagaaagatgagaagtttaaatggacagctgagtgcgataagagttttgaggagctcaaaaagaaattagtatccgcaccagttttgattctgcccgaccagatgaaagacttccaagtctattgcgatgcatcccgccatggacttggatgtgtcctaatgcaagagggcagggtggttgcgtatgcctcgcggcagttgcgtccacacgaaggaaattatccaactcatgacctggaattggcagcagtggttcatgttttgaagatctggaggcactatctgattggcaaccgctgcgaagtatatacggaccataagagtctgaaatacatcttcacccaaccggacctaaatctccgacaacgaagatggttggaactaatcaaagactatgacatgagcattcactaccacccgggtaaagccaatgtggtggcagacgcattaagcaggaaaagttactgcactgccctatgcatcgagggcatgtgtgaggaattgcggcaggagtttgagcatctcaacgtgggaattgttgaacacggtcagagcagagtaaatgattctgaaatagcagagctgaaaaagaacatgagagtcggaaaagcccgggatttccatgaagatgagcatggcacaatctggttgggagaaagattgtgtgtacctgacgacaaggaactgaaggatctgatactcaccgaggctcatcagacccagtactccattcatccaggcagcaccaaaatgtatcaagacctcaaagaaaagttttggtgggtcagcatgaggagagaaatagctgaattcgtcgcactctgcgatgtttgccaacgagtgaaggcagagcaccaaagaccagcaggtttactccaacctcttcaaatcccggaatggaaatgggaggagattggaatggactttataacaggactgccccggacatcatcgggtcatgattccatctgggtagtcgtggatcgactcactaaggttgctcacttcataccagtacataccacgtatacgggcaaaagcacggcctatcacccgcaaactgatggtcagaccgagcgagtcaatcaaatcttggaagatatgttgagagcttgcgctctcgattttggtggagcttgggacaaaagcttgccatatgcggaattctcgtacaacaacagctaccaggctagtctacagatggcaccgtttgaagctttatacggccggaagtgccgcacacctctcttctgggatcagacaggcgagcgtcaactgttcgggacagaggtattagcggaagcagaagagaaagtcagaatcatcagggaaaggttgaggattgcacagtctcgacagaagagctacgcggataaccgccgaagggagctcacttttgaggcgggagattacgtgtatcttcgtgtcactccgctccgaggagtgcaccgttttcaaaacaaaggcaagttggcaccacgcttcgtgggaccatacaaaatcttggaacgaaggggagaagttgcttatcagttagaacttccatccaatatgatcggcatccatgacgtgttccacgtgtcccaattaaagaagtgcttaagggtacccgaagaacaggctgattcggaacacattgatatccaggaaggacctaacctacgtggagaagccggttcgtatacttga

SEQ ID NO: 29882 - DNA, 1249 bp, Oryza sativa
  Clone ID: PAT_MRT4530_34340C.1
ctcacggaaccccgcgccaaccgcggcagccacgagcgccgccgccgcagccgcgtccctgcactccacggccacaatcatcggctcgaacctgaacacgagctcatcatcgcctccccctcccccttcctgcggccggagcaggaggaggtggtgaagaggtccgggtgggagttcagggcgtcgaggagcggcgcgatgggcgcgtcgacgccgcccttcggcgacttgtccggcgccggcgacgcgagcgcggccagcgccgccgccttccggcgatcgaactccatggcaggcaagcagaggaggagaggcgcctcgcgcggttagggtttctcacttgggttttttccctttcttttgtgttcaggaggcctccacctaggcccatagttgtattgggcctcaatccgccgaaaccctaaaactcatcgtagccgacatgctcctggaagaactcctcgtcagcaggatccacttcatcttcttcagcaactgggggggatttttttttatagagcaaggtttgttaacctctgcagagggggtacactttacccacacgacattactaacccggatcacccagcccgtggggatcagccacgtcgggagacctccaagctttcatgacaaggcatttcgaaagccgatacaggtttaccatatgccgacgagaggggtcccagaccaacaacagttttacccaagttgttactcagattttaagtttgaaggcgaccgtcgatactcgcatagagtgcacgaatatcgaggtgcaactgggtggttacaaggggacatggctgagctggcgccgacgtggcgcctacgtggcggccacgtgggctggcgggaggtagacgacgacccggccgcgaatggacggcgggcggcggcggcgagcggcggagcgaaccacggtgatacgggcaaaagcgtgcacaccgggcggttgcacgtgacaaggggagacgagccaacggctcggattcgccggaggttgctcgatggcggcggattgcggcggcggcaaccggtggcgggagaagagggaaacggcgacgaggtcacgagagaccgattcccggcggtgagagcatctacgcggcttcgggaactcgacgctagcgtcggattgggtggaactacgccgagcaaggccggcgacgagcgggtgctacggagctcgggcggcgacggcggcgagcacacggcgagcgacggcaacggtcggggcggcgccggc

SEQ ID NO: 29883 - DNA, 1815 bp, Oryza sativa
  Clone ID: PAT_MRT4530_34341C.1
atgggaaaggggaaaactccaggtgtgacatactaccatgaatatattgaggcaaaatttgctacaggacactcaaagattgtggtctttactcaacgcgacgcttttcatggccctcggtgcgcccaacagcagcaacacggcggccggcttctcgttcacactgatgcgccgcatcccctcggtgccgacgttctacgtcatgacgctcaccggcatcaactgccgcagcacgcgtcgccggtctccgacgcgtcgagccgcttcacggcgacgacgcgcccgccgtcgaggtcggcgcggtacacagtcccgaagctccccttgccgatgcagtacgcgtcgttgaagtgctctatcgccgccaggatgttgccaaaggagaacgtcatgtccttgctccatatcgaggccggcggctggcccgagcctggacggctcggccacggtggggcggcggtggggcaacgtgtaactcacccgatggctgctggttgggaatcctacttaggtgccgaatttcacaaccaggaccctattagcaggactgatgggaagaagtttcaaccgaggacggaacaatgctccatggtcagaataaagtacgggccgaaccgacagaatattcaagaggtcgaagtggagccacccaaaacggacagcctggtgaaattcatgcagaatttcctggagaaggacacaacaatgcccaggaaccgttattggaagacgccgagatttgctgtggtagatgagcctggttctcgtctgcttactttgcaatttctgtgcactttgaaagaaatagaagatggaatttcctttcgctttttccataaaaagtacacacttacatggaaaagcttaagtacacttcttggttttcacgattcctgtaaaatcgatctccagaaaggaatttatgggttcgagaaaaataagttttgggaagacatttctggtgctccaatttgcaagaaagctagaacgaatgatatccataatcctacacttaggctcatgcacaaatggattgctatgaccttgtttcctagaggtgatctgaggcccattaggggagatgaattgattatcatatttgccatggttagaaagatcaaaattgctcctgtgaaatgtatgataaggcaatggttagaaagtataaagttctctgctcctgttgagtgcacttctctgattactcggatagcaaaagggctaggggtcgttagcgaccaaattgcttttatctcagccgcttgtccgtgtattgatgaggcttatttagtgcaagggcacattctgaaacatggagtaaataaatctttgatttacttattccccgattgtacaaatgaaatcccgttgccaaatacggggtatcatttgtacaactgccatgaactaaccattcccctgcagaacataaaagaatctcatgcagccgtgcagatgtatgaggtaggttgggagccaactggggacgcacccagatggacccaagctccacgtcacagtatcagagtctcaacctgggtaagtgccagtgtggacctgtggcatgcgcctcatgacatccaatggggggacaatcaacctcccagatcaagtggtgtgcctccatctccaagtgaatgtcgctcaagttcctctcgttgggacttgggtgaaatcactaggagaatggacacccttgatatgcagacgagagagatccagtacaacctcacggaacacatagctcaaacgcaagaatggcaacaatctgctgatgctcagttcgccaacttcaacaacatgatgcagcaatag

SEQ ID NO: 29884 - DNA, 1083 bp, Oryza sativa
  Clone ID: PAT_MRT4530_34342C.1
ctacgtggctgccacgtgggctggagggaggaagacgaaggcgccggccgcgaatggacggcgggcggcggcggtttctccggggcgccttgcgacgatgaggggcgacggggcgtacaccgggatgacgaggaagaatgagagggagcgagccaacggcttggattcgccggagggagtccgtcggcggcggatttcggcggcggtaaccggcggagagcaaaaggggaaaacggcgacgaggtcacgaggggccaattcccggcggtgagagtatctacgcggccacgggaattcgttgctagcgtcggattgagcggagtttgggaaaaggaggaggggagcgggggcgtcgcggcagagggaggagggctctgcctccgtcccttggcggcttgcgcgcggagtggcggggccgaggcgatgacgacggcgatgacggcggggcggtgtggagcggaacggcgacacgggcgacaggcgcgggcaggcgctgacgatggcggtgaccaggcggtcggccactcggcacgcgcgcgcggcttgcaacgggaggcgcggcggatggagtggcgcggctcgggcacgcgcgctggctgcggggccgagcggcagccgctccggctcttgcctcctccttgtggtcccatgacgtcggccctcggcggcccgcggcgccttatgatctcttgtcccccgctccctttgtctcccgcttttatctgcgttgctggtctcggccttctcgggttgtgtaacattctccgggtggtgctcgctacaagcgccgccaaacaggaattccgtgtttggttgcctataggggcggatcgttgtcgacttgactgcctgaaatactatcacgtagtcgacaatggggtagtcttccttgaatccaaactcagcaagatcagatatagcgctagatccctcttgttggcctccacagacaccatattgggtttgtctaggcttatctctgatgtcgataaccggcggcttgtcttggcgtgtgtattgtgtgtcgatctgttgttgttgttgtttcctccccctcctcctagggggtctatttatacccat

SEQ ID NO: 29885 - DNA, 555 bp, Oryza sativa
  Clone ID: PAT_MRT4530_34343C.1
atgtgctcgccgccgtcgccgcccgtgctccgtagcacccgctcgtcgccgacctcgctcggcgtagctccgcccaatccgacgctagcaacggattcccgtaaccgcgtagatgctctcaccgccgggaattggcccctcgtgacctcgtcgccgtttcacccttttctctccgccgggtgccgccgccgcaatccgccgccgacggacaccctccggcgaatccaagccgttggctcgctccctctcattctccctcgtcatcccggtgtacgccccgtcgcccctcatcgtcgcaaggcgtcccggagaaaccgccgccgcccgccgtccattcgcggccggcgccttcgtcttcctcccgccagcccgcgtaggcgccacgtaggcgccacgtcggcgccagctcggccgagatcgggtcgggccgaccccgtttcggagaccgaagacccgcagtgcgaggatttcgagggtcaagctccagatctcgagcaaggcaagccacctttgaacatcttgagcctatatttgaaatttaattatgttgcttga

SEQ ID NO: 29886 - DNA, 1446 bp, Oryza sativa
  Clone ID: PAT_MRT4530_34344C.1
atggcgacacctctgctcttgctcgagctcctgtgcttctccatggcactcgccggcggcgccgccctccgcctcgagctcgcccacgtcgacgccaacgagcactgcaccatggaggagcgcgtgcgccgcgccaccgagcgcacccaccaccggcgcctcctgcacgcgtccacggcggcggcggcgggcggcgtggccgcgcccctccgctggtccggcaagacgcagtacatcgccagctacggcatcggcgacccgccgcagccggcggaggccgtcgtcgacaccggcagcgacctcgtctggacgcagtgctccacctgccgccttcccgccgccgccgccgccggcggcggcggatgcttccctcagaacctcccctactacaacttctccctgtcgcgcaccgcccgggcggtgccgtgcgacgacgacgacggcgccctgtgcggcgtcgcgccggagacggcggggtgcgcgcgcggaggcggcagcggcgacgacgcgtgcgtggtcgctgcctcctacggcgccggcgtagcgctcggcgttctgggcaccgacgcgttcacgttcccgtcgtcgtcgtcggtgaccctcgccttcggctgcgtcagccagacgaggatctcgccgggggcgctcaacggcgcctccggcatcatcgggctcggcaggggcgcgctctcgctcgtcagccagctcaacgccaccgagttctcctactgcctgacaccctacttcagggacaccgttagcccaagccacctgttcgtcggcgacggcgagctggccggcctgagcgccgccgccggcggcggcggcggcggcggcgctccggtgaccaccgtgccgttcgccaagaaccccaaggacagccccttcagcacattctactacctccccctcgtcgggctggcggccgggaacgccacggtggccctccccgccggcgcgttcgacctccgggaggcggcgcccaaggtgtgggccggcggcgcgctgatcgactccggctcgccgttcacccgcctcgtcgaccccgcccaccgcgcgctgacgaaggagctggcgcgtcaactgcggggcagcggcagcctcgtgccgccgccggcgaagctgggcggcgcgctggagctgtgcgtggaggcgggcgacgacggggactcgctcgccgcggcggcggtgccgccgctggtgctccggttcgacgatggcgtcggcggcggaagggagctggtgatcccggcggagaagtactgggcgcgggtggaggcgtcgacgtggtgcatggcggtggtgagctcggcgagcgggaacgcgacgctgccgacgaacgagacgaccatcatcggcaacttcatgcagcaggacatgcgcgtgctctacgacctcgccaatggcctcctctccttccagcccgccaactgcagcgccgtctga

SEQ ID NO: 29887 - DNA, 996 bp, Oryza sativa
  Clone ID: PAT_MRT4530_34345C.1
atggggatgttttctgttcaaagtgcatataaaatcgcgcttgctgaacaactcaggaaagatgatcacggcgcaagtagcgcgacaggaaacggggaaagagcactttggaaacatatatggtcttttctctcaaaaaaaaaacatatatggtcagctaatgttcctcagaaagtccgtatttttgcttggcgtctggcaagcgagggattggccactcaactcaataagcaccgacggcgtataattaaaaatccagcttgcgaaatatgtggtgcccctgcaaaagatggattccatgccaatgtcgcctgtactaagtcaatagcactgagagcagagctcaggaagtgttggagattaccaccagaggaagaatttgtgcaatctggaccggactggctgttattactgctagatcacactgattcgcatacgagatccctcacgcacctgatgctgtggcgggtgtggttcctgaggaatgatgcggttcattgtcatggcaaaaattcagtttgtggatcggtgcagtttctgcagcactacgcggagacgttgttgctcacccgacaaaaagcggatgatccaaaaggcaagcagattgcccagcatatgggccaacagaagccaaattcagataaagaactgaagaaggagcataaacaacactggaaaccaccaccagtaggatgggcaaaaatcaatgttgatggtgcatttacagttgaagatggacgatgcggtcttgggatagttatcagaaattcagaagggaaagtcttgctctcttcctggcgtttcatcaggcaatgcaggacagcagaggaggcggaagtgatggcgtgctgcgaaggcctcaaacttgcttgtgctctagtggcaaataggctagcaagcaatactcaggaaagctctctttcccttggaaaaaaaaaagaaagaagaccgacacatttaatgcttatgtatatgacggaaaagttgaaagtttga

SEQ ID NO: 29888 - DNA, 209 bp, Oryza sativa
  Clone ID: PAT_MRT4530_34346C.1
atgggctcgccgaccacctatccattccttttccgcctccgacttcctcagccacccctcagggcgacagcccgcaccttgaccgcctcatctgtccccgccttcgtgaatgcgctctccctacgtcttgcgcttcttcccgaacgcctccccatcaccagggtccaggagagaagaatgaagcacgcattgccacgtgggccccatgg

SEQ ID NO: 29889 - DNA, 1905 bp, Oryza sativa
  unsure (1)..(1905): unsure at all n locations
  Clone ID: PAT_MRT4530_34347C.1
caaatgtaccagcaaccccaataccactactttgtaaacanaaccatatttattactcactacataattctctaatttcacatccaaacatccaggcacgcttaaatcagcagtagataaccagtggaagaacaagtctcttttaggccttcctgcaaacgcctccctcgcatgctgggtcagcctcagcctcagcctcgtcatcgcccttcttctcctcctccttccccagcgcgcacttggggtgcaggtcgaagtcacactccctgcacctgtacgaccacgagctgcccatctcgtcgcatccatcacagccatacgtggtgcagcgagtcagcacgagctcatgctcatcgtgcagctcgtgcttcagcttcccgggccaccccttcgccatctcgtcgatcttcctctccatctccagcccactctcctgcgtgaacgggaacgcgtcggcgccgtgggccgtcagcggggtcttggcgtccctggccaccgtcctcccgtcggcgccgatggcgacgagcgaagggatcccgcggactctgaaggtcttgctcaggtgctgcttcctctcgtcacccaggggaagagcgagccatggcatgccggagaagaactcgtcgtaggagctctggtctcgatcgctggagatgaagatgatctcgaagtcgttgtgcttctccttgatcttgttgtactcgtcgacaagtttaggcaggaaggctcggcatggtccgcaccatttagctgagaagtagaggaggacagtcttcccaacaagttctgatacaggaacctttgctccatcttttccaagcacaaagtccaaatcaccaatgaccagaagggactccaaggtctgtaactctgctttagcctttgccttctcagcaagaatttccatcttctctgcagtgaaaggaaacccttcccatgcatcttgaccatgctcatcaattatgtcagcaacattgttgttcagtgtcttcccatcaggaccaatcaggacaagtgtaggcaggcctctaagctcaaaataacgagccagcttctcacccatcttgtcttcctgagggatggcaagccaaggcatgcctgcaaaactctcattggataattcctcatcactgtccaaggatacagctacaacttcaaatttctcccctacttctttgagtttctcataaaatttagcaagcaatgaggtaaattggactactgggccatagccattcaccacaaagcacaaaccaacgtacttgccctcaaggtcagagatgggtaccctatctcccttgttcgaaagtaagtagtcgcgggtgggtgtaccaagcacactttgaacagtttgattatccttagctgccttttcctgttccttcaattcattgatcctctctgttgtaaaagggtaagcttctgtaccatgcacagtcacaagctcaactccatcttccgtataaacttcaccagatgttgcattaaggatgacgaggtgtggaatgcctctcaccttaaagcgcttattgagtttggcacggcattcggagtccgagaaagggactgccaaccatggcatctttgcaaagtatgcatcgaatgcctcttgatccttatcccctgaaacaaagacaacctcgaagttctttccctgggagaccagctcattgtatgcttcaataagcttaggcgtgaagcgcctgcatggtgggcaccatgaggccgagaagtagagggcaacggtgcttgcctcgatgctgctgatcttcaccatctcggcggagttgcggaggaggaagtccctgccgtcggcggcgaggacggtggcgatgccagcggcgtccgccatccgggagcgtatagtgtaggactagtactagtagtagcgagggagtgggcaag

SEQ ID NO: 29890 - DNA, 207 bp, Oryza sativa
  unsure (1)..(207): unsure at all n locations
  Clone ID: PAT_MRT4530_34348C.1
tgggaactggaaggtgttcaccccactcctgtgtgtaggccacacgtctatacccttggggtgcctntgggaatggtgtttgccacctttgtagcacgtgtgtgtaagggggggtagtcttttgggaaggggttntggccttccggtgtgttacatactaacggctttcgtgttaatcttattgaggncacatgtgggagcccaaaa

SEQ ID NO: 29891 - DNA, 810 bp, Oryza sativa
  Clone ID: PAT_MRT4530_34349C.1
atggcgaaacccgtgcccgtgtgccgaggctttcgccacatcatcttcgcccgtgctgccttctgccgagaactccacttggcgaaggtggtgttacccccagtcacggctttcgcccagaaatcacttctatatcttttcaaggttgtagctgcagagaaatcacttctatatcttttcaaggttgtaggaatgttttcagatgtgatcctctcgcacgccccggcccacccgggctgcgtcgtgctcatcgccgacctcgaagagacggtgctctggcactgccgccccggcgccggcgccggcggccggtggctcaggcacgagtacgacgatcacgcggtgagccccgacgtctcaataagttactcgatgtccatgctcaccacggtggggggcagattctacagcgtggaccacttacagaagcatttcctcgtcgtggctctcgagttctcgccggtggacggcgccgccccgcagttcacggccgtagcgaccaacgacacggagcacacgccggcagggcactccaggacggtgtttagggcggtggaatccgtcggggagctgttcttggtcgccatgtactacgtgaagcctcgagatagggtggcttccaagatcttggtgcttaagctggacctcttgaaacgggccagggtggaggtgatgagcacgctcggcgagaggtcctttttcttggccgcgtcgtcgaagttcggagcgtcggtgcgggcaagacaagttggtcttaaagagaactgcatttattatttgaagccagatgataaaggattaaaggattag

SEQ ID NO: 29892 - DNA, 303 bp, Oryza sativa
  Clone ID: PAT_MRT4530_3434C.1
atgcaacagcagggatggagctacgccgaagacgaagaggaagaagagcaggaggtagcttcagcggccgccattggcgagagggcaggagggttttattctggcgggcatcgcatatgtgcgagattgcgagagtggaggaggaggacgagtggaggtggaggtggcgcgcggctgcgcgaaagctacagccaaagcaagcaagcagaaattcagaagagattcaggaggccagccagccagccagccactgaagaagctgtagctgctgctgctgctgctagtgccaatccttatggtcca

SEQ ID NO: 29893 - DNA, 645 bp, Oryza sativa
  Clone ID: PAT_MRT4530_34350C.1
atgcagtctgaagccccttgcagttgtatggacacacgagaagttttagttgtaaatcctacaggttctaaccaagtagatcctgactatttggaatctgagaaacgacttgagaaatggtttgttcaacgactagctgagacaatagggtttattacgagtacacctgaaaacattcctacaaccttgaaaagatatagaagtgatttctctgcagctacaaccttgaaaagatatagaagtgatttctctgcagccataattagtaaacttgttaaggctggatcgaaaagatataaatttatagctgttggaggcttgtcatggagggccttcagccgaacctgccgaaaccaaaaagttcaagcaatatgctcacgccgaaggtgggcagcgaaagacaagagcgaagccatacgggcgaaagccgtgactgggggtaacaccaccttcgccaagtggagttctcggcagaaggcagcacgggcgaagatgatgtggcgaaagcctcggcacacgggcacgggtttcgccatagcaccaaacctcgttgacgggagatttggtggactgctacgccctcgggggatttcgccagatagatgggccgagctatttagacccactaggggcccatatgtgtaa

SEQ ID NO: 29894 - DNA, 1546 bp, Oryza sativa
  Clone ID: PAT_MRT4530_34351C.1
ggcttccgctcccccgcgccgggggctcggctggttcctccccgctccgcctctcctcctcctcctcgcgcggcggccggcgagcttggccgctccggcacgcacggttcgggcagcctccactccttcccgactcccgcccttcctcccgcgcgcgcgcgcgcgcgccgcgggccggtgtgaacaggttttgggaggggggcggcgcggcgcggccggcctcgctcgttccgccgccgccgttggcggttcggcaccggaggactgaagggagtatgaggaggtgagcattgtagctggagtgattcggttgccggaaatggtgctggtggtgaagcagcaccggtgcatgcactcggcgagctgcgtttgcatcaagggacacctcagcgaggacgcgctgttcctggtctttcgtcacatgaactggaaccccaggctgatcgccgtgctctcgtgcgtgtgcaagtggttcgacgaggtcgcgaagcaggtgctctggaaggagttctgccacgccagggcgccgaagatgatgctggatttgcattcgggtggcagtcacattgtcgacgggaactggaaggcgctcgggaagcttctcatctactgcaatggctgcacaaaagggggcctctttaacaacattcatgtccctgggcactttgtgttcaggacacgcttttcgaggaccgcgggcaagagtttcctgccccagcagtgtaggaatgatgtcttatatgtctcagatccatgcgagcatcttgatcaaggggatgaaggtgacttgggtttcttccgtggtatcttcatgtcgttcgccacctcaaaggttaagaagatgttgattgagaagcgggcaaggttccatccaagcgagtcatgtccctactgtaaggctaagctgtggagcatgttggaagcaaatatgtcgccggggagttcttctgccaggcttggtgcttacgaggattctgtggagtattttgtatgcctgaacggacatgtcattggaattggtacccttctacctctgtctgattctgaggaagtaccagaggagtagtaatcaggaacttgaatcaggtttgcaagactgaaaccctggattcgtgcatgctgttcgttgctgaatctttggttgcgactaacagtgggagaatgcatgcgcaaggcgacctgcaggtctgcaggatgacaagaatggctttgcatcgcagtgttgttcttcctgaaactttgcatcagatggggaaaaaaagctatttttatactgttctctcctttatcattgatgcctcatccctgcttcccctaattgtaaccgagacaccaatctcctgtcatgtcctatatgttcacagcacgtaatgtggtgtttatttagcttaattggactgtcaaaaatataaaactggtgctcatcacatgcatttcattttcctgtctgaaaatgctgcattacttttgagaattaaggcatgctggttcattgccatacatagccttgccatttttttcggtaatggcaaacattggtcattgc

SEQ ID NO: 29895 - DNA, 2235 bp, Oryza sativa
  Clone ID: PAT_MRT4530_34352C.1
atgataccgacgagaccgtagtcgagttggttcgactagatcacccggtgacttggctcctgtaagctccggcttcgtaggctgtggtggatgtgttggcggtgagattcgatgccttaggtcctgcccagggggtcccttttatatcgtgggtcagttgatctccaagtaggactcgaagatatcgaaccccacacggtatggcaaaaacccagtcttgtccgagtagaactccttccatccgtggattcttatccgtaaccgtggagttcttccgaccttgctcccgtccagcggtgcgtccagggcgcgcccggcgccgtggagttcctcctgtccgtcgtcaaggagcagcacgccaccaccgtggacaagacgacgtccacaccgctggttcgttctttccaggaagagacgacgtgtggcgtgcaggatttggcaaaggtgagctcgccggaggaggcggctctgagcatcctgcatgcttaagctctcctccttcgcccgccgccctcgtctcctccgccattgccactgctggagcttgagctggtcgtagtagagcgcgctcagcgcctcagcaccaccgaagtttgttttcttagctataaaagtcatgtaatctcggcttccggcttccgactccggccgttcatgccgcccgaagatgatgtggcgcacgttgtcgacgttctggacgcgctcaccggcgccgtcgagcgcgatggtcagcaggtcacccgcggtggcctgctcgagcaccgccgccacgcgcgcggggctccaggtcgcggcacgtattgggagccagcaagagatgacgccggcgaaaccacccgccactccacctgccaccgccaaccgctgccgctcgctgccgtcaccggtgctactactccatggcttcatgtccgtcgcgccctcgaggaggtcttggaccgccttggtgtagtacgcgcgcagccgccgcagcgagcggcggtacagcgccactagccaccgcacccgcagccgccggaacgcactgaacagccgcctccgcccgccggcgccgacgccacgcctcgcacggtcacatggcggcgcagcggcaacttgcggagggagggagcggtggtggcggcggcacagctgcgctagttccatccccttctccacttctccgaggcgattccccttctcaatccattcattccaccctcttccgatccccaaccgccgctggtccgtatccattccactctcctccgacccctaccgctgccggagtgctagggcatcacacgatgagtgttgcaactgaagcatgcccttcaccaaagctacacacaagactaaggctgtgggagtttgcagaccgttacgtatttgaaccagttgacggtcttgctgatttgttcctgtcagttgatcggacaaatggatcaatgagtctagtggaagagttgccacctcgtggtccctctacaaatcctaaagttagaatagtttttggtgtgattggagtgctcaaacttgcagttcggtcgtactttcttgtgatcactggccgtgattgtgttggatcctacttggggcatgcaattttcaaattgacgggactaaaagttctgccatgcaataactcgttaaatacttcttctgctgagcagaagaaaatggaatcagaattttcggaacttctggatgcagcagagaggactataggcctgtacttctcctatgatgtcaacttaacactaacttcacagaggctgcatgatctaggagatcagtttaagtcacttccactttggagacaggcagaaccaagatttctttggaacggttacttgttggagcctctaattgagaacaaactgcaccaatacttactaccagtcattcaaggaagttttcagagtatccatgcagaagttgggtcagagaaggtaaatgtgaccctgattgcacgtcggtgtacacgtaggataggtacccggatgtggaggcgaggagctgatccagagggttatgctgcaaattttgttgaatcagagcagataatgcaatcgaaagaatttacagcatcatatgtgcaagttcgaggttctatgccttttttgtgggaacaaattgttgatttgacatataaacctagttttgatgttgtcagagtagaggaggcgcctcgtgtacttgaacggcattttcatgatttacaaaagaaatatggagctgtcgtggcttgtgatc

SEQ ID NO: 29896 - DNA, 759 bp, Oryza sativa
  Clone ID: PAT_MRT4530_34353C.1
atggccagagagggaggacgagacgacggtgatgacaccggcgccgcctctacctcgcccaacagcgtcgcaaatcagtcgtcgtcgtcgtcgtcgtcgtcggagccggagccggtgcctttcccggttcaccgcttggcgcgctactccaagtcgatcgacaaggcgatcagggagtcggtcctcatcaacctgctgtcctggagcctcgagcagcggatgctgtcgcccgaggcggcggcgcatgccaccgccgacgggctcgtgggcgtggtccggtgccacgccgtggactccggcgtcaccttctacgggatggaggggatcggcaggagcttcgaggaggagctcctcaagtccttcgacaggcagctcatcgccttccgcggcggcctccccagcaggggggagaaggtgcccgtctccgcgggcgaggcggcgcggatccgcgcgctccacgccgcgttcgtggaacgggacgcggagctgtggaccctggcccacgtcaccctggccgaggacctcgcggcgtcgcgcggcggggacgcgtcggccgcctccatcccgcgcatggtggagcgcctccgccaggtgcggcgcctcttcgaggcggtgctcatcccgttgagatcgctcaagtctattttcgatgacctcctcagtagtagcagatcaccaccagcagatgctgacgtgctgggcggcgccacctgtgacacgcctgtttctaacgcaggttcttgtgtgcccaatgtctga

SEQ ID NO: 29897 - DNA, 598 bp, Oryza sativa
  Clone ID: PAT_MRT4530_34354C.1
ctaccggcggccgggagtactgccgatgcatggtgggctggggctgctgggaggggtcgggccttccttgcacgtattgcccgtaggcgtcgttgtggcgccaccgccggtggtcttcaggatctccggcgtgacgacgaacatctcctccccgccgccgccgccggctgcggccaacggcctcgccgcgaggagcacgccgcagcactgcatcagcacggccgccaccaccaacgccctcaccaacttcgccgacgccgacgatgccatgggatggggggatggcgctcagatctggaacgagcgcgcctccatccgctcgtccgaaccaagcaccggcggggagatgcggctgcataaggtgctgcgggtgtcgtggcgtaggaaaacggagaagaaccggaagatcaatgtgctacactgcgaagagttgagtccctgcgaaggtagaggtgttgcgggcgtatttcctttcgcgcagatggaaaaagctaagccgggtaaggtctccatgaacttcaaagcatttaacccacatgaccaactaaccatagaaattgagaatgatgttggaacaggacgttctttcaccgtgtaa

SEQ ID NO: 29898 - DNA, 521 bp, Oryza sativa
  Clone ID: PAT_MRT4530_34355C.1
aggactccggcgccatcctccgccacatatcctccctcaaggacatgcttgacaaggtcaacgaagagattgaagagaatattcaaaagacaagggaaatagagtcagaaatagtgaagcattctgaaactgaaaaggagtacatcatgaaagagtctgaactaatgaaaggggtatcaattgctgagtttgaactcaatggcattatacaagtggctggtaattattgcctttattcatgcagttattagctcagtggcaaatatctaagctgtggttaacttgcatagtatatccttgatagcagtatgttttaagtacgatagcagtaattttttggacaaaggttattaaagttgcttcagtaattcccttttgaggccaaagataatcttgctcttcaaaacttgaagctaaaatattgttttttcccttgattatgcaactgaaacttaaccaatttatctcgaccttaacttcaacgcatgtggctaggaatgtatctgcatgtggactctatt

SEQ ID NO: 29899 - DNA, 690 bp, Oryza sativa
  Clone ID: PAT_MRT4530_34356C.1
atggcgcatcgtcgtcgttgtctcctcctcttgctcgccgtgctgctgccggcgatggcggcaaggggcgatcccgacgcggtgcaggacttctgcgtgccggacgccgggcgtgggcggccggtggagctcgccatgctcccggcctacccgtgcaggagccccgccaacctgacggcgggcgacttcgccttctccggcgtgcgcgccgcggggaacttctcgccggagacggggttcgccggcgtgtccgtcaccccggcgcagttcccgggcctgcacaccctggggatgtccttcgcccgcgccgacctctcggcggccggcggcgtcaacccgccgcactaccacccgcgcgccaccgagacggcgctcgtcctcgccggccgcgtgtacgccgggttcgtcgactccggcggccgcctcttcgccaaggtgctcgagcagggggaggtgatggtgttcccgcgcgccatggtgcacttccagctcaacgtcggcgacacgccggccacggtctacggcgccttcaacagcgagaaccccggcatcgtccgcatcccggcgacggtgttcgggtccggcatcagggaggccgtcctcgagagggcgttcgggctcactccggcggagctccggcggctggagaagaggttcggcccgcccaagaaggcggagatggaggattag

SEQ ID NO: 29900 - DNA, 165 bp, Oryza sativa
  Clone ID: PAT_MRT4530_34357C.1
taacagatcactgcaagggttaaccacttggtaagccactggctactgtgccaaatatggttgccagtgaccatatccaagagtcaggttcaagatgaatgccaacttgtgagtagtggaagaaataagatgaggatggcttgaacggtttcacatgtggctgat

SEQ ID NO: 29901 - DNA, 318 bp, Oryza sativa
  Clone ID: PAT_MRT4530_34358C.1
atggcgtccgccgcggctaagattgccgtcgtctgtctggtggttttgtccgtggggcagtccatgatgatgacggcggcggcaactactgccgccaccggcgccacgacgtgcaactgcgacacaagcggttgctacaattgcatgctggatgtcgtcaccaactggtgcaaaggcagagatttcaactggatgggggggagggagggggagcggcaccgcgggagaaaggagggcatggagaggcaccaccggtgggggaggggcgtggagaggcgccaccggtggggaaggggcagctcgcggtgggaggagtag

SEQ ID NO: 29902 - DNA, 263 bp, Oryza sativa
  Clone ID: PAT_MRT4530_34359C.1
ggaaagcggaggttggttttataaaaaaccctgccccgcatgaggggacggggcaggatttcatgatgggatcaccatttataaccaagacccatccaggcccgtttgggagccctaaaagattgactgacccccgcccacactgtgcaacaacactacggttttaattagagcgaagaacaaagggaaaggggggcctacataaaaccggggcccgaatgcaagcaaaaaaaggcctttatcaaagttttgatcgacaggat

SEQ ID NO: 29903 - DNA, 4480 bp, Oryza sativa
  Clone ID: PAT_MRT4530_3435C.1
atggtcgagatcctggaggtggaggaggcggtggcgtttacccccaccccgtccgggagtgagtattctagtgggagccgcggccctcgtcaccgccgccgcgactccccaactcctccccgccgcgaaccctcgcggagggaggataccacccgttcgggtggttcggccctctcttcgcccccgggcggggggaggccacgacgcgtcggggcacgtcgccgcctcacttacggcgacgacgattcgccccgaggcgcgcttcaggcggcgggtgcccttctgtggcatccccccgtaaactcggagccagagacccctgttcagcgctggctagacgacttggccaacttggtcacctctgcccagcggcagttggctgctggcgaccgacctgccgccaccggtacgtcgcgtacccctgttaccctctcctcgtcggcaaggaggagggcccgtcgctcggccaccgcctcaaggcggtccacggcgccaacatcgtcaggggcctcaggaagccggaggcgtcatgacggtctctacggggagcaggacgctcggatcaacatcgagcgacgcagggacgagcgctgagctgcccgcatggggaaaggcgcctcctcatctggagtgccacgttcctcctcacgaggcggccctcccccacgctctcccctggagggacgggttgtaaggccttcgtggtgagtctccagaatgtcctgtggcccctgaagtttcgccccaacctcacggagaagtatgatggcagcatcaatccctccgagttcctccagatctacaccacgattattgtggtggcagggggtgactatcgggtcatggcgaattacttccccatggccctgaaggatcaggcgcgtggctggttgatgacccagccccccgactccatccactcctgggaggatctgtgccagcagttcgttacgaacttccagggcacatatccccgtccgggagaagaggcggacctgcacgctatacggcggaaggacgacgagtccctccgctcgtacatacaacgcttttgttaggtccgcaacactattcggtgcattccggcccacgcggtcgtgtatgcgtttcggaatggcgtgcagcataactgcatgctagagaagatcgcctccaaggagcccaagaccaccgccgagctttttgagctggcggacaaggtggctcggaaggaggaggcgtgggcctggaactctcccggcaccggtgcggcggccacggctgcccccgagtctgccccccactctaagtggcgagataggagaggcaaaaggaaaccggcccgctccgatgacgagggccatgtccttgcggcagatgggcccgcacgggccccgtgcaagggaaaggacaccggcgacaagacgatctccactgctccatccggcgagggccggtcggcagacaagtggtgctcggtgcacaacacttatcggcacagtctcgccgactgccgctcggtcaagaatttggctgagcgattccgaaaggccgatgaggagaagcggcagggtcgacgggagggcaaagcccccgccacctcaaccggtaaccggcgagaagaggccaagaacaaggcccccgccgatgatggcgctcagggaaccgtcgccacgctcgacggggggggggggggggggcgtgcgctcacacctctcgccggggcttcaaggccatgaggcgagagcttttggccgctgttcccacgcacgaggcggctcggaaggcgcgctggtcggaggtgaagctcacctttgaccagagcgaccatccgacagccccggggatgaagctccagccgtcgctgccgatcatcggcgtgactccgggacatacgtggcctcttggccacgtcgagctcccgatgaccttcggcgactccaccaacttccgcaccgagcgaaacgacttcgatgtggcggacctcaatctgccctacaacgcggtcctgggcagacccacgttggtgaagttcatggccgccacccactatgcctacctccagatgaagatgcagggccctgctggtcccatcaccgtctttggcgatgtcaaagttgccctcacctgcgcggagcaatgcgccgacaacctggcggtggccacggagccgcaggccccggaggcctccgcgtcccgcctccaagaagcgcctcacctcggctgatgaggaaggcgcgcttgtctccttccttcgggcaaattctgacgtcttcgcatggaagctgtcagatatgcccagggtcctcaaggaggtgatcgagcaccgctttgccgtccggcaaaaagtgcggcgtcaagccctggagcgacaggccttcatccgagaggaagtggcgtggctcctggaggctgacttcatccgcgaggttatccatccggagtggctggcgaacctggtggtcgccccgaaggccaacggcaagctccggatgtgcatcgactacacggacctcaacaaggcatgccctaaagatcccttccatctaccacacatagatcagatagtcgactccactgcggggtgtgaccttttgtgttttctagatgcctactctgggtatcactagattcgcatggctagggaagataaggaaaaaactgccttcattactcctgtgggcaccttttgttatacaactatgccttttgggttaaaaaattcaggacctacttttcagcgcatgactcgtattattttgagtaatcaaatagggcgcaatgtagaggcgtatgtcgatgacctggtggtaaagacgcgccactaggacacgttgctgcaggatttggctgagactttcgatagtcttaggtccacacgcgtgaaactgaatcccgataagtgtgttcggtgtgccggcgggcaaacttctcggttttctagtctccttccgaggcatagaagcaaatcccgagaaaatacacgcgatagagaggatgggcccccctacaaacttagggatgtgcagtgcgtcactggatgcatggccgccctaagtcgattcatatcgaggctgggagagagggcgctacccctattcaagctcctcaagcgctctaggccgtttgtgtggacggaggaagctgagcaagctctcaaccagttgaaagcttacctcacctcccccccatcttggtagccccggggccggaggaaccgttgctactctacttggccgcaaccccccatgtggtgagtaccgccctagtagtcgagtgcgaagagggcgaaccggaggcccctttaactcgcgatggccctacgtctcccaaaggcccggagcccgaggcccccgtgggaggaagggaggctttggcgagtggtcctaaggcctatgatcccgacatgactcgagacccccccggggcccccgagcaagggcaacccagatcatcccgccaagcaaatccaccagccggcccaagccttgcaggtcatcccgctctcttggccttttgtggtctaggggctagacatccttggaccattcaaggctgctcgaggcgggtatcaacaccttgtacgtcgccatcgacaagttcaccaagtggcccgaagcttacccgatcgtcaagatcaacaagcattccgccctcaagttcatcaggggcatcacgtcacgattcggagtgcccaaccgcatcattacagataacggcacccagttcaccagtgagctgttcggcgactattgcaacgacatgggcatcaaattgtgctttgcctcacccgcccaccctaagagcaacggccaagtcgagcgagccaacgccgaaatcctcaaaggccttaagaccaagatgtacaacgtcctaaagaaacacggggattcgaggctcgaggagttgcccaccgtgttgtgggcaaatcggaccactccaagtcgtgccacgggggaaacaccatttttcctagtgtatggcgccgaagcggtcctaccctcggagctttccctgggatcgcctcgcgtcgcgctgtacaatgaggccaaccaggatgatcttcgccgcgacgatctcgtttatcttgaagaatggagaaggcgtgtggccctgcgtgccgcgtgctaccaacaaagcctgtggcgctaccatcagcgcctcgtccgggcccagtcactgcaagttggcgatctcgtcctacgccgcgtccaatcgcgtctgggctgagcaagctctcgccaatgtgggaagggccatacaaattgatcggtgttccccggctaggctctattcgactaaccagggaggacggcaccgagttgcctaacccctggaatatcgaacacctccgtcgcttctatccatagcgtcgagattttttgctttctaggagctcgggccaacccccgcacaacccctcggtttgtgcgggcttggtcgggggctaccactgtgtatccttttccctttacaagcaatgaatttttctacttagtgt

SEQ ID NO: 29904 - DNA, 1956 bp, Oryza sativa
  Clone ID: PAT_MRT4530_34360C.1
atgccgaagaggacctcctcgcattcccccaccgtctccgccatgaatcccctcctcccttcctcctccttccccaaattcccccacccggacccaaacctcagctccccaaaccctagcccgtgtagctacctcctccacgccgacgccgacgacgaggcgctgatccaaatcccgtgcccgaaccctagctccggcgcggcctcctcctcctccgtcgtcctgccgcccatcgacccggcgccgcacatctcatcgcagttctacaccttcaccgccgagtcgcacgcgctcatgctgcgatgcgtcctcgccggccgccccgcggccgccgacgaggtccgctccgcgacgcccccctccgtgctcgcctcgtggcgggcggtgtggaaggaccggaacgaggacacggcctacctcaccgcttggaagcgcatccaggacaagctcggcgcgtcggccgacgggcggtccctccacttcaagtccaaccctgggcagcgcgtctcgcacgtcggccagtggcgggacatagtctcggaggcgcacgccgaccccgacctgctccgccatctcgggctcaaggacaccgtcgaccgaatcaagcagtcatggaccgtgggtgccaaattctacggcattccggagtcattcgtccgtgtttgtgtctctgcatgtgctgtatgtaaggccgcacctgcgggacagcctgattttgctatgtcatcgccagggcgggggaaacggcgccgcaggtttgaatatacggagacactagatgtgcccgcgcgagatgttccacgccgactgcaacagttggctgctaagcataaggtggttctctgtatcaggcagaagtatataaggcataaaccattcatggccgaggtgaaagattatgcatgccaccgtgctggggtgccaacttcaagtggtgtgaatgctacgtcttcttcaggaagtgtccctgatgggaagaagacacgagtattgaagcgggaaccatatcaatcaaagaggtgtggttgtgggtttcgtattcgggcaattgtgccaatagctaattacaatgagaaagacaagagttttgtatacgaggaggagggtactgcagtgttcaagctttatgcagtgcattcagggcatgagccagggccacttgatggcaatgcccgaattgttcataggttagttgggcataagggagctcttgagttcgatccagacatttatggtgtcagtgaggaaggagatcctaactttacgattaagggagattttgatgttgaaactgatgattcacatcttgcagttttgcagcaaattcgggatctcaaaacagaggttggcttgttagaagggaaggtgggtaagatgcacccagagcttttgggttcactatccaatgagctatctgagtgtttgcacaggatcaggaagtttaattttgatggcaatgtctgccagccagaagatacactgatgataggcaacgaggaggttcctggatgggggccagctgacgtttctcaccatttagatcagcatgacggtgcattctgcagggatgatgagatgcttgatgatgacgatactgattttggttcaagtcttgggcctattgtctcgtgggatggaatgacggcagaatgtgaggataggaagatgctcatgagtgatagtccaaagtgtgacaaatggatgctcaaggaagacgtgggcgactttgttgagaagagtattcttaactgtggtgatgacgatggtgtggaggattcaaaaattatcaagccattgatgcatgatgagaccatggtagctgacccaggtttggtaggtattcatgtagaaggattctactctggagccaaatggtatgattcaccggtacccttctgcattagactgattgactgggtggatgtttactatgacagtataaatccttcattgtga

SEQ ID NO: 29905 - DNA, 746 bp, Oryza sativa
  Clone ID: PAT_MRT4530_34361C.1
atggtgagctggaggaggagcagggtggtcgccgccgccggcgaagatgagtgcgcgcgagcggttggttcccggttgcggcggcgccggcggcgagaaggtgtgcggccgtgccgagatggtgcgtggcgctgttgctggtcgggaacggcgggcggtgtgctgtgcgtgcgacgtgcgacgacggcgagcgcgtggtggtggaggtgcgcgcgctggagcggccgcgggtgggggcgctgctggagaaggcggcgagggagttcgggtacgaccagaagggcgtgctgcgtgtcccttgctccgccggcgagttccgacaagctctcacggcggactgctggcgccgccgccgccggagctccgtgccgccggcgatgacgccgcgcgccttgcgcgttgggctcttctcgtgcctgccaaattatttctcgatgcttgctgcacgcacgcacgctgcatgaacgatgacgattcaggcgtgcacgctgacctgatccgggggtttcagttcgctggttttcggcgtaatttggtgtatcgcgacgctcgccgacgccgcgcatccctcaccggctccaatgcctcggcgaacggcgagagatgaattcgagttggtggatgcccgcgccgccgatcgagctcgcgacgtgcgtgactctctcccccctcaccttcccgtgttaaaccgcgtcagattgcagctagggggcggaatcgatagcatcttctttagaaacgaagtt

SEQ ID NO: 29906 - DNA, 494 bp, Oryza sativa
  Clone ID: PAT_MRT4530_34362C.1
tttcaacagatccattctatgatttcaagtctcaatagaaattaagtgttcctttctcctcataccatacaattatcctcattcctaattctacagatgcacaggtcattgttctatgatttcaagtctcaacagaaactaattgttcctttgttctcttaacataacagtgattatgagaggaaggcagaggttaccgttcaagaacaacgatttttttgggtgtatcctgcaaagcatgtttcggaaatgctttcttgaagaaatcatcatttgctatgagatccccaccctcgcaccagatgacatacatgcaagctacgcaaaacagatcaagcagtacatgatggaattgtaatgtgaaacgatcataataacatcagttgaccttatgttgacatgatgaaacccaaccaggcaactgaagcccaacattcggcagaatctattataatccatacgaaaagcctgggatttgagagagaataactgtc

SEQ ID NO: 29907 - DNA, 585 bp, Oryza sativa
  Clone ID: PAT_MRT4530_34363C.1
atggccaaaaccggtgaaggggcgcggagtggccgccggcagtggcttgccgagctgcgctgccgacgcccgccaccaccgtcgtttcagccgagggagggaagcgagagggggcagagggagccgccgccgctgtcgccggatctgtcctccgcagccgccaccaccactggatccacccatggccgccgcgaggccgccaccgccgctagatctgccgcaggagggaggcgagagggggcggagggagccaccgccgccactgccggatccacctcctcccgccgacgccgccaccgccaccgccaccgccgccggatataccgcgggagggagtcgccgcgccgtgccggtgagacaggaggaagagggggagatggagcggtggcgccggtcaccggtggagggagggggagggggagcggcggcgctggaccgtccatcagatcggatggctacggcttctcccgcgtcgggccgggcgccgttcccaggccgcccacactattgggccacatgccgcccgcactattgggccacctcatggaccgcatgtacactccgcacggaataagttcactttag

SEQ ID NO: 29908 - DNA, 755 bp, Oryza sativa
  Clone ID: PAT_MRT4530_34364C.1
cttccccatctctctcactcaaaacaacgtcggcggcagcgcctctccccaaccttcctcccaccagcgccgccgctccccctccccctccctccaccggtgaccggcgccaccgctccatctccccctcttcctcctgtctcaccggcacggcgcggcgactgggaggggacccaccagcagcgccgcttcccctcggccactccccccttcctccaccggcggcgctctccttccggcacgaatccggcggcggcggcggctccctcaaccccttgtcacctccctcccgcggtatatccggcggcggtggcggtggcggtggcggcgtcggcgggaggaggtggatccggcagtggcggcggtggctccctccgccccctctcgcctccctcctgcggcagatctagcggcggtggcggcctcgcggcggccatgggtggatccagtggtggtggcggctgcggaggacagatccggcgacagcggcggcggctccctctgccccctctcgcttccctccctcggctgaaacgacggtggtggcgggcgtcggcagcgcagctcggcaagccactgccggcggccactccgcgccccttcaccggttttggccatgggaggcggtggcagcagaggcggctatggaaaaatctgctcgatttctgttcgatttgttttttttatctccgtttgctgttcttctattcttatatttgggatctaacataaactggattaaaactttgtgtgtt

SEQ ID NO: 29909 - DNA, 285 bp, Oryza sativa
  Clone ID: PAT_MRT4530_34365C.1
tcatattcatcgagcttgatcggatagcacttgccggatacaccttttgctgcatgctactgatgttctgtggccttgtcggctcatggcaatatcacaccccagactgaatcagacatgtgaggtgtcccaaatgctccagtgttcatcaagagccaacctgggcgccagaataccaatgcggaggatgcgggactaccctgcgagtgaaaaaccagactggcaaattacaggacgtgatcagcgctccctcctcttcggggagtggactgcactctcacagca

SEQ ID NO: 29910 - DNA, 2424 bp, Oryza sativa
  Clone ID: PAT_MRT4530_34366C.1
atggagatggagatggaggacaacaaggcgccctcgccgccatcacctatggagtccgacgtcgctggggagaagcgcaagagggaggacgatgcatcctcctccgctgtacttgccgccgccaacaacaccggcggtgcccagcaccccatgtggaagaccagcctctgctccttcttccgccgccgcgccgcctcctccgccgacggctgcagccacggcgactcctgccgctacgcgcactccgaggaggagctccgcccgcgccccgacggcacctgggaccccacctccgaccgcgccaagaagctccgcaaggtcgccgccgacgaggtggaggaagaggtggtcaccattgacgacaaggccctggacaagtgcctcgtcggcctcccgaggggatgggccaacgacaggctcaagactttcctccaagacaaggcaagaactaactactcctccattcttcctcctgctctactactaggaatctcgtatgcaacagcgaagaagaagaagggaatgactgttggttttgtaacttttgaaaatattgaacagctgaagaatgctatcgaggtacttacagagaaccaatctggtggaaaggaaataaagatagcagatgccaatcgtagatctcatcaaaagctgcacacagaaaagcctgtatctgacaatggagtgacaacagaaaatggtactagtgttgatgttcctcctggggagacatctgcacctgaagcagcaatatcaaataaaaaaagtgtccgcgatgcagttactccccttgcccacatgtcttataatgatcagctagagcacaaaaagaattctgttgcgcagatactgaagaggcttactcgcaatgctaggaaagcttgccctactggcattccccttccagattgggtttttaaatccaaagaaattggtggtcttccttgcaagcttgaaggcattctggagtccccagtgattaatggataccgtaacaagtgtgaattctctgtgggattttctttggagggaaaaaagacggttggatttatgcttggaaattttagggaaggtgtgactgctgttgaggaacctgtggactgcccaaatgtctcagaaatttcctgcaaatatgctctgatgttccaagactttctgcagtcatcaagcttgcctgtgtggaacagagttgataattgtggattttggcgtcaattcacagttcgggagggaagatgtcaagctcaagctgttgcacagaatgcagaaaaccaaatatcagaagtcatgcttattgttcaggtttgctccacaggtgttgatgatgcagtaatgaaagatgaatttgacaagttgaccgttgccctgcaacaaggagcagcaacatgctcacctccattacctctaacaactatagtagtgcaagatcacaaaggaatttcaaatgctgcaccagctgattgtccattgatcccactattggtgccaaaagtagatcaatcagaaggtacagtggataaaacaagaatccatgaccacatcggtaatctgtggttctccatatcaccaacagcattttttcaggtcaatactctcgctgcagaaagattgtatacccttgctggtgattgggccaacctcaattcgggcacattactttttgacgtatgttgtggaacaggaacaattggactgaccttggcacaccgtgttggaatggttgttggaatcgaaatgaatgaatcagcagtttctgatgctgagagaaatgcgctcattaacggtgtatcaaattgtcgctttgtctgtgggaaggccgaagatgtgatggggtctcttctcactgaatatcttggttcaccgcagcaggacattcctgtttctgaaggtgcagtaagtggtactgtgaaagatgaggaagttattgacagttctaagaatagtggcgaaaatttggacagctcaatgcagaaaaatgacaatggcgaaagccagcagctcggggatgcaccagctgattcttcctcttctgccatagatgagataaaggggaattccaatgatagggttggcaatgggttggaaggcagccatgatgaatacaatgaggttgctggagaagatattcatggggaagcatcattgatcaatgagtctgttgacctgaaagtatcggactgtttggaggacagaaagacatctgatgatggttcttccatttctaacaatgatgtgactgcagctactgcatgtcagttcgaagacattgttgctattgtggatcctcctcgtgttgggcttcaccctactgatcaagcttacacactgaatttgataggtgatcaaggcattgaggactcatccacgaattcgacgtctagtgtaaaccccaaaagaggacagggagttgctgttttcatttaa

SEQ ID NO: 29911 - DNA, 441 bp, Oryza sativa
  Clone ID: PAT_MRT4530_34367C.1
atgcggcgggcccacgcgcagcctcacggctcgcggtggaacgcgcgcacgggaggggctaaccggggtcggcccgacccgacctcggctgagctggcgccgacgtggcgcctacgtggctgccacgtgggatggcgggaggaagacgaaggcccggccgtgaatggaaggcgggcggcggtggtttctccggggcgccttgcgacgatgaggggcgacggggcgtacaccgagacgacgaggaagaaggagagggagcgagccaacggcttggattcgccggagggagtccgtcggcggcagatttcggcggcggcaaccggcggagagcaaaggggaaaacggcgacgaggtcacgaggggccaattcccagcgggggcggcaatgtcggtttggaaaccgactttggcggtcaaggcgcgagctggcgctccggctag

SEQ ID NO: 29912 - DNA, 3124 bp, Oryza sativa
  Clone ID: PAT_MRT4530_34368C.1
tcaacgaattttaagattacttaagcatacggtgatatcctctacattttcttctgtatccccggggaaaccaccaatgccagttgaagttgaagggctttcatctttcatcccacttcgggatggcacttgaaccttgctcgtgtaagtgacacatttgtgcgctgccggtttgacaagaaaacctacagccccatctgagttggacctcacagttgataaagtgattatgtcttcctcaccaccttgaaagccatcaccagaattaatttttactatgaccgggtcaaacttcattttcccgagtttttgttgaattgctaggacttgagcagtatatggacatatgacaccaactgtaaccttatttttggttttagaatgggcatcttcaatattgaagaaagagtaaggaccaaacataagacctggaaggtacttctttcggtgttctttctgcttgacattaggagcatctaagagtttcctatcatagaagctgatgtttggaaagatactaatggatgggtgcattctgtattgcatattaaggagatgtttttcatgtcccagtgaactcaacctctcgaagaggcttctcccgaacgacgcatcctcacaaaccttgcttttgacagttgctggcaattggcactcgtcaccaataagaatagcatgctttaaagtaggcaaacgcaacgggatcaatccttcacattcttttaactgagcagcctcatcaacaacaagcaactgtagttttttattacttattttggaagagctagatacagtgcagaaaactatggaggcgctttccatacagaactcccgaatggtacgtttggaggaagttataggaagtttcaagctacttaataacatattcagtagctcgagacatctaattctgattttcccgaggctgattgctgttttagaaaattttgtcagactggatacactggaatcagattgatcatcattatacaggaaaattcccttcacttcatcctcaatatttttgttcatgaatttcttgttgaaatcttcaagcagctctagaagtgaaatgatattgttgtaattcacttccaagatagtggattttggaacatggaatagtacttctttgaaacatcttcgaagctctggataagtagcattaaatcttttcctagtgtaagaataaaaggtaaggctatcaccttccttttggtcttccagatatttctgatactgggagtaaccattctcaaaaagatcagatagggaagataggcgatgtctccatccagtcattggcacaaagcatccaagcagcgtccttacacgatcatgtaaatagatctctttgagattaccgtcaacacacatgcgttgtttattgccacagagtagaacatctcctaagcaggctctatccgaagactctttgatcaccttcaagaaacgcgaagcaacttgtttaacagcaaggtttgtgggtgcacatgttagagtaccatggtccatttctctcatcaaccacaacagaacactgattgtttttgtctttcctgtgccaggaggtccccagataaggctaaaactgctactgctgttgttgctatgcattgatgagatacaattcaagatcgcatcattctgagaattgttaagatccatcgtagacagtttactccatatctccatactgtcgatagaatgatcctttttctgtttctgaacaatgtctgcaaccagtggataatgtaccatctcctgtatgaggctttgatttcttctgactgcagtgttgtagtcaaggcagcgccatatacggatgtatgttacaatattgagcaaataggcagcaaaaagtttgatctctttcctatcttgacacttgccatcttcagaatcaatttttcctgatgatatgatcacatacttaactggaggtgagtcgtcgtcttcatcccctccttctgtgacaaaggcaacaatatatggcctcccattgcgagtgatgtcagaaatatgctccggcttcacatcagacaggataatgatatcaccaacacttggaacataactttcaggtcggttacatgccttagaattctgagaatcagcatcgaaaacaatgtcgtaaactttgttgtttttcttttgctcgatccacgaaattttggtagaaggcatggtggatatggcttccaagctagaagacatctccgtccgcatctcctccagcaatggagagtctttagaaatgaatcaaggttggcacccggccaacagcttttcaaacggccacccgggccaacaactttcaaacggccacccgggcccagctgatcccgctcaagatgttcaaaggtggcttgccttgctcgagatctggagcttgatcctcgagatcctcgcgctgcgggacgtggcccgagagaagaagcgcggctcggccgagctaatgggccggccggcccaagaggacccggcccagagcgcgcgcgggaggggaggagagaggggggccggtggaccgggctcaccacgcgcggtcccgggtgggacccgcttgtcagtggctcggctcaccgtgcggagggagcatgcggcgcacgcgcgcgggcgggggagggacgcggtgcacgcgcgcggctcgcggtggatgcggatgcggcgggaccacgcgcagcctcacggctcgcggtggaaacgcgcgcaccggggagggactgacccggacgacgacccggccgcgaatggacggcgggcggcggcggcgagcggcggagcgaaccacggcgatacgggcaaaagcgagcacaccgggcggctgttcgtgatgaggggagacgagccaacggctcggattcgccggagggagcttgacggcggcgaatcgcggcggcgacaaccggcggggagggaagagggaaacggcgacgaggccacgaggggtcgattcccggcggtgagagcatctacgcggcttcgggaactcgacgctagcgtcggattggacggagctacgccgagcgaggctggcgacgtgcaggtgctacggagctcgggcggcgacggcggcgatcacacggtgagcgacggcaacggtcggggtggcgccggctaa

SEQ ID NO: 29913 - DNA, 667 bp, Oryza sativa
  Clone ID: PAT_MRT4530_34369C.1
ccgcgcagccgcttggccccgcgagccagcgcgcgtgcccgagccgcgccactccatccaccgcgcctcccgttgcaagccgcgcgcgcgtgccgtggtggccgaccgcccggtcgccgccgccgtcagcctctgcacgcgcctgtcgccagtgtcgccgctccgctccaaaccgccccgccgtcatcgccgtcgtcatcgccggccccgccactccgcgcgcaagccgccaagggacggaggcagcatccctcctccctctgccgcgtcgcccccgctcacctcctcctttttcccgaatcggcaaaggggcaagcccccctttctccccctccttttcccctttttcctcctcgccggcgtcatcctccctgtcgccgctttggccgcgaccgccgagcgccagctcgcgcccttgaccgcgcaagtcggttcccaaaccgacattgccgcccatttaaaccccagcctcccctttccccttcctcttccattcgcctccgtgccattgccgccgcccccgtgctctgtctcgcctccgccgtccttcgccgagcgccaggagaaccgccacgtaggcgccacgtcggcgccagctcagccgaggtcgggacgggccgaccccggtcagtccctccccgtgtgcgcgttccaccgcgagccgtga

SEQ ID NO: 29914 - DNA, 579 bp, Oryza sativa
  Clone ID: PAT_MRT4530_3436C.1
ggaattgttgttcctgtttttcttttaggtttctgtgccccttgatctggtacattgcagctcttctttattactgcaagtactacaaccgcgatcctcgagagcggcctgggcttgctgcttctgcttttctggcagtcatatttacagcagcaactattgttaccctttctgttttgctgattatgtgtacacagaaacgattgaatagctgtgcttgtctgggctgactgaactgcaagacattgttgcagatccttgtgactaaattcttatactgattcttttgttcgtctatttgctggaatgcaaaagggaaacccaaggattgttcttcattaggataactccttatcagcaatatcagctattgcatgctcatgggggatgattgtagagagaagtggctaactggcgtgtactttcttctgtagacgctttgtaagcaatttttcactgacaaatttatgttaactagagcaatctggagttcaggaattaatccaatgaggttgatttgatcaagcagaacatcggcaaatgcggaatttgttcattctttttaaaaaaaaaaaaaaa

SEQ ID NO: 29915 - DNA, 624 bp, Oryza sativa
  Clone ID: PAT_MRT4530_34370C.1
atggcgatgggtggcagcgggcccatgtggcatcggagcggcgccgggatgcgggcagagcggcgatgggcagcggcgagaggcgccaccctccgccccgctcgctgctcccgccgtcccgcccgcctctctcccccaatctacgctacctgccgccacgcccgccttctctcccctctccgcgccgcccgtagccgtaccgaccccctctcccacttcttccccgcgcaccaccgcgcttgcatctatagcccgcatctgtcggggaaatcgctgcgaaggacaaaggcgacgccgatggcgcacgcgaatgggagcaaggttgccgcccacctcactcgccttctccaccgttctcctcgccgccccgtcgcgctcgcccgccgcgggcctgccgccgttccgcccgccggccgacggcctacctcactgaagaagaagagaagagagttcaccgaacatgttctacagacacctgaacagcaaaatcggcaggtgctgagccctgatctgcccgtccttcacgtcaacatgccaccgtcgggcgtcagagatgcagatgccacgccggctacacacgctccggcgtgtgagggcaatagcattgtgacagaatttacctag

SEQ ID NO: 29916 - DNA, 1821 bp, Oryza sativa
  Clone ID: PAT_MRT4530_34371C.1
atggccacgtggcgcctccgccgcgcggccgccgccatcgccgcgtcctccgccgtcgtcgccgcgggcgcggcctggccgtccgcgtccgcttccgacccgtcccccgcggccctcgaggccgcgcggcggcgcgtggcccagccgggcgcggccccgccgccacgcgccgcgcagagggcggcgctggccgggtccacccccgcggatcccctcgacgtgctcgtcgtcggcggcggggccaccgggtgcggcgtcgcgctcgatgccgcaacccgcgggctccgcgtcggcctcgtggagcgcgaggacttctcctctgggacatcctcccgatccaccaaactcatccatggcggtgtgcgctatttggagaaggcagtattcaatcttgattatgggcagctgaaactcgtttttcatgctttgaaagaaagaaagcaggttgtatactattggttcggcctgaaattctatgatatcgttgctggaagaaggctgctacatttgtcacgatattattctgtagatgaatcagttgaacttttcccaacccttgcaaaaaacagccatgatcgtagcctaagagggacagtggtatactatgacggtcaaatgaatgacagtcggctgaatgtgggcttggcatgcactgcagcggttgttggtgcagctattcttaattatgctgaagtggtatccctcattaaggatgaatctggagaaaggattattggtgcacggatccgtgatacgctatcaggtaaagaattcgatgcatttgcaaaggtggttgttaacgcagcaggaccgttctgtgactctgtgaggaagatggctaacaatgacgtagtgcccatgatcagtccaagcagtggagtgcacattgtacttcctgattattattcccctgatgggatggggctaattgtccctaaaaccaaggatggtagagttgtatttatgctgccatggttaggaaggacagtagctggtacaaccgactctagtacagcaataacaatgcttcctgaaccacatgaggatgagatacagttcatattagatgctatctgtgattatcttaacgttcaggtaaggcgttcagatgttctttctgcctggagtggtatacgtccactggctatggatccatcggcaaaaaatactgagagcatttccagagatcatgttgtatttgaagactacccaggactaataactatcactggtggaaaatggacaacttatagaagcatggctgaagatgctgttaatgcagccataaggtcaggtaatttgaagcctgccaatggctgtgtgactgatcatctgcatattcttggtggatatggttgggatcctgcttcgtttactgtccttgcacagaactataaacggatgaaaaggacatatggtgggaagatcattccaggtgcaatggacagtgctgtatcgaagcatctgtcacatgcatatggaactttggctacacaagtggcttcaattgcccagaatgaaggcttggggaagcgacttgctcatggatacccatttttggaggctgaagtagcatactgtgctcgccacgagtactgtgaatctgctgtggacttcattgcaaggagatgccgtcttgcatttcttgacacagatgctgctgggagagcattgcctcggatcatcgagattttagctctggaacgcaagtgggacaaggcaaggcagaagcttgaactacaaaagggtaaagatttcctggaaacattcaagtcatccaagaatgcacaattcagggatggcaaacataatggtcaatga

SEQ ID NO: 29917 - DNA, 2001 bp, Oryza sativa
  Clone ID: PAT_MRT4530_34372C.1
atggacatctctagggcaaatgaaggctacacgagctgcggcccggtagtcgagatgtcatggcacagggctggtgtcctgctgctaggggctcagtcctgcctacctgtcccggaggttccggccgtaggtggggttgggtcggtactcttgtctatggctaggatgggttggaaactatgtcatgtcctccgtccgtatgccatggtgaaacggccacaagacactgtcaaggccttggactctcacgtcacgtgtgaggtctacggcggcacaggtcattctaggaatgactgcccgaaaacctgtgaggaggcgatgtacatgggcaacaacaacgggtaccgtccacaaggaggtcaggggtggagccaaccacgcccatattatcaaggaggtaacaacattggtaacttttctaaccagccctccttgaaggatgtagtttctgcgcaggctaaaaccactgatgcgctaagcaaaaagcttgttgccaatgacaagatcggagaaaacattaatgtcaagttagatggctttgcttctgcttttcaaaatcagctgagctttaacaaaatgatagaaacccagctagctcagttagcatccttagttccttcaaatgaaactgggaggattccggggcaacccaactcctccactgaaaatgttaaggcgatcacgacgaggggaggaacaaacgagattgcaaaagaagcgccatctagtgactcaactgacaaggaagatcagccagaaaagaccctcccggagaagaagaaaaatccggggtgtcctacgatcacctgctcgatcggggcacaacagttcgaccaggccttgtgcgaccttggagccagtgtcagcgtcatgccaaaagacgtcttcgacaaggtcaacttcacggtgttggcaccaacaccgatgcgccttcaattgactgactcgtcagtccgttacccggcagggatagcggaggatgttccagccaagatacgggatttcttcatccctgttgactttgtggtgctggacatggacacgggaaatgagacgctgctcatcctagggcaaccgttcctttgcaccgcaggagccaacattgacgataaagtatgggccgaacccacagaatattcaagtggtcgaagtggagccacccaagatggacagcctagtgaaattcctgcagaatttcttggagaaggaaacaacgatgcccaagaaccgttattggaggacgccggtaaaaccacccataccggccaagaagttagagcagccggctcagaagaagccaccgtccgcaccaaagccaaggaaggatttttgaattttgaggaaattcttcaaatgaacttttcagagcaaaccaaaataaaatttccaacgaaaattcactgtgccacgaccacactgacagttggaatccaacagtcgaaagtggggccggttgggcccaccaggggttcagccgaacaccctggttcagccgaaccggccaggcaacggtcggctccctccctctttgaggcaatggctagtgggccccacagaatgaggaagcgattgtctagtctgttcaaggggtccagctcttcatcaagtcatcatgacgagtctagtactcgtccatcagctgatgtctcgatggaagacgcggaagctctgcgacaactcctgaacgacaccgacctcgaccttgtcggtgatcgggagagacaagcctactacatgctgagcgaccgggagtatgctcacacgcgagaatactctctggagctgctgaaaaagataggtatggatgttgaatttcgttctgtttggaaagcgacgggggagatccagtacaacctcacggaacacatagctcaaatgcaagaatggcaacaatctactgatgctcaatattccaacttcaacaacatgatgcagcaacaacacgatgaccttcatgcgtacttccgttttcaggggttcaatccttatcaaggaccctga

SEQ ID NO: 29918 - DNA, 1849 bp, Oryza sativa
  Clone ID: PAT_MRT4530_34373C.1
acgacattactaacccggatcacccagcccgtggggatcagccacgtcgggagacctccaagctttcatgacaaggcatttccaaagccgacacaggtttaccatatgccgacgagaggggtcccagaccaacagcaggaaacggtccttaagtgcaagagcgggaaaccgtacacccggtacgttccccggtccgcggttttggaaattcatttagttcgcaagcaccgacccaggtgtcgggttttccaagtctcttgtaaaacccaagttttacccaagttgtttttcagattttaagtttgaaggcgtccgtcgatactcgcactgggtgcacgaatatcgagacgcaactggatggttacaaggggacatgggcgcggcccgagagaaaggacagctcggccgagcttaacgggccggccggcccaagaaggcggcccagagcggcccaagacgcgcgcgcgcggaggaaggagagagagtccggtggaccgggctcaccacgcgcggtcccgggtgggacccgcttgtcagcggctcggctcaccgtgcggcgggagcacgcggcgcggcgctagggtggaggatggacgtggtgcacgcacgcggttcgcggtggacgcaggtgcggcgggcccacgcgcaacctcacggctcgcggtggaacgcgcgcacggggagggactgaccggggtcggcccgtcccgacctcggctgagctggcgccgacgtggcgcctacgtggctgccacgtgggctggcgggaggtagacgacgacccggcctcgaatggacggcgggcagcggcggcgagcggcggagcgaaccacggcgatacgggcaacagcgagcacaccgggcggttgcacgtgacaagggaaggcgagccatcggctcggattcgccggaggttgctcgacggcggcggattgcggcggcggcaaccggcggcgggagaagagggaaacggcgacgaggtcacgagaggtcgattcccggcggtgagagcatctacgcggcttcgggaactcgacgctagcgtcggattgggcggaactacgccgagcgaggccggtgacgagcggggcggtcaagggcgcgagctggcgctcggcggtcgcggccaaagcggcgacagggaggatgacgccggcgaggaggaaaaaggggaaaaggagggggagaaagggggcttgcccctttgccgattcgggaaaaagggggaggggagcgggggcgacgcggcagagaaaggaggggcgcggcctccttcccttggcggcttgcgcgcggagtggcgggggccgggcggtgacgacggcgatgacggcggggcggtttggagcggagcggcgacactggcgacaggcgcgctaattggctgagcgacatgtggcgagatacaagcgacagaaaaagcaccgggacgaggaggcccgtgaggcagatttccgagacaagcaaggcacggcggagcggcggccgagagaggggaagggaagggaagggggaaaagaggcggcggtccacggcttaccccgggtcgacggcgacgacaaaggaggcggccggagcggaggaaggcggcggcgcggctcgggtggactgggacgatggcgctccggcggtcggcgagctcggcgaggtggtggacggggtcagcggcgatgcgacgaagccggagaaggcgacgccgaggcgggagacggtcccggcgagcggagagggccggccggaggtcgtcggcgacagaggagagagaggacgacggcgcgagctcgattctggcggggagacggtgcggcaagtggcggaaacgggcgagagaggcgcggggagggtttaa

SEQ ID NO: 29919 - DNA, 1251 bp, Oryza sativa
  Clone ID: PAT_MRT4530_34374C.1
cgacatcatctcaccgggtgcgcttcccctccccttcgtacaacgaagatttgctattcgccagggcccaaccacagttatagctcacgtagccgctacaggcttcttcgccgcctcgtctcctcctcgatctcccttcctccctagaaaatctctcggatctcgccgagagctagcggctggctggcggcggtggcgcggtggcagcaaagtgtacgctttgcagttgctgccggcgcggcgcggcaggggtgacgacgaagagggaggaggagagaggctgtgtcgggtttgtgttgtgtttgtgtgtgtagtgtgagatctggagacggccgggaggatggcgcgcggcgggagcttctcgcggctgcggctgcgcgcgggggtcgttgtcgccgccgccgccgccgccctgctcctcttcgccgtcgtcgcgccgcccgccgcggccttcaacatcggcctccagtccgccggcgacggcgcgagcaaggccgggttgtgcagccgcacgtgcgagtccgaccactgcacgacgccgccgttgctgcgctacggcaagtactgcggcatcctgtacagcggctgccccggcgagcagccgtgcgacgagctcgacgcctgctgcatgcaccacgacaactgcgtccaggccaagaatgactacctgagcacggcgtgcaacgaggagttgctggagtgcctggcgaggctgcgggagggctcgtcgacgttccaggggaacaagtgcatgatcgacgaggtcatcgacgtgatctcgctcgtcatcgaggccgccgtcgtcgccggcaggctgctgcacaagccttagcttacatagcctcagccgtgctgcaggcaccacccctgccggcggcgaacggcggccggatcgacggcatgggcggcgcgaaggatgagcagtattgtcctctaacttcgaatcactgacgtgtaggtccagtagatgtggggcctacatgtcagtcagtcacagtcaataatgaccgtactacagaggataaagtgcttgtgcgttattgggtgggtggtacatgttttgcttgcttggtgtgtgtcagtgtgtgtgtgtgtgtgcagcttagctagcaccgggctggcggctgcgtgcgtcgccttcaacttcacagttcacgtgggctcccccttgacagaggcccagacttacgacaaatatatgcagatcacaaatattactacaaggaaaaggaaaaaaaaaaaaaaaaaaaa

SEQ ID NO: 29920 - DNA, 1394 bp, Oryza sativa
  Clone ID: PAT_MRT4530_34375C.1
acgacattactaacccgggtcacccagcccgtggggatcagccacgtcgggagacctccaagctttcatgacaaggcatttcgaaagccgatacaggtttaccatatgccgacgagaggggtcccagaccaacaacaggaatcggtccttaagtgcgagagcgggaaaccgtacacccggtacattccccggtccgcggttttggaaattcatttagttcgcaagcaccgacccaggtgtcgggttttccaagtcttttgtaaaactccagttttacccaagttgttactcagattttaagtttgaaggcgaccgtcgatactggcacagggtgcacgaatatcgaggcacaactggatggttacaaggggacatgggtgcggcccaagggatctggggcggctcggccgagcttaatgggccggccggcccaaaacggcccaagcgcgcgcgcgcgcgggggaggggagagagagtccggtggaccgggctcaccacgcgcggtcccgggtgggacccgcttgtcaacggctcggctcgccgtgcggagggagcacgcggcgcacgcgcgcgggcggggaggaacgcggtgcacgcgcgcggtttgcggtggacgcggatgcgacgggcccacgcgcagcctcacggctcgcggtggaacgcgcgcacggggagggaccgaccggggtcggctcgacccggtctaggctgagctggcgccgacgtggcgcctacgtggctgccatgcaggccggcggaaggtagacgacgacccggccgcgaatggacggcgggcggcggcggcgagcggcggagcgaaccacggtgatacgggcaaaagcgagcacaccgggcggttgttcgcgacagggggaggcgagccaacggctcggattcgccggaggttgctcgacggcggcggattgcggcggcggcaaccggcggcgggagaagagggaaacggcgacgaggctacgaggggtcgattcccgtcagtgagagcatctacgcggcttcgggaactcgacgctagcgtcggattgggcggaactacgccgagcgaggccggcgacgagcgggtgctacggagctcgggcggcgacggcggcgagcacacggcgagcgaaggcgacggggaaggagagggcgcggccgaagtccccttccgcgtcctcgaatgcaccggctctcccggcgctcggcgaaggacggcggaggcgagacagagcacggggcggcggcaacagcgcggagacgaatggaagaggagggggaggatgacgccggcgggaggaaaagggaaaaaggagggggagaaagggggcttgcccctttgccggatcgggaaaaggaggagggagcgggggcgacgcgccagggggttttcccgctag

SEQ ID NO: 29921 - DNA, 3403 bp, Oryza sativa
  Clone ID: PAT_MRT4530_34376C.1
ttcttttactccggtaggctaccacccgaagccaagagaggaaccacgaaatttccacgaacaaacaccccaaattccaggcagtaatttttccggaatcaaaaatcgaatggaaaaacaaaaattaaaacaagagaaaaacaaggcgtaggcaaagtggcaaaccacgaatcgaagaagagcttctccttccctttcctcctccattccaaccttccaacccaacaaccttaaccctcctccctcagtatccccccaatggtggaggaagggaggtcactggcggagacgccgacgtggtcggtggccaccgtcaccacgctcatggtcgccgcctgcttcctcgtcgagcgcggcatctcgcgcttcgccaagtggctgcgcaagacgaagcggaaggccatgctcgccgcgctcgagaagatccgcgaagtcttgcttcttgcaaggtgtttgattgtattcctcaccaagggaaacccatgcctgattgcagagctgatgctgctcggcgtcatctctctgctgctgagcgcgaggagccgagtccgtactaggcccaggtcatcttttgttgtagaggcgatgcagacggcggcggcggcggcggcggcgtgggcggccgagcccatcgccgtccacctccacctcatcgccgccccccttcaaggtggggatcgcgtcgccgtgtgggacggctgctcacgcctcctccgcgccgaggttggttgctgcggccactcaccgggggcggcggcggcagcagcaagtggtttaaggctatttccaaccccagatccagcagttgagctgccattgacagctgaaaatgttgagattgtattggatgaagttcgaccataccttatggcagacggaggaaatgttgcattgcatgaaattgatgggaatgtggtgaggttgaagctgcaaggagcatgtggatcatgcccagcttcagtaacaacaatgaagatgggtattgagcgacgcttgatggagaaaattcctgaaattgttgctgtcgagcccattgctgatgaggagactggccttgagttgaaccaggagaatattgaaaaggtactcgatgagattaggccatacctttctggcacaggaggtggtgagcttgaattcgttgcgatcgaggaacctatcgtcaaggttaggcttacgggcccagctgctggtgtgatgacagttcgcgttgccctaactcagaagctcagagaaaagatacctaaaatcgcagctgtccagctattgtcgtaagcctgaaaacatttagaaaacaacccctgcaatgtaaatgtgccgctacaataatcgccaggaaagattgtaatgggcttaaagctttgtaacctgttactctattctacttgaactacgaatagtgatcatcaatatgaaatgttgtaagggtgttcctactggatttatttacaaaaggttttgggcttcaagtacaagaaatcactggtctcagagagtgtgagggagtcactccacagctggtgcaagagggtgaaagacaagaacaggcacaacctggcatcgagatccgtctgctccctcgacaccacatacgaggagactgatcatgagactgctacggttggcaccctgtcgagaaccgtgtctgcgacgtccctggacgaggagctgacggtggccaccgtcgaggacaacgacgacgacgaggagatgtctcgcatcgagcaagagattgatcgatcgttggggggaacccgatttccttggttctgccaagctgacgagttcttgatttggggtttatttacaggtggggatcgcgtcgccgtgtgggacggctgctcacgcctcctccgcgccgaggttggttgctgcggccactcaccgggggcggcggcggcagcagcaagggtggttaaggctattgccaacccagacccagcagttgagctgccattgacagctgaaaatgttgagattgtattggatgaagttcgaccataccttatggcagacggaggaaatgttgcattgcatgaaattgatgggaatgtggtgaggttgaagctgcaaggagcatgtggatcatgcccagcttcagtaacaacaatgaagatgggtattgagcgacgcttgatggagaaaattcctgaaattgttgctgtcgagcccattgctgatgaggagactggccttgagttgaaccaggagaatattgaaaaggtactcgatgagattaggccatacctttctggcccaggaggtcgtcagcttggattcggtgcgctcgagcaacctatcctccacgttaggcttacgggcccagctgctggtgtgatgacagttcgcgttgccctaactcggaagctcagagaaaagagacctaaaatcgcagatgtccagctagtgtcaagaaaaaaacgaaatgcaggagcgacgaacgggatcgggagggagacggcccgagttctggcgaggaggggggcggaggtgatcatcccggcgaggacgatggagagcggcaacgcggtgaagcagagcatcgcggaggaggtcccggggtccaggctccacgtcatggagatggatctcgcctcgctcgactccgtccgccgcttcgccaccgcgttcgactcctcccacacccacctcaacatcctcataaacaatgcagggataatggggtgccctttcaagctatccaaggatgggatagagctgcagttcgcaacgaaacatgacggtcatttcttgcttacaaatcttctgctcgacaagttgaaatagacggctagcaataccggcgtgcagggcaggatcgtgaacgtatcgtctattgcgcacaagagaagtgatggttcttgctttgatctgaacaagctaaacgataagtctaggtcagcaatgtgttcatttttattgttaccgcgtacattatcacaatgcgtgatggtttcaatcctttctgtgggaaacctctttctgaagaacacacaacagggagctgcaaccacatgctatctggcactgcatcctgaactgaaggatgtctccggcaaatacttcgcggactgcaaggaagccacgccgaggcctgctgcgagagacgcagagctagcgaagaggctatgggatttcagcgaacagctcgtggatactaatcgtcgtggagaattcaacagacaaaaatgacactgtttagactgtctgaaattctgaacctgaccatgtctcaacctgagatccttcagatacagaattttattttttatttctattttttattttttttcaatggaatgatacagcttatataatatgaccatagagctgtttgtcagtactgttgtttgcatgtgtaaacaaattcaaatgcattaataatcagcctgctttttttgcc

SEQ ID NO: 29922 - DNA, 2871 bp, Oryza sativa
  Clone ID: PAT_MRT4530_34377C.1
atgcccgccggaaatttctgggtccgttacgcgcggcggtttctcggacttcagtttaaattcactcatgaccgttgggcttcacatggtgctgtcgattacgtcttacgatggaaggagtcctactcggacaggactgggtcgtcaatgtatcgtgcagggtccgggtggtgcatgactggtttcaacttgccgaaaaacttcaatgaaaatccagaagctttctttcggagcgttaggccgcgagtcgttgctccgcagaaaactcttccgacagagaaaccagccataccagtgccaccgaccttcaagactatggccagcaagactcttcgcgagtttgctgctccctctgctgacaatgtggccattgggccgcaagtcaacataggagacgtggatttcgacttgaagtccagccttatcacgatggcgcaggctagcccgttctgtggcaagccaaatgaggatgccaatgctcatctgcaacagttcctggagatctgtagcacgtacaccatcaagggcgtcagtcccgacaccatcaggctgcggctgtttctattctcccttctcgggagagcgaagcagtggttctatgccaaccatgctgctgtcaacacctgggacaaatgctatacggcattcctctcgaaattcttcccgatgggcaaaaccaatgctcttcgtggaaggattttaagtttccagcagacaagggatgggtctattcctgaggcatgggagtgtctgcaggagtatgtggccgcctgtcctcattatgggatggacgactggctaatcctgcagaacttttataatggactcaccccaatgtcccgcgatcacctggacacggcagctggaggagccttcttctctaaaacggttcaaggggccgttgaactcatagagaagatggtctccaatatgggttggagtgaggaacgactccagacctgtcagcgaggcatgcacaccgtcaaggagacggagttacttgctgccaagctggacctcctcatgaaatgcttggacaaccacgagaaaaggccacaaggcaccgtcaaggccttggactcacatgtcacgtgtgaggtctgcggcggcacgggtcattctgggaatgactgcccggaaacccgtgaggaggcgatgtacatgggaaacaacaacgggtaccatccacaaggaggtcaggggtggaaccaaccacacccatattatcaaggaggtaacaataacggtaacttctctaaccagccctccttaaaggatctcatttttgtgcaagccaaaaccactgatgcgctaagcaaaaagcttgctgccaatgataagatcctagagaacattaatgtcaaattagacggcttcgcttctgcttttcaaaatcagctgagctttaacaaaatgatagaaacccagttagctcagttagcatctttagtccctgcaaatgaaactgggagaattctggggcaacccgactcctccattgaaaatgtcaaggcgatcacaatgaggggaggtaagtccactcgtgatccgccatatcctaaccctgcaggaactaatgggatgtcaaaagaagcgccatctaatgacttggctgacaaggagattcagccagacaagaccgtgccgcaggaatactgcgacacacggttactgccattcctccaacggatgaggaaaccgtcagcggacgagcagttcgctcgttttgttgaagtgatccaaaagatccacatcaacatgtcattgttggatgctatcgtcagcgtcatgccaaaagacgtcttcgacaagctcaacttcacggtgttgtcaccaacaccgatgtgccttcaactagctgactcatcagtccgttacccggcagggatagaggaggatgtgccagtcaagatacaggatttcttcatctcggttgattttgtggtgctagacatggacacggggaaggagacgccgctcattctgggacgtccgttccttagcaccgcaggagccaacattgatgtgggaacggggaatatccatttcgatatcaatcggaaggaggaaaagtttgagttccaaccaaggacggaacaatgctccatgcctggtgaaatttatgcagaacttcctggagaaggaaacaacgatgcccaggaaccgttattgaaaaacgctggtaaaatcacccgtaccggccaagaagttagaccagccggctcagaagaagctgtcttccgcaccaaaaccaaagaaggtgtggaaggaaaagccaaaggcgcccgctccatcacctttggagacgggtggaaaatacgcaaactgaaccgaaaggaggtacggtcttgcacgtcagactttaaacgacgtgaccttcgccaacaggggttcggccgaacaccctggttcggcctaaccggccaggccaacggtcggctgcctctttctttgaggcaatggctagtaggccccacagccgatgtctcgatgaaagacgccgaagctccgcgacgactcctaaacgacactgacctcgaccttgtcagtgatcgggagaggcaagcctactacatgctgagcgaccaggagtatgctcacacacgagaatactcaccggagctgctgaaaaagatagtgaggaccggtggcatgcgcctcatgacatccaatggggggacaatcaacctcccagaccaagtgacgggggagatccagtacaacctaatggaacacatagctcaaacgcaagaatggcaacaatctgctgatgctcagttcaccaacatcaacaacatgatgcagcaacagcgcgatgaccttcaagcgtacttccgttttcaggggttcaatccttatcaaggaccctga

SEQ ID NO: 29923 - DNA, 245 bp, Oryza sativa
  unsure (1)..(245): unsure at all n locations
  Clone ID: PAT_MRT4530_34378C.1
gcngcttccctgcctgcctgctagaggcaatttgttgtaggtgatgcacaagtactaggaatcttttcccccttcctttattttcttgcttatgaggccattggcaccgaaatgcctgcttatgcgcagcttgaacaatctcttccaatatgattgccgagcatgcgcgtgtgtatatgagcctctattgtgtttcgggaaaaaaaatgattgccgagccaagaagatgcaaaaaaaaaaaaaaa

SEQ ID NO: 29924 - DNA, 1513 bp, Oryza sativa
  Clone ID: PAT_MRT4530_34379C.1
acgggccggccggcccaagaaggcggctcagaacggcccaagacgcgcgcgcgcgggagggaggagagagagagccggtggaccgggctcaccacgcgcggtcccgggtgggacccgcttgtcagcggcttggctcaccgtgcggagggagcacgcgacgcggcgctagggtggggggaaggacgcgggtgcggcgggcccacgcgtagcctcacggctcgtggtggagcgcgcgcacgggaagggactgaccggggtcggctcgacccggtctaggctgagctggcgccgacgtggcgcctacgtggctgccacgcgggccggcgggaggtagacgacgacgccggccggaacggacggcggtcgacagcggcgagcggcggagcgaaccacggcgataccggcgaaagcgagcacaccgggtggttgcacgagacgaggggagacgagccaacggctcggattcgccggaggaagcttgacggcggcgaatcgcggcggcggcaaccggcggggagggaagaggggaaacggcgacgaggtcacgaggggccaattcccggcggcgagagcatctatgcggctacgggaatccgatgctagcgtcggattgggcggagctacgccgagcgaggctggcgacgagcgggtgctacggagctcgggcggcgacggcggcgggcacacggtgagcgacggcaacgaggaaggagagggcgcggccaaagtccccttccgcgtcctagtgcgcaccggctcctccggcacacacgtgacggctgcggtcggcgagagggacgacaatggcgcgggcgagaaacaggcgcgggctggcgctccggctagcggccaaaacggcgacaggagggagggaggatgacgccggcgggaggaaaaagggaaaaaggagggggagaaagggggcttgcccccttgccgatttaggaaaaaggaggagggaggcggaggcgtcgcggcagagggaggagggctcggcctccgtcccttggcggcttgcgcgcggagtggcggggccgaggcgatgacggcggcgatgacggcggggcggtttggagcggcgcgacgacacgggcgacaggcgcgggctggcgcggcagagggtgacggcggcggcgaccagacggtcggccactcggcacgcgcgcgcggcttgcagcgggagggcgcggcggatggagaggcgcggctcgagcacgcgcgctggctgcggggccgagcggctgctggcgcggcagggtagcggggccgggcggcgcagacgcgatgcgggcgaggaccacgcgggcgcgcgcgcgcgaacgacgcgcggggagcggaaaggaggggcggaaaggagggctcggctcggcgcgggcggctcacgcacgcgcgggcggcttgcgcgctcgcgcacgcagcgcgcgcggcgcgcgggcggggcggagcggagggagagagagagagggcgccggggagggagggggagatgggccgagagggattcggcccatcg

SEQ ID NO: 29925 - DNA, 4143 bp, Oryza sativa
  Clone ID: PAT_MRT4530_3437C.1
atggaggcgaatgactggctccatgccatagagaagaagctgaatctcttgcagtgcaatgatcaggagaaggttgctttcgccacacaccagcttcaaggtcctgcgtcagcttggtgggacaatcacatggccacccgcccaccaggtactgaagtcacttgggtagagttctgccgtagcttcaggaaggcgcaggtgccagacggggtcgtggcacaaaagaagagggaatttcgggcactccatcagggcaacaggactgtgacggagtatctccatgagttcaatcgcctcgcgcgatatgcaccagaggatgtccgcaccgacgccgagaagcaggaaaagttcatggcaggtctggatgacgagctgaccaaccaactgatatctggggactacgccgactttgagaggctggttgacaaggcaatccgtcaggaggatcaacgcaacaagatggacaggaagaggaaggccgctcagttcagggcacatcagggaagtcaccagaggccgcgcttcactcctggacagcagggtggacctaccaccatgatcgtccgccagtaccgcccgttcaaccctagcaactttccccagggcgccagtggcagtcagaaccaccatggaggtcagcccaaccgcggtgcagctccacgcccaccaatggcaccggcacagtcaggcccgtccgcgcaagccaagaagaagactggagcaaaaccagggtcctgcttcaactgtggcgagcttggccacttcgctgacaaatgcccgaagcctaggcgtgccgggccaaggtttatccaggctcgtgtcaaccacgtatctgcggaggaggcacaaacagcaccagaggttgtactgggtacgtttcctgttaactcaatccctgcaacaatactttttgattctggtgcaacgcattcgttcatttcaaagaagtttgtcgggatgcatgggttaataagagaggaacttagcacaccgatgcgggttcataccccagggaatagctccacttcggttcaattcagcccttctataacaatagaaattcaaagatcaccatttctagccaaccttattcttctcgaatccaaagacctagatgtcattcttgggatggattggctgaccaagtttaagggagtcatcgattgtgcgaatcgcaccgtcaccttgaccaacgagaagggagaaacggtagtgtacaaatcaccagactcaccaaagcgaggggtctctttcaatcagattgaggcggaaatcccagtggacaccgtggagaagaatttgaggaaattggaagatatacccatagtctgcgagtatccagaagtgttccccgaagacctcactaccatgccacccaagagagagattgaattccggattgacttggcaccgggaaccgctccaatttacaagagaccgtacagaatggcggccaacgaactagcagaggtcaagaagcaggttgatgagcagcttcagaaagggtacattcgaccaagtacttcaccttggggtgctccggtcatttttgtggagaaaaaggataagacaaagaggatgtgcgttgattatcgcgcactcaacgaggtcacaatcaagaacaaatatcctttgccgcgaatcgatgatttgtttgatcaactgaaaggagctaaagtgttttataagatagatctgcgatcaggctacctccagttgagaattcgggaagaggatattccaaagacggccttcaccactcggtacgggctatatgagtgcacggttatgtctttcggacttaccaacgcacccgcattcttcatgaatctgatgaacaaagtgttcatggaatttctggacaagtttgttgtggtgttcatcgacgacattcttatctattcaaagaccgaagaagaacatgagcaacatctccgtctggtactcgagaagttgaaggagcaccagctatatgccaagttcagcaagtgtgacttctggttgacggaagtcaagtttctgggacatgtcattacagctcagggtgtggcagttgatccatcgaacgtagagtcagttaccaaatggaccccaccgaagaccgtgtcgcagattcgaagttttctaggactggcaggttattaccgccgattcatcgaaaacttctccaggatcgcccgacccatgactcagttgcttaagaaagatgagaagtttaaatggacagctgaatgcaataagagttttgaggagctcaaaaagaagttagtatccgcaccagttttgattctgcccgaccagatgaaagacttccaagtctattgcgatgcatcccgccacggacttggatgtgtcctaatgcaagagggcagagtgaggcactatctgattggcaaccgctgcgaagtatatacggaccataagagtctgaaatacatcttcacccaaccggacctaaatctccgaccacgaagatggttggaactaatcaaagattatgacatgagcattcactaccacccgggtaaagccaatgtggtggcagacgcgttaagcaggaaaagttaccgcactgccctgtgcatcgagggcatgtgtgaggaattgtggcaggagtttgagcatctcaacgtgggaattgttgaacacgggttcgtagccgctctggaggcacgacctacgctcgtggatcaagtcagagcagctcaagtaaatgattctgaaatggcagagctgaaaaagaacatgagagtcggaaaagcccgggatttccacgaagatgaacacggcacaatctggttgggagaaagattgtgtgtacctgacgacaaggaactgaaggatctgatactcaccgaggctcatcagacccagtactccattcatccaggcagcaccgaaatgtatcaagacctcaaagaaaagttttggtgggtcagcatgaggagagaaatagctgaattcgtcgcactctgcgatgtttgccaacgagtgaaggcagagcaccaaagaccagcaggtttactccaacctcttcaaatcccggaatggaaatgggaggagattggaatggactttataacaggactgccccggacatcatcgggtcatgattccatctgggtagtcgtggatcgactcactaaggttgctcacttcataccagtacataccacgtatacgggcaaaaggttggcggagctctacctctcgagaatcatgtgtctacatggagtacccaaaaagattgtatctgatcgagggagtcagttcacctcaaaattctggcaaaagctgcaggaagaattggggacccgtttaaattttagcacggcctatcacccgcaaactgatggtcagaccgagcgagtcaatcaaatcctggaagatatgttgagagcttgcgctcttgattttggtggagcttgggacaaaaacttgccatatgcggaattctcgtacaacaacagctaccaggccagtctacagatggcaccgtttgaagctttatacggccggaagtgccgcacacctctcttctgggatcagacaggcgagcgtcaactgttcgggacagaggtattaacggaagcggaagagaaagtcagaatcatcagggaaaggttgaggattgcccagtctcgacagaagagctacgcggataaccgccgaagggagctcacttttgaggcaggagattacgtgtatcttcgtgtcactccgctccggggagtacaccgttttcagacgaaaggcaagttggcaccacgcttcgtgggaccctacaaaatcttggaacgaaggggagaagttgcttatcagttagaacttccatccaatatgatcggcatccatgacgtgttccacgtgtcccaattaaagaagtgcttaagggtacctgaagaacaggctgattcggaacacattgatatccaggaggacctaacctatgtggagaagccggtttgtatacttgataccagcgaaagaagaaccagaaaaaaggtcaccaggttttgccgagttcagtggagtcatcattcagaagaggaagcaacctgggaaagggaggatgagttgaaagccgcccatccgcacctcttcgccagctcctccgaatctcggggccgagattccgtttaa

SEQ ID NO: 29926 - DNA, 1536 bp, Oryza sativa
  Clone ID: PAT_MRT4530_34380C.1
gacgactggctgatcccggttgacttcgtggtgctggacatggacacggggaaggagacaccgctcatcctgggacgcccattccttagcaccgcgggagccaacattgacaatattcaagtggtcgaagtggagccacccaaaatggacagcctggtgaaattcatgcagaatttcctagagaaggaaacaacgatgcctaggaaccgttattggaagacgccggaatgtgtggaaggagaagccaaagacgcccgctccatcacctccggagacgggtggaaaatccacgaactgaactggatggaggtacagtcttgcacgtcggactttaaatgacacgaccttcaccaacagaagccaaccggccgagagagggaattccaccccatttcaacacatcctgaacgacatcgacctcgaccttgtcagtgatcgggagagacaagcctactacatgctgagcgaccgggagtatgctcacacacgagaatactcaccggagctgctaaaaaagataggtatggatgttgaatttcgtactatttagaaagcggttggttggcagagatttgctgtggtagatgagcctggttcttgtttgcttactttgcaatttttgtgcactttgaaagaaatagaagatggaatttcctttcgctttttccataaggagtacacacttacatgaaaggcttaagtacacttcttggttttcacgattcctgtaaaatcgatctctagaaaggaatttctgggttcgagaaaaataggttttgggaaaatatttctggtgctccaatttgcaagaaacctagaacgaatgatatccataatcctacacttaggctcatgcacaaatggattgctatgactttgtttcctagagtgcaagggcatattctgaaacatggagtagatggatctttgatttactttttctctggttgtacaaatgaaatcccgttgccaaatgcggggtatcatttgtacaactgccgtgaactaaccattcccctgcagaccatagaagaatctcgtgcaggtggagcatacagggagacgcgcaacatgacaagaaatgaacgagaaagttcatcatcctcaacacctgtgcagatgtatgaggcaggttgggagccaattggggatgcacccggatggacccaagctccacgtcacagtatcggagtctcaacctgggcaagtgccagtgaggaccggtggcgtgcgcctcatgacatccaatggggggacaatcaaccttccagatcaagtggtgcgcctccatctccaagtgaatggcgctcaagttcctctcgttgggacttgggtgaaatcactaggaggatggacactcttgatatgcagacgtcagagatacagtacaacctcacggaacacatagcacaaacgcaaggatggcaacaatctgctgatgcgcagttcgccaacttcaggaacatgatgcagcaacaggacgatgaccttcaagagtacttccgctttcaggggttcaatccttatcaaggaccc

SEQ ID NO: 29927 - DNA, 2079 bp, Oryza sativa
  Clone ID: PAT_MRT4530_34381C.1
atgactggtttcaacttaccggaaaactttaaggaaaatccagaagctttcttccggagcatcaaaccgcgagtcgttgctccgcagaaaactctcccgacaaagaaaccagccatactagcgccaccgaccttcaagactatggctgacaagactctccgtgaattcgctgctccctctgttggcaatgtagccattgggccgcagctcaacctgggagatgtggattttgatttgaagtccagcctcatcacgatggcgtaggctagcctgttctgcggcaagcctaacgaggatgccaacgcttacttacaacagttcctggagatctgtagcacgtacaccatgaagggtgtcagtccggacgttgtcaggctccggttgttcccgttttccctcctcgggaaagcaaagtagtggttttatgccaaccgtgctacaatcaatacctgggacaaatgctctatagcatttctctcgaagttctttccgatcggcaaaaccaatccccttcatgggagaatttcaagtttccagcagacaagggacaagtctattcctgagacgtgggaacgacttcagaaatatactcccatgtcctgtgaccacctggacacgctagctggagtagccttcttctctaagacggttcaaggagccgttgatttaatagagaagatggcttctaatatgagttggagcaaggaacgactccaaacccgtcagcgaggcattcacaccatcaaggagatagaaatgcttgctgccaagctggacctcctcatgaagcgattggacgatcacgacaaaaggccacaaggcaccatcaaagccttggactcacacgttacgtgtgagatatgcggcagcaccggtcattctaggaatgactgcccggaaacccgtgaagaggcgatgtacatgggcaacaacaacaatgggtatcgtccacaaggagaaacccagctagctcaattggctttattagtccctgcaaatgaatatgggaggattccgaggcagcccgactcctccaagacagacagcctggtgaaattcatgcagaatttcctggaaaaggaaacaacgatgcccaggaaccgttattggaagacaccggtaaaatcaagcataccggccaagaagctagagcagccggctcagaggaagccgtcttccacaccgaaatcaaaaagggggtctggctcttcatcaagtcatcatgacgagtctagtgctcattcatcagctgatgtctcgatggaggatgccgacgctccgcgacatctcctgaacgacgccgacctcgaccttgtcgatgatcgggaaatgcaagcctactatctgctgagtgaccggaaatatgctcacacgcgagaatactctccggagctgctgaaaaagataggtatggatgttgacttccgtgctatttggaaagctgttggttggcaaagatttgctgtaatagattagcctggttctcatttgctcactttgcaatttctgtgcactttgaaagaaatagaagatggaatttcttttcgctttttccataaggaatacacacctacatggaaaggattaagtacacttcttggttttcacgattcctgtaaaatcgatctcctgaaaggaatatctgggttcgagaaaaataggttttgggaagatatttctggtgctccaatttgcaagaaacctaggacgaatgatatccataatcctacacttatgctcatgcacaaatggattgctatgactttgtttactagaggtgatcttagacccattagggggatgaattaattatcatgtttgccatggttaggaaaatcaaaattgctcctgtgaaatgtatgataaggcaatgctaccatgaactaaccattcccctatagaccatagtagaatctcgtgcaggtggagcatacagggaaacacacaacatgacaaggaatgaatgagaaggttcatcatcctcaacacccgtacagatgtatgaggcaggttgggaaccaactggggatgtacccggatggaccccaagctccatgccacagcatcggagtctcaagc

SEQ ID NO: 29928 - DNA, 348 bp, Oryza sativa
  unsure (1)..(348): unsure at all n locations
  Clone ID: PAT_MRT4530_34382C.1
ccggnncggaannccgggggcggccggggcgtacgcccacgcgtccgcccacgcgtccggcttcgcctcgtctctccnngcccnaatccccaaaccgctncgttctcctattctgggggggggcccncccctcnctcagatcgctccccccgggggcagcagctagatcccgatggcttcgcgccgccgcacccttctcaaggtcatcatcctcggcgacagcggggttgggaagacgtccctgatgaaccaatatgtgaacaagaagttcagcaaccagtcgtgctcgtctacaccggcttctccgccaccgaccccaagcgcaacgcccgtgactcacatgtcccg

SEQ ID NO: 29929 - DNA, 514 bp, Oryza sativa
  Clone ID: PAT_MRT4530_34383C.1
cccacgcgtccgggatgtgaccccggttcccacggacaggacccgcagaaagggaggtaggataggaaggaggctgtagatgtattgtcagccaacttgacgccatggagcatttcttctttggatagtctcatagctcccaatgtacctgaagagagatttagttctgctcagtgtcctgaattgttgactgtcaagttaattcggctgctatgttattgttcaaggaaatttccagttatcatgcttaacaaacccaatatgtgtacctacgaggttccttataatatggttgcattgtcttatgcttaaaaaaaaaaaaaaaaaaaaacaaaaaaaaaaaaaaaaaaaaaaaaaaaaaaaataaaaaaaatataaataaaaaaataaaaaaaattaaaaaaaaaattttgggccgaccattgggggggcccttttaaagaacccagttttacgccccgggcaatccaaattaaaggtttttttatggggaacccaaaatccatttttttgc

SEQ ID NO: 29930 - DNA, 420 bp, Oryza sativa
  Clone ID: PAT_MRT4530_34384C.1
gggcgggggggtaaaaacaagctttgcaatccccggaattttccttttggggttgggtttttttggaaaaaccttacctcccgcccttgtggggggggggggaggaaaaactttgtttcccggccccccaccattgaaccaaaacttccccgaatttttttgggggcctgttttaactgaaaaaccttgtcctggggcccaaaaaaggggtaaaaccccccccccgttgggggaaaggcctttgcccaaaaaatcacggggaccaccggggggttgattgcccccccctttgtccaaaacattcccgggggcaacggggggggtccccatacaaaaaccttgagcccttcccgggggggaaagtcccttggggcttttttaaaaaaacgggggcccccaaagagcccccccaaatccttt

SEQ ID NO: 29931 - DNA, 305 bp, Oryza sativa
  Clone ID: PAT_MRT4530_34385C.1
aagggggggggggacccttgggtttaccggggaatgagggaccggaaccggcaggggaaccagcttccccaaaaggggggcgaacaagagctaggcgaaaccagggccaaagagggttccgggggaaaaaggatatccgtgtacaaaggcgaaaaacaaacgagccggaagcaaaaagaggaaagccgggggggcctaaggagggggctaacccaacataatggggtggggcccaaggaccgatttccggggggggagaccgggggggccccaacaaaaaaaaaaaaccggcccaaccccccggg

SEQ ID NO: 29932 - DNA, 3195 bp, Oryza sativa
  Clone ID: PAT_MRT4530_34386C.1
atggcttccgatgcatgtagtgggctgcacctggtgcgtctgcatgcgtgggggatgcaggtcgtctgcagtacggcccttattactttaaagaaaggcagcaagcttatcaagtatagccggaagggaaaacccaagattcgtgagttcagactttctagtgacgaaaatacattagtttggtactcccacaacaaggaaaagtgcctcagactgtcttctgtgtctaaagttatacctggacagagaactgctgtttttaggaggtttttacgccctgagaaggattacctatcattttcccttatatacaagaacggccaacgttcccttgatctggtttgcaaggatcaagctgaagtagaagtgtggttttcgacacttgagtcactgattacttcatgccgtctaaattttctgaatgatggtcaaactgatagagtatcattttctgaagacgtaacaatctatcaagatagcacttcctatgatacaacgctagatatcgcctcaagtattacacgtagttttaactcagctggttatagcacaccgaattcattgaattctattagagcagatgttggatcagaccgcgtaaatatgctaagagcaagtacaggagacaatagccgagttagtatttccagtgcccctagttcttccagtcaaagttctggactagatgacatcgaatccctcggcgatgtttatgtatggggtgaggtgtggactgaggtgctaccctctgaaggatcctccaactatttgtgcagcaaaacagattttttaattccaaaacctctagaatcagatgttgttttggatgttcagcaaatagcatgtggctctaggcacattggccttactactcggcaaggagaagtattcacttggggtgaagaacttggtggacggctaggccatggtactgatactgatatctgtcgtcccaaacttgtcgaatccttggcagtgtccaatgtggaatacattgcgtgtggggagtttcatacttgtgttgtaactgcatctggtgatctgtatgattggggtgatggatcatacaatgctggattacttgggcacggaactggagttagccattggcttccgaaaagagtttcagggcctctagaagggcttcaggtactctctgttgcatgtggctcatggcattcagcactgaccatgtcaagtggaaaacttttcacatttggtgatggcacatttggttctcttggtcatggagaccgtgaaagcgttgcatatccaaaggaggtagaagctttgagtggattcagagcaatgaaagttgcatgtggagtatggcattctgcagcaattgtggaaatcagtggtcaggcaagcacaaatgcaatgtcaagaaagctgtttacatggggagatggagataagaatcgcttgggccatggcgataaagaagcgaagctagttccaacatgtgttcaagcactcgttgaccataatttccatcaggtggcctgtggacatagcatgactgttgctcttgccacatctggccatgttttcacaatgggtagctctaacaatggccagcttgggaatccaaaagctgatggtaaacaaccatgtatggtgcaagataagttgggtaatgagttggttgaagagatctcatgtggctctaaccatgtagcagccttgacttcaagaagtgaagtatatacatggggcatgggagccaatggaaggttgggacatggtagtgttgaagacaaaaagaagccaactcttgttgacgcattgaaagatcgtcatgttaagagcatttcatgtggttcaaatttcactacatgcatttgcatacataagtgggtttcaggtgcagatcagtctgtttgctctggatgcaggcagccatttggtttcacaagaaagaggcacaattgctacaactgtggacttgtccattgtcatgcatgcagttctaggaaagtgctcaaggctgctttggcaccaactcctggcaagccacaccgtgtatgtgattcatgtttcatgaaactgaaagccgcggataccggcgttatcagttcatataacaaaaggaatgtcatcaccaggcgatccattgatatcaaagataagttagagagaccagaaataaggccttccagacttgcaacgacatcaccagcagagccagtcaagtatcaagaaacaaaaaatgttagaaatgagacaaaaccagccgatcctatgtccatgatgaaagcatcacaagttcctgccatgttgcagttcaaagatatggcttttgcaggaacatttggtacagttccaactaccgtaaaatctatgacaatgggaggtcaaatgcaaatgggcatgccaatgttttcaccatcgccaccgtcaaagaagccaagtccacctccagcgaccgcaagtcctctgatcggtaaagtggacaatgatggcttgaagaagactaacgagttgctgaatcaagacatttccaagttgcaatctcaggttaataagttgaaacagaaatgtgaaactcaagatgagcaactacagaaagcagaaagaaaagctaaacaggctgcctctatggcttcagaagaatctgctaggcgcaatactgtcttggattttgttaagcatcttgacagtgaggatatactcatgatatcacaaccctccattcttcagctcaaggttattgcagacagggtgcccggtgatgttgctgacaacttaaaaactttgcaaagccagtcggagagatttcttgcaggacaaagtagtaatctagtggagattactggccttactggacatgatatcggacaccataggtcaagtagcacgggtagcctgccagtgtctcaagatggcagttctggaaatgctagtggctcttccattgccatggctagtgactctccatgtcaccgtatcatggaaaacaacttgaaggctccaggtgacttcgcaccaaagtatggtactcatggagaagtgcagttgattgagcagtttgagccaggagtgtatgtgacgcttatccagctgagggatggcaccaaagtattcaagcgtgtcaggttcagcaagaggaggtttgctgagcagcaggctgaggaatggtggagggaaaaccaagagagagtgttcaagaaatacaaccatccaactaactag

SEQ ID NO: 29933 - DNA, 465 bp, Oryza sativa
  Clone ID: PAT_MRT4530_34387C.1
atggtgcagaaggactgcatgccgtggcttagcttacctggaagggtgcggcttaacagcggcaagaaaagtacaagcagagagcgcgagaagaaggaagggagatcacctgcttcgtctaaaaaaagcgcaaggcaaatgagcaaaccccactgcctttgtccaggcggcgccccgcgctacggccacacggacacggggggacagcacaaggtcgggccaactaacgcccacaccgcgcaaagtcagtggccactgacacgccgatgcaatccaggtgggcccagcgaggagaaaagaacggtgccacgtggacgcgagacgtgggccatgcttataactacctgcccaccaaacgaggagagcagctcctgcaaaatcgagctccagttttgctgcggaaccacacaaactgatccagcgcatatgtttgcgccggacaagtgggggcccatcgcccagtga

SEQ ID NO: 29934 - DNA, 484 bp, Oryza sativa
  Clone ID: PAT_MRT4530_34388C.1
ttcgaagtgacttgggagatatgaaacagattgtcgtggccttcatccagctagcaaagaaacttgagaacccaaggttgatttctgatagagatgggacagcagttcagaaggacagttctgacatgagtcagtattcttcagatctgaaactcaaaaagaaacagagtaaaactatgtcagaaagaaggggagcaaactggactactgctggagcagatccgtcatctcgtgcatttgaccgtgaaatcaaaagaagtctttctaaattaaagaaaagggatatcgattctggtagtgaaacatctgatgatgatgatggctactctgaaggtgatgagactgagagtgaaactactgtttctgatacagagagtgatcttgatgtaaattcgggagcatgggatttaaagggaaatggtatgaagttatttgaatcaagcgagtctctgacggatgatcgtggatggggtgctcgcatgac

SEQ ID NO: 29935 - DNA, 326 bp, Oryza sativa
  Clone ID: PAT_MRT4530_34389C.1
agccacgcgtccgattcttgcaaggagtgaagagcagctagaggcgaggcaagaaaagaagtgaaatctctccgttacgacaggaagaggaaaagcaaggtggaattgctgatggctgtaaagaggatacacaaggaactcaaggatccgcataaggattgccctacatcatgcagtctacgtactcttggtcaagacatgttccactgctaagtaacgataatgggtgcatttgacagcccacatgctttgctagactgttctacgtagcatgcactttcctcctgattatcgcttcagacaacacaaggtcgagctttagaaaa

SEQ ID NO: 29936 - DNA, 4083 bp, Oryza sativa
  Clone ID: PAT_MRT4530_3438C.1
atggtctacaccaggactggcaaccgcacggcaggcgagggcagcaacggcgaagaacgcgctgatggtgtgcaccccaacggtgattctggcaatggtccgccaccacttcccgagaatccgacccttgcccaagttatggcacatcagactcagatgatggccgccatgatgcagcagatgcagcagcagcaccagcagatgcaccagaggatgatgcagcacgccgaacagcagcatgagcagtttggtccccctccccctcagtccaagctgcctgagtttctacgtgtcaggccacccaccttctccagcaccaccaaccctatggaggcaaatgactggctccatgcgatagagaagaagctgaatctcctgcagtgcaatgatcaggagaaggttgctttcgccacacaccagcttcagggtcctgcgtcagcttggtgggacaaccacatggccacccgcccaccgggtactgaagtcacatgggcagagttctgccgtagcttcaggaaggcacaagtgccagatggggtcgtggcacaaaagaagagggaatttcgtgcactccatcagggcaaccggactgtgacagagtaccttcatgagttcaatcgcctcgcgcgatatgcaccagaggatgtccgcaccgacgccgagaagcaggagaagttcatggcgggtctggatgacgagctgaccaaccaactgatatctggggactacgctgactttgaaaggctggttgacaaggcaatccgtcaggaggatcagcgcaacaaaatggacaggaaaagaaaggcggcgcagttccggtccaaccaaggtagtcagcaccgaccgcgcttcactcccggacagcagggtggacctaccaccatgatcgtccgccagcaccgcccgttcaaccctagcaacttccatcagggcaccagtggcagccagaaccaccatggaggccagcccaaccgcggtgcagctccacgcccaccaatggcaccggcacagtcaggccagccagcgcaagccaagaaggagacgggagcaaaaccagggtcctgcttcaactgtggcgagcttggccacttcgctgacaaatgcccgaagcccaggcgtgccggaccaaggtttatccaggctcgtgtcaaccacgcgtctgcggaggaggcacaagcagcaccagaggtcgtactggtcaccctgaccaatgagaaaggagaaaccgtggtgtacaaatctctagcctcgccaaagaaaggagcctcgttgaatcagattgagacggaaatcccagtggacgccgaagagaagaacttgagaaaattggaggacatacccatagtctgcgagtatccagaggtgttccccgaagacctcaccaccatgccacccaagagggagattgaattccggattgatttggcaccaggaaccgctccaatctataagagaccgtacagaatggcggccaacgaattagcagaggtcaagaagcaagttgatgagcagctgcagaaagggtacattcgaccaagcacttcaccttggggcgctccggtcatttttgtggagaaaaaggataagacaaagaggatgtgcgtcgattatcgcgcacttaacgaggtcacaatcaagaataaatatccgttgccgcgaatcgacgatttatttgatcaactgaaaggagctaaagtgttctctaagatagacctgcgatcaggctaccaccagttgagaatccgggaagaggatattccgaagacggccttcaccactcggtacgggctatatgagtgcacggttatgtccttcggacttactaacgcacccgcattcttcatgaatctgatgaacaaagtgttcatggaatttctggacaagtttgttgtggtattcatcgacgacattcttatctattcaaagtccgaggaagaacatgaacaacatctccgtctagtactcgagaagttgaaggagcaccagctatacgccaagttcagcaagtgtgacttctggttgacggaagtcaaatttctgggccatgtcattacagctcagggtgtagcagttgatccatcgaacgtggagtcagttaccaagtggaccccaccgaagacagtgtcgcagattcgaagttttctaggactggctggttattaccgtcggttcatcgaaaacttctcaagaatcgcccgacccatgactcagttgcttaagaaagacgagaagtttaaatggacagctgagtgcgacaagagctttgaggagctcaaaaggaaattagtatccgcaccggttttgatcctgcccgaccagacgaaagacttccaagtctattgcgatgcatcccgtcacggacttggatgtgtcctaatgcaagagggcagagtggttgcatatgcctcgcggcagttgcgtccacacgaaggaaattatccaactcatgacttggaattggcagcagtggtccatgctttgaagatctggaggcactatctgatcggcaaccgctgcgaagtatatacggaccataaaagtctgaaatacatcttcacccaaccggacctaaaccttcgacaacgaagatggttggagctaatcaaagactatgacatgagtattcactaccacccgggtaaagccaatgtggtggcagacgctttaagccggaaaagttactgcactgccctatgcatcgagggcatgtgtgaggaattgcggcatgagtttgaacatctcaacatgggaattgttgaacacgggtttgtagccgctttggaggcacggcctacgctcgtggaccaagtcagagcagctcaagtaaatgacccggaaatagcggaactgaaaaagaacatgagggttggaaaagctcgagatttccacgaggatgagcacggcacaatctggatgggagaaagattgtgtgtacccgacgacaaggagttgaaggatctgatactcaccgaagctcatcagacccagtactccattcatccaggcagcactaaaatgtatcaagacctcaaagagaagttttggtgggtcagcatgaggagagaaatagctgaattcgtcgcactctgcgatgtttgccagcgagtgaaagcagagcaccaaagacccgcaggtttactccaacctctacaaatcccggaatggaaatgggaggagattggaatggactttataacgggactgccccggacatcatcgggacatgattcaatctgggtagtcgtggaccgactcaccaaggaagaattggggacccgtttaaacttcagcacggcctatcacccgcaaactgatggtcagaccgagcgtgtcaatcaaatcttggaggatatgttgatagcttgcgctcttgattttggtggagcttgggacaaaagcttaccatatgcggaattctcgtacaacaacagctaccaggccagtctacagatggcaccgtttgaagctttgtacggccggaagtgccgcacacctctcttctgggatcagacaggcgaacgtcaactgttcggaacagaagtattagcggaagcagaagagaaagtcagaatcatcagggaaaggttgaggattgctcagtctcgacagaagagctacgcggataaccgccgaagggagctcacttttgaggcaggagattacgtgtatcttcgtgtcaccccgctccggggagtacaccgtttccagacaaaaggcaagttggcaccacgcttcgtgggaccatacaaaattttggaacgaaggggagaggttgcctatcagctagaacttccgtccaacatgatcggcatccatgacgtgttccacgtatcccaattaaagaagtgcttaagggtacctgaggaacaggctgattcggaacacatcgatatccaggaggacctgacctatgtggagaagccggttcgcatacttgataccagcgaaaggaggaccagaaacaaggcaagggtgggcgtgatggagcggggcgggccctgcgacggcctctgtcgcttccggattcacctaggcacgagaggggactgcccgtcgcccgctggggacgggggtgaaacctga

SEQ ID NO: 29937 - DNA, 379 bp, Oryza sativa
  Clone ID: PAT_MRT4530_34390C.1
ttacgaacagatagcgacgcgcttcactggacggacctgaactacatatacgctcaagacggcagggactcgcatggacccaactgtacctcctgcacagatagacggtccatatctctcagcacagaggttcgaccttccatggaaggaatcctatcgttacgatgacatcctttgattcacctggagaacggctgaggcgacgaccaaacgatggaaatggacatcaggctgatcatgagcagctacatgagctcgatgtagaccgaatagctcgtcgcgatcactgccgaactactcttatgataaagaatatcctaaacaagcgcacctccagatgcttctagctgctattgatgaaaatcatcaacagacttat

SEQ ID NO: 29938 - DNA, 416 bp, Oryza sativa
  Clone ID: PAT_MRT4530_34391C.1
tttgttttttttttttttttttttttttttttttttttaaagtaccgtgtaacattaaccgttactattacaggttgccatttgatggcaccaggtttattggacaaccatgtcgacgatcacttaacactgatgaacatattacacaggtaatgggcgtctctacacgaagatacagcctggggatagcccatctgcttagggcttaacattggggataaatataaaacatctttggaaaaggaaaggggtttctgaaataaaaggggcaaccagatttggattggggactcccagggtcaccagaaagggggcactcttaagccattgagggtgaaaggaactagcacaaaaatcccaggaagagggcatgcaatcaatccagggttatatttgggggccaaagcaacaaagaa

SEQ ID NO: 29939 - DNA, 566 bp, Oryza sativa
  Clone ID: PAT_MRT4530_34392C.1
actaaactctaaactttaaggtgcataatgggactcaattgagattttgggaggactgttgggcaggtaactcttcttttgataggctttatccttcgctatatcagttaacgaggaagaaaaatgttactatggctgaagtcttaggaagggaaccgttgaatgcctcttttagaagggcattggttggggataatcttgattcttggttttctctagtaacagaagtggtttcctttgagctttcagatcaaaatgatgtctttatttggaaggctcataagaagggggtctttacagtcaactgaatgtataaagctctcatatgtgacggggtaataccaaggaaaacttttatttggaaacttagagttcctttaaaaataaaaatctttctttggtatttaaagagagagatcattcttactatagacaacttggctaagaggagatggaaggggaataccaagtgttgcttttgtaatgcaaatgaaacaatacaacatcttttctttgattgccacaatcaggaaaattttggtagcaagattcttgcaaggaaaaaa

SEQ ID NO: 29940 - DNA, 1518 bp, Oryza sativa
  Clone ID: PAT_MRT4530_34393C.1
ctaattggataaaaggtgaaaaatccacgccagttcctcctccccttctcccagcgccaccgaccaccgcccctcgccaggaatgtcaccgccaacgacaaggacgaggcaccgcgggaggatctccggcccgaatctcgccgtgcgccccaactctaggccagcggcagatctggtcccgctggatccggcctccgtagtccacagcctcgccgcggacggcatctcctcgccggagtcgctctcgcataattggccagtaggagtgaagtgtcgcccgccctcattcaccgcgctcggtcgaactagctcaacctcaaatgtgcccatgtctcctagtgaacaatgcgccatgtgcagccacacaaaactgagaaactccccacccatgctgagctgccttgcatggttctcgccacgggacttgccggctgcatagaggagaaccccaacccacgcgcgcgcaagaacttgcagtgattcatgacaatgcacagcctcttccttgtggcccctgaagacaaacccagcgagggtgatgggatcagacaagtcattcaggtcacggtctgtagccagtttctccaggacgacactgactctgcccttgcttgcagcagctccagagctgaccttggcaacggtttctgaagccttatctagaacatcacgcacactgccactgacaggaagcatttcaggatggacgaccaataggtagcacatgtactcagatattgtcctgcacgcatccatcagatgccgtctctccctggtagcgtcgcagctatcagcacttgtgggattcatgcatcggtgcaagaatatgtcggtgtagacgtgtagcgagaggatggccacctcgaactgttcccgcaggattatgtccagtgctgaaccgacgcctgaatttggatccgcatcgacacttgatgtctggcttgcaccgaagatctcggcaaggcacttggcttcaaagacgagcttcttcatctctgctttgacgcccacacgctgagagtaccgaaagttcctccaaaattcctttgctccaacaaggctcatcaccttcccaaacacattgtcagagaagcaggaactgaggaaattgtattgccccaaggaattcgaccaccatgacatagactccgtctgtaggctcttgaaaacataccaagctgcatctgcgagcctatggtacttccaatattgcaaggatgcccatgtccatggcgacatcatcaccatgaagaagatcgcacagacctccaaacagagtgctccaatgaacaatgcataggttatggcaacatcaactctgctatggtgccacttcttgttcctcttgagtgcccatgttctctccccatacttgatgattccagaatcctcaatgacgagttggtgctgcgctgtcgaagaccaccggaaaagaagacgaacacttgcaacatgaagcttaaaagcaccagcacaggatataaaccagcagatgagagtaatcgtcgatgccgccat

SEQ ID NO: 29941 - DNA, 702 bp, Oryza sativa
  Clone ID: PAT_MRT4530_34394C.1
atggctgtttggtgggaaagaaacatggggctagctagacgcaccactcaagtcaacctgggcgtgctaaatctagaaagctttgcactagcactacatgtcagatggctatggtatgaatggaaatccctggacaaagcatgggtcggcttggataccctgtgcgacgaaaccgataaaatactcttgtcaactacaatgataaccattggggacggagcaacatcacatttttgggacttagcctggatgcacggtcgccacccgaaggatgtcatgccacaagtgtacacaatctccaaagggaagaatagaaccttgagggataccatcacagacaatacctggtcgcaagacctaaatctctcaatcatcggagacatgtcaactaagcttctagagcaactagtgaccttgtggacaacagttcaaagcgtgcaactctccccagacacgaattggagactgctttccacctcctcgtggactgagatacatgagaagaatctggaacatgctcgcaaactagatgttgcaagggcacataaagtcagccagctggattcccgctatagtccatacctggtgtacaatcatccggaaagcgtaggcaccaaacaaatacacgaattggagactgctttccacctcctcgtggtctgcagatacatgagaagaatctggaacatgctcgcaaactag

SEQ ID NO: 29942 - DNA, 1034 bp, Oryza sativa
  Clone ID: PAT_MRT4530_34395C.1
tctagctttaacatggttttaatcttttcaatgcatgtctcgttaattcttttttttacggagaaatgtctcgttaatataatgtgctcgccaactgcctacggcagcctgggcgtgctaaatctagaaagctttgcactagcactacatgtcagatggctatggtatgaatggaaatccctggacaaagcatgggtcggcttggataccctgtgcgacgaaaccgataaaatactcttgtcaactacaatgataaccattggggacggagcaacatcacatttttgggacttagcctggatgcacggtcgccacccgaaggatgtcatgccacaagtgtacacaatctccaaagggaagaatagaaccttgagggataccatcacagacaatacctggtcgcaagacctaaatctctcaatcatcggagacatgtcaactaagcttctagagcaactagtgaccttgtggacaacagttcaaagcgtgcaactctccccaggtgttgtagatgaaatcatttggaggctcacaaatcatgaagaatactcggttccacctaaaaagagtagttccttgaatccactagcacaaactatgacataatcatttggaaaccatgggcacgaaacaaatgtaagttgttcgctcggcttgtgatccgtaatagggactggatattagacaaactagtgattcaaggatgtccaaacaacacttactgcctgctctgcagacacgaattggagactgctttccacctcctcgtggactgcagatacatgagaagaatctggaacatgctcgcaaactagatgttgcaagggcacataaagtcagccagctggattcccgctatagtccatacctggtgtacaatcatccggaaagcgtaggcaccaaacaaatgtaagttgttcacctagcttgtgatccacaatagggactggacattagaaaattagtgattaaggatgggaaaagagctcttgacaatatccctcgttacgaaaataaaggaggacactaaaact

SEQ ID NO: 29943 - DNA, 485 bp, Oryza sativa
  Clone ID: PAT_MRT4530_34396C.1
gcgcaccaagttgaatttctagttgatgcagaccttattatggtgatgcaaaatggaaagatagcacaagcagggaaatttcaaagatctccaacaaatcatggcttttggagggatcttaggggctcacttttgtgccgtcgaacaagtaagtatcgcataaggcacaagcatatatttgtcaaagcatcatgcagaatcagaaaaggtaccaagcatcaatgagtccgctgcataaaaggaaatcagcagcaaatggctaaacacatatatgataaattgctgacaagaagtatttagagataacactgaagaagggaaattgctgcttggtgaagaaagagagaatggataccttagctagcaagtggattggtcatacctcacagctgctcgaggaggtcttttcattcctatgataattgcaagacaatgcttctttcagatattaaaagtgggaagcaactataggatggcatcagctt

SEQ ID NO: 29944 - DNA, 395 bp, Oryza sativa
  Clone ID: PAT_MRT4530_34397C.1
gcgttaacgtcagatacaatgctaggctcaggggatgcttatgtgatccagaaaaattgtgacactgcagatctatatgaggcggaggacaaagatactgagcagagacctgtacttcatacaaaaaatgggatagcaccatcatgaatgcgtgagcatacatagtatggacatgctgatcagttgctttgatttggttcaaatgatgtggccacagaagctaataagccaggacatgggggggagactatatcatgcagtcaagatgaaggagcagacgaattaaaaaaccagaacagtttatacgagtgtacaacacccgacaaatattttgcctcttctggaatatctgctcccacactggtctctgcagctatacgggtgctgtactggac

SEQ ID NO: 29945 - DNA, 732 bp, Oryza sativa
  Clone ID: PAT_MRT4530_34398C.1
atgcaggacctgtcgaacagcccccgttcgacaggcagggctgtcgaactgcccctgttcgacaggagggctgtcgaactgcccctgttcgacaggatatccgtcgaactggcgcagttcgacaggggaagtgtgccgacccagatgctccctgcgaggggtgaacataaggcggagtttggaatacctgcggacgtggtggtgccgtgctcgacgtgggtacccctgatccggctgaccccctggtgtactccggtgctggggtgtgctgaaaggaaggacgaccgtgagatgtgtgggccgcttcgtacccgcgacgtgaagaggatggaccactccgatccacgctggaacgtcggggtagtggtggtgatggccgtcggcccgacgtctgcaccacatctgccgcgctccgacaggagacacgacggtgtcggactccacgtgaacgtgctcaacaaattccgcatccaaaggacgaccatctctcggagggaagtcctgatacatgcccaactgtttgagaaccctgtggacattgtgtggctcgacgtgcacgtccaccacgaggtgacaagtcgtcatccagagttgcatatctcgcgtgcaaagatccgcgagaccgtgcggtgcacgatcattgacatcgtgctgagtgtagggagtccaccgaacacggtcaggcgtaagctgatcaaagtcagctacaaactgagtgtagacacgatgtag

SEQ ID NO: 29946 - DNA, 1916 bp, Oryza sativa
  unsure (1)..(1916): unsure at all n locations
  Clone ID: PAT_MRT4530_34399C.1
tcaagccggtggatgcgcgccgcacttgtccgagtgctccttggtgtagaggtgcagcaccatgtcggtcttgccggagcagcgcacgccgcagggctcgcacagcagcgcgccgttcgcctcacgcagcaccgccaacatcctcccctccacctggaccttcacctgctgctgcccgccggtggcagccgccgccgccgcggcgtcggcggccaccggcgcgccgccatctctggcctctgcagtttggtcgacttccatgggcgccacagagccatcgcccgtttgtgcagcgacgacagctcgcggcgcagacgatggcgaggaggcggcggcggcggccgccgtttccttcgacctggccttcacaatctccatgtcgtccatggccgccttttcagccatcgatttgttcctgtgcttctttccggctaggtgtagcctcatgccgctctccgacgtcgccatcacgttgcaggacgcgcacccgaggaactcgccgatctgcttgacggcgtggtgctcgccgccgacgacgatgtcgacggttcccttctccggacaagtgttgtcggcgacgttgttggtggcgacaccttctgctactgccatggctcccgcctcaaggttcccgccaactttgccagcagcggccatggtggtggaggcggcagcttcggcacccttcgccttcgccgtcgccgcggccatggacttgtgcttcctcccggcgaggtgcgaccgcatgacagtcaccgacggcgccttcacgttgcagacatcgcagataatgaagacctcgtccagcctccgcatggcgtgtggctcgccgtcgacctccaccaccaccgttccatgctcgccgtcggcggcagcagctgttgttggcggcgcccccgctgctttcacgccattcataggagaggcagtcgccgtcgctggcgccggcggcttcccggcttgctgctgcttcagcttcgtggccttggagacgtgcttgccgccgtcgaggtggcacatcatggtgacgcggtcggccgtcctgacattgcagccctcgcagaggaggtagccgtccatctgcatcacctcgtacacgactccggcgctcgtcagcatgctcagcttcgtcggactgaagccgccgccaccgccgccgccgccgtccgaagccggcgggatcatcgacgccgcatcctcctcgtcctgctcgggctcgggctcgggttccgccggcggcggcggcggcggtgcagacagcgcgagcgcggccgccttcttcttgtggctcttcccgttgagatggtcctgcatagccttctcgccggtcgacgtgatgccgcagacggcgcaggtcaggtcggcggccttgggcttcttgctactcgtcgcggcggagacggcggacgctgctgcggcggggttcttcttcctcttggccggcaaggcggccgccgatgatgatgcgtttgcattcgtgacggcgccataaattaatattagagccatacgatctgactcgtagtcaacaacagggtagtcttcctcctcgaatccgcgcccggcgagatcagagataacgctttcgtctctccgcgcaagtgcggaggggacgacagcggcgagtgggggcggcgcaagtgcgcacagcggcgcggagccgcggacgacgacggtgcgtgggggcgcgcggcggatgacggctagtaggggcggcgcaagtgcgcacggtggcgcaaaactgcggacgacggcagcaagtggggggggcgccagtgcgcacagcggcgcggagccgcgcaccatggcggcgcgtgggggcgcgcggcgcacccccgcgagtaagggcggcacaagtgcgctcggcggcccgacgccgnggacaacggaaggagcgtgggggcaggcggcggacg

SEQ ID NO: 29947 - DNA, 1467 bp, Oryza sativa
  Clone ID: PAT_MRT4530_3439C.1
cggcccgtctactttgtcagcgaggcactccgagatgcgaagacccgatacccacaggcccagaaaatgctttatgcagttttaatggcctcaaggaaattacgccactatttccaagcgcatcgggtttccgtagtgacatcctaccctctcggccaaatcctgcacaaccaagagggcactggtcgggttgtaaagtgggccatcgagctggctgagttcgacctgcacttcaaaccacgacacgcgatcaaaagccaggtcctagctaacttcatcgcggagtggaccccagtggacgaacctgttccacccaacgtctccttcctccccagagatgtaaaggacccaaacgccgacattcatggcgggcactgggttatgcatttcgacggctccctcaaccttcaaggtgcaggcgccagagtcacgctgacatcgccaagcggggacgtcctcaagtatgtcatttggctcgacttccgagccacgaacaacatggcggaatacgaaggactcctcgcgggattgagggcggtggccagaatgggcatccaccgtctcctggtcctaggtgactcccagctggtcgtgaatcaagtatccaaagaactcgagctccggcacgtgccccgacgcgacaacacagtcgctgatgagttgtcgcgtgttgcatcggcacgagccccactccccccggggaccttcgaggaaagactcgcgcagccatcggcgcgaccgaacccctcgagggaccccgacgacacgccctctgccccgacccttggcgactcgcggccctcggggcccgagggggtcgaccccgacccccctcatcaggtcgtttggatgactgacatccgggcgtatctcgacggcaatactcttcctgaggatcgcgcagaagctgagaagctcgcgcgcatctccaagcggtacgtcctcatagaagggaccctctaccggcgtgccgccaacgggatactcttgaagtgtgtttctcgagagcaaggcatcgagctcatagccgacacccatcaggacatccttggaccattcaagacggctcgaggcgggtatcagcacctatacgttgccatcgacaagttcaccaagtggcccgaagcttacccggtcgtcaagatcgacaagcattccgccctcaagttcatcaggggcatcacatcccgattcggagtgcccaaccgcatcattacagataacggcacccagttcaccagtgagctatttgacaactattgcgacgacatgggcatcaaattgtgctttgcctcgcccgcccaccccaggagcaacggccaagtcgagcgagccaacgccgaaatcctcaaaggcctcaagaccaagacgtacaatgtcctgaagaaacacggggattcgtggctcgaggaattgcccgccgtgttgtgggcaaatcgcaccactccaagccgcgcaacggggtaa

SEQ ID NO: 29948 - DNA, 135 bp, Oryza sativa
  Clone ID: PAT_MRT4530_343C.1
atgcggcggcgtgatctaacgagtagcgaggagaggttggaccgttggacccaggcgactgggctcaggaggttgatgttcacggcggtcaccgttgaagcccacgacctagatccagggcgatgccggccgtag

SEQ ID NO: 29949 - DNA, 2373 bp, Oryza sativa
  Clone ID: PAT_MRT4530_34400C.1
atgtcagatgatatgcccattcgtctgtattatggcgatgctcctatacaaatatgtgatagcggggtggatttgactgtatatgccttccatgatactagtctgaatgcaccggagcatatgggtttgaacgacgtgttagggtggttgtataatatgtttggggtagatccagtgcacgataaatttgtcataaatgccgtgtggccagtgaggggtcaacatggatggcagtggagagtagtggaggttgcgtcaactgggagttggaggaagtttgttagtaaagtaagggagaaaggctatagcctggcaatagtggtgcagaagacaaaatgtgttgatcgatcgggggagtcaagtcatgccgtggtggaagaaactccgttggaaggtggacaagctgaaaatgtttggcggactgagcaaggtcgaggggaagaagtagtagagggtaatacacaaggagaggtcattgttcgtggtactaatcgtgaggccaacgactcggacgatgaagaaccggattcgcctatgcgtgttgatgcagcggaggagaatgaggcggtagtggatcagatggaagtggaaaacgaggaatacattgcgcttgtagtggaaggagaagatacaacactatgggacaacgaaacttacatacccgataattggacgaccatatcaatgagtcgtatgaaggtaaacgatggtttagatgcccactggtgttacgatagtaagcaggtgaaagttggacagatgtttcatgacaaaggtcacttacaagatgcggtgaagaggtgggcatttgtccagaagcgtgagttcagggtgaaggtttcaaatcggacgacgtatgacgtgaagtgcatacagggtggatgtccttggagagtgcatggttacaagccacaacatgacactttatgggtagcttcgagggttgagcaacatacgtgtttgttggagaatacccgtctggtgcacagaaacctgacagcggcatttgtggcacaaatggtatattcaaaggtggttagaaaaacatctttgtcccctttcaccataatgcatgacgttgagaaagagtacggatatgagatatcgtacgacaaggcttggagggcaaaacagaaagcattggagatgaggtttggaacttatgaggattcttatcacaatcttcccccactattggaggtgatgcaggcaagaaacccgggcacacacatggctattctcgatgaggtgaatgaatatggggagaatgttcttcgtcgggctttctggtcatttgggtgcatgatagaggcctttaaaaattgcattcctttgctctgtgttgatggcactttcatgacaggcaagtacagaggaacaattctaaccgcgatcggagtcgacgcggatagccatgtcgttcctgttgcttttgcattttttgaaagcgagaacacatcaagctggctatggtttttgcggcacattaaaatgtgtgttgttgaaaacagaccaaatgtgtgtgttctgcatgaccgacacgccggtttgctatcagcgatacagaagcttcaagaagatgtcacacagtccgtgccatggccagatttacatagcagatggtgcatgcgacattttggggctaatttttatagacaattcaggagtaagagattgatggacctgttcaagaagttatgcaagcagaatcaacaaagaaagtttgatgccatatgggagcaactggatcgtttgaccactacacacatggaagaggcggaatttgttgagcacgttcacgtggagtccgacaccctgctgcaaagactagaggcgagacctccagtcgtcagatgtggtgcagacgtcaggccgacggccatcaccaccactaccccgacgttccagcgtggatcggagtggtccatcctcttcacgtcgcggggagcatctgggtcggcacacttcccttacatgccaacgggggacaacgtgttgaacacaccagcatggggacttcatatcactccgcgtgcgccagagcagggccacacacagcacacatacgatgagtacggttcggcgtcgacgcatcacggagtgcctgcttactccccttgcacagcattcattgaggacttcttttccactgatcctccccagggggaagtagggatggattactggcacgcagcacctcaggtcacacagccgacgcaggagacggaggccggtcaggggccagacgtgacaccacagcaggcagctagagataggcacccccctgataatttgacatatcccactgagcagattaggcgtatgaagaagggaggacctagcaagcgtgcgaagggcactgatcgtccttga

SEQ ID NO: 29950 - DNA, 774 bp, Oryza sativa
  Clone ID: PAT_MRT4530_34401C.1
atggaaattagacttttcctcgggcggctaaggcgcggcccaagggaattggagcggaccggccgatctaaacgggccggccggcccaagaaggcggcccagagcggcccaagacgcgcgcgcgcggaggaaggagagagagagtccggtggaccgggctcaccacgcgcggccccgggtgggacccgcttgtcagcggctcggctcaccgtgcggagggagtacgcggctcatgcgcgcgggcgggggagggacgcggtgcacgcgcgcggctcgcggtggacgcggatgcggcgggcccacgcgcagcctcacggctcgcggtggaacgcgcgcacggggagggaccgaccggggttggctcgacccggccggcgggaggtagacgacgacccggccgcgaatggacggcgggtggcggcggcgagcggcggagcgaaccacggtgatacaggcaaaagcgagcacaccgggcggttgcacgggacgaggggagacgagccaacggctcggattcgccggaggttgctcgacggcggcggattgcggcggcggcaaccggcggcgagggaagagggaaacggcgatgaggccacgaggggccgattcccggcggtgagagcatctacgcggcttcgggaactcgacgctagcgtcggattgggcggaactacgccgagcgaggccggcgacgagcgggtgctacggagctcgggcggcgacggcggcgagcacacggcgagcgacggcaacagtcggggcggcgccggctaa

SEQ ID NO: 29951 - DNA, 2892 bp, Oryza sativa
  Clone ID: PAT_MRT4530_34402C.1
atgtcaggtgatatgcccattcgtctgtattatggcgatgctcctatacaaatatgtgatagcggggtggatttgactgtatatgccttccatgatactagtctgaatgcaccggagcatatgggtttgaacgacgtgttagggtggttgtataatatgtttggggtagatccagtgcacgataaatttgtcataaatgccgtgtggccagtgaggggtcaacatggatggcagtggagagtagtggaggttgcgtcaactgggagttggaggaagtttgttagtaaagtaagggagaaaggctatagcctggcaatagtggtgcagaagacaaaatgtgttgatcgatcgggggagtcaagtcatgccgtggtggaagaaactccgttggaaggtggacaagctgaaaatgtttggcggactgagcaaggtcgaggggaagaagtagtagagggtaatacacaaggagaggtcattgtttgtggtactaatcgtgaggccaacgactcggacgatgaagaaccggattcgcctatgcgtgttgatgcagcggaggagaatgaggcggtagtggatcagatggaagtggaaaacgaggaatacattgcgcttgtagtggaaggagaagatacaacactgtgggacaacgaaacttacatacccgataattggacgaccatatcaatgagtcgtatgaaggtaaacgatggtttagatgcccactggtgttatgatagtaagcaggtgaaagttggacagatgtttcatgacaaaggtcacttacaagatgcggtgaagaggtgggcatttgtccagaagcgtgagttcagggtgaaggtttcaaataggacgacgtatgacgtgaagtgcatacagggtggatgtccttggagagtgcatggttacaagccacaacatgacactttatgggtagcttcgagggttgagcaacatacgtgtttgttggagaatacccatctggtgcacagaaacctgacagcggcatttgtggcacaaatggtatattcaaaggtggttagaaaaacatctttgtcccctttcaccataatgcatgacgttgagaaagagtacggatatgagatatcgtacgacaaggcttggagggcaaaacagaaagcattggagatgaggtttggaacttatgaggattcttatcacaatcttcccccactattggaggtgatgcaggcaagaaacccgggcacacacatggctattctcgatgaggtgaatgaatatggggagaatgttcttcgtcgggctttctggtcatttgggtgcatgatagaggcctttaaaaattgcattcctttgctctgtgttgatggcactttcatgacaggcaagtacagaggaacaattctaaccgcgatcggagtcgacgcggatagccatgtcgttcctgttgcttttgcatttgttgaaagcgagaacacatcaagctggctatggtttttgcggcacattaaaatgtgtgttgttgaaaacagacaaaatgtgtgtgttctgcatgaccgacacgccggtttgctatcagcgatacagaagcttcaagaagatgtcacacagtccgtgccatggccagatttacatagcagatggtgcatgcgacattttggggctaatttttatagacaattcaggagtaagagattgatggacctgttcaagaagttatgcaagcagaatcaacaaagaaagtttgatgccatatgggagcaactggatcgtttgaccactatacacatggaagaggttaggaaaaaacccatagttgccagacaggaggagccggagggacttgaacccattcctaatgaagcaccaagtattactcggcgcaggaaacgtggacgggccacgaagtgcttcacggagtgggtagaatttgagccaagggagaaatggtcgttgttgtacgatacagatggatcgaggtatggtgtgatgacaacaaatcttgctgaagtgtataattgggttatgaagaatacacgacctctaccacttgttgctatcctggagggcatcacgaggggtacacagaagtatctctgtaaaagtgttacacgatggaggtgttttcctccacaaggagatagcaccgtcccccaccaggcagcgattactgacacgtttgcccctcagcctagatcagcttacaactcaatggcggaatttgttgagcacgttcacgtggagtccgacaccctgctgcaaagactagaggcgagacctccagtcgtcagatgtggtgcaaacgtcgggccgacggccatcaccaccactaccccgacgttccagcgtggatcggagtggtccatcctcttcacgtcgcgggtacgaagcagcccacacatctcacggtcgtccttcctttcagcacaccccagcaccggagtacaccagggggtcagccggatcaggggtacccacgtcgagcacggcaccaccacgtccgcagacgatgagtatggttcggcgtcgacgcatcacggagtgcctgcttactcccctcgcacagcattcattgaggacttcttttccactgatcctccccagggggaagtagggatggattactggcacgcagcacctcagaacgcgaccctgtcgaactgcggcagttcgacggacatcctgtcgaactgcggcagttcgacagcccagcctgtcgaacgggggctgttcgacagccctgcctgtcgaacgggggctgttcgacaggtcctgttgaacggcagccttccgatctcgtcgccagtcgcgctctggccgttcgataggcgccctatcgaactgcacccgttcgacagggacctattttcgcgattttccccggttgaccactacttttgcgattttccataa

SEQ ID NO: 29952 - DNA, 740 bp, Oryza sativa
  Clone ID: PAT_MRT4530_34403C.1
gcggcctgattcatcttcttcttcttcacctcgaggaactccgcgaggccggcgagcgcggcgccggcgtcctcgctgcgcagcagcatctcggacacctccgccggcgtcacctcggcctgggagatgagccgccggatctccgggaacagcgggtggtcgtcgacgaggaagtagttgcgggcgagcgtcgtgaaggcgtcccagccgcagtggcccatgtagacgtgcttgtccatccgccccggccggagcagcgccgggtcgaggcgctccctgtagttggtggtgaagacgatgaccctctcctcgccgctcgtcgaccacagcccgtcgatgaagttgagcagcccggacagcgtcagcttctccttctcttcctcgtttaaggttaacaagatgttttgacttttattaaaatcgaactgcttcttgagggccggatccatggcgaccgtgtcgaacgtggccgggtggtggtgcacgatgccgttccacgacgagccctcgttcatgctgatctccagctcgcggtcgcgccgccgcgcccgctccacctcgtccctgatgaagggcacgtacctgtcgagcgccgtgtccgtgtgctccgcgtcgaagctgagctccctcgagtccgactccgccgccgtgccgccgccgttcgatctcccgccgccgcccccgccctcgccgggaacggaggtccacgtgaactccacgccctcgaacacgtcggtcat

SEQ ID NO: 29953 - DNA, 279 bp, Oryza sativa
  Clone ID: PAT_MRT4530_34404C.1
atggaggcacaccacttgatctggaaggttggttgtccccccattggatgtcatgaggcgcacgccaccgatcctcactggcactcgcccgggttgagactacgatgttgtggtgtggagcttgggtccatccgggtgcgtccccagttggctcccaacctgcctcatacagctgcacgggggaatggcttgtctctcccgatcactgacaaggttgagttcggtgtcgttcagaagtcgtcgcggagcttcggcgtcttccatcaagacatctgctga

SEQ ID NO: 29954 - DNA, 3099 bp, Oryza sativa
  Clone ID: PAT_MRT4530_34405C.1
atgggcgttcgacaggccgatttaaagcccggtccactcaggccaggagttcgatttgtgaccacatcgccagccaccgccgagagtcgccacatcgtcgccgtacaaaggatgtcaggtgatatgcccattcgtctgtattatggcgatgctcctatacaaatatgtaatagcggggtggatttgactgtatatgccttccatgatactagtctgaatgcaccggagcatatggtgaggggtcaacatggatggcagtggagagtagtggaggttgcgtcatttgggagttggaggaagtttgttagtaaagtaagggagaaaggctatagcctggcaatagtggtgcagaagacaacatgtgttgatcgatcgggggagtcaagtcatgccgtggtggaagaaactccgttggaaggtggacaagctgaaaatgtttggcggactgagcaaggtcgagggcaagaagtagtagagggtaatacacaagaagaggtcattgttcatggtactaatcgtgaggccaacgactcggacgatgaagaaccggattcgcctatgcgtgttgatgcagcggaggagaatgaggcggtagtggatcagatggaagtggaaaacgaggaataccttgcgcttgtagtggaaggagaagatacaacactgtgggacaacgaaactaacatacccgatgattggacgaccatatcaatgagtcgtatgaaggtgaaagttggacagatgtttcatgacaaaggtcacttacaagatgcggtgaagaggtgggcatttgtccagaagcgtgagttcagggtgaaggtttcaaataggacgacgtatgacgtgaagtgcatacagggtggatgtccttggagagtgcatggttacaagccacaacatgacactttatgggtagcttcgagggttgagcaacatacgtgtttgttggagaatacccgtctggtgcacagaaacctgacagcggcatttgtggcacaaatggtatattcaaaggtggttagaaaaacatctttctcccctttcaccataatgcatgacgttgagaaagagtacggatatgagatatcgtacgacaaggcttggagggcaaaacagaaagcattggagatgaggtttggaacttatgaggattcttatcacaattttcacccactattggaggtgatgcaggcaagaaacccgggcacacacatggctattctcgatgaggtgaatgaatatggggagaatgttcttcgtcgggctttctggtcatttgggtgcatgatagaggcctttagaaattgcattcctttgctctgtgttgatggcactttcatgacaggcaagtacagaggaacaattctaaccgcgatcggagtcgacgcggatagccatgtcgttcctgttgcttttgcatttgttgaaagcgagaacacatcaagctggctatggtttttgtggcacattaaaatgtgtgttgttgaaaacagaccaaatgtgtgtgttctgcatgaccgacacaccggtttgctatcagcgatacagaagcttcaagaagatgtcacacagtccgttccatggccagatttacatagcagatggtgcatgcgacattttggggctaatttttatagacaattcaggagtaagagattgatggacctgttcaagaagttatgcaagcagaatcaacaaagaaagtttgatgccatatgggatcaactggatcgtttgaccactacacacatggaagaggttaggaaaaaacctataattgccagacaggaggagccggagggacttgaacccattcctaatgaagcaccaagtattactcggcgcaggaagcgtggaagggccacgaagtgcttcacggagtgggtagaatttgagccaagggagaaatggtcgttgttgtacgatacagatggatcgaggtatggtgtgatgacaacaaatcttgctgaagtgtataactgggttatgaagaatacacgacctctaccacttgttgctatcctggagggcatcacgaggggtacacagaagtatctctgtaaaaggtactccagaaaggggctcgggctttcctacgagctagttattgtgaccacggttcagccgacggtacaagagtgggagcacgcagctgataacttggcacttcagacacctccagacgatgggagttattatggagcttaccttcgttggtaccgcagtgttacacgatggagatcagcttacaactcaatggcggaatttgttgagcacgttcacgtggagtccgacaccctgctgcaaagactagaggcgagacctccagtcgtcaggcctgacgacgtggcgagcatccttcgcaacttccgtgcacgtgctgccgcactactacgtcgtgtctcctgtcggagcgcggcagatgtggtgcagacgtcgggccgacggccatcaccaccactaccccgacgttccagcgtggatcggagtggtccatcctcttcacgtcgcgggtacgaagcggcccacacatctcacggtcgtccttcctttcagcacaccccagcaccggagtacaccagggggtcagccggatcaggggtacccacgtcgagcacggcaccaccacgtccgcaggtattccaaactccgccttatgttcacccctcgcagggagcatctgggtcggcacacttcccttacatgccaacgggggacaacgtgttgaacacaccagcatggggacttcatatcactccgcgtgcgccagagcagggccacacacagcacacatatgatgagtacggttcggcgtcgacgcatcacggaatgcctgcttactcccctcgcacagcattcattgaggacttcttttccactgatcctccccagggggaagtagcgatggattactggcacgcagcacctcaggtcacacagccgacacaggagacggaggccggtcaggggccagacgtgacaccacagcaggcagctagagataggcacccccctgataatttgacatatcccactgagcagattaggcgtaggaagaagggaggacctagcaagcgtgcgaagggcactgatcgtccttga

SEQ ID NO: 29955 - DNA, 1715 bp, Oryza sativa
  Clone ID: PAT_MRT4530_34406C.1
tcccccgctctgcccgtgcgccgcgcgcgcgtgcgcgtgagccgcgccgagccgagcgccctccgtcctcgctgccgcttcccgccgacgccgcccaaatcgccacgccgcccgttgcttcccgcgcgtgcatgccgtggtggccgaccgcctggtcgccgccgccgtcagcctctgccgcgcctgtccgcgcctgccgcccgtgtcgccgctccgctccacaccgcccccgccgtcatcgccgtcgtcacaacccggctccgccactctgcgcgctagcttccaagggacggaggcagagctccccccttctgccgcgtcgccctctctccctccttctcctctcgttttgtcccatcgcctccactccattgtcgccgcctcccgtgctctgttcgccgtcgccgttcgtcgtcgtgcgtgtcagaggagccggcacgagcgaggacgcggaaggggactccgggtgcgccctcttcttcctcttccccggcccgaggctggagagatcactcccgtgccgtcggcctctcgtcacagcgccccgcctcatctcggtagtgcattcccccgttctccctcctcgatccatctcctccctggcgccgccccgactgctgctgtcgctcgccgtgtgctcaccgccgtcgccgcccgagctcggaagcgcctctcgtcgccggcctccctcggtgcgtttccccctaatccggcgcaagggatggattcccgcagccgcgtagatgctctcaccgccgggaatcagcccctcgtgacctcgtcgccgtttcccccttttctcgccgccggttgccgccgccgcaatccgccgccgacgaactccctccggcgaatccaagccgttggctcgcaccctctcgttctccctcgtcattccggtgtacaccccgtcgcccctcgtcatcgcacggcgtcccggagaaaccgccgccgcccgccgtccattcgcggccggcgccttcgtcttcctccagccggcccgcgtggcagccacgtcggagccacctcggcacgaccggatcggctgacccggtcagccgctccctccgttccaccctccccgtgcgcgtggtccacggtgagccgtaaggctgcgcgtgggcccgccgcacccgcgtcctccacgagccgcgcgcgtgcgccgtgccccggccaaaccggtgagccgagccgccaacaagcgggtcccacccggatccacgcgagatggacccggcccaccggcttcttctctcctccccgcccgcgcgcgcgctttgggccgccttctcgggccggccggcccgttaagttcggccgagccgcccctttctctcgggccgcgccctagccgcccgaggaaagtctaatttccctccctctttcttttcttttcctttcttttttactccatcccgctcgccggcgtgcaccagcgatcgggagagcaggtctccggaacctctgcctttgacgtcctgcaccgggagaaggcggcaataaggtttttgggaagcgcttcgcgcgactgctccctgttcgttcgcgacggctcgccttcctcttcgctcgcgtgtttcgtgccttcgtagacacctgcgaaaagtttcgaccaagcagccggtcttttcgtcacctcggtacgtgttcaatatattgcgcatatttgatctgttcatgttatactgtgtagtttacatgtgtagatctaatga

SEQ ID NO: 29956 - DNA, 453 bp, Oryza sativa
  Clone ID: PAT_MRT4530_34407C.1
atggcgaaagggggcgcgtttgtgatttttgaggttcttccgaccgccggcgtgattagcatcgcgctgccgatgcgggggaaggtgcagcctcctcaggagtgtcacgccaccctaggcagggggcaaggccccccacatccccaccggccctgcctcaccgagaagtacgacggcgacgtcgacccctccgagtccctccagatctgcacggcgatcatagaggcggtggggggtggcgaccaggtcatggcgagcgtcttccccatggccctcaggggccaagcggggggttggcccatgaacctgctgtcgcctcggttcactcctgggaggactcttgcagttgagctctgggtgccgtcaaagcccgggaccccttgtgctggctcttccgtagtggctagctttgatcccgccggctggctacggtgcccggcccggctcaactga

SEQ ID NO: 29957 - DNA, 669 bp, Oryza sativa
  Clone ID: PAT_MRT4530_34408C.1
atgggcaatgactgggcttgtagtatagcttttccctttctgatgtacctaggtgaggttgggtgcgatggagattggatggaccgggtggcggtatatgcggcttccggattcaccttggcacaagagggggctccctaccttggttttaaggttatggttgaaacctgcagtgtggtgcttttggttagagggagttatgcgaaggatcctgtcagagttcctttctgtttttctgctttcaactactgctttataactattttatgcaaaagaacccctagcctccttggaaatccttgcgtcatacctcctcttgagaaactagccgtaccagcgccaccgaccttcaagactatggcaagcaagactctctgcgaattcgctactccctctgctgacaatgtggccattgggccgcaaatcaacatgggagatgtggatttcgacttgaagtccagcctcatcacgatggcgcaggctagcctgttctgtggcaagcctaacgaggatgccaatgctcatctgcaacagttcttggagatctgtagcacgtacaccatcaagggcgtcagtccagacgccatcaggctaaggcggtttccattctcccttctcgggagagcgaagcagtggttctatgccaatcgtgctgctgtcaatacctag

SEQ ID NO: 29958 - DNA, 2745 bp, Oryza sativa
  Clone ID: PAT_MRT4530_34409C.1
atggaggtcatggcatccctcgtcaacatcttggcgctgatctccgaggcatgccgcagcgcggagaagctgccggcggcgctgatcactggcggcgtcgtggaggccgcggcggcgatcttcgtcggtgtgttcaaggcgcccggaggcatatttcaacaccacggcaaggcgccattctacctctattacggcatcacaggaggcgtggccatcttcggcttcgcggaggcgtgggccgggttctgggtctccggcgacctcaacggccggcgcgccgtcggaaagacgatactgtgggtgtcgattttgcctctcgtcttggtggctgcgctcggaggggcccaccacccggcgccgcgaggcctgtcgaaccgggggcgttcgacagggccctccaccgaccctgtcgaacaatgggcgttcgacaggccggccggagaggaggccgaggaggcgccggccgggaggaaagggttggcgacgccctccagcagtgaagttaaggtgaaagttggacagatgtttcatgacaaaggtcacttacaagatgcggtgaagaggtgggcatttgtccagaagcgtgagttcagggtgaaggtttcaaataggacgacatatgagatatcgtacgacaaggcttggagggcaaaacagaaagcattggagatgaggtttggaacttatgaggattcttatcacaatcttcccccactattggaggtgatgcaggcaagaaacccgggcacacacatggctattctcgatgaggtgaatgaatatggggagaatgtttttcgtcgggctttctggtcatttgggtgcatgatagaggcctttagaaattgcattcctttgctctgtgttgatggcactttcatgacaggcaagtacagaggaacaattctaaccgcgatcggagtcaacgcggatagccatgtcgttcctgttgcttttgcatttgttgaaagcgagaacacatcaagctggctatggtttttgcggcacattaaaatgatcaagaaccttatggatgaagctgaagtgaaagatcgttctcgtcgtaagaaagcttgcattctttgcggggagaaccattcccgaactttctgcaatgtgctaaagatgcgaggaccggatcaatattggcgtattgatcctctttgggttccaaggctgagagcagctgggttgttgacgtttgcacggttggtcgagccttcacgtgcaaggtccgaacgaatccacattgacgcggcgcttctgagtgctcttgtggatagatggaggcctgagacccacactttccacctcacagttggagagatggtgcccactctgcaggatgtgtcttatttgttggggctgccgatagctgggccagcagttggcccaacaatggtgaatgctggatgggcggatgaccttctggccagttttggtggtgtgctgcctgttgcactggaggatctcacagatgggcacgggcctacgaaaagttggttaaatcagtttcgacaggatgtcttccctgatgaccaggaggagtggatcgtgcagcggcacttagtcgcttacctgttgtggttgtttggatgggtgatgttcacgggaactcacgctgactccgtggacaagtacttcatccactttgcggagcagattgcagagttacctatcgcggagattccacagtacagttgggggtcggcggtacttgcggcgacatatgccggactgtgtgatgcttgcgtgaggaacagcaagcaaagttcactccctggatgcccgttgctacttatgttgtgggcgcacgagcgcttcgacattgggaggcctcagcttgactcgtacgcaaactacggtttgcgagagatgtacaggtctggtgttgatgacatcgacgatcgtcccactatgggatccttgtggacacaccgtgagccgcagtgggttagcgggatgacacgtcgtgtctacactcagtttgtagctgactttgatcagcttacgcctgaccgtgttcggtggactccctacactcagcacgatgtcaatgatcgtgcaccgcacggtctcgcggatctttgcacgcgagatatgcaactctggatgacaacttgtcacctcgtggtggacgtgcacgtcgagccacacaatgtccacagggttctcaaacagttgggcatgtatcaggacttccctccgagagatggtcgtcctttggctgatagtcttcataggtactccagaaaggggctcgggctttcctacgagctagttgttgtgaccacggttcagccgacggcggaatttgttgagcacgttcacgtggagtccgacaccatgctgcaaagactagaggcgagacctccagtcgtcaggcctgacgacgtggcgagcatccttcgcaacttccgtgcacacgtcgggccgacggccatcaccaccactaccccgacgttccagcgtggatcggagtggtccatcctcttcacgtcgcggggagcatctgggtcggcacacttcccttacatgccaacgggggacaacgtgttgaacacaccagcatggggacttcatatcactccgcgtgcgccagagcagggccacacacagcacacatacgatgagtacggttcggcgtcgacgcatcacggaatgcctgcttactcccctcgcacagcatttattgaggacttcttgtcacaccccaatccggcaccgccacacaacggcacctga

SEQ ID NO: 29959 - DNA, 393 bp, Oryza sativa
  unsure (1)..(393): unsure at all n locations
  Clone ID: PAT_MRT4530_3440C.1
tcgaccacgcgtccgctcttttaggcaccgcaggtggagaggggggcgggggacgcnnncccnnccnccnnngggaggggccnggccccgcnnccgncngccggcgnncgcccgncccggcgcncggncnggggcggcgccggcgcgccggggctcccgctgcncctccccctttctcgtcntccccccctgtggttctggatgcggctcatcttgttcttctttccccnctgnttcccccctgccgcggtcccttggctgcggtttcgctgcnctgtcccctgggtcggtgggactctcgttgatccgttcgtgcgcgtctctcgttcgctgacgnggcttttggcttcctgtgcctggtggtcgttgctcccgccgtttacccgcgcttgg

SEQ ID NO: 29960 - DNA, 1145 bp, Oryza sativa
  Clone ID: PAT_MRT4530_34410C.1
ttgtcttatgtttggatgaaattccaaggaaacggtccttaagtgcaagagcgggaaaccgtacacccggtacgttccccggtccgcggttttggaaattcatttagttcgcaagcaccgacccaggtgtcgggttttccaagtcttttgtaaaacccaagttttacccaagttgttattcagattttaagtttggaggcgtccgtcgatacttgcacaggatgcacgatggaacgcgcgcatgggaggggctgaccggggtcggcccgacccgattttggccgagctggcgccgacgtggcgcctacgtggctgccacgcgggctggcgggaggaagacgaaggcgccggccgcgaatggacggcgggcggcggcggtttctccggggcgtcttgcgacgatgaggggtgacggggcgtacaccgggatgacgagggagaatgagagggagcgagccaacggcttggattcgccggagggagtccgtcggcggcggattgcggcggcggtaaccggcggagagcaaaaggggaaaacggcgacgaggtcacgaggggccaattcccggtggtgagagcatctacgcggctacgggaatccgttgctagcgtcggattgagcggagctacgccgagcgaggccggcgacgagcgggtgctacggagcacgggcggcgacggcggcgagcacacggcgagcggcggcaatggtcggggcggcgccggcttgctacggggaggctactcgtgctactaccgaaaactaagggggagagatggagcgaggagggagaacgaagggaggcactaccgagatgaggaggggcggcggcaacaatggagtggaggcgatgggacaacgagagaagaagagagggagggcgcccggggctttaaagggcggcaatgtcggtttggaaaccgaggcggggcggtgtggagcggagcggcgacacgggcgacaggcgcgggcaggcgctgacgacggcggcgaccaagcggtcggccaccacggcacgcgcgcgcggcttgcaacgggagacgcggcggtttgagtggcgcggctcgggcacgcgcgctggctgcggggccgagcggctgcaggcgcggcagggcagcggggcacgatctaattcagcatgaac

SEQ ID NO: 29961 - DNA, 4338 bp, Oryza sativa
  Clone ID: PAT_MRT4530_34411C.1
atgggcgttcgacaggccggtttaaagccccgtccacctaggccgcgagttcgatttgttttgaggaccacatcgccagccgccgccgagagtcgccacatcgtcgccgtacaaaggatgtcaggtgatatgcccattcgtctgtattatggcgatgctcctatacaaatatgtgatagcggggtggatttgactgtatatgccttccatgatactagtctgaatgcaccggagcatatgggtttgaatgacgtgttagggtggttgtataatatgtttggggtagatccagtgcacgataaatttgtcataaatgccgtgtggccagtgaggggtcaacatggatggcagtggagagtagtggaggttgcgtcaactgggagttggaggaagtttgttagtaaaaagacaacatgtgttgatcgatcgggggagtcaagtcatgccgtggtggaagaaactccgttggaaggtggacaagttgaaaatgtttggcggactgagcaaggtcgaggggaagaagtagtagagggtaatacacaaggagaggtcattgttcgtggtactaatcgtgaggccaacgactcggacgatgaagaaccggattcgcctatgcgtgttgatgcagcggaggagaatgaggcggtagtggatcagatggaagtggaaaacgaggaataccttgcgcttgtagtggaaggagaagatacaacactgtgggacaacgaaactaacatacccgatgattggacgaccatatcaatgagtcgtatgaaggtaaacgatggtttagatgcccactggtgttatgatagtaagcaggtgaaagttggacaaatgtttcatgacaaaggtcacttacaagatgcggtgaagaggtgggcatttgtccagaagcgtgagttcagggtgaaggtttcaaataggacgacgtatgacgtgaagtgcatacagggtggatgtccttggagagtgcatggttacaagccacaacatgacactttatgggtagctttgatggttgagcaacatacgtgtttgttggagaatacccgtctggtgcacagaaacctgacagcggcatttgtggcacaaatggtatattcaaaggtggttagaaaaacatctttgtcccctttcaccataatgcatgacgttgagaaagagtacggatatgagatatcgtacgacaaggcttggagggcaaaacagaaagcattggagatgaggtttggaacttatgaggattcttatcacaatcttcccccactattggaggtgatgcaggcaagaaacccgggcacacacatggctattctcgatgaggtgaatgaatatggggagaatgttcttcgtcgggctttctggtcatttgggtgcatgatagaggcctttagaaattgcattcctttgctctgtgttgatggcactttcatgacaggcaagtacagaggaacaattctaaccgcgatcggagtcgacgcggatagccatgtcgttcctgttgcttttgcatttgttgaaagcgagaacacatcaagctggctatggtttttgcggcacattaaaatgaagcgtggaagggccatgaagtgcttcacggagtgggtagaatttgagccaagggagaaatggtcgttgttgtacgatacagacggatcgaggtatggtgtgatgacaacaaatcttgctgaagtgtataactgggttatgaagaatacacaacctctaccacttgttgctatcctggagggcatcacgaggggtacacagaagtatctctgtaaaaggtattccatggatagtctgaacctcagcaaacccagtgttaagtatagccccgctattacacagtacatggatgagaaaagtaagaagggaggaatccacagagtgtggcatgctgggaacagagagttgttatttgagatacgacttcgtgacaagagtggtgtcggcattgggactactaacatcacattggaatgcacgttgtggccagagtatcacacttgcaaatgcaattgcaacaagccttacctgttacatcggccatgttcccatgttcttgctgcttccgcaaaagggggtgttgatggaaacatttttgtttctccctactttagaaaggaatcgtgggaggcaacttggcgtggtgaattgcgtggttggcgtgccgtgtgcgatttcactcgtcctcctccagggcaagccaattgggttcctgactcaaatttattagttgatactaagggtcgtcgccagtcgcgcaggatcaagaaccttatggatgaagctgaagtgaaagatcgttctcgtcgtatggctgatcaatatgatgggcagctgatagacaaggagatcgataggaaccatcgatcgcgacgtcttagtacaggaactttctgcaatgtgctaaagatgcgaggaccggatcaatattggcgtattgatcctcgttgggttccaaggctgagagcagctgggttgttgacgtttgcacggttggtcgagccttcacgtgcaagatccgaacgaatccacattgacgcggcgcttctgagtgctcttgtggatagatggaggcctgagacccacactttccacctcacagttggagagatggtgcccactctgcaggatgtgtcttatttgttggggctgccgatagctgggccagcagttggcccaacaatggtgaatgctggatgggcggatgaccttctggccagttttggtggtgtgctgcctgttgcactggaggatctcacagatgggcacgggcctacgaaaagttggttgaatcagtttcgacaggatgtcttccctgatgaccaggaggagtggatcgtgcagcggcacttagtcgcttacctgttgtggttgtttggatgggtgatgttcacgggaactcacgctgactccgtggacaagcacttcatccactttgcggagcagattgcaaagttacctatcgcggagattccacagtacagttgggggtcggcggtacttgcggtgacatatgccggactgtgtgatgcttgcgtgaggaacagcaagcaaagttcactccctggatgcccgttgctacttatgttgtgggcgcacgagcgcttcgacattgggaggcctcagcttgactcgtacgcaaactacggtttgcgagagatgtacaggtctggtgttgatgacatcgacgatcgtcccactatgggatccttgtggacacaccgtgagccgcagtgggttagcgggacgacacgtcgtgtctacactcagtttgtagctgactttgatcagcttacgcctgaccgtgttcggtggactccctacactcagcacgatgtcaatgatcatgcaccgcacggtctcgcggatctttgcacgcgagatatgcaactctggatgacgacttgtcacctcgtggtggacgtgcacgtcgagccacacaatgtccacagggttctcaaacagttgggcatgtatcaggacttccctccgagagatggtcgtcctttggctgatagtcttcataggtactccagaaaggggctcgggctttcctacgagctagttattgtgaccacggttcagccgacggtacaagagtgggagcacgcagctgataacttggcacttcagacacctccagacgatgggagttattatggagcttaccttcgttggtaccgcagtgttacacgatggaggtgttttcctccacaaggagatagcaccgtcccccaccaggcagcgattactgacacgtttgcccctcagcctagttcagcttacaactcaatgcgcggcagatgtggtgcagacgtcgggccgacggccatcaccaccactaccccgacgttccagcgtggatcggagtggtccatcctcttcacgtcgcgggtacgaagcggcccacacatctcacggtcgtccttcctttcagcacaccccagcaccggagtacaccagggggtcagccggatcaggggtacccacgtcgagcacggcaccaccacgtccgcagacgatgagtacggttcggcgtcgacgcatcacggaatgcctgcttactcccctcgcacagcattcattgaggacttcttttccacttatcctccccagggggaagtagggatggattactggcacgcagcacctcaggtcacacagccgacgcaggagacggaggccggtcaggggccagacgtgacaccacagcaggcagctagagataggcacccccctgataatttgacatatcccactgagcagattaggcgtaggaagaagggaagacctagcaagcgtgcgaagggcactgatcgtccttga

SEQ ID NO: 29962 - DNA, 609 bp, Oryza sativa
  Clone ID: PAT_MRT4530_34412C.1
atggcgggcaggtcgccggagtcgagggaggcagtcgtggtgcggaggtggtggagggagagggatcagcagcgtgaggagcaagagcaccactgccgcggaggctacggggaggaaccgacaccggcggaattagtagtcgtggtggtggccgaggccgtggccgagggagcgcaacattccggcaccgttgaagatttggtcaccgggatggaggaagaacccaaatctagaccagcaagtgaggcgcacattgctaaggtatctgatatcaagaatgccttaaaggcaacgttccttgccattataggaagtccctggcttccagcatcactgctgtatcctccaggcagggtgaaagcagcagcaaaggtcgccgttgaccggatccccctggacgccgccgttcggcatttgccggtgggcggtggagtacggccggagctcatcggcgtgggtgcctacgcggtggccgccggcagcaggggattcgatgagcgttgcgtggacgtggtgggtcatctgctggtggtggctaggcttattggcaggaatataatgggcctttctctaccttacttaattgggctgaaatggatcacaagttga

SEQ ID NO: 29963 - DNA, 456 bp, Oryza sativa
  Clone ID: PAT_MRT4530_34413C.1
tggatccccgggctgcaggaatcggcacgagggttgcatttatgtggatgtcagcttcaatatatgttttctattaggaaattacccacaaaaaatatatctcttgaggcatttgaatggctgatcttaaaccttgtatcttttttgatttagttatggtatttgatgcccacttctttcatctggggatttagtttagttttcaaattgtattttcagttttgaatctttgatttaacagatgaagtcaatattttaggtttcaggcagtcctaaaacacacttacagtgcaactcacaccacttacagtggaaatataccttagttacagttgtaatttttattatttcgcactgtaactgactattggtagttagattgttaattattgatattggttttatcagagacttgtagtttggggaaccctaggcatctttattttctttagatat

SEQ ID NO: 29964 - DNA, 552 bp, Oryza sativa
  unsure (1)..(552): unsure at all n locations
  Clone ID: PAT_MRT4530_34414C.1
tgcctcctccaacaacaatctccattccgggagaagctcgtggccggcttcccgctgcatcctcctctgcggcggtgagcgcccgaacncattgcgattacttgttgcaatgtcaacataacacccatatatcagaagctttttttcgaaacctttgaacaagtgtgaaacaattggtaccgggctgtcacaccttacatgaggtttggctttgaatctatgccaggtaaagcaaaaaatgtggcaagccaagtaaaccaaaatactcatctaaataactgtatggtgtgcttaacgtttggtgtcaaagtgcaagtaccatgagcactttaagagagtttttggcagctatacctnctcatagaatcaaaagtttctccaatcagtaaaactttttattcaaattgagaagctatagctatagatttctcagaaactagttctcacttttctttgggcgcagctgtcaaggcttctggaaagaagaaagaatctgggaaatcatcggttctgctagatgtaaagccatgggatgacgaaacagacatggca

SEQ ID NO: 29965 - DNA, 1582 bp, Oryza sativa
  Clone ID: PAT_MRT4530_34415C.1
gttgaaagtttgtagaaaaaaggggagggaggcggagaccggtgccggcgaaaggagggaggggagccgggcctggcggcggcggctctcggtggcatcggcgtctgcggaggtggtggcggtggcggtggcgtcggcatctgcgcgcgcagcggggagggaggcggctcagcaccgccgccgccacccgcagcgccgccgacagcgtcctcctgtcccccgccgccatgtctcgcggcacgtccgggacgacgtcggcctcggcgggcggcgccggcggctcttgatcgaccacctgatccggctccgggacgtgcttcgtggcgggcggcggcgcctcgtcggggttcttctcgaacgaggaggcggcgtaggggcggccctccttgttgtagaggtactgcctctccatgagcccccgcagctgccgcagctcctccaggagcatggccaccgtcggcatgctgccgctgacgtcgatgacggcgacgaggtccaggcccgccctgtcggtggacgaggaggagcccctgagctcgagcagcagctcctggtcatggggtgccatggacgcgacgtcgttgtggtacttgttgagacgcacttgcttcaccagttggcccgtgatccccaccgtcggcctcgccggctcggtggcggtgctcgtcggagcagtctgctcgtcgtcgttgtacgccatctcttcgcgatcactagctagcttcttggttgttggcaaaagcagcgccgaaaccctaaaactcatcgtagccggcttgctcctggaagaactccacatcaacaggatccgcttcatcttcttcagcaactgggggggattatttatctagagcaaggtttgttaacctctgcagagggggtacactttacccacacgacattactaacccggatcacccagcccgaggggatcagccacgtcgggagacctccaagctttcatgacaaggcatttcgaaagccgatacaggtttaccatatgccgacgagaggggtcccagaccaacaacagttttacccaagttggtattcagattttaagtttgaaggcgtccgtcgatactcgcacggggtgcacgaatatcgagacgcaactagatggttacaaggggaccaggccgaggtggcgccgacgtggcgcctacgtggcagccacgcgggccggcgggaggtagacgacgacgccggccggaacggacggcggacgacagcggcgagcggcggagcgaaccacggtgatacgggcaacagcgagcacaccgggcggttgcacgtgacaaggggaggcgagccaacggcttggattcgccggaggttgctcgacggcgccggattgcggcggcggcaaccgatggcgggagaagagggaaatggtgatgaggtcatgagaggttgattcctggcggtgagagcatataagtggctttgggaactcgatgctagcgttggattgggtggaactatgctgagtgagactggtgatgagcgggtgctatggagctcgggtggcgatggcggtgagcacacggcaagtgacggcaacggtcggggcggcgccggc

SEQ ID NO: 29966 - DNA, 3078 bp, Oryza sativa
  Clone ID: PAT_MRT4530_34416C.1
atgggcctgggaaggcggcagcaaggcggaaacggcacgggcgtcgatagggaggcgggggtcgtcgacggcgggcgcgatgctgtcgaggtcgctcacctcaccgctaccgggatcttcgacctcgagctcacccgtgccgccactaccaacgcctcccgggcctctccgacagtccgaccccaaggtcgcacgcgccgccactgcctcccttctcaagcgtcgcagccgctgccgcttcccttctctcgtgtcgtcgccgtcgccgctgggctatcgccgaaagcaaatattctcgtcatgagatctccgcgtaaccgcgttactattgtcccacttggccttccagaacccagctttccgtggggatccttctgcttcttcttggttgtgctatgcttgccagattccaatatctccacgtcctcccatggctgcttcgtggaggagaggacggcgctgatggacatcggctcctctctgacgcgctcaaatggcacggcgccgcgttcatggggccgcggcgacgactgctgcttgtgggagcgcgtcaactgcagcaacatcactgggcgagtatcacatctctatttctcaaacctgtatgattctaatgaagtgctagatgcactcggtcactcgttttggcgtttcgacacaacggtcttctcttcattcccggagcttcagttcctggatttgtccatgaacaatgctactttccagagctgggatgttgaaagcttagacctatcccacaacaagctgagtggagcaataccatggcagttaactcgtttgtcatcactgtccgtgttctcagtgatggcccaccaccccgcgccgccaggcctgtcgaaccgggggcgttcgacaggtccctccaccgaccctgtcgaacaatgggcgttcgacaagccggccggagaggaggcgccggccgggaggaaagggttggcgacgccctccagcagtgaagttaaggtgaaagttggacagatgtttcatgacaaaggtcacttacaagatgcggtgaagaggtgggcatttgtccagaagcgtgagttcagggtgaaggtttcaaataggacgacgtatgacgtgaagtgcatacagggaactttctgcaatgtgctaaagatgcgaggaccggatcaatattggcgtattgatcctcgttgggttccaaggctgagagcagctgggttgttgacgtttgcacggttagtcgagccttcacgtgcaaggtccgaacgaatccacattgacgcggcgcttatgagtgctcttgtcgatagatggaggcctgagacccacactttccacctcacagttggagagatggtgcccactctgcaggatgtgtcttatttgttggggctgccgatagctgggccagcagttggcccaacaatggtgaatgctggatgggcggatgaccttctggccagttttggtggtgtgctgcctgttgcactggaggatctcacagatgggcacgggcctacgaaaagttggttgaatcagtttcgacaggatgtcttccctgatgaccaggaggagtggatcgtgcagcggcacttagtcgcttacctgttgtggttgtttggatgggtgatgttcacgggaactcacgctgactccgtggacaagcacttcatccactttgcggagcagattgcagagttacctatcgcggagattccacagtacagttgggggtcggcggtacttgcggcgacatatgccggactgtgtgatgcttgcgtgaggaacagcaagcaaagttcactccctggatgcccgttgctacttatgttgtgggcgcacgagcgcttcgacattgggaggcctcagcttgactcgtacgcaaactacggtttgcgagagatgtacaggtctggtgttgatgacatcgacgatcgtcccactatgggatccttgtggacacaccgtgagtcgcagtgggttagcgggacgacacgtcgtgtctacactcagtttgtagctgactttgatcagcttacgcctgaccgtgttcggtggactccctacactcagcacgatgtcaatgatcgtgcaccgcacggtctcgcggatctttgcacgcgagatatgcaactctggaggacgacttgtcacctcgtggtggacgtgcacgtcgagccacacaatgtccacagggttctcaaacagttgggcatgtatcaggacttccctccgagagatggtcgtcctttggctgatagtcttcataggtactccagaaaggggctcgggctttcctacgagctagttattgtgaccacggttcagccgacggcggaatttgttgagcacgttcacgtggagtccgacaccctgctgcaaagactagaggcgagacctccagtcgtcagatgtggtgcagacgtcgggccgacggccatcaccaccactaccccgacgttccagcgtggatcggagtggtccatcctcttcacgtcgcgggtacgaagcggcccacacatctcacggtcgtccttcctttcagcacaccccagcaccggagtacaccagggggtcagccggatcaggggtacccacgtcgagtacggcaccaccacgtccgcaggtattccaaactccgccttatgttcacccctcgcagggagcatctgggtcggcacacttcccttacatgccaacggggacaacgtgttgaacacaccagcatggggacttcatatcactccgcgtgcgccagagcagggccacacacagcacacatacgatgagtacggttcggcgtcgacgcatcacggagtgcctgcttactcccctcgcacagcattcattgaggacttcttttccactgatcctccccagggggaagtagggatggattactggcacgcagcacctcaggtcacacagccgacgcaggagacggaggccggtcaggggccagacgtgacaccacagcaggcagctagagataggcacccccctgataatttgacatatcccactgagcagattaggcgtaggaagaagggaggacctagcaagcgtgcgaagggcactgatcgtccttga

SEQ ID NO: 29967 - DNA, 2068 bp, Oryza sativa
  Clone ID: PAT_MRT4530_34417C.1
aattaggtgatttttcgggcgtgacaatcaccatctccgatactcagattaccaaatttggttgttaacagtggttttactagcgtcttccaataacgattcctaggcattgttgttttcttctctaggaaattctgcatgaatttcaccaggctgtccgtcttgggtggctccacttcgacctcttgaatattctgtgggttcggcccgtactttattctgaccatggagcattgttccgtcctcggttgaaactcaaacttctcttccttgccgatgatgtggaaacggatacttcctgttcccacgttaatgttggctcccgcggtgctaaggaacgggcatcccaggatgagcggtgtcttttttcccgtgtccatatccagcaccacgaagtcatccgggatgaaaaaatcccgtatcttgactggcacatcttccgctatccctgccgggtaacggactgacgaatgagccagttgaaggtgcattggtgttggtgccaacactgttaagttgagcttgtcgaagatgtcttttggcatgaccctgacactaactccaaggttgcacaatgcctggtcgaactattgtgccccgatcaagcaggtgatcataggacaccccggatctttcttcttgtctgggagcttgtggagtatcaggttgctgcattgttccgtcagcttgaccacctccgttgttgggagcggtctcttgttgttgaatacgtccttgagataactggcgtatgttggcacttgcatggcgtccaacaacggcacgttgatgtggatcttctggattacttcaacaaaacgagtgaattgctcgtccactgacggtttcctactccgttgagggaacagcagcaatcatgtgtcgcagtactcttgcggcactgtcttttttggctgaacttccttgtcagtcgagccattagatggcgcttcttttgatatcccattagttcctacagggttaggatacggcgaatcacgagtggacttacctcccctcgtcatgatcgccttgacattctcaatggaggagtcgggttgccccgaaatcctcccagtttcatttgcagggactaaggatgccaacttgtcattggctgcaagctttttgcttaacgcatcagtggttttagcttgcgcaaaaacaagatccttcaaggagagctggttagaaaagttaccgttgttgttacctccttgataatatgggcatggttggttccacccctcacctccttgtggacgatacctgttgttgttgttgccaatgtacatcgcctcctcacgggtttccgggcagtcattcccagaatgacccgtgttgccgtagacctcacatgtgatgtgagagtccaaggccttgacggtgccttgtggtcgtttcttgtggtcgtccaatcgcttcatgagaaggtccagcttggcagcaagtaactccgtctccttattggtgtgcatgcctcgctgacgggtctggagtcgttcctcactccaacccatattggagaccatcttctctattaaatcagcggctccttgaaccgttttagagaagaaagcccctccagctgccgcgtccaggtgatcgtgggacatcgagtgagtccattataaaagttctgcaggatcagccagttgtccatcccatgatgaggacaggcgggcacgtactcctgcagacgctcccatgcttctatcgggaagaatttcgagaggaatgccgtagagcatttatcctaggtgttgacagcagcacgattggcatagaaccactgcttcgctctcccaagaagggagaacggaaacaatcgcagcctaacggctttgggactgacgcccttgatggtgtacgtgctacatatctccaggaactgttgcagatgagtattggcatcctcgttaggcttgccacagaacgggctagcatgcgccatcgtgatgagcctagacttcaagtcgaaatccacgtcccctatgttgacctacggcccaatggccacattgtcagcagagggagcagcgaactcacggagagtcttgttagccat

SEQ ID NO: 29968 - DNA, 1740 bp, Oryza sativa
  Clone ID: PAT_MRT4530_34418C.1
atgggtttgaacgacgtgttagggtggttgtataatatgtttggggtagatctagtgcccgataaatttgtcataaatgtcgtgtggccaataaggggtcaacatggatggcagtggagagtagtggaggttgcgtcaactgggagttggaggaagtttgttagtaaagtaagggagaaagggtatagcctgtcaatagtggtgcaaaagacaaaacgtgttgatcgatcgggggagtcaagtcatgccgtggttgaagaaattccgttggaaggtgcacaagcggaaaatgtttggcggactgagcaaggtcgaggggaagaagtagtagagggtaatacacaagcagaggtcattgtctgtgccaataatcgtgaggccaacgactcggacgatgaagaaccagagtcgcctatgcgtgttgatgcggcggaggagaatgaggcagtagtggatcagatggaagtggaaaacgaggaatacattgcgcttgtagtggaaggagaagatacaacactgtgggacaaggaaaccaacatacccgatgattggacgaccatattgatgagtcgtatgaaggttaaggatggtttagatgcccattggcgttttgatagtaagcaggtgcaagttggacaaatgtttcatgacaaaggtcacttacaagatgcggtgaagaggtgggcatttgaccagaagcgtgagttcagggtgaagatttcaaataggacgacatacgacgtgaagtgcacacaggctggatgtccttggagagtgcatggttacaagccacaacatgacactttatgggttgctgcgagggttgagcaacatacgtgtttgttggagaatacccgtctggtgcacaggaacatgacagcggcatttgtggcacaaatggtatattcgaaggtggttagaaaaacatttttgtcccctttcacaataatgcatgacgtagagaaagagtacggatatgtgatatcgtacgacaaggcttggagggcaaaacagaaagcactggagatgaggaagcgccgaagggccacgaagtgcttcacggagtgggtagaatttgagccaatggagaaatggtcgttgttgcacgatacagatggattgaggtatggtgtgattacaacaaatcttgctgaagtgtataactgggttatgaaaaatacacggcctctaccacttgttgctatcctggagggaatcacaaggggtacacagaagtatctctgtaaaaggtattccatggccagtcttaaccttagcaaacccagtgttaagtatagcctagctattacacagtacatggatgagaaaagccagaagggaggaatgcacagagtgcggcctgctgggaatagagagttgctatttgagatacgacttagtgacaagagtggtgtcggcattgggactaccgacattacattggaatgcatgtggtggccaaagtatcgtgcttgcaaatgcaattgcaacaagccttatctgttacaccggccatgttctcatgttcttgctgcttccgcaaaaggaggtgttgatgcaaacctttttgtttctccgtactttacaaaggaagcgtgggaggcaacttggcgtggtgaattgcgtggttggcgtgccgtgtgcgattgtcgcgaccgggaaaattgccttttcccgaacgctagtgtattaatccccgtcccaggaaaagccggggtacaccacacaaacatgatataa

SEQ ID NO: 29969 - DNA, 1802 bp, Oryza sativa
  unsure (1)..(1802): unsure at all n locations
  Clone ID: PAT_MRT4530_34419C.1
atgggccggccggcccaagaaggcggcccaaagcgcgcgcgcgggcggggaggggagagagagccggtgggccgggtccatcccgcgtggtcccgggtgggacccgcttgtcggtgacacggttcaccgtgcggaacgcgcacgcggcgcgcgctagggtttgggggagggacgcggtgcacgcgcgcggttcgcggaagatgcggtgcggcgggcccacgcgcagcctcacggctcaccgcggaccatgcgcacggggggggaacggagggagcggctggccgggtcagccgatccggtcgcggccgaggtggcgccgacatggcgcctaagtggcagccacgcgggccggcgggaggtagacgacgacgccggccggaacggacggcggacgacagcggcgggcggcggagcgaaccacggcgatacaggcgaaagcgagcacaccgggtggttgcacgagacgaggggagacgagccaacggcttggattcgccggagggagtgcgtcggcggcggattgcggcggcggcaaccggcggggagggaagagggaaacggcgacgaggtcacgaggggccgattcccggcggcgagagcatctacgcggctacgggaatccgtcccttgcgccggattaggaggaacgcatcgagggaggccggcgacgagaggcgcttccgagctcgggcggcgacggcggcgagcacacggcgagcgacggcagcagtcgggagggcgcgcccggagtccccttccgcgtcctcgctcgtgccggctcctccgacacgcgcgacgacaaacggcgacggcgaacagagcacgggaggcggcgacaatggagtggaggcgatgggacaacgagaggagaagagagggagggcgcctgggctttataggatggcaatgacggtttgggagaggggaaccgactttggacggtcaagccagcgagctggcgctccggctagcggccaaatcggcgacagggcggagggaggatgacgccggcgggaggaaaaaagggaaaaggagggagagaaagggggcttgccccttgcctctttgggaaaaggaggagggagcgggggcgacgcggcagagggaggaggggctctgcctccgtcccttggaagctagcgcgcggagtggcggggtcgggttgatgacgacggcgatgacggcggggcggtttggagcggagcggcgacacggacggcaggcgcggacaggcgcggcagaggctgacggcagcggcgaccaggcggtcggccaccacggcacgcgcgcgcgggaagcaacgggcggcgcggcgatttgagcggcgcggctcgggcacgcgtgctgactcgcggcgcagacggcgcaggcgcggcacgggcggcgaccgcacgggcgcgtgcatgcgaacaacggcgcgcgggaagcagcagcgagggagcggagagggagggctcggctcggcgcggctcatgcgcctctcgagcaggtcgaggtcggcgaccggtggacaggggcagcacgacaaaaaggcgacgacgaaggagtgcntattccttttgtaaaaaaaaaccgccgccgtctgcttccatggcgccgtggagcagcgcgagaaacggcatctgaccagcgccggcgctggcggccgcctggtccgccgccgccgccgccgcccactgttccattagcacccgcaccgccgcgccatcgccatgaaccggcagagttgagcacgttgaggtagaatgagggagaggagacgattggatggagaagaaatggctgtctcttgtaaggtttgg

SEQ ID NO: 29970 - DNA, 1391 bp, Oryza sativa
  unsure (1)..(1391): unsure at all n locations
  Clone ID: PAT_MRT4530_3441C.1
tttgttccctccacttcggcctcttcttcctcctccatccccatcctccatcggatgcactagtagctggccttgtaccctacctagcttagctacccacccatgtcctcctcctcgtctcctctcgctgtctgcctttgacttggaggcctagctcgtcgatcgccggccatgcgggtgcagtgcgacgtctgcgccgccgagccggccgcggtgctctgctgcgccgacgaggccgcgctctgctccgcctgcgaccgccgcgtccaccgcgccaaccgcctcgccagcaagcaccgccgcctcccgctcgtccacccgtcctcctcctcctccggcgacggtggcgccgccgccgcgccgctgtgcgacgtgtgcagggagaagaggggcctcgtgttctgcgtcgaggaccgcgccatcctgtgcgccgactgcgacgagcccatccactccgccaacgacctcaccgccaagcacacccgcttcctcctcgtcggcgccaagctctcccctgccgcgctcgccgaacagccgctcccgtcctccgactgcagctccgacgacgacgccgccgccgccgccaccgaggaggagtaccactcctccgccgcatccaccggcgccgcagtgagcgcgcctcttgacgcctccagcaacggcgccggtggcggaggaggagtaggagggagcagcatctccgactacctcaccaccatctgccccggctggcgcgtcgaggacctcctccccgacgacgacgccttcgccgccgccgccgcgcaggcggggaaagagaaggacgagcgcgtgccgttcctcgacgccgacctgttcgacgtggtcgccggccggccggagaagaagggcggcgcgtgggcgccgcacgtgccgcacctgccggcgtggtgcctcgacgaggtgccggtcgtcgtcgccgcgtcggcggcgccagcggcgacacctgtaaaggcgaagcagggacacgtgcgggacagccactggagcgacagcgacgcgttcgccgtgccggagttctcgccgccgccgccgccggccaagagggcgcggcccagctcgcagttctggtgcttctgaacgccgccgccgccgtacaatctggccgccggcgagctcgacgaacacctcgatggatcgatcgaacacctgtgtaatcactcagctggtcactactacaagtagcaatcagcaagcttgatgtgccactgttactagctgctgctgtttaattagtgagtactaagctactactagttaattttggtgaaaactatgctactttgttactatataatgaagtatgtgtatcaaactaaactgagatgttggtaattaattatcgtattttgtaaaantnaaaaaanttnaaa

SEQ ID NO: 29971 - DNA, 187 bp, Oryza sativa
  unsure (1)..(187): unsure at all n locations
  Clone ID: PAT_MRT4530_34420C.1
ttgtcttcccctctgcgtcgaaggaaatctcccgtctcgtcgtcgctccttgcgccgatctccatcccgcgagtcgcgagcagagagcaggggaggggaggggaggggcncagangcacntnctgctccatcctgactatgctcttcctaatagaggtcccatagtcggacggaggatgctcacgga

SEQ ID NO: 29972 - DNA, 118 bp, Oryza sativa
  Clone ID: PAT_MRT4530_34421C.1
ggcatactatcttagattctgaatagcaattgcgggggagggtttaaacacaggagttcaaaccttaaaattgtctcgtgctcccattaccagtcgttgccacattgttttatattta

SEQ ID NO: 29973 - DNA, 1452 bp, Oryza sativa
  Clone ID: PAT_MRT4530_34422C.1
atgtctctcggcatcaaggctcccctgtgggacccgcttgtcagcggctcggctcaccgtgcggagggagcacgcggcgcacgcgcgcgggcgggggagggacgcggtgcacacgcgcggtctgcggaggaacggatgcagcgggcccacgcgcagcctcacggcttgcggtggaacgcgcgctcgggaggggctgaccggggtcggcccgtcctgacctcggctgagctggcgccgacgtggcgcctacgtggctgccacgcgggccggcgggaggtagacgacgacgccggccggaacggacggcggacaacagcggcgagcggcggagcgaaccacggcgataccggcgaaagcgagcacaccgggtggttgcacgagataaggggagacgagccaacggctcggattcgccggaggaagcttgacggcggcgaatcgcggcggcggcaaccggcggggagggaagaggaaaacggcgacgaggtcacgaggggccgattcccggcggcgagagcatctacgcggctacgggaatccgatgctagcgtcggattgggcggagctacgccgagcgaggctggcgacgagcgggtgctacggagctcgagcggcgacgacgacgagcacacggcgagcgacggcaacggcgcgagctggcactcggcgctcgcggccaagacggtgacagagggagggaggatgacgccggcgggaggaaaaggggaaaaaggagggggagaaaggggcttgcccccttgccgatttaggaaaaaggaggaggggagcgggggcgtcgcggcagagggaggagggctcggcctccgtcccttggcggcttgcgcgcgggctggcgcggcagagagtgacggcggcggcgaccagatggtcggccactcggcacgcgcgcgcgggaaacaacgggagggcgcggcggatggagtggcgcggctcgggcacgcgcgctggctgcggggccgagcggctgcaggcgcggcagggcagcggggccgggcggcgcagatgcgacgcgagcaaggaccacgcgggcgcgcgcgcgaacgacgcgcggggagcggcatcgagggagcggaaatgagggctcggctcggcgcgggcggctcacgcgctcacgcgcgggcagagcgaagggagcggaggaggggcgctcggctcggcgcgggcggctcacgcgcacgcgcgggcagagcgaggttaaagggagggggcgctcggcgcggcggctcacgcgcacgcgcgcgcggcgcgcgggcggggcggagcggagcggagggagagggggaaagggagcgcgccgggggaggggagggggcgagagagagagagagagggggagaaggagcgcgccgggggaggggagggagagatgggccgagcgagattcggcccatcgaccccggaggaggcaaaatagacttttgcggaggaatt

SEQ ID NO: 29974 - DNA, 216 bp, Oryza sativa
  Clone ID: PAT_MRT4530_34423C.1
atggcgagcgaaggttcaacgtcggagaaacaggctgcgacgggcagcaaggtgcctgcggcggatcgggggaaggaaaaggaggaaatcgaagttatgctggaggggcttgacctaagggcagatgaggaggaggatgtggaattggaggaagatctagaggagcttgaagcagatgcaagatggctagccctagccacagttcatacgaagtga

SEQ ID NO: 29975 - DNA, 1057 bp, Oryza sativa
  Clone ID: PAT_MRT4530_34424C.1
cccgcatttctattaaatgttgcataatttctgggcgtgacaataccggcgaaagcgagcacaccaggtggttgcacgagacgaggggagacgagccaacggctcggattcgccggaggaagcttgacggcggcgaatcgcggcggcagcaaccggcggtgggaaaaggggaaaacggcgacgaggtcacgaggggccgattcccggcggtgagagcatctacgcggccacgggaatccgatgctagcgtcggattgggcggagctacgccgagcgaggctggcgacgagtgggtgctacgaagctcgagcggcgacgacggcgagcacacggcgagcgatggcaacgaggaaggagagggcgcgcccggagtccccttccgcgtccttgctcgtgccggctcctccggcacgcgcaacgatgaacggcgacggcgaacagagcacgggggcggcggcaatggcgcggaggcgaatgggagaggaagggaaagggggaggctggggtttaaatgggcggcaatgtcggtttgggaaccgacttgcgcggtcaagggcgcgagctggcgctcggcggtcgcggccaaagcggcgacagggaggatgacgccggcgaggaggaaaaggggaaaaggagggggagaaagggggcttgcccctttgccgatttgggaaaaaggaggaggggagcgggggcgacgtggcagagagaggaggggcgttgcctccgtcccttggcggcttgcgcgcggagtggcgggggccgggcggcggtcggccaccacggcacgcgcgtgcggcttgcaacgggaggcgcggcggatggagcggcgcggctcggcacgcgcgctggctgcggggccgagcggctgcaggcgcggcagggcagcggggccgggcggcgcagacgcgacgcgggcgaggaccacgcgggcgtgcgcgcgatcaacgcgcggggagcggcagcgagggagcggaaaggagggcttggctcggcgcgggcggcgcggctcacgcgctcgcgcgcgcggcacgcgggcgaggcggagcggagctga

SEQ ID NO: 29976 - DNA, 597 bp, Oryza sativa
  Clone ID: PAT_MRT4530_34425C.1
aggatcccccgatgaaccggtgcacgagatcactcctggtggaagtggcgagcttgtcacgaaggtggaaaggtgtcaaagatggcgggtcatgtagcgtgctgtttgacgcggcagagggcaacgtggtggtggcaagctgcactgcggtggacagatctgatagaaacaatgagctcatcgcggcggcggcatcaacaactaggaggaggaggaggagtgagcagcgttggggatggcttcgtccctacagcggtacagggtatgtacgatgaatcgaagttactagcagaagccgagaataacacctatcttagcagtggatctacaagttttagggccagtttaagtgtcttgcgtcaactaataagaaaccggaaaccggagagagtatggagtgacacgataaaccaagagagtggtcgtctagagtcgcggggcgggggatccaccgttggtgaatgtaaggaggaggccgatgaggaggcggtggacgacgcgtacgccgagatcatcgagagtcacgcgcgcacgcggttggtgagcgtggaggatgatggcgggagaagaagaagatacgacgcatgcagactgtag

SEQ ID NO: 29977 - DNA, 1713 bp, Oryza sativa
  Clone ID: PAT_MRT4530_34427C.1
aaatcttaaactttaattttaattttttaagaccttttattgtagtttctttttcaagattaacgtctaaatcattaataacacatatttaaaatttctaactataaattactaccggaggaccgttcgtcggcagcagccagagtctctgacgttgcatcgattgtctttgtctaagccaattcactccagttctagtgttgaactgttgataattgggttgcacctctcgttttgctgtcggccatggacgcgcacgcaccgccccggagccctgcgtccgacggcggccatggcgacggcgacggcgacacgaagaagccgcacgtcctcgtcgtgccgtacccggcgcagggccacatgctcccgctcctcgacctcgtcgcgctgctggccgcgcgcggcctcgcgctcgccgtcgccgtgacgcccgggaacgtcccgctcctcgcgccgctgctggcgtcgtgcccgccgtcgtcggtcgccacggtcaccctgcctttcccggcggcgtcggcgtcggggctcctcccggccgggtgcggcgagaacaccaaggacctgccgggacacctcttccgcccgtttatggcctctctcgcggcgctccgcgcgccgctgctcgcctggtgcaaggcgcagcgccgccgccgccgccgcgtcacggccgtcgtctccgacatgttcacggggtggacgcagccgctcgccgcggacctcggcgtgccgcacgtgacgttctcggcctccggcgcgcactacctcgccgtgtcgcactccctctggcgccgcctgccgagaaggcgctgccccgacgaggccgtcagcttccaggacgtgcccggctcgcccacgttccgttggagccacctgtcgtggctgtaccggacgtacgtcgccggcgacgaggtctccgaggcgatccggcagttcttcctgtggaatctggagagctcatgcttcgtcgccaactctttcacggcgatcgaggccgcgtacgtggatcgcccgctcccggacctgatggagaagaaggtgtttgcggtgggccccctgtcggacgccgtgggccggtgcaccgaccgcggcgggaagccggcggtggcgccggcgagggtggcggcgtggctggacgcgttcgacgacggctccgtcctgtacgtctgcttcgggacgcagcaggcgctgtcgccggcgcaggcggcgagcctggccggcgcgctggggcggagcgcggcgccgttcgtctgggcggcgaggggcggcacgccggtgccgggcgggttcgaggcggcgacggcggcgcgcggtatggtcatccgcgggtgggcgccgcaggtggagatcctgcgccaccgcgccgtggggtggttcctgacgcactgcggctggaactcggtgctcgaggcggtcgccgccggcgtggcgatgctcgcgtggccgatgagcgccgaccagttcaccaacgcgtggctgctcgcggaggccggcgtggccgtggccgtggcggagggcgccgacgccgtgcccgacgccggacagatggccgacgccatagcctcggcgatcgggaacggcggggcgtcggtgagacagcgcgcggcggagctcggcaggagcacggcggcggcggtggcggagggtgggagttcttccgtagacttggaagagttggtgagcatcctaagctcgccaaagctgactaattaa

SEQ ID NO: 29978 - DNA, 339 bp, Oryza sativa
  Clone ID: PAT_MRT4530_34428C.1
atgaacccttgccgtgcatacctgcagaggtcacagttacctcagcgagaggtcgagaaggacttcccgtggtcgtcgtcgccgctcaccgccaccgttgtggtcgtgtcactgctcgccaaatccgccgctgccagatccagcgagctcgtggccggattcggtgagctcatggccggatccatcgccgccggtggcccctcaccgtcacgagaagggggtgggaggggagaggccagccgatgtggccagatccggcgccgggatcctccgccgccaccgctcgcagagaagggagggggagaggccggaggtggaagaggagcactgcagcggtaa

SEQ ID NO: 29979 - DNA, 2076 bp, Oryza sativa
  Clone ID: PAT_MRT4530_34429C.1
aagcgattcgtgatgtatttcccaggtttcaatatacagcatgtaggtatcgtgtacgtccgaatcttaaggcgcatccagcggtaatgagcctaggtgcagcagcaggtctcccaaacaagcccagaaacatcaacaagccttcctggttttgtacttcatggcgcagctcataaacgctgcaagattgaggcagccaagtccggccatcatccagaagaagcgatcaaggtggccctcgttgaggtcgtcggggatccaccccggccgcccgccggtcgccgtcgcccacgacacggccgtcacgatgatggagctcaggtagtcccccgccgcgatggcgccgagcgcgagcgccgcgcacaccgtcttcatggcgggcggcgcctggctgtagaagaagtccagctgcccgatggaggtgagcagctcgccgacgcccaccagcacgaactgcggcacctgccacatgatgctcgtcttctccatcgccgtctgccacgcgcggacgcgcttcgtctcgaccagcgccgcggcggccatggcgagcacgaccatggcgaggccgccgccgatcctcaccagctcggagatgcccttctccctgccagtgagcctcctgaccgccggcacgaacgcgcggtcgtatagcgggatcagcgtgatggtggttagcatttggaaggtgagcagcgaggccggcgggacgcggagggagccgacgcgggcgtccatcgccatgccctgctcgacgaacgtcgagttgacctgcgccgtcccggtgtagaagaaggtaatgcacgcccacaggggcagcatcctgacgaagatcttgagctcctccacctgcgtcaccacgcaaagcctccatggattgcgcggcgcggcgcccgccgcctcctcatccgaagccgtcacgacggcggccttgtcgaagaatctgagatcagtggtgtgttcgatcctctcaactactttcatggaggaggcgtcgtccggtagctcgtagagaagggacatgtcgtccggcggcgcgacgttgaacttgcagacggcggcgacgacgacctggcacactctggtgagcgggctaccgcgggttgtctgaaacctgtacgcccgcgacgcggcgaccaggcaggagagcccaacggcgaggaccatcgccggaatggccaagcccagtgcccacccgtagtggtcttgcacccacaccatgccagaggtggatatcacggagccgcagttcatggtgaagatgtaccagttgaagtaggagcccttgctgataagctccgacgggtcgccggcgtcgaactggtcggcgccgaaggatatcaggcatggccggagcccgcccaccccgaaagcgatcatgtacaggccaagaaacaagatgatctccatggacagtgttgatgagctctcgatcagctgcggcagaagcgccgacagagacgccatgagcatcccagcgacggcgacgcagcagccgacgaccatggtacgataccttccccagtaggaatcggcgacgacggcgccagccagcggcgtgaggaagcaggtggcctgccacgtggacacgttcttggcggcggcgacattgctctggtgcagcacggtggtgaggtaggtgacgaggttgtacatgatgccgtagtaggccaggcagtaacagaattcagtaccaagaatcgagcggcatgccctccatccaccggtgcgatgcttcagcgccggattgccatcgatgtcgagtgacccatctgtggtgtatgcttcttcaacctggcagcaaccaaaatccccagcctagttagcactgaacgtatccatgagcggctgcttcaaattaactaggagtagctagttcaggcaaggctcaatcaatatttttctgcagggaaactgatgagaaattaaacaaactgcatcgtggaaatcggcataaggctagcggtaaggagaatatgaacagcgattaattaattacctcgggttgtagcagcgccactgcgtgttcctgctgctcagtgtccgtggacgccattgcggagccggtcgagagctcga

SEQ ID NO: 29980 - DNA, 3387 bp, Oryza sativa
  Clone ID: PAT_MRT4530_3442C.1
atgatcgtccgccagcaccgcccgttcaaccctagcaacttccatcagggcactagtggcagtcagaaccaccatggaggccagcccaaccgcggtgcagctccacgcccaccaatggcaccggcacagtcaggccagcccgcacaagccaagaaggagacgggagcaaaaccagggtcctgcttcaactgtggcgagcttggccacttcgctgacaaatgcccgaagcccaggcgtgccggaccaaggtttatccaggctcgtgtcaaccacgcatctgcggaggaggcacaagcagcaccagaggtcgtactgggtacgtttcctgttaactcaatccctgcaacagtactttttgattctggtgcaacgcattctttcatctccaagaaatttgtcgggatgcatgggttaataagagaggaacttagcacaccgatgcgggttcataccccagggaatagctccacttcggttcaattcagcccttctataacaatagaaattcaaaggtcaccgtttctagccaacctcatccttctcgaatccaaagacctagatgtcattcttgggatggattggctgaccaagtttaagggagtcatcgattgtgcgaatcgcacagtcaccctgaccaatgagaaaggagaaaccgtggaaccgctccaatctataagagaccgtatagaatggcggctcaacgaattagcggaggtcaagaagcaagttgatgaacagctgcagaaagggtacatacgaccaagcacttcaccttggggcgctccggtcatttttgtggataaaaaggataagacaaagaggatgtgcgtcgattatcgcgcacttaacgaggtcacaatcaagaataaatatcctttgccgcgaatcgacgatttatttgatcaactgaaaggagctaaagtgttctataagatagacctgcgatcaggctaccaccatttgagaatccgggaagaggatattcccaagacggccttcaccactcggtacgggctatatgagtgtacggttatgtccttcggacttactaacgcacccgcattcttcatgaatctgatgaacaaagtgttcatggaatttctggacaagtttgttgtggtgttcatcgacgacatacttatctactcaaaatccgaggaagaacatgagcaacatctccgtttgccccagggtgtagcagttgatccatcgaacgtggagtcggttaccaagtggaccccaccgaagacagtgtcgcagattcgaagttttctaggactggctggttattaccgtcgtttcatcgaaaacttctcaagaatcgcccgacccatgactcagttgcttaagaaagacgagaagtttaaatggacagctgagtgcgacaagaactttgaggagctcaaaaggaaattagtatccgcaccggttttgatcctgcccgaccagacgaaagacttccaagtctattgcgatgcatcccgtcacggacttggatgtgtcctaatgcaagagggcagagtggttgcatatgcctcgcggcagttgcgtccacacgaaggaaattatccaactcatgacttggaattggcagcagtggttcatgctttgaagatctggaggcactatctgattggcaaccgctgcgaagtatatacggaccataagagtctgaaatacatcttcacccaaccagacctaaaccttcgacaacgaagatggttggaactaatcaaagactatgacatgagtattcactaccacccgggtaaagccaatgtggtggcagacgctttaagccggaaaagttactgcactgctctatgcatcgaggacatgtgtgaggaattgcgacaggagcttgaacatctcaacatgggaattgttgaacacgggttcgtagccgctctggaggcacggcctacgctcgtggatcaagttagagccgctcaagtaaatgatccggaaatagcagaactgaaaaagaacatgagagtcggaaaggctcgggatttccttgaggatgagcatggcacaatctggatgggagaaagattgtgtgtaccggacgacaaggaattgaaggatctgatactcaccgaagctcatcagacccagtactccattcatccaggcagcactaaaatgtatcaagacctcaaagagaagttttggtgggtcagcatgaggagagaaatagctgaattcgtcgcactctgcgatgtttgccagcgagtgaaagcagagcaccaaagaccagcaggtttactccaacctcttcaaatcccggaatggaaatgggaggagattggaatggactttataacgggactgccccggacatcatcgggacatgattcaatctgggtagtcgtggaccgactcaccaaggtggctcactttataccagtacataccacctatacgggaaagagattggcagaattgtatctcgcaaggatcatgtgtttgcatggggtacccaagaagatagtatccgaccgaggtagtcagttcacctcaaagttctggcagaagctgcaggaagaattggggacccgtttgaatttcagcacggcctatcacccgcaaactgatggtcagaccgagcgagtcaatcaaatcctggaagatatgttaagagcttgcgctcttgattttggtggagcttgggacaaaagcttaccatatgcggaattctcgtataacaacagctaccaggccagtctacagatggcaccgtttgaagctctatacggccggaagtgccgcacacctcttttctgggatcagacaggcgaacgtcaactgttcggaacggaagtattagcggaagcagaagagaaagtcagaatcatcagggaaaggttgagaattgctcagtctcgacagaagagctacgcggataaccgccgaagggagctcacttttgaggcaggagattacgtgtatcttcgtgtcaccccgctccggggagtacaccgctttcagacaaaaggcaagttggcaccacgcttcgtgggaccatacaaaatcttggaacgaaggggagaagttgcttatcagctagaacttccatccaatatgatcggcatccatgacgtgttccacgtgtcccaattaaagaagtgtttaagggtacccgaagaacaggctgattcggaacacattgatatccaggaggacctgacatatgtggagaagccggttcgcatacttgataccagtgaaaggagaaccagaaacaaggtcacccggttttgccgagttcagtggagtcatcattcggaagaggaagcaacctgggaaagggaagatgagttgaaagccgcccatccgcacctcttcaccagctcctccgaatctcggggccgagattccgtttaa

SEQ ID NO: 29981 - DNA, 453 bp, Oryza sativa
  Clone ID: PAT_MRT4530_34430C.1
accacgcgtccgctgttagattggtgcctgtggatgactagatgacagtcatgtagaccagagtggcactattgtagaattcctggcaaacttctctttgccttgaactgcttgttgagttgccattctgtggtatagggaaatctaatggcaattcatgaaaaaaaactgaaaaaacacataaaaaaacacaaaaaaaaaaaatggaagaacattcataatttacaaagttgacgtaaaaggggggcgggccctcaaaaggatccatttttaaccacgtgtgcatactaaatggtaattgttatatagccctgcctaaatgcaataccctggccgtgttttatcattacgctgatgggaaaacccttcgtttgccaaaacttaatccccagctaattcacctccctttcctcacttgctaacaaagcaaaaaggctttccccgaccggcttt

SEQ ID NO: 29982 - DNA, 789 bp, Oryza sativa
  Clone ID: PAT_MRT4530_34431C.1
atggcgcgacgtggcggcgcgtgggcgtgggcggcgacggcggccgcattgctgtggtggatggcggcgggagccggggcggtgtggctggagatcccgccgtcggcgaccaagtgtgtgtcggaggagatccagtccaacgtcgtcgtcatcggcgactactccgtcctctacgagcaccacctcaaccccaccgtcaccgtcaagacggtagaggctgcaacgaagttcctttccttttgcgaccccgaaatggctagcccctgccaaggtttgcttgaggaggtccgttgcaaccatatccacctggaacgaagagctatacccataagctccagattcggtacccctgccaaggttacatccccttttggagacattgtacatcataaacaaaaggtttccacaggccagttttcattcacaactgcagaagcaggaaactacttggcttgcttctcggctgatggtcggaacaagaggttagtggtgaaactaaatcttgactggagagttggtattgcaacaaaagattgggattctgttgctaaaaaggaaaagctcgagggagttgaactagaattagtcaagcttgaaacctctgtccaagcaatacatgaaaacctgctcttgctgagatccaaagaagcaaatatgagagataccagtgagaagacgaatgctagggctacatggttgagcatcatatcactcattgtttgcattatagtctcagttttgcaactttggcatctacaacagtacttccgaaagaagaagctcatctga

SEQ ID NO: 29983 - DNA, 1199 bp, Oryza sativa
  unsure (1)..(1199): unsure at all n locations
  Clone ID: PAT_MRT4530_34432C.1
cccgggggcgaccctccccgccgcgcctataaaagccggaaaagccccttcttttcccccagagccgagcctcgagctgcatgcttctgctctcgtccccaatgccggccaccggccgatctccctcgtcggactatttccgaccaagccctcgcgccatcggcttcgcctcgatggggcaaacccattccctaaccttccccttcctttccccttccaagattagccaccaccgttacttcccaaaccggccggggcaagcttttggccatcgccgttccggtctcctctctcattccccctgccggacaccaccctccccggatgcgcgtcgttcgggaacacattccgccagcgatgtcgccgcctcccaaccaccagagccctggtgcccctcctccccctcctctcgtttgctcggctggaagagaggaggaagacgacgggaggaagaagaaaaaaaggaaaacgctgccggaaggctgacaggccggcccatcaacagtgcactgtcatcttttcaagactatcaacctcgcagtagacgccaggcacccgacgctccccccactccagtgccaccaggatttggtcgtaccggaaccatggcggcgcgcacgggggagccgcctctctttacaccgtctccaactcgtggccacgtcggagccgccgctgcacgccgtcccggcctccgccatacattcattgccgttccccatggctccccgagccgcatggtacccaatggcatggggggggaacggtgttagggtctggccggtctccaactccgatgaggagtcgggaccgtcggcctaaagccggccggcatgccgccggccgacgagagggacgcggcggcggcggatagtggacggtggcggtgggaggtggcggtggaagcaaggcggcagcggaaatggagggggtagcggcggcgctatcactgaaggtggagacggcggtggaatcggcggcggtggcgtcggcagcgcccccgcggcggcngtcggcggcgccccccagcggtggaataggcggcgcacctcaacggcgtcaacggcgcacctcggcggcgtcggtggtgcctcacggcggcgtcgatagcggcgaactggcggcggtcagcgacgaaatgacggcggtgggcggcggcgtgtgcagcgaaaagggcggcggcggcggcggtgaaattg

SEQ ID NO: 29984 - DNA, 806 bp, Oryza sativa
  Clone ID: PAT_MRT4530_34433C.1
tcatggatgcccgttctcggcctccctcgccatcagcgcgcacgccagcttcgctatcttcttcgtcgatcgatgaggaggacgcgttggggatcccgcggaggcagggctagggttgtggccgccgccactaccctcgccgccgtgtgactgcaactccagttgtggttcccccgcctgtccttgtcgcacctcctcctccgcctccggttgccgaagcacctcgccggatccggaaccatggcggcgcgcacgggggagccgcctctctttacaccgtctccaactcgtggccacgtcggagccgccgctgcacgccgtcccggcctccgccatacattcattgccgttccccatggctccccgagccgcatggtacccaatggcatggggggggaacggtgttagggtctggccggtctccaactccgatgaggagtcgggaccgtcggcctaaagccggccggcatgccgccggccgacgagagggacgcggcggcggcggatagtggacggtggcggtgggaggtggcggtggaagcaaggcggcagcggaaatggagggggtagcggcggcgctatcactgaaggtggagacggcggtggaatcggcggcggtggcgtcggcagcgcccccgcggcggcgtcggcggcgccccccagcggtggaataggcggcgcacctcaacggcgtcaacggcgcacctgcggcgaactggcggcggtcagcgacgaaatgacggcggtgggcggcggcgtgtgcagcgaaaaggcggcggcggcggcggtgaaattgtgggggcagt

SEQ ID NO: 29985 - DNA, 411 bp, Oryza sativa
  Clone ID: PAT_MRT4530_34434C.1
atgccgccggccgacgagagggacgcggcggcggcggatagtggacggtggcggtgggaggtggcggtggaagcaaggcggcagcggaaatggaggggcgcccccgcggcggcgtcggcggcgccccccagcggtggaataggcggcgcacctcaacggcgtcaacggcgcacctcggcggcgtcggtggtgcctcacggcggcgtcgatagcggcgaactggcggcggtcagcgacgaaatgacggcggtgggcggcggcgtgtgcagcgaaaagggcggcggcggcggcggtgaaattgtgggggcagttagggttaaccctgacacccccctccccgacgccccaccccatgcccctctgctgcgagacggttgggccggcccaccgcgcccctgcctgccggcctag

SEQ ID NO: 29986 - DNA, 2766 bp, Oryza sativa
  Clone ID: PAT_MRT4530_34435C.1
atgcggcacaaccgctccctcgcggcgctcctccgcgccggccgctacggcgccgcgcggcgcctcttcgacgccctcccggcccgctccgtcgtgacgtggaactcgctcctggcggggctcgcccgccgccccgacgcccgcgcggcgcgggagttcttcgacgccatgcccgtccgcgacgccgtctcgtggaacacgctgctcgccgcctactccgcctccccgcacccggaccacctcgcggccgcgcggcggctgttcgacgaaatgccccagcgggacgtcgtcacgtggaacacgctgctgggcgcctacgcgcgccgggggctcatggacgaggcgcggaggctgttcgacgagatgccccagaggaacgccgcttcctggaacacgatggtcaccgggttctttgctgctggccaggtggtgaaggcccttgacgtgttcgatgcaatgcctgccaaggattctgcatctctgagcacgatggtgtctgggtttaccaagaatggtatgctgcatgaggccgaggagttgttaacaaagcgtttgagtgtgacagacatggacaaagctgttgacgcttacaatacactaattgttgcatatggacaagctgggaggtttagtgatgccaaaagattatttgatatgatacccaaaggacaataccagcataatatgctcaaaaggaaaggttttgagaggaatgttgtttcatggaactcgatgatgatatgctatatcaaggctggtgatgtttgctcagctagggcattgtttaatgagatgccagataaagacttggtttcatggaatactatgatttctgggtatactcaagcgtcagatatgaaagaatcagagaaactgttctgggaaatgccagatccagatacagtatcatggaatttaattatacaaggattcatgcaaaaaggagaggctgagcatgccaggggattttttgataggatgccagagcgtggaaccatctcatggaatacaatgatatccggttatgagaaaaatgggaattacatcagttctgttaagttgttttcaaagatgcttgaagttggtgagattcctgatcggcataccttctcttctgttctagcagcatgtgcctctatccctatgttaggcctcggagctcagatccaccaacttgttgaaaaatcatttgtgccagatactgcaatcagcaatgcacttataacgatgtactctagatgtggggcactaaatgatgcggaggccatcttcaagcagatgcatacaaaaaaggatttagtgtcttggaatgcactaataggatgttatgaacaccatggtcgtgctacaaaagccttgcaactgttcaaagagatgaggagagccaaggttatgcctactcacataacctttgtttctctcttgagtgcgtgcgtcaatgctggtcttgtctctgaaggacggatggtgttcgataccatggttcatgagtatggcattgttgctagaattgagcactatgctgcactcgtcaatctcataggacgtcatgggcaacttgatgacgcgttggaggtgatcaatagcatgccaatggctccagatcgatcagtttggggtgcatttcttggagcttgtacggctaagaagaatgaaccactagctcaaatggctgcaaaggaactatcgacgattaatcccgacagttctgctccatacgtacttattcataacctacatgcccatgaagggaagtggggaagtgcagcggtggtaagggaagagatggaacggcaaggcatttacaagcagccaggatacagctggattgatttggaaggcaagatgcatgtcttcatctcaggggatacttggcatcccaatgcccaggagattttttctgtcctggaaggtgggcactggccctgcccagtgtgctgggagatgaaccagctaactcaagtaaagcttattgctaaaagaaacaatcaaataatggataagcaggccactgcaactaagatgcacaaagccacaaatattagacatatatacagcaaatttaaagtagatgaacagcaaaacacaagctggtggccttattgtactagcctttggcctgatagttacctgcttgaggaggaagcgctcttctccagtctttccttcccgagctttcatccccagccagtctactctactgtcatgcaaagcaacgttttacaagacgagcttggtgtcatctttgaagatgatgtgctgaagtattgggatgagatggagcaatcggagaacaaggtagagaaaagtgagaagggattgccactgctctattacggtgatgagaacggagcagcctccaagatcatgagagacgatgttagatcagaggagaaggcattgacgttcgagctcgtgtcccagtacttctacatgccgatcacgcaggcggcacgagagctgaatgttgggctcaccctcctgaagaagaagtgcagagagctgggcattccaaggtggccacaccgcaagatgaaaagcttgcagacactcatcaacaatgtacaggtccttcaggaagccagcaaggcgaacaatgaggagcagctgaggatgctggtagagatgctgcaggaggagaggaggctcctggagcagaagccgtatgttcagctcgaggagaagacgaagaggctcaggcaggcctgcttcaaggccaactacaagaagaggcgcctcttggctcttgaagctggggagccgtga

SEQ ID NO: 29987 - DNA, 423 bp, Oryza sativa
  Clone ID: PAT_MRT4530_34436C.1
gtcgaaattaattttttctttttaggttgtttgtttttctttttttttttttcacaaaaccactttttccatccaggggcggggagaaacaaagggacgttattaccaaggcgtcaaaaatccaccggggccccaaaagaccactcccaccttaagccccaatgtataacaaatgcgacggatttttcctggggcatctcaaggggacccgccgaagatttttgaggcaaggaccgtcccccggcgttcctaaaaagggccccccctgatcttttggtctcccaataaaacaccgcagactcccctaaaaagcggccgcgggggaatagcctgccccaaagaagtttggagtcccattggtggttaaaatgcaaggatttactcacccgaaaaaaggttttcggcccgtgcttttataaaaag

SEQ ID NO: 29988 - DNA, 1361 bp, Oryza sativa
  Clone ID: PAT_MRT4530_34437C.1
atgggccggccggcccaaggcggcccaaggcgcgcgcgcgcgggaggggaggagagagagagccggtggaccgggctcaccacgcgtggtcccgggtgggacccgcttgtcggtgacacggttcaccgtgcggagcgagcacgcggcgcacgcgcgcgggcgagggagggacgcggtgcacgcgcgcggttcgcggtggacgcggatgcggcgggcccacgcgcagcctcacggctcacggtggaacgcgcgcacggggaggggctgaccggggtcggctcgacccggtcttggccgagctggcgccgacgtggcgcctacgtggctgccacgcgggccggcgggaggtagacgacgacaccggccggaacggatggcggacgacagcggcgagcggcggagcgaaccacggcgatacaggcgaaagcgagcacaccgggtggttgcacgagacgaggggagacgagccaacggctcggattcgccggagggagcttgacggcggcgaatcgcggcggcggcaaccggcggcgggagaagggggaaacggcgacgaggtcacgagaggccaattcccggtggtgagagcatctacgcggctacgggaatccgttgctagcgtcggattgggcggagctacgccgagcgaggccggtgacgagcgggtgctacggagctcgggcggcgacggcggcgagtacacggcgagcgacggcaacggtcggggcggcgccggctagctacggggaggctactcgcactaccgtgagggcgggcgcaacgacgagaggccgacggcgcgggagtaatctctccggcctcgggccggggaagaggaaggagagggcgcgcctggagtccccttccgcgtccttgctcgtgccggctcctccgacacgcgcaacgacgaacggcgacggcgaacagagcacgggaggcggtggcaatgtcgtggaggcgaagagggggagggcgcccggggctttaagggcggcaatcgcgcggagtggcgggggccgggctatgacgtcggcgatgacggcgggggtggttcgagcggcgcggctcgggcacgcgcgctggctcgcggggccgagcggctgcgcggctgcaggcgcggcagggcagcggggccgggcggcgaccacgcggctctcgcgcacgcgcgggcagagcgagggaggggcgctcggcgcggcgctcgcgcacgcgcgcgcggcgcgcgggcagagcggaagagggagggggagagagagagagcgcccgggagggaggaggagatgggccgagagagattcggcccatcgaacccgggggaggcaaaatagacttttgcggaggaatttgatttggaaggattt

SEQ ID NO: 29989 - DNA, 372 bp, Oryza sativa
  Clone ID: PAT_MRT4530_34438C.1
acaaattaaaaaaaaaattttttttttttttttttatttattctcacattttttttttttttccaaaaaaaaaaaattggggtcctattataacccacccagttttaaaaccccctgccaaaaaaaaaaaaccttttttttttaccccccccaaaggttctaccccaaaatttttttttggaacctgcaggccaaccatgggggcctttaaaaaaccccatcagagaaaaaacccatctttgccaaacatcctttctgtgagacaatgggggtccctcttaattccccccaaaataccagcccgaagcctaaagggtaaaaacttttttttataaggagggagctaaaacacatgaattaaattgggctaac

SEQ ID NO: 29990 - DNA, 1752 bp, Oryza sativa
  Clone ID: PAT_MRT4530_34439C.1
atggctgccgcgccgaagccggaggaactcgtcgtcgccatcgagcagccattctccccgtcgctcttcctggacctgcccccgacgccgcaccacgatgacgaccccaacaatgtcaatgacgacctcctcctccccttcatctcacgcatcctcatggaggacgacatcgacgacaagttcttctaccagttccccgaccaccccgccctcctccaagcccagcagtcttacgcccaaatcctccatgcccctgccacatcttcttcctccgacgacaccaccatcaacaacaatacgaccaactccacctccgtccccgacacgctcgccatgcccgaccacgacgccgacacccagagcgcgccggacgacatggagatgctctacatggcgttcctcaagggcagggaggaggccaccaagttcctgcccacaaacaacaccctcttctctggcttcaaggcagagccggtgctggatattcaacccaccttcacgttcggaccaagcggcggcggcaggggccggaagaacaggcacgccgaggaggacgacctggagacggagaccagcaggagcagcaagctgatggcgccagaacatgacgacgccgccgccgccgacgagatattcgacgaaataattctcaatgggtaccagatgatcattaaggggatagatgagctgcgcgtcgccatgggcagccagagccaggccgacaagaacggccgaagagcgtcacgcgcgaagacggcggtggtcgacctacacaccctgctcatccactgcgcgcaggctgtggcgacgggagactggcggagcgccaccgagctgctgaagcagatcaagcagaactcgtcggcgagaggggacgcgacgcagaggatggcgtgctgcttcgctgaggggctagaggcgcgtctcgccggaacggggagccagatgtaccagtcgctcgtcgcgaagcgcacgtcgacggtggacttcctcaaggcgtacaagctgttcacggcggcctgctgcatcaagaaagtgagcgtcatcttctcgaacaagaccatctacaacgccgtcgccgggaggcgcaagctgcacatcgtcgactacggcctcagctacggattccagtggccagctttgttctttttgctgggagccagggaaggcggaccgccggaggtgaggatgaccggcatcgacgtcccgcagcctgggttccggccagccgaccagatcgaggagacaggccgccggctgagcatctgcgcgcgccagttcggcgtgccattcaagttccgcgccattgccgcaaagtgggagacggtccgccgcgaggacctccatctcgacccagaagaagaagaagaggaggtgctcgtcgtgaactgcctccatggattgaacaccctgcaagacgagagcgtggtcgtggacagcccgagccccagagacgtggtgctcgacaacatccgcgacatgaggcctcacgtgttcgtccagtgcgtcgtcaacggcgcgtacggtgcgcccttcttcgtgacgcgcttcagggaggctctcttcttctactcggcgcacttcgacatgtggacgccaccatcccgcgcgacaacgacgatcggctgctcatcgagcgggacatgttggggcgatgcgccctcaacgtcatcgcctgcgagggcgcagacagagttgatcggccggagacgtacaagcagtggcaggtgcgcaaccatcgcgccgggctga

SEQ ID NO: 29991 - DNA, 1014 bp, Oryza sativa
  Clone ID: PAT_MRT4530_3443C.1
atgcgggtgcagtgcgacgtctgcgccgccgagccggccgcggtgctctgctgcgccgacgaggccgcgctctgctccgcctgcgaccgccgcgtccaccgcgccaaccgcctcgccagcaagcaccgccgcctcccgctcgtccacccgtcctcctcctcctccggcgacggtggcgccgccgccgcgccgctgtgcgacgtgtgcagggagaagaggggcctcgtgttctgcgtcgaggaccgcgccatcctgtgcgccgactgcgacgagcccatccactccgccaacgacctcaccgccaagcacacccgcttcctcctcgtcggcgccaagctctcccccgccgcgctcgccgaacagccgctcccgtcctccgactgcagctccgacgacgacgccgccgccgccgccaccgaggaggagtaccactcctccgccgcatccaccggcgccgcagtgagcgcgcctcttgacgcctccagcaacggcgccggtggcggaggaggagtaggagggagcagcatctccgactacctcaccaccatctgccccggctggcgcgtcgaggacctcctccccgacgacgacgccttcgccgccgccgccgcggtgagtactaccaacccatcgctccgccgtgttcttgctacgtctccatcgatgaagccgagactaacctacgattccttggagcagcaggcggggaaagagaaggacgagcgcgtgccgttcctcgacgccgacctgttcgacgtggtcgccggccggccggagaagaagggcggcgcgtgggcgccgcacgtgccgcacctgccggcgtggtgcctcgacgaggtgccggtcgtcgtcgccgcgtcggcggcgccagcggcgacacctgtaaaggcgaagcagggacacgtgcgggacagccactggagcgacagcgacgcgttcgccgtgccggagttctcgccgccgccgccgccggccaagagggcgcggcccagctcgcagttctggtgcttctga

SEQ ID NO: 29992 - DNA, 249 bp, Oryza sativa
  Clone ID: PAT_MRT4530_34440C.1
atggaaggatcaaatgcaacaagtcaggctcaagatgttcaaaggtggcttgccttgctcgagatctggagcttgatcctcgaaatcctcgcactgcgggtcttcgggctcacgcgtggccccgggtgggacccgcttgtcagcggctcggctcaccgtgcggagggagcacgcggcgcacgtgcgcgggcggggaggaacgcggtgcacgcgcgcggtccgcggcggacgcaggtgcggcgggcccat

SEQ ID NO: 29993 - DNA, 666 bp, Oryza sativa
  Clone ID: PAT_MRT4530_34441C.1
atggcgcatctcatcggcagagacggtgacgagacgatgctgtcgatgcgcgacgacaacctctatgttcttgggtttgccaacaggagtggagattggcacgcattcgagaggcacgcccatctttttcgcgaagatgtgacgcccctcaagatcaatgataattatggttctcttctaggagctgggcaccgtggacataaggaccgacctaggatcgcccttggccaacaggccgtgctagatgccatacaagcattatccaactacgatccatcaaccacagatgacaggattctcggagatgccctagcaaccctgatcgttaccctgccagaagcggtacggctcaggaaaatccgtgactggcaactcagaggatggtccacagggacgcatcttaccagtaagctagccgatgaagtagtgaaatggcgagtgatgacatgtggactcctcgttagtcacaggaacaatggctggtggggcggagaggaggcaagggacttgtatggatcgttacgtattgcgaacaaatttggtgcgatggagagagtcggcgtcatgctttggcccgcacgaaggaaatgctcggaggaggtgttggatgaatggcacatcagcaaaatcaggagagatatgatgatggtgcagcaaagaggatga

SEQ ID NO: 29994 - DNA, 584 bp, Oryza sativa
  Clone ID: PAT_MRT4530_34442C.1
aacctctgcagagggggtacactttacccacacgacgttactaacctaggtcacccagcccgcatttccaaagccgacacagggttgccatatgccaacgagaggggtcccagaccaacaacaggttaggtcccagaccatactgtgccaggaagcccgagggttctccccgacaccaccccgttgaatccacatgtctcttggcatcatggttctcctgattagctaattactcagccaggggcgtcccattacacccatgtggccgcactgttgtatgctcggatgtaattccgaaggaatcggtccttaaatgcgactgcacaagtattccacccagattttaagtttgaaggcgaccatcgatactcgcacagagtgcacgaattatcgaggcgcaactagatggttacaaggaaacatggtggcttgccttgctcagggtcttcacgaagcttcacaaatcttcgagaaatccgcttgaagaaaaatatccgataaccgcaactaggcgcaaacaatcaaaaacctaagcaaagaccaaataaaatgtccgatttaggctaattaatagtgccattaga

SEQ ID NO: 29995 - DNA, 216 bp, Oryza sativa
  unsure (1)..(216): unsure at all n locations
  Clone ID: PAT_MRT4530_34443C.1
tcttncgtactcgcctctctccgcgccctcctccgncgncgttcgncgncttttcgtctccgncgtcaccgncgtcgacatgagggagtgcatctcgatccacatcgngcaggccggnatccagtncgngaacggngngntgngagctctattncctcgggnatggcatccagccngatggacanatgnccggtgacaaagacctttggggggagg

SEQ ID NO: 29996 - DNA, 1062 bp, Oryza sativa
  Clone ID: PAT_MRT4530_34444C.1
atgacgcgaccttcaccaacagagcaaatcaaaataaaattttcaacgaaaattcactgtgccacgaccacactgaccgttggaacccaacggccgaaagtagggctggtttggctcaccaagggttcggccgaaccggccaggcaacggtcggctgcctccctttttgaggcaacggctagtgggccccacagaatgaggaggcagctgtctcgtctgttcaaggggtctggcttttcgtcaagtcatcatgacgagtctagtgctcattcatcagctgatgtctcgatagaggacgccgaagctccgcgacgtctcctgaacgacgccgacctcgaccttgttgacgattgggaaagacaagcctactacattctgagcgaccgggagtacgctcacatgcgagaatactctccggagctgctgaaaaagataggtatggatgttgattttcgtgctatttggaaagctgttggttggcatagatttgctgtggttgatgagcctgattctcgtttgcttacttttcaatttgtgtgcactttgaaagaaatagaagatggagtttccttttgctttttccataaagaatacacacttacatggaaaggattaagtacacttcttggctttcacgattcctgtaaaatcgatctccagaaaggaatttctttgttcgagaaaaataggttttgggaagatatttatggtgctccaatttgcaagaaacctaggacgaatgatatccataatcctacacttaggctcatgcacaggtggattgctatgactttgtttcctagaggtgatcttagacccattaggggggatgaattaattatcatgtttgccatgaccatagaagaatctcgtgcaggtggagcatacagggagacgcgcaacatggcaaggaatgaacgagaaagttcatcatccccaacacccgtgcagatgtatgaggcaggttgggaaccaattggggatgcacccggatggacccaagctccatgccatagcattggagtctcaagctgggcaagtgccagtgaggaccgatggcat

SEQ ID NO: 29997 - DNA, 634 bp, Oryza sativa
  Clone ID: PAT_MRT4530_34445C.1
atgacctctaagcaaaagaaaagaaaagagggatggaaattagacttccctcgggcggctagggcgcggcccgagagaaaaggggcggctcggccgagcttaacgggccggccggcccaagaaggcggcccagaacggcccaagacgcgcgcgcgcgggagggaggagagagagagccggtggaccgggctcaccacgcgcggtctcaggtgggacccgcttgtcagcggcttggctcaccgtgcggagggagcacgcgacgcggcgctagggtggggggaaggacgcggtgcacgcgcgcggttcgcggtggacgcgggtgcggcgggcccacgcgcagcctcacggctcgcggtggagcgcgcgcacgggaagggactgaccggggtcggctcgacccggtctaggctgagctggcgccgacgtggcgcctacgtggctgccacgcgggccggcgggaggtagacgacgacgccggccggaacggtggtcgacagccgcgagcgacggagcaaaccacggcgatacaggcaaaagcgagcacaccgggtggttgcacgtgacgaggggagacgaggcaacggctcggatttgccgggggttgctcgacggcggctgattgcggcggcggcaa

SEQ ID NO: 29998 - DNA, 1625 bp, Oryza sativa
  Clone ID: PAT_MRT4530_34446C.1
ggcgagggcgcggcccgagagaaaagaggcggctcggccgagctaaatgggccggccggcccaaaaggcggcccaaagcgcgcgcgcgggcggggaggggagagagagccggtgggccgggtccatcccgcgtggtcccgggtgggacccgcttgtcggcgactcggctcaccgtgcggagcgagcacgcggcgcgcgctagggttcggggagggagacgcggtgcacgcgcgcggttcgcggaggatgcggtgcggcgggcccccgcgcagcctcacggctcaccgcggaccatgcgcacggggggggggggggggggaaacggagggagcggctggccgggtcagccgatctggtcgcggccgaggtggcgcctacgtggcagccacgtgggccggcgggaggtagacgacgacgccggccagaacggacggcggacgacagcggcgagcggcggagcgaaccacggcgatacaggcgaaagcgagcacaccgggtggttgcgcgagacgaggggagacgagccaacggctcggattcgccggagggagtgcgtcggcggcggattgcggcggcggcaaccggcggggagggaagaggggaacggcgacgaggtcacgaggggccgattcccggcggcgagagcatccacgcggctacgggaatccgtcccttgtgccggattaggaggaaacgcatcgagggaggccggcgacgagaggcgcttccgagctcgggcggcgacggcggcgagcacacggcgagcgacggcagcagtcggggcggggcgcgcccggagtccccttccgcgcccttgctcgtgcgggctcctccgacacgcgcgacggcgaaaggcggcagcgaacagagcacgggaggcggcgacaatggagtggaggcgagagacgaaaacgagggagattggaggagggaggagcttgggtttataggggcggcaatgtcggtttgggagaggggaaccgacattggacggtcaagcctgcgagctggcgcccggctagcggcccatcacgacgacaggaggtgacgccggcgagagggaaaaagggagaaaaggaagggagaaagggagcttgtcccttgccactttgggaaaaggaggagggagcgggggcgacgtggcagagggaggaggggctctgcctccgtcccttggaagctagcgtgcagagtggcggggtcgggttgatgacgacggcgatgacggcggggtggtttggagcggggcgacgacacgggcggtaggcgcggcagaggctgacggcggcggcgaccaggcggtcggccaccacggcgcgcgcgcgcgggaagcaacgggcggcgcggcgatttgagcggcacggcttgggcacgcgtgctggctcgcggggccgagcagctgcgcggcagggcagcggggccgggcggcgcagacggcgcaggcgcggcacgggcgatgtccacgcgggcgcgcgcacgcgaacaacggcgcgcgggaagcggcagcgagggagcggagagggagggctcggctcggcgcggctcacgcgcacgcgcgcgcggcacgcggacagagcggagaagagggagagagagagaacagagagagagacagagccgcctcc

SEQ ID NO: 29999 - DNA, 719 bp, Oryza sativa
  Clone ID: PAT_MRT4530_34447C.1
cccgggctgcaggatgagtctatcatgtgcttatgttgtatcacctctacaatttccaaaaggaaaccctccttagacacccaaagattttgagcaaatggatattttcatcagcaagccttatgtccacattcacctctttcatttggatagtagcccaagctaaaggagttaaaccaatcaactaaatgaactgcttgtgtattttaggatcatagccatcaaccttgatttctattttattttgttaatggataatttagtacatactgtaaaacatatgcaatatgagttacgtgctccgctgttgtaaaacatgtccacctgttcatgttctatttaattcttctgattaaaggttatatctaatgcccgcgcaacgcgtggggggggcacggctagtctggtattaaactcgttcccctcgtcccctctgccctccccacttcgcgccgcggcaggcggccgcgcgcctggatccccctctccgccgcgcgaatcccttcctcttgtccgtcgcgtcgagcccaattcggcgcgccacctctcctccctccgccgccggctcagtcgctctcgccataagaatcccggaaccaccgccgccgcataacctctcagccgccccaaggccgggtgttcgccggctgtccgccggcacgccggtccaaggaaagccgcatgaatctaaccatgtcctcaacacagtccttcaagag

SEQ ID NO: 30000 - DNA, 349 bp, Oryza sativa
  Clone ID: PAT_MRT4530_34448C.1
gggggggaccaatttatcagattccctttaaaaacaaatttggggggtaaaacgccggggtttttgttttgaaatcacccaccccaaggaaaggtgggggacttttacaaaaaaaccggtcggggggggggggaagaaaatattccctttgggttaagggccggggccattgggatgggcccaacccaaaagggaaaaaaaaaataattggcattttatttttgggtatataaaaaacaaaccccaaaaaaaaggtggattcattttttttggggggaaatccaccagggggagggggggctttaggctaggggcccccaaatttctggaaacctgggggcttgttggg

SEQ ID NO: 30001 - DNA, 354 bp, Oryza sativa
  Clone ID: PAT_MRT4530_34449C.1
atggatgagaaggaatcttgccacaagtgtgactatgaacgaaacaatagactaacttgttgtaaccccaatgatcctattaaatttgaattgttgcagttttgcatttctgctttatggccattcgacaatgaacctatgattttgaggagcttttctccgtttcagtacagccatctgaagggtgtccttgttacaggatacaaaggggccatagagcaacctgaatttcttgcacatatcgcggagctattaactgttgatacagtcgaagcaccgtggaatgatatctttggatacgtcatacgaatcaagcatcagcttagagcaccattttcgtcaaattgcagctag

SEQ ID NO: 30002 - DNA, 166 bp, Oryza sativa
  unsure (1)..(166): unsure at all n locations
  Clone ID: PAT_MRT4530_3444C.1
aagatctgggagctcctcacctcagtctgatcaaagtatagaaagagggccatgtcaagcatggttgatcttaagctcctggctcgtggccctgaattgaagttgtttgcctcgcggcatgtgagcatggnggaccactgctcgaagagatggactttggattcta

SEQ ID NO: 30003 - DNA, 569 bp, Oryza sativa
  Clone ID: PAT_MRT4530_34450C.1
aacctctacagagggggtacactttacccacacgacattactcactcggatcacccagcccgcatttcgaaagccgacacaggttcaccatatgccaacgagaggggtcccagaccaacaccaggttaggtcccagaccatactgtgccaggaaacccgggggttctcctcgacaccaccctattgaatccacatgtctcttggcatcatggttcccccgattagctaattactcagccagaggtgtcccattccacccatgtggtcgcacttgtcttatgttcggatgaaattccaaggaaacggtccttaagtgcaagagcgggaaaccgtactcccggtacgtcccctggtctgcggttttggaaattcatttagttcgcaaacaccgacccaggtgtcaggtttttcaaggatcaaaggtgacttgccttgctcgagatcttgagcttgatactcgaaatcctcgcactgcgggtcttcaggctccaaaactacacgcgaaatgggacaactcaacaaacggcgaaaataaagccctattattgacctctaagcatgccattaga

SEQ ID NO: 30004 - DNA, 1263 bp, Oryza sativa
  Clone ID: PAT_MRT4530_34451C.1
atgagcctgagcgatctgccggacgaggccctgctcgtcatcctgaacaagctggacacacgggaggccgtgagatgcagcgtcctctcgaggcggtggagacgcgtccccggcatgctccccaacatcgagctggacgtcgactcgttcacgcccgaccacgacgacggcttcacgtccacgctatccgacgccgcgaggaacaactacgcgatggtgagcgcggtgcagagcctcctgtcgcacgagagccggcacgacatccgccgtctggacctgagcttcttctcgagggacgagtccgtcgggatcatccacgccatcgacgacgccatggcccgcggccgcagaatcctcgacctgcggttcgacgtcttgtcagagaagtcatatatggaatgcccggacagtgacagggtcaagcaagggaggcgccttcttcactgcttcgaccgctatccacgcgtgtttgctggcctcaccagcctgcacctggagtgcgtcaccgtgcaaggaccccgcttctccgacgtgatcaccgcctgcgagaagctcatcgacctctcccttgtccgctgcaactttggaaaggagacggcgctaacgatccaacacgagcagctcagcatgataaacctcgagttctgcacatgtgacaccgtcgagcttgagtggctcccgaagttatcggagctgtcgatgtccgtctggttttggtcgccgcgtcagtatccgctggtgtttggccatgctcctcggctccagcggctagagctaactcatgccggtttagttcattccaaagtgctccggttgagcaagctacttgacaattgtacaagccttcgcgaactgtggttggacttcgaatgcgaaaaagtaacggaccatcactgtgtgccccttgaggaagagctgctagagagaatgttcatttgcgagaaaaacaatataaattgggaaccatctaatttcaagcacaacaatttgacgaagctcatcatttatggctttcgacctgaaaatagattcatgagctacataagaagggtcatgaaggcagcagtgaatttggatgaaatatcattgcacgatgataggtgtgagatttgcgaatcttattatccaattacacgatatccacatactaaaaaagagagggatttggtaaagagagctatcaatgagggaagaacgtcccctatcaaaagtattcaattttttcacacatcagaagctagaactatcaaaatcattgattga

SEQ ID NO: 30005 - DNA, 530 bp, Oryza sativa
  Clone ID: PAT_MRT4530_34452C.1
atccacatcaacgtgccgttgttggacgctatgcaagtgccaacatatgcccgttatctcaaggacatactcaacaacaagagaccgctcccaacaatggaggtggtcaagctggcggaacactacagcaacatcatactccacaagctcccggagaagaagaaagatccggggtgtcccacgatcacctgctcgatcggggcacaacaattcgaccagccttgtgcgaccttggagccagcgtcagcgtcatgcccaaagatgtctttgacaagctcaacttcatggtgttggcaccaacaccgatgcgcctccaactggctgattcgtctgtccgttacccggcagggatagcgaaggatgtgctagtcaaaatacgggatttcttcatcccagttgattttgtggtgttggacatggacacggggaaggagatgccgctcatcctggggcatccattccttagcaccgcaggagccaacattgatgtgagaacggggagtatccgtttccatatcaacgggaagtag

SEQ ID NO: 30006 - DNA, 1605 bp, Oryza sativa
  Clone ID: PAT_MRT4530_34453C.1
atgggccggccggcccaaggcggcccaagtgcgcgcgcgcgggaggggaggagagagagggccggtggactgggctcaccacgcgcggtcccgggtgggacccgcttgtcagcggctcggctcaccgtgcggagggagcacgcggcgcacgcgcgcgggcgggggagggacgcggtgcacgcgcgcgctggcgacgacgtggcgcctgcgtggctgccacgtgggctggcgggaggtagacgacgacgccggccggaacggacggcggacaacagcggcgagcggcggagcgaaccacggcgatacgggcaatagcgagcacaccgggtggttgcacaggacgagaggagacgagccaacggctcggattcgccggagggagttcgtcggcggcggattgcggcggcgacaaccggcggcggaagaagggggaaacggcggtgaggtcacgaggggctaattcccggcggcgagagcatctacgcggctacgggaatccgatgctagcgtcggattgggcggagctacgccgagcgaggccggcgacgagcgggtgctacggagctcgagcggcggcggcggcgagcactcggcgagcgacggcaaggggggagatggagcgaggaggaagaacggagagaggcactaccgtgcgggtcggggcgctgtgacgagaggccgacggcgcgggagtaatctctccggcctcgggccggggaagaggaaggagagggcgcgcccggagtccccttccgcgtcctcgaacgcaccggctcacccggcgcttggcgaaggacggcggaggcgagacagagcttggaagacggcggcaatggcgcggacgagaaacggggaggaatgggggaaaagggaagggagggcgcccggggcttatagggggcggcaatgtcggtttggaaaccgactttggcggtcaaggcgcgagctggcgctccggctagcggccaaaacggcgacaggagggagggaggatgacgccggcgggaggaaaaagggaaaaaggagggggagaaagggggcttgcccccttgccgatttgggaaaaaggaggagggaggcggaggcgtcccggcagagggaggagggctcggcctccgtcccttggcggcttgcgcgcggagtggcggggccgaggcgatgacggcggcgatgacggcggggcggtttggagcggcgcgacgacacgggcgacaggcgcgggctggcgcggcagagggtgacggcggcggcgaccaaacggtcggccactcggcacgcgcgcgcggcttgcagcgggagggcgcggcggatggagaggcgcggctcgagcacgcacgctggctgcggggccgagcggctgctggcgcggcagggtagcggggccgggcggcgcatacgcgacgcgggcgaggaccacgcgggcgcgcgcgcgcgaacgacgcgcggggagcggaaaggaggggcggaaaggaggactcggctcggcgcgggcggctcacgcacgcgcggacagagcggagggagcggaggaggggcgctcggcgcggcttgcgcgctcgcgcacgcagcgcgcgcggcgcacgggcggggtggagcggaggtaga

SEQ ID NO: 30007 - DNA, 372 bp, Oryza sativa
  Clone ID: PAT_MRT4530_34454C.1
atggctgctaaggctgataaactagttacttcctctatccccaaatgtagccatctccaggcggcggcgttggcggcagctgtggcgggtggcggcaccgtcggcggcggcaacggcaggcgccacggcggcggggcgcggcaagcacgcgggaggaagatgggcgacgcgcggccggcggcgcgcggcgcgcgcggctatgacacgcaaccgacgggggacggcgcacgcggccgccgggaggtgcactaccgaggcgatgaagctcgacgggcggagggcggcgcgcggccggtggagggcggcgggcggccgacggagggcggggggaggcgggcggccggcggagtatggggggagatctggagctga

SEQ ID NO: 30008 - DNA, 453 bp, Oryza sativa
  unsure (1)..(453): unsure at all n locations
  Clone ID: PAT_MRT4530_34455C.1
aaaaatatacaaatccacaggctttccctgtaattttctcccatatcgcctttctcctcgcaagcatgtgtctcctccccactttgcacttggcatttgcaccccagctttgcctctacctcactagtagtagtaaaaaaacgttaattacattgtttactcgaaagcccacaggattaaccgcttaacccaatgcaaccgttgtcaaggctaaccctaaacactttaatttaaaactcctacttaaaaccccccttccagaagacatcccgctccagtttcccacgccaccgtcgaacaccttcacccatggcgtccatggccgccctcctcgtcgtcgtcttcctcgccggctgccacggtgagcgccgncgnccaccacctncgncttntngtgttcttacttgagatatggctaaatgttttttttaatttttttttggctgggagtgg

SEQ ID NO: 30009 - DNA, 447 bp, Oryza sativa
  unsure (1)..(447): unsure at all n locations
  Clone ID: PAT_MRT4530_34456C.1
tgctgtggttggcgcggaggacagaggactgttggtcctttcncttcgttgntggggtacgcccccccccggggtcgtgcatctctgctcgtgattttgatntggtggtggcttgttgttctcgtgtcacatnatattagcagggttgtggtgtcgccacgttgtnatggttgtgcgcncacatcatttgtggggccgtnggggaccnctctgggggactcgtgtggtttatgtacgacactgtgatgtccgctccacgccactgtaaaccctccgctactgganaancttaatgttattttctagtttaatttgttagttaaatgctgttcatattgttctggttgttaagttcaccctgtgncttgtttgggtatgtggttngtatctttatcatccggngaatgtatgaagttctntcttgagtaaaaaaaaaaaaaaaaaaaa

SEQ ID NO: 30010 - DNA, 309 bp, Oryza sativa
  Clone ID: PAT_MRT4530_34457C.1
atgtttgatccggcaccgacaaccggcgggaagggagaccggcagatttggccgtcggtaggggtgaaaacgctgtcagtgaggcacggttctccccgatggtgctactctctccggcggtggtggagggatggctatggcaagggcacggggcacctagaccgagcgtccactacccccctcatcgaatcaggccgtgaccgcgactgccttcttctccatcgagctcccgacggctacctcgtcaagcttgagcctgacggcagcggcaagatctcgagggcacgcaggcaggggccaactcggtaa

SEQ ID NO: 30011 - DNA, 3975 bp, Oryza sativa
  Clone ID: PAT_MRT4530_34458C.1
atgtcgtcgcttagcagggagctggttttcctcatcctgcagttcctcgatgaggagaagttcaaggagacggtgcacaagttggagcaggagtcggccttctacttcaacatgaagcactttgaagacctggtgcagggaggggagtgggacgaggtggagaagtacctcagcgggttcaccaaggtggaggacaaccgctactccatgaaaatattcttcgagatccggaagcagagggttcaccaagggtggaggacaaccgctactccatgaaaatattcttcgagatccggaagcagaagtacctcgaagcccttgacaggcatgatcgagccaaggcggtggagatactcgtgaaggatctcaaggtgtttgcctcattcaatgaggagctgttcaaggagataacacagctgctgacgttggagaattttaggcaaaatgagcagctgtccaagtatggggacacaaagtcagctcggaatatcatgctcatggagctcaagaagcttattgaggcaaacccactgtttcgggacaagctgaatttcccaccatttaaagtttcaagactccgcacattaatcaatactggcaacatcagctatgcaagaatcccagaccaaaccctgacatcaagacactgtttaccgatcattcttgtgccgctcctaccaatggagcaagagctcctccccctgctaatgggcctcttgttggacgaacccctgttggaccaatccctaagtcagctgcatttcctccaatgggtgctcatgcgccatttcaacctgtggtgtcaccatctccaaatgcaattgcgggttggatgacaaatgcgaacccctctttgccacatgctccactcgcacaaggaccacctggtcttgttcaacggcatttctaaaacatccaaggactccaacaagtgctcctgccattgattatcaatctgcggattctgaacatctgatgaaaagaatgcgtgtaggccaaccagatgaggtgtccttctctggtgcaagccaccctgccaacatttatactcaagatgaccttccaaaacaagttgttcgcaaccttaaccagggttcaaatgttatgagcctggatttccatcctgttcaacaaaccatccttctagttggaacaaatgttggtgacattgggatatgggaagttggctcacgagaaaggatagctcacaagacattcaaagtttgggatattagttcttgcaccttgcctttgcaggctgcactgatgaaagatgctgcaatatctgtcaatagatgcctgtggagtcctgatggaagtattttaggtgttgctttttcaaagcatattgttcagacgtatgcattcgtgctcaatggagaattgcggcagcaagcagagattgatgcccacattggtggggttaatgatattgccttctctcaccccaacaagaccctctcaattattacttgtggtgatgataaactaattaaggtatgggatgctcagacaggacaaaagcagtacacatttgaaggtcacgaagctccagtatattctgtttgccctcactacaaggagtcaattcagtttatattctctactgccatcgatgggaaaattaaggcatggttatatgactgtttgggctcaagggttgactatgatgctcctggacattggtgtactaccatggcttacagtgctgatggaacaaggctcttctcatgtggtactagcaaagatggtgattcacacttggttgagtggaatgagactgagggagctattaagaggacatacaatggtttcaggaagcgctcactgggtgttgtccagtttgatacaacaagaaaccgcttcttggctgctggagatgaattcgttgttaaattctgggatatggataacaccaacatacttacaacaacagattgtgacggtggactgcctgcgagcccacgcttgagattcaacagagaaggttcattgcttgctgttacagcaaatgaaaatggaataaaaatattagccaacactgatggacagcgtttgctaaggatgctagagagcagagcatatgagggctctcgagggccacctcaacaaattaataccaagcccccaattgtcaacacccttggttctgtttccaatgtgtctagtcctatggcagtgaattcggagagacctgatcgggcattgcccacagtgtcaatgagtggcctggcgcccatggatgttagcagaaccccagatgttaagccaagaattacagatgaatctgaaaaggttaaaacctggaagttggcagacattggtgactcaggacatctccgagcactgcgtatgccggatacatcagcaacttcaagcaaagttgtgcgtctgctgtatacaaataatggggttgcgcttttggctcttggctctaatgctgttcataagctgtggaaatggcaacgcactgataggaatcctaatggcaagtccactgcatctttcactcctcaaatgtggcaaccagcaaatgggattcttatggcaaatgacactagtgatggcaaccccgaagaagcaactgcctgcattgctctgtccaaaaatgattcctatgtgatgtctgcatccggtggcaaagtctcattgttcaacatgatgacattcaaggtcatgactactttcatggcacctccacctgctgcaactttccttgcattccaccctcaagacaataatatcattgctattggaatggaggactctaccattcaaatttataatgtccgtgttgacgaggttaaaagcaagcttaagggacattcaaaaaagatcactgggctggcattttcgcagtcaatgaatatgcttgtatcttcaggtgctgatgctcagctatgtgcttggagcattgatggttgggaaaagaagaaatcaagatatatccaatctccagcaaatcgttctggtgctttagttggtgatacaagggtgcagtttcacaatgaccaaacacatattttggtggttcatgagagccagttggcgatctatgatgcaaagctagagtgcttgcgctcgtggtccccaagagaagcactccctgctccaatttcaagtgcaatatactcatgtgatggtctcctcatctacgccggattttgtgatggtgcaattggagtcttcgaagcagagtctcttaggctgcgatgcaggatagcaccttctgcatacataccaccttccatgtctagtggtggaagtgtttaccccatggttgtcgctgcgcatcctttggagcctaaccagattgcggtcggcatgagcgatggtgctgttcatgtggtggagccgttggactcggacccaaagtggggagtggcgcctcctcaagacaatggaacccaccccacaatatcagcggctccggcagcagctaacaaaccagaagtctgaccatccctctagtgacttggccagcagtgccgacattcgttagacccaaagaatggtaggatcgtaggagatagggagaaagaagaaacagtttagatttgtgggatgaggtgaaatgtatcaagtccacagcatctccttttgcctgtggcagcagcacaggtgttgattgatgatgatgatgacatgtctaaattagtttttggttcttttttcccacccccagaaaatcttgacctcacctggcggctgccgcagtgtgtgccggagatggctgccatctttccctcctttgtaaagcttttctagctctgagctagtggtggttggtaccttagagaatgttcttttgttcctgcccttttttgcggggtaggaaggtattcctagtgtaaaatatggttggcatgttggatggtggtatttgtttggcctaatgcgactgattcaacccaaaaaaaaaaaaaaaaaaaaaaaaaaaaaaaaaaaaaaaaaaaaaaaaaaaaaacctcgtgc

SEQ ID NO: 30012 - DNA, 2175 bp, Oryza sativa
  Clone ID: PAT_MRT4530_34459C.1
gattaaccctacaccggccaccaccagtcacacaacacaacaatttaggattggtagagcccatctctgagccctgccttgctggccctgagctctctcttgctgcttcttttaatgggttttttgtctccttggatttgtgcttgtgctcacctgggcccccgggccgcggcatgcggcacacggggagtctctgcatgagagagagagagagagagagagagaggacacctctgagctgtttcttcaacaagtcttcaagatttggcagagctactgagagagagcaaaggagaggagggctatagggaaaaaaggattttttttttgggggtacaaatttcttgcttgattctcttcgatcccggagagcagccaccagttgaggcacaatccttgctgttcgtgtgcctgggtttgatagctgtccagatctgcggcacttgcccgatagattccaagaatccgagcacaaactctcgtttgctgcgaaaagatagtaggtggaataagttgagcaatacggtggagataagagagagagcttgtgtctcgtgatgccatcaagaaactgcgtggaggaggaggagagtgtgagatgaaggatgctggccgcggtgatggactacttcaggtcctgctggggcccgcgatctccggccggtcaccgggtcaggggctccgacgtcgccggccggcaagacgggctcctgtggtataaggacgccggccagctggtcaccggggagttctccatggctgtggttcaggccaacaacctgctggaggaccagagccaggtggagtccggcgcgctctccatggccgagcccggccctcagggcaccttcatcggcgtctatgatggccacggcggcccggagacggcgcggttcatcaatgaccacatgttccaccatctcaggagatttgcaactgagcacaagtgcatgtcaacagatgtgattcggaaagctttccaagcaactgaggagggcttcctttctctagtcagtaagcaatggtccttgaagcctcagattgcagcagtaggatcttgctgcctagttggtgttatttgctcagggactctctatgttgcgaaccttggagattcgcgtgctgttcttgggagatttgtcaagtccactggggaagttgtggcaacgcagctatcatcagaattgcacgcgttctatgaggaagttagacaagaattgcaggcatcacttcctgatgatccacaaaggcaaatccttatacacaatgtttatttttcatatggcctcttccagatctcaagatctattggcgatgtatatctaaaaagaccagaatataacagagaacctcttcacagcaagtttcgacttcgggaaaccttcaaaaggccgattcttagttctgaacctgcaattgctgtacaccaaatacaaccaaatgatcattttgttatatttgcttctgatggtctatgggagcacctcagtaatcaggaagcagttgaccttgtccaaaataatcctcgtaatgggattgctcgaagactagttaaagtcgcaatgcaagaagcagccaagaagagggagatgagatactcagacctcaagaaaattgatcgtggcgtgaggcgtcatttccacgacgatataaccgtcattgtggtgtttcttgattcgaatgccataagcaaagcaaactggagccgaggtccttctgtttccctgagagggggtggtgtcaccctccctgcaaattcccttgcgcctttctcggctcccacggtgttaagcagcacctattgaaggagctatactgcaaagaacatgaacatctacagtaacacagatggaggtgaaagcagctgccgttatcaactgtactgtactccttctgtgttgctcttatgaaactgtttagaccccacctggtaattagtgtactgatagcgaggtataagattagattattccttagcaacgcaatcttttttttcttttctttttctttttccttctttattcttatcctttctcttacccacgagagaacaggtggttgtaaattgcccagaacacctttttcgtaatagtccatcatatccccttttttcgtgttgataatgaaggcattgctaaaagttttaatgttgggtaaaaaaaaaaaaaaaaaaaa

SEQ ID NO: 30013 - DNA, 220 bp, Oryza sativa
  unsure (1)..(220): unsure at all n locations
  Clone ID: PAT_MRT4530_3445C.1
atgcatgctgtgcgcaaaaatcggtatgttatcctccccaagggcttcgtgaaggggttaccgnaccaatgtcaagaagggctgagactgaactttgactttctacaaatgaggcaacatattgttggactgcatgcttgtttccctgcggaggctaatcattaacattaaagatggattttccccggggtagtcgcctccagcggattaattttggttt

SEQ ID NO: 30014 - DNA, 536 bp, Oryza sativa
  Clone ID: PAT_MRT4530_34460C.1
ataacaggacacacacgagggggggggacactttatttacccaaccaaaaaaaaagggggggccacactcccaaaaaccggaaggaccaggaaaaactttggagggggggcgggaaaccctaggggagaccccccacagggggggcaaaaggaaagccaccggggccggggcctgagctgggggcccgccaacaaagccagaaaaaaaccggacttgggggaagaaaaaccgccccagggggcaaaaagcccggcaagaaaattggggggccaaaaaccccattgggggacaaaattgggggcgcaaaacccgggaggtgctaaattggagcccgggggacggcccccaagggaggccaaacgggcggaacgggggccccacaaacccattggacggggtaaagagcggtttttaaaacgggggggggggggattgcccaattgggcaaggataaaactgggcccaggccctgctctttgggggggcgggggaagagaggaagacaaaaaacttcagggctttggggggggggcca

SEQ ID NO: 30015 - DNA, 422 bp, Oryza sativa
  Clone ID: PAT_MRT4530_34461C.1
gaacaaaacaaaatgctttcaaattccaattcaaaaaataaaaatttttccaggggaagggggaatggaactttctgtataccccccgtaaagttaaacaaattgacaaaacctaacaaacccccttgaaatttttaggaagcttgttaaactttaccggtagctgcacatcgatccaacattttcgtcattatttttggcaaacccccttaaacccattttttttttgtaaccaactgactagcttcatcgggttttttatttgcattttttttattcttcaaaaactcaaaagtttggcccaccaccaaggattttttttgtcaggctgttgtttcccccgattttgtagttggcaaacacctcaaatttttttttgaacaggccacccatttttaggagcgtttccttgtaccccccct

SEQ ID NO: 30016 - DNA, 135 bp, Oryza sativa
  Clone ID: PAT_MRT4530_34462C.1
atggagttcagccgaagcctacatctccggggcactgattacgggcacgcccctctatttatgagagaacctaggatagagtccgactcatactctagtcctacacctagtacaactccaagtcctaaactgtaa

SEQ ID NO: 30017 - DNA, 453 bp, Oryza sativa
  Clone ID: PAT_MRT4530_34463C.1
atgggggcggtgacagcttcctcttcctctccccagcccagcgcggtggccaccaagtctgaccaggacgacgaccaatcgatggagggggagaagacgacgatgacgaaggtggtggcgccggtcgagcgggtggtgttcgagctgaacggtgagcggcaggaggtagcggcggcggacgtggagccgtcgacgacgctgctggagttcatccgcaccaggacgccattcagggggcccaagcttggctgtggagaagttcccggtgatggatccagccgcccgagccctgggtggcagcggatccaacgctgccgttgctgggagaccgccgccgccaccgccaccgccgtcgttgtccccgtgatcaccggcaacagatccgccctccccgcggttgccgggagaccgccgccgccaccctcgccaatgtcgccgccaccgccgccctag

SEQ ID NO: 30018 - DNA, 5997 bp, Oryza sativa
  Clone ID: PAT_MRT4530_34464C.1
atggcgggaggaggaggagttggaggaggcgctggcgagcacgcggcggcggcgtactggtacgacgcgtgcgaggacggcgcgtcgctgctgtgcggcatcgacttcgccgcgtccgcggacttcgaccccggcctcatacccgcgatggacaccggcgccgacgacggcttcgtcgccgagatcgacaggatactcgagagcatcaacgcggagagctcccctgcgcccccacccccgccgccgccgccgctacctgagcccgtgcctgtggctccgccggagctaccgattcaggaaaagcaattacaggtggcctctgcgcccgtggccaacaatgccgtggcggtggtgggcgttgtgcagagaagtaaaggcgtggtggcgaggaaggagccgaggagggagtcgcatggctgtgctgcaaatggcggcggcggtggggagtggagggacgggaagcgcccgcgcctcgcctccggtggtgtcgggggaccgcgtcaggagtggcggcggaggccgatgctgccaccaccgccctcgcgtgggtgggatgacaggcgtggaaggcgcgatttcgacagggtccgcaagcacgagcaccatcggcgcgaggcccggggtttctgggagcgtgaccgcggcggcaagatggtgttccgctcaggcacctgggagcaggagtctgaccgcgaggcaaagcgtgccaggacgcaagatggaggctccatggagaagaaggcagaggcagataggatgggggctgcgcagcgggagaagcctgtcgcggaggagcgtgcaaggcaataccagctagaggtgcttgagcaagctaagagcaggaacacaatagccttcctggagactggcgcagggaagactctcatcgccgtgcttctcatcaaaagtgtgtgcgataaaatgctcaaggagaacaagaagatgcttgctgtcttcttggttcccaaggtgcctcttgtgtatcaggtactagttatgacagcccaaattttgttaaacatcctcaggcacagtattattaaaatggatgcgatacatcttttgattttagatgagtgccatcatgcagtgaaaaaacatccatattctctagtgatgtcagaattttatcacacgactccgaaggagaagaggccagcagttttcggtatgacggcttctcctgtcaatctaaaaggagtgacgagtcaagaggactgtgccatcaagataagaaatcttgagagcaaactagattcagtagtttgtaccatcaaagatcgtaaagagcttgagaagcatgtccccatgcctttggaagttgttgtccaatatgacaaagcagccactctttggtccttgcatgagcaaatcaaacaaatggaaagcacggttgaagaagctgcactctctagctctaagagaactaaatggcagttcatgggggctagggatgctgggtctagagatgagctgcgtcttgtctatggtgtttcagagcgtacagagagtgatggtgcggctaatttaatccagaagttgagagctataaattatgctttaggtgaacttggacaatggtgtgcatataaggttgcacagtcctttttgactgcattacaaaatgatgaaagggcaaactatcaggttgatgtcaagtttcaagagtcttatttaaaaaaggttgttgatctgttacactgccagttgactgaaggggctgcaatgaaaagtgagaccagtgatgttgaaatgcaaaatactgaaaaacacaacacaaatgaccttgaggagggggagctgcctgacagtcatggtgagcatgtagatgaagttatcggtgctgccgtagcagatggtaaagttactcctagggtgcaggctttgatcaaaatacttctcaaatatcagcatactgaggattttcgtgccataatctttgtggagagagttgtgacagcattagttcttcctaaggtattggcagaacttccatctctaagttttattcgatgtgcaagcttgataggccataacaataatcaagagatgcgcgcgtgccagatgcaggatacaatttcaaaatttcgtgatggccgtgttacacttttagtcgcaacaagcgttgcagaggaagggcttgatattcgacagtgcaatgttgtcattcgatttgaccttgcaaagaccgtcttagcctacatacagtcacgtggtcgtgcaagaaagcctggatctgattatatattaatgcttgaaaggggcaatatatcacatgaaacttttttgaggaatgctcggaatagtgaggagacgttgagaaaggaagctatggaaagaaccgatcttagtcatttggatggtacttctgtgttgagtcctgttgatacatcacctggttcaatgtatcaggttgaatcaacaggtgctgttgtcagcttgaactcagcagttggactcatacatttttactgttcacagttgccaagtgacagatactcaattcttcatccggaattcattatgcaaaagtatgagaagccaggtggttcagtggaatattcttgcaagcttcagctcccttgtaatgccccgttcgaaaaacttgagggtcctatatgcagttcaatacgactggcacagcaggctgtttgtttggctgcttgtaagaagctgcatgagatgggtgccttcacagatacgctcttacctgacagaggaagcggggaaggggaaaaaactgagcagaatgatgaaggtgaaccacttcctggaacagctcgccatagagagttttatcctgaaggtgttgctgatattctacggggagaatggattttatctggcagagatggctaccaaaactctcaatttattaagttatatatgtattctgtgaactgtgtaaacgttgggacttctaaggaccctttcgttacacaactttcaaattttgcaattatttttggcaatgagccggatgcagaggttttatcgacgacgatggatctctttgttgcaaggacaatgataacaaaggcatctctcgtattccgtggacgaattgaaattacagaaagtcagctggtgttgctgaagagctttcatgttaggctcatgagcatagtacttgatgttgatgttgatccctcaactacaccttgggatcccgcaaaagcatacctctttgtccctgtaggagctgagaagtgtacagatcctttaagagagattgattggactttggttaacaacattgttaacactgatgcctggaacaatccacttcagagggcacgcccagatgtctatctaggcaccaatgaacgaacacttggtggggataggagggaatacgggtttgggaaattgcgccatgggactgcttttggacaaaaggcccatcctacttatggtattaggggagctattgctgaatttgacattgtgaaagcatctggattagttcctgctcgtgatagaggacattttagtgattatcagaaccaaggcaagttgttcatggcagattcatgttggaatgctaaagatcttgctggaatggttgtcactgctgcccactcagggaagaggttttatgtggactgcatttgctataacatgaatgcagaaaattcattccctaggaaagaaggctacctggggccattggagtatagttcatatgctgattactacaagcagaagtacggtgtggagttaatctataggaaacagcctcttatacgggcccgtggtgtttcatattgcaagaatcttctttctcctagatttgagcattctgacgctagagaaggtgacttctctgagaaccttgacaaaacatactacgtgtatttgccacctgagttgtgccttgtgcacccacttcctggatcactagttcgtggagctcagaggttgccctcaataatgagaagggtggagagcatgcttcttgcagttcaattgaaggacataattgattaccctgttcctgcaactaagatactagaagccttgactgctgcatcatgccaggagacattatgctatgaaagagcagagctgctgggtgatgcatacctgaaatgggtcgtgagtagattcctcttcctaaaatatcctcaaaagcatgagggacagcttacaaggatgcggcagcagatggttagtaacatggtcctgtaccaatatgctctgaataaaaccctccaatcatatattcaagcagaccggtttgctccatcaagatgggcagctccaggagtgctacctgtattcgatgaagagtctagagagtatgaaccttccatctttgacgaggaatcaactggttgcgagttacagaaggaatcctatgatgactatgcagataacatgcaagaagatggtgaaattgaaggagactctagctgctatcgggttctgtcgagcaaaactttagcggatgttgttgaggcacttattggggtgtattatgtagcaggagggaaaatcgctgcaaaccacctgatgaaatggattggaattcatgcagagttggatcctgaagagatcccacctccaaagccatatgacattcctgagagcataatgagaagcatcaactttgacacgttgaaaggtgtcttgggtatcgaattccagaataaaggtttacttgttgaggccataacacatgcatcgagaccatcttctggtgtttcctgttaccagcgtttggaatttgttggtgatgctgtgttggatcatctcataaccaggcatttgttttttacatatactgacctacctcctggccgcttgactgatttgagagctgcagctgttaataatgagaattttgcaagggttgcagttaagcataagctgcatgtacatcttcgccatggatcatctgcattagaaacacagattcgagagtttgtgaaagatgtccaagaggagcttttgaaaccaggtttcaattcttttgggcttggggattgtaaggctcctaaagttcttggtgacattgttgagtcgattgctggcgcgatattcctggatagtggatatgatacctcagttgtctggaaggtttttcagccactccttcatccaatggtgacgccagagacccttccgatgcatccagttagggagctccaagaacgctgccaacagcaggctgaaggcctggaatacaaagcatcccgagcaggcaacatagctactgttgaagtatttgttgatggtgttcagatcggtgtagctcagaaccctcagaagaagatggcacagaagttggcagcgaggaatgcacttgtggtcctgaaggagaaggaaaccgcaacaaagaaagaagatgaaagggatggcgagaagaaaaatggtgctcagatgttcaccaggcagaccctgaacgacatctgcttgagaaggcagtggccaatgcctcagtacaggtgcgtaaacgagggtggccctgcccatgctaaaagattcgtctattcggtgagggtgaacacttctgatcgtggatggacggatgaatgcattggagagccaatgcctagtgtgaagaaggctaaagactctgctgcagttcttctcctcgagcttctgaatagagatttccctgacaagcctgacggtaagcagccgtaggcactgtggttgttattggtggtggcattgtgggcatttgtggtgttaggcattcagcattcttacacaaacacaaaattaattacccattcagtgctcctcagctttggctaataaggacataaccagagctggtgagtgagagtagaggattatttttacctgcgctggcgattatagtggtgagatgtgataaataggagccgcgatagaaaaaggatagcttgatagcataggataggcgcggggcctcataattctgtcgtgcaatgtgtaaacaaaacaatgcattaatccaataaatttatattaccattgcgctggcaaaaaactcgagactagttc

SEQ ID NO: 30019 - DNA, 107 bp, Oryza sativa
  Clone ID: PAT_MRT4530_34465C.1
atgcgccacgtcggccgcttcggttgctgggctctttgggctttggctattggctacccgcaccggaacacctgggtcgttcggtcgggggtgcggatggcctaccg

SEQ ID NO: 30020 - DNA, 381 bp, Oryza sativa
  Clone ID: PAT_MRT4530_34466C.1
cggacgcgtgggtcaaaatttaaggtcatatatacatattcatttagtcctggtatttaagtaagatccattgcagtgagtgtgtgtatatgaacttttgtatgtaatttgcatatgtcctatttttctgatcaatgacattcttaaatattcctataggatgttagcatctcatacatgagctttgatctatatacaccacacttggtattatctctaaccatgttgaattatcatgacatcgatgcattttaacctgaaggaattataatcgttcagaattttgtaatttacattaagtataccatggctgaataatataatgattcaagtttttaagtagttgtatttctcgaaaatgagttggagttggttgggtga

SEQ ID NO: 30021 - DNA, 277 bp, Oryza sativa
  Clone ID: PAT_MRT4530_34467C.1
gcgtccgccttgcgccgccgccaagacgagtcgcggctgccgatctccatctggcgaggagagtaggggaggggatcgggttaaaagcttccatccaggaatggcaatggcatttataagagtactgaaacatggcgtaatcccaagagatgcagctcaagtagttggcataagaggatttgcaattgcaagcaaggcaaataagggtggaaagggtgcgtccgatgctgcttaaacccctgtgctcaataaagaacttaatatttctacagtgttt

SEQ ID NO: 30022 - DNA, 399 bp, Oryza sativa
  Clone ID: PAT_MRT4530_34468C.1
atggccgagctcggcacggcatcgacaacggcagccacgcggttgtggctgagcttggtctgcatcgacgaccacggtgcagatttgccacatgagcacgtggtagtgattctagggtgggacccacggccccacccgtcaggcccatccccttcctccggctccaaccgccgccatggacgcccgagccgccccacgacgccgcctcctccgcgcgtctccccgctcccgcgcgcgtgtggacgtggtccaccccacgtcctccccttcctccacgttctcccctattttccccaaaaatcggcgccgttcgagcctcactcgcccacgtcgccggagctccctccgccggcggttgccgcccacctcggccacgatctccctctccggggcctataa

SEQ ID NO: 30023 - DNA, 544 bp, Oryza sativa
  Clone ID: PAT_MRT4530_34469C.1
tactatagggcgaattcgagctcggtaccctattttatgggatgggggagggagccggccacgggaggagcgggaacggcggcgggaaccacggccggcggcaatggaaggcggccggagaaaacgcgggcgttcagaacggttggaatcggggcggatttgggggagcaatggtgctaggttttcccggagagggagaggagactgagcgggaggaggaagaagacgacggccggcctggcgcgtgggccccgcgcggccaggcgcgcgctcagcgcgcgtgtgacgcgcgtgcacgcgggagggaggggcggctcgggcaggggcgcggcttgggccgagcggccggcccaggaggagaggagggaggaggaagctgggccgagggagaggggagcccaagaaaaggagggagagaaggagagggagagaaagagagggagagaaagagagggaggagagggagacttcggccgcgggccgagagagagagagagaggaatttgggccaaacttggcccaaagggaaagagagggttatttt

SEQ ID NO: 30024 - DNA, 816 bp, Oryza sativa
  Clone ID: PAT_MRT4530_3446C.1
atggatcgaagacggctacaggcacgagccggcatcgacgaccatcgactggagtcgctgcaccggccgaggctgggggagacgagggaggaggcgtgcgccgtgtgcctgcaggatttcggggagaaagacgaggagctcaggatgatgccgtgctcgcactcgttccatcagcgctgcatcttcggttggcttgcgatcagagacaactgccccgtctgccgctcggcgatgtcctcgtacaacgatgttttggaggagctgcacgctgagctagagcaatggatacaggggacgtacggtgagcgcctccggcgtgtgttgctgccgcagatcgatggaggtggatgcctccgcggtagtcggacgctattaacgcaggaagaagctcatgagatcattcgcgagcgcttgaggtctgacattcgtcggggccgcatagaactggacgccgacttcttgcagcagcttgttgatcaggttcgcgatcatattcttcagcgtcagcgccgtggcactgccactgccattgccatggatggagtagtggaggtggaggatgcgtacaggaacggtgggttcggcgctgtccccgcgtcgagcaaggccatggccgagctgcaggaggcgatggcaagcgacgccagggaacgcgggtgcgctgtgtgcctggaggatttcgaggcgggagagaagctgacgaggatgccctgctcgcattgcttccatgcgacctgcatcttggattggctccgcctcagccatcgctgcccgctctgcagattcccgatgccaacccaagaccaatcttactag

SEQ ID NO: 30025 - DNA, 856 bp, Oryza sativa
  Clone ID: PAT_MRT4530_34470C.1
tcagtccttcctcctctctctcccttctctctctttctgtcccattcttcccttcggccggtggcacctctctctttctctccccctcttcccttcggccggcggcgggtggcgagagcgggcggcggcggcgcgcaagtgaggcccagagcggtatggcggggagtcggcgcagtcagacgcggcggcggcagcaaagtcttcgggccccaccaagcccgtgccgccgtggcgggttcgtgccgcggcggctggaggacttcagcgacggcggggccttcccggagatccacgtcgcgcagtacccgctcggcatgggccgacgggacgagaagggcggctcgaagatcctcgcgctcactgtcgacgccaagggcagcgtcgccttcgatgccgtcgtgaagcagggcgtgtacgctcccggagcccggagcttggcgcacttgacgacgacgaagatgccgtcggggaggacgcccctgtagacggcgccgaagtcgccctggccgatcttgagcgccggcgagaagttgttggtggtgtgcaggatctcctccatggagaacaccgagctctggaactgcgtcgcgctgcccctgcccctgctgctgttgtacagcccgcacattgacgccttcccctgatcactgccaggccccggcacgtcgacaccaagggaagcgtcgccttcgacgccgtcgtgaagcaggatgagaatgcccccggagctctcgctcggcctccttgcgctccgccgtggcgtgccgctccccgagacggtggcgttcttccaccacgtcctcccgttgctcccctcacctgcgccccgccgccacccgctcgcccgtccagccat

SEQ ID NO: 30026 - DNA, 174 bp, Oryza sativa
  Clone ID: PAT_MRT4530_34471C.1
attaactcactccaagtggaaaccgagggcatgtacgaaaaatttaaccttgcagaagaaaggagtgaggaaggagatgctaagtccatgcacatggctgctgttattgctgatgctatagagccagaggccaatctgattagcagaaaggatgcagcgctacaacaaagaaag

SEQ ID NO: 30027 - DNA, 346 bp, Oryza sativa
  Clone ID: PAT_MRT4530_34472C.1
cccaaggttcttgagtttcgagggataaagacaggtgggctgaatatatggaccgctgcgtgatgatagtccttgcctccaccgcaattgcctatcatgggctaaagtacaccgccgacatgcccattctcctgcctggccgagctgcagaataggatacacaacgtgtggcagcaggatcaggtgcatccatgcatacatcattgaaggcagtaatagatgagggactctgtactacctaacaccgctcaccaaggaagacctgctgtgaccgatcgagtacctgctgcggttcacgtggttgccctgcctcaagcatagcactgtcggatggtgctaccgagag

SEQ ID NO: 30028 - DNA, 882 bp, Oryza sativa
  unsure (1)..(882): unsure at all n locations
  Clone ID: PAT_MRT4530_34473C.1
ccaaaatcacatatacggtatattactcgagcaacatatattcaacacaagatttttataacgaactttagcacgcaaaagcacaaatcaactccgaggtacatgtagatgtaatgtcactcactcaagcacaggaattaattaactcaacatcggtcatcaaagtagtaagcatgcgctacacgatcacacacgacaccgaaagcaattaacaacaaatcaaataagcgaacaataacaatagctgcatgagctgctcatcaagcactaatttaattcagatataatcaaattagctagcttaattagctagttgctggagcactggaagccattggggagcttcctgctgcagcggttgacgaggacgctgagctggacgtgcggctcgacgccgacgaggccgagcacgttggcgcgcagcgccgtgcagaggcacacggcggcgtccacgtcggcgaggccggcgaggagcccgcagcactgctcgccggaggacgacggcgacgagttccccagcagatggcccaggttcagcagccctcctcctccgccgccgccgcccagcacgtcggcgcacgccgccagcttcagcgcgtcgaacgggcacttggcgccggcggcgcggcgcgccggcgccggcgtcggtttggcgcaccgcgatctgcaggcgccgccgttgcagcggccgccgcatgcctccgacggcgccgcggcgaacacgaggaggctcatcagcgccacaatggcggcgactgcaagcttgtttctactactgttcttgtgcgccaccgccattgctaattgacacactagctatagctctagctaaggaatgagttgaagtgtttatgtgagagtcctctcgtgccgnatcttcca

SEQ ID NO: 30029 - DNA, 332 bp, Oryza sativa
  unsure (1)..(332): unsure at all n locations
  Clone ID: PAT_MRT4530_34474C.1
gatattttccngatttccagatgtnatcttgattttagttagctgtaggtgatcacaattgaaaatattgttgctaatgaggcggctggatccacggtggagcaagttnttgcgacggactccaacgcggatgcagttggnagcgggatttggcgtcggccgtgagtntccngcaccgacgctggtggtggtgtttggcgagttaggatgtagtcattggttgtaactttccttttttntagatcaagatgantaatatgtatgcctgtcttccatgtgtaaaaaaaaaaaaaaaaaaaaaaaaaaaaaaaaannaanaanaaaaaaaaaaa

SEQ ID NO: 30030 - DNA, 543 bp, Oryza sativa
  Clone ID: PAT_MRT4530_34475C.1
atgtcagctctcttatctctcttctctctatcccctccttccagcgttctgatggcggcggtggcgggagggcgagggcggagcggccgcggcgacacacgggcaggatggcggcagcctccttccggctcagaactcgaccgcccaagcgaggtcctccaagacaagcactatcgtgcggccgctgccgctgacgacgcaccggagctccgtgagtcgccgctctgcctcctccctcagtcaacaattgccacattcaagcgcgcccaggtgcaccagcggtggggcttcgtcgagacccagcagcagccggtgctcgccgagtgcgctgccgcggctgaggcggcggcgcgggtagccgtggaaaggattaggcgcggcgcggcgaggcaacacgcgcaggtggtcaccctcaccgtgtcccggttccacagcacgccgagggagggggcggagcagcgactcgcggagctccggtctgctgtcagcggcagcggctgcgcgatggtgctcgttgtggaggacctcgcgagagcggcctag

SEQ ID NO: 30031 - DNA, 687 bp, Oryza sativa
  unsure (1)..(687): unsure at all n locations
  Clone ID: PAT_MRT4530_34476C.1
ataccagagatgtccaaaactcattcatcagcaccagcctctctttccacatacataagagcacaacagtcaggggctttgaaatggccaggttacaattcaaccccaatgcagtgtgggtctcagcctctggttctggaggaatacagggcattctgaaacccagtgaatccctcaataattctcaaaagaccacccccaaccagggtgccaatcctcatcagatgctggagggacacatttgtcctctgcctaacaggagtcatcttgcagcacagaggcccaagtgcacagaaaacaaccccaaaactcttggtgtatggtgtggtttccacccaacacaccattaaccacacctcaaagcctgtgcctccaggtttggagctgctcctgcgtgcagaaaagattctggtgccatcttgctgacatttgcactgacagacactctcaggttttcctcatctctctctctggttcagcagccccagggctccattggacatggtcaatatgcaggttttttctccttcctactcattctggaaataccaacatgtgcccttccaagggggcttttctctctcaatgtctttaggagccctgaggccaanctaacccatgtcactccattacaaacactcagctcctgaaccatcagatcatgacaggcttcttccttttttacta

SEQ ID NO: 30032 - DNA, 241 bp, Oryza sativa
  unsure (1)..(241): unsure at all n locations
  Clone ID: PAT_MRT4530_34477C.1
acgagnagttttgtatgatttcaggaagccatgcatcctctttagatgactctacgcttgggaaatgaagctatataatgagttaaaggtgagctcatatgtgctcttcaatcgatgcttataagagaattgcactggcatgatcttttacagcatctgtgtagaaccatgggattctgcttgtcttgtgttttattagaaatgatcaaaacagattgtattatagttgttaccactattg

SEQ ID NO: 30033 - DNA, 2937 bp, Oryza sativa
  Clone ID: PAT_MRT4530_34478C.1
atggaggaggaggtgatggggggtcgagggggcttggggggagggaagaagatggcggcgggggaggtggagctgaaggagaaggcggggacggcgtggagccactcgtacctgaaccagaagccatggcacccgctctcctacccgaaccagcggcggaagtggatcgccgagcagatccacgccaaccgcgcgcgccgccaggaggaggtgcagcgtgagttcgcgcaggagcaggagttcttccgccagaccgccctcttctccaagaaggacaaggagaagatggagataatgaaagctgtgagtttcatgtatgtccgcccacctggctacaacgcagagagtgcaaaagcagctgaaattgaagatgagaagaggaggtctggtgaaggtcatgcaacccaaagtgctgctgctgcaagcacctcttcaatgcctgataaggaacttgacaagacccacgcaggtccagataagaaaaacaggccaaaagatgtttttggccggccattgccaacagaacaagaatttgaagtgctgaaaaatgctccaaggttggagacaggtgctcctgcgagggttaaaccatttggagttgaagttcgtaacgttagatgtttaaggtgtggaaactatggtcatcagagtggtgaccgagaatgcccactgaaggatgtgatcatgcctaacgaggagagccgactgaaaagggatgatcctcttacagctataatggcacagactgattcaagtgagcctttgaagtgggaacttaggcaaaagccaggcatgagccctccacgtggtggatacaacccagatgatcctaatcagcagattgtagccgaggacatctttgatgaatatggaggatttcttggtggatgtgatattccagctcttctttccaacttttctgctagcaaatcaaagaaacgctccaagagtaaaagcaagcataggcaggctgagcctgctgctcatgaggaatcttcacactctgaagctgagaagagcaacaggacatcaaggagcaagagaaagaaagaatattgttctgattcgtcattttctggtgctgaggtggaagctagaaaaagcaagcaaaaatcaaagcacaagaagaaacacctgccagagtctttgtctgattcaaaagttgaagttggtagagatacaagaagacatcaaaagagagagcataggaagaagaaaagaaatatcactgagtcagagtcttcatctgattcagaagttgatatagatacaaggaaacatccgaagagggagcacaggaagaagaaaagagatgtcactgagtcatattcttcatctgattcagaagttgaagttgatagagatacaaggaggcatccgaagagagagcataggaaggagaaaagaaatatgactgaaaatgggcattcaagccgatcgagggagaagcaccactacagtgacactagtacttcggacaatgagaagcactcaatgggacataaggatgagcaatactacagcgattcaagttcttctaggagcaatcggcattcaagaaggtcaagggaaaagaggtactacagtgactcaagttctcctgagcacaataggcattcagggagatcaaaggagaagagggcctatactgacttgagcacgcatgacagggataggcattcaaagagatcgagggataagcgggagtacactgaatcaaggccttatgagagcaataagcattcaaggacattgaaggtgaactggcactactctgattcaagatttcccccaaagcccacaactccagagcaaggtaggcagcaaagtgagccaagcccaacccccgaagcatccaacgcgagaggcggcgagatgctgtcgtcttccacctccacccactgcctccaccagccgccgccgccgccggcgagccaccaattccggtcggccgccgcgttccgccgccctccgtctccggcggcggcgcccctccgcgcgcggccgcagcgcgggggcggcaccaccatccgcgccatcgacgcagcccagccgttcgactacgagtcccgcgcggcggggctcctggaggagcggcagcggctcaagatcgccatcgtcgggttcggcaacttcggccagttcctcgcccgcaccttcgcgcggcagggccacacgctgctcgcccactcccgctccgactactcctccctcgccgcatccgtcggcgcgtcctacttccaggacccgcacgacctctgcgagtgccacccggatgtggtgctcctcgccacctccatcctctccgccgaggccgtcctccgctcgctccccgtccaccgcctccgccgcaacaccctcttcgtcgacgtgctctccgtcaaggagttccccaggaacctcctcctcggctcgctcccgccggacttcgacgtcatctgcacccaccccatgttcggcccggagtcggcgcgcgacggctgggacggcctccccttcgtgttcgacaaggtccgcgtcggcgactgccccgcgcgccgcgcccgcgccgaggccttcctcaacatcttcgagcgggaggggtgccgcatggtggagatgacctgcgccgagcacgacgcgcacgccgccgagacgcagttcctcacccacaccgtcggccggatgctcgccatgctggagctccggtccacgccgatcaacaccaaggggtacgagacgctgctccgcctcgtcgacaacacctgcagcgacagcttcgacctctacaatggcctcttcatgtacaacaagaactccaccgagctgctcaatcgcctcgaatgggccatggattccgtcaagaagaagctcttcgatggcctccacgacgtgctccggaagcagctcttcgagggctcgccgcacgctcccaacaacacccccgtcaggaagtag

SEQ ID NO: 30034 - DNA, 2215 bp, Oryza sativa
  Clone ID: PAT_MRT4530_34479C.1
ttcatctacattatgaccaagccggagatagatcctaccaatatcctccccatctcattggaggatttggatgaggagcaacctcgggagattgaacaacatctaaaggcgacacaagaagcacttttggcgggttgcttcatcaagactcgtcaaggaattgttcgtaagcccggttctacaccaaaagtcaccgtcaacgaggtaagtggtgatgatattgctcttctggttcaaaagctcgtagcaagttccataaatgagactgttaatgctacttttaacaataagcttgaacatgctatgagttgttatttttataagtggatttaatcttttatgaattccaaattcagttctcttatgaccgatttgacatctacttctgttgcaagtactagtcaacctcctgttcaccacatatttagtaaaaatgatggggcaaccatgcaacatgctgggaccggtccgaccaccggcggttctctagccggtcagatcgcaccgacctttggtgtgaccggccatatggccggtcagaccggtgcaatagttcttgtgtaggaggtagatccaaccactaataattttgttttataccattatccagtacctaatcctcctgtagctactgttaaccctcagattcctccttatatacctaattcctataatgatcctgctattggatatcctcaagatgctatatatggccaatataacaatattgtgccgccgcaaccaccctttaggccaccaaacccaccaaggcctaaaaatatggaggaacgtgtgaggaacattactagggaagcgcttttggaattgagccaaggaatcgtgatagggtttacggaaagtcgtatcctaattattttgataatatcacatatcctcgtggttttagggtccctaagtttactaagtttaatggtgaggatagtagaaccacatgggaaaatataggccaattcttagcacaatgcggtgaggctagcaacacggatacttttaaattgtatttgttttctttatctttgtctggtactgcttttacatggtttacttctttaccggcaatttatattcatacttgggctcaattataacaaaattccatgattacttttacactggtgaaactgagcttaggttatgcgatttaacatcggttaggcaaaagtataatgaatctgtgactgattacattaagaggtctatggatgctacaaaccgatgttttagtttgaatataactgaaagaggtttggttgatcttgcttctagtagtttgcttgctcctattaaataaagattagttggccaacaatttcttgatgttagtcaacttatgcataaagctctggctcaagaaagccgggttagggaaagtaagaagtttgttaggtccaatgacaaaaaaaacccaatgttagtattgtggattgccctgatgatagtgattctgataatgatgatggtgatcctgatatatatgttgctgagtggtcatggactaataagccatttgtttgttctaacttaatgctgactccttgtaaagatcggcaaagtcagattaagtatagctttgatgtggccaagtgtgataaaatctttgattatcttttgtaaaaaaaaaaaaaattagattacctaaaggccatgtcattccatctccagaagaattgaaacgtcgtgcttattgtaagtggcatgattctcattctcatactactaacaattgcaatgtgtttcaacgacaggttcaatcggccatagaggaaggacgattgaaatttactgagggttctaagaagaagctagatcatgatctttttcctgtgaatactattgacttcaatgataaaaaggtgttgattcggccggagcaagccgtatttaccaatgggaaagaagtagtagttggagagcctagacacaagatggttgtgtcaaagaatacagaaaagtatgagaagaaagagtgccgaacaatatcctaataaaggaaaaagaccaagatctcctcctagcgagagatttggtccatcaccaagaccattggagccaccttttccatacaatcctcaactcatgccatgggggccttgtccaatgccgccgccaggtttttctttttcttacttcatgccatggggggcactgccgccgatgtatggtcatatgcaaccaatgcaaattcatcaaggct

SEQ ID NO: 30035 - DNA, 1460 bp, Oryza sativa
  Clone ID: PAT_MRT4530_3447C.1
tcggtgtgctatagctaccattcccccggacctgtgtgttggcgctgtcggtatctgggtgctagcttgtattttaggtgaaaaccgtgcgaaatgctgaggtgcttcctggtcgcggcggcggcggtggcgttggctgcggcggcggcagcgccggcgagggctatcccgttcacggagagcgacctctcgtcggaggagagcctgcgggcgctgtacgagcggtggcggagccggtacaccgtgtcgcggccggcagcatcaggaggcgttggcaacgacgacggcgaggctcgccggcggttcaacgtgttcgtggagaacgcgaggtacatccacgaggcgaacaggaggggcggccggccgttcaggctggcgctgaacaagttcgccgacatgacgacggacgagttccgccgcacctacgcgggctccagggcgcgccaccaccgcagcctgagcggcggccgcggcggcgaggggggctccttccggtacggcggagacgacgaggacaacctgccgcccgcggtcgactggcgcgagcgcggcgccgtcaccggcatcaaggatcaaggccaatgcgggagctgctgggcgttctcgacggtggcggcggtggagggagtgaacaagatcaagacggggaggttggtgacgctgtcggagcaggagctggtggactgcgacaccggtgataaccagggctgcgacggcgggctcatggattacgcgttccagttcatcaagaggaacggagggatcaccaccgagtccaactacccatatagagcggagcaggggaggtgtaacaaggcaaaggcaagctctcacgatgtaacgattgatggctacgaggacgttcctgccaatgacgagtcggctctacagaaagcagtcgcaaaccagcctgtggctgttgcagtagaggctagcggccaagatttccagttctattcggagggtgtcttcaccggagaatgcggcacggatctcgaccatggtgttgccgctgtcggttacggtataactcgagacggcaccaagtactggatcgtcaagaactcgtggggcgaggattggggcgagagagggtacatcagaatgcagcgtggtgtgtcgtcagactcgaatgggctgtgtggcatcgcgatggaggcttcttaccctgtcaaatcaggagcacgcaatgctgctgcaagtaacagagtggttaaagacgagatgtgagcctgtgatcgatggagggatatgatatggatatgatcgatgctttatgtgtgcttcgctgaaagtagtgctagctaagctttcgttgtcaactggatttaatcttctactgttcacggttgtactgtacgccaggtgtcaaatcagaagttaggtaaaataaattcaaagaggagcatgactaacataatgtgctcaactggattgctgaaaaaaaaaaaaaaaaaaaa

SEQ ID NO: 30036 - DNA, 363 bp, Oryza sativa
  Clone ID: PAT_MRT4530_34480C.1
atggctcgatcagaccgccgttggctcggtctgaccggctacagcactggcggctctggatcggccacccaaagcgtcgctgccagcaaccagggggccagtcagctcggccggcatgcgccagtcagaccgacaatatgggcccggtcagaccagccctggtcactcaacccagcgggcgatcaagtttttggggagcgctctcgggcgcgactgctctgcttcctctacgtcaacatatctgatgctggtgctgctggaggtggcagggataccaaggtggatgaaacaatcattttagccttggttgacatggtggtgggagcttttggtgctaggaggtcgcaaggtggtgttgggtag

SEQ ID NO: 30037 - DNA, 132 bp, Oryza sativa
  Clone ID: PAT_MRT4530_34481C.1
atggggcggagggtccacctgctgcgctgggggcatgactccagcctccggatggtggggaagcgactgcatctagcggcggcagctgcgagcgtccagattacatcgaatggctgtgatttaacagattag

SEQ ID NO: 30038 - DNA, 489 bp, Oryza sativa
  Clone ID: PAT_MRT4530_34482C.1
atggaggccgaccgcgtcatgcagtggcttaacggaaaggagctgcgctccgtggttttcgtctccttggcaatgatggcgcacgggctggagctgagcggcgctgccttcgtgcacggggctggtggtggaacggtgggcgcgcgcagtggcgcgtcggcagcgaacatgactcccaacctcaccggtcacctctcccctccctcttccaccggtgcctccccctccctcctaggctcgccgaccgtctctccccactttcccgccggtgcggccgaccgcctctctccctctctccctccaaggctcaccaacctcctatcctcttctctcccttctagactcgccgacctcctctccccgctctcccgccggcgcatttggtctctctccctccctcccaggctcaccgacctcctcctccccccctcccgtcctatcggctgccccccatctcccaggcttaggaagaaaagagaagaaaggtga

SEQ ID NO: 30039 - DNA, 232 bp, Oryza sativa
  Clone ID: PAT_MRT4530_34483C.1
gggaaccgcccggccagatctagcggtgggtcagccagcggcggggctgagcgatgcggtggcagtgacgtctggtggtggtggcggcggcgtttcgagcctagatctggcaggatggcgactgcggcgggggtggcgaggggatggcaacggtgaggcgaacccggccgcgctggctgcggagttctggacaccctgtggtggctcggagttcgtggcgatggcggcctag

SEQ ID NO: 30040 - DNA, 3481 bp, Oryza sativa
  Clone ID: PAT_MRT4530_34484C.1
aatcactttttgtcatctttcacgggtgaagggctaaggcctcagatgaattgtcagacatatggcgccttatcaattgtaaactttttctttgctacaacctttttcctgttttttttgtgttttttcggcctgagtaatttcatctcatctctttttttttttttttttttttttttatttggaacgacagtagtattaaccaactcgttctcgctacaacaatccaatacaattgaatacagaggttccagctgtttaaatacgacatggcgaaaacaacagttgaatgcatgtccagtcccagcagctgtttgtccggaatgctaagatgtaacacggcaaaacgaacaacaaatgaattcttcaaaaatgggcgctacactgctactacaacatgggcatcgtcaatcgtcattgtcatcttctaacatgggcatgtttcttccaggatttgggttgataggtcctctgtttcatgtttctctgtgagatgtagttggcctcctcctggaaggggtttggtccaccgtagtcttcctttgaatttctgattttcttggtctttccacggtcatacttcctcgtcccattcatctaacacatatccaatgctcttgctttctgaatgttttgactctcttgcctcagcatttgacacagcaacatcatcccagcatggaacagtaacttcagccaagtcccttgtcagaacagtaaaatgccggggaactcccaattttgcatgaacattttccttgaatgttcctgatttgcagaagagcctggacccagcttcggaagctcagcactagcagcggtttcactaataacatttctcttatccatgttaagttcaccactaccagtatcggctccaataacgtcttgcttgttttgcttctggttattatttttaggactgtcactatcataggcacgtttccgccctctgggagtacattgcacagtttcagacgacgttgttgttgatgttgatgcctgctgctcgcttgtgttgttacctgaacaagtggcattggccatgtcctcacaaactacagaccgtcttctagttctattgcatttctttttcttttgtacctttagtgaacctagcataacttgtctgggcccaagccacatgttcatgactggatatctcacaagtttctttgacttcaaatccacccttttaggtgtgttgctattgcacgaatcagctgcagctaccttcatggaaacttcagagctagtctgttttctggcgttgactcgttcaagtcctgatactatattgttctcacttataggaagttctttcaccgttttgtcatcttgcttgatggatttttgcaagccacacaccttctcactggaaattggatccctgctactaggtacaacaccatttgaaacaatagcatccttagttgggaaagtttgtgcagcaagccctgcccctgtgtcctttccatgggaagctggcatagaaaatggattttgatgctgggatgtttgtttatttcgctcagacaatatcgcattgccattgcccagggaagaggtatcggttaagccatcaacctttggttgcaattcctgcgacggaaccatggccactgcttggttcacaatcacatgtgtaagagatgcagatcgatctgatgaagatacctctctgtgaccagttgaagtaatttgcttagattgagcagataaggtagcaccatcaatttgaggtgcagaagctttctgtgtggaagccaggccattgttttcagaggctttaggagcttcagttttgccatctttcttcaaataatgctctcttgaagtcttgattgagttcccattgcttatgccgtgcaacctcttatcgccataaggagacgaggaaccattcaattttgcttcaattacgccgctctggatcatatcactcagacctgagatcttttcaggtattgttctcctggctggcatattagcagtgatattatccttgcgtggagtcggattcccaactctgtcacgtacataaaataacatatatgctttctgtctcaatacatctgcctcacggacttggcgtacctggttatcatcaaggttgtgccacattccactggaagttcgaacgaagcaataataatggcctgactgagtgttccaaccagcatgaaccaaaacaccataaaggctgtatttaaaatctgcgcctttagagtcgctaataaatggcttcaagtctagcattggctgaaaatcaacttttttgtcaatcttttcacgggggttgaaagggctaaagcgcttcagatgaattgtcagaacatatggcgccttatcaattgtaaactttttctttgctacaacctttttcctgcagcgttggcactgatattgcttttctcccccatctaagagctcttccgcagtgaaattttgaagtgccctcaccagagacgtggccttaccaatatcaaggctgagatccaagaaaggatcaaatttgttggagcaatgtgagcactgtgtgcatttcacctgacttcttaggcggccaccaaatattttgtgaactaagctcttctcatatgcactaggagactcacttggtactccagaaggtagacaacatttatgcatggattcaagtaaattaaccattaactcatgtgcatcctcctgccttgaattgcggaaactacgggagatgcagcgcaagttcttgacaatctgtgatggcgtcactatttttccagttgactgtagagcagtcttaacatggttttgaagagcacatagtgcacaaaatccagcagtacgacatgaagacttgtgcttcccgctctgcaaataggccgcaaatggttctgtgtacgtcaagcattgcagcaccgagttcaggtagcaagtgttcccaagattttgcaggccagcaccaattctcccgaggtagatcctggcgacgctgagctccggatccagcccaccgccgaccacctcccccttctccgccctcctcgcctccccctcgccccccgccgccacccccaccccctgcgccgcccccgcccgccgctctgtcacccgcgtcggggttcagcgtctccatccggaacccgcctcccccgaccgccaccaccgagtgcgacctcctcgcgaggtggaactcgatcctcctgtgcagcaccccctccgccgccgccgccgccgccgccacctcaacctccgccattcctagggtttcaagccccaacacagaagcggaaaccaaactacacctcaggacagacagggacacgatgatggatgggtatcggacgaatcaacactccactctgaatttttctgcgatttttccgggattaaactcgcgcggattcgatcgatacgggtgtgggtaattggtgcggcgcgctgtttttttttttcttttctttttttttttggttcgctcggccaccgttcgagc

SEQ ID NO: 30041 - DNA, 321 bp, Oryza sativa
  Clone ID: PAT_MRT4530_34485C.1
atgccaccgtttctcccacttcttaactactcactttgctttgcccctgatctggtcgggccgcctttatctcatcggagttctcaccatcgcaccgagccggcgaaaaagaagtgcagcacgaatcatgacacgattccaacaggaggatctgacataaatataattcatctcaaatttctcccgaataaagccggagtgtggcgcgcgttggtgcttgctcgtgctcgtgctgcttgctgcggcgcggccatgtctgtcacctaccacgaaccaccgaaaggcagtggcaagcaggcagagagagagacagagacctga

SEQ ID NO: 30042 - DNA, 216 bp, Oryza sativa
  Clone ID: PAT_MRT4530_34486C.1
atgcccccaccaccaacaccggcccactgccgtcctccagccccgcagctccggcgcctcgccgcccaccgccgagctgccgcctcccccgcgccggagaagaagaggaggttgccggagttggaagagagcatggagcacgaatctcaaagctcatccgatgttccaaaaattgcaaaatttggggaggtgcaatttctgtcgaaagaaggttag

SEQ ID NO: 30043 - DNA, 1002 bp, Oryza sativa
  Clone ID: PAT_MRT4530_34487C.1
atgtcgcccgcgtccggccccgcacaagccaatgtacatgggcagcacgagccccatctcgcccaggaggactccatctccagcgccgcccccacctcgatcgccgcgccgcccgaggccgccgccgatgtctccccgcctccctcgtccgtcgggagccgcctcccccagcagcccggagacggaggaggccgcggggccgacggatggagccccgccgctgcggcggtcggccagaaggggaagaagaaggagaaggcggagagggacgaggagaggaaatctgatttcctcaggaggaggagcgttcgtgttgcgtatcatggccacgccaaggaggaggtcatgtccaagaagctaccttgggatgatcccagacttcggaaggagcaggtgacgcccgtttccacaataaacaagtcacaccggaccagcgctcttggctgtatcaacaaagaggaaatagatggacttcttgttgtagaaagacccaggtttggaccaccgtatgtggcatgtaatgaatttacacttatgtggtcactgaaaaatgataggaaggtgtgggatgatattaggcttgtgcgcaagttgaggcccctgcagaattcagagaaaatatcatcccgaacccattacaagatgatcctagttgcagctcataagcatggtcgaaagccaaatcttatctgctctagtttgttcactgaggatcgaaaggccaagggcaagctggaaggtttcgagatcccgcaaaaccttgtttgccccttgtgcggcaatgttatggttgaccctgttatgattgcaacaggaaagactatggaccgtcactgcgtacgggcttggtttgataagcatggacacatctgcccagtaacgtgccagccagtctcttctaccgtgctccgaaatgagcggattagaggatacgtggaagaatggcatgaagctgaactagaggttgaggaagatgctagggtatcatttacaagaccttag

SEQ ID NO: 30044 - DNA, 415 bp, Oryza sativa
  Clone ID: PAT_MRT4530_34488C.1
ggtttttctttttttttacttcttttttccatttatacaattgatatatatttttgaaataatcataattttccaaacaaaagaatataccatcatataactctttataaacataaggaactaaattagctatacaatcttagaaatatttaatttacaccattatatgtttaccctgtgaatatttccacttaaaccgggggtactcattactttatactattattcttaaataatgcactattttaaaataaaatttacacaattatattgggtacctatcaaataaacaatctaagatccatattaactactttatatgggcaatgaacagatggacccattatttaaatcatcggacctattgtttattactttgaactattattgccaaataatactctatgttaaaaat

SEQ ID NO: 30045 - DNA, 828 bp, Oryza sativa
  Clone ID: PAT_MRT4530_34489C.1
atgaacggccgagatctatcggtccatgaccgggccacggggaacgacgacaatgacgtcagcggtgacgtcaccaccggtggcggctcgggcgtgcatgcttgccggcgaacgacggcacgacagcgcgaacagagggaaccaacatgtagagggcgacgcggcgaactcaccggtgaccaaaacaacggcggaagatcaacggatggcgacggcgtcgaggaagaagcggcggcgaccttcggcttgacgacgacggcggtgttccggcggtcgacagcgacggcggaggggcggacgagggcgagcctcccgcgtcggcggctgcttgacgacgaggacaatgatgatgacgtgggtggccctagcgtcggcgtggatggatgtgggccgttgtacgccctcgggctccgccagtggtggctatactcggcgctgcaaaactgcctctcccttgccacagcaccgtgccgcaccggcttgccgctgcttccacgtgatgatgacgatgacgatgacagcgatggtgacggggacgatgacctgccgcttctgcaggcctcaccgttgcgcttgaggggaggctgctcgcaagcagtcaccaccaccgtctgcgcgcggatgagaaatttggaatggatgagccgcgcacgagtgtttaatggagacgaggcgctgtcggagagctacgaggcggcggcggtggagagcagtgcggatatcggcggtcggcggaggccggagcttgcatggggaggcaaggccgagaaagatcagcggagtcgccacggagaagggaggaggaggaggcggcggcgacctatctga

SEQ ID NO: 30046 - DNA, 427 bp, Oryza sativa
  Clone ID: PAT_MRT4530_3448C.1
cccacgcgtccgctatagtcgcgagtggccgccctttttttttttttatttcccatcacagccagcttggtcctggggtgcgattgctgccatgtccacaaaataaacatttgaggtcaagaattattgatcatacatgcttcgcgattaaacgaaactaaaattgttcgttacccaaaacacacaccataacagtcgatatctagctaaatccctaaggctacaagcctattaccggatatccactgacagacaccccctatctctttggggatttacactttgaaaaactccgagtggtatgtctccgctcgctgaatgatcacagcacggcagatgtatatccaagcctttccagttgatgcatgtcctatatgcgatcctaattttactgtgataggcctgaactctctattgcaacgggttg

SEQ ID NO: 30047 - DNA, 312 bp, Oryza sativa
  Clone ID: PAT_MRT4530_34490C.1
atggccggcggtgcggaagcacggcggcatcccggtggagctgcacgtggcgcgggcgtcgacgggcgaggcgggagaggaggaggacggcggcggctgttggcaggcgagcacggtggaggcggctgctgttggcgccccgtcgccgcccaactccggcggcgcccgccccctgctcagcttcgtgccaccgcccgtctcggccccgtcggcgtcgcctacccgctgaagaagagaaaagagaagaaaagggaagaaataggagatgacgtagatagtatgacatgtgaggcccacgtgatcccacgctaa

SEQ ID NO: 30048 - DNA, 3276 bp, Oryza sativa
  Clone ID: PAT_MRT4530_34491C.1
atgtgccaatggcgtggtgtggcgtgtgggctgagtggacgccgcacaggccgtgtggtggcgctggacctcaccaagctcaaccttgtaggcgccatctcacctttgctcggcaacctcacatacctgaggcggctccatctccacaagaatcgcctccatggcgagataccgtcggagctcggccatctccgagacctgagacacctcaaccgcagctacaactccatccaagggccgatcccagcgacgctttcaacctgcagaggaatggagaacatttggctctacagcaacaagctgcagggccaaataccaagtgagtttggatccctgcaaaatcttcaggcacttgttcttggggaaaatagacttactggaagcatcccttcattcattggaagcctcgcgaatctgaaatttctaatcctagaagaaaacaactttacaggagaaattccatcagacataggcagactggccaatctcactgttctaggactaggttctaatcaactctcaggaccaattcctgcctcaataggaaatctctcggcactacaatttcttagtgtcttctctaataacctggtaggaagcatcccaccgatgcaacgcttgtcctctctcgaattctttgaactagggaagaacaatatcgaaggaagcatcccaacttggctgggaaacctctcatcattacttactgtgaaacttggaggcaatagactagatgggaacatccctgaatcactggggaaactgaagttgcttacatctcttgatctatcaagtaataatctagtgggcccagtacctgatactattggaaacctatattccattaagcagtttcatgtagaaaataatgagctagaaggttctttaccttcttcaatattcaatctttcctctcttgaagaactcaacttacaaaccaacaacctaaatgggaccattccacttgacttaggcaaccgcctgccaaagctccagttattcctaatatctgaaaaccagtttcatggctcaattccaccctccctgtgcaatatttctacgcttagatggatccaaacagtaaacaattctttgtcaggaaccatcccccaatgcataggaatcaaccaaaagagcttatattccgtaacttttgcagtgaatcagtttgaaacgagtaataaatatggttggagcttcatgtctagtttaactaactgcagcaatttgcgactacttgatgtgggtgacaacaagcttacaggtgagctaccaaattcaattggcaatctttccacacgtcttgagtattttgtcaccaactacaacagtatgactggcaaaatacctgaagggctagggaatctggtcagcttgaagttcatcgagatgaacaataacttctacgagggcacaataccagactctcttggcaaactcaagaacctgaatagactatatctcactaacaacaacctttcaggatccattccatcaagtatcggcaaccttcgtatgctaacattattatctgttgcaggcaatgcacttagtggagaaataccccccagtctcagcaattgccctttggaacagttgaaactctcatacaataatcttactgggttgattccaaaagaacttttcgccatctctgtcttgtctacttctttgattttggatcataattttataactgggcctctgccctctgaagtgggtaatctaacaaaccttgcattacttgatttctctagcaatttgatttctggagagatcccgtcctccattggtgagtgccagagtctacaatatctcaatacatctggaaacttactccaagggcaaattccaccatcactagatcaaccaaagggcctcctgttgcttgatctttctcataataatttatccggaagcatccctaagttccttgggaccatgacagggcttgctagtttgaatctttcattcaacaactttgagggtgatgtcccaaaagatggaatctttagcaatgcgactcctgctttaattgagggaaataatggcctatgtaatggaatccctcaactgaagttgccaccctgctctcatcagacaacaaaacacaagaagcaaacatggaaaattgccatggcaatttctatatgcagcacagttctatttatggcagtagtagccacatctttcgtgttccacaaacgggccaagaagacaaatgcaaaccgacaaacatcacttattaaagagcagcatatgagagtttcttacactgaattggctgaagcaacaaaaggttttacttctgagaacctcattggagcagggagcttcggctctgtgtacaagggaagaatgaaaatcaatgaccaacaagtagctgttgctgtgaaagtgttcaacctcaagcagcgtggttcatctaagagttttgcagcagaatgtgagactttaagatgtgttcgacatcggaaccttgtaaaggtactgaccgtatgctcaagtatcgattttcagggccgtgatttcaaggccattgtatacaagttcctaccgaatagaaatttagatcaatggctacaccaaaatatcatggaagatggtgaacacaaggcattagatctcatcacgcgactagaaatcgcaattgatgtggcatcctcacttgaatatcttcaccaatataaggcatcgccaatcattcactgtgatcttaagccaagcaatgttctcctcgacgatgagatggttgcacatgttggtgattttggccttgcaagatttcttcaccaggacccagagcaatcaagtggttgggcatcaatgagaggcacaactggttatgctgctccagagtatggactgggcaacgaagtctcaatccatggcgatgtatatagctatggtatattgttgctggagatgtttagcgggaagagaccaacagacagcgaatttggagaatcccttggcctccataattatgtcaatatggcattgccagacaggacggctagtgtcatagaccttagcttactagaagagacagtggatggcgaagcaaagacatcaaaatctaaccagacaagagaaatgagaattgcttgcattacctcaattctgcatgttggagtttcctgttcagtggagacaccaacagatcgcatgccaatcggagatgccctgaaagagctgcagagaataagagacaagttccacagggagttgcaaggagcaggagcgacaaaccatcaagacattcaaatctgttga

SEQ ID NO: 30049 - DNA, 2513 bp, Oryza sativa
  unsure (1)..(2513): unsure at all n locations
  Clone ID: PAT_MRT4530_34492C.1
atgccgccattctcggcagccggcggcgagggggcgccgtcgccgatcagcagccggccgccgccgccggagcaggcggcggcggcggcggcggaggagcagctcaacgggagctcactggagcacgacggggtgctgggcggcgaggagggcgaccggggcgggtcgtcggcgggcaaccggtggccgcggcaggagacgctggcgctgctcaagatccggtcggagatggacgccgccttccgggaagccgccctcaagggccccctctgggaggaagtctccagaacccaaaaagtaatagagaattcagaaggaaccagtacaacccctccagtagttgctttcaatcagaagggagagctacttgttggaacaccagccaagcgtcaagcagtgaccaacccacagaacactttctttggtacaaagcgtctgatagggcggcgctttgatgacccgcaaactcagaaagagatgaaaatggtaccatataaaattgtgaaggctctgaatggtgatgcttggctcccccccccacatggcaagcagtactcaccgagccagattggtgcctttgttttgaccaagatgaaggagacagctgaatcttaccttggaaaatctgtttccaaggctgtgattactgttccagcttatttcaatgatgctcagcgtcaggctaccaaggatgctggtcgcntcgntggtttggggggcgggggggaagaagccattggagctgtgcagctgcgtctcagctttcgctgcttgctcagctgtacaccttccctcagatctgccatttgcgtgaactgcgtggtggacagcctacagttctcatcccatcatgatgttgccatggacttgataaatagtgtcactggagttgacgaggaaggtcgttctcgtcaacgcattctttcctttgctgccaaaagatatgttagtgccatcgaaagaaatccggaagatccagatgcatactataattgggccctagtcctccaggaaagtgcagataatgtggatcctgattctagttcttcaaaagattcattactcgaggaggcttgcaaaaagtacgctgaagctacacgactctgcccaacgctatatgatgcatattacaactgggctattgctattgctgatcgagccaaaatgcgtggacgtaccaaagaggctgaagaactctggaagcaggctataatgaattatgacaaggcagtccagttaaattggaacagcccccaggccctcaacaactggggtttgggactacaggagctgagcgcaattgttccagcccgagataaacaaacaatcataaaaacagctataagcaagtttcgatctgcaatccagttgcaatttgatttccaccgggctatttacaatcttggaactgtcctgtatgggttagcagaggatacaatgaggtctgcaggtccagatgtctctccaaatgacttgtacagtcagtccgccatttatgtcgcagctgctcatgcattgaagccaaattattcagtttatcgcagtgctctacgtctggttcgatcaatgctacctttaccatatctaaaagctgggtatctaactgctcctccagcagacaacaccattgcaccacataaacattgggaaaggtcagaatttgtcttaaaccatgagggactccagcaggtcgatgcctctgaaagcccttctagcaaaccccttggacatatggggagaagcaaaaaatatattaaagtagctgttgaagatatcgtttcagtgtctgcatgctccgatctaacactgccacctggtgctggcctttgtatagaaacaattcacgggcctttgttcttggttgctgatacctgggagtctcttgatggttggttagatgctatacgcttagtgtacaccatatttgcacgaggaaaaagtgatgtattggcagtttatcgagtgaaccatgcgggcatcgaggtcgtaagcccaagtaaaacagttgtcccttcttccataaactcattatttacatcgtttcggaggactggtgcgtgatataagaaataaaaaccgtaatatcctctctagcctgtgaataaagatgcaacggcttgtggcaggcgagtaggttgtgtgaactgctgtcctatctccctctcaaagaaggaataaaatgtttcccctatctgtttttcagccttcaaaaaaaaaaaaaaaaaaaaaaaaaaaaaaaaaaaaaaaaatgccaggtaacaccactggtttataaatcattgtatggccgagttcgccgatcaacagatatgtccattttaaccacccatattcttttaatcagcttgattacaccgagtgtattcttccttatctcgcatcagtagagtacaagttgatctgtaggtccctaccaaagtaccaatcataggctacgtccgacacattttttgtatctttgtatgtgtaaaacatgtcaatgtcattgaagtacgactacattattcttcaag

SEQ ID NO: 30050 - DNA, 658 bp, Oryza sativa
  Clone ID: PAT_MRT4530_34493C.1
ccgggctgcaggcttgatcagtaacgggaatttcgtaatatttgtttaaatttgattaattttgttcaaaatgttggaaatttcggaccgaaatttctagcaaatttcgccatattggcactcccaatacaaataccgaaagcaaaaacgaaagattgaaccctggctatgagcctgtgagctgcttgctgtgcaaatccatgagttgtttttccactgaacaatcactaaagcgccgaaggaatcattcacaatgtccgtaaaacatttgccctgctttagatgctcagagtagctctctcgcatttactgaatgcatccatgtttcatactgtccagcacaaagatagggtgccgcaaaggtaaattctatttttaggtgccctctagctgtttgatgtatttctctacagaatcaaatgcaaatatgaagggtcatcgccacttcaaaattcaggtcagtttgagatcatgtcactgtgtccctattgactttgcctagccaacataaaacccttgacttgaaaagtatccatgacaactttattaaataaaaagggatgctctacactggcttgggtttcagagtagaaatttgattagatttgcaagatgttctttatgtgtttttcatgcatagttctctttaagggactta

SEQ ID NO: 30051 - DNA, 737 bp, Oryza sativa
  Clone ID: PAT_MRT4530_34494C.1
gaactagatgacaatcgatactcatctcatctagtataatgtagtcgtacttcaatgacattgacatgttttacacatacaaagatacaaaaaatgtgtcggacgtagcctatgattggtactttggtagggacctacagatcaacttgtactctacagatgcgagataaggaagaaaacactcggagcaatcaagctgattaaaagaatatgggtggttaaaatggacatatctgttgctcgacgcactcgtacatacaacaatagatcaaccagtaatgatacctgccaatacatcactttttcctcgtgcaaatatggtgtacactaagcgtatagcatctaaccaaccatcaagagactcccaggtatcagcaaccaagaacaaaggcccgtgaattgtttctatacaaaggccagcaccaggtggcagtgttagatcggagcatgcagacactgaaacgatatcttcaacagctactttaatatattttttgcttctccccatatgtccaaggggtttgctagaagggctttcagaggcatcgacctgctggagtccctcatggtttaagacaaattctgacctttcccaatgtttatgtggtgcaatggttgttgtctgctggaggagcagttagatacccagcttttagatatggtaaaggtagcattgatcgaaccagacgtagagcactgcgataaactgaatattttggcttcaatgcatgagcagc

SEQ ID NO: 30052 - DNA, 174 bp, Oryza sativa
  Clone ID: PAT_MRT4530_34495C.1
atggggattgccggatcggcgaggcaagagaagcaaccaagagcagcaagggtgccggtcctcatcggcagtgacgcgcacgcagcgtcccctccggtgttcggcgtcttcacgtcttccccggcgctgggcttctccgagcatttcccatggctgacggcgaggcaaagctaa

SEQ ID NO: 30053 - DNA, 368 bp, Oryza sativa
  Clone ID: PAT_MRT4530_34496C.1
aaaggaaaatatcaacttttgcacacgggaagcccataatttttgcaagacacacaagtaatagaccaacagacagcacaggcggtttatttcagggaatacgcatgaaaaggaaccccttgacttccaaagaaaaagagggcatataaatgagcggaaaggggaggaagctaccaaacaaactaacaccccaggtgctcccggggaaaaaataacgccattaaagaagacggaatacagaggatccaagggccaggattgaaggcatgaaaaacaggggccccacagatggggggagcaaccactctgaactacttgacaaaagggggggggccaccataccgctaagggcacacggccccgcaaaa

SEQ ID NO: 30054 - DNA, 381 bp, Oryza sativa
  Clone ID: PAT_MRT4530_34497C.1
aaaaaagagagaaaaagcggaaggccacctatcccatggcaccaccaccaccctgacgccgacgccgacgccgactgactcacccgccggcgagcccacgccgcccaccgacggagacggccatgcccaccggcgttttctatctcgacaggctgccctgcaagctcatcctccgacgacgaatatcctccctctccggctacgccgactcctgctcctgctaattgcggcgactactaccgcgccagacgctgaccaccacgacccttcgccgacttccaatacctccttattatgaccacacggcgctgacgctgatgccaccaaggacctacaccccgacccgacctcctacctccacctgagtccttgactccccaa

SEQ ID NO: 30055 - DNA, 153 bp, Oryza sativa
  Clone ID: PAT_MRT4530_34498C.1
atgacacgactaattgggccaaagttcagaagtctgtggaggggagaagtccaagaagccagcagccaaattatgggctggttgggccggcctctggttcggccgaacccccctcatcgccgttggatgcagggtttctcctggacggtgtag

SEQ ID NO: 30056 - DNA, 543 bp, Oryza sativa
  Clone ID: PAT_MRT4530_34499C.1
aaaaaaaaaaaaaaaaaaaaaaaaaaaaaaaaaaaaaaaaaaaaaaaaaaaaaaaaaaaaaaaaaaaaaaaaaaaaaaggggggaaaaaaaaaaaaaggggaggggggcgcccttttttagggtaccccttcttccggccgcgtcttttcaaggtcttcgcttttttttcgtgtcccttgcatttcatttctttgttcctttggttttcccccgttttgcttgggggccccttgtttttcccccttttattgggttgcccttgcttccccttttcttcaccgggtttaatcccgaaccgttctcccccgctggcttttccaacaagtggcccgccctgtttgccttttgggacccttctttttccggtcttttaaattggccccttccttttgtctcccccttagtgcccggttcttttgccatccccctcgggccccctcttttgttttcctccccttcctttcccgcccttttcgcttttttcccctttttggccccaaatcgggggttttctttggggttcccttttagggcttgccccc

SEQ ID NO: 30057 - DNA, 545 bp, Oryza sativa
  Clone ID: PAT_MRT4530_3449C.1
cgaggtccacatgcgcgcaggatgtggctcgacaagctgcccccctgcacttcctacgaggagcgctaacagtgcactgcacccgcgctgtcccgggataccgggagctgcaaacaagcacagcagcaggctcgggtggccaggtcgtgctcacacctggagctccagggggatggtcttctccgttccggagccacagccatgggacatgccacagtgaatgtgcagagcacagccagctgcagatggttgatgtggagacttgccttgtccccaccaccgggctgccctgcggcagggtgcagttgcagtggcacagcagccaaactgcttgtttttaatggttaatgggattgcagatggaaaggaataatggatttggatggccaaaaactgttgagtgctggatgtgtgaaactgtttgtttactttgaatgtgttaacatggtggatgatgtgaatgtggaatgcccttgaaatgccctcgttcattcaatgttttggttttgcacatttcgatgaatgtttggacccaaaaaaaaaaa

SEQ ID NO: 30058 - DNA, 1618 bp, Oryza sativa
  Clone ID: PAT_MRT4530_344C.1
atggctgagaggcggtggatcggaggtcttgctggcagccgccgggatggaggagttgctcttcgtcgccgtccgcatgtcttcacgctgcctcaccagatctggcggcaacacgaaccggcgccaccggatcctctctatgctccaaccatgccatatctgcatggcggcaatacgagggagaggacggagacggcggcgccagaggtcttgccgggggcggtagggatggaggatgcgccgccgctggatccccttctcttttctctcgacatgcgctttggctctttgccaccgcgtgaaagccctgcagccgccgcccccaccgcgtggaagccccgccggagcgccgcgcacgcccgcccgtccttgctgccgctggcgcgcgcgcctacatgtcctcaacggcgctgccgcgccgcgtgcccgccctcgccgccgctgccctgccacgcgccgccgatagcgcggcgcgaggtggttataacggagaggcccgagaagtcgcgggttctggaagctgtcagcttccgtcgaccgaacgaccaagcagccgccgcggctggcggctgccactcgctttgtgacgtgcaagagatttcggcgtgcgtggcggcgatccaccggaccagtccaaacgccaagctagcatacgggcggatatctttgcttgcacttggacgagtacaagtatttggatccttgctagcatacgaccggctcccgctctcgcagatcagatcggagacgaagaagatggcgtccaactacgtcgacaccaccggcgacgagggcaggttccacggccaccacagcaccaacaccacgccgacgggcgccgcggcgtcgtcgccgaggacgatgcgccggagcttctccaacgcctcctccggcagccacggcggcggcggcggcgccaagtgcgtgtgcgcgccggcgacgcacgccgggtcgttcaagtgccgcctccaccgcaccaactcccagggccacggccacggccacccgcacccctcccctcccacctccccggccgccggcggcgcctccgccgcgccccggccgtcctccgcctcctcccgcaccgtcgaggcccagtgacccctgacctccccggccgcaccaagaaaccaaccaaccaagaagaggaggagaatcagagtgggggagaagagagtaaaaaagagcatcgcgtatcatatcatcggaagggagtttatttttgatttccctcgttgtgatctccatgttcttggaagatttttcttccatttttccttttctttttcttcttcttcttcttccttcttttggctttatgggatctctcctactacatggccaaaccttcctcttcaccatgatgagaaactccaaatcatcccctgctcgaatcagctccactggctagtagctgctacttctcctccctctattattataatctattggatgatgataagctgataaatggaaagataagggttacccttctgctctactatgtaattactagtaccattttaccatcctattgataatccaatccccacctggttgattgagttcttgtctgaattttagtgatgttcttgaaagtactcctaatttgttggtt

SEQ ID NO: 30059 - DNA, 247 bp, Oryza sativa
  Clone ID: PAT_MRT4530_34500C.1
aagcttcactagctggggggtcattcaacaaattattgacttgaattttacaaagtcaagacaaacttagataaatatctatagtttttgcaaaattatgtctatatgttaatagtcttctgagatctagaaattttcatggattccgtaatcaagagatatttctgatgtttcataagagtttctgttgtttaatgtttaatatgatctaattatatttcgataagtttccaaaaaaaaaaagctt

SEQ ID NO: 30060 - DNA, 203 bp, Oryza sativa
  Clone ID: PAT_MRT4530_34501C.1
cccacgcgtgcgctctactgctctaatcttaagcatcctgctcgtcggactcgcatctccactcgccgtgggcgagattcagaccggactcaacggtctcataaggatcgggaagctcgtggccagggtggccctccagagcgaggatggccagctcaacaccgttaaccgaccctttcatcaccaccgactacatggaccta

SEQ ID NO: 30061 - DNA, 951 bp, Oryza sativa
  Clone ID: PAT_MRT4530_34502C.1
gaaaaatataatcacagagagagcactgttagatttataaatagtactttcttgttcctcctcccgttcttgctcctcgcgttcgtctactccctcttcttccccggctacttcagtatcctgccatctctcgccgccaggtgcagcaacagcgtggcggcgacgccggcgaacgcgacggggccggcggtggatctgcgcgtgctcctcggcgtggtcacccgggccgagatgtacgagcggcgcgcgctgctccgcctggcgtacgcgctccagccggcgcccgcgcgcgccgtcgtcgacgtccggttcttcgtgtgcagcctcgccagggaggaggacgccgtgctggtgtcgctcgagatcatcgcccacggcgacgtcgtggtgctcaactgcacggagaacatggacgacggcaagacgcactcctacttctcgtccctcccggcgctgttcgccgacgcgccgtacgactacgacccctacgactacgtgatgaaggccgacgacgacatcttcctccggctgccgcggctgctggcctccctgggcgcgatgccgcgggaggacgcgtactacggcgccaccatcccgtgcggcagcatggacccgttcagggagtacatgtccggcatggcgtacgcgctgtcgtgggacgtcgtcgagtgggtggcgacctccgacgtgccgcgcaaccgcaccgtggggccggaggacaggatgacggggcagtggctgcggctcggggggagagggaagaacaggttcaacgccaagccggccatgtacgactacccgctgccggcgccggtggacaagtgctcgcacgagtttatcccggacaccatcgccgtccaccgcctcaaggacaacccgcgctgggccgagacgctcaagtacttcaacttcaccaagggcctcgagccctcaaagttctacaagataaac

SEQ ID NO: 30062 - DNA, 1238 bp, Oryza sativa
  Clone ID: PAT_MRT4530_34503C.1
atgaatctggatatatctttatccagattcgttactccgatcgacctcgtctcgtcgagcgccaagtccggctccggcgacgcagcgccgccgccacacgtcgtggaggacttcttcggcgtcatccagctcctcagcgacggctccgtcgtgcgcgccgacgacgccgccctcctcgccatgcccgaactccaggacgtccccggcgttcagtggaaggacgccgtgtacgacgccacgcacggcctcagggtgcgcgtattcaagctggccgccgccgccgccggtgacgatggaggtaagctccccgtgctcgtctacttccacggcggtggctactgcatcggcgccctcgaccagtcccccttccacaccttctgcctccgcgccgccgacgagctccccgccgtcgtgctctccgtccagtaccgcctcgccccggaacaccgtctccccacggccatcgacgacggcgcagctttcttctcctggctgcgcggcgccggcagtgcggatccatggctcgcggagtcggccgaactcgcgcggacgttcatctccggcgtgtcggccggcgccaacctggcccaccacgtcgccgtccgcgtcgcctcggggcgccaacccgtggttgacgacgtcgacccggtggtgcgcgtcgccgggtacgtcctcctcgacgcgttcttcggcggggtggagcgcacggcggcggaggccaacccaccggccgacgtgtccctgctgaccgtcgagatggccgaccagttctggcgcctggcgctgccggcgggggcgaccagggaccacccggtggcgaacccgttcggcccggagagccccagcctggaggcggtggcgctgccgccggcgctcgtcgtggcgtccggcggcgacgtgctctacgaccgcgtggtgggctacgcggcgaggttgaaggagatgggcaaggcggtggagctcgtcgagttcgagggagcgcagcatggcttctcggtgatacaaccatggagcccagaaaccagcgaggtcatccaagtcctgaagcgatttgttcacaaggcgatacgcccagctgagggttgaaaaggacaaggcaaattgagtgggataatatccactcttgtttactttcaatttcaacatttgtgttttgtttgggttataaaagtgtttgttaaatatccattatctaaaaataaaaaatataaaagtgtttgtttaaaaaaaaaaaaaaa

SEQ ID NO: 30063 - DNA, 576 bp, Oryza sativa
  Clone ID: PAT_MRT4530_34504C.1
atgaagaggggcagcgggggggtaagggccggcgctgccagggtgggggatcgaagcgggcgtagacctaagtgggcgagtcaggctaggagggagcgcgcggcgcgccttggtggagagtgccacggaccaccgcgccgccgtacgccggagcccgcatctgccgccgtcgaccgcgctagccgccaccacgccgccctccgccggagcccgtggccgccgccgtcgaccgcgcctgccgccaccgcgcagccctccgccggagcccgtggcgagctagccatggcagggagggagctagccatggccgccggcgagctcttcacgcgcgagatggaggaagaagaagagccaggggcatttctgtccgggatggcattttggcgaagacactctgatatgcaattttctcaccgcgaggcggcgatgtcgccggcgagcagaggcgacgaggcgttcggaagaagccactcttgtgacatggcaattaacgatttgccacaccctgtcaatgacatgttgacgttgggcctctcgagggaagagacggacgatgcagctcaggcccataactag

SEQ ID NO: 30064 - DNA, 480 bp, Oryza sativa
  Clone ID: PAT_MRT4530_34505C.1
atggcggtggatagggctccggccgacgggagaggggtgacgccgacgggagagggatggcggcgtaatgccgccggcgcagcaccccaccttcctctgtgcctcctccccggccgctcccttcccttcctctccgtctcccatcccttccccttcctctcctcctcctcccggcccacggcggccggagctgccctccccagtcctctcccttcccgccgtcctaagctccggtgtccaccagatccgggcgacaagagctcgggggccaccggatccgccgtcctgagctcgggggcgaccagatccggcagccacgagctcctatgtggccatatccgccccctcacaccgttgcaatctaccacctccgtgttcctgccgtactccgtctctgcgctccaaagcgttctaagacaatattatatgtcagcaggaccaactaattttcctctctcgagccattttgtgaagacctga

SEQ ID NO: 30065 - DNA, 118 bp, Oryza sativa
  Clone ID: PAT_MRT4530_34506C.1
ctctccactgaaacacccgaagttcgtaacccctgtggtccaaaagagaacggctcaaacctgaaagtccgaaacacgttcccggccaaccgcgcggccttcagcccagccgcgtccg

SEQ ID NO: 30066 - DNA, 273 bp, Oryza sativa
  Clone ID: PAT_MRT4530_34507C.1
gcaagtctgaaaatgagacacatggtattcaacggtaattatttgtagggtctgcgcacgcataccatgctacacctatattagtagagtacatgaacccgaacgtttgatcaacatcagctacatgctgagagaaaggaggttacggtcacaattgcacacaatatatggcctctgaatcatcatgtgtataatctgctgtggctaaagagcgacataaataacatgaatcgtgctctgcataatgccccatctgcagccagaaaacctgtg

SEQ ID NO: 30067 - DNA, 153 bp, Oryza sativa
  Clone ID: PAT_MRT4530_34508C.1
atggacggcagagggagccaggctggcgttggacgcgaacccaaggcggcgacgtcacctggagtcgaaaggtccgggaagcgggagctcgtcttggaggatgtggagcttgccaaggtagttgagatggagaccgtgttcgctttagtttga

SEQ ID NO: 30068 - DNA, 2487 bp, Oryza sativa
  Clone ID: PAT_MRT4530_34509C.1
cccgggctgcaggctctctctcctcccctcccatggcgatggcaccacgcgctctccgcctcctcccgcgcctactcccgcctcgccgccgccgcttccgacgccctcctcctcctccccctccgcgcatccacctccacctcccgcgtcgtccgcctgcgggccgccgcggcctcggcgccatccgaggtcctcgactccaccaacggggccatcccctcggggaagggcggcggcgggcagcagtacgggagggagtatttccccttggccgctgtcgtcgggcaggatgcaattaaaactgctctgctgcttggggcaattgaccgtgaaattggaggcatcgccatctcagggaagcgtgggacagcaaagacagtgatggctcgtggcttgcacgctatgcttccacctatgaagtggttatgggaggagggtttggctaaccaagttcaatatgatgctgatggtaacttgaagaccgagattatcaaaacaccttttgtgcagatcccgcttggtatcactgaggataggttaatcggatcagtcgatgttgaagcatctgtgaaatcaggaactactgtgtttcaacctggccttcttgctgaagctcacagaggcgttctttatgttgatgagataaatctattggatgagggcgtaagcaatctacttctgaatgtcttgactgagggagtcaatattgtggaaagagagggcattagctttcgtcatccatgcaaaccacttctaattgctacttacaacccagaggaaggatctgtacgtgaacacttacttgatcgtattgcaattaatttaagcgctgatctgccaatgagttttgatgatcgtgtggcagctgtggatattgcaacacaatttcaagagtccagcaaagaggtttttaaaatggtggaagaagaaactgaggttgcaaaaacccagataattttggcaagagaatatctgaaagatgttgcaatcagcacagagcagctcaaatatcttgtcatggaagctatacgcggtggctgtcaggggcaccgggctgagctgtatgctgctcgagtggcaaaatgtcttgctgctatggaagggcgtgaaaaagtatatgatgaccgagctagttattctacctcgatcaatcctatctgataacccacaggagcagcaagaccaacaacctcctccacccccaccgccaccccctccacaagatcaagattctcaagaagatcaagatgaagacgaggaagaggaccaagagctcattagctgtactcttggacaggacgatgatgaagaaaatgaacagcaggaccagcagatacctgaggagttcatttttgatgctgaagtgcaagctcaaagacggcgagggaaagctggacgagcaaagaatctcatattctcatctgataggggacgatacataggttctatgcttcccaagggtccaataaggaggttagctgttgatgccacacttcgagcagctgcaccataccagaaactgaggagagagaaagatcgtgacaagacaagaaaggtttttgttgaaaaaactgacatgagagccaaaagaatggctcgaaaagcaggcgcactggtcatatttgttgtggatgctagcggtagcatggctctgaatcgcatgcagaatgcgaaaggtgcagcattaaagttgcttgcagaaagctacacaagcagagatcaggtttcaatcattccatttcgtggagattttgctgaggttcttcttccaccttcaagatccatagcaatggcccgcaatcgtcttgagaagctaccatgtggtggcggttctcctttagctcacggccttagcacagctgtcagagtgggtttgaatgctgaaaagagcggtgatgttggacgtatcatgattgttgcaatcaccgatggaagagctaatgtgtcactgaagaaatcgactgacccagaagccacttcagatgctccaagaccttcttctcaagaattaaaggatgagatacttgaggtggctggcaaaatatacaaggctggaatttcacttcttgttattgataccgagaacaagtttgtatccacaggatttgccaaggaaattgcaagggtcgcccaaggtaaatactattacctgccgaatgcttcagacgctgttatttccgccgccaccaagactgcactctcggacctgaagagttcgtgatcctggagagcgttttaccttcagataatgagtggtttttaccttttaccttgtttggtgcagcagtgtccatgtttcgtgtaactttgggacgtttcggctgtgataaccaattttggcataggatttttaccgtgagagttggaattcgggcgtagcaccgtgtaaagaatcatataatccctcttctgtctaaataattggccatgtaaatatggtgttattgcgtacagtattaagtaataataacattcataatttatgtg

SEQ ID NO: 30069 - DNA, 205 bp, Oryza sativa
  Clone ID: PAT_MRT4530_3450C.1
ggtggggtttttattatttactttttttttcttttttctatgcattatttgcaatctgtactgttaatatgttatcattgaggagccaaaagaaacaggtttaaagtcagttgaatgggcgacccagtgacaaaacaaagacacaaagctcagaggaaggaggtctaaggacacaggactcgtgggcatccaggtggcaccaagg

SEQ ID NO: 30070 - DNA, 756 bp, Oryza sativa
  Clone ID: PAT_MRT4530_34510C.1
cccacgcgtccggcctgcgggccgccgcggcctcggcgccatccgaggtcctcgactccaccaacggggccatcccctcggggaagggcggcggcgggcagcagtacgggagggagtatttccccttggccgctgtcgtcgggcaggatgcaattaaaactgctctgctgcttggggcaattgaccgtgaaattggaggcatcgccatctcagggaagcgtgggacagcaaagacagtgatggctcgtggcttgcacgctatgcttccacctattgaagtggttgtaggctcgattgcaaatgctgaccctaactacccagaagaatgggaggagggtttggctaaccaagttcaatatgatgctgatggtaacttgaagaccgagattatcaaaacaccttttgtgcagatcccgcttggtatcactgaggataggttaatcggatcagtcgatgttgaagcatctgtgaaatcaggaactactgtgtttcaacctggccttcttgctgaagctcacagaggcgttctttatgttgatgagataaatctattggatgagggcgtaagcaatctacttctgaatgtcttgactgagggagtcaatattgtggaaagagagggcattagctttcgtcatccatgcaaaccacttctaattgctacttacaacccagaggaaggatctgtacgtgaacacttacttgatcgtattgcaattaatttaagcgctgatctgccaatgagttttgatgatc

SEQ ID NO: 30071 - DNA, 422 bp, Oryza sativa
  Clone ID: PAT_MRT4530_34511C.1
cacagccttgcatgccggggagctactaccgaggagatcagcgattattgctgatatgatgctgctgctgatggagtgatggcaaggaggaggaggagaaaagatgagcatttgatgtgtgctgctagctgggcttggtgagctcctgctggctcaaaaatggagcatggaggtcactaggaggagaaccatatttggcaaggacggtggtctcgcctttgctttggccagatctgatggatgataaactactacatgcatgatataatggatagcagaagcaagctaagccaccaccaccaccagcagcaggagcactagctgcaagtctctgcaatatcaccaatactaagcagtacaggtgcacacgatgaagagggaacaacagctgaaaagaagtgaaacataggctgcttctgcag

SEQ ID NO: 30072 - DNA, 851 bp, Oryza sativa
  unsure (1)..(851): unsure at all n locations
  Clone ID: PAT_MRT4530_34512C.1
gcagctcaaatatcttgtcatggaagctatacgcggtggctgtcaggggcaccgggctgagctgtatgctgctcgagtggcaaaatgtcttgctgctatggaagggcgtgaaaaagtatatgtggatgaccttaagaaagctgtagagctagttattctacctcgatcaatcctatctgataacccacaggagcagcaagaccaacaacctcctccacccccaccgccaccccctccacaagatcaagattctcaagaagatcaagatgaagacgaggaagaggaccaagaggacgatgatgaagaaaatgaacagcaggaccagcagatacctgaggagttcatttttgatgctgaaggtggtatagtagatgagaagctccttttctttgctcagcaagctcaaagacggcgagggaaagctggacgagcaaagaatctcatattctcatctgataggggacgatacataggttctatgcttcccaagggtccaataaggaggttagctgttgatgccacacttcgagcagctgcaccataccagaaactgaggagagagaaagatcgtgacaagacaagaaaggtttttgttgaaaaaactgacatgagagccaaaagaatggctcgaaaagcaggcgcactggtcatatttgttgtggatgctagcggtagcatggctctgaatcgcatgcagaatgcgaaaggtgcagcattaaagttgcttgcagaaagctacacaagcagagatcaggtttcaatcattccatttcgtggagattntgctgaggttcttcttccaccttcaagatccatagcaatggcccgcaatcgtcttgagaagctaccat

SEQ ID NO: 30073 - DNA, 2229 bp, Oryza sativa
  Clone ID: PAT_MRT4530_34513C.1
ttaactgtcacgtgttccaatcggcagaatcaatttccaaactaattctccttctgaaaaggatttattcaccacttttttgttataatgacgagcaactcgttccttatccatagtaacttttgaaagggctctcaatctagactgaactaggtcttctatttcatcagccatgagattataatattcatcggctgttatctcatcttgtaaacctatccttcttgagccgatcttaatctcccctggtaaaactgcctcatgtccataaacaagcttataaggaggaacttgaatcgatacatggcaagccatccgataagaccataatgcttcagctaatcttgtatgccattgccgaggataatcagaaatctttctcttcatgaatttgatcaaactcttattatatgcctcggcttgcccattagcttgtgcataatacggagaggaattcaacaacttgatacccatgctatcggcaatctgaacaagttcatcggacacaaagattgatccttgatctgttgttatggtctgagggataccaaatcggtagatgatatgttccttgacaaattgtatagcatcccccgaatcaaccttcttcaaaggaatagcttctacccacttaagaaaataatcggtcgcaaccaatataaatttatgccccttacttgaaggaggattaatttgaccaatcatatccataccccatcctctgaatggccacggcttgatgataggattcatagccgacgctggtactctttgaattgctctaaacttctgacaatcctcaatatctttcaccatcggcttatatccagatgccccccgagccaaatcattagcttcaacgttttgctcccgagacacatgctttaaagttaccagccgaaatccatccatcaattctcggcacttctcgttgtagaccatcaacacatcattcttgcattcatattctcctgccaattgactgatcaccaacaaggaatcacccatgatttcaacagcatcggcttcaacctccctgagcaattgcaaccccttaagaactacttcatactcagcctgattgttagttgcgtaaggtttaatagtataagcaaactcaaaacttgcccccaaggggaaattataaccaagccgataccacaaccatgagtgcacaccgatcttgccgatcaacttctgcaattgtttcttgtcttctggaggtagaatctttttgattgcattaacactcctttgagttacttcaatccccctctcatgaacaagaaagcccaaaaactgccaagccgatacaccgaaatcacacttcgtgggattcatcttcaagccatatttccttgtcctctcgaaaaccttcctcaaatcggctacgtggtcatctacctcttttgatttaacaaccacatcatcaatgtaaacttcaaccaacaagccgatcaagtcatggaatatgtaattcatggctctctgatatgtagccccggcgctctttaagccgaaagtcatcacaacccactcatacaagctaattgcaccaggacacctgaaagcagtgttatgaatgtcttcttctaccataaaaatttgattgtaacctacattgccatccataaaactgataatcttattccctgaagcagcatcaaccaactgatcggcaatcggcattgggtactcatccttaggggtagctttgttcaaatcctgaaaatcgatgcacaccctaagcttgccgttcttcttgatgactgggactatgttggaaatccactcagcatatcggcaaggtctaataaaaccagcatcatataagcgagtaacctcagccttgatagcatcatacatatcggctttacatctccttggaggttgctggtatggtttatatcctggtttgataggaagccgatgttcaacaatcgatcggctgagtcctgtcatctcgtaatattcactggcctggaagatctgcttaacttcagtgcaggtccaaaatcttgcttttaggttcgtaagcgtgccagttgatttgatccaaacacgactcttatctctaacaaactctaagataccataagtctttgcggcagacttttgcctaaacatatctctcctcttcctcctcctccccttgcctctccgctcctccccctcgccgccaccgtcaccaacacagccgccaccgcacttgtaggagcaacgtgtcat

SEQ ID NO: 30074 - DNA, 1292 bp, Oryza sativa
  Clone ID: PAT_MRT4530_34514C.1
ccgcccccggcccgccggactcggcttccagcttcctcccggagaactcctcggataggcgatggcggccgcggtcaccgcgccaccgtacgcggcgggggcgccgcgccgccggcttctcgccgctcgtccgctgggccgcggcgccgcgctcgcgccggccgcacgcacgtcgtcgtcctctgtgacgctcccgtgcagggacctcgccgcggcagctgggaggacgtcgccaggcgccgcagcggccggaccgaggtggcgagcgtcgacgacgacgaggcgtgcgagctggtgagcggcgcggacctcgtcatcggtggcgacgtcgacgagggcgacggcgtccgcgcctacctcctcaaggccgtcaagaacaacaacggcaccggcgtgctcctcctctccgacgtcttcggcttcgaggactccgccacccgggacttcgcctaccgcgtcgcgtgccacggctacaatgttcttgtgccggacttgttccgggggagcccgtggaagaaggcggagaaggacggcttcgacgcgtggctcgccgggcacgcgccggagcgggtgtcgggcgacatcgacgcgtgcacgaactggctggtggacgagttcacggcggcgggggtgtcgaggaagctcgggataatcgggttctgctacgggggcggccggctggtggagacgctggcgcgcgacggcggcggcggcggcggcgcctacagcgcgggggtctgcttctacgggtccaggatggacgcgtcgctggcgccgcggctcgccgcgcccgtgctgttcgtgtgcggcgacggcgacccgctgtgcggggtggagacggtgcgggcgctggaggcacgcgcgaggggcgccagggccgccgtgtacgccggcagggggcacgggttcgcgcaccggccgcagtcgctggaggacgacggcgacgccgaggacgcgttcgcgctgatgcgggggtggctgcacgaccaccttctcgcctgatcatccttgttccgtttcaaactgttcgctcgtagacattggacagggttctatttatactattgactatgttactgcttgtgtaaatgtgtaatgcacatgggcattgcattgcacttgagaaatgagtagttgagtattgtaagttcaatagtttcgtttcatgttttggagtcggagctttcaatgtgtcactctggctgtggcatatttctctccaaaaataacacgaaacctttttagttgtccaaaaaaaaaagagagagagagaactagtaaaaaaaaaaaaa

SEQ ID NO: 30075 - DNA, 110 bp, Oryza sativa
  Clone ID: PAT_MRT4530_34515C.1
gcgtccggatgctgccggggtatttgcgccgtcatcatatgcacatacccggaggccgttgccgttttcatccatcacaaacgacggtttctttacggtgtccttgttgc

SEQ ID NO: 30076 - DNA, 786 bp, Oryza sativa
  Clone ID: PAT_MRT4530_34516C.1
atgtatgttaaggttgaacttaagagattccgcattgtgaaggaggtgggaacaatagtaatgaatgttaggatctttgcttattaccagttgatgcaagtgtgccagagggatccaacagcattcactggaaacccttcctttgcttatggacatgaagcagatggttatatcgcaaatggacccttgggtggcatgaccagtcctcaactccgaacctcactcggtggatttgagtttcagccttccaaggtatgccccagaaacttcatcatctttgatcaaactgatgacaaagggcgcatcatgtgtcatcctgcattggtgagcaagctaaacccttcagccaccaatgctttcccttcctatcccgagccaatttgcagaagttccggccaagataacggaaacctggaagaagtttcctcatctttcaaggaggatacaagagagattgatgcactgctaagctctgatgaagaaagcgatgaagatgatgtcaagagtactgggcgtactccggactgcttcgagagtgattcccttgattcatcttcaccaccaaggtctaggaaaatgcatcattcttctagccagagttcagtcttccatggatccatggacactgttactcatgagaggatgagaaatatggtcacagttcttaggggaataatccctggtggagaccaattggatacagcctctgtcattgaagaagctgttagatacctgaagtttctcaagatggaggcgaagaaacttggcgtggaggtttcggataac

SEQ ID NO: 30077 - DNA, 2179 bp, Oryza sativa
  Clone ID: PAT_MRT4530_34517C.1
aaaatgagacagattcctttttttttttagtatgataaatccaaagtacattatttcatatcgtaatttagttcacaatgacatgatcttgttcggtacacaatactacaatttaacaagccaagtatgtacattatttaagtagtgcaacaaatataagcagagcttgaaaaagagcaaagcacggtgatctgaccataggataggtagagctgaggtgcttaagtcacaaaaggcaaaggtaagcctgaaaacataatgcatcatccagaacttcgtctgacgatctaaccatagtgccacaccatgatgagggagggaaagctcacagcgcagcaacaccatgctaccagacatcaagcatcagaatcccacaaacaatacctcttttgaggcctgcagaaagaagcaaaagctggctgcctgccttgccttccacacccacacaaagtcaatcaagtaacaatgatgataagggccttaccaaagaccatatatacacacattgatgccttcagattttatttatgtgtgagctttagtatcgccactgtaccagttgccagttctagttatccgaaacctccacgccaagtttcttcgcctccatcttgagaaacttcaggtatctaacagcttcttcaatgacagaggctgtatccaattggtctccaccagggattattcccctaagaactgtgaccatatttctcatcctctcatgagtaacagtgtccatggatccatggaagactgaactctgggctagaagaatgatgcattttcctagaccttggtggtgaagatgaatccaagggaatccactctcgaagctgtcccggagtacgcccagtactcttgacatcatccttcatcgctttcttcatcagaagcttagcagtgcatcaatctctcttgtatcctccttggaagatgaggaaacttcttccaggtttccgttatcttggccggaacttctgcaaattggctcgggataggaagggaaagcattggtggctgaagggtttagcttgctcaccaatgcaggatgacacatgatgcgccctttgtcatcagtttgatcaaagatgatgaagtttctggggcataccttggaaggctgaaactcaaatccaccgagtgaggttcggagttgaggactggtcatgcctgaaggggcaccaaaggcaggtgaaacaggaaccctgtagttgcactgaccaccccaggggccccgtgcgctataaccatctgcttcatgtccataagcaaaggaagggtttccagtgaatgctgttggatccctctgcatgagtcaatggctgatactgaacagaaacgcacttaagtacagacctctacctgatctgatgtagtagctacactacccaaacacaacgagaattctacaatatgtttgcgactcgcaacaacaagagactaaacaccctaccacaaggtagccatcatgaatgcactgcttttgttgttgcgactttataccagacgaaagataaatagcagataaagtgactaatctcgactcctgtatttggactacgtgacaggcttaagcaattgacggaagtactcagcctggcacacttgcatcaactggtaataagcaaagatcctaacattcattactattgttcccacctccttcacaatgcggaatctcttaagttcaaccttaacatacattctcaatttttacacacccaatgtcgtcaagaacaaagaaccacaaaggaaaaggattctcctgtaaatgtgaccgcctcacacaatcacacggaaaaacacagcaaggtgaacagactttcggctgctgtaataagtcgagtacaaaggggtccaaggcatactgctgctcagtgcttaagttttgttatattcctgcaatccagaaccagaaggctacaaccaaatcgagcaccgttgggcaggtacggcgagggcgggtctcgacgaattcgtcggcggcggggagatcaaaatcggatcttggaggcgatcccgaggtggcgaggcgctcgtggcttcgtgcagcagcagcagcaccaagaaaaaggagggggatttgggggggaggagaggagacgacaggagcggagaagacaacaggagcaaaagggcaacagcactagtagcatgggatgtgtgtgccttgtatgtg

SEQ ID NO: 30078 - DNA, 2264 bp, Oryza sativa
  Clone ID: PAT_MRT4530_34518C.1
gaattcggcacgaggcacgcttcgacaccaacaagcacatccgattccctccagcctccactgtgctcctcgtgtccggggttctgatctccattataccacctcggaatcccacggacaccgcgcgccccacataaccccatgacctggatccctccccgccacccatggacgctcctcccctccgcctccgcctcgccgtcgccttcttgtcgctccttctaacggtttctgcgtcggcggcggcggcgagcggtggtggtggtggtttcaatgttagctttgattcggcggcgctggccttctccgacctgacgctgctgggggactcgttcctgcggaatggctccgtcggcctgacgcgcgacaccgccgtgccgtcgtcctccgccggcagcgtgctctgcagccgcgccgtcgcgttcggcggtggcggaggatcggcggcgtcgttcgcggcgaggttctccttcgtcatcgccgagcagaacgccggatccaccggcggcgacggcatcgccttcttcatctcccccgaccacgccacgctcggcgccaccggcggctacctcggcctcttcaactcctcctcctcggccgccaagaccaacgcctctattgtcgccgttgagtttgatacgatgttgaacgacgagttcggcgacccgagcgacaaccacgtcgggcttgacctcggcttgccggtgtcggtcaacgccgtcgacctcgccgcgttcggcgtcgtcctcaacagcggcaacctcaccacggcgtggatcgactaccacggcgccgaccacctcctccaggtgtccctcagctactccgccgccaagccggcgaagcccgtcctctccgtggccgtcgacctctcgccgtatctcagggacgccatgtacgtcggcttctcggcctccacggaggggagcacgcagcagcacaccatcaaggaatggaccttccagacgttcggcttcccgtcggcgaccaactcctcttccttttcgaacaccaccggcaacgcgtcggcgcagactgtccccggcgaggcggccgcgggcggcgccgcctctcgcaagaagaggttcgggctcgccctcggcatcctcggccccgtcgcgcttgccgtctccttcgtcttcttcgcctgggtgtccatcaggaagctgatagagctcacctcccggaagaacgccggcttcttgcccgagctggtgaaggggccgaggaagttcagctacaaggagctcagcgccgccaccaggggattccacgcgagcagggtcatcggcaaaggcgcgttcgggacggtgtacaaggcggctatgccggggacggccaccgcatccgccgtctcctacgccgtcaagcgatccacgcaggcgcaccagagccggaacgagttcgtcgccgagctctccgttatcgcctgcctccgccacaagaacctggtccagctcgagggatggtgcgacgacaagggcgagctgctgctggtgtacgagtacatgcccaacggcagcctggacaaggcgctctacggcgagccctgcacgctgtcgtggccggagcggtacacggtggcgtccggcatcgcgtcggtgctgtcctacctccaccaggagtgcgagcagcgggtgatccaccgggacatcaagaccagcaacatcctgctcgacggcaacctcagcccgcgcctcggcgacttcggcctcgcccgcctcatggaccacaacaagagccccgtctccaccctcaccgccggcaccatgggctacctcgcgccggagtacctccagtcgggcaaggccaccgagcagaccgacgtgttcagctacggcgtcgtggtgctcgaggtgtgctgcggccgccgccccatcgacaaggacgacggcgggggaaagaacgtcaacctcgtcgactgggtgtggcgcctgcacggcgaagaccgcctcatcgacgccgccgacccgcgcctcgccggcgggttctaccgcgacgagatgctccggctgctgctcgtcgggctgagctgcgcgaaccccaactgcgacgagcgcccggcgatgcgtcgcgtggtgcagatcctgaaccgcgaggcagagccggtgcccgtgccgcggaagaagccgctgctcgtgttcagctccagcgcgtcgatcaagctgcaggagatcgcctttgcctgcggcgacgacgtccgcggcggccttccggcggcggccacgtcgccgaggtctgagggcggcgacattgaacgctag

SEQ ID NO: 30079 - DNA, 453 bp, Oryza sativa
  Clone ID: PAT_MRT4530_34519C.1
gcatcgaggacaaatcactcctggggtggcactgatttgaagcagagaagactaacatatttgaccgaatcattcattcaattaggtcatgaattgagcacgctgaaagttctacagaactgggttattggccgatgactacatcaactgttatctacctattacaaaatacttttaaggctagcagttcaacaagtaaaggaccaaagtcgagtctaaccacaacaagcaacctgttcagtatgatggtgcataatggtcgatcgacgtcattaggatcatgcgtattaagtggatatagtggaatggtcggcagggctgacaatgcatcaaatgttgaaggaaaatgactagaactacgtttatacaggaaatgacagcttctgtcgggcagacttatggaatgatcagagataacctgatgaatgatataacccgggtttgatatttgca

SEQ ID NO: 30080 - DNA, 580 bp, Oryza sativa
  Clone ID: PAT_MRT4530_3451C.1
aggtacagttctattgaagtgtaaaattcctgttctcccagagtccatggacaccatacaaaaaacattgagcgaacatcttacaaccaacaacgaagtgttaccacatgatgtcaattcaacatacaagggggtgattctccggcatgtgtatgcaccacaacagacattgaaacaatcaattcatggaaaatgggcaatcacagaaataagcagcaatgcaaatattatacttgggataaattttatgtatactatagagggcaattatctctacttggaaattttaaaatggggaatgctctccacctcagcgtgcacctattggagggcatccaacaggaagcggaagatccaagttatcaacaattctgaatgtcctagggaccatcgtgtcaacatacaatgtaccttcaagatgatcacattcgtgctgcaggatacgtgcctgccatcctgaagcttctaccttgatggggcgtccattcctgtccaaacctgaaacctcaacatccaggtgtcgctcgacaagtgcctggatccatctaaacttcaaaaacccttcgaagaaacaagcagg

SEQ ID NO: 30081 - DNA, 471 bp, Oryza sativa
  Clone ID: PAT_MRT4530_34520C.1
atgcccctcatgcacctcctggccccaccagcgcaagccttcgtcgtcgcgccgccgcgcgtcgcgcccgcgttcgacggcgccgccgcgccaccgcgtgaggacgacccagccgccgaccagccgccggagagggaggccgacgccgacgagcggcgcctccgccggaagatctccaaccgggagtccgcgcgccggtcccgcgcgcgcaagcagcggcacctcgacgagctccgcgcgcgcgccgagcggctccggcgctgcaaccgcgagctcgcggcgcgcggccacgccgcccgcggccgcgcgggcctcgtccgcctcgccaacgcgtggctccgcgccgaggccgccgccctcacccgccggctcgcggcggcgcgccgcgcgatcgcgctcggccagctgtaccgccctgccgcggcggcggcggcggcgtcgggacgttcgagcagacgatcgcctcgctaa

SEQ ID NO: 30082 - DNA, 391 bp, Oryza sativa
  unsure (1)..(391): unsure at all n locations
  Clone ID: PAT_MRT4530_34521C.1
tttttttttttttttttttttttttttttttttaaaaaggggggagaaaacccaaaaatatttcaaatcaaaacaatgtcanaagaccatttacactaaaattttgattcttttctataaaanactaatgaatgttctgggactaangctaagcaataacaataaaacaaacaaaaaatcctcaaaagaaaactctcctccccgttgttcttgcgcangggaggccaaccatgcaaangggggcattccattccacgacatgccacgtcacgtcgccggggacccatcggngcacgaccgcnacagcgcgggctcgccgccggcgccggcgccgccttcctcgtactcgtcgnacgccgccacggcccgntcgagcacgcccacgacctcg

SEQ ID NO: 30083 - DNA, 259 bp, Oryza sativa
  unsure (1)..(259): unsure at all n locations
  Clone ID: PAT_MRT4530_34522C.1
ttgtttaaaaaaaaccgngccccccccccntcccccccccaaacaattattatgggtccgggtgtttccctcctttcctaggagaggttttacgttctagtggagtccgtacgctacgtgttggagtacgacgacgtgttgtgatcgttttnggtcttttttactcntttccccctaactagcggtcttcttcggaatcaagatggagaaataatggatgaaaaattttcncccaaaaccccccccagaaaaaaaaaaa

SEQ ID NO: 30084 - DNA, 705 bp, Oryza sativa
  Clone ID: PAT_MRT4530_34523C.1
tttttttttttttttttgaacttagaactagcccaccacttcattagtagacagtaaacctctgaagaagtggaaatgtagatgagattaacagcatgcacgaacaacctagattagtttcacacagaaacaacacacttcaacacacagatacaggatacagatcaaagttaattaaacacctactactactacataacacgaacctagatagtactagctagctaagcacgccttcgtcattcttatttacttaagagggttgggccaagaagcctcatgatgccctatgatcacggcttcttggtggcgccatggatgccgatgacgccgccgccgggcgtgagcggcgaggcaccaccggcgccggggaagacggaggaggaggagcccggcatcccgccgaagccgacctgcggcgtgacgccgttggggccggggaacacccagttgatgttggggccagggtagaagccgccgaatccgtacacgttctgcggccggtatgtcgccggctccggctcgccggggacggccctcgcgccgtggcacgcggcggcgccggcggcgagcaggaggagccccacggcgaggcccgcgcggtggacggcgccgacgctgctgctccccgccattgctaagctaagctagctgctcgagtgctcgatcaactaatgctctgcttgggttgtgttgtgttctgtg

SEQ ID NO: 30085 - DNA, 303 bp, Oryza sativa
  Clone ID: PAT_MRT4530_34524C.1
atggcttgtgaggatcggcggagggtaggatgtcgccgcccgctgccgcagccgtggcccgcgagacgggaagaggaggagagggcaggggggctgctgctgccgccacccaccgccgccgccgcggcccgcaagaggggaaggggaggaggccaggagagccgctgccactgccgacgccagccgctcgccaccgcggcccgcgagaggggaaggggaggagggcaggggggccgctgccactgccgacgcccgccgccgccactgcgggacaccggctgctaccgccgcggcccgcgatag

SEQ ID NO: 30086 - DNA, 267 bp, Oryza sativa
  Clone ID: PAT_MRT4530_34525C.1
atggcttgccgccgcaagccacctggccaccttcttcaatcgctgccgtcctgcaccttcttctgccacttcttccgccaccgaccaccaggggaggagaggtggctgcggcagcgaccagtgaagtgggtggaggacaacaacgactggcgcaacgggtggatgatgatgactggcgtagcgggtggaggacgacagcaaccggtgcccaacaacaacgacaaagcagtcggtggcgacgaaagcaacccgacgatgaagatgtag

SEQ ID NO: 30087 - DNA, 527 bp, Oryza sativa
  Clone ID: PAT_MRT4530_34526C.1
aaatagtgtgatatatgtgcttgggtagcctttggtgttcgccatttctggcaggtagcatgtcaaatgatgaaggtaatatggtcagtttgactactacacactttacagtgttgtctgatttagttcactaatttagttgtgtgcctttttttctctagccaacaaatcgccatgtttgggtgcatcgatttggccaatgtagttagatattgatcagcattaatgctgcaactgtctggtgctgtgaacagtttgggtctaagtactaagtattttttatcttttagctgtagccattcagttcaacacaacaccgtactaaatgcatttcttttgtatctggttcataagtaattggaagcatagttgtgtccattcaaatcatgttggcaaggcgacaaatgcaaaagtgaagataagtttctgaccaaaaggtgttgtaattaaacatagtattcatgtagcagtgtgaatcatcatattctgagccttttgcattcttattttcaactgatctactggtt

SEQ ID NO: 30088 - DNA, 439 bp, Oryza sativa
  Clone ID: PAT_MRT4530_34527C.1
ctagaccgcgcgcggccgtcctttttttttgtttctttctcgggccggttgctgtcttttctgctctgtggcttttccttctctgtgctcttgttcggctaagcctcgcgggctacctggctttctcaacaggaaagcagcgcccccccgttggcccatagcagcctcgggggcccccccccccaaaaaaccgggcggtccgggggggcgccccccggagggggcccccccccggggccccccccccgcccctctgagcccgggccccccaggaccccggcccccccagagggggccccccaaaggcccccccccccggggccccccccccgcgcaaggtccgccccctgaggcgggcccactgccaaccggggggcctccctccccaacagggcggccccccggcgacccccccccgtcaccccccccccgcgggcgc

SEQ ID NO: 30089 - DNA, 1773 bp, Oryza sativa
  Clone ID: PAT_MRT4530_34528C.1
atgtctctccttctttgcttcctcctattctccctgtaccctccgagaatctctgccgccacagacaccgtgtcacctggccatgcactcaccggaagcgataggcttgtctccaacaacagcaagttcgtgctcggcttcttcaagacggagagtaagaactcctcctatgccagccacaactcttacctttgcatatggtacagcaagctccctatgataactcctctgtggtccgccaatggcgaaaacccggtcgtggaccccgcttcgccggagctggcaatatcaagtgatggaaacatggtcatcttggatcaggttaccaagaacatcatatggtccacccatgtgaacaccagaaccaaccacaccattgtagtgttgttgaacaacgggaatcttgtactgcagagctcctcaaactcatccaaggttttctggcagagctttgactacccgacagatagccttttcgctggcgcaaagattttcaggaacaaagtgactggccagaagaaccgtcttgtttctaggaaaaattcgattgaccaggctgctggtttatactcggtggagtttgatatcaatggtactggtcatttgttatggaactcaactgtagtatattggtccactggggattggaatgggcatttcttcggcttagcgccagagatgattggcgcaaccatacccaatttcacttatgtcaacaatgacagagaggtttacctctcatataccctgacgaaggagaagattacacatgctggaatagatgtcaatggtcgaggtttggcagattttggaatggcaaaggttttggggagagaatttagtcatgctcttactacagtaagaggaactattggatatcttgcccctgaatggattagcgggactgttgttacatctaaagtagatgtttacagctatgggatggttttgtttgaaataatatcaggaaggaggaactcaaatcaagaatattgtaggggtcattcggcctattttcctatgcaagttgcccgccagcttatcaatggagggattgaaaatttggtggatgcaaaattacatggtgatgtgaatctcgaggaggttgaacgagtttgcaaagttgcttgttggtgtattcaagacagtgagtttgaccgcccgacaatgggcgaggtggtgcaattcctagagggggcagcacgggaggagacgagctccgaccacaccctccccccatcttcctccttcgcctcgccgccgcctgagcggccgccggccaagccgcgtggccgcaaggatagtggtggcgtaggagcgcccatcgcggcaggtcgatggcggcgtgaggcctacggcgacagcggccggccggccgttggtagtagcggctggaggcgctgctggcggcggttgtggctggcgacggcggtggctgacggcggcaacggctgtgaatgcggcgtcggttgccggtggcagcatgtagaggcgaggaagatgacagcatttggccggcgcggcagcggcgggaggagtgctcagaggctagcttggtgcatagaggttccgccggtggcagcggaggcgggcacggtgcaaggagaaggaactgccggtgagtgcggtgcagtcttcggcgcacgaaggctggccggtggtgagcggtcggtgaaaacccagctcaacctcggtcgggctggcaacgatgacgctcgaagtgtcattcccctcccgagggcgttgtcgtgccgtctcatccctcatgtgtag

SEQ ID NO: 30090 - DNA, 645 bp, Oryza sativa
  Clone ID: PAT_MRT4530_34529C.1
atgagcaaactcgcgaatatgttctctgttcttaatctggatgctgaggacgatagagaggaaggtgcggaaccaccaacatccagcaaggccgaagctgctgctgttactagcagcacggagattgataaaatcaggctgaatcacacaatgattgtaaaccacgatggagaaaaccttgcttcatcatcaagtgattatgataagccattagtgtggatagacttggaaatgactggtttggatatcaccaaagatcgcatactggagattgcttgtattataacagacgggctgaaggaaaaggtgctgcagagcgacatttctgagaatgatgctgagaaacaagtgctagattttattaggaagtatataggctcagccactccactgatagctgggaattctgtctatatggatttactatttttgaagaagtacatgccacatctggcagccattttctctcatgtgatagttgatgtaagcagtatatcggctttgtgctcccgatggttccccaaagaaaggaaacatgctccaaggaaggagaagaaccacagggcgatggatgacattagagaaagcattaaggagctacaatactacaaggaaaacatattcaaatcacggaaatcaaagtag

SEQ ID NO: 30091 - DNA, 300 bp, Oryza sativa
  Clone ID: PAT_MRT4530_3452C.1
atggagcaaaggagtgctccaccctcggaggatgagtggcgcgacgaagagcacgacggagcggcacatgtggtggcggcggggacgaggcaaactagagcgagtggaatagtaggaacgcccagtgcgcaaggtccgcacaacgagaccgcacgaggaggcgaccaccttgcggggctcaacctcttgctcgacgtcaacgcgcctccgcccgcctaccgctccgcgacgccctcgctgacactaccacaggcggccatgcttcccactcgcacactggtggcagcaattatgcggtag

SEQ ID NO: 30092 - DNA, 747 bp, Oryza sativa
  unsure (1)..(747): unsure at all n locations
  Clone ID: PAT_MRT4530_34530C.1
ccggccggggactccgtcacacctgctgccgtgccgactgcgaagagcagcggcgccgccgtcgtcctgctgcttccgccgccgcgtcttctcgccctcgactccgctctcctgcgctgcccgatttccatccatcccgcttccgcctccggttacagctccgtcactcttttcttgggggaaaagatgagcaaactcgcgaatatgttctctgttcttaatctggatgctgaggacgatagagaggaaggtgcggaaccaccaacatccagcaaggccgaagctgctgctgttactagcagcacggagattgataaaatcaggctgaatcacacaatgattgtaaaccacgatggagaaaaccttgcttcatcatcaagtgattatgataagccattagtgtggatagacttggaaatgactggtttggatatcaccaaagatcgcatactggagattgcttgtattataacagacggtaaacttaccaaacgaatagagggtcctgacttggttataagacagagcaaggaatgtgtaaatgacatgaatgaatggtgcaaagttcatcacagcgctagcgggctgaaggaaaaggtgctgcagagcgacatttctgagaatgatgctgagaaacaagtgctagattttattaggaagtatataggctcagccactccactgatagctgggaattctgtctatatggnattactatttttgaaagagtacatgccacatctggca

SEQ ID NO: 30093 - DNA, 511 bp, Oryza sativa
  Clone ID: PAT_MRT4530_34531C.1
ttattccaattacttttaggaaagctggttccccttcaagttaccgttccgaatttccggggccacccaagccttccgaaaaggtgttggtccccttggtcctttattaaaaaccttttattgcaactgtggccaaccttttttggagggggattctcggccactctaaatatgtggttggttcttaatccttccaatgttggatgataacagcttttaattggaccagcaggtttacaggaaaaaaggatttccatttacctttaggagtcccatggtttcaatataatttaatggccttggtaaaaaaagttattcttggtccaatctttccacacaaaacttgcctggtgactcaactttttgtcacaaaattctgttgcccaccttggattgtaggtcgccctagggaactgaaaagaatcagaagccacccaattgtctaaaaaaatcctatatagctcgcctttgcaggcacaaacttgaatgccggccccacaagggcctctat

SEQ ID NO: 30094 - DNA, 1593 bp, Oryza sativa
  Clone ID: PAT_MRT4530_34532C.1
atggcggcgccctccggctccggcgaagccgcccccgccttctccacgtactacgacgtctacggacccgacgatgttcaggggctagtaacttgggtcattggtgatggcatgctgccttcttgggtgtttgttaaaaacaagcctcttataccaaaagtcgtccttctatatgttcctggccttgatgcagctttatatatgtcgcaatcccgtcacctttcttctttgaaagaattttgtggcaatccaaaacctgttctagcttcaagctgtataccagatgaaaggcataccatcgatgcactcctaacatgcagagtaaagcgaaagcgtgcgttgaaaacaacggaccaatctcatgaatctgatggccaagaaaagttatcaagtttggacgatctaaaggatataccgtttcctattaaatattacacgctttctgaaaaagacttggaggacaatggatacaacttcagtttagaaggttttgtccctactgtttcagctcctccaggctcttcgccatatgcaattcttgcacttgactgtgagatgtgtgttactgcagctggatttgaacttacaagagtaacattagttgatattaaaggagaggtggtgctagataaactagttaagcctgccaatccaatcactgattacaatacaaggttcagtggaatcactgctgaaatgttagctgatgttaccacaaccctccaggagattcaggaggagtttgttggacttgtgcacaaagaaactgttcttgttggacattctttggaaaatgatcttatggcattgcggatatcccacgatttgatcattgatactgcagttttgtacaaacataatcgtggccatcgctttaagatcgctttacgtgtcctggcaaaaaagtttcttaaccgggagatccagaacactgggtctgggcatgacagtgtggaggatgctaaagctgctctagaactcgctttattgaaaatcaaatatggtcctgattttggctccccaccatcaacttcacgacgaaagttggcttccatactgcatgaaagtggtaaaaaatgctccctcattgatgacgcctccgttcttgagcggtattcagatgcttcttgtaattcaatagcagttttctcagatgatgatgcactatctagatcaatgaaagaggtaaaaaatgacaaagttagttttgtctggactcaattctcgaaattgatctcgtatcttcgtacaagggcccaagatcccgataaggtgaaatcgtgtgttgcagaggctattgcattgcagacctgcgacagaaaaactgctcagaaaagaaaaaagcatcaaacttgtcctgaactaaaggaaattctgattgggttggacaagaaaattagaaaattatacagcatcttacctgataatgcaatgcttattatatgtagtggtcatggtgatacacctttggtgcaaaggcattattcagacgatatacttgcggactctgtttattgtaggaaggatggagccccatgcatcccactaacattagaacttctggctaacatgaacttctggattcaattttga

SEQ ID NO: 30095 - DNA, 333 bp, Oryza sativa
  Clone ID: PAT_MRT4530_34533C.1
atggcggagcagcaagggtggctcccagttgacggcaaagaaggcatcgtagagcgacgcctcgtagtgtggcatgtagaagagggtgggctcgtcggcgcggtggcagcaaccgtcattgacacctggcacggcacagagaagcccagcgctgccgcagaggcgcactcgaccgcagagaggatggggtcgaagaggtcggtgtgggcggatgattccggcaggaggaggaggagattgcagtggaggagcgcaagctggaggcggcatgagggagagttctcgaagctgccgacgccaagaagtgatagcctccgtcttcacccaccatga

SEQ ID NO: 30096 - DNA, 394 bp, Oryza sativa
  Clone ID: PAT_MRT4530_34534C.1
tttgtttttttttttttttgggtttttttttttttttttttttttttttttttttttttttttttttttttgggggaaaaaaactttttttttcaaatttcaacagttttaggaggggcccctttttaagggggggccaggggacagaccccttacaatgagaaaaccaatgggggggggcccctggggaaatggccctcaaaactccaaaaattttattttttggtggggaactgggggccttcctttttgggcccctttatgttggcaacgggcgggtgagttttcgcgaccttggcaagggccttgttctcataaggggaccccccctccagggggggccccaacaccttggcgtgcttggtccaaggggaccccaacttgggctttggaa

SEQ ID NO: 30097 - DNA, 167 bp, Oryza sativa
  Clone ID: PAT_MRT4530_34535C.1
tgtgaaactgatggaagtacaacgttgcactaccgtggtgaaaattgcccattgcaactgggctctggggtgtttgttatgattgttaaactgcttgttttattgtcgcacacagaaaaagaattgctgtgcttttgtggtgagtatcatagacttcatagacttag

SEQ ID NO: 30098 - DNA, 594 bp, Oryza sativa
  Clone ID: PAT_MRT4530_34536C.1
atggctattcttttaaccgactaccgccgtgtcaagcaactaggtttgttaatttcttacacatttgtctttccccttgcccttcataatatgcatttctttgattttggcagcaagttcctcatacgtcattcagtccacacgcttcaagttagtcagattgacctgaaagacaaagccaagcacgaagagtctaaatttcaaccaaatgaattcgttcggtcatcaaatgaccggtgcaacctagccagctcagttaagctgaaattaaacaaactgctgcaagctataactagagctaagtcacagttgtacatccgggagcagaagatgaaaagaggaggctcgtcgtcgtcgtcggcgactgcggtgacgatgacgatggtcgtgctgctgctcgtcgtcgcagcggcgtcgctgcgtgccgccgacgccgcggcggcggcgccgcgccgcctgctgggagctgacggcggcggcggcggcgggtcgccggcgctggtgtccgagagcaaggcgtcggcgggggcttccacctgcacgcacgaccccaacacgccccctagtggcactccttgcccaccgcataattga

SEQ ID NO: 30099 - DNA, 400 bp, Oryza sativa
  Clone ID: PAT_MRT4530_34537C.1
gcggccacgcgtccgcccacgcgtccgcccacgcgtccgaaagctttttcgttgaattagaaacaaaacgcacaaagagtaacttatgtcaaagtgcaacttatgcacattaacttgtcatgaaggttacttgagccagtaatagtaatctagtcactgtattgtgcaagtgcaactccagaaccacagcaaaatatgacccatcttctgaggattgaggtatgatgacaaaagcggattgcggcacagccattggcaccaatggataaaaaaaactcatttgtgttttcttggttagctaagctattaaggggatatacaacatcacacctcttcaacatgtctttgtcaggtcattcattaccaaaatgtgaagaaaacatcttttggtggcatgtga

SEQ ID NO: 30100 - DNA, 1885 bp, Oryza sativa
  Clone ID: PAT_MRT4530_34538C.1
ttcgccttgcgtcccgcggccaccatcaccaccaccaccaccacccacctcctctcctcccggatccgagatccgatccggcggcgatggcgtcgacggcggcgaggcggctacgggagctgcaggggcaggcggggaacaagacgtgcgtggactgcgcgcagcggaacccgcagtgggcgagcgtctcgtacggggtgttcatgtgcctcgagtgctcgggcaagcaccgggggctcggcgtgcacatcagcttcgtccgctccgtcaccatggactcgtggaccgaggcgcagctccgcaagatggaggccggcggcaacgaccgcctcaacgccttcctcgccgcgcggggcgtgcccaaggagaccccccacgtcgccaagtacaactccaacgccgccgccgcgtaccgcgaccgcatcgtcgccgtcgccgagggccgcccgtggaccgacccgcccgtcgtgaaggagacccccggatctggcgcgcccgcccccaccaggaagccacccttgcccgccggaggcggcggcggcggcggcggcggatgggatgactgggacgacgatttccggcccgacatgaggaggaaccagtcggtggggtcgttcggtgagtcgggggcggaatcagggaggcagccgccgaggtccaaatcgacgcaggacatgtacacgaggcagcagctggaggcgtcggcggccaacaaggacagcttcttcgccaggaggatggcggagaacgagtcgaagcccgaggggatcccgccctcgcagggtgggaaatacgtcgggttcggctccagcccggcgccgtcggcgaatcggaacggcgctgctgctcagggtgatgtcatgcaggtcgtctcccagggaattggacggctttcactagttgcagcatctgctgcccagtctgctgccagtgttgtccaagttggcacaaaagagttccaatcaaagatgagggaagggggctatgatcagaaggtgaatgaaactgtaaatgttgttgccaataaaaccgcagagattggaagtagaacatggggaattatgaaaggggtaatggcgttagcgtcacaaaaggttgaggagtatgccaaggaaggtgggaatggctggggggatgattggcaacgcagggagcagggcagtgagccttaccataggtttgagcgtgagaccaatggtaatgggtggaattcttcttctcatgatggttcatcaaagaattacaattccaattcctgggatgattgggatgagccagtcaagaaggatgagcctgcgaaagaacgccaaagcagtgactcctgggccggctgggatgatgggaaggatgacaattttgatagttacaatcacagcacccccagcaaggggagcaatcagaacggaaccaccggtggctcctattggacggaaggcggcttccgctgaggttgatttctttctagagatatattatacttggagaagttatatatgccagaaagtgtgagcgtccgatggtccgtatcattcaggatactaaaagggtcaagtaaaagagtttgtgtttttgtacgttgtttacaactatgtctagtggtatgttccggggtcaatggggctcatctgaaactgtcatcacaattactaagaaatgtcaaattgaaactgtaatctacacaaacttcctctcatattctttattgtttcaactgcttttttttttcttttttccttttttcttttttgtcttggacctcctacagctgtatcagctcttccattatttgctctagttgatagtctgtccaaaaggccagtgtgtaacatgttccataaaaaaaaaaaaaaaaaaaactcgagactagttctctctctctctctcc

SEQ ID NO: 30101 - DNA, 2755 bp, Oryza sativa
  unsure (1)..(2755): unsure at all n locations
  Clone ID: PAT_MRT4530_34539C.1
ccacgcgtccggattctgtgtgtgtgtcttggttgcaaaaaccaagacatacacacagaatcaaataataacaaaggtttcctagcctcaaaggatacatatatatagtttccctacaatacaatggagcctgtcaatgatttccaggaaggcatttcaacagagcatgcctttgaggcagagcctgtgccatcattgtcggaaacaataacgccacgatcaatggtggtgagcttcatccttagtgtaactctcagcatcgtcgccatgaaggtcaccttgagctctggcttcattccgtcgttcagcatcccagccggcctcctcggtttttgtgtatcccgtgcgtcgatccgcattcttgactacttcgcagtggcacaactaccattcacacgccaagagaacaccatcatccagacctgtgtcgtcgcatgcacctcgatcacattcaccggtggctttgggacatatattcttgcaatgggaaagaaagcagctgtaggggatgtcaatgcccaaaataacgttgaggagccaagctttgccaggatgatcaccttcctcttccttatcagctttgctggcatgttcatcatcatgcccttcaggaaggtcatgatcattaggcaccggttgacattccccagcggcacagcaacggcgcacctcatcaatagcttccatacacctcaaggtgtcaagcaagcaaggaagcaagtgacattattgtttaaatcgtttggaggaaccatcgcatggtcgctcttccagtggttcttcgcctctgggccgggctgtggcttcaaattcttccccacatttggcctcgaggcatataaacacggattcttcttcgatttcaccatggccaatgtcggcattggcatgatgtgcccgtacatgatcgtgttctccgttttcattggcaccatcatctcgtgcggtgtaatttggccgtacatcgagtcaaaggagggcatctggtacccaagcaaccttgggcccaacagccttaacggcatcagaggttacaaggtgttcatcggcttgtccatgataatggctgactgcctcttcgtcttcctctgcatcatggtccggacaacatgtgccatgatcaagcggcgtcggcaggcaatgcaaggtggtggcggtaatgcgcagccattccagggtatcgacatcgccgatcagccggtgaagagcttcgatgatcgccgcagggcgcaggtgttcctccgggacgagataccggactcggtcaccattggctgctatgtcctcctgtcgatcatctccatcgccgccatccctcacctctacccacagatgaggtacagccatgttgcgctcatctacctcgccgcgcccgtcttcgccttctgcaacgcctacggcttcggcgtcaccgacatgaacctggctagcacctattgcaagatcgccatgttcgcgttcggctcgtgggtcggcatcaagagcggcggcgtggtcgccgccctggtcgccggcgggatcaccatgtcgatcctgggcaacgcggccgacgtcgcgcaggacctcaagacgggctacctgacgctgacgtcgccgcgcgccgtgttcatcagcgaggcgatcggcacggcgctgggatgcgtcgtcaaccccaccgtgttctgggtgttctacagggtgtacaagatgggcagcggcgacatgggcgacatgccctacgccaagctctaccgcggcttcgccatgctcagcgtcggcgacggcgagcaaggcctgcccaggcacagcatgctcctcttcaaggtcttcttcgtgctcgccctggcgctcagcgtgttccgggaggtggcgagccggaaggagtggcgcatccggcgctacatcccgagcaccatcggcatggccatcaccttcttcatgccgccgcgcgtgcccgtcggcatgtgcatcggcagcctggtggcgtacctgtgggagaagatggacgccggccgcgggcggatgctctcgccggcgctggcgtcggggctcatctgcggcgacggcgtcggctcgatcttgctgtccatgctgacactcatgggtgccagggcgcccatctgcatcaagttcttgtctcgaggtgacaatgtcaagttggacgccttcttggcaacactccatgacatgagatagctactagctagctatccatgtagggaaactagatcattttctcaggtgtcaaaacttttgtacatatgtatccacgtcataggggcttgagttaggagtcgtggcaaactgtataatcaagtttcagttcagtctataaacacagtttgatctcctctatcaaaaaaaaaaaaaaaaaacggacatttacacgattatagtctaaagaagtaatgtaccatgtatgtagacaacatatttctatttattcttcttcagtacgtgttttatcanaaggttcttggtcctcgaaaggtggaacaaatgtccaaagtttggggacgnacctttnctttgggcaaaacaacttgccaatgaacaattgnagaaataaggcctnaacttagnnctaaggnctaatnccnaatggtaagggggaaaaaactaaggaatncaatttttttctnncaagggtggttcaaaaaaanctttttggtaacaaatnaatgtaatnncncacgtcanntaggggcttttgagttttaggagttacgtggcacaactgtataatcaagtttcagttcagtcaataaggacagtt

SEQ ID NO: 30102 - DNA, 3924 bp, Oryza sativa
  Clone ID: PAT_MRT4530_3453C.1
atggtctacaccaggactggcaaccgcacgacaggcgagggcagcaacggcgaagaacgcgccgatggtgtgcaccccaacagtgattctggcaatggtccgccaccacttcccgagaatccgacgcttgcccaagttatggcacatcagactcagatgatggcagccatgatgcagcagatgcagcagcagcaccagcaaatgcaccaaaggatgatgcagcacgccgaacagcagcatcaacagtttggtccccctccccctcagtccaagttgccagaatttctacgcgtcaggccacccaccttctccagcaccaccaaccctatggaggcgaacgactggctccatgcaatagagaagaagctgaatctcctgcagtgcaatgatcaggagaaggtcgctttcgccacacaccagcttcagggtcccgcgtcagcttggtgggacaaccacatggccacccgcccaccgggtactgaagtcacatgggcagagttctgccgtagcttcaggaaggcacaggtgccagatggggtcgtggcacaaaagaagagggaatttcgtgcactccatcagggcaaccggactgtgacagagtacctccacgagttcaatcgcctcgcgcgatatgcaccagaggatgtccgcaccgacgccgagaagcaggagaagttcatggcgggtttggatgacgagttgaccaaccaactgatatccggggactacgctgactttgaaaggctggttgacaaggcaatccgtcaggaggatcagcgcaacaaaatggacaggaaaagaaaggcggcgcagttccggtccaaccaaggtagtcagcaccgaccgcgcttcactcccggacagcagggtggacctaccaccatgatcgtccgtcagcaccgcccgttcaactccagcaacttccaccagggcactagtggcagtcagaaccaccagggaggccagcccaaccgcggtgcagctccacgcccaccaatggcaccggcacagtcaggccagcccgcgcaagccaagaaggagacgggagcaaaaccagggtcctgcttcaactgtggcgagcttggccacttcgctgacaaatgcccgaagcccaggcgtgccgggccaaggtttatccaggctcgtgtcaaccacgcgtctgcggaggaggcacaagcagcaccagaggtcgtactggtcaccttgaccaacgagaagggagaaaccgtagtgtacaaatcaccagactcaccaaagcaaggagtctccttgaatcaaattgaaacggaaatcccagtggacaccgtggagaagaacttgagaaaattggaagatatacccatagtctgcgagtatccggaagtgttccccgaagacctcactaccatgccacccaagagagagattgaattccggattgacttggcaccgggaaccgctccaatttacaagagaccatacaggatggcggccaacgaattagcagaggtcaagaagcaagttgatgagcagctgcagaaagggtacgtacgaccgagcacttcgccttggggcgctccggtcatatttgtggagaaaaaggataagacgaagaggatgtgcgtcgattatcgcgcacttaacgaggtcacaatcaagaataaatatcctttaccgcgaatcgacgatttatttgatcaactgaaaggagctaaagtgttctctaagatagacctgcgatcaggctaccaccagttgagaattcgggaagaggatattccgaagacggccttcaccactcggtacgggctatatgagtgcacggttatgtctttcagacttaccaacgcacccgcattcttcatgaatctgatgaacaaagtgttcatggaatttctggacaagtttgttgtggtgtttatcgacgacattcttatctattcaaagtccggagaagaacatgaacaacatctccgtctggtactcgaaaagttgaaggagcaccagctatacgccaagttcagcaagtgtgacttctggttgacggaagtcaaatttctgggtcatgtcattacagctcagggtgtggcagttgatccgtcgaacgtggagtcagttaccaaatggaccccacctaagaccgtgtcgcagattcgaagttttctaggactggcgggttattaccgccgattcatcgaaaatttctccagaatcgcccgacccatgactcagttgcttaagaaggatgagaagtttaaatggacagctgagtgcgataagagctttgaggagctcaagaagaaattagtatccgcaccagttttgattctgcccgacccgactaaggacttccaagtctattgtgatgcatcccgtcacggacttggatgtgtcctaatgcaggaaggcagagtggttgcgtatgcctcgcggcagttgcgtccacacgaaggaaattatcccactcatgacttggaattggcagcagtggttcatgctttgaagatctggaggcactatctgattggaaaccgctgcgaagtatatacggaccataagagtctgaaatacatcttcacccaaccggatctaaaccttcggcaacgaagatggttggaactaatcaaagactatgacatgagtattcactaccacccgggtaaagccaatgtggtggcagacgcattaagccggaaaagttactgcactgccctatgcatcgagggcatgtgtgaggaattgcggcaggagtttgagcatctcaacgtgggaattgttgaacacgggttcgtagccgctctggaggcacggcctacgctcgtggatcaagttagagccgctcaagtaaatgatccggaaatagcagagctgaaaaagaacatgagagtcggaaaggctcgggacttctttgaggatgagcatggcacaatctggatgggagaaagattgtgtgtacctgacgacaaggaattgaaggatctgatactcaccgaggctcatcagacccagtactccattcatccaggcagcaccaaaatgtatcaagacctcaaagaaaagttttggtgggtcagcatgaggagagaaatagctgaattcgtcgcactctgcgatgtttgccaacgagtgaaggcagagcaccaaagacccgcaggtttactccaacctcttcaaatcccggaatggaaatgggaggagattggaatggactttataacgggactgccccggacatcatcgggacatgattcaatctgggtagtcgtggatcgactcaccaaggaagaattggggacccgtttaaatttcagcacggcctatcacccgcaaactgatggtcagaccgagcgagtcaatcaaatcttggaagatatgttgagagcttgcgctcttgattttggtggagcttgggacaaaagcttgccatatgcggaattctcgtacaacaacagctaccaggccagtctacagatggcaccgtttgaagctttatacggccggaagtgccgcacacctctcttctgggatcagacaggcgaacgtcaactgttcggaacagaagtattagcggaagcagaagagaaagtcagaaccatcagggaaaggttgaggattgctcagtctcgacagaagagctacgcggataaccgccgaagggagctcacttttgaggccggagattacgtgtatcttcgtgtcactccgctccggggagtacaccgttttcagacgaaaggcaagttggcaccacgcttcgtgggaccatacaaaattttggaacgaagaggagaagttgcttatcagctagaacttccatccaacatgatcggcatccatgacgtgttccatgtgtcccaattaaagaagtgcttaagggtacctgaagaacaggctgattcggagcacattgatatccaagaggacctaacatatgtggagaagccg

SEQ ID NO: 30103 - DNA, 478 bp, Oryza sativa
  Clone ID: PAT_MRT4530_34540C.1
ttcctaatctcgctttaagagcagtagctacagtggtgaagatggaagatgataggagactctttcataatgctgctcttcgcaaacacaggaaagaggtgaccgaacgtatggatgtgctgaagagcactggaggtagcagaggcaatggtgagctggtgttggatgctgaaaaccctacatcacccaggggtgtgcagtatccatttgtagtgggcgagagggtcctgatcatgggaaacagaaggacgcctgataaatttgttgggaaggaggcagtcatcacatcgcagtgcttgaatggctggtatcttgtgaaggcggttgatagcggggaaagcatacggctgcagtatcggtcgctgaagaaagtgtcggagctgcagcttcagtcagagatgaggttgcagccactcaccttcctgcacaacaaataccccagtagtggcagctgagttgattgactatcatcagtctt

SEQ ID NO: 30104 - DNA, 1373 bp, Oryza sativa
  Clone ID: PAT_MRT4530_34541C.1
gcacgaggaagatccccatcgtcgccgccgccgccgtcgccgtcgccatcgccgccggcggccgccattggcagcagggaagaggatgatccggcgattcttgtacattgctgaccactgctttacaggcccctccctctcccacaggctacggcgagtcaacccatcacatctcttctaccccgatggccatccactagcaacgaaaccggagcgagcgacggtggaggtggaggacgctcgcctgcctccacccgccatggccttctgctccccgggcaccacggcgacggccatgggcatggagttcatgcgcaggaacgacggcagcatcgtcggcatcgaccacaccggccgcgccgtcctctacgaccccgccgcgcgcgccgtccgcacgctgcccgccctcgcggcgcccaagctcatgcccgtctcggccgccgtcggcgacgacctgtacgtcatggagacgacgcccctccccgacggcgccggctgcttcgaggcgctcgtacgcctcgaggataatcccgccgagtccgactccgacaagtgggaggtaggggacaactacctctggcaacccctgccgccgccgccgccgccgccgtccccgtgcgtgaacgcctacgccgccggcttcgaaggctcctcccgcggcatgatctgcgggtacgcggtggccggcgacggcgacggcggcacgcgcatcctggtatccaccacgaccaacggcacctactccttcgacaccgcgagctccgcgtggagcaaggccggcgactgggagctgcccttccgcggccgcgccgagcacgtccccgagcacggcctctggttcggcatctccgacatggatggcaccattctcggagcgtggaatctgtcctccgcgttccagcagccgcagccgccggtggcgagcctccaggtgaaggggttctcggtggagagccacagcgacgaccggaggaggagggagttggaggtgtacgcatcgcaggtcgtccacctgggcggcggcaagctgtgcgtcgccaagatgttcagtgttgatcgcagagaaaggggtgaaataaatttcgccatgctcaccggcgtggaggtggtacgcggccgtggcgggaagctccgcgtcgtcaagcacaagtcgcgccgttataacttcggccaagactacacccctgattatctactctaacgagtagagtactcctacttagtactgtcctaataaaaacccttatttgattaatcctgctcttatgcaggatacatattcatcggttagttttaaaactctgcattgcatagctctgtaaactctgttagtagagatgaatgatttcaaggaagcaaaaaaaaaaaaaaaa

SEQ ID NO: 30105 - DNA, 542 bp, Oryza sativa
  unsure (1)..(542): unsure at all n locations
  Clone ID: PAT_MRT4530_34542C.1
tttttttttttttttagttacaattcttttcatttatttttcatatactctatcaactgctctgaaactaatgaacataaaatgaatgaacgcccaaacttggcgacccagataatgaaagttgacaatgttattaacactgtactggggcaggtaattcgataactgaatttacagctagtaaagcaaaaaagaaaaatggtataatcaggttcaggtgtgtcgtatgctcaatcagatactgaagacatttgtgatcaaaatcaaaacctccttattacgctacttagaagggccataatactcacactttaattaaccatggcagcagggtggaatccatggtcacagcttgctggtggcggtggcggtggaggtggagacaaccttcattctgccgaagagggagtgcctgccctcggcgacgacctcgccggtggcggcgttggagatgaggacgtgggtggcggaatacgcccccttgtggccgagcgccctggccgtgatccgcangcggtcgcccgggcgggcctgcgcgaggg

SEQ ID NO: 30106 - DNA, 432 bp, Oryza sativa
  Clone ID: PAT_MRT4530_34543C.1
atgagatatacttacccatggtggaaagagaaggtgattgactcgaatgcaaagaggaaagatgagctctgcccattaacaatggaggaggctgcaatggtattgaaggcactagacattgataggagttatcaaatatacattgccgatggtgaaatatacggtggccaaagaagaatggctgcccttacctcagcttatcccaatgtggtgagaaaagagacattattgccttcagatatctcaggttttttccagaaccattcctcccagatggccctggggtatcaagcccaaagggaggaggttgccccggtacccatgtggcactcccccgaggggggtcgggcccgagaacaacaacaacaaaaacaacaacaactacaacaacaacaacaacaacaacaactacaacaacaacaacaacaataa

SEQ ID NO: 30107 - DNA, 282 bp, Oryza sativa
  Clone ID: PAT_MRT4530_34544C.1
atggatcaacaagagaattggcaccgacgccaaggcgccggtagcaggccagccagcaaagacggcatggagatgaccaatggacaaacaattgaaaaggttgctgatggccgtggagtagaggacttgacggcctccaaggcggacaccaaagaggaggagaagggggaaaagaagaggtctgtgagagcagccatatgtgtagatcgccacctgcgggaggttttgccgagcgagaccagggatgtgcccggtgacgtgcgatacaattatgatgaatga

SEQ ID NO: 30108 - DNA, 2631 bp, Oryza sativa
  Clone ID: PAT_MRT4530_34545C.1
tttttggtttttttttttttttttttttttttttttttttttttttttttttttttgccaaacaacgaacttaggagaagattaatagcaagtaaatagtaggccaaaccatgcaaacttacataaggtttaagtgcagtcataacacaatatacactagtttgataaacaaactttattcagcagcaagtaaataaggtaacacaaagcgaatatctgatcctcagtagcgcgccaggctagacaagttcggatcatagagcatcgccatcgagaactaggccaaaccttcaaaacaatgtacattgttggcctcacaatgcttgcagtgaccaccagttcgagcactggtaaatccagcaacagtccacgagaaagattcagcgaggtttggcttagctcggagcggcagcaggtggccatgaagacacatctgttgcgcagtactgccagcatatggaatcccactaggtcatcagtatcagagtcctctagaacggttctggacttagttatgacagtgggaactgcatgctgggttttgaagcaaagccaccgttattagcagcagcaggtaaatcatcaacaatgcgcatagttggacgcgagtcaccagatggaaaggcagcagatagagtagtactgtatgtgaactgatccatgggataatgccaaaattggttgtttggcaaaggatatgcataggataatcttgtgtctggagcaaagatatcatccatatttacataattttcactgttaggaactccaaagtatgtgggctgttgttcagtaacaccagcattggacggagaaaatccatcaccatttggcacacccaattcagcaagccctgcaatttcattgtacagatcatttgtgctaacctcaaaagcatgagcttcagcttcagacattggtgggagaccagagtgctccccaacagggttgccatgatgaggagaatcagttaaaaacctagaaagttcctccaatacaagcccctcaattacaggactgtctgcattattgaccacattagaacagttgtccacagaaactacctcatcaccaatagattcaacagagtgctgggaaggcagttccatgagagcactttcaccagtaacagtaatattttgatatgttgatccattcccagcacatacatgaggtaaatgctgcacaggtagttcctcaatagctctggcagcaacagaaggctgaacacgtgtatcatcagtagaatttactacctctgaagagggcagcaatggaaacacagaagtttcaacatttggcagcaagggaaacatttcagcatctgcatgctcccattcttcttcattaaatgggagccccatattgctccccaatccctggaccaaggccacttttcttggaaaattttgcgagaggacaaaatcatcctttgagaaaccagcagagaccaattgattgtcttccattttgtattcgtacatcacccaatcagtcctgttgcctttaggtgctttgccttcatgaaaaatcagtgttttctttgacccaacaatgcgagagttaagctcaatcgttctatctttcccacttgttttccagtaaccatttggtgtggaacgatttgtcctagacccattaggatatttcttgtctcgtgggcaaaagaagaaccattcaagatctctgctctggagacaggattgagcaggaagatcccagggagcaaatttatacagttcaacatctgatatagcttgaataagaggcttctttcccataatcttccttttcaaatagtatgaaacaagttcaacatctgttggatgaaaacgaaagccaggtggcaagcaagtttgagccatcactgcagtgtatatcttgccttcagcaccaataagacaacagagacctttgtttaaggtacaagcagaaatgcttcaccaaataatgccaataccaataatcaacaagtgatctaagattgaccagtaagggaaatgtttgagtgctcaaacaacagaatttaggagcacaaacaatcaagagaacttaggagagagctgcttttgatgtttgagcacagaaggaacaagagaggacttcagaagattgtattgcgtgaacacagcaggacggttcacttaagggagatcaggaggttgatcagaccaaaagggagattggtccaacctcagagagaacagaagacgtgattgttgagaaacaatcttcggcaagactcaagcagagtttagatcgagcactcaaccgacaaatgtttctgaacccagatgagagaaaacttgagtcttgccaattatgctaactacaactgattcacatgataggaagtattagcacaaaactccaggtgatccacttgtatcaagtgaaatctcggaattttatgcaatatatgaaccagaagtagcaggagaggaaataaggatattcctcgctgacttcagcagacatgggtgattaggatcaaaatcgcggaggaggcaggggagccagctggtcgattggggatgccgcggaggaggagggaggtgagcgcctgcgcctgcgccgccgtctggtcaatggagaggatgaggattttcggaggaagcaacccccggccgg

SEQ ID NO: 30109 - DNA, 1008 bp, Oryza sativa
  Clone ID: PAT_MRT4530_34546C.1
atggacaccttcttcctgtcgcacggcgcgcccacgctgtccatcgacgacaccatcgcggcgcagggattcttcaagtcgtggctgccggcggcggtggcgggcgcggagttgccgcgggcgatcctcgtcgtgtcgggccactgggaggcggccgcgccgacggtcaacgtcatccgcggcaacaacgacaccatccacgacttctacggcttccccaaggctatgtacaagaatatatgggaagaaatcgatctttctgccttggttatcggaaaaccacactacatggttgctgaaacctggtttggcaactggtctgaatttactcgtaggcaacaccatggcagcatgataccatttctccgcatgctcatagccttaggcaggtttacaaaatcggccgtaattgcacggttattgcatttacctccggatatgctgaagtaccctgcgccgggcgctcctgatctggcgatgaagaccaaggagcttctggagcaagccgggttcgggccggtgaaggaaaaccacagccgcgggcttgaccacggtgcgtgggtgccactgatgttcatgtacccggaggcgaacgtgccggtgtgccagctctccctgcagagcggccgcgacggcgcgtaccactacgagctcggcagggcgctggcgccgctccgcgacgacggcgtcctcgtcctcggctccggcagcgcgacacacaacctccgcaggatggggcccgagggcacgccggtgccgcagtgggcggcggagttcgacgggtggctgcaggaggcgctgctcggcgggaggcacgacgacgtgaagcggtacgaggagaaggcgccgcacggcagggtggcgcacccgtcgcctgaccacttcctcccgctgcacgtcgcgctcggcgccgccggtgagggggccaaggcggagctgatccaccgcagctggagcaacgcctcgctctcctacgcctcgtaccgcttcaccaccgccaagaactga

SEQ ID NO: 30110 - DNA, 1116 bp, Oryza sativa
  Clone ID: PAT_MRT4530_34547C.1
ggctaacaagtaactacagacagccaaaaaattgttcaaaagtacagacaacaattaagaattttacaatatgaaacgccgagttgtagttcacgccatgtcgcggtgttcgcgtgccgcgttctgctgttcgtgccaccacacaatagcagaacggagtgcgcgattgggaatgagttccatgtgttcaagaggcaagttggtaactggagatgtgtcatgcccagcgtcgagccatgccctgatcgcctcaccgtcgtaggtgtgtccatccgctgtaatgtaaggatcctccatgacatgcagaaatataggacaggtgaatggcggttcgcggtttaagatggattgtagccgttcaagtttctctgtgcattgtaagagttgacattctagattcgctttatcctcccggactgacttaagttctgcatcgtgattcattgtaagttgttcaatcgaggcttgaattgccatgaccatgtcttcgtattccttccgtcttgagcgctcctcggataatttgtcctcattttttttttttttttttgttgcatgcttcaacaaggtgttgagcctggttttatccatgttaatgcgctcttcaagtcttgcggggtaaagatgctgcgtgtaagttggataagcaccacattcaagtttttggcttttgagttcctcgtactgctccctcatgaacaacgcccccttcagcctaatctgcgcctcctcgctgtggcacgtttccagcgaccgccgcagcagcaggatcacctgctcgtaatccgcggcgcagtcggcgagatgctccagcgccgacgccttccacaacagcgcctccgagatcagcttgttgccggagctgccggagccgagctcctcgcccctcctcagcgcgtcgttgcagtccctcacgcactcctgtcccaggcccgatagggctttggctcgcttgatcaagaaggagatgtcgctggggtcgagttcggcgccgcgggtgtagtgcttgatggccttcccgtagctccccttgttgtagcaggagtcacctttcctcttcacaccttgcacctccgcctccgccgcacgccacgggttgaagcgtacgggagacat

SEQ ID NO: 30111 - DNA, 230 bp, Oryza sativa
  Clone ID: PAT_MRT4530_34548C.1
tatatacgcaatgtaacacaacccaatcggggggtcttttttaacacccgggcgctacaagcgcaaaaaaatccttaaaaagcgaaacaaattatccaaaaccaccgtacgccagtgctacatggagaacgaccagtgcacccgacatggtaccaccaagttcaactatgcggcacaggcggtgatccacactacgatgcttgtgacacctcgactagcgcacctgatcc

SEQ ID NO: 30112 - DNA, 1434 bp, Oryza sativa
  Clone ID: PAT_MRT4530_34549C.1
atgaaccgcaaaggcagtgacaggctaagcaagttacctgatgatattctgcttaacatccttgaccggctccatgtccgcgatgctgcaagaaccagtgtcctctccagacggtggaggcatctcccttctatgctttctcaattggttatagactttgttcacttcatgcctaatggtgcatccatgttatctgatgatgtgttggtctggaccaatgccgctgttgttgaagcaacgaagagcatcttggaacgcaggaatccagatgaatataccatccacctcttgcgcatgctgttctacctgaatgaaggtgactgtatctcaattggacaaactgttggacatgccatgacaacacaaaaggttgagatggccgaattcacaattatagtggagaagctacccacccgttgcactgatgatgatttgatcgattacgggagacgattcatgtcatttttcgatgcttgcccaactgcatttggtggtctcacacgcctcataatagggaatctaagatttggtgaatcggacatccacaacgtcctcaagacctgtcagaatttacagtatttgcgtttgttcaactgcgattcaggaaatttgaccgtgctgcaacttgaacatccacagctcaatgtgctcaatattgccagctgccgttttgaaagcatcaagctcaactgcttgccgaaactagcacaattgatggttgagggttggctatctttccaagatcccctgacttttggttatgtgccctcactcgaggcggtacggcttgcaggtgttggtcttaaaaggcacaagttggtcaagctaagtaagatccttggaaagatctctgtaagagatctacgtttgaattttaagagtgaaaagatttgggttcaaccagaattaccacaaaaactggcatctgttttctacaaattaaggcttgtgaatctgtttcgtgttcctgaaggatgtgatctcacatggacaatgttcattctcgaagcagcgcctttcctgaaggagctacgcatgacggtatgggatcattggtgtaacatggaaaaggacgaggagatgagggcgtctttgtacagctcgaacaagagtgtagagtgggaatcttctgctgaggatttcaagcaccacaacctgtccgttctcaccatcttctgcttccaatctgaagacttcttggttgcgtttatcaagcgtatcatggaagtggccgtgaatctggaggatgtgttcctgtacaacatgctgtcgtgtgacacgtgtaaggacatccgaaggccgtgtaagttcccacggacgaagaggcagatgtgttcactgaagaagaggatcaacgaggggaactcgtttgccaaatttcacttcttgacctcagtaacggctgatcatgttccaatatctgagtacccgtag

SEQ ID NO: 30113 - DNA, 519 bp, Oryza sativa
  Clone ID: PAT_MRT4530_3454C.1
atggtggttggggctaagggcgtccagggcagtgtggggtttggttgttggctagctgaccatacgctcgccgtcggatggggcctgcctaccaatcttaccatgcggcgatgcgcgacgcgtggcccacctggccagctcgcgtggctgctctgcctgcaggattgtgattggggcgaggcgccgagccgggggaaccggttggttcggcggcggcgcttgcgttgcgtgttgcctcggtggtgcgtagctgtgtggggtgggtggctggagacttgcgcggccgggggatttggcgggggttggtgggacggagagagcgagcgagagcgcgtgtgtggacgggaggcctctgctgagccaacgctgacggtctctcgcggtcagtcggtccgtcggtccgtcggtcgctcgatccggtatcgtcctgtttttacacatgcacccactccgagatccgagacgctgcaggagtgcaggactgacccaagtggtcatcaggacaacacgatgaaatga

SEQ ID NO: 30114 - DNA, 861 bp, Oryza sativa
  Clone ID: PAT_MRT4530_34550C.1
tctcgtcagattaagagattattgcactagattttacaaaagatgaaacattgaattactttaaaatctataaagctggggtagaaaaccaacttgaaagtaaaattaaacggttgaggtatgattgaggtggagtgtatttttaaaatgagcttacttcattccgtgaaaagtctggaattattcatgataggatatgcctccctattcacgccaatctaatggggttgctaaaagaaagaatcatagtctaactgaattagtgaatgtcatgtttgacactacgggactttttaaggaatggtggggtgagactatattgattgtgtatcatgtgctgaataaaattcctaataagaacaaagattatatggggttgtttggctatggtcaatgtgcctatagtcaaaaagcataaatttggaccaaaacccgtggattgtgtgtttcttggttatgctattcacatcatagtatatagattcttaatttcgaattcaagagaacctgacatgcatgtttgtaaaaaattttttagtaaagatatggtactatattttttgaaaatgaatacacctaacacttctagtcaagaatctattttattccccgtgtcttttgtgctgatagaacacgatgttcaaacgtccatagaaaatcctaaggaggatcacactgttgctactcgatgatgactacattgtataccttgtggacgatactacaaaccatacaagagacatattcatctattgatgctgactattggaaggaagcagtatctaagtgaggtgacctcagttatgtctaatggcacttgggaagtccgacgaagggaagcctgctgtggccccgcaagtc

SEQ ID NO: 30115 - DNA, 513 bp, Oryza sativa
  Clone ID: PAT_MRT4530_34551C.1
ttaagagatgcttttcaacaactcaattggtaatgtaccgacctccaaggtcagatcattacttctcggctcccagagccatttcacttgattaggcggctcccagagccttttcatttttgtggactcccagagtccagctgcccagcagcacaacaatccgcttccactcgggaagcctagtctatgatgcccgcagacatcccgaatcacacagattcgtttctgaccactcaggtcatccatctgccacttaggctgattctcatgccacatagagggtctccctgaccaacatcgggccaactccggctttccttttaggactcccgggtgccttcctctgtttcggactcccaggatgcctctacccccacatcccggctttccgcctttagccagggtgtcccataccaccatgtggttgcacttgttatgcttgatgaatttcccaaaggaatcggtccttatatgcgaatacgggacagtgccacccaggcacagcatccgcat

SEQ ID NO: 30116 - DNA, 508 bp, Oryza sativa
  Clone ID: PAT_MRT4530_34552C.1
agaaatgcttttcaacaactcaaatggtaatatatcgacctccagggtcagatcattattaagcggctcctagagcctttttcatttttgcggactcccagagtccagctgcccagcagcaaagcaatccgcttccactcgggaagcctagtctatgatgcccacagacatcccgaatcacacagattcgtttctgaccactcaggtcatccatctgccacttaggctgattctggttacgattcccaatccacaacaactcatgccacatagagggtctccctgaccaacatcgggccaactccggctttccttttaggactcccggatgccttcctctgtttcggactcccaggatgcctctacccccacatcccggctttccgcctttagccagggtgtcccataccaccatgtggttgcacttgttatgcttgatgaatttcccaaaggaatcggtccttatatgcgaatacgggacagtgccaccaaggcacagcacccgcat

SEQ ID NO: 30117 - DNA, 518 bp, Oryza sativa
  Clone ID: PAT_MRT4530_34553C.1
atgtgccacgacggcggcaacgaggatgcggacagtggcgttgctccgccggtgcgacgccggccgctggatctacgggatcgtccatggccgcaaacacggcggaggcgtggggaggccagcgagctccatcgcgtggaaagggacgagtcagggttgccgcggtcgccggcgaggagctcgaaggcaggggcccagaggtggcggtggctcggcggctgccgcccttgcccatctcctccccccggcggcagaccgccgccgttccgctccaccgggcgccgggccctcgccctccggtccgcgcctccggttcgccccgggttgcaccaggcactcgcgcaccgccgcgccgtcccgggcgactggggctgccccttcgtggggcggaaccgtgagttcaaacactgcgcgagttcagagggagaggggccgcgctcccgcctaaaggggcgggaccctgtgtgggacgttgtggggaggaccgccagtcgagtcgcccccgagggggcgcatgg

SEQ ID NO: 30118 - DNA, 1520 bp, Oryza sativa
  Clone ID: PAT_MRT4530_34554C.1
atggacaccttcttcctatcgcacggcacgcccacgctctccatcgacgacacgatgccggcgcagcacttcttcaggtcgtggctaccggcggcggtggcgggcgcgcagcctccgcgtgccatcctcatcgtgtcgggccactgggagacggccacgccgaccgtcaacgtcgtccgcggcaacaatgacaccatccacgacttcgagggctatggcttccccaagtccatgttccagctggaatacccggcgccgggcgcccctgatgtggcgaagaaggccaaagagctcttggagcaagccggatttgggccggtgaaggaggaccacggccgcgggcttgaccacggcgcgtgggtgccactgatgttcatgtacccggaggcgaacgtgccggtgtgccagctctccctgcagaccggccgcgacggcgcgtaccactacgatctcggcagagcgctggcgcctctccgggacgacggcgtcctcatcctcggctccggcaacgccacgcacaaccttagctgcatggcgcccgtcgccgagggcacgccggtgccccagtgggcggcggagttcgacgggtggctgcaggaggcgctcctcgcgggcgggaggcacgacgacgtgaagcagtacgaggagaaggcgccgaacggtaagatggcgcacccgtcgccggaccacttcctcccgctgcacgtcgcgctcggcgccgccggggaggatgccaaggcggagctgatccaccatagctggtacaacgcgacgctctcccacgcgtcgtaccgcttcaccaccaccaccaagaacaaaccgattgccgcatgcaaagagtgaaacatgtcttgcttatatcatcgccattttactcttaacagacggcgcgtaccactacgagctcggcagggcgctggtgccgctccgcgacgacggcgtcctcgtcctcggctccggcagcgcgacgcacaacctccgcaggatggggcccgagggcacgccggtgccgcagtgggcggcggagttcgacgggtggctgcaggaggcgctgctcggcgggaggcacgacgacgtgaagcggtacgaggagaaggcaccgcacggcagggtggcgcacccgtcgcccgaccacttcctcccgctgcacgtcgcgctcggcgccgccggtgagggggccaaggcggagctgatccaccgcagctggagcaacgcctcgctctcctacgcctcgtaccgcttcaccaccgccaagaactgaaaaccggtcgacgcgatgcacgccggctcgccgcatgcaaccacgtgtttgcttgtaacatatttgactcgaacaataatccccgtgggctcacgtagacgtgtgtgccgtgttcgtgtttgtatttttcggagccgtggcttggggttgtttacttgtttttttttgtaagattgggttgggcctgggcctgggcctgggccgtggcacagccttatggcgttaattggtgttcttatttggacccaaaaaaaaaaaa

SEQ ID NO: 30119 - DNA, 765 bp, Oryza sativa
  unsure (1)..(765): unsure at all n locations
  Clone ID: PAT_MRT4530_34555C.1
ggcggccttggcggcggccggggtggcgacagcggacagagacttctcccgtgggctccggtggcaacggcgactcccgcgatggaactcggcggcggccggggtcggcgtcggcggcgaaggcttctcctgcggacagagctgtggcgacggcggcttccacgacggatccggcatcggcggcggccggggtggcgacggcgggctcccacggacggagtggtggcggcggcggctcccgcaatagatccaaccctcggcggcggcccggggtgcaggacgacgggcggaagactgcatccctgggtcggccatcggcgggttggagctggtggtggtgtgtcgacgtttgatgtcgtgattccggcatttacatagtatggggatcgttggtactaggatatatgcgagacagtacaatatttggggtagcctatctatcttttgtcgacatggcggtctgaagtgctgacacgtagtcgacaacagagtagtatttctcctcgaatccgtgtccggcgagatcagagacagcgttagatccttcttgatggtagtcgtaggtaccgtatggggactactaggctatctccaatgtgatatccggcggcttgtctggcgtatgtnggcttgtatgttgatctattgttttatgtcccctcttcttctaggggcctngtatttatacccataggtatccccttatcaaaatagaactagggaaaccaatatggatacaatccgagtagtccttatcattttcat

SEQ ID NO: 30120 - DNA, 260 bp, Oryza sativa
  unsure (1)..(260): unsure at all n locations
  Clone ID: PAT_MRT4530_34556C.1
ctgtgcttgtgatngatngatntggcaccaaacatatactacaatatggtaagaagagtttttatccccccatccctcgattaccccattatgaatagctgaagaggaggctgccagaggattaaaatatcatggccatccacccaaaccacaagtaattaatagggcgattttgggagaagaagaagaanaaaaagaagtttagatgtcgaagacgtttttgccggtgaacttgacctcaatggggctgacgtttttgc

SEQ ID NO: 30121 - DNA, 1794 bp, Oryza sativa
  Clone ID: PAT_MRT4530_34557C.1
ggctagtcgatctccccttcgcctcgtctccccgtctcctcctcgcgagctcgcccgcccgccgcctgcgccgagcaccgccgatctccaccccggcgagcagtagcggcggccggcgtcctgctgcatcccgccgagaaatttgggggttcagctgaaccctctatgcgcgacgatagatccgcccttggggagtagggaagggaggtgccgggcggcggggagataggaggagttgagaaggcgctgattgttgggaggaggaggaggaggaggatggtggaaggccccaagttcgccggcatgatgggcggcgtcgtcggcggcgccggcggccatgacgacattggtgggaatttctgcgacatggcgtactaccggaagctcggggagagctccaacatgtcgatcgatagcctcaatagcctgcagaccagcacgcatggcggtggctccgtggcaatgtcggtggataacagcagcgtcgggtctagtgattcccacaccaggatgctcaaccacccgggcctcagggggcatgtcgcagccaattactcggttgggcacagcattttccgccccgggcgggtgtcgcatgcgttgagtgaggatgcgcttgcacgggcactgatggacccgaggtacccgactgagacgctcaaggattacgaggagtggacgatcgatttgggtaagctccacatggggatgccctttgcacagggtgcatttgggaagctatacaagggcacctacaatggggaggatgttgccatcaagcttttggagaggccagaggcggatccggagagagccgggctaatggaacaacagtttgtgcaagaagttatgatgcttgcaactttgaggcatcccaacatagttaaatttattggggcatgcaggaagccgatggtttggtgcattgtgacagagtatgcaaagggtggctcagttaggcagtttctgatgaagaggcagaacaggtcagttccattaaagcttgctgtgaagcaagccttggatgttgcaaggggcatggcctacgtccatgctcttgggttcattcatagggacctcaagtcagataatctcttgatttctggcgataaatcgattaagatagcagactttggagttgccaggattgaagtcaaaaccgaggggatgacacctgaaacaggaacctatcgttggatggccccagaaatgattcagcacaggccatatgaccagaaagtagatgtctatagctttggcattgttctatgggagctcattactggcatgctccctttcgctaacatgacagcagtacaagctgcatttgctgtggtgaacaagggtgtccgtccagccataccacaggactgcttgcctgttctcagtgagatcatgacaaggtgctgggatccaaaccctgatgttcgccctccattcaccgaagtagttaggatgctggagcatgctgaggtggtgatcctgagcacagtccgcaaggcccgatttcggtgctgcatctcccaaccgatgacaactgattgaatgagacaacagagagttgcgaagaccttgatggaaggaagcataatcgagtgtatttatcacatgttagactctgcgccgctgaagtagaaatccaacttgagtgtacgactgagttatatactcaggtgtaaggcagttctatattcaaaatatttctctcttagagtggtgttttcagactgctttggtgtgttaggctctatccttttgtcgaaacatcatgcagatttccttttgttgtaactg

SEQ ID NO: 30122 - DNA, 172 bp, Oryza sativa
  Clone ID: PAT_MRT4530_34558C.1
taccggcgactgccgcaacgcctctcctgcgccgtctccgcgcccgccgaccacgctggccgagtacacgctcggcaccccgggcgccgccgggcggcgcacgcaccgactacttcgacctgtactgatcgaacggttcaagcgccgatgagcttcagcgagctagcaagcg

SEQ ID NO: 30123 - DNA, 1702 bp, Oryza sativa
  unsure (1)..(1702): unsure at all n locations
  Clone ID: PAT_MRT4530_34559C.1
atggccggcccggccgacggagcacagtgcaccgtgcagccgttcgccgccggcagccagccgtggctgctgactggttcaaccatactcactgggtcacgctttaatgcaactcttatgttggagatgctgcgggggaagcgcatgatgtttgttggagattctctgaaccgtggacagtatgtgtcattggtgtgcctcctacaccggtccatccctgagagctcaaagtccatggaaacttttgactcgcttacggttttcagagcaaagaactataatgccaccattgagttctactgggctccctttctagctgaatcaaattctgatgatgctgttgttcaccgtattgcggatagaattgtaagggggacagcccttgaaaagcatgccaggttttggaagggagctgacatcttggtattcaacagctacctttggtggatgactggacaaaagatgaaaattctgcaagcggcggcggggtgcgacggtaaggatattgtagaaatggaaacagaggaagcctatgggatggtactgaatgcggtcgtgaggtgggtggagaacaacatgaaccccagaaattcaagggtctttttcgtcacaatgtcacccactcataccaggagcaaagattggggtgatgattcggatggaaattgctacaaccaaactactccgatcagagatttgtcatactggggtccaggaactagcaagggcttgatgcgcgtcattggagaagtgttcagcacatctaaggtccctgtggggatcgtcaacatcacccagctttccgagtaccgcaaagatgctcacactcagatatacaagaagcagtggaacccgctaaccccggagcagatcgcgaacccgaagagctacgcggattgcacgcattggtgcctcccaggtctccaggacacatggaatgagctgctctactccaagctgttctttccttgagcaaaagaacagtttctgatatttgagtttggagcactgatccctatgtctgaactctgaagagaattttgctgaatgccacgtccaagttgtgagtatatcagatcacctggggagtttctgaccttctggaggagagtcagtcagtctaacatcatataggtccaaacattctgaagattacgattgaatcataaatatacaaggagcactagatggaaatatcatggaaaatgctgagctcgttgaaaagccacatgctcatactgtactaatcacatggctgttgattttgttggacatgaatatcgaggcgacaatattcttgcagtcgcatggagaatattatgtggcctttccgagttaatggaagctaatcacatgctgttgattttgctgcacattcttttttgagtaaaatgcaccggcagtccttaaacttgtcaggaggtttcacttagatccacaaacttgcaaagcatacatcaaggttcttaaacttggtttattgtatcatcccggtccaagccgcgtttgaccatggtctnnacctacgtaacacgctatgtggatgatgacatggaatctttttatttttttctcccttctttttttttctctttcttccttgtcgaaaagacgaaaatcccttgtacatgtcatcgtccatctcatcgtattttcataaaagagaaaaaaaagaacataaaagagaaaaaaaaaaaaaaaa

SEQ ID NO: 30124 - DNA, 1322 bp, Oryza sativa
  Clone ID: PAT_MRT4530_3455C.1
agagaaaccaaacaatgtacgcgaccaagccgctctccctcttcaagagccacccggaggcggcgacccagccgccgccggatggccggaactccggctacttcgtcgtgaagggccccgacgacgacggcggcggcggcgacgacgagacgtgctgctggggcacgtgcggcgggtcgcgcgtgcgcgacctgccgttcccgcagaaccgcgtgctgaccgtgcggtacacggagcagcacggcgagagcagcaccacctacgccgacgccgtcgtgttcgtccccgtccccgacctgccgctggcgtcgaaccggtactacgccgtcgtcgccgccggcaagcacaagggcctcgtcagggcgtgctcccgcgaggaggacatgaccacgctctgcttctgccgctgcatcaacgacgccaagccgagggtgttcgacccggccgacgtctaccagcaggtcgagatcgtgcagcggcggcgcggccggttcacggcgaggtccgtcgccgccgacggcttcccctacttcctctaccgcaagaagtactggcgcgtgtacgcctccaagccgaagcacttcgacctcggcgaggcgccggggctgaacgccgcgctccggtcgcgccagctcgccctcgacgcgttcccggtgacgacgaccgccgccgtcgggaagtggtacgccccgttcttcctcgtcaaggagagcggcgtctccccgccggagcagatggaccgcgccacgttctacgaggtgtcgctcgagcagcggtgggaggcggcggcgcacgggcacggcgacggctacgcggggaagctggacagcaagagggtgctcatcggcgggagcgtcgaggggaggcaggagggcggcgggcgccacggcgacgacgggtacgtgtggttcagggcggcggcggcggcgggcggcggcgggcagagggtgggtttgtgcgcgagcctgtgggagaggatgaggtgggaggagtacaggggagggtgggtcgacgagcacgagggcgccggcgaggtggccggcggcgggtcggtgctggtggagaggttatacctatcaaatgcacagttgcgaatcttcaggttaaatccttcaaaaaccataaaaaggaagaagaagaagaagaagaagaagaagaagaagaagaagaagaagaagaagaagaagaagaagaagaagaagaagaagaagttgcgatttgtaatgatttttttttatcaactctgtgagacagtggagaagatgtatttgttatggtttgtcaatcaccttgctttgagctttcgccttgtaactatatag

SEQ ID NO: 30125 - DNA, 423 bp, Oryza sativa
  Clone ID: PAT_MRT4530_34560C.1
cccgggctgcaggaattcggcacgaggcagccaccaaaaaaagagaacaacattgaaaacacagctgagaataataatagcgatactgttgatagcataaggatcgaatgaaatggtgatggaaaaagtaagtgtagatagaaatgaaatgatctctgaggaaaggatggaacacaaacacacaataatctcattgaaggtattccagtaagacaagataccaactgtgggcagaatgtggttgtgaattctaatgtggtcaaccaagattgctctattgtctccaaagaaatcgacttgctaaaatgcggtactagagaaaaccagggcaagtaatgctggaacaccggaagaaaccagggcaagtaatgctggaacaccagaagttgagtccacagagagaatgatccctagactagaaca

SEQ ID NO: 30126 - DNA, 757 bp, Oryza sativa
  Clone ID: PAT_MRT4530_34561C.1
cacttagaaaaatgatggattttttctcttcgtgcggctggagtaggtggaggggcgacgtcagcgcgctagagcaggcagtgtctccgggcgagcgcggctgcggcggcggcaagcggcggcgtgggcagtccgcggccggagcaggcggagcggcggcgtctacgggcgtgggtgaagcagagaggcaggggacgcgggaggggggcggcgggcgagcggcggcgaggcgtcgcctctttccccctctcccgccggcctcatctcccccccactccgtccgctcccgacgttgcggccccctcctccacctgccgtgctcgtccgctcgcccgccgtccgctctgcccgcaacccgccgcgcttgtcttccgctcgcccgccgccgtccaacgccgctccgcgtgccgccgcgccgcccacctccgttcgtgctgtgggaggaaaagctaaggccggtgccgtccaagcccggcaacctgtcgttcttcgacctcatgagcatccctggcaagctcagggccggccttggcgcgctcggcattcgaccgccaccccctttgattcatccgccaccggcggcgacatctccgtcggccgcggggatcccctcccggagcaggagcccgtcccggatctcgcccccacctcccgccgcggtcgcccacaatccgccgccactctcgccgaccgtcgcgcccgctcctgcctgcttcgcctgccgcggccgcgctcgccctccgccgctgccgccgct

SEQ ID NO: 30127 - DNA, 166 bp, Oryza sativa
  Clone ID: PAT_MRT4530_34562C.1
tgttatatcaaaagtgtcagcttgtacaccggggtaattatgtacatctaagagttattataaccactagacaacataataactgtatatgtcagacttgcttattaaatcagacaaactatgctagctgaagataacttaacagcatattctactactgtggatg

SEQ ID NO: 30128 - DNA, 596 bp, Oryza sativa
  Clone ID: PAT_MRT4530_34563C.1
gccttacttatttgcttcacggcatgcctgacgtctctccttttaatcctcattaggattctatttggtgttttattaacaattttatatgtcgtatcaaccgccaccactctactcctctataggcatgttacttaatttatctcgtcatgtgttttagatagtcttttcttactatattcttttagggatagaggaggtaactgtcatggttacggttaaggcatacctaatatcctacgatttatggaatatacgagtatgatataccttcatgtacatgggttgtttccgtgtgcattgtaggaatccatcacgaattatgaaaaatatctctacggatcgggtgatttacaaagtactactcggatgtcttcgaggagaccaagatgatccacagtataaaatagaccctttgggaggagtgtagggcatcgaatctcatcgccaacacacccaccacagtttatgaagccagagcacacagaggcaagtcgcctggagatcttatcgagtctatcgactatgatctcatcctcgtaccaacgtaccccaatactctactcatccggtctacgtgtatcattcgtcgacag

SEQ ID NO: 30129 - DNA, 646 bp, Oryza sativa
  Clone ID: PAT_MRT4530_34564C.1
cataacaactaccagcgtatcaaggcctttgtcttttgaaacacatgacactttgccaaccatgacgcgaggatgcgggataatagccccattacatagcgcgcggattaccagctcgagagctaacgagcctacctcctgacacgggagggtgcactggactaccaaatcgatcttcctgaactctcctaatagcatagaaaggagcacgcacattgggatctggggtaaacccgagacgactgctaccctgggcctaaaaagatgagccttccgttcgacgaaccgatctgccccatgagatggctccccggctacagaacaagaccgctggtcgtggctgcaccggaaatcgtggctgtgccttcacttgactcagcgaacgatccgcactaggctcaacatctgagtctgacgagctcatactttgaccctgcatgcttgaacgatggggcactagaatggttgacagaactgtctacttgatagagaccttgctatgggtgcggaagagatggtccgtcccatgcacatgccctgatcgataagagagaagctgccactggaagcatctacatcaggagacggacctaggacagaaccgtcaaaacggaccgattacgcaccgcattcgccgttgatgact

SEQ ID NO: 30130 - DNA, 597 bp, Oryza sativa
  Clone ID: PAT_MRT4530_34565C.1
caggaatatggaaacagccggagcttagaataacgtagaatcagaacaatgaatggaaacgagaagacgaagagaaaagagaaaagcgcgagagaaacaacagcaagagacagagcagggttggcgccagacaccaagaccgcaaaaagaataagacgcaacggaggaggtgaagaaagccgaggaacaaaacgaggcgtggcagcggagaaggcgaggcggcggcgaggcagggcggaggagcgtcggcagcgaggcagggcggaagggcggtagtggcggcgaagcgagcgcaacggcggaggtccacgccggcgacgggatgaggacgacgacggatagggatgaccagcttgctcgtccagacgcccaccgtcacgatgcacttagcgccgtggaactcctcgccgccgctcgtcttcgcgaagactctggcctccccatccttcttgacgaccttcgctcttatcgcgtcgccgctgccgcgctgctgcgcctcgtgccgcgcgcgccctcctcgcgccccgcgccgccgcgccgcgcgcccgtcctgtcccgctgccgcgccgcgcgccgttaccgtcggccgtctcgtcc

SEQ ID NO: 30131 - DNA, 804 bp, Oryza sativa
  Clone ID: PAT_MRT4530_34566C.1
atggccagttggagaaaaataaactcaaggtttatgactgcaaagcatattgaagactgtttctcatctagatgggcacttcttgaacgagtttcttattatcgcatcttggacaagaatacatcactggagtacgaattttctttgttccgtgccactttatcccctagcgtcggtcgcgccgtcgtccttcatcctcccggcgccgccgtcatccgtccgccactgctcgcgccagccacgtcgtcgcccgtccgtcgttgccatcggcgcacacggtggagggccggaggagaggggagcagcggtggaggacagagggtgtcgagcttcggcagcggtggaaggcagagagcatccagctccgttgtgtgggttgctgatcagtcggcgcccatcgccgaccatccttcctccccggcttccatgctcgccattgccagcgacggcaacctagtcttgtccgatggcgccaccggccacgccctttggagtactaacgtcaccgccggtgtgaactcgtcggcgtcgggaggaggcggcggtgctatggcggtgctcgcaaactctagcaacctcgtgctccggctgccggatggcaccgtcttgtgggagacgttcgagcacccctgcaacacattcctgcccggcatgaagatcggcgtcatctaccgaacgcgcggtggcgtgcggcttgtctcatggaagggcaccaccgacctgtcgccggggaaattctccttcggcggcgacccggaccagccgcttcaggtggtcatctggaaaggctcgcgcgtgtcctag

SEQ ID NO: 30132 - DNA, 134 bp, Oryza sativa
  Clone ID: PAT_MRT4530_34567C.1
gttaaatcgaacgctcggagtcaggacctagggttcgcttgtaacaggcaatgtggggtaacaaatgagctgcctattattgtaaacactagcatacgcattgtcaccaagaacacagttgttgcagcatacga

SEQ ID NO: 30133 - DNA, 332 bp, Oryza sativa
  Clone ID: PAT_MRT4530_34568C.1
gctccgcagctagctgtgatggcagttgtcttggggcctgatcaagttgccacggaggcacggcggatagtcgacatggattgtcggccatgggtgaagaagtatcatcgcaccaccggagactgactgtcgaactgactacaaggttgacctgatcaccacactcacaaagtcgtgctctgttgcgcagaatatcaactatcaagggctacacgtactcctaagcaaaagatggactcggttaaagcgataccgagatggataggtggctgaccaacattgatgctctgtgacgctgagacaggagacactgagcttgattagggtgtcta

SEQ ID NO: 30134 - DNA, 456 bp, Oryza sativa
  Clone ID: PAT_MRT4530_34569C.1
agcttgaaaacagtctaaattacaatcaaatagcagcaagccacactaattaattaaagatagtacatatatatatataggtggttcgtctctgtgaacggagaaaaaaagagataaacatgaacaaatgaaacaagcagtatttgctaatgtaacaacacattttcttctgcatgtaaagtggtggtaaacaagccctcctagctaagggtctttaggatattaatagtaattcaccagtttagtcttcagctcttggttattctcctcaattcatttacctgcccaatgcaaagatcgaagctgaacaggccgccgcggctactgcgcggcggtgggccggtcgccgccgccggcggtgccgggcttgaggaacgtcccgccgccgagcggcccgagcccggacatcggcccgccggcgccgcccatggcggacgagtacccgaactcgtagcc

SEQ ID NO: 30135 - DNA, 5468 bp, Oryza sativa
  Clone ID: PAT_MRT4530_3456C.1
atggccggccacccacccaaccaccacggagaaggcatgattgactttgtggcagagttagcacgtatgacgctggtggtgggctaccccaacgcgccggagtacacgactgttccaccgctcagtggcgagcttccccaccgtgtccgcttggaggtccatggctacgtggggacttgcctcgctaacatggtggttgaggcgtccggaggcacagcagatcacgcctgtcaggaggcagcatacctgatgatggccagactacgggagtgccacaactacatcttccatgacacggcgtatcgatttcaccctcgtcgagccagcggtgatgatgtcagtaccttccgtccaatagccggcgagaacgacaccacctttgatcacatgtgcgccgtgatgagggggatggacaggatgcacttggacctgcacaagacgtccaaggccttgaatgatgggaagctcatgaggatcgtcgttctaaaggacgagatagcgcgcttgaagagggagaatgctcagttaaagggtcttcccgcgccaggaggagtccggatccacactacgccccgcaagtcgacaacggcacccgtgcgcatccagcttgcgcccaggaacccacctccgcccgcagttcccgcagcacctccagttccgcccgcagctccagcagttcccgcagctccagcgccagctccagctcatgttcccgtgtcagctcctgcatccgctctctccttcgcgcctgcaacagccgtcaggggccccgccagtggcaatggaggttggttgccagctactcccagtggcagtcgcgacctcagcagcagcagctccagtggctcagagctgggtagcggcgagacttatctgccaggctccaggagtcgctcagagggacgtgatggtctacaccaggactggcacccgcacgacaggtgagggcagcaacggcgaagaacgcgctgatggtgtgcatcccaacagtgattccggcaatggtccgccaccacttcccaagaatccgacgctagcccaagtaatggcacatcagactcagatgatggcagccatgatgcagcagatgcagcagcagcaccagcagatgcaccagaggatgctgcatcacgccgaacagcagcaccagcagtttggtccccctccccctcagtccaagttgccagagtttctacgtatcaggccacccactttctctagtaccaccaaccccatggaggcaaatgactggctccatgccatagagaagaagccgaatctcctgcagtgcaatgatcaggagaaggttgctttcgccacacaccagcttcaaggtcctgcgtcagcttggtgggacaatcacatggccacccgcccgccaggcactgaagtcacttgggcggagttctgtcgtagcttcaggaaagcgcaggtgccagacggggtcgtggcacaaaagaagagggaattccgggcactccaccagggcaacaggacagtgacggagtatctccatgattcaatcgcctcgcgtgatatgcaccggaggatgtccgtactgacgccgagaagcaggagaaattcctagcaggtctggatgatgagctaaccaaccagttgatatctggagattacgccgactttgagaggttggttgacaaggcaatccgtcaggaggatcagcgcaacaaaatggaaaggaagaggaaggcggcgcagttccggtccaaccaagggagccaccagcgaccgcgcttcactcccggacagcagggtagacctaccaccctgatcgtccgccagcaccgccctttcaatgccagcaacttccatcagggcgccagtggctgtcagaaccaccatggcggtcagcccaaccgcagtgcagctccgtgcccaccaatggcactagcacagtcagctacgtccgcgcaagctaagaaggagactgggacaaagccagggtcctgcttcaactgtggcgagcttggccacttcgctgacaaatgcccgaagcccaggcgtgccgggccaaggtttgtctaggcttgtgtcaaccacgcgtctgcagaggaggcgcaagcagcaccagaggtcgtactgggtacatttcctgttaactcaatccctgcaatagtactttttgattctggtgcaacgcgttctttcatttcaaagaaatttgtggggatgcatgggttaaggaaagaagagcttaatacaccaatgagggttcataccccgggaaatagttcaacctcggtcagttttagcccttcagtgctaatagaaatccaaagatcaccatttctagccaatctcattcttcttgaatccaaagacctagatgtcattcttgggatggattggctgaccaaattcaagggagtcattgattgtgtgaatcgcacagtcaccttgaccaacgagaagggagaaaccgtagtgtacaaatcactagtctcaccaaagcaaggggtctccttgaatcagattgaggcggaaatcccagtggtcaccgaggagaagaattcgaggaaattggaagagattcccatagtttgcgagtacccagaagtctttcctgaagacctcactaccatgccacccaagcgagagattgaattccggattgatttggcaccgggaaccgcgcccatttacaagaggccgtacaggatggcggccaacgaactagtagaggtcaagaaacaggttgatgagcagctgcagaaagggtacatttgaccaagtacttcgcattggggtgctccggtcatttttgtggagaaaaaggataagacgaagaggatgtgcgttgattatcgcgcactcaacgaggtcacaatcaagaataaatatcctttaccgcggatcgatgatttgtttgatcaactgaagggagctaaggtgttctctaagatagacctgcgatcaggctatcaccaattaagaatccgggaagaggatattccaaagatggctttcaccactcggtacgggctgtatgagtgcacagttatgtctttcggacttaccaatgcacccgcattcttcatgaatctgatgaacaaagtgttcatggaatttctcgataagttcgttgtggtcttcatcaacgacatacttatctattcaaagtctgaaaaagaacatgagcagcatctccgtctggtgctctagaagttgaaggagctccagttatacgccaagttcagcaagtgtgatttttggttgacggaagtcaaatttctaggccatgttattacagctcagggtgtggcaatcgacccatcaaacgtggagtcagttaccaaatggaccccaccgaagaccgtgtcgcagatttgaagttttcttggacttgcaggttattaccgccgattcatcgagaacttctccaggatcgcccgacccatgacttagttgcttaagaaagatgagaagtttaaatggacagctgagtgcgataagagctttgaggagttcaagaagaaattagtatccgcaccagttttgattctgcccgaccagatgaaagacttccaagtctattgcgacgcatcccgccacgggcttgggtgtgttctaatgcaggagggcagagtggttgcgtatgcctcgcgacagttgcgtctacacgaagggaattacccaacccatgatctagaattggcagcagtggttcatgctttgaagatctggaggtactatctgattggcaaccgctgtgaagtatatacggaccacaaaagtctgaaatatatcttcacccaaccggacctaaatctccaacaacgaagatggttggaactaatcaaagattatgacatgagcattcactaccacccggggaaagccaatgtggtggcagacgcattaagcaggaagagttactgcactgccctatgcatcgagggcatgtgtgaggaattgcagtaggagtttgagcatctcaacgtgggaattgttgaacacgggttcgtagccgctctggaagcacggcctacgctcgtcgatcaagttagagccgctcaagtgaatgatcctgaaatagcagagctgaaaaagaacatgagtcggaaaggctcgggatttccttgaggatgagcatggcacaaactggatggggggaaagattgtgtgtacctgacgacaaggaactgaaggatatgatactcaccgaggctcatcagacacagtgttccattcacccaggcagcaccaagatgtaccaagacctcaaagaaaagttttggtgggccagcatgaggagagaaatagctgaattcgtcgcactctgcgatgtttgccagcgagtgaaggtagagcatcaaaggccagcaggtttactccaacctcttcaaatcccggaatggaaatgggaggaaattggaatggattgtataacaggactgccccggacatcatcaggtcacgattcaatctgggtagtcgtggatcgactcaccaaggttgctcacttcataccagtgcataccacctatacgggaaagaaattggcagagttgtacctggcaaggatcatgtgtttgcatggggtacccaagaagattgtatctgatcgagagagtcagttcacctcaaaattctggcagaagctgcaggaagaattggggacccgtttaaatttcagcacggcctatcacccgcaaactgatggtcagaccgagtgagtcaatcaaatcttggaagatatgttgagagcttgcgctcttgattttggtggagcttgggacaaaagcttgccatatgcggaattctcgtacaacaacagctaccaagccagtctacagatggtaccgtttgaagctttatactgccggaagtgccgcacaccactcttctgggatcagacaggcgagcgtcaactgttcgggacagaggtattagcggaagcagaagagaaagtcagaaccatcagggaaaggttgaggattgccctgtctcgacagaagagctacacggataaccgccgaagggagctcacttttgaagcaggggattacgtgtatcttcgtgtcactccgctccggggagtacaccgttttcagacgaaaggcaagttggcaccacgcttcgtgggactatacaaaatcttggaacgaaggggggaagttgcttatcagctagaacttccatccaatatgattggcatccacgacgtgttccacgtgtcccaattaaagaagtgcttaagagtacccgaagaacaagctgattcggagcatattgatatccaggaggacctgacatatgtggagaagccggttcgtatacttgataccagcgaaagaagaaccagaaacaaggtcaccaggttttgccgagttcagtggagtcaccattcagaggaggaagcaacctgggaaagggaagatgagttgaaagccgcccatccgcacctcttcgccagctcctccgaatctcagggccgagattccgtt

SEQ ID NO: 30136 - DNA, 1035 bp, Oryza sativa
  Clone ID: PAT_MRT4530_34570C.1
ggccggggccgacgccgtcgtgaacgtgagcgagcgcgccgccgtgctggtcacggacacgacgtgcgcgccatgatcggcgacaggttcgagatgcgggacgagtacctggagggcgtggccgaggtggggaagctcctgctcgggctcagcctcggcgacctgttcccgtcgtcgaggctggccagcctcgtcagcggcacggcgcgccgcgccgcagcgagccaccggaagatgttcgagctcatggactgcgccatcaggcatcaccaggagaggaaggccgccatggacgccgacgaggacatcttggacgtgctgcttcggatacagaaggaaggaggtcacgatgccccgctcaccatgggagatgtcaaggacaccatacttgatctttttgctgctgggacggagacatcaacagcaacactccaatgggctatgtccgaggtggtgaggaacccaagaataatgcaaaaggcacaagccgagctacgtaacaagcttcaagggaagccaagtgtgaccgaagatgacctagttggcctaacctacttaaagctcgtcatcaaggaaaccctaagactgcaccccgccgcaccaatgcttgtcccaagggagtgtggggagtcgtgcaaggtgctagggtacgacgtgcccaggggcactaacgtgctcatcaacgcgtgggcgattggcagagaccccaattactgggatgacacggagacgttcaaaccagataggtgtgagaataacaagtataactttagaggcaccgatttcgagtacataccgtttggatctagacgaaagatctgccctggtccggcgttcacacatgccatcttggagctcgcgctcgccgctttgctgtaccactttgactgggagctcccctgcggagttgctccaggggaggtggatatggccgaggagacaggcgtcgtcgttcgcccgaagaacgacctctacctgcgtccggtcgtccgtgtgccgccgggagctgcctcgagcggcaatggtggcacctag

SEQ ID NO: 30137 - DNA, 302 bp, Oryza sativa
  Clone ID: PAT_MRT4530_34571C.1
ctcaaacttatgcttagtacatttgagaaactttcaggcttgaaaatcaattttcataaaagcaaattgttttgttatggcaaggcaaaagaagtagagaacgagtatgtcatattatttggatgtggcaaaggaaattaccctttcaaatatttagggattccaatacatcacaagaaattatcgaataaagattggcagaggatagaggaagattccaaaagaaattgagtagttggaaaggaaaattcctttcggtgggaggaagattggtgttaataaacagctggcaatgctcaagg

SEQ ID NO: 30138 - DNA, 786 bp, Oryza sativa
  Clone ID: PAT_MRT4530_34572C.1
tttttttttttttttttttttttttttttcatagataagcacttgaaagttgagcaaattacaacacaaaacaactcaatgaacacacacacaaacacttaagcaacacaagagaaatctctaatcaacgatagccgtacaaactccagcgtacggtagatacatctcaccgtacattagtacatatatctgacgtggcacaattaacccacaacgttatacacgtggaatcacattaattgcactatactactatacgcatgcgcacacgtcgtcctacgagtcatcgtcttacggccggaatcctccgccgccgccgccgaggccaactccgccgccgaacccgccgaacggcccgccgccggcgccgaacccgccgaaggggccgaacccggcggcgccgccgccgagcgggccggtgtacccgccgaagagccccccgcggccgtcgctcccgccgaacgccgtcttggcttcccccacgccggcggcgccggcggcgttcgccgtgtcgccgcagtcgtcgtcgggcatgatcctcgccgccgtcaccgccacggcggcgaggccgaacagtagcaggaggacaaccgccacgcgcgccgccattgccaacctctctgatctcgatctcgatccctgcagcgtcgtctctctcaactccggcgaggtggagatcgatcgatggtggtggagcgggaggcgagaggagagggggtttaaaggggaggaggagagacgatggggagttggaggaagcgattaatggcgggagcaagtggttcg

SEQ ID NO: 30139 - DNA, 342 bp, Oryza sativa
  Clone ID: PAT_MRT4530_34573C.1
gaaacagctatgaccatgattacgccaagctatttaggtgtccccaccgattgctcaagcttctacgcatgcatgcatgaagttgtccgaagtgctacaggtgggcagtttactatgccttcaggtatgacacggtccgatcaaagccagatggcccggttgcccaattctcaacgtcatgggcacaacgagatgacagaacgtaagaaacatatcaataaacatactccatcgatttcaacgatcgaccatttaataagaaatctaaaaagaagagtacgtctcattgcattttttaagccaagtacgtcattatcttcaaacacagtgatttgtgactag

SEQ ID NO: 30140 - DNA, 1533 bp, Oryza sativa
  unsure (1)..(1533): unsure at all n locations
  Clone ID: PAT_MRT4530_34574C.1
atggagcactccaaggaattcatcgacgagctccacaagcccttgacggcagaagagaaggcgcagatggtggcagacgggaaggagaaggttcagcttcaagaaaaacaagaggagctgacggcagaggcgaaggcgcgtatggtggcagacgggaagaagaaggttcagcttcaggagaaacaagaggaggacggcactgcgcttcgtcaggggagtcgtctttcggctaccgacctcatccggtacaccctcatgggcatccggtttgcgttcacggcggcgatgcactactaccacttccagcacccaaagcaagcactactccagagagcacccaaagcaaagcccaaggaagaagaggacgagcgcgagagagaaacccatcccagccagcccaaggaggcaaggatcatggcccgatggaccctccgacttctcctctgggtcctcgcgttcggggtgattctgagccagctcctccgctacgccaccatcttcgcgctcgccttcgggttcggggacggttcgcggaggaggacgctctcgtccgcatcgtcgctgccgccgccgtggcggccttcttcctcgcctatttccgctgagcggagtcgccggcagcggcggcggcttcctccaccgcgccgcgcgccgccgggctcctcgacgagggggatggcggtgggaacgcgtctccccgcgccaccgacgaaggcgcagcagaggcagcggggaatcggatgcggcggcgctagttgcagcggtggtggcgcctcctcttcgccgcgggggatgacggtggcggcggggccgcgtctcgccatgcagcagacgtcgacgatcctcgcgcctccgatgacggcaaagcagaagcagcaggggatcgggttcggcggcgctgtggcgcctcctccttcgccgcgggggacgccgatggcggcggggccgcgtctcgccatgcagaagccgtcgacgatcctcgcgccgccgctgacaacacagcagaagcagcaggggaccgggttcggcagcgctgtggcgcctcctccttcgccgcgggggattccgatggtggcggggccgcgtcctgcctcgcagagcaagcggaagaagccgaacgtcgcgccgccgcagcagcagaagattcagggcttcggcggggccggggctggagctggaccggtgccggtgtcttcctcggcgcgcgcgatggcggcggtggcggagaaggcggcagctgcagagactgaggatgaggcgcgggcgagggagcgcgcggcggcggagcagatcgcgcacgaagacgcgcggaaggacttcgtgacgcccttggcttccgtcgaggacgccatcagcaggctgaaggatctgaaggaggagtagcagaaggaggcggcggcgctgcagcggcagctcatgctagagcaacagcaacagatcatggcgcggcgcccgcagcgnntgaggtagtagcacagtacgcttgctagagcttcgggattcgtgctagaatacattgacctgattcctttg

SEQ ID NO: 30141 - DNA, 456 bp, Oryza sativa
  Clone ID: PAT_MRT4530_34575C.1
atgccgtacaccagatcagggaatgagggaaccgatcgagttaccccgccccaaccggcaggtgctagagtcaagacgatgatgacggatcgcaattcgcaaccacacacagttggctgcgtctgcgtctgcgtcggcgtcggcggcaagccagaacttgcggtgaggcagaggctagggcatggcagactgcaggaaggcatcatcgagggggagagcgcccggactggccagctagctaggaggatccgaaggaaccactgttgggaggagttgagtctgaagtggagttgtggagctgccaaaacccagctctacaactctagtacattttgtgagagagctccacccaactccactcccagtttgggtggagctgaagctgtttggctaagctctaactccaggaggggtggagctggagctggagctggagctgtgccaaataagccctaa

SEQ ID NO: 30142 - DNA, 429 bp, Oryza sativa
  Clone ID: PAT_MRT4530_34576C.1
gcaaggggaacagttacctacggaaacccaagtacaacataccggccatggagaaggagaagccatcagttcctgaatgataccaactccagaaaagggtcagttctgggtgcctaaactcagctgattggatcaatggaccacccaggccaaattaccatgcacttgcaaggattggagctcgccacagccattgggttgaggcgggcatccagccgaaggccacattcagaattttggagctagcacctcttgactcgccaactaatgaaacgctgacttcgcatgttgcgcgaggcttgtatccatcagcgacctgacatctgaagagaggaagcagactctatgtatgtacataaagaagaacgagactagaaactctggcctaaagatcaagtgtgcttgcaggcaggctcttgcagacagtca

SEQ ID NO: 30143 - DNA, 300 bp, Oryza sativa
  Clone ID: PAT_MRT4530_34577C.1
atgcccggcagctgcagtacaggcagcgacatcgccgacgacgatccggccaagcccagcaattgcagtggcagtagcggcgttgctgacgactgtccggccatgtccggcaattgcagtggcagtagcggcgttgctgacgacggtccggccatgtccggcaatggccgcggtggcgtaggaggtggcagtgccgacgacgtggagggctcgtcgacgccgcggaggcagcgttcaccgattctcttcgtcctccttccttttatcttctacaagtggtacacggcaagaagttgttaa

SEQ ID NO: 30144 - DNA, 984 bp, Oryza sativa
  Clone ID: PAT_MRT4530_34578C.1
atggcgccggcggggggcaacggcaacggcaacagccaccgcgtcgttggccgcaagcggcttctcgtcgccggcggggcgggggaggaagatcgtctacgggggaagaagcgggcggcggccggcgctctggtgccgtacgtggcggcggcttcggcgtcggcgcccatcgatgcggtcccgctcgccgccgtggcgccggcgtcgtcgtcgtcgctggcggcgggggaagtgccgaacgagccgtcgtggatacggaagatagtgttctaccggctggggctcccgtacgacctgccgctggtgttcatcgaggagaagacggtgacccgcaccgacctcgactcgcaccagaatcggttccgcctcgcgtgcggcggcgtcggccgcagcctcatccccatgctcacccgccgcgaggccatcgctgccagcttcctgcgcaaggaggaggatgaagctcaagctgcaggattaactccgccgcaaccggaggagaacaacaccgccgtcgtcgtggagcagcagcaggaggaggaggaggaggaagctgcagtaacaactccgccgcaaccggagagcgacaccgccgtcgccgtcgcggagcagcagcagcagcaggaggaggaggagacggcggggccgggcgggaggaagaagaagaagaagaaggggaggtcgcacggcgggctgccggtgacgctggtgcacctgcgcggcggcatgaagcggctgctgctgacgcggtgggacagcagcggcgccgccatcatcaagggggaaggctacctcgacttcatcgcccggtgcggcatcaaggagaaggacgtcgtccatgtctgggccttcaagcagcaggggttccgcctcttcggcgccacctacccgcccggtcccctctacatcctcatcgccggcaccgcccgcctcgccgcgccgccgccgccgcagccgcccgttgcacaatctcctccaagttgttga

SEQ ID NO: 30145 - DNA, 1416 bp, Oryza sativa
  Clone ID: PAT_MRT4530_34579C.1
atggacgccgccgcgacggccgcgacggcgacggccgccgctgcgatggtgtggttcaggaaggggcttcgcgtgcacgacaacccggcgctggacgcggcccggcgcggcggcgccgctgcgcggctgtacccggtgttcgttctcgacccgcggtacctccgccccgaccaggccgcgccgtccccgggctccgcgcgcgccggggtcgcccgcgtccgcttcctcctcgagagcctctccgacctcgacgcgcgcctccgccgcctcggctcccgcctcctcctcctccgcgcccgcgacgacggcgacgtcgccggcaccgtctgcgccgccctcaaggactggaacattgggaagctgtgcttcgagtccgacaccgagccgtacgctctggcccgcgacaagaaggtcatggatttcgcggctgcgtcagggatcgatgtgttctcgccggtgagccacaccctatttgatccagcagaaatcatagagaagaatgggggtcggccgccgatgacataccagtcgttcgtggccatcgccggcgagccaccggagccaattatggaggagtactccgagctgccaccggttggagataccggggagtatgaattgttgccagtgcctagagtggaggagcttgggtatggggatatcagccaggaggatctttcgctgttccgaggcggcgagacagaagccctgaagaggatgagagaatcgcttcatgataaggagtgggtcgccaaatttgagaaacctaagggtgacccgtctgcattcctgaaacctgcaacgactgtcctgtcaccatatctgaaatttggttgcctgtcgtcaagaactaatctcaattttgcattagacatgcccaaggagtacatctatgaaccttggactgcacccctcagcattcagaagaaagcaaactgcataattggcaaagactacccaaaaccagaagggatgctaagaaacttcaacttaaagtttgaattgtacttgtttgagaatacgaagtgtggctgcggaaagggtgccaaggaaggcaatgagacctttgcgcccacccttggatggtattgtatgctgggtcaaaggctccttggatcctccctggagttgaaagtacatgcatccaatcttaggataaggcagctgtgggaagatggcaaatgggttgctattccaaaggattctgcaagattccctggtgattcacctagaagccagttgagatgtggaaaagttggccatgagttggtgcatacttcaagggacaaccgtcttctactgaagaaaaagaaagtatatgagggcaatacttctcagggcttgaagagaaaatcatctgcactatcagctttccccatgcagtacagtgaaatgctgttgattcccaatgcttag

SEQ ID NO: 30146 - DNA, 281 bp, Oryza sativa
  Clone ID: PAT_MRT4530_3457C.1
cgccgcggcggcgggcggggaggaggaggaagaggagcacccggaggcgggaggcggcggcggctctgcgtcggcgatgtaccggatggagcgggggctccgggaggcgctccggcccaagtacgccgggttcctcgaggccatgaacgcgcagcccggcgggctcaagctcctcgccgtcatccgcgccgacctcctcgcattgctgggggaggagaacttgccagcgctgcgtgcgctggacgggtacctgaaggagaagctcgtgacatggctcagcc

SEQ ID NO: 30147 - DNA, 463 bp, Oryza sativa
  Clone ID: PAT_MRT4530_34580C.1
gttctacctgaaggagaatgacgtcttccacaggggcattgatgtggccaagatgggacttgaactgaaggatctggttgacatcactgtagagacatacaattctgccgatgcatttgggcttactaacctgactgcaacttacatgctaaggcatgtactaacactatactactcagtgtacgactatgatatgctgaactctccagacctggattgtatacttgaacagcaagcgtccgactattgtattggtgttcttgacactgttcaaaatatggcctacttggacagctcctcgaacatacaggctatgtccatcaagctttctctatggaccgctcgcatttctgaagatgtgcgtgtcaagaccaggtgagcagagaccacattctgagatgatcaatagtctagactgacacttatgtacgcgatcgttgactcaggttcattgcagatcact

SEQ ID NO: 30148 - DNA, 339 bp, Oryza sativa
  Clone ID: PAT_MRT4530_34581C.1
atgggggccggtgcgacccaccttgggttcaaccgaacccatgggtcagccgacgcagctatgaagaatagaattttgggcttgttcaagaagggatcaagctcaagatcaagccatcaccaagacgagtcgagcacacactcctccactggtgtatccatggaggaggtggacgctacgctgaggctcctcgacaactccaatctcgaccacataggtgaccgagagatgcaagtctgtcacatgatcaaggatcggacgtttgctcatacccaagcatatgacccgaaccttattcagaaaataggtatggatgttgattttcacaatgtgtggtaa

SEQ ID NO: 30149 - DNA, 187 bp, Oryza sativa
  Clone ID: PAT_MRT4530_34582C.1
atttgaaccagctcctgttcaagttctattaacagaagagattagtggctctcttagaaagctgaaggggtgctgtaatctagcaagggaccgatataagagcatcgagaaacgtggaatacttgcaccaagcagaaaaataagtacaaatgaggaacatggcgatcccagacgtggagcgtcttga

SEQ ID NO: 30150 - DNA, 300 bp, Oryza sativa
  Clone ID: PAT_MRT4530_34583C.1
acacggacgataaatcaatcgaacgatgtcgacaatcagacttatgtatgaatgagccaagaactcagaattgacacgacaaactgggccaaaattcacaagtctacataaagaagcaatagaggaggccgccagccgaatggtgggctggttgggccagccccatgttcggccgaactaggaggttcggccgaacctccctcgcctccgttggatccaggttttggctggacggttgagatgaaaccccaatgacggttggagggtattacctaccattccaaccatcacaaccgtcat

SEQ ID NO: 30151 - DNA, 783 bp, Oryza sativa
  Clone ID: PAT_MRT4530_34584C.1
atggcgccaccaccaccgccaccaccgctgcactgctacaaagcccccgaggagcagcggctcgggccgcgccccgccgcacgagcaaggcccccgccgcacctcctcccgtactccggcggcctcgacctcctcacggaggcacttggggccgagagcttcgatccggacgacgacgacgacgccaccgccgcctcccccgccatggaggacgtcggcgccgccgtcgccgcggtcgactttctggccccgccgtgcaagaggccgcaccacgtcctcctcagcagcagcagcgaaggcgtaggccacgacgacgacgacaaccagcacgccgtgatggtgctgaggaggacgaggagcgggagggcgttcccgccgccgatatcggtgatcggcaagggcgggcggccgtggctgagcctccgggcgcaccgggaggccggccggctcgtgctgcgggagatgcggctgccgtcgcaggagttgctgcagccgtgcaaggaggacggcaggttcaagctgctcatccacccggaggccggccgccgtagtggcggcgccggcgcggggccacgcgtaggatcaggaagggaaggacacggcgccctcgagtcttgatcagtagatcagacagaattttccttttctttggtctttagagcaccgtaaattcttcctctccttcctgcgataatgtgcatgatcttgccgttaatcaatacatgcattggcttgcagcttaaaaaaaaaaaaaaaaaaaaaaaaaaaaaaaaaaaaaaaaaa

SEQ ID NO: 30152 - DNA, 459 bp, Oryza sativa
  Clone ID: PAT_MRT4530_34585C.1
tcaggtttcagtaacgtcggtggtgccccatcgaaaagcgctcaaccactaaaggaagatgcggccctcaagatacactgcataggaattagcaggaacacggacaagacagcacttgccgaaatcgcctctccgcctgtcagcgaacatgtattttatctctcggattataatgagctggaacgcgccgtggaagccattacctctacaaacagatcttacgaggaatgtggaaagtcaaaacatccgtcggggacgtctcgcattgttggtggtagtgaatcccattcgggggattggccgtggcaggcagccctttacgatgaagactcaaatcaacttttgtgcgggggctctctcattcacaagaactggattttgaccgcagcacactgtttcattaaagaccgtactcccgtactgagccagaatggaacaactgtttatcttggtaggtct

SEQ ID NO: 30153 - DNA, 468 bp, Oryza sativa
  Clone ID: PAT_MRT4530_34586C.1
aattaacaaacaccaccatatttgatcgagcagggaaacagcctgcacagacacactcactacccagacagaactcaccctctattaaatactcatacatccatgcaggcggcacaaacacatacatacatacataccgcgcacgtacatacattgaatggagtgcacacacacacactcactttcatagacagacacgcatgtgaacctacctagctaacttaaatgaaagccatgcgcatgcatggacggacgggggggggctcactcacttgccacgaactaagttggtggcgcccacccaggctttgttactgactcggtcagctaggcggtcaggtagtttatggaggcgtcccttgccactaacgactgcccgaacaaaccaaccatgcatggcatacatgggcgggcggccgtgattgatctcctttagatcgagctccaggaatgcctgccggtcgtcag

SEQ ID NO: 30154 - DNA, 572 bp, Oryza sativa
  Clone ID: PAT_MRT4530_34587C.1
atgaaacttggaggccgcgatgatgacaagggcctcggagagctatgcttggatgaggggcgatgcgagggagggcttgggccaatgacgccggaggaaattcttaatatggacaagttgtggcatgaggaggggcaatggcgagcagttctagcaagaagccttagaagcacacgggcgctgtgctcgaccgcatccgcgcatgtccgtcgaccgtcgttcgccttcttcgcggtgcactcagaattaaccaagcaaaattcctccgccgcaataccgaacccgcgagccagtcggctgccgaaccgaccgtctcttgcgccggtgaaatcctatcccaagtcccacacgctgacacgcgcgcctcatcagcgagatggttcggtctcgttggtttgggagatgcaacggttggcggacgaggaattcgggacgaactacagacgtcattcccacgaaagtctgaaagtcaaggcgcagttcggcgttccggaaatagcccatgtccgaggtccttgggcgtatttctgggtacggagacccctagcactgagtgctgttgcgaactaccc

SEQ ID NO: 30155 - DNA, 428 bp, Oryza sativa
  unsure (1)..(428): unsure at all n locations
  Clone ID: PAT_MRT4530_34588C.1
aatgcttgatgancncaagcnnnttagagttgnnnttntntaacannttctcacanaaggnccctngggtcctttctacaatcaaggnagtagttaatntttcatctaaagggcacaataaggagntactccattgtcngtggagggcgntcnaanaanantccttncnncngtaagnnganantannctnnaccnnacntgtgtnaaggcacnaagagtggatcgagtgaactntcgtgtcnctgctgatggcaatgttctgtcgtccaaatgtaagagtgtttaaccntgtgcgtaanttngtcatacaccactcagtgtttntgtgtgcnattctnnccatgnntggtcngtcnnancccccctacntngangngcgtaaaagtnaaantcncaaatnacctcgnnnnaaaaaaaaaaaaaaaaa

SEQ ID NO: 30156 - DNA, 230 bp, Oryza sativa
  Clone ID: PAT_MRT4530_34589C.1
tcgcttcctacccggaccatcttccaccatgggaggagacgctcaaactaccgcgctgcccaatccatggcggcggcggaggcggaggcggccggtcctctccggcgggctctcttcgtcctcgccgggctcgccttgctgctggaagcggcccctgaggccgaggcgtggtcgggggagaaccgtggtcatgacgttcggcactgctgccgtgactgcggcatctgtcc

SEQ ID NO: 30157 - DNA, 3036 bp, Oryza sativa
  Clone ID: PAT_MRT4530_3458C.1
atggaggcgaatgactggctccatgccatagagaagaagctgaatctcctgcagtgcaatgatcaggagaaggttgctttcgccacacaccagcttcaaggtcctgcgtcagcttggtgggacaatcacatggccacccgcccgccaggcactgaagtcacttgggaagagttctgtcgtagcttcaggaaggcgcagggcaacagaactgtgacggagtatctccatgagttcaatcacctcgcgcgatatgcaccggaggatgtccgcactgacgccgagaagcaggaaaaattcctagcaggtctggatgatgagctaaccaaccagttgatatctggagattacgccgatttcgaaaggctggtggacaaggcaatccgtcaggatgatcaacgcaacaagatggacaggaagaggaaggccgctcagttcagggcacctcagggaagtcaccagaggccgcgcttcgctcccgggcagcagggtggacctaccaccatgatcgtccgccagtaccgcccgttcaaccctagcaactttccccagggcgccagtggcagtcagaaccaccatggaggtcagcccaaccgcggtgcagctccacgcccaccaacggcaccggcacagtcaggcccgtccgcgcaagccaagagggagactggagcaaaaccagggtcctgcttcaactgtggcgagcttggccacttcgctgacaaatgcccgaagcctaggcgtgccgggccaaggtttatccaggctcgtgtcaaccacgcatctgcggaggaggcacaagcagcaccagaggtcgtactgggtacgtttcctgttaactcaatccctgcaacaatactttttgattctggtgcaacacattcgttcatttcaaagaagtttgtcgggatgcatgggttaaggaaagaagagcttagcacaccaatgagggttcatacctcgggaaatagctcaacctcagtcagttttagcccttcagtgctaatagaaatccaaagatcaccatttctagccaacctcattcttctcgaatccaaagacctagatgtcattcttgggatggattggctgaccaagtttaagggagtcatcgattgtgcgaatcgcacagtcaccttgaccaacgagaagggagaaacagcagtgtacaaatcaccagactcaccaaagcaaggggtctctttgaatcagattgaggcggaaatcccagtggacaccgtgaagaagaatttgaggaaattggaagatatacccatagtctgcgagtatccagaagtgttccccgaagaccttactaccatgccacccaagagagagattgaattccggattgacttggcaccgggaaccgctccaatttacaagagaccgtacagaatggcggccaacgaactagcagaggtcaagaagcaggttgatgagcagctgcagaaagggtacattcgaccaagtacttcaccttggggtgctccggtcatttttgtggagaaaaaggataagacgaagaggatgtgcgttgattatcgcgcactcaacgaggtcacaatcaagaacaaatatcctttgccgcgaatcgatgatttgtttgatcaactgaaaggagctaaagtgttttctaagatagacctgcgatcaggctaccaccagttgagaattcgggaagaggatattccaaagacggccttcaccactcggtacgggctatatgagtgcacggttatgtctttcggacttaccaacgcacccgcattcttcatgaatctgatgaacaaagtgttcatggaatttctggacaagtttgttgtggtattcatcgacgacatacttatctattcaaagtccgaagaagaacatgagcaacatctccgtctggtactcgagaagttgaaggagcaccagctatacgccaagttcagcaagtgtgacttctggttgacggaagtcaaatttctgggccatgtcattacagctcagggtgtggcagttgatccatcgaacgtagagtcagttaccaaatggatcccaccgaagaccgtgtcgcagattcgaagttttctaggactggcaggttattaccgccgattcatcgaaaacttctccaggatcgcccgacccatgactcagttgcttaagaaagatgagaagtttaaatggacagctgagtgcgataagagttttgaggagctcaagaagaaattagtatccgcaccagttttgattctgcccgaccagatgaaagacttccaagtctattgcgatgcatcccgtcacggacttggatgtgtcctaatgcaagagggcagagtggttgcgtatgcctcgcggcagttgcgtccacacgaagggaattatccaactcatgacctggaattggcagcagtggttcatgctttgaaaatctggaggcactatctgattggcaaccgctgcgaagtatatacagaccataagagtctgaaatacatcttcacccaaccggacctaaatctccgacaacgaagatggttggaactaatcaaagactatgacatgagcattcactaccacccgggtaaagccaatgtggtggcagacgcattaagcaggaaaagttactgcactgccctatgcatcgagggcatgtgtgaggaattgcggcaggagtttgagcatctcaacgtgggaattgttgaacacgggttcgtagccgctctggaggcacggcctacgctcgtggatcaagtcagagcagttcaagtaaatgattctgaaatagcagagctgaaaaagaacatgagagtcggaaaaacccgggatttccacgaagatgaacacggcacaatctggttgggagaaagattgtgtgtacctgacgacaaggaactgaaggatctgatactcaccgaggctcatcagacccagtactccattcatccaggcagcaccaaaatgtatcaagacctcaaagaaaagttttggtgggtcagcatgaggagagaaaagctgaattcgtcgcactctgcgatgtttgtcaacgagtga

SEQ ID NO: 30158 - DNA, 294 bp, Oryza sativa
  Clone ID: PAT_MRT4530_34590C.1
atggacagcgctcccgccgccacaaacacatctatcgggcggcttccgcgcgtgatccgccaccgaaatgcacccgccgcgacgctctcattctgccggagcgccgtcgcccgcacgctgctgccggtcgtcgccgtcgcccgcacgctgctgccggtcgtcgccgttgccgccgccttgcctcgccggcacgccgccgccaccgccgcaaaattgctcgggcaaggccgctattatgtttccgcgtccaggttcccgttcaaggacacggtaaacaccaggcgtccaagttag

SEQ ID NO: 30159 - DNA, 192 bp, Oryza sativa
  Clone ID: PAT_MRT4530_34591C.1
atggagtccatggaggagcgcttgatggacgccatgaaagctgtcgcggctaaggtcgacggcatggacggcattgccaagcacctcgcgcaaatcgacctcaagttggcgcagcaggacgagctcttggatcgcgtgcagaccaaggtagatcgctccatgacttccctcggccaagtacagcaagagtag

SEQ ID NO: 30160 - DNA, 147 bp, Oryza sativa
  Clone ID: PAT_MRT4530_34592C.1
atggagctcattgagctcgaccctgaattccggaggttagagattgggctaagctccatggcactctattgcaccaagggcggggaggatgcttacagacacgtggagggggggggggtgttggggagggagctcaaggtctggtga

SEQ ID NO: 30161 - DNA, 195 bp, Oryza sativa
  Clone ID: PAT_MRT4530_34593C.1
atgcacacaatacgaatggaacttctgaacgacgcctccaaggaggaaatgacgctaaagaacaccgccatcacccatcctagagaaccagaatacgtcaccgttgtcgacccgaaggctaggccttccaccattgctttcctactctctcgcgtcaacaagtgcccgtcagaatcagcagccaccaccagctaa

SEQ ID NO: 30162 - DNA, 589 bp, Oryza sativa
  Clone ID: PAT_MRT4530_34594C.1
aaacgcatcactacacaaacgcgggaagacctaatcacttaaagctgctatcataagaaactcttcatgacacagcaatagcccaaaagcgcacacactactgcgtgacccaatgggcaaattttttgaccgccttgccacctgatgaggcttccaacaaatgactaacacactgggtagtatgtgcacttgggggggaaacaagggcccgaacagggggcctaagacgtggttgaacgtcatagcctctggagttccaagccgacctttattttatacaaccagacttgagaactcacggaaaatgggctgccttaacgctccggggttctcattcatgttaggatagggggagcaagcaaaaaaaacccactcacttccccttgcatacccaaaagataaacgatggcgcgtaacatcccgacactgttcgcggcggatcctttcgttggcatcaaaatttacgtcgtggatgcctcttatagcgggcgcatagcccttggtaactgcacgcctgccaggagacgaatgcctgcggacaggaaaagggagcacctgtgagctcctacgtggtggagcacttctttgg

SEQ ID NO: 30163 - DNA, 110 bp, Oryza sativa
  Clone ID: PAT_MRT4530_34595C.1
agccaaatttgcccctcaacagattaccttgcgtccttgccaatggcacgcaggactctgaatcagtaacgagtggtttagcatggcaaatcatcaaatccccgacctaa

SEQ ID NO: 30164 - DNA, 986 bp, Oryza sativa
  Clone ID: PAT_MRT4530_34596C.1
gacaaaaccaccccaaattggcccgaaagctgcctcctttttcctcctcctaaaaaccgctccggcctctccatctcccgccgctcgccgtcgccgccgccgcccgccatgtggaagcgcgcgacctccgtcctcctccaccaccgctccgccctcacccgccgctccccggcgatcggcggcggcgtccttccccgtgctctcttcttctccacgctcgatgcggcgcaggcgaggacgagggtggaggacgtgatgccgatcgccaccgggctcgagcgcgaggagatcgccgccgagctccaggggaagaagaggtttgatatggacgcgcccgtcgggccctttggtaccaaggaagctccagctgttattcagtcatactacaacaaaaggattgttggttgtcccggtggtgaaggagaggacgagcatgatgtcgtgtggttttggttggagaaaggcaagccacatgaatgccctgtctgcactcagtatttctcgcttgaggtgataggagaaggaggagatcctgatgggcatgacgatgacgacgatcaccaccatcattaaggttgcagaagtcacctctagcaataaaaacactggatatggccatatccatgtcaactctcaattcagatgacttggagcagcagtggattttggaaaaacaaagtttgtctttttagagatttgttcatgcaaataacaggattcagtaaacaatgatatgcaattctctttttcagcacaccttagtcgaattcaaaataggtatgtttgtttgtttgtcttgatggatgattccatgttcaatggccacctggaccatttattttggtgtatgatctgttatctgaacatttcacaaaccttggtcctgttcaattcagtttaaacaaatgaagtcagcattctgatgatccttctaaaaaaagctattccctttagtgagggggcttagctgcactgccgtcgtctcc

SEQ ID NO: 30165 - DNA, 417 bp, Oryza sativa
  unsure (1)..(417): unsure at all n locations
  Clone ID: PAT_MRT4530_34597C.1
ttnagnttntatnttntttcnanacntttngtatntttttcctcnactttanttnancnaagngtnntgganntcctattnngnggtggccnntttttngaatattttgtttcccctnnnntnnaannatttagcnantgtttcngaatngctcananccgttcatnctctanatcgttagggactganttncntaccngtncctaacttaatcacnaaaaagtgtatttnntttncatnnttnnncantatagcnatgncctgtnttgcattgtaantcattgtttnngtggctttnttgnattantataagcattttatctnnnntatttggtatccgntaangnnnacnnagtcccccgaaannatcaatgtnagttatancggtttttgtgaaaaaaaaaaaaaaaaaaaaaa

SEQ ID NO: 30166 - DNA, 395 bp, Oryza sativa
  Clone ID: PAT_MRT4530_34598C.1
ttgttttttttttttttttttttttttcttttttttttttttttttttttttttttttttttttaacaaacccaaactggttttatcacaatggtagcccctgacaatggaaagaggaatctagggccaagggggtcattggcggggggaacaaaaaattgggtggaccacaacacccaccaggggggccaacaaggggggctttcccttttggggcgggggaaaaaggaaaacctcccgatgggaagggaaactgaataattttaggaaaccatgatgatgatgggtaggctccttaggaccccccccgcccttaggggtttggtgctcccattttggccactggaagggtaactcggaatcggtttaatccttttgggtggcctcgggggaat

SEQ ID NO: 30167 - DNA, 284 bp, Oryza sativa
  Clone ID: PAT_MRT4530_34599C.1
acggcacgaggcgaagcaaagcgcaccgacgcacacggaaaagagaggagaggtcacatcgcggcggcggcagccagaatagtacggcggcgtaagaaccgacggaggccaagtgcccggagggcctccggagcccgccggtagccggcggagccgtggcggccggcggcgcgggcgcgctagatagaagggctacgccggagcgcacgccgacgcggtacaccgtcagcctagggccccgccggcgccctcgcctaactacggcggccaaccagagcccccta

SEQ ID NO: 30168 - DNA, 2670 bp, Oryza sativa
  Clone ID: PAT_MRT4530_3459C.1
atggaggcgaatgactggctccatgccatagagaagaagctgaatctcctgcagtgcaatgatcaggagaaggttgctttcgccacacaccagcttcaaggtcctgcgtcaccttggtgggacaatcacatggccacccgcccgccaggcactgaagtcacttgggcagagttctgtcgtagcttcaggaaggcgcaggtgccagatggggtcgtggcacaaaagaagagagaattccgagcactcaaccagggcaacaggacggtgacggagtatctccatgagttcaatcgccttgcgcgatatgcaccggaggatgtccgtactgacgccgagaagcaggaaaaattcctagcaggtctggatgatgagctaaccaaccagttgatatctggagattacgccgatttcgaaaggctggtggacaaggcaatccgtcaggaggatcaacgcaacaagatggacaggaagaggaaggccgctcagttcagggcacatcagggaagtcaccagaggccgcgcttcgctcccgggcagcagggtggacctaccaccatgatcgtcctccagtaccgcccgtttaaccctagcaacttcccccagggcgccagtggcagtcagatccaccatggaggtcagcccaaccgtagtgcagctccacgcccaccagtggcaccggcacagtcaggcccgtccgcgcaagccaagaaggagactggaacaaaaccagggtcctgcttcaactgtggcgagcttggccacttcgctgacaaatgcccgaagcctaggcgtgccgggccaaggtttgtccaggctcgtgtcaaccacgcatctgcggaggaggcacaagcagcaccggaggtcgtactgggtacgtttcctgttaactcaatccctacaacagtactttttgattctggtgcaacgcattcgttcatttcaaagaagtttgtcgggatgtatgggttaataagagaggaacttagcacaccaatgcgggttcataccccagggaatagctccactttggttcaattcagcccttctataacaatagaaattcaaagatcaccatttctagccaacctcattcttctcgaattcaaagacctagatgtcattcttgggatggattggctaaccaagttcaagggagtcattgattgtgcgaatcgcacagtcaccttgaccaacgagaagggagaaacaagaccgtacagaatggcggccaacgaactagcagaggtcaagaagcaggttgatgagcagctgcagaaagggtacattcgaccaagtacttcaccttggggtgctccggtcatttttgtggagaaaaaggataagacgaagaggatgtgcgttgattatcgcgcactcaacgaggtcacaatcaagaacaaatatcctttgccgcgaatcgatgatttgtttgatcaactgaaaggagctaaagtgttttctaagatagacctgagatcaggctaccaccagttgagaattcgggaagaggatattccaaagacgaccttcaccactcggtacgggctatatgagtgcacggttatgtctttcggacttactaacgcacccgcattcttcatgaatctgatgaacaaagtgttcatggaatttctggacaattttgttgtggtattcatcgacgacatacttatctattcaaagtccgaagaagaacatgagcaacatctccgtctggtactcgagaagttgaaggagcaccagctatacgccaagttcagcaagtgtgacttctggttgacggaagtcaaatttctgggccatgtcattacagctcagggtgtggcagttgatccatcgaacgtggagtcagttaccaaatggaccccacctaagaccgtgtcgcagattcggagttttcttggacttgcgggttattaccgccgattcattgaaaacttctccagaatcgcccgacccatgactcagttgcttaagaaagatgagaagtttaaatggacagctgagtgcgataagagttttgaggagctcaagaagaaattagtatccgcaccagttttgattctgcccgaccagatgaaagacttccaagtctattgcgatgcatcccgtcacggacttggatgtgtcctaatgcaagagggcagagtggtcgcgtatgcctcgcggcagttgcgtccacacgaagggaattatccaactcatgacctggaattggcagcagtggttcatgctttgaagatctggaggcactatctgattggcaaccgctgcgaagtatatacggaccataagagtctgaaatacatcttcacccaaccggacctaaatctccgacaacggagatggttggaactaatcaaagactatgacatgagcgttcactaccacccgggtaaagccaatgtggtggcagacgcattaagcaggaaaagttactgcactgccctatgcatcgagggcatgtgtgagaaattgcagcaggagtttaagcgtctcaacgtgggaattgttgagcacgggttcgtagccgctctggaagcacggcctacgctcgtcgatcaagttagagccgctcaagtgaatgatcccgaaatagcagagctgaaaaagaacatgagagtcggaaaggctcgggatttccttgaggatgaatacggcacaatctga

SEQ ID NO: 30169 - DNA, 284 bp, Oryza sativa
  Clone ID: PAT_MRT4530_345C.1
cccaaaggtccccatggatggaaagcgatatcataaaagcagcgacacgaattaaaatttaaaaccaaccccaaaaaggaccgcaaatccaactccaccaaatcgacccaaaaaccccgcctaatccaaccaaaccaggggcaatctaatttaaccaacacgacacgaactcataaaaagactaacaccaccaccaccttctccttattaagggactcgacaacccaaaacgaccgataccggcaaaaggcaaaggggaacagcacaaatctaggaaaactggc

SEQ ID NO: 30170 - DNA, 105 bp, Oryza sativa
  Clone ID: PAT_MRT4530_34600C.1
gcgataaaccgggccggggtgatcgagcgcagctagggcgctttgccatggaccgctgggcgtacgaacgcctcaccgtggtccaggctctgctcaagctgccct

SEQ ID NO: 30171 - DNA, 2269 bp, Oryza sativa
  Clone ID: PAT_MRT4530_34601C.1
tgcaagggctttaaaacgccagccgtggcccgtgacacccgccatatgcccaggagccacggcgcttgacatcgagtctcgtccccctaaccctgttgagagtttttttttttttttttgtatccaaagtgaatcttccccaaggggaaagcaacaatttacacggtggtcaataaataagagtgcatgtacaagtcaaaaatatagtagtagtatacataaggtccacaacatcagctaattaagttactccttttttggcttattatttcatatgcactggtgttaaaattcctgcggcggaacaagacttttgctttttcggctggaaagattgagctttccatggagcatcagcagcacaacacaattgaacagctagctattctttttaagtcgatcttgaaacatacattactatgatgctgggattaaagagctggagaagagcttctgtgtctctccatttttttttacatcattgagggaatgatcttggccgaaatgaccggcttttactttaccacaggggaagaaaaccttcttcagtcaggtgtgttgcctccaccatgcattcagggtcacatttgagatgcataaggtgcaagtgtgttgctgcgcagattcacgccgccgcctcttaaagaaacagaagggcccctgtaggtgctcgccctgctgacaaggctggagtcgaggaagactactatgacggttatgtcatcatggaagtggcggagaatatcacggtcaatcttcttgagatccggaggacctcatttcgtcttttcttggcagcttatttgagagcagcctttatggagcctcctagcacttccagttgcgagggctactgtgaacacttgtcaatgtcctcttgattggttaagtgctcccatagaccatcagatgcaaatatgagaaattgatcatgtggttgtaggggttgcacactaatcgatggttctgaacttagtatgggcttgtgaaaaggttcccggaggcggaattttgcatacaaaggttcccggttgaactctgatcttttgagataggcatcaccaattgatctgcagacctgaattagaccttttacacgccaaacgttgtgcttgagaacaacaatatgcctatcttccgggtgcattgactgcaattcttttctcactgactcaatgcttacgttatgctctgctgagagttggacagccagaacttctcccgtggctttgacatgtctgcctaaaacaacacgggaatccccaacattagcaacataaagaatgccaccacagattacaccaaccaggcagcacgagccaacagcagctatttgaggcttcacaggccattgcttggtgacaacagagaagaacccatcttctgtagcttcatatgctttcttcagcacatcagcagatatcgaattctgttcagatgcaaaccttttcagatggtggaataggtgatcgttgatatagcaagccgtctctgggccaccatgtccatcataaaccccgacgaaagttccgtatggaccagagtcaagaaagctcaatggacccgattcaatctggcactgatcctcaagtaagttgttggccagtgtccttgtaccatagaagtccatcctgcctgccggcaacatctgagcctgcccgggcatgctggttggatgatggtctccagcatgcccgtaacaagttcatcaatgtcactatcatccctcatcagtcatcccaccacagacgccttcgaggccgcttcatctgagctctaagaaaatgcagcttcacttgttgatacgccgatgttttcctttattctcttggcgtggcggacgcggccaattggcggatttcggataggggatttgagggaattggggagggttgcctcgatcgaatcgcgcgatttgggcgtcgccacgctgcttgctctcaatccgcctccgatccgacccgaatccgcctcctctcggatcgtatcgacgcggagccaaggggaaatccctctctctctctctctctccgaccagcaccgccggggacgaacgaaccggcggccggcgtgaggcggcgctgactcgtcggcggtcaatcttcttgagatctgagtacctcatttctcttttcttggctgcttcttgcaaagctgcctttatgagcctcctagcacttcaatttctcatatttgcatctgatggtctatgggagcacttaaccaatcaagaggccgttgacattgttcacagtagccctagcacttc

SEQ ID NO: 30172 - DNA, 851 bp, Oryza sativa
  Clone ID: PAT_MRT4530_34602C.1
ggtgcattgactgcaattcttttctcactgactcaatgcttacgttatgctctgctgagagttggacagccagaacttctcccgtggctttgacatgtctgcctaaaacaacacgggaatccccaacattagcaacataaagaatgccaccacagattacaccaaccaggcagcacgagccaacagcagctatttgaggcttcacaggccattgcttggtgacaacagagaagaacccatcttctgtagcttcatatgctttcttcagcacatcagcagatatcgaattctgttcagatgcaaaccttttcagatggtggaataggtgatcgttgatatagcaagccgtctctgggccaccatgtccatcataaaccccgacgaaagttccgtatggaccagagtcaagaaagctcaatggacccgattcaatctggcactgatcctcaagtaagttgttggcctggaccacagccatagagaattccccatttacatgctgaccagtgtccttgtaccatagaagtccatcctgcctgccggcaacatctgagcctgcccgggcatgctggttggatgatggtctccagcatgcccgtaacaagttcatcaatgtcactatcatccctcatcagtcatcccaccacagacgccttcgaggccgcttcatctgagctctaagaaaatgcagcttcacttgttgatacgccgatgttttcctttattctcttggcgtggcggacgcggccaattggcggatttcggataggggatttgagggaattggggagggttgcctcgatcgaatcgcgcgatttgggcgtcgccacgctgcttgctctcaatctgtg

SEQ ID NO: 30173 - DNA, 258 bp, Oryza sativa
  Clone ID: PAT_MRT4530_34603C.1
cggaacccagggtcgacccaggcgcacgcgaacacctacctggacacaaaggagcgcgacaacaccgagtacaagctcgacactaggggctccccgaacaacacgctgtcgcgcaggcacgcggtggtcaaccacccgacgacggacaccgcgcaacccacggcagagccagtcgaaggagaacacaggactgctgccggcagctcgccgcggacgacgacagctggtgcaggtgctcagagccgaaacgcatggaca

SEQ ID NO: 30174 - DNA, 523 bp, Oryza sativa
  unsure (1)..(523): unsure at all n locations
  Clone ID: PAT_MRT4530_34604C.1
tacgcaatttgttgcgcacttaaaaccggggagacgttgcgcccaaaccgggagataagcctgttctttgacaacccccaaganaagcctaagccttcaatgaaggtggaagtagcaccccttcccctttgtaaagttgggtgccaactcccccctgagaactgtggcaataggtggggactgaattgctgcaaacaagcaatttaacctaaggtccttgcactggcctcccagtttaatccggggatgctgtgttgcggtgtgttgcaagtgactggaaaaaatgtnacttggtaatgttgcctgtgcaacctgccccgggtgggtgaacccccctgcccccaaaagggggccgttggaaccgggggaaaggaaaccaaaaaatttggtgaaatattgggcgcttcctcccattgtgggagatgctaatgtgtagtgtggtggtacagtcccgcattttctgtgccagtttgtgangtcattgtgccttgggtttcttcttccaaaaaaaaaaaaaaaaaaa

SEQ ID NO: 30175 - DNA, 1698 bp, Oryza sativa
  Clone ID: PAT_MRT4530_34605C.1
atgtcgtatgacattgagcatgcgaaatggtccttagccaacaagaactgtttggctgcggtaaagaacacgattgagccaaccatattgggctcaatcccagagtatgacaccgtctctaattacctcgaaagtataaagagccagtttactggttcttcaaagtttcatgcgacacaactgataaagcagcttgtgacagagaggtaccatggaggtggtgtaaaagattacattcttaggatgagcaacatggcttctaagttgaagcaaaaaattatgtcctcattgccaaagaactttgacaaccttgttgtcaactacaaaataagtccagagaaatggaatcttgaagagctcatctctaattgtgtgcaagaggaggaaagactcaaagagaccaatggtggctccattaaccttgttaaagataacaaggaaaagagccagagatccacatggtggattgattctagagcaactattcatgtgtgtaattgtttaaagggattccgttcaatgaggactacgcaaagaagtgaaatatccattagagttgccaatggagttgaagcaaaagttgaagctgttggagatctttgcctagagctcgcgaatggcttcacacttttacttccagatgtttttatgtcccttctttgcaaagaagtatccaaattggattttgatagatatgattgctattttggaaatggcaaatgtgaactatggtataataatgcatgtgttggtcttgctctgttgcaaaatcagctttatttgttatctctttttgagaatgtgaatgttgtgtcctcgaatgcatcggtgcccaaaacaccgtatgagctatggatcctccgtgtgtgggggagtcttgcaaaggataaagtatttaacccaaattttggaaaattggatcccaaaacagcccctagaaggtctgaaagagtccgaagatcggttatccgtgatgactatcatgtttataatatagaagagtcgcatatggaggatgatgccacctcatacgaagaggccatgagaagcgctcgctcatctgaatggttggaagccatgaaagatgaaatgagatcaatgatattaaatgatgtctgggatttagaaaaaattcctaaaggagctaaaacagtaggctgtaaatgggtctacaaaaccaaatatgactccagagggaatatagaaagaaaatcagaatcgctccagatagtggggtattcagattctgactttgcaaaagataatacaaagttaacatcgggatacgtgttaaccctggcagtaggagctatttcatggaaaagatcaaaacagaccatcactgcagggtctactatatatgccgagtttatagcatgctatgaggcaacggggcaggtgaactggctaaagaagttcatacccggtttaaaggtggttgacagtattgagaaaccactaaagttatactgcgatagagaacccgcagtaatgtactctcacaacaatcagtcaagtggtgctgccaaacacattgacataaagtactatgttgtgaaagacgaagtctgggatcaaacaatcaatctcaagcacattagaacagaaaggatgctcgcggatccgctcatgaaaggccaacctcccaacatgttcaaggaacatgtagcatgcatgggtttaagggaagccttatga

SEQ ID NO: 30176 - DNA, 223 bp, Oryza sativa
  Clone ID: PAT_MRT4530_34606C.1
gatcttggtccttgtcccgggctggatcccttgcccgggcaccggtcaatcgcagcttcacgggtgccaccccggttgctgggtcattcttcagcccccgtgcttgggtgcccgcgccatcgcactggcgctcatgcagcccgggttcagtcacactcagggtggggctcggccagtgcccggcgcctctcccggtgtttccttcggtgggatggtaaccaaa

SEQ ID NO: 30177 - DNA, 3447 bp, Oryza sativa
  Clone ID: PAT_MRT4530_34607C.1
atggaaaaaaaactcgaccttgcttttatcttgggagaggtggactgggtgttgactaccccatgtcctatagaacctgctgaacttgtcagaggtgaaaatgagtcagatgctgactggcaaaagagacagagggacaatgctcctctcgtcatgtcgtatgacattgaacaaaagaaatggtccttagccaacaagaaatgtttggctgtggtaaagaatacgattgagcctaccatattgggctcgatcccagagtgtgacgttgtctcagagtaccgtgaaagaataaagagtcagtttactggctcttcaaagacttatgctacacagctaatcaagcagcttgtgacagaaaggtaccatggaggtggtgttagagaccacatacttagaatgagcaacatggcttccaagttgaagccaatggatttgggcataacagatgactttctggtccatctggttatggcctcattgccaaagcagtttgacaattttattgtcaactacaacataagtccagagaaatggaactttgagaagctcattgctaattgtgtgcaagaggaggagagaatcaaagaatcaaatggtggttcaataaactatgttaaagataagaaaaagaaccacaagtctcccacctcaaaaggtaaacagtctcagcatctgcctcagcaacaacagttcgctgttgagaaagatcaatgtctccactgcaagaagacaggacactacaagaaagattgtcctgactttctgaaaatgatcatggcaaagaaaggtgagaacattattacatttgtaaatgaatctcattatgttggttactctagatccacatggtggattgattctggagcaactattcatgcttgtaattgtttaaaggcattccgttcgacaaggactacgcaaggaagagaaagctccattagagttgccaatggatttgaagaaaaagttgaagctgttggagatcttccgctagagctcgcgaatggcttcacacttttacttcgagatgtcttttatgttccttctttgcaaagaaacttaataagtgtatcaaagttggattttgatggatatgattgccgctttggaagtggcaaatgtgaactatggcataataatgcatgtattggtcttgctgtgttgcgagacgagctttatttgttatctctttctgagaatgtgaatgttgtgtcctcgttgacaaaagaaaacaagaaaagaaagcgaacttccgatgtctcatcgaaattatggcactgtcgtttgggccatatttcgagggggagaattgagagactagttaagaatgaaattctttccccattggagttctcagacttagaacaatgcatagaatgcattaaaggaaaatttgtaaagagcatcaaaaagggtgcaaaacgaagcgcaggaattttagagatcattcatacagatatttgtggtccatttcctatgaaaagtatggatggctatgactcgttcataacattcacagatgattactcccgctatggttatatttatccaattaaagagcgatcagaagcactggataaatttaagatattcaaagctgaagttgaaaatcagcatgatataaagattaaagtagtaagatctgaccgtgggggggagtactatggtcgacatacgccttatgggcaagtccctggaccttttgcaaggttcttgctagagaatggaatagtagcccagtattcaacaccgggcgaacctcaacagaatggggtagctgaaaggcgcaaccgtacccttatggctatggacaggaagagtaccctcgctaactcacctccttatacaaagtttgtagaaacgagacacgccgtcttcttggaagacggaatgattagggggagctcggtagttcgagaaattgatcttgaggagaggcgggtgtctgtacccgctccgtcgactcaggaacctttcttctctctacctgctgatgttgtgcctgcaatgcctgtcattgaggtaccagcacctgttgttacccctcctgtggcaacaatgaatgagagtgaggaacctgttatacaggattcaacagaaatggttgccacaccagaggaggagctacaacagcctcaaatagataatgtgccagtacaggagactcatcaagagcctcaggtacaggatgtgccaaatgtgcaggcccctagaaggtctgaaagagtcagaagatcggctatccgtgatgactataaagtttataatatagaagagtcgcatatggaggatgatcccacctcatatgaagaggccatgagaagcgctcgctcatctgaatggttggaagccatgaaagatgaaatgaaatcaatgaaactaaacgatgtttgggatttagaagaaattcctaaaggagccaaaacagtaggctgtaaatgggtctacaaaaccaaatatgactccagagggaatatagaaaagtttaaagcgcgacttgtggcaaaaggcttcacgcaacgagaagggattgattacaatgagacattttctccagtctcttgtaaagattcctttaggattataatggcactagtggcacattatgatttggaattacatcagatggatgtaaaaatggcatttctaaatggagatttggaggaaaaagaaacaaagaaattcttgtcctcaaactttgacatgaaagacctcggtgaggcttcatatgttttgggcatagagattcaccgagatagaacaaagtatgcattgggactttctcaaaagacatatatagaaaaggtgttgaagaaattcaacatgtacagatgcagtgctacacctgctcctataatgaaaggcgaaaagtatggggcatcgcaatgtcccagaaataagtatgagctcaatgaaatgaaaacaaagccatatgcgtcagctgtaggaagcctacaaagatcagaatcactccagatagtggggtactcagattctgactttgcaaaagataatacaaagtcaacatcgggatacgtgtttaccctggcaggaggagctatttcatggaaaagctcaaaacagactatcactggagggtctactatgtatgccgagtttatagcatgctatgaggcaacggggcaggtgaactggctaaagaagttcatacccggtttaaaggtggttgacagtattgagaaaccactaaagttatactgcgacaacgaacccgcagtaatgtacgctcacaacaatcagtcaagtggtgctgccaaacacattgacataaagtactatgttgtgaaggacaaagtccgggatcaaacaatcagtctcgagcacattaaaacagaaaggatgctcgcggatccgctcacgaaaggcctaccacccaacgtgttcaaggaacatgtagccggcatgggtttaagggaagccttatga

SEQ ID NO: 30178 - DNA, 2311 bp, Oryza sativa
  Clone ID: PAT_MRT4530_34608C.1
aatactcaagcttgccgagttcctccgcatccgcccgcctaccttctctagctcccataaccccattgatgctttggactggttgcatgccgtggggaaaaagttggacaccgtacagtgcaatgatgaggagaaagtcatcttcgccgctcaccaactgcaggggcccgcatctctatggtgggaccacttccaggctacgcagccagagggacagcctatcacctgggcccgtttcactgccgccttccggaggacccatgtgcccgccggagtcatggcccttaagaagagggaatttcgggagttgaaacaaggcaaccgctccgtgatggagtatttgcacgagttcaataatttggcccggtacgccccagaggatgttcgtgaagatgaggagaagcaggagaaattcctggcagggatgaaccctgagctgtctgtgcgtctggtctccggggactatcctgatttccagcgcctggtggacaagagcatccgcctggaagccaagcaaaaggaattggagtcgcacaagcgtcgcttggcgaatttccgcaaccaacgggggctaaccaaaggatccgctacaccaatccttatccaaggggatcctcctcgcagcagcagcaacagcaacctcgctccgcgcccttacctcaattcgtggtgcgcgtcccacagccgcatcagcagcagaatcagcaagggacccgtgcaccccgccctcctgcaccagccgtgcaacctggacaaggccacagggatgctcaaggtcaacagcgtctgtgcttcaactgcttcgagcccgggcactttgcggataaatgcccaaagccgaggcgccagcaaggccaagcgcctccccgccccaacaacggtggtaaggatgtcattcggggccgtccgagcggagggggcgcgcggactgggtccacgggagtggggcccacgcggcagcctcacggtccacggtggaccgggcgcacccggctcgcaccggccggcgccgtgggtcccacgcgtcagccgcacccaagggcgcgggcggctgacggccgggccccacgcggcagccactcggcgcgcccgagggcggccacgccggcgctgtcggcgggaggcggcgcgcccgcgccccgatggtcgccgccggcgaccaccggcgcggcggagcggcggccgagagaggggcgggaagggggaaaggaggcgacggtccacggctcaccccggggcgtcggcggcgacggaggaggcggccggagcggagggaggcggtggcgcggctcgggtcgacggggtcgacggcgttccggcggtcggcggactcggcgagggcgtggatggggtcgacggcgttgcggcgaagccggaggaggcgacgccggcggcggaccggagctcgggggcgacggcggagagagagagcgacggcgcgagctcgattccggcgaggaggaaggggatggcggaaacggacggaggaggagcggggagggacgtgacaatatctgtgccattcgtggggagaaatcagctgggggtagaaaggcttatgaaccctctgctcatcaccacccctggagaaatacccatcgtcaatgagttcggagatgtgtttccagaagagctacccggtatgccgcccaagcgagagattgagttccggatagatcttgctccaggaaccactcctttatacaagcgaccctaccgtatggcagcaaataaactagccgaagtcaagaaacagttggaagagttgaaagaaaagggatatatacggccgagcacttccccctggggtgctcccgtgatttttgtggagaagaaagacaagacaaagaggatgtgcgttgactacagagctctcaatgaagttactataaaaaacaagtaccctcttccccggatcgatgatctgttcgatcaacttaaaggtgccactgtattctccaagattgatcttcgttccggatatcaccagttgcgcatccgtgaaaaagatatcccgaagaccgcattcaccacgctatacggactatatgaattcacggtgatgtcgttcggtctgaccaatgcttctgccttcttcatgaacttaatgaacaaagtgttcatggaatacctggataagtttgttgtggtctttattgacgacatactggtgtactcacaatcagaggaagaccatcagcagcatcagagtttatcaagcggaagcctagaggcccatgtggtgacccctgaccagataaaaaggaggcccaggcctagaagaaagggaggagagaaaagggggttctag

SEQ ID NO: 30179 - DNA, 187 bp, Oryza sativa
  Clone ID: PAT_MRT4530_34609C.1
gaccggcccggactgactggctggaccgacgcacgcgtctgtttctctgatcgcactctatttaactgctcacggctcacgtctatcgtgtcctggcacacgcagccgagagcgagatgggccatgcacaggtggtagcggccgcttcttgccgttcttctcctatgtggccctcacaccaccatgg

SEQ ID NO: 30180 - DNA, 2631 bp, Oryza sativa
  Clone ID: PAT_MRT4530_3460C.1
atggcgctcgtctccaccaccgccacagtcgcgtcgccgtcctaccactactgcgacctgctgttcccgcccgcgaggaggtggtgttgcagggcgaggagacgcggcgggggcggggggcgggtcgcggtggtggccgcgagggcgccgagggaggcggcggcggcggcggtggtggtggagaatggggggcactcttacgaggtggagtcgctgatcgaccggctgagcaacctgccgccgcgggggtccatcgcgcggtgcctcgagacggcgcgccaccggctcacgctgcaggacttcgccgcggtgtaccgcgagttctcccgccgcggcgactggcagcggtcgctccggctgttcaagtacatgcagcgccagtcgtggtgccgccccgacgagcacatccacgccatcgtcatcggcgtgctcgggcgccagggccccgccctgctcgacaagtgcctcgaggtattccatgacctcccctccgagtcgcgcaccgcgctctcctacacctccctcatcgccgcctacgcgcatgcagctatgtatgaggaggcttatgttgcattcaacatgatgaatgaaattggaagcttgccaactaccgccacgtacaacaccgtgctcgccgcctgcgctcgcgccaccgatccgccggtcccgttcgacatgctgctcggcctcttcgctgaaatgcgccatgacccttccccctccgttcgtcccgacctcaccacctacaacaccctcctcgccgctgccgctgtacgcgctctctccgaccagtccgagatgctgctgcgcaccatgctcgaggccggtgtcttgccggacaccgcatcttaccgccacattgttgatgccttcgctggtgctggtaacctctcccgtgtggccgagctgtttgccgagatgtcagcaacggggcacactccagacccatctgcgtatcttgggctgatggaagctcacacgctggttggtgccactgctgaagcggtagctgtgctgcggcagatgcaggctgatggctgtccgccgacagctgcgacataccgtgtcttgcttgatctgtatggcagacaggggaggtttgatggcgtgcgcgagctcttccgcgagatgagaacaactgtacctccagacacagccacatacaatgtcctgttccgcgtttttggggacggtggcttcttcaaggaggtggtggagctcttccaagatatgcttcactctgaagtagagcctgatattgatacatgtgaaaacgtcatggttgcgtgtggtcgtggtggactccatgaggatgcaagggaagttcttgactatatcacaacagaaggaatggtgcctactgcaaaggcctacactggcctagttgaagcgcttggccatgcagctatgtatgaggaggcttatgttgcattcaacatgatgactgaaattggaagcttgccaactatagagacctacaatgctcttgcaaatgcatttgcaaagggtggccttttccaggaggctgaggccatcttttctcgaatgaccaaggcagccatagattcttccaatggtgctgcattcgatgctcttgttcccactgacaaactctcatttgccatcccctggttccaaattgtacactagggagtcccaagctgataatggttctgcccatttgactgatgaaaccttggtagaagaaaaggaatcagaactccttgcactgtgagttttcaggagcttgctgcctccttccttttgcagatgcgatgttatctggccgaacaagggaagataagacacagaatgtctcacaattttgaagtttgggcaatcagatcgtcctaatgtgcaatgagatggccttatgcctttgcagtgctctcttgcttcactatatgcagtggacgtgactcccaatatccacaatcttgcctagaacccagcacataagcatgagttcgtgatactggatttgcgctaacttgatagacaatgctggacttccagttgtgtttcaggatgtagcacttagtagggagaatcagagtatgcatgttgttgttagttgctcacttgttctatatgacatctcgtgcctgccccattcggcaagaacgaaccctgtctggaatatatggattcactcgatgcaagtaaaacatgctgatgagtcagtggaacacatcagtcatcgatacgttttgatggaaataatatcgggagtttgtatcaccgtaaggttccagtacctacatgatgtatctgcgtgcccgatctttttaatgcaagggattgcctattgcaaaagttgtgtactcttttctgaatgatacactatcatcatccttccattatccaaaatggaacaagggacgaatcatatgtttgaagtcccagttgaaaaagctccaggcagccatagattcttccaatggtgctgcaatttctggttttgttcccatgacaaactctcatttgccatcccctggttccaaattgtacactagggagtcccaagctgataatggttctgcccatttgactgatgaaaccttggtagaagaaaaggaatcagaactccttgcactatgcgatgttatctggccgaacaagggaagataa

SEQ ID NO: 30181 - DNA, 1500 bp, Oryza sativa
  Clone ID: PAT_MRT4530_34610C.1
atggtgactccattaaccttgttaaagataacatggaaaagagccacaggtcatcctcctcaaaagcaaaacagcctcagcatctgcctcaggaacaacagttcacaattgagacaggatcagtatatccactgcaagaagacaagacattccaagaaagatcgtcctgacttcctaacagtgatcatagcaaagaaaggtgagaacattattgcatttaatgcatcggtgcccaaaacaccgtatgagctatggatcctccgtgtgtgggagagtcttgcaaagaataaagtatttaacccaaatcttgggaaattggatcccaaaacagattcaacagaaattattgccacaccagaggaggaactgcaacagtctcatatagataatgtgccaaatgaggaggctcctataaggtctgaaagagtcagaagatcggctatccgtgatgactatcatgtttataatatagaagagtcacatatgggggatgatcccacctcatatgaagaggccatgagaagcgctcgctcatctgaatggttggaagccatgaaagatgaaatgaaatcaatgaaattaaatggtgtctgggatttagaagaaattcctaaaggagtcaaaacagtaggctgtaaatgggtctacaaaaccaaatatgactccagagggaatatagaaaagtttaaagcgttacttgtggcaaaaggcttcacgcaaagagaagggattgattacaatgagacattttctccagtctcttgtaaagattccttcagaattataatggcactagtggcacattatgatttggaattacatcagatagatgtaaaaacgacattcctaaatggagatttggaggaaaaaaatgacattctactggctagtagtgatgtcagtctactgcaggaaacaaagaaattcttatcctcaaactttgacatgaaagacctcgaaaaggtgttgaagaaattcaacatgtacagatgcagtgctacacctgctcctatagtgaaaggcgaaaagtatggggcatcgcaatgtcccagaaatcagtatgagctcaatgaaatgaaaacaaagccaaatgcatcagctgtaggaagcctacagtacgctcaagtgtgcatacgacctgacttggcatttgttacctggttacttggcagatttcagagtaatccaggcccagagcactggatattggaaaagaaagtcttgcgttatttgcaaggaacaaaaggcctcatgctgtcttacagaaaatcagaatcgctccagacagtggggtattcagattctgactttgcaaaagataatataaagtcaacatcgggatacgtgtttaccctggcagtaggagctatttcatggaaaagctcaaaacagaccatcactacagggtctactatgtacgccgagtttatagcatgctatgaggatccagggcaggtgaactggctaaagaagttcatacccagttttaaaggtggttga

SEQ ID NO: 30182 - DNA, 2017 bp, Oryza sativa
  Clone ID: PAT_MRT4530_34611C.1
caaatactcgcccagcaggccaacatgatggctgctttcctccaccacatccagaatctgccgcaaaacaatgctccacctccaccaccacccccacagcactctaagcttgccgagttcctccgcatccgcccgcctaccttctctagctcccataaccccattgatgctttggactggttgcatgccgtggggaaaaagttggacaccgtacagtgcaatgatgaggagaaagtcatcttcgccgctcaccaactgcaggggcccgcatctctatggtgggaccacttccaggctacgcagccagagggacagcctatcacctgggcccgtttcactgccgccttccggaggacccatgtgcccgccggagtcatggcccttaagaagagggaatttcgggagttgaaacaaggcaaccgctccgtgatggagtatttgcacgagttcaataatttggcccggtacgccccagaggatgttcgtgaagatgaggagaagcaggagaaattcctggcagggatgaaccctgagctgtctgtgcgtctggtctccggggactatcctgatttccagcgcctggtggacaagagcatccgcctggaagccaagcaaaaggaattggagtcgcacaagcgtcgcttggcgaatttccgcaaccaacgggggctaaccaaaggatccgctacaccaatccttatccaaggggatcctcctcgcagcagcagcaacagcaacctcgctccgcgcccttacctcaattcgtgcctggacaaggccacagggatgctcaaggtcaacagcgtctgtgcttcaactgcttcgagcccgggcactttgcggataaatgcccaaagccgaggcgccagcaaggccaagcgcctccccgccccaacaacggtggtaaggatgtcattcggggccgtgtgaaccacgtgactgccgaggatgtgttgacaactccagacgtcatcgttggtacgttcctcattcattccatccctgctaccattttgttcgactctagagcttcccactcgtttatttctgtgccattcgtggggagaaatcagctgggggtagaaaggcttatgaaccctctgctcatcaccacccctggaggtgttatgacaacaaagtattatagccctgccgttcctatagaaatccaaggaattcctttcccctcggatttgatacttctagacaccaagaacttgatgtgatcctcgggatgaattggttggctcaattccaaggagtagtggattgcgcaaggcgcactgtcactctgtatcggggccctgatcaaccggttgttttctttgcacccccaacttccgccggcagttcagtacttcattagctaggattgccagaaatacccatcgtcaatgagttcggagatgtgtttccagaagagctacccggtatgccgcccaagcgagagattgagttccggatagatcttgctccaggaaccactcctttatacaagcgaccctaccgtatggcagcaaataaactagccgaagtcaagaaacagttggaagagttgaaagaaaagggatatatacggccgagcacttccccctggggtgctcccgtgatttttgtggagaagaaagacaagacaaagaggatgtgcgttgactacagagctctcaatgaagttactataaaaaacaagtaccctcttccccggatcgatgatctgttcgatcaacttaaaggtgccactgtattctccaagattgatcttcgttccggatatcaccagttgcgcatccgtgaaaaagatatcccgaagaccgcattcaccacgctatacggactatatgaattcacggtgatgtcgttcggtctgaccaatgcttctgccttcttcatgaacttaatgaacaaagtgttcatggaatacctggataagtttgttgtggtctttattgacgacatactggtgtactcacaatcagaggaagaccatcagcatggctgccgcgtggggcccggccgt

SEQ ID NO: 30183 - DNA, 465 bp, Oryza sativa
  Clone ID: PAT_MRT4530_34612C.1
gccttcatcgccgccgactggtgtttctgcctacaccggctgacctattatgccgccggagttgggcgtctacgacttcaccgaccgaccacccggcctgcctccatcgccgccgattgatgtcttcgcttacacggttggttggccacaccaccgttgatgggcatttattgacctacacccgtcggtcgcctcagctgcttgcaccggttggtgcttttattgccacttgatggatgactttgttcctacatcggctacctctgctgtcaccaacgggaatactaaaagctaagtcatcatttatttcattctttatatgatattttctttttcctctgcctcactatgtcaactggttcaccgttgactagtgagtcggggggctacagatgttatatcatattttttaaacatttttataaaatatttatcttgattgcctgcgaaaaaaaaaaaaaaaaa

SEQ ID NO: 30184 - DNA, 525 bp, Oryza sativa
  Clone ID: PAT_MRT4530_34613C.1
atggtctgttttgagcttttccatgaaatagctcctactgtgagggtaaatacgtatcccgatgttgactttgtattatcttttgcaaagtcagaatctgaataccccactgtctggagcgattctgattttctttgtcctcgacattctcttgaaaacccaaatttctttattgttccatcaaatttcaagtatcactgtctcgaagcttgttctaagccattgggctgggcgcccccaatcagggcgcgggtcaaggcccccttgagccgttgggctcaaggggagggagatctatctaacagtggcagctgtagtagggttgggcggcgggagaaggagagcacggcacggcgtcgatgtggcatggttggcaaggcagcggtgcaagccgtgggcggcggcgtgcgaaccacggcaacggtggtggcggcgtatccatgtacagaggaaggagaagggaggttcaagggcaacattgggaaggtttcttggactacaattcacaaaggggtttttaaataa

SEQ ID NO: 30185 - DNA, 919 bp, Oryza sativa
  unsure (1)..(919): unsure at all n locations
  Clone ID: PAT_MRT4530_34614C.1
atggcggccgacctcccgcgccggtttccttccttcccccggccgccctctctcgccccggctctatttaaaccctccccgctcctcctccgtccgtttccgccatccccttcctcctcgccggaatcgagctcgcgccgtcgctctctctctccgccgtcgcccccgagctccggtccgccgccggcgtcgcctcctccgggttcgccgcaacgacgtcgaccccatccacgccctcgaccagtccgccgaccgccggaacgccgtcgaccccgtcgacccgagccgcgccaccggctccctccgctccggccggctcctccgtcgccgccgacgccccggggtgagccgtggaccgtcgnctcctttcccccttcccgcccctctctcggccgccgctccgccgcgccggtggtcgccggcggcgaccatcggggcgcgggcgcgccgcctcccgccgacagcgccggcgtggccgccctcgggcgcgccgagtggctgccgcgtggggcccggccgtcagccgcccgcgcccttgggtgcggctgacgcgtgggacccacggcgccggccggtgcgagccgggtgcgcccggtccaccgtggacccaccccggccaatataaggactaagctcgggcctctgttgcaaagcactaccgtccttccacatgtctagtgggacaaatgaaggctacacgagctgtggcccggtagtcgagatgtcatggcacagggccggtgtcctgctgctgggggctcagtcctacctacctgtcccgggggttccggccgtaggtggggttgggtcgatgtacacctctgatcagagtataatctattcgaatagaagcgccctcggttatgggcaagccgagcaatgtatccaagttacggggaagaggagagagagggggagg

SEQ ID NO: 30186 - DNA, 2084 bp, Oryza sativa
  Clone ID: PAT_MRT4530_34615C.1
gtggctactccttgatgggttgcattaaagatattctgaccctaaaaggagataactacgcagaatggaaaagaaaactcgaccttgcttttatcttgggagatgtggactgggtgttgactaccccatgtcctatagaacctgctgaacttattagaggtgaaaatgagtcagatgctgattggcaaaagagacagagggacaatgctcctctcgtcatgtcgtatgacattgaacaaaagaaatggtccttagccaacaagaaatgtttggctgtggtaaagaatacgattgagccaaccatattgggctcaatcccagagtgtgacgctgtctcagagtaccttgaaagaataaagagccagtttactggctcttcaaagacttatgctacacagctgatcaagcagcttgtgacagaaaggtaccatggaggtggtgttagagaccacatacttagaatgagcaacatggcttccaagttgaagccaatggatttgggcataacagatgactttctggtccatctggttatggcctcattgccaaagcaatttgacaattttattgtcaactacaacataagtccagagaaatggaactttgagaagctcattgccaattgtgtgcaagaggaggagagaatcaaagagtcaaatggttgttcaattaactatgttaaagataacaaaaaaaagaaccacaagtcgtctcccacctcaaaagctaaacagtctcagcatctgcctcagcaacaacagttcgctgttgagaaagatcagtgtctccactgcaagaagacaggacattacaagaaagactgtcctgacttcttgaaaatgatcatggcaaggaaagacgagctttatttgttatctctttctgagaatgtgaatgttgtgtcctcgttgacaaaagaaaacaagaaaagaaagcgaactcccgatgtctcatcgaaattatggcactgtcgtttgggccatatttcgagggggagaattgagagactagttaagaatgaaattcttcctccattggagttctcagacttagaacaatgcatagaatgcattaaaggaaaatttgtaaagagcatcaaaaagggtgcaaaacgaagcacaggaattttagagatcattcatacagatatttgtggttcatttcctgtgaaaagtgtggatggctatgactcgttcataacattcacagatcattacttccgctatggttatatttatccaattaaagagcgatcagaagcattggataaatttaagatattcaaagctgaagttgaaaatcaacatgatataaagattaaagtagtaagatctaaccgtgggggggagtactatgtcgacatacaccttatgggcaagtccatggaccttttgcaaggcgaacctcaacagaatggggtagctgaaaggcgcaaccgtacccttatggatatggtgcgcagcatgatgagctactccacactaccactgggtttatggatggaggcgttaaaaaccgccattcatattctcaatagagttccaagcaaatcgatgcccaaaacaccgtatgagctatggacaggaagagtaccctccctagctcacctccgtgtgtgggggagtcctgcagaggccaaagtatttaacccaaatattgggaagttggatcccaaaacagtcagctgccattttattggctatcctgaaagatcaaaaggctatcgtttctactgtccaaacagttatacaaagtttgtagaaacgagacatgccgtcttcttggaagacgaaatgattagggggagctcggtagttcgagaaattgatcttgaggagaggcgggtgtctgtacccgctccgtcgactcaggaacctttcttctctctacctgctgatgttgtgcctgcaatacctgtcattgatgtaccagcacctgttgttacctctcctgtggcaacaatgaatgaaaatgaggaacctgttatacaggattcaacagaaatggttgccacaccagaggaggagctgcaacagcctcaaatagataatgtgccagtacaggagactcaacaagagcctcag

SEQ ID NO: 30187 - DNA, 351 bp, Oryza sativa
  Clone ID: PAT_MRT4530_34616C.1
atgacggtggtgagaggcggcagtaagctcagggccgatctgttgggaggaggcagctggaggctcaggctggttgcggtggtcaatagtcaaggcggactgcacaagctctcccgctgccaccttctcatgttcgtgaagcatggaggggccaccgttgcggttgctagctgggagctcctaaggcacgccatggcaagggcgctgttgggtatagccgatgtgcacttgcgcgatggcggaggagaaggcccgctggcgatggcaacatcaacagctatccaagctcatggagccccctttctcccctccccattcgaattggccctcgccacctctgctcacctatag

SEQ ID NO: 30188 - DNA, 1155 bp, Oryza sativa
  Clone ID: PAT_MRT4530_34617C.1
atggggtacattaaagatattccaaccctgaaaggagataactacgaagaatggaaaagagaacttgaccttgcttttatcttgggagaggtggactgggtgttgactaccccatgtcctatagaacctgttgaacttttcagaggtgaaaatgagtcagatgctgaatggcaaaagagagagagggacaatgtttccctcatcttgtcgtatgacattgagcatgcgaaatggtccttagccaacaagaactgtttgactgctgtaaagaacacgattgagccaaccatattgggctcaatcctagagtatgacaccgtctctatgtacctcgaaagtataaagagccagtttactggttcttcaaagttttatgtgacacaggtgataaagcagcttgtgacagagaggtaccatggaggtggtgtaaaagaccacattcttaggatgagcaacatagcttccaagttgaagcaaaaggatttgggcatctcagatgattttctggtccatctggaggaaagactcaaagagaccaatggtggctccattaaccttgttaaagataacaaggaaaagagccagaagtcaccctcctcaaaagctaaacagcctcagcatctgcctcagcaacaacaattcacagttaagacagatgacattctactggctagtagtgatgtcaatctactgcaggaaacaaagaaattcttgtcctcaaactttgacataaaagacctcggtgagacttcatatgttttgggcatagagattcaccgagatagaacgaagtatgcattgggattttctcaaaaggcatatatagaaaaggtgttgaagaaattcaacgtgtacagatgcagtgctacacctgctcctatagtgaaaggcgaaaagtatggggcatcgcaatgtcctagaaatcagtatgagctcaatgaaataaaaacaaagccaaatgcgtcagctgtaggaagcctacagtacgcgcaagtgtgcagacgacctgacttggcatttgttaccgggttacttggcagatttcaaagtaatccaggcctagagcactggaattggtatagaaagtcttgcgtcatttgcaaggaacaaaatgcctcatgctgtcttacagaaaatcagaatcgctccaaatag

SEQ ID NO: 30189 - DNA, 372 bp, Oryza sativa
  Clone ID: PAT_MRT4530_34618C.1
atgtcgaaggacgaagtccctgataggcttttgtacacctcaccccgtttcaccggcaccaacaacggccaggtccggtccgtccgtacaaccacccgcacgcgccgcaccacactccggctccgccaccctcacctcatcccaaccgtttccgacccgcgcccgtgcggccgcttgaccgtttcccactgccacctgggccccacctcgtcgggccccgcgccgcgcctcaccggtggccgcgtggcacccgcccaccggccgcgcccacgccccgcgtgcgccgcggtagtcctattcccaaactgcccccggggactctcgggccgcgtgtaccactcccctccccgcgtagcactagctttttgctga

SEQ ID NO: 30190 - DNA, 2553 bp, Oryza sativa
  Clone ID: PAT_MRT4530_34619C.1
atggccggcgcttcttcatcctccaacacctcaaccggtggctactccttgatgggttgcattaaaaatattccaaccctaaaaggagataactacacagaatggaaaagaaaactcgaccttgctttcatcttgggagaggtggactgggtgttgactaccccatgtcttatagaacctgctgcacttgtcagaggtgaaaatgagtcagatgctaaccggcaaaagagacaaagggacaatgctcctctcgtcatgtcgtatgacattgaacaaaagaaatggtccttagccaacaagaaatgtttggctgtgggaaagaacacgattgagccaaccatattaggctcaatcccagagtgtgacgctgtctcaaagtaccttgaaagaataaagagtcagtttactggctcttcaaagactaatgctacacagctgatcaagcagcttgtgacagaaaggctaataagcctaagcctaaacaaagagggccttaggatgaacaacatggcttccaagttgaagccaatggatttgggcataacagatgaccttctggtccatctggttatggcctcattgccaaagcagtttgacaattttattgtcaactacaacataagtccagataaatggaagtttgaaaagctcatcgctaattgtgtatccacatggtggattgattctggagcaactattcatgcttgtaattgtttaaaggcattccgttcaacgaggactacgcaaagaagagaaagctccattagagttgccaatggagttgaagaaaaagttgaagctgttggagatcttcctctagagctcgcgaatggcttcacacttttacttcgagatgtcttttatgttccttctttgcaaagaaacttaataagtgtatcaaagttggattttgatggatatgattgccgctttggaaatggcaaatgtgaactatggtataataatgcatgggggagaattgagagactcgttaagaacgaaattcttcctccattggagttctcagacatagaacaatgcatagaatgcattaaaggaaaatttgtaaagatcatcaaaaaggatgcaaaacgaagcgcaggaattttagagaccattcatacatatatttgtggtccatttcctgtgaaaagtgtggatggctatgactcgttcataacattcacagatgattactcccgctatggttatatttatccaattaaagagcgatcagaagcattggataaatttaagatattcaaagctgaagttgaaaatcagcatgatataaagattaaagtagtaagatctgaccgtggggggagtactatggtcgacatacgccttatgggcaagtccatggaccttttgcaagttaatacaaagtttgtagaaacgagacatgccgtcttcttggaagacaaaatgattagggggagctcggtagttcgagaaattgatcttgaggagaggcgggtgtctgtacccgctccgtcgactcaggaacctttcttctctttacctgctgatgttgtgcctgcaatgcctgtcattgaggtaccagcacctgttgttacctctcctgtggcaacaatgaatgaaaatgaggaacctgttatacaggattcaacagaaatggttgccacaccagaggaggagctgcaacatcctcaaacagataatgtgacagtacaggagactcaacaagagcctcaggtacaggatgtgccaaatgtggaggcccctagaaggtctgaaagagtcagaagatcggctatccgtgatgactataaagtttataatatagaagagtcacatatggaggatgatcccacctcatatgaagaggccatgagaagcgctcgctcatctgaatggttggaagccatgaaagatgaaatgaaatcaatgaaactaaacgatgtttgggatttagaagaaattcctaatggagccaaaacaataggttgtaaatgggtctacaaaaccaaatatgactccagagggaatatagaaaagtttaaagcgcgacttgtggcaaaaggcttcacgcaacaagaagggattgattacaatgagatattttctccagtctcttgtaaagattcgttcaggattataattgcactggtggcacattatgatttggaattacatcagatggatgtaaaaacggcatttctaaatggagatttggaggaaaaagtatacatggcgcaaccgaaaggttttgtcatgaaaggaaacgaaaatatgggatgccgtctaaagagatccatttatggattaaagaaagcttcgagacagtggtacttgaagtttgacgggacaataaagaaatttggatttcaagagaatgtcaaggacaactgtatttattcaaagtttaagaatgggagatttattttcctaattctgtatgtggatgacattctactggctagtagtgatgtcagtctacggcaggaaataaagaaattcttgtcctcaaactttgacatgaaagacctcggtgaggcttcatatgttttgggcatagagattcactga

SEQ ID NO: 30191 - DNA, 343 bp, Oryza sativa
  Clone ID: PAT_MRT4530_3461C.1
accggatacaatttgcaacttctaattgtaaaaataacggggaacgagattttacagttaataaccattatagtggaccaaatggttttgggagcggttaaaaccggtgataaaacactgggctttggtaaaatttgtaataaacgttgtgcaaccagttcgtgttcgttatgtcctccctaaaaaacaatgcctaataccgggcaggggtatacaaatttagttcactcagggtctccttagttccaatgctttccctgtttggaaaaccagttgagctgccaccgttttttgaaagagttccgttcgaatttccaaagaagggtccattgatgctgccatt

SEQ ID NO: 30192 - DNA, 2184 bp, Oryza sativa
  Clone ID: PAT_MRT4530_34620C.1
atggcggaagagaaggaaagcttcgaaggccaatgggcgccgtccgacgtgacggaagaaaacttgaaggagatggtggcgcacggcgttctccctgctaaggagatcatcgggtggcggccagcgtgcggtgagatttttccgacccccgatacacacgagattgtggtcttctcgcatttcttctacggcggcttcgctcttccgacctcgaaatttttccgcgggatcttgaacttctacggaatcagcttgcatcacctaaacccgaattccatagtgcatatcgccaatttcgtccatgtttgtgaagcctttttgggaatcaagcctcactttgccctgtttcgccggatcttcttcctcaaaccccaaccgaacaagagcaaaccgtgcgtagtcgggggggcaggattccagctgaggggaactctgagccaaaagtatttctctatgcccttcaagacttcaaataaagggtggcatgcaaactggttctatgttcagaatcctgagcctgctcttcccggctactcacaccagctgccagttgtgccatataatgcattcaatccgcctccgcaggaatacgtattgatgaaatctgatcccccaattgctcagcgccgatctcctcgccagcacaccattcagggaagtggagggccgacaatcaggtcagacccacaacctcaaacctccaaaccggctggtcagacaggtcctcgcaagagaaaactggtgcttaatgacgacgagggcgatgacagcaacaaatctggggacaagggcacgcccaacaaactcccaaagcataccatgcccaggaaaaaactggccggccgtcaaatgccaaagattagaacatcttccaggaaaccgtccgacatagatccaactggaaaagaccctgatccggctgtgacagagccaaatttatccaaagacgctgagccgtcttccgaaaaccagccgactgccgaaagccagccgactggcgcccatgcttcggatgacaaagccaatccgagtgaccagccgccaactggagaccagtcggcaacagctgaaactgcaacaacacaagagcccccgactggaaaccagtcggacgtaggtcccgatgaagaaatccctgaagttgaagcgcaaacgacaacttcccaaggaccagaggctggtaaagactcaatgattgggtctctaaataaagaacaaggaccacctcatgttcagccaggaacatcctcaggaacactaggcgatgacgaagaaacaattcctcgcataaaggcggctgatgactcccgtcctcctatcttgctcaaatggtgggacgagaactcgcaagttgccggcatcgttataaatcgtcaaaaagaagatgaggaagtgtgccagctgaagaaagcacttggagaagccactcgcattgtgaatagaatccatcttcgcaatgaggccaaaactacaactttggaaaagctggttcctcatttgggaactcttgaagcagttagggaccagctgcatgaggccaaggagtatgctaaaaagacagagaaggagttaagggaccgaattgcccagctccaggattcaaacttcgagctaagtggttcgtcaaaagcacaagctaccaggatggcacaaatggagaaacagattgaagccttgaaaagagacaaagtagaactagctgtgcaaagggactcagccttgaaggaggttgaagaccgtaaaatcaaatctcaagctcagtttgatgtcctggttggtaagatcaagaagcttgaaggagcaagagacgaagtcgccaatgtcgctacaccacttgtccaagctatgttccttaatgacagtggtccaagtgcacttgacgcaaccgaaatctttgacaagctgagagtagcaccggatgtatacttcaagaatatcaagaaagctggaagtatgggagctagtatggcattggcgatgaccaaatccttgtacccgaggattgaaattgacgccattgatggctttgcagacgggacaagcgaagaagctgctcttgatcttatcagtaatgctcaaagtgcggctgacaagattgcaagtgatgttgtagagcaattccgcaacaacgaccttcagccgagcaataataactctgatgatgaaaggactgattctgactga

SEQ ID NO: 30193 - DNA, 1398 bp, Oryza sativa
  Clone ID: PAT_MRT4530_34621C.1
atggcgcggcggcgcgaagaggtggactgggtgttgactatcccatgtcctatagaacctgctgcacttgtcagaggtgaaaatgagtcagatgctgactgggaaaagagacagagggacaatgctcttctcatcatgtcgtatgacattgaacataagaaatggttcttagccaacaagaaatgtttggctgtgctgataaagcagcttgtgacagagaggtaccatggaggtggtgttagagaccacattcttaggatgagcaatatggcttccaagttgaagccaatggatttgggcttaacagatgacttcttggtccatttggttatggcctcattgccaaagcagtttgacaattttattgtcaactacaacataagtccagagaaatggaactttgaaaagctcatcgctaattgtgtgcaagaggaggagagaatcaaagagtcaaatggtggttcaattaactatgttaaagataacaagaaaaagaaccacaaatccacatggtggattgattctggagcaactattcaagcttgtaattgtttaaaggcattccgttcgacgaggactacgcaaagaaacgaaagctccattagagttgccaatggagttgaagaaaaggttgaagctgttggagatctttgtctagagctcgcaaatggcttcacacttttacttcgagatgtcttttatgttccttctttgcaaagaaatttaataagtgtatccaaattggattttgatggatatgattgccgctttggaagtggcaaatgtgaactatgtgtggatggctatgactcgttcataacattcacagacgattactcccgttatggttatatttatcctattaaagagcgatcagaagcattggataaatttaagatattcaaggctgaagttgaaaatcagcatgatataaagattaaagtagtaagatctgactgtgggggggagtactatggtcaacatacgccttgtgggcaagtctctagaccttttgcaaggttcttgttagagaatggaatagtagcccagtattcaacaccgggcgaacctcaacagaatggggtagctgaaaggcgtaaccgcacccttatggatatggtgcgcagcatgatgagctactccacactaccactgggtttatggatggaggcgttaaaaaccgctattcatattctcaacagagttccaagcaaatcggtgcccaaaacaccgtatgagctatggacaggaagagtacccttgctagcttacctccgtgtgtgggggagtcctgcagagcctaaagattcaacagaaattattgccacaccagaggaggagctgcaacagcctcaaacagataatgtgccagtacaggagactcatcaagagccttag

SEQ ID NO: 30194 - DNA, 2418 bp, Oryza sativa
  Clone ID: PAT_MRT4530_34622C.1
atggcggaagagaaagaaagctttgaaggccaatgggcgacatccgacgtgacggaggagaacctgaaggagatggtggcgcacggcgttctccctgccaaggagatcatcgggtggcggccagcgcacggtgaggcttttccgtcccccgatacacatgaggttgtagtcttctcccatttcttctatggcggcttcgctcttccgacctcgaaatttttccgcgggattttaaacttctatggaatcagcttgcatcacctgaacccaaattccatagttcacatcgccaatttcgtccatccccaaccgaacaagagtaagccatgcgtagtcgggggggccggatttcagctgaggggcactctgagccagaaatacttctctatgcctttcaagacttcaaacaaagaatggcatgcgaactggttttatgttcagaatcctgagcctgctcttcctgaatactcttgccttcctccggtataccaagagacttggaactctcttccgattggggatgaagctgcccaagccttggagttgatggatcgcatgctaaaactcaaagaacaaggcttacaaggagagcagattactcggcatttcattaaatgccgactggcgccaattaaagaaagatcccgcacagcgttcgagttcgacggcaagcatgatcctaatcgtgaagaaccagattctctggatttcaaaatcatgaaggagagaatgtataaaatcttctcaaatgctattgtcgtcagctactcacatcagctgccagttgtgccatataacgcattcaatccgcctccgcaggaatatgtattgatgaaatctgatcccccaatcactcagcgccggtctcctcgccagcacaccgttcaaggaggtggagaatcgacaatcagatcagatccacaacctcaaacttccaatccgactgggcagacaagttctcgcaagagaaaactagtgcttgacgacgatgaaggcgatgacgacaacagatctggggacaagggctcgcctaataaactcccaaagcgtacaatgcttaggaaaaaactagctaaccgcccaatgccaaagattagaacatcttccaggaaaccatctgacatagatccaactggaaaagatcctgatccggctgtgacagagccaaattcctccaaggattctgagccgactgccgagagccagccgactggcgagagccagccgactggcgcccatacttcaggtgataaggccgattcgagtgaccagcccccgactggaaatcagtcggcagcaactgaaactacaacaacccaagagcccccgactggaaaccagtcggatgtaggtccagatcaagaaattcccgaagttgaagcacagacgacgacttctcaaggacctgaagctggtaacgactcgatgattgggtctccaaataaagaacaaggatcacctcacgctcagctgggaacatcctcagggccaccaggcgatgacgaagaagaaattctccgcataaaggcggctgatgactctcgtcctcctatcttactcaaatggtgggatgagaactcacaagctgccggcatcgtcataaatcgtcaaaaagaagatgaggaagtgtgccagctgaagaaggcgcttggagaagccactcgtattgtaaatagaatccatcttcgcaatgaggccaagaccgtaactttagaaaagctggttcctcatttgggaactcttgaagcagttagggaccagctacacgaggccaaggagctcgccaaaaagacggagaaggaattaagggagcgaattactcagctccaggattcaaacttcgagctgagtggttcgtcaaaagcgcaagccgccaggatggctcaaatggaaaaacaaattgaagccctgaaaagagacaaggcagaactggctgcacaaagggactcggccttgaaggaggttgaagaccgcaaaatcaaatcgcaagctcagttcgacgtcctggttggtaagatcaagaagcttgaaggagcaagagatgaagtcgctaatgtcgctactccactcatccaagccatgttcctcaataacagtggtccgagtgcactcgacgcaaccgaaatcttcgacaagctgagagttgctccggatgtatatttcaagaacatcaagaaagctggaagtatgggagctagcacggcattggcgatgaccaagtccttgtacccgaggattgaaattgatgccattgatggctttgcagacgggacaagcgtagaggctgctcttgatcttatcagcaatgctcaaaatgcggctgacaaaattgcaagtgacgttgtagagcaattccgcaacaacgaccttcagccaagtaacaataactctgatgatgaaaggactgattctgactga

SEQ ID NO: 30195 - DNA, 594 bp, Oryza sativa
  Clone ID: PAT_MRT4530_34623C.1
atccccgggctgcaggaatcggcacgaggccatttcatagatcgtcggattgattcttttggatcaacatatgatcctgttgtacatgaaggctgacagacatgacgatcatccactgtaaataccaggtataccaggtattgaggatttgaggtgcacctcgtagttcaaaggaaaaacaataagagccagaaaacacgctggaggttttattacagtgcaaaaatctttgcaaagaagaatctttccctctaccatccttgaaggaagtcgaagttggactttaagcttccaaggaaatgtaaacatgttcaagtaattggagggtcatgttcttttttggatcatattaggctacccatttagggatgtacagccttatcagtatgttgtagttgatataatactagtatgttgtagttgctcagtaacccttttataattgctcttccaactttgctgtggtcttatcagcctagttcgtgcatgctgctgtaaattgtagtggtttagatggttcagtttgctgatgtttgggagttcaccttgcaaattgcaaactgtaaatgtccgttgttgctcgaattccaatcg

SEQ ID NO: 30196 - DNA, 1646 bp, Oryza sativa
  Clone ID: PAT_MRT4530_34624C.1
ctaaccacactgttcaagttccacgtcatgccctttaagcttcacaccaataacaggataaccttgtttcttcgtccatgtagtcatcaaattcttaacaggttcaccagatacctcttcaagaacagcccacaggtcctcggttttagcattcgagtaggcatatttttttatatatgaagctaatgctttctctcttattgttatcattcccaacttttcccccttctttgcttctcccaatgcacttctactcagtttttcaggaaattcccatcttatctgaaaacgctctgcaccaaggtaactttgcagcatacgaataacagaagcacccttgtcatagcttatggaatcaaaaatcgagtctatctcactggcatggtgtatttcgacctcaataggatgagactcagctagagagtccaattttagagcagaggtggtactgtcaagaaattgggtccagatattccactcagggaaaaaggaatctactgccaaatagctcatccatgtagcaaaaccctcgtttagccacaagtgagtccaccattccatggttacaagattgccgaaccattgatgagccaattcatgcgcgacagtaattgctacattctgtttggtggatgctgatgaagactgctcatcaaaaagcaaatatatttcccggtaagtgaccaatccatagttctccatggctccatttgtaaaatcggggatagcaaccatatccaacttaggtagtggataaggggtatcaaagaattctttatagagattcaatgacttcactccaacatctaatgcaaacttcccttgattactcttaccaacttgagtgtacacacgaactttgttgccttccgatgttacaccttctatataatcaaacaaaccaacaactattgccactaaataagttgacataacgggtgattcctcatactcgacagtcttgataggaccagcaattttctcattaactataggcatgttcgacaaagctaccagctcagatggaacttcaagtgttaacttgaacttcgccttgaaagaaggctcatcccagcaagggaagcaccgtcgagcatccacggactcaaactgtgtcactgccatgttttttgtctcccccttgtattcatatttacttctgtagaatcccctcatctgatcgttgagcgtgccgttgaacctcatggcgagcacgccctcgccgagcggcagctccccggcgaactccagcaccaggatctcgtcctcctcgaacaccgacacctccgccggcgccaagccctggaagcggatggaggcgcggtcgacggcgaggtcggcggcgttgaggacgaggaagcgggtgggcgcggagacgtcgacggccacggacgcctcgccggagaacacgcaggcggcgaggtccggccggagccggagctcgtaccgccgcggcgccgcgaaccgcggcagccgcgcctgcccgcggaactccgccgccgccgccgccatttcaggagtagcatcaattgatattttagctacactagaagttacagaatttatgtgtgaaagaacactgaaatcatcctcgtcacggcaagcatacagtaaatgtagtaacgacgacaatgtttaatagacac

SEQ ID NO: 30197 - DNA, 2717 bp, Oryza sativa
  unsure (1)..(2717): unsure at all n locations
  Clone ID: PAT_MRT4530_34625C.1
aatgcgaatcgatgcaaccaccactgtactgattactgattagtaaaattacaatttgcagattagcagcagttcgcgatgataatatacatgcaaggatggaaggatcagagtagagagagagaagaggagattggaagtccggattacttccgtgtaataatcatacaattgattaatgctacagaaagcatttcccgcgcgcgcgaaatgcatgcaacaaaattacagcccaatgggggagaagggctagtgtacacagcggctttggttgcgatcgatcagaaggtcggcacgacgccgtcgacgccgtagtcggcgtcggagccgccgggcgccatgagcgcggcgacggcggccgcggcggaggagtacatctcctcgtcctcgccgtcggcgtcggcgtccgcgtcggcgtccgcgcccgcgccgcccttggtgcgcttggcgaagcggcccttgatgcgcggccgcgtctccgcgtacgccttgcgggacgcgtaccggatggtcttctcgaaccgccggctcttgcgcttctccctgtaccgcatcagccgcgcctcccgctcccgccccctgctcaccaccggcatcggagcgccgccgcccgccgccgcgtccggcaccaccgccgcctccgaggatgatacgctgtggttcatggagtggtcggagtagaagagcttgccgccggtgatgtcgagctcgggcggaccgttctggacgccgatggccttgatgtcgtccatggagcgcgcgaagtcgaggtcgaggtaagggtcggagtcggcgtagagctcgtcggttgcaccgacggcgccatctttctgcccgtggtcgggctcggggaggagccacgacgcggcctcggcgtcgttgctcccgtcatcgtcggccgccgccgcgtcgccgccgtgggcaccggaacccggcttgggcgcgtcggcgagcgcgccgaagaagggcgcgacggggagccgctcgtggcggcgcgcgagcgggttggcggagtggatgtcggcgtcgcaggcggcgcagagcgcggcggcgtcggccctgcacgtgaccgccgcgggcgcgtgctcgcagacctcgcagagccacacccgcgcgtggcgcgacccgggcccgtgcgcccgcgcgtcgcacccggcgcagaggaacgccgcgtcggcgcggcagaacagccgcgccgcctccccgccgcacgcgtcgcacgccctcgccgccagcccccagtacgcccctcccaccaccgccgacttgtcgtccccctccatggccacaccacctcactcactctcagtctctcactcgcgctagcggcggccgcgagctagaaggcgaggcgaggcgaatctcagccaagctttcctagctgacgcagccatttccgcaatggcagaaatcggtgtacgatctacctattctcctccgcatacaggtaaacagacggctagacttcatgataattcatgctaatgttgggaggggcaatccactatgctcagctcatggatcttcaggaatggagctgccagcatataaatgacaaacaaatacaaggtggctactccttgatgggttgcattaaagatattccgaccctaaaaggagataactacgcagaatggaaaagaaaactcgaccttgcttttatcttgggagaggtggactgggtattgactaccccatgtcctatagaacctgctgaccttgtcagaggtgaaaatgagtcagatgctgactggcaaaagagacagagggacaatgctcctctcgtcatgtcgtatgacattgaacaaaagaaatggtccttagccaacaagaaatgtttggctgtggtaaagaatacgattgagcctaccatattgggctcgatcccagagtgtgacgctgtctcagagtaccttgaaagaataaagagtcagtttactggctcttcaaagacttatgctacacagctgatcaagcagcttgtgacagaaaggtacaatggaggtggtgttagagaccacatacttagaatgagcaacatggcttccaagttgaagccaatggatttgggcataacagatgactttctggtccatctggttatggcctcattgccaaagcagtttgacaattttattgtcaactacaacataagtccagagaaatggaactttgagaagctcattgctaattgtgtgcaagaggaggagagaatcaaagaatcaaatggtggttcaataaactatgttaaagataagaaaaagaaccacaagtctcccacctcaaaaggtaaacagtctcagcatctgcctcagcaacaacagttcgctgttgagaaagatcaatgtctccactgcaagaagacaggacactacaagaaagattgtcctgattttttgaaaatgatcatggcaaagaaaggactacgcaaagaagagaaagcaccattagagttgccaatggagttgaagaaaaagttgaagctgnttggagatcttcctntagagctcgcgaatggcttcatacttttacttcgagatgtcttttatgttccttctttgcaaagaaacttaataagtgtatcaaagttggattttgatggatatgattnccgctttggaagtggcaaatgtgaactatggcataataatgcatgtattggncttgctgtgttgcgagacgagctttatttgntatcctctttcttgagaatgtga

SEQ ID NO: 30198 - DNA, 2427 bp, Oryza sativa
  Clone ID: PAT_MRT4530_34626C.1
atggcggaagagaaggaaagctttgaaggccaatgggcgccatccgacgtgacggaggagaacctgaaggagatggtggcgcacggcgttctccctgccaaggaaatcatcgggtggcggccagcgtgcggtgaggcttttccgacccccgatatacacgaggctgtggtcttctcccatttcttctatggcggcttcgctcttccgacctcaaaatttttccgcgggatattaagcttctatggaatcagcttgcatcacctaaacccaaattccatagttcacatcgccaatttcgtccatgtttgtgaagccttcttgggaattaagccccacttcgctctgtttcgccgaatcttctttctcaagccccaaccaaacaagagtaagccatgtgtagtcggaggggccggatttcagctgagggggactctgagccagaagtacttctctatgcccttcaagacctcaaacaaagggtggcatgcaaactggttttatattcagaatcctgagcctgctcttcccgagtactcttgtcttcctccggtgtaccaagatgcctggaactctcttccgattggggatgaagcagcccaagccttggagctgatggatcgcatgctaaaactcaaagaacaaggcttacaaggagagcagattactcgacacttcatcaaatgccgattggcaccaattaaagaaagatcccgtacggcattcgagtttgacggcaagcatgatcctaatcgtgaagaaccagattctctggattttaaaatcatgaaggagagaatgtgtaaaatcttctcaaatgctattgtcgtcagctactcacatcagctgccagttgtgccatataacgcattcaatccgcctccgcaggaatatgtattgatgaagtctgaccccccaatcactcagcgccggtctcctcgccagcacaccgttcagggaggtggagggccgacaatcagatcagatccgcaacctcaaacctccaatccgactgggcagacaggcgacgacggcaacaaatctggggacaaaggctcgcccaataaactcccaaagcataccactcccaggaaaaaactggctagtcgtccaaggccaaagattagaacatcttccaggaaaccatccgacatagatccaactggaaaagatcctgatccgactgtgacagaaccaagttcatccaaggattctgagccgactgccgaaagccagccgactggcgcccatacttcaggtgataaggccaatccgagtgaccagcctccgactggaaaccagtcggcagcaactgaaactacaacaacccaagagcccccgactggaaaccagtcggatgtaggtccagatcaagaaactcccgaagttgaagcgcagacaacaacttctcaaggaccagaggctggtaacgactcgatgattgggtctccagataaagaacaaggatcaccccacgctcagctaggaacatcctcaagaccaccaggcgatgacgaagaagaaattcctcgcataaaggcagctgatgactctcgtcctcctatcttgctcaaatggtgggacgagaactcacaagctgccggcatcgtcataaatcgtcaaaaagaagatgaggaagtgtgccagttgaagaaggcacttggagaagccactcgcattgtgaatagaatccatcttcgcaatgaggccaagaccgcaactttagaaaagctggttcctcatttgggaactcttgaagcagttagggaccagctacacgaggccaaggagctcgccaaaaagacagagaaggaattaagggaccgaattgctcagctccaggattcaaacttcgagctgagtggttcatcaaaagcgcaagccgccaggatggctcaaatggagaaacaaattgaagccctggaaagagacaaggtagaactggctgcgcaaagggactcggccttgaaggaggttgaagaccgcaaaatcaaatctcaagctcaatttgacgtcctggttggtaagatcaagaggcttgaaggagcaagagatgaagtcgctaatgtcgctacaccactcgtccaagctatgttcctcaataacagtggtccgagtgcactcgacgcaaccgaaatcttcgacaagctgagagttgctccggatgtatatttcaagaatatcaagaaagctggaagtatgggagctagcacggcattggcgatgaccaaatccttgtacccgaggattgaaattgacgccattgatggctttgcagacgggacaagcgtagaggctgctcttgatcttatcagcaatgctcaaaatgcggctgacaagattgcaagtgacgtcgtagatcaattccgcaacaccgaccttcagccgagtagtaataactctgatgatgaaaggactgattctgactga

SEQ ID NO: 30199 - DNA, 485 bp, Oryza sativa
  Clone ID: PAT_MRT4530_34627C.1
gccaaaacagcatgttcattaaggacaacatgttactactatacatgtgaacacagctaaattccaccatgcgaatacaaaagtgtctaacaaaggagcgcatgtgatatctgctagttataaccatatttttgaccgatcgtcgatgagggttcaatatggatggttcgcatgacaacatgagtaacccggtgacgtgaggaattataactaggcctcgagctggtcatattatactgagtccttgctgtactatctcctgagaggaatatatcgaggatctaccatactttaagagctatcaatacaggtggaccactcgatgattcaaggagtatggctcttaataccaatacatgtgaagcgcttacaaacttctaatgttatgaacttgtataccatagccaatggacttctggtgaacagggtgataacaatgatgactcatatacctactgcacagggttcttaatggatgagtttac

SEQ ID NO: 30200 - DNA, 440 bp, Oryza sativa
  unsure (1)..(440): unsure at all n locations
  Clone ID: PAT_MRT4530_34628C.1
gcgcagatctgcttaattcatcgaaggtttgcaaattttattgattcacatgcttgttttctgtatcacagatgcatttgtcatgctgtcaactgtctatgtttgtggaattgctgaatgtagatgcattgttctgttctagcttaggttgctgtgtttgatatatttgttccattatacttgaattgaaattttgtatattagttgtgttgtaatgtatgatttatgtttaattatgtatttatcatttcctgttattaattgattgcatcttatttatcaaaattttgattatgtactgtgaaattgatttctgtgatgtgtttatacaggcacatttagttgttgaattgtattttaatttcactttgatntttctgtacttctgccatgtattttgtactggacttaaaatgaactgaaatgncttttgggtatga

SEQ ID NO: 30201 - DNA, 3588 bp, Oryza sativa
  Clone ID: PAT_MRT4530_34629C.1
atgattatctcaggtggctactccttgatgggttacattaaagatattctgaccctgacaggagataactacggagaatagaaaagagaactcgaccttgcttttatcttgggagaggtggactgggtgttgactaccccatgtcctgtagaacctgctaaacttttcaaaggtgaaaaagagttagatgctgaatggcaaaagagagagagggacaatgcttccctcatcatgtcgtatgacattgagcatgcgaaatggtcctcagccaacaagaactgtttggctgcggtaaagaacatgattgagccaaccatattgggctcaatcccagagtatgacaccgtctctaagtacctcgagagtataaagagccagtttactggttcttcaaagttttatgcgacacagctaataaagcagcttgtgacagagaggtaccatggtgatggtgtaaaagactacattcttaggatgagcaacatggcttccaagttgaagcaaaaagatttgggcatctcagatgactttctggtccatctggttataacctcattgccaaagcattttgacaactttgttgtcaattacaaaataagtccagaaaaatggaatcttgaagagctcatctctaattgtgtgcaagaggaggaaagaatcaaagagaccaatggtgactccattaaccttgttaaagatatcaaggaaaagagccacaggtcaccctcctcaaaagcaaaacagcctcagtatctgcctcaacaacaacagttcacagttgagacaggattagtgtctccactgcaagaagacaagacattccaagaaagatcatcctgacttcctgatagtgatcatggcaaaaaaaggtgagaacattattacatttgtaaatgaatctcattatgattagttattatagatccacatggtggattgattctagagcaactattcatatgtgtaattgtttaaagggattccgttcaatgaggactatgcaaagaagcgaaagatccattagagttgccaatggagtgaagcaaaagttgaagttgctggagatctttgcctagagctcgcgaatggcttcacacttttatttcgagatgttttttatgtcccttctttgcaaagaaataagtgtacccaaattggattttgatggatatgattgccattttggaaatggaaaatgtgaactatggtataataatgcatgtgttggtcttgctctgttgcaaaatcagctttacttgttatctctttctgagaatgtgaatgttgtgtcctcgttgacaaaagaaaagaaagcgaactcctgatgtctcatcgaaattatggcattgtcgtttaggccatatttcgagggggagaattgagagactggttaagaatgtaattcttcctccattggagttctcagttttagaacaatgcatacaatgcatcggtgcccaaaacaccgtatgagctatggatcctccgtgtgtgggggagtcctgcagaggttaaagtatttaacccaaatattgggaagttggaccccaaaacagtcagctgccattttattggctatcctgaaagatcaaagggttattgtttctactgtccaaacagttatacaaagtttgtagaaacgagacatgccgtcttcttggaagacgaaatgattagggggagctcggtagttcgagaaattgatcttgatgagaggtgggtgtctgagccctctcagtcgattcaagagccttcttctctctacctgttaatgttgtgcttgcaatgcatgatgttgcagtaccaacacctgttgttatctctcctgtggcaacaatgaatgaaagtgaggaacttgttttacaggattcaacagaaattattgccacaccagaggaggagctgcaacagcctcaaacagataatgtgccagaataggagacccctagaaggcctgaaagagtcagaagatcggttatccgtgatgactatcaagtttataatatagaagagtcgcatatggaggatgatcccacctcatatgaagaagccatgagaagcgctcgctcatctgaatggttggaagccatgaaagatgaaatgaaatcaatgaaattaaatggtgtctgggatttagaagaaattcctaaaggagccaaaacagtaggctgtaaatgggtctacaaagccaaatatgactccagagggaatatagaaaagtttaaagtgcgacttgtggcaaaaggcttcacgcaaaagagaagggattgattacaatgagacattttcttcagtctcttgtaaagtttccttcagaattataatggcactggtggcacattatgatttagaattacatcagttggatgtaaaaacgacatttctaaatggagatttggaggaaaagtatacatggcacaactgaaaggtttcgtcatgaaaggaaacaaaaatatgggatgtcatctaaagagatccatttatggattagaacaagcttcgagacagtggtacttgaagtttgatgggacaataaagaaatttgggttttcaagagaatatcgaggacaactgtattgattcaaagttaagaatgggagattcattttcctaattatgtatgtagatgacattctactggctagtagtgatgtcagtctactgcaggaaacaaagaaattcttgtcctcaaagtttgacatgaaagacctcggtgaggcttcatatgttttgggcatagagattcaccgagatagaacatagtatgcattgggactttctcaaaaggcatatatagaaaaggtgttgaagaaattcaacatgtacagatgcagtgctacacctgctcctatagtgaaaggcgaaaagtatggggcgcaatgtcctagaaatcagtatgagctcaatgaaatgaaaacaaagccatatgcatcagttgtaagaagcctacagtatgcgcaagtgtgcacacaacctgacttggcatttgttaccgggttacttggtagatttcagagtaatccaggcccagagcactggaaattggtatagaaagtcttgcgttatttgcaaggaacaaaaggcctcatgctgtcttacagaaaatcagaatcgctccagatagtggggtattcagattttgactttgcaaaagataatacaaagttaacatcgggatacgtgttcaccttggcagtaggagctatttcatggaaaagctcaaaacagatcaccactgcagggtctactatgtatgccgagtttatagcatgctatgaggcaacggggcaggtgaactggctaaagaagtttatacccggtttaaaggtggttgacagtattgagaaaccactaaagttatactgtgataatgaacccacagtaatgtactctcacaactatcagtcaagtggtgctgccaaacacattgacataaagtactatgttgtgaaagacaaagtccgggatcaaacaatcagtctcgagcacattagaacagaaaggatgctcgcggatccgctcacgaaaggcctacctcccaacatgttcaaggaacatgtagcatgcatgggtttaagggaagcctta

SEQ ID NO: 30202 - DNA, 5376 bp, Oryza sativa
  Clone ID: PAT_MRT4530_3462C.1
cgcgccgctcctccccggtccgtggacccgatccgccgtggaccgccctccccgagccgctgaccggtgagcttcctcaccgtgttcgcctggaggtccacggctacgtgggtacctgcctagctaacatggtggtggaggcatctggaggcccagcagatcacgcctgtcaggaggcagcatacctgatgatggctagactacgggagcgccacaactacatattccacgacacggtgtaccggtttcaccctcggcgagccagcagtgatgatgtcagtactttccgtccgacagccggcgagaacgacaccacctttggtcacatgtgtgctgtgatgaggggattggataggatgcactcggacctggacaaggcgaccaaggccttgaatgatgggaagctcatgaggatcgtcgctctgaaggacgagatagcgcgcctgaagagggagaacgctcagttaaagggtcttcccgcgccaggaggagtccggatccgcaccacgccccgcaagacgatgactgcacccgtgcgcatccagcttgcgcccaggaacccacctccatcagcagctcccgcagcacctccagttccgcccgcagttcctgcagctccagctccagctcccgcgtccgctctctccttcgctccagcatcagccgccaggggcccagccagaggcaacggaggttggttgtctgctactcccagtggcagccacgatctcagcagcagcagctccagtggctcagagtcgggcagcggcgagacttatctgccagggtccggaagtcgctcagagggacctgatggtctacaccaggaatggtagccgcgcaacaggcgagggcagcaacggcgaagagcgcactgagggtgtgcatcccaacagcaactccggcaatggtccgccaccacttcccgagaatccgacgctagcccaagtgatggcacatcagacacagatgatggcagccatgatgcagcagatgcagcagcagcaccagcagatgcaccagaggatgctgcagcacgccgaacagcagcaccagcagtttggtccccctccccctcagtccaagttgccagagtttctacgtgtcaggccacccaccttctccagcaccaccaaccctatggaggcgaatgactggctccatgccatagagaagaagctgaatctcctgcagtgcaatgatcaggagaaggttgctttcgccacacaccagcttcaaggtcctgcgtcagcttggtgggacaatcacatggccacccgcccaccaggtactgaagtcacttgggcagagttctgccgtagtttcaggaaggcacaggtgccagatggggtcgtggcacaaaagaagagggaatttcgggcactccatcagggcaacaggactgtgatggagtacctccatgagttcaatcgcctcgcgcgatatgcaccagaggatgtccgtaccgacgccgagaagcaggaaaagttcatggcaggtctggatgacgagctaaccaaccagttgatatctggagattacgccgatttcgagaggctggttgacaaggcaatccgtcaggaggatcaacgcaacaagatggacaggaagaggaaggccgcacagttcagggcacctcagggaagtcaccaaaggccgcgcttcgctcccgggcaacagggtggacctaccaccatgatcgtccgccagtaccgcccgttcaaccctagcaactttccccatggcgccggtggcagtcagacccaccatagaggtcagtccaaccgcggtgcagctccacgcccaccaatggcaccggcacagtcaggcccgcccgcgcaagccaagaaggagactggagcaaaaccagggtcctgcttcaactgtggcgagcttggccacttcgctgacaaatgctcgaagcctaggcgtgccgggccaaggtttatccgggctcgtgtcaaccacgcatctgcggaggaggcacaagcagcaccagaggtcgtactgggtacgttccctgttaactcaatccctgcaacagtactttttgattctggtgcaacgcattctttcatttcaaagaaatttgttgggatgcatgggttaataagagaggaacttagcacaccaatgcgggttcataccccaaggaatagctccacttcggttcaattcagcccttctataacaatagaaattcaaagatcaccatttctagccaacctcattcttctcgaatccaaagacctagatgtcattcttgggatggattggctgaccaagtttaagggggtcatcgattgtgcgaatcgcacagtcaccttgaccaacgagaagggagaaaccgtggtgtacaaatcactagactcatcaaagcgaggggtctttttgaatcagattgagacggaaatcccagtggacaccgtggagaagaacttgaggaaatgggaagatatacccatagtctgcgagtatccggaagtgttccccgaagacctcactaccatgccacccaagagagagattgaattccggattgacttggcaccgggaaccgctccaatttacaagagaccgtacagaatggcggccaacgaattagccgaggtcaagaagcaggttgatgagcagctacagaaagggtacattcgaccaagtacttcaccttggggtgctccggtcatttttgtggagaaaaaggataagacgaagaggatgtgcgttgattatcgcgcactcaacgaggtcacaatcaagaacaaatatcctttgccgcgaatcgatgatttgtttgatcaactgaaaggagctaaagtgttttctaagatagacctgcgatcaggctaccaccagttgagaattcgggaagaggatattccgaagacggccttcaccactcggtacgggctatatgagtgcacggttatgtcgttcggacttaccaacgcacccgcattcttcatgaatctgatgaacaaagtgttcatggaatttttggacaagtttgttgtggtgttcatcgatgacattcttatctattcaaagtccgaagaagaacatgaacaacatctccgtctagtactcgagaagttgaaggagcaccagctatacgccaagttcagcaagtgtgacttctggtcgacggaagtcaaatttctgggccatgtcattacagctcagggtgtggcagttgatccatcgaacgtggagtcggttaccaaatagaccccgccgaagaccgtgtcgcagattcgaagttttcttggacttgcaggttattaccaccaattcatcgaaaacttctccagaatcgctcgacccatgactcagttacttaagaaagatgagaagttcaaatggacagctgagtgcgataagagttttgaggagctcaaaaagaaattagtatccgcaccagttttgattctgcctgaccagatgaaagacttccaagtctattgcgatgcatcccgtcacggacttggatgtgtcctaatgcaagagggcagagtggttgcgtatgcctcgcgacagttacgtccacacgaagggaattatccaactcatgacctggaattggcagcagtggttcatgctttgaagatctggaggcactatctgattggcaaccgctgcgaagtatatacggaccataagagtctgaaatacatcttcacccaaccggacctaaacctccgacaatgaagatggttggaactaatcaaagactatgacatgggtattcactaccacccgggtaaagccaatgtggtggcagacgctttaagccggaaaagttactgcactgccctgtgcatcgagggcatgtgtgaggaattgcggcaggagtttgagcatctcaacgtgggaattgttgaacacgggtttgtggccgctctggaggcacggcctacgctcgtggatcaagtcagagcagctcaagtaaacgattctgaaatagcagagttgaaaaagaacatgagagtcggaaaagcccgggatttccacgaagatgagcatggcacaatctggttgggagaaagattgtgtgtacctgacgacaaggaactgaaggatctgatactcaccgaggctcatcagacccagtactccattcatccaggcagcactaaaatgtatcaagacctcaaagaaaagttttggtgggtcagcatgaggagagaaatagctgaattcgtcgcactctgcgatgtttgccagcgagtgaaggcagagcaccaaagaccagcaggtttactccaacctcttcaaatcccggaatggaaatgggaagagattggaatggactttataacaggactgccccggacatcatcgggtcacgattcaatctaggtagtcgtggatcgactcactaaggtttctcacttcataccagtacataccacatatacgggcaaaaggttggcggagctttacctttcgagaatcatgtgcctacatggagtacccaaaaagattgtatctgaccaagggagtcagttcacctcaaaattctggcagaagctgcaggaagaattggggacccgtttaaatttcagcacggcctatcacccgcaaactgatggtcagaccgagcgagtcaatcaaatcttggaagatatgttgagagcttgcgctcttgattttggtggagcttgggacaaaagcttaccatatgcggaattctcgtacaacaacagctaccaggccagtctacagatggcaccgtttgaagctttatacggccggaagtgccgcacacctctcttctgggatcagacaggcgagcgtcaattgttcgggacagaggtattagcggaagcggaagagaaagtcagaatcatcagggaaaggttgaggattgcccagtctcgacagaagagctacgcggataaccgtcgaagggagctcacttttgaggcaggggattacgtgtatcttcgtgtcactccgctccggggagtacaccgctttcagacgaaaggcaagttggcaccacgcttcgtggggccatacaaaatcctggaacgaaggggggaagttgcttatcagctagaacttccatccaatatgatcggcatccatgacgtgttccacgtgtcccaattaaagaagtgcataagggtacctgaagaacaggctgattcggaacacattgatatccaggaggacctaacatacgtggagaagccggttcgtatacttgataccagcgaaagaagaaccagaaacaagatcaccaggttttgccgagttcagtggagtcatcattcagaagaggaagcaacctgggaaagggaagatgagttgaaagccgcccatccgcacctcttcaccagctcctccgaatctcggggccgagattccgtt

SEQ ID NO: 30203 - DNA, 2466 bp, Oryza sativa
  Clone ID: PAT_MRT4530_34630C.1
atggcggaagagaaagaaagctttgaaggtcaatgggcgccatccgacgtgacggaggagaacctgaaggagatggtggcgcacggcgttctccctgccaaggagatcatcgggtggcggccagcgtgcggtgaggcttttccgtctcccgatacacacgaggttgtagtcttctcccatttcttccatggcggctttgctcttccgacctcaaaatttttccgtgggatattaaacttctatggaatcagcttgcatcacctaaacccaaattccatagtccatatcgccaatttcgttcatgtctgtgaagccttcttgggaatcaaaccccacttcgctctgttccgccggatcttctttctcaagccccaaccgaacaagagtaagacatgtgtagtcggaggggccggatttcagttgaggggaactctgagccagaagtacttctctatgcctttcaagacctcaaacaaagggtggcatgcgaactggttttatgttcagaatcctgagcctgctcttcccgagtactcttgtcttcctccggtgtaccaagatacttggaactctcttccaatcggagatgaagctgcccaagcattggaattaatggatcgcatgctaaaactcaaagaacaaggcttacaaggagagcagattactcggcatttcatcaaatgccggctggcaccaattaaagaaagatctcgtacagcattcgagtttgacggcaagcatgatcccaatcgtgaagaaccagactctctggattttaaaatcatgaaggagagaatgtataaaatcttctcaaacgctattgtcgtcagctactcacatcagctaccggttgtgccatataatgcattcaatccgcctccgcaggaatatgtattgatgaaatctgatcccccaatcactcagcgccggtctcctcgccaacacaccgttcagggaggtggagggccaacaatcagatcagatccgcaacctcaaatctccaatccaactggacagacaagttcccgcaagagaaaactggtgcttgacaacgatgaaggcgatgacaacaacaaatctggggacaagggctcgcctaataaactcccaaagcgtaccatgcccaggaaaaaactggctagccgtccaatgccgaagattagaacatcttccaggaaaccatccgacatagatccaactggaaaagatcctgatccggctgtgacagagccaagttcatccaaggatccggagccgactgccgaaagccagccaactggcgtccatgcttcgggtgataaggccgatccgagtgaccagccgccgactggaaaccagtcggcagcagctgaaactgcaacaacccaagagcccccgactggaaaccagtcggatgtaggtccagatcaagaaattcccgaagttgaagcgcagacgacgacttctcaaggaccagaggctggtaacgactcgatgattgggtctctaaataaagaacaagggtcacctcacgctcagctaggaacatcctcaggaacaccaggcgaagacgaagaagcaattcctcgcataaaggcggctgatgactctcgtcctcctatcttgctcaaatggtgggacgagaactcacaagtcgccggcatcgtcataaatcgtcaaaaagaagatgaggaagtgtgccagctgaagaaggcacttggagaagccactcgcatcgtgaatagaatccatcttcgcaatgaggccaagactacaactttggaaaagctggttcctcatttgggaactcttgaagcagttagggaccagctacatgaggccaaggagctcgccaaaaagacagagaaggaattaagggaccgaattgcccagctccaggattcaaacttcgagctgagtggttcatcaaaagcgcaagccaccaggatggctcagatggagaaacaaattgaagccttgaaaagagacaaagtagaactggctgcgcaaagggactcggccttgaaggaggttgaagaccgcaaaatcaaatctcaagctcaatttgacgtcctggttggtaagatcaagaggcttgaaggagcaagagatgaagtcgctaatgtcgctacaccactcgtccaagctatgttcctcaataacagtggtccgagtgcactcgacgcaaccgaaatattcgacaagctgagagttgctccggatgtatatttcaagaatatcaggaaagctggaagtatgggagctagcatggcattggcgatgaccaaatccttgtacccaaggattgaaattgacaccattgatggctttgcaaacgggacaagcgaagaagctgctcttgatcttatcagcaatgctcaaaacgcggctgacaagattgcaagtgacgttgtagagcaattccgcaacaacgatcttcagccgagcaacaataactctgatgatgaaaagactgattctgactga

SEQ ID NO: 30204 - DNA, 283 bp, Oryza sativa
  Clone ID: PAT_MRT4530_34631C.1
caacaatactaaatttagagcgagtatccgagatactgcttttctggggtgacaatagcccctcatctgacatggcttttgacaccaccacaggttagaacggtgttagggctgaggatagacttaactcctaaaacaataagatgacttgagactataaatgggagggtcatatgcgcttctttaattacatatacaagtgccgtatgctatatagcaagtgatatgcactggatcacacgagcttgcactactggaacatgatccatggtacaaccaaact

SEQ ID NO: 30205 - DNA, 266 bp, Oryza sativa
  Clone ID: PAT_MRT4530_34632C.1
tgtttcttaacaccctgtttagtgctgatgaaatgtttatcaaatatcgttttttgcttttctcgcggttcttgatggcttcgtttgttacacggcgtagttcctataacttctgtaactaattcagcccttccctcgttctttttgggtctggaatggaaggaccataatggatgtgcgggttcatgttaagtatcactgtaactggtttgactgatgcttttgattgatcgtctcgactatgtaatcttgcccaagaaaagata

SEQ ID NO: 30206 - DNA, 1534 bp, Oryza sativa
  Clone ID: PAT_MRT4530_34633C.1
atggtggaagagaaagaaagctttgaaggccaatgggcgccatccgacgtgacggaggagaacctgaaggagatggtggcgcacggcgttctccctgccaaggagatcatcgggtggcggccagcgtgcggtgaggcttttccgtcccccgatacacacgaggttgcggtcttctctcatttcttttatggcggcttcgctcttccgacctcgaaatttttccgcgggatattaagcttctatggaatcagcttgcatcacctaaacccaaattccatagtccacatcgccaatttcatccatgtctgtgaagccttcttgggaattaaaccccacttcgctctgtttcgccgaatcttctttctcaaaccccaaccaaacaagagcaagccatgtgtagtcggaggggccggatttcagctgaggggaactctgagccagaagtacttctcaatgcccttcaagacttcaaacaaagggtggcatgcgaactggttttatgttcagaatcctgagcctgctcttcccgagtactcttgtcttcctccagtgtaccaagatacttggaactctcttccgattggggacgaagcagcccaagccttagagttgatggaccgcatgctaaaactcaaagaacaaggcttacaaggagagcagatcactcggcacttcatcaaatgccgactggcgccagttaaagaaagatcccgtacagcttttgagtttgacgacaagcatgatcctaatcgcgaagaaccagactctctggattttaaaatcatgaaggagagaatgtataaaatcttctcaaatgctattgtcgtcagctactcacatcagctgccagtcgtgccatataatgcattcaatccgcctccgcaggaatatgtattgataaaatctgatcccccaatcactcagcgccggtctcctcgccagcacaccgttcagggaggtggagggccaacaatcagaccagattcgcaacctcaaacctccaatccaactggacagacaggttctcgcaagagaaaactggtgcttgacaacgatgaaggcgacgacgacaacaaatctggggacaagggctcgcctaataaactcccaaagcgtaccatgcccaggaaaaaactggctaactgcccaacgccaaagattagaacatcttctaggaaaccatccgacatagacccaactggaaaagatcctgatccggctgtgacagagccaaatttatccaaggatcctgagccgactgccgaaagccaaccgactggcgcccatgcttcgggtgataaggccgatccgagtgaccaaccgccgactggaaaccagtcggcagcagctgaaactgcaacaacccaagagcccccgactggaaaccagtcagatgtaggtctcgatcaagaaatccccgaagttgaagcgcagacgacaacttctcaaggaccagaggctggtaacgactcgatgattgggtctccaaataaagaacaaggatcacctcacgctcagctaggaacatcctcag

SEQ ID NO: 30207 - DNA, 590 bp, Oryza sativa
  Clone ID: PAT_MRT4530_34634C.1
gcacgaggcgaccattcgttccgcttcgggcggcgcgaggcgaggataatggcggcagcgcacgcgcacccgctctccctcgccgtcctcccgtcgtccccggctcaggcgacgccgctgccgctcttcctgaggtacgctgctctccgtcgcggtgggagatgcggcggagcgacgaggccgctgcggctcacgaggctgcgccgcggccgagcggcggtggcggcggcgggggaagttgacgcgcccatggagcagaccgaggccatgatgagggtggcggcggatgacgacagcgtcaccgccaccgtggtgtccgtgctcctgaccgtcgcgttcgtcgggctctccatcctcaccatcggggtgatctacctgtcggttaccgacttcctgcagaagagggagagggagaagtttgagagggaggaggccgagaggcagaaagaggaagcgaggaagaagagggccaaggcgaggggaaggaaaagaaagttctgaacttctgattgctggtacagcacttcgtcttccttttccagtatcgatattcgacatgtgactttgcattggcttgatgccattataaa

SEQ ID NO: 30208 - DNA, 2463 bp, Oryza sativa
  Clone ID: PAT_MRT4530_34635C.1
atggcggaagagaaggaaagcttcgaaggccaatgggtgccgtctgacgtaacggaagagaacctgaaggagatggtggcgcacggcgttctcccagccaaggagatcatcgggtggcggccagcgtgcggtgaggcttttccgacccctgatacacatgagatcgtagtcttctcgcatttcttctatggcggcttcgctcttccgacctcgaaattcttccgcgggatattaagcttctatggaatcagcttgcatcacctaaacccgaattccatagtccacattgccaatttcatccatgtctgtgaagccttcttaggaattaaaccccacttcgccctgttccgccgaatcttctttctcaaaccccaaccaaacaagagtaagccatgtgtagtcggaggggccggatttcagctgaggggaactctgagccagaaatacttctcaatgcccttcaagatttcaaacaaaggatggcatgcgaactggttttatgttcagaatcctgagcctgctcttcccgaatactcttgtcttcccccggtgtaccaagatacttggaactctcttccaatcggagatgaagctgcccaagccttggaattgttggatcgcatgttaaaactcaaagaacaaggcttgcaaggagagcagatcactcggcatttcatcaaatgccgactagcgccaattaaagaaagatcccgtacagcttttgagtttgacggcaagcatgatcctaatcgcgaagaaccagaatctctggatttcaaaatcatgaaggagagaatgtataaaatcttctcaaatgccattgtcgttagctactcacaccagctgccagttgtgccatataatgcattcaatccgcctccgcagcgccgatctcctcgccagcacaccattcagggaagtggagggccgacaatcaggtcagactcacaacctcaaacctccaaaccggctggtcagacaggtcctcgcaagagaaagctggtgcttaatgacgacgagggcgatgacagcaacaaatctggggacaagggcacgcccaacaaactcccaaagcataccatgcccagaaaaaaactggccggccgtcaaatgccaaagattagaacatcttccaggaaaccgtccgacatagatccaactggaaaagatcctgatccggctgtgacagagccaaatttatccaaagacgctgagccgtctgccgaaaaccagccgactgccgaaagccagccgactgccgaaagccagccgactggcgcccatgcttcggatgacaaagccgatccaagtgaccagccgccaactggagaccagtcggcaacagctgaaattgcaacaacacaagagcccccgactggaaaccagtcggatgtaggtcccgatgaagaaatccctgaagttgaagcgcaaacgacaacttcccaaggaccagaggctggtaaagactcaatgattgggtctctaaataaagaacaaggaccacctcatgttcagctaggaacatcctcaggaacactaggcgatgacgaagaaacaattcctcgcataaaggcggctgatgactcccgtcctcctatcttgctcaaatggtgggacgagaactcgcaagttgccggcatcgttataaatcgtcaaaaagaagatgaggaagtgtgccagctgaagaaagcacttggagaagccactcgcattgtgaatagaatccatcttcgcaatgaggccaagactacaactttggaaaagctggttcctcatttgggaactcttgaagcagttagggaccagctgcatgaggccaaggagtatgctaaaaagacagagaaggagttaagagaccgaattgcccagctccaggattcaaacttcgagctaagtggttcatcaaaagcacaagctaccaggatggcacaaatggagaaacagattgaagccttgaaaagagacaaagtagaactagctgtgcaaagggactcagccttgaaggaggttgaagaccgtaaaatcaaatctcaagctcagtttgatgtcctggttggtaagatcaagaagcttgaaggagcaagagacgaagtcgccaatgtcgccacaccacttgtccaagctatgttccttaatgacagtggtccgagtgcacttgacgcaaccgaaatctttgacaagctgagagtagcaccggatgtatacttcaagaatatcaagaaagctggaagtatgggagctagtatggcattggcgatgaccaaatccttgtacccgaggattgaaattgacgccattgatggctttgcagacgggacaagcgaagaagctgctcttgatcttatcagtaatgctcaaagtgcggctgacaagattgcaagtgatgttgtagagcaattccgcaacaacgaccttcagccgagcaataataactctgatgatgaaaggactgattctgactga

SEQ ID NO: 30209 - DNA, 185 bp, Oryza sativa
  unsure (1)..(185): unsure at all n locations
  Clone ID: PAT_MRT4530_34636C.1
cacgcgtccgccctgtggtacaatgagggattgccatgtncgtagcacaccattattgctgttgggttgagagaaggagttgtcattctctgtggtgcctttgggggaccggtgtttcttggggaccacggttatgatgggctctatttgtgacgctgtgctgcacgttgtgctctatgcttccc

SEQ ID NO: 30210 - DNA, 1205 bp, Oryza sativa
  unsure (1)..(1205): unsure at all n locations
  Clone ID: PAT_MRT4530_34637C.1
ccacgcgtccgcccaaacgcaaacgcaaacgcgacgccatgggaaggcaggaccagcagctgcaggtgctgaacgcgctcgacgcggccaagacgcaatggtaccacttcacggcgatcatcgtcgccggcatggggttcttcaccgacgcctacgacctcttctgcatctcgctcgtcaccaagcttctcggccgcatctactacaccgaccccgccagccccacccccggctcgctgccgcccaacatcgccgccgcggtgaatggcgtcgcgctctgcggcaccctctccggccagctcttcttcggatggctcggcgacaagctcggccgcaagagcgtctacgggatgacgctgctgctcatggtgatttgctccatcgcctcagggctctccttctcgcacacgccgacgagcgtcatggccacgctctgcttcttccgcttctggctcggcttcggcatcggcggtgactacccgctgagcgccaccatcatgtccgagtacgccaacaagaagacccgcggcgcgttcatcgccgccgtcttcgccatgcaggggttcggcatcctcgcggcgggcgttgtcacgctcgccatgtccgcggngttccaggccgcgttcccggccccagcgtacgaggtcaatgccgctgcgtccaccgtgccgcaggccgactacgtgtggcgcatcatcctgatgctcggtgcgctgccggccatactgacgtactactcccacgcgtccgctcatgttcggcaccgtcccggcggcgctcacctactactggcggatgaagatgcccgagacggcgcggtacacggcgctcatcgcccgcaacgcgaagcaggcggcggccgacatgtccaaggtgctgcacacccagattgaggagagcgcggaccgcgccgagacggtggccgtcggcggcgagagctggggcctcttctcgcgccagttcctgcgccgtcacggcctccacctcctcgccaccaccagcacgtggttcctcctcgacatcgccttctacagccagaacctgttccagaaggacatcttcagcaaggtcgggtggatcccgccggcgaagaccatgaacgcgctcgaggagctctaccgcatcgcccgcgcccaggcgctcatcgcgctctgcggcaccatccccggctactggttcaccgtgcattcatcgagatcatgggc

SEQ ID NO: 30211 - DNA, 688 bp, Oryza sativa
  Clone ID: PAT_MRT4530_34638C.1
cccgggctgcaggctccaccgctctccctaccactcacgtcggtggatcgaagtgccgacgagctcggcaccgcgtcggggcggatctggaacggcggcggtttggcgcgtccttctcggcggcgggagcaaggttagcggcgtggtcgtcctcgcggagccgggcggagctgcgaggtcggtggcgggagcaaggtcagcggcgcggtcgtcctcgtggagccgcgcggagcagcgaggtcggcggcgggagcatcctcatggcgccggctccactgccgtctctcgccgctcccgcggcgacgagctcggcgccatcgtcgacgttgatctggaccgccggatctggcctggcgcggggcgaccaggccggagatcgagctcctcggcggcgacgtgggagcttcctccagtccatggcggcgacgcgagctcctctctctctctctctcgcttttctggctcctctctctatttccccacaccaccgcgcttggatcgagccgaagaacgcacgaacaaattaaagttggtcatgtggtcttcaacttagtgggcccaggagcaaaagtggcactggattggagaatctcgtggacgtggcagcgccgggctgaacgccacatcatcccactgtgaccggccatatcagtaaacgatcgatactcctattgatacttcatatatg

SEQ ID NO: 30212 - DNA, 2580 bp, Oryza sativa
  Clone ID: PAT_MRT4530_34639C.1
atggcggaagagagagaaagcttcgaaagccaatgggcgccgtccgacgtgacggaagaaaacctgaaggagatggtagcgcacggcgttctccctgccaaggagatcatcgggtggcggccagcatgcggtgaagcctttccaacccccgatacacacgaggtcgtggtcttctctcatttcttttatggcggatttgctcttccaacctcaaagttcttccgtgggatactgaatttctatggaatcagcttacatcacttgaatccgaactccatagtccatattgcaaatttcgtccatgtctgcgaagcttttttgggcattagacctcattttgctatgttccgccgaatatttttccttaagcctcaaccgaacaaaaataaaccatgcgtagttggtggggctggatttcaactgaggggcactctgagccaaaagtatttctctatgcctttcaagacttcaaacaaaggatggcacgccaactggttttatattcaaaatcccgagcccgctcttcctgagtactcctgtcttcccccagtataccaagatacctggaactctcttcccatgggagatgaagctgcccaagccttagaactgatggaacgcatgctgaagctcaaagaacaaggcttacagggagagcaaatcactcggcatttcattaagtgtcgattagctccaatcaaagagagatcccgcacagcattcgagttcgacggcaagcatgatccaaaccgtgaagacccagactctctggactttaaaatcatgaaggagagaatgtataaaatcttctcaaatgctattgtcgtcagctactcacatcagctgccagttgtaccatataatgcattcaatccgcctccacaggagtacgtattaatgaaatctgatcccccaactgctcaacgccgatctcctcgccagcacaccgttcagggaagcggagggccgacaatcaggtcagacccgcaacctcaaacctctaaaccggctgggcagacaggttctcgcaagagaaagctggtgcttaatgacgacgaagacgatgacagcaacaaatctggggacaaaggaacgcccaataaacccccaaagcataccatgcccaggaaaaaactggctggccgtcaaatgccaaagattagaacatcttctaggtataaacctctcggtaccattttatttcgacatgcttctctaatagaaattacgctgaatatcgaaaggacactttgcaggaaaccgtccgatatagatccaactggaaaagaacctgatccggctgccacagagccaaatttatccaaagatgctgagccgactgccgaaagccagccgactgccgaaagccaaccgactgccgaaagtcagccgactggcgcccaagcttcggacgataaggccaatccgagtgatcaaccgccgactggaaaccagtcggcagcaactgaaactgcaacaacccgagagcccccgactggaaatcagtcggatgtagatctaaatcaagagatccctgaagctgaagcgcagacaacttctcaaggaccagaagttggtaatgactcagtgattgggtctccagataaagagcaaggatcacctcacgctcaaccaggcatatcctcaggtccactaggcggcgacgaagaagaaattctccgcataaaggcagctaatgactctcgtcctcctatcttactcaaatggtgggacgagaactctcaagtttccggcattgttataaatcgccaaaaagaagatgaggaagtgtgccagctgaagaaagtacttggagaagccactcgcattgtgaatagaatccatcttcgcaatgaggccaagactgcaaccttagaaaagctggttccacatttgggaactcttgaagccgttagggaacagctacacgaggccaaggagcatgccaagaaaacggagaaggaattaagggaacgaattgctcagctccaggattcaaacttcgagctgagtggttcatcaaaagcgcaagccaccagaatggctcagatggaaaagcaaattgaagccttgaaaagagacaaggtagaattggctgcggaaagggactcagccttgaaggaggttgaagaccgtaaaatcaaatctcaagctcagtttgatgtcctggttggtaagatcaagaagcttgaaggagcaagagacgaagtcgccaatgtcgctacaccactcgtccaagctatgttccttaataacagtggtccgagtgcacttgacgcaaccgaaatctttgacaagctgagagttgcaccggatgtatatttcaagaatatcaagaaagctggaagtatgggagctagtatggcattggcgatgaccaaatccttgtacccgaggattgaaattgataccattgatggctttgcagacgggacaagtgaagaagctgctcttgatcttatcagtaatgctcaaagtgcggctgacaagattgcaagtgatgttgtagagcaattccgcaacaacgaccttcagccaagcaataataactctgatgatgaaaggactgattctgactga

SEQ ID NO: 30213 - DNA, 1708 bp, Oryza sativa
  Clone ID: PAT_MRT4530_3463C.1
atggcacatcagacccagatgatggcagccatgatgcagcaccagcaccagcagatgcaccagcggatgctgcagcacgccgaacagcagcatcaacagtttggtccccctccccctcagtccaagttgccagagtttctacgtgtcaggccacccaccttctccagcaccaccaaccctatggaggcgaatgactggctccatgccatagagaagaagctgaatctcctgcaatgcaatgatcaggagaaggttgctttcgccacacaccagcttcaaggtcccgcgtcagcttggtgggacaatcacatggccacccgcccaccaggcaacaggactgtgacagagtacctccacgagttcaatcgcctcgcgcgatatgcaccagagaatgtccgcaccgacgcccaaaagcaggaaaagttcatggcggagatccacgccaccaagatggacaggaaaaagaaagccgcacagttcagggcacctcagggaagtcaccaaaggccgcgcttcgctcccaggcagcagggtggacctaccaccatgatcgttggtcagcaccgcccgttcaaccctagcaactttccccagggcgccagtggcagtcagaaccaccatggaggtcagtccaaccgcggtgcagctccacgcccaccaatggcaccggcacagtcaggcccgcccgcgcaagccaagaaggagactggagcaaaaccagggtcctgcttcaactgtggtgagcttggccacttcgctgacaaatgcccgaagcctaggcgtgccgggccaaggtttatccaggctcgtgtcaaccacgcatctgcggaggaggcacaagcagcaccagaggttgtactggtcaccttgaccaacgagaagggagaaaccgtggtgtacaaatcactagtctcaccaaagcaaggggtctctttgaatcagattgaagcagaaatcccagtggacaccgtggagaagaatttgaggaaattggaagatatacccatagtctgcgaaatggcggccaacgaattagccgaggtcaagaagcaggttgatgagcagctgcagaaagggtacattcgaccaagtacttcaccttggggtgctccggtcatttttgtagagaaaaaggataagacgaagaggatgtgcgttgattatcgcgcactcaacgaggtcaccatcaagaacaaatatcctttgccgcgaatcgatgatttgtttgatcaactgaaaggagctaaagtgttttctaagatagacctgcgatcaggctaccaccagttgagaattcgggaggaggatattccgaagacggccttcaccactcggtacgggctatatgagtgcacggttatgtcgttcggacttaccaacgcacccgcattcttcatgaatctgatgaacaaagtgttaatggaatttctggacaagtttgttgtggtgttcatcgacgacattcttatctattcaacgtccgaagaagaacatgaacaacatctccgtctagtactcgagaagttaaaggagcaccagctatacgccaagttcagcaagtgtgacttctggttgacggaagtcaaatttctgggccatgtcattacagctcagggtgtggcagttgatccatcaaacgtggagtcagttaccaaatggaccccgccgaagaccgtgtcgcagattcgaagttttcttggacttgcag

SEQ ID NO: 30214 - DNA, 1623 bp, Oryza sativa
  Clone ID: PAT_MRT4530_34640C.1
ggcacagaggcagaatcaaatgaagactatgggatgttattcagattatcacaggagggaggcatcacctatacaaatttaatccagcaagtctctgtctcacctaatgcaattcttcctagtgctgaggtggcaggtggtcttcctctgctccaaaacacttatggcagtttcatgcagctattgcaagctcctattgaatcagagaaatcaagcgctgatgttgataatcaagctgagatgtgcaggccaacagtacaattgaaagcatcatctgtagaagtgatttataatgaaatgcagactcaaactattgaggctgatgcctgttttgaccagcactttgagcaagcaacagaagaggatttattgtctgatcatgcaatagttacatttcagcaagttgaggaaatagaacacgataaaagtgcgcaaaatccagatcacaattttagtgaggaagatataaacatatttctggagaatgaaattgcttacacaaaaaaggctgtgagcaattatagagattttgttagaagagaaagtgggaaaaatgacatgatgcagtgtttggatttttttgagaagaaaagatcagaggatccattgttttatttcagattcagaactgatgagaacaatgttgtgaagagtctgttttggtccgatgggaacagcagaaaattttatgagatgtttggtgacatagttagttttgacatgacgtacaagacaaacaggtattttcagcttatgtgggtcactagaaagagatgggcaccagtttacttcaaaagcaattggtgccctttgattcagacaacagcaaggagtgaggggacaaattcaagtgtttctgcattcctagcacagtatgaaaggattgcagaaacaatttatgagtgcttcaaagaacaggaatcgctgactaggaatactgttctagatacttggtcagaatatcaatttgagaagcaagctacaaaattgtatactaggaagatattttgggcatttcagcgtatcttgcaaagctataccaagtatgatgtgaccgtgaaagtgcgtgattctatttttgaggtgtacaaatcagagattcatgaactacaggatttcagaaaaagaaagtacattgtggttgttgatactatatctgaagaatatgaatgtatctgttcaagatttaagaaggatggtattttgtgtgttcatgtgctcaaagtactcattcacttgaacataacaaaactacctgagaaatattttattgaaagatggaggctgaaagacaaaaaccaagaattatctgtgccaaacacattgatgtctgctactgttcttgaatgcaaccctttactcaggttcaacatcttgtcacagaaaatgattaagttggcttcagatgcatcaaaaacaaaacaaaagtttatatatgtgatgaatgaaagtgacaagattgaagatgggttgaaggcaatgagtgatacggctcctaacgaggctactgttcatgttcaggatgcggcggcgatgtcacgccctaaaaatcttaaatatataaattgttgtttaattggaatttttagaaattattttaaaagcctacaagctaaaccctaa

SEQ ID NO: 30215 - DNA, 2370 bp, Oryza sativa
  Clone ID: PAT_MRT4530_34641C.1
atggcggaagagaaagaaaacttcgaaggccaatgggcgccgtccgacgtgacggaggagaacctgaaggagatggtggcgcacggcgttctccctgccaaggagatcatcgggtggcggccagcgtgcggtgaggcttttccgacccccgatacacatgaggtcgtggtcttctctcatttcttttatggtggatttgctcttccaacctcaacgttcttccgtgggatactgaatttctatggaatcagcgtacatcatttgaatccgaactccatagtccatattgcaaatttcgtccatgtctgtgaagcttttttgggcattagacctcattttgctctgttccgccgaatctttttccttaagcctcaaccgaacaaaaacaaaccatgcgtagttggtggggctggatttcaactaaggggcactctgagccagaagtatttctctatgcctttcaagacttcaaacaaaggatggcacgccaactggttttatattcaaaatcccgagcccgctcttcctgagtgctcctgtcttcccccagtataccaagatacctggaactctcttcccatgggagatgaagctgcccaggccttagaactgatggaacgcatgctgaagctcaaagagcaaggcttacagggagaacaaatcactcggcatttcattaagtgccgattagctccaatcaaagagagatcccgcacagcatttgagtttgacggcaaacatgatccaaaccgtgaagacccagattctctggactttaagatcatgaaggagaggatgtacaagatattctcgaacgccattgtcgtcagctactcacaccaactgccagttgtaccatacaacgcattcaatccacctccgcaggagcacgtattgatgaaatctgatcccccaattgctcagcgccgatctcctcgccagcacaccattcagggaagtggaggaccgacaatcaggtcagacccgcaacctcaaacctccaaaccggctgggcagacaggttctcgcaagagaaagctggtacttaatgacgacgaaggcgatgacagcaacaaatctggggacaaaggaacgcccaataaacccccaaagcataccatgcccaggaaaaaactggctggccgtcaaatgccaaagattagaacatcttccaggaaaccgtccgatatagatccaactggaaaagaacctgatccagctgccacagagccaaatttatccaaagatgctgagccgactgccgaaagccagccgactgccgaaagccaaccgactgccgaaagtcagccgactggcgcccaagcttcggacgacaaggccaatccgagtgatcagccgccgactggaaaccagtcggcagcaactgaaactgcaacaacccgagagcccccgactggaaaccagtcggatgtagatctaaatcaagagattcctgaagctgaagcgcagacaacttctcaaggaccagaagttggtaatgactcagtgattgggtctccagataaagagcaaggatcacctcacgctcagccaggcacatcctcagaagatgaggaagtgtgccagctgaagaaagtacttggagaagctactcgcattgtgaatagaatccatcttcgcaatgaggccaagaccacaaccttagaaaagctggttcctcatttgggaactcttgaagccgttaggagccagctacacgaggccaaggagcatgccaagaaaacggagaaggaattaagggaacgaatcgctcagctccaggattcaaactacgagctgagtggttcatcaaaagcgcaagccgccaggatggctcaaatggagaagcaaattgaagccttgagaaaagacaaggcagaactagctgcagaaagggactcggccttgaaggaggttgaagaccgcaagatcaaatcccaagctcagtttgacgtcctggttggtaagatcaagaggcttgaaggagcaagagatgaagtcgccaatgtcgctacaccacttgtccaagctatgtttcttaataacagtggtccgagtgcacttgacgcaaccgagatctttgacaagctaagagttgcaccggatgtgtacttcaagaacatcaagaaagctggaagtatgggagctagcatggcattggcaatgaccaaatccttgtacccgagaattgaaattgactccattgatggctttgcagacgggacaagcgaggaggccgcccttgatcttatcagcaatgctcagaatgcggctgacaaaattgcaagtgacattgtatatcaattccgtaacaacgaccttcagccaagtagtaataattctgatgatgaaaggactgattctgactga

SEQ ID NO: 30216 - DNA, 2121 bp, Oryza sativa
  Clone ID: PAT_MRT4530_34642C.1
atgggagctctcagttcatgcaaatgccattacattgtccagaaaaaaggatgtaatgccatttttttcatctatccaaatgtgcagggcacagaggcagaatcaaatgaagactatgggatgttatttagattatcacaggagggaggcatcacctatacaaatttaatccagcaagtctctgtctcacctaatgcaattcttcctagtgctgaggtggcaggtggtcttcctctgctccaaaacacttatggcagtttcatgcagctattgcaagctcctattgaatcagagagtgctctatatttgacatccaatagatttgagtatgacaataccttttggggttttgatcctcacaatggttatcaacaaaatgacctgcaaaatgcacaaacagacacctctcagatgtgcaactctttgccacaaagtgtagctgtgcatcctcctatggcatctctggacatgctatatgatgaaatgcagaaatcaagcgctgatgttgataatcaagctgagatgtgcaggccaacagtacaattgaaagcatcatctgtagaagtgatttataatgaaatgcagactcaaactattgaggctgatgcctgttttgaccagcactttgagcaagcaacagaagaggatttattgtctgatcatgcaatagttacatttcagcaagttgaggaaatagaacaagataaaagtgcagaaaatccagatcaaaattttagtgaggaagatataaacatatttctggagaatgaaagtgtagcagttgttcagagaggtggtcaggatgctaaaagtgcacatgtgccgtcaatcaacaaagtttttgctgatgaaaatgaagcttttgacttctacaatggttatgcttatatggttggtttctctacatgcaaagctagcaattaccatagcagaaaaaccgatgttgtgacaaggcacacgttcaaatgcaacaggtggcggaaaccaagtgatccaaaggagaaggacctgcctgaggttgatgaagttgagaattgtttgcaaacaaacacaacaaatccattgtgtttggatttttttgagaagaaaagatcagaggatccattgttttatttcagattcagaactgatgagaacaatgttgtgaagagtctgttttggtccgatgggaacagcagaaaattttatgagatgtttggtgacatagttagttttgacatgacgtacaagacaaacaggtattttcagcttatgtgggtcactagaaagagatgggcaccagtttacttcaaaagcaattggtgccctttgattcagacaacagcaaggagtgaggggacaaattcaagtgtttctgcattcctagcacagtatgaaaggattgcagaaacaatttatgagtgcttcaaagaacaggaatcgctgactaggaatactgttctagatacttggtcagaatatcaatttgagaagcaagctacaaaattgtatactaggaagatattttgggcatttcagcgtatcttgcaaagctataccaagtatgatgtgaccgtgaaagtgcgtgattctatttttgaggtgtacaaatcagagattcatgaactacaggatttcagaaaaagaaagtacattgtggttgttgatactatatctgaagaatatgaatgtatctgttcaagatttaagaaggatggtattttgtgtgttcatgtgctcaaagtactcattcacttgaacataacaaaactacctgagaaatattttattgaaagatggaggctgaaagacaaaaaccaagaattatctgtgccaaacacattgatgtctgctactgttcttgaatgcaaccctttactcaggttcaacatcttgtcacagaaaatgattaagttggcttcagatgcatcaaaaacaaaacaaaagtttatatatgtgatgaatgaaagtgacaagattgaagatgggttgaaggcaatgagtgatacggctcctaacgaggctactgttcatgttcaggatgcggcggcgatgtcacgccctaaaaatcttaaatatataaattgttgtttaattggaatttttagaaattattttaaaagcctacaagctaaaccctaa

SEQ ID NO: 30217 - DNA, 2517 bp, Oryza sativa
  Clone ID: PAT_MRT4530_34643C.1
atggcggaggagaaagaaagctttgaaggccaatgggcgccgtccgacgtaacggaagagaacctgaaggagatggtggcgcacggcgttctccctgccaaggagatcatcgggtggcggccagcgtgcggtgagatttttccgacccccgatacacacgagattgtggtcttctctcatttcttctatggcggcttcgctcttccgacctcaaaatttttccgcgggatattaaacttctatggaatcagcttgcatcacctaaacccaaattccataatccatatcgccaatttcatccatgtttgtgaagccttcttgggaattaaaccccacttcgctctgttccgccgaatcttttttctcaagccccaaccaaacaaaaataaggcatgtgtagtcggaggggcaggatttcagttgaggggaactctgagccagaagtatttctctatgcccttcaagacctcaaacaaagggtggcatgtgaactggttttatgttcagaatcctgagcctgctcttcccgagtactcttgtcttcctccagtgtaccaagatacttggaactctcttccgatcggagatgaagctgctcaagccttggaattgatggaccgcatgctaaaactcaaagaacaaggcttgcaaggagagcagattactcggcatttcatcaaatgccgattggcaccaattaaagaaagatcccgtacagcattcgagttcgacggcaagcatgatcccaatcgtgaagaaccagactctctggactttaaaatcatgaaggagagaatgtataaaattttctcaaatgctattgtcgtcagctactcacatcagctgccagttgtgccatataatgcattcaatccgcctccgcaggaatatgcgttgatgaaatctgatcccccaatcactcagcgccggtcgcctcgtcagcacaccgttcagggaggtggaggttcaaaaatcagaccagatccgcaacctcaaacctccaatccgactggacagacaggttctcggaagagaaaactggtgctcgacaacgatgaaggcgacgacgataaatctggggacaagggctcgcctaataaactcccaaagcgtaccatgcccaagaaaaaactggctggccgtcaaatgccaaagattagaacatcttccaggaaaccatccgacatagatccaactggaaaagatcctgatccggctgtgacagagccaaatttatccaaagacgttgagcagactgccgaaaaccaaccgactgccgaaagccagccgactgccgaaagccagccgactgccgaaagccagccgactggcgcccatgcttcggatgacaaggccgatccgagtgaccagccaccgactggaaaccagtcggaagcaactgaaactgcaacaacccaagagcccccgactggaaaccagtcggatgtgggtcccgatcaagagatccccgaagttgaagcgcagacgacaacttctcaagggccagaggctggtaacgactcgataattgggtctccaaataaagaacaaggatcacctcacgcccagctaggaacatcttcaggaccaccaggcgatgacgaagaagaaatccttcgcataaaggcggccgacgactctcgtcctcctatcttaatcaaatggtgggacgagaactcacaagctgccggtatcgtcataaatcgtcaaaaagaagatgaggaagtatgccagctgaagaaggcgcttggagaagccactcgtattgtaaatagaatccatcttcgcaatgaggccaagaccgcaactttagaaagactggttcctcatttgggaactcttgaagctgttagggaccagttacacgaggccaaggagctcgccaaaaagacggagaaggaattaagggagcgaattgctcagctccaggattcaaacttcgagctgagtggttcgtcaaaagtgcaagccgccaagatggctcaaatggaaaagcaaattgaagccttgaaaagagacaaggtagaactggctgcacagagggactctgccttgaaggaagttgaagatcgcaaaatcaaatcccaagctcaatttgacgtcctggttggtaagatcaagaggcttgaaggagcaagagatgaagttgctaatgtcgctaccccacttgtccaagctatgttcctgaataacagtggtccgagtgcactcgacgcaaccgaaatctttgacaagctgagagctgctccggatgtgtatttcaagaacatcaagaaagctggaagtatgggagctagcatggcattagcgatgaccaaatccttgtacccaagaattgaagttgacaccattgatggctttgcagacgggacaagtgaagaggctgctcttgatcttatcagcagtgctcaaaatgcggctgacaaaattgcaagcgacgttgtagatcaattccacaatactaactttcagccgagtagtaataactctgatgatgaaagaactgattctgactga

SEQ ID NO: 30218 - DNA, 187 bp, Oryza sativa
  Clone ID: PAT_MRT4530_34644C.1
aaatgcttttcccacgggccttccggtaattgtttgttgttggtaaatttgttgaaccggaatgaaccgaagtgtcaacaaccaaggaaacaaggcttaatgaaccccaatgaatgaccgcccaaaggcttcttaattaccggacttcatctaattaagggtaaagcttggttaacgccattgcaag

SEQ ID NO: 30219 - DNA, 2412 bp, Oryza sativa
  Clone ID: PAT_MRT4530_34645C.1
atggcggaagagaaggaaagctttgaaggccaatgggcgccatccgacgtgacggaggagaacctgaaggagatggtggcgcacggcgttctccccgccaaggagatcatcgggtggcggccagcgtgcggtgaggcttttccgacccccgatacacacgaggttgtggtcttctcccatttcttctatggcggcttcgctcttccgacctcaaaatttttccgcgggatattaagcttctatggaatcagcttgcatcacctaaacctaaattccatagtccacatcgccaatttcgtccatgtttgtgaagccttcttggggattaagccccacttcactctgtttcgccgaatcttctttctcaagccccaaccgaacaagagtaagccatgtgtagtcggaggggccggatttcagctgagggggactctgagccaaaagtacttctctatgcccttcaagacctcaaacaaagggtggcacgcaaactggttttatattcagaatcctgagcctgctcttcctgagtactcttgtcttcctccagtgtaccaagatacctggaactctcttccgattggggatgaagcagcccaagccttggcattgatggatcgcatgctaaaactcaaagaacaaggtttacaaggagagcagattactcggcacttcatcaaatgccgattggcaccaattaaagaaagatcccgtacggcaagcatgatcctaatcgagagaatgtataaaatcttctcaaatgctattgtcgtcaactactcacatcagctgccagttgtgccatataacgcattcaatccacctccgcaggaatatgcattgatgaagtctgaccccccaatcactcagcgccgatctcctcgccagcacaccgttcagggaggtggagggccaacaatcagatcagacccgcaacctcaaacttccaatccgactgggcagacaggttctcgcaagagaaagctggtgcttagcgacgacgaaggcgacgatggcaacaaatatgggaacaaaggcttgcccaataaactcccaaagcataccacacccaggaaaaaactggctagccgtccaatgccaaagattagaacatcttccaggaaaccatccgacatagatccagctggaaaagatcctgatccggccgtgacagagccaagttcatccaaggattctgagccgactgccgaaagccagccggctggcgcccatacttcaggtgacaaggcctatccgagtgaccagcctccgactggaaaccagtcggcagcaactgaaactacaacgacccaagagcccccggctggaaaccagtcggatgtaggtccagatcaagaaattcccgaagttgaagcacggacgataacttctcaaggaccagaggctggtaacgactcgatgattgggtctccaaataaagaacaaggatcacctcacgctcagctaggaacatcctcagaaccaccaggcgacgacgaagaagaaattctccgcataaaggcggctgatgactctcgtcctcctatcttactcaaatggtgggacgagaactcacaagctgctggcatcgtcataaatcgtcaaaaagaagatgaggaagtgtgccagctgaagaaggcacttggagaagccactcgcattgtgaatagaatccatcttcgcaatgaggccaagaccgcaactttagaaaagctggttcctcatttgggaactcttgaagcagttagggaccagctacacgaggccaaggagcttgccaaaaagacagagaaggaattgagggaccaaattgctcagctccaggattcaaacttcgagctgagaggttcatcaaaagcgcaagccaccaggatggctcaaatggagaaacaaattgaagccctgaaaagagacaaggtagaactggctgcgcaaagggactcggccttgaaggagattgaagattgcaaaatcaaatctcaagctcaatttgacgtcctggttggcaagatcaagaggcttgaaggagcaagagatgaagtcgctagtgtcgctacaccactcgtccaagctatgttcctcaataacagtggtccgagtgcactcgacgcaaccgaaatcttcgacaagctgagagttgctccggatgtatatttcaagaatatcaagaaagctggaagtatgggagctagcatggcattggcgatgaccaaatccttgtacccaaggattgaaattgacgccattgatggctttgcagacgggacaagcgaagaagctgctcttgatcttatcagcaatgctcaaaacgcggctgacaaaattgcaagtgacgttgtagatcaattccgcaataccgacctacagccgagtagtaacaactctgatgatgaaaaaactgattctgactga

SEQ ID NO: 30220 - DNA, 2434 bp, Oryza sativa
  Clone ID: PAT_MRT4530_34646C.1
tttgtggtgccacattcctaggggcgatggtttattctttgtgcgtaattgtagcttctatttacccacctggaatactttggttgtcctttaatgtaaaaaactttgcagggtttccttctcagcacctcttttacacctaaacatcgagggctgaactccatatgtgaactattccacccaaagaatgaaatggaaaaagaaacttcaaatccacaaggcaaatggtaagccgattacgatatttgcccaatatgtcaattttttctaacactttatttcacgttattgctattccttttcttccccgagtgtccagtatgtctttacaacaaggaggagcttctcccggacgagcgggccatcttcgtgatcaacgatttggctgttccatctcataccgtcggtaatgctctttattttcaccaacatatcaacatcatctcttataatcactgtaccctcaggcctcagtattctgtccatttccagcagaatgttgtccatctggcatctgtccttgtatagcgtgaacactgaatcggcatgaatgaggtcgtaggtccgagggtacgtggacatgccctcacaccagtcttggtagcttccgatgagcccacgctcgtatataaccccaagagttgttgaattgccaacagttgggaccatattcatgacccacacagggtcatccaccaatgccgcagcgaagccgccaaagcgcgcattcatatcaagcaagttgcggtaccgtcctttctgtccaaattgacttatcacggacttgtagtgcccgaccctcttctgccatagtttggtgtcttccacgaacatttcatcagtgacaccctcaatgctaccactggcaattctgggtggcactgcagtgagcctctctggccatttcttcaactggccacccgcaatctcttttatgtcactaacctctgggagaggagttatgcaagcctccatcttatcgtaccatgcagcatctggatttttatttgagcagaagggtggggacttgacgactttgcgggaggccttgcagtgaatgtggttagtaggtttctgccagatggcaatgtcaccaacctccttgagcgtgatcttcttccagcaaagactcttggccactgcctcaatcgcttgctgctctgcattcaggtcctccttggttctctgccaccccttccagtgcttcttccagttgattggaggtccagacaaaatccaataccctcctggccgcagaatgcgatccacctcagccaagtacagcccatcgtagagctgccagggaatgaggcagcgggagcaatgtgccatgtcaaaggcacgagctggataggtgagccggttggatgaaagaacaccgatcatcgccggcacaccacgttccagtgcaaattgaacctgtgcctcgtgagagtcacgtggcgcgaaggacatggccaggatgttgcgtgacagcaagtatgcgccccagctcgctaccccacaaccggtgtcgagggcggtgcggatggatccatcgtggagggggatgatcttgccgatgtcgtcgatgtacgcgccggcgccgtgggggaacatggtgccgccgccggggaaccggaacttttcgccttcgacgcggatccagttctgcaccgccttctcgacggtgagctccttgtgcggcacgttggcgaaccacgcgacgtcgcggctggtcggccacgggaacgggttgcggtacccctggggcgccggcacgaggcaccggagccgctcgccctccgacgggcagtgccgctcccggtacacgagccggtcccgcgggaaccgcagcgagcgctcgacgtcctcgcacggcgtgtactcggagtacttggccgggcacgcctcgtacgtgcggtgcacctggcccgacgccacctccatcccctccgcggtatggtgcgccgcgaagtcgagcggcgcggacgacgaggagtcgccgccgccgccgccgccgccaaggagcgtcggggtgggggagacgcaggagacggaggcggtggtggcgatggagacggaggaggcgacgccgccggccggggaggcggagaagccgccgtggtgccagatgccgatgaggtaggacaccgtgcagagcaccgcgacggccgcgaggtggaacagggacgggcggcggccgcccgcggacggcatgtgcagcttcgtggcggtcgcgcccaccgccatggctggctggcggcttctgctgctcccgctgcgcgctctcctctctcccctcgcctcttgtgggattggggcgattcgcctttctgcaccactgcccccctcgctggctgcttaaagcgcttgccgcctaggaaggattggggccgctggggatcgattgattagccgcgggccgagtcccggcggcccgtgaaagggagcc

SEQ ID NO: 30221 - DNA, 742 bp, Oryza sativa
  Clone ID: PAT_MRT4530_34647C.1
gccgcttgttgcaggtagcgagctggggcgcatacttgctgtcacgcaacatcctggccatgtccttcgcgccacgtgactctcacgaggcacaggttcaatttgcactggaacgtggtgtgccggcgatgatcggtgttctttcatccaaccggctcacctatccagctcgtgcctttgacatggcacattgctcccgctgcctcattccctggcagctctacggtatggcaacattttgtccaaaattaaatgtgttggcaatgctctgttaatcctttgataactcaggtgcaatttgaaatgcagatgggctgtacttggctgaggtggatcgcattctgcggccaggagggtattggattttgtctggacctccaatcaactggaagaagcactggaaggggtggcagagaaccaaggaggacctgaatgcagagcagcaagcgattgaggcagtggccaagagtctttgctggaagaagatcacgctcaaggaggttggtgacattgccatctggcagaaacctactaaccacattcactgcaaggcctcccgcaaagtcgtcaagtccccacccttctgctcaaataaaaatccagatgctgcatggtaattacaacactaattatatctttattgtccatcttgaagttaactcacgttcacagttcaggataaatcatattcatggtgatcgattataggtacgataagatggaggcttgcataactcctctc

SEQ ID NO: 30222 - DNA, 725 bp, Oryza sativa
  unsure (1)..(725): unsure at all n locations
  Clone ID: PAT_MRT4530_34648C.1
gacaccataattgtagcttctatttacccacctggaatactttggttgtcctttaatgtaaaaaactttgcagggtttccttctcagcacctcttttacacctaaacatcgagggctgaactccatatgtgaactattccacccaaagaatgaaatggaaaaagaaacttcaaatccacaaggcaaatggtaagccgattacgatatttgcccaatatgtcaattttttctaacactttatttcacgttattgctattccttttcttccccgagtgtccagtatgtctttacaacaaggaggagcttctcccggacgagcgggccatcttcgtgatcaacgatttggctgttccatctcataccgtcggtaatgctctttattttcaccaacatatcaacatcatctcttataatcactgtaccctcaggcctcagtattctgtccatttccagcagaatgttgtccatctggcatctgcaagagacgaaaactgcgtcagtccagtaccagggtaaacagtctccaagagtgactgttaacgatacctattagatttctcaaatacaggcataaagaataatngtgcagttactactgcataggagtacagatttatactccacggacaagaacagaagtcactggttgctgtgatggactgaattttactgcagcttatgattacctgtccttgnatagcgtgaacactgaatcgcatgaatg

SEQ ID NO: 30223 - DNA, 512 bp, Oryza sativa
  unsure (1)..(512): unsure at all n locations
  Clone ID: PAT_MRT4530_34649C.1
ccgggnncgacccacgcgnnccgnaacaagcaacgagaccgncgncgncggggccggagacgccgccgccgccgcagcggcggcgcagcagcaggaggagcngccgccggggcacggccaaacggggggngncaccggcgccgccgggnacancgcgncggggcncgncaagcggcggcgggagaggggcnacaccgngaagggcacagngagaaacccangagacccgaagaacgcccaccngaaggcgcnggacggcgccgacgagaggcnggnccncngcaaggccgacccccncgacnacgacnccatccgcgccgccgncgacggctgccacggcgngnnccacaccgcctcccccgncaccgangaccctgagcaganggnggagccggcggngcgggggacggagnacgnganaaaggcggcggcggaggccggcacggngcgccgggngggngnncacgncgnccatcggggccggcaccagggaccccaaccggggccccgac

SEQ ID NO: 30224 - DNA, 4488 bp, Oryza sativa
  Clone ID: PAT_MRT4530_3464C.1
atggtctacaccaggaatggtagccgcgcaacaggcgagggcagcaacggcgaagagcgcactgatggggcgcatccccacagcgattccggcaatggtccgccaccacttcccgagaatccgacgctagcccatgtaatggcacatcagacccagatgatggcagccatgatgcaacagatgcagcagcaccagcagatgcaccagcggatgctgcagcacgccgaacagcagcatcagcagtttggtccccctccccctcagtccaagttgccagagtttctacgtgtcaggccacccaccttctccagcaccaccaaccatatggaggcgaatgactggctccatgccatagagaagaaactgaatctcctgcagtgcaatgaccaggagaaggttgctttcgccacacaccagcttcaaggtcctgcgtcagcttggtgggacaatcacatggccacccgcccaccaggtactgaagtcacttgggcagagttctgccgtagcttcaggaaggcgcaggtgccagacggggtcgtggcacaaaagaagagggaatttcgggcactccatcagggcaacgggactgtgacggagtacctccatgagttcaatcgtctcgcgcgatatgcacccgaggatgtccataccgacgccgagaagcaggaaaagttcatggcaggtctggatgatgagctgaccaaccaactgatatctggagactacgccgactttgagaggctagttgacaaggcaatccgtcaggaggatcaacgcaacaagatggacaggaagaggaaggccgctcagttcagggcacctcaggggagtcaccagaggccgcgcttcgcttccgggcagcagggtggacctaccaccatgatcgtccgccagtaccgcccgttcaaccctagcaactttccccagggcgccagaggcagtcagaaccaccatggaggtcagcccagccgcggtgcagctccacgcccaccaacggcaccggcacagtcaggcccgtccgcgcaagccaagaaggagactggaacaaaaccagggtcttgcttcaactgtggcgagcttggccacttcgctgacaaatgcccaaagcctaggcgtgccgggacaaggtttatccaggctcgtgtcaaccacgcgtccgcggaggaggctcaagcagcaccagaggttgtactgggtacgtttcctgttaactcaatccctgcaacagtactttttgattctggtgcaacgcattcgttcatttcaaagaagtttgtcgagatgcatgggttaataagagaggaacttagcacaccgatgcgggttcataccccagggaatagctccacttcggttcaattcagcccttctataacaatagaaattcaaggatcaccatttctagccaacctcattcttctcgaatccaaagacctagatgtcattcttgggatggattggctgaccaagtttaagggagtcatcgattgtgcgaatcgtaccgtcaccttgaccaacgagaagggagaaacggtagtgtacgaatcaccagacgcaccaaagcgaggggtctctttgaatcagattgaagcggaaatcccagtggacactgtggagaagaacttgaggaaattggaagatatacccatagtctgcgagtatccagaagtattccccgaagacctcactaccattgcacccaagagagagattgaattccggattgacttggcaccgggaaccgctccaatttataagagaccgtacagaatggcggctaacgaattagccgaggtcaagaagcagaaaaaggataagacgaagaggatgtgcgttgattatcgtgcactcaacgaggtcacaatcaagaacaaatatcctttgccgcgaatcgatgatttgtttgatcaactgaaaggagctaaagtgttttctaagatagacctgcgatcaagctaccaccagttgagaattcgggaggaggatattccaaagacggccttcaccactcggtacggattatatgagtgcacggttatgtcgttcggacttaccaacgcacccgcattcttcatgaatctgatgaacaaagtgttcatgaaatttctggacaagtttgttgtggtattcatcgacgacatacttatctattcaaagtccaaagaagaacatgagcaacatctccgcctggtactcgagaagttgaaggagcaccagctatacgccaagttcagcaagtgtgacttctggttgacggaagtcaaatttttgggccatgtcattacagctcagggtgtggcagttgacccatcaaacgtagagtcagttaccaaatggaccccaccgaagaccgtgtcgcagattcgaagttttctaggactggcaggttattaccgccgattcatcgaaaacttctccagaatcgcccgacccatgactcagttgcttaagaaagatgagaagtttaaatggacagttgagtgcgataagagttttgaggagctcaagaagaaattagtatccgcaccagttttaattctgcccgaccagatgaaagacttccaagtctattgcgatgcatcccgtcacggacttggatgtgtcctaatgcaagagggcaaagtggttgcgtatgcctcgcggcagttgcgtccacatgaagggaattatccaactcatgacctggaattggcagcagtggttcatgctttgaagatctggaggcactatctgattggcaaccgctgcaaagtatatacggaccataagagtctgaaatacatcttcacccaaccggacctaaatctccgacaacgaagatggttggaactaatcaaagactatgacatgagcattcactaccacccgggtaaagccaatgtggtggcagacgcgttaagcaggaaaagttactgcactgccctatgcatcgagagcatgtgtgaagaattgcggcaggagtttgagcatctcaacgtgggaattgttgaacacgggttcgtagccgctctggaggcacggcctatgctcgtggatcaagtcagagcagctcaagtaaatgattctgaaatagcagagctgaaaaagaacatgagggtcggaaaagcccgagatttccacgaagatgagcatggcacaatctggttgggagaaagattgtgtgtacctgacgacaaggaactgaaggatctaatactcaccgaggctcatcaggcccagtactccattcatccaggcagcaccaaaatgtatcaagacctcaaagaaaagttttggtgggtcagcatgagcaaagaaatagctgaattcgtcgcactctgcgatgtttgccaacgagtgaaggcagagcaccaaagaccagcaggtttactccaacctcttcaaatcccggaatggaaatgggaggagattggaatggactttataacaggactgccccggacatcatcgggtcacgattcaatctgggtagtcgtggatcgactcactaaggttgctcacttcataccagtacataccacgtatacgggcaaaaggttggcggagctctatctctcgagaatcatgtgtctacatggagtacccaaaaagattgtatctgaccgagggagtcagttcacctcaaaattctggcagaagctgcaggaagaattggggacccgtttaaatttcagcacggcctatcacccgcaaactgatggtcagaccgagcgagtcaatcaaatcttggaagatatgttgagagcttgcgctcttgattttggtggagcttgggacaaaagcttgccatatacggaattctcgtacaacaacagctaccaggccagtctacaggtggcaccgtttgaagctttatacggccggaagtgccgcacacctctcttctgggagcagacaggcgagcgtcaactgttcgggacagaggtattagcggaagcagaagagaaagtcagaacaatcagggaaaggttgaggattgcccagtctcgacagaaaagttacgcggataaccgccgaagggagctcatttttgaagcaggggattacgtgtatcttcgtgtcactccgctctggggagtacaccgttttcagacgaaaggcaagttggtaccacgcttcgtgggaccatacaaaatcctggaacgaaggggggaagttgcttatcagctagaacttccatccaatatgatcggcatccatgacgtgttccacgtgtcccaattaaagaagtgcttaagggtacctgaagaacaggctgattcggaacacattgatatccaggaggacctaacatacgtggagaagccggttcgtatacttgataccagcgaaagaagaaccagaaacaaggtcaccaagttttgccgaattcagtggagtcatcactcaaaagaggaagcaacctgggaaagggaggatgagttgaaagccgcccatctgcacctcttcaccagctcctccgaatctcggggccgagattccgtttaa

SEQ ID NO: 30225 - DNA, 163 bp, Oryza sativa
  Clone ID: PAT_MRT4530_34650C.1
aaattttctaaattacaagcaaaccaaagctcatagaagtatagctagggcattggcatcagacaagttcgtgctctacgacattgcgctcgtcgtactcactgtcgcggcagatgcggcagtctacagcggctaccgcgacaaacgagagtactgacgcgtg

SEQ ID NO: 30226 - DNA, 306 bp, Oryza sativa
  Clone ID: PAT_MRT4530_34651C.1
gaaaaacaaattagccatatcatgtacagcatagacggtttgaagcatcagagttgttattattggtcgtgaagatgatacatatggattaaaagaaaaataatgaaagaacaatatacagttctactaacctgtaattctgatacatacaacaaatgcatccagattgcctcttgttctgtttatcttaatttagaccccccacccccaccctatgcgaggggtgtaatcagtttaatttatttttctttttatacactcgaattaaagagcaaaactttatcctatcttcctttctcttgtatg

SEQ ID NO: 30227 - DNA, 786 bp, Oryza sativa
  unsure (1)..(786): unsure at all n locations
  Clone ID: PAT_MRT4530_34652C.1
ggagatgtcggttggattgcatcggattggatgccatggcagcatgggccgcacgcccgcacgggacggagtgcggccaccgcgtggaatccatggcgcggccggtacggagtgggccgcgtgcggcgtgccccgtgatgcgcccgagctggacggccatgtgcgtcggtgaaggctgtcgcgtcgtgtgactcgcgtcgtcgtcgtgtcaacctctgacttgccgaatggaaaatgtctattgtaactcccttaaatataggccgtatttctcgatcgtaaagctgctggatacaacaactctactaaccgttaaaaccggaaaaaaaaacttataagacactactccatctgtctctataaatataagggatattggttgaaaataacacatcctaatataacgaatcattataccaggatatattatatccgactaaaatctcttatatttagatacggagggagtatttagaatggcattagctaacgtggcaaattaaccacggtcaaaaacaccaagccaacaaggatgttaggatatcaagtggaactcacatgtcattctcgcttaccctccttcctttctccttcctccctcctccccatatctctctcctcttcccgcaatactatcttagaaatctttttcaactctcttaatagttagaggggttattatatctgattttatggttaaaagacgaattagatccaacctaagaaaaattagacattntccgcagcgaattgatgcccgctagtcgcatggatagatctagcccg

SEQ ID NO: 30228 - DNA, 162 bp, Oryza sativa
  Clone ID: PAT_MRT4530_34653C.1
agcggcgaattcgcggcgtcttccatccagttcaggcgaactggaccgatctcccgaccaacgacgggcggattgggaccggaggcattaccttgagaggcaggccggccttccaaagggttacaccctatctcaggaggctatttattcaggtgtaatttg

SEQ ID NO: 30229 - DNA, 157 bp, Oryza sativa
  Clone ID: PAT_MRT4530_34654C.1
ttcatatattattcagaaatgcaaaaagtgcgcggaagaaaatatttccgagtccggtgatgatcacttctagccatcgccatgaggacacataacacttactatgagccaactatcgtggggtttctaaggcagctaagaaaataagcagtaaatt

SEQ ID NO: 30230 - DNA, 309 bp, Oryza sativa
  Clone ID: PAT_MRT4530_34655C.1
atgcctggtcatcgattcccagtcgcgttcaccaggttctacgccgctgaggtgctcctcgcgctcgagtttctgcacatgatgggcatcgcggcagagccagtgcacgcacggtcgagctcgttcgtcggcacgcacgagtatatggcgccggatgtggcacgcggtggcgggcacgacgtaggcatggactggtggtcatatggcatggagttcccctcggccgtcgctgcctcgccgcacgacgccgcgacgcgagacatgatttgcgcgacgaagagcctgccaccgccggcgtattctggctag

SEQ ID NO: 30231 - DNA, 1824 bp, Oryza sativa
  Clone ID: PAT_MRT4530_34656C.1
atggcgccccgtgggcgccgcctgacggagcagatccactcggagcaccaggtggtcgccgccctcctcgacaaggcggaggccttggtaatggcggcccgcgccaagggcgcccatggcggcgccgcggcggcgggggagcagcaccccgatcaccctagccgcggcaagaagagcggtcgtttcttgcgccgccaggagaccccaccggaggccgccaccgcgatcgacggggatgtctctccccccgagaagaggaggaagacgacggccgcgagcccgatcgtggaggtggaggttgaggtgatcgagccgaccatgcccaaggcgcagagggaccgcctctacggcctcctcgcctcgctgtcggcggacacgccattgccgccgcacatcgtcggcctgatgcgaagccaatgctgctgcgtcgtggaccctaacggcgaagagatggatgtcgatcttagctccgcgaaggatgctgccttgttccagttgctgaacctgctcgtggaattcgctcaacagcagaccaccaagattattgaggagcaagaaccgcccaagatcgaggcatccgacgccaccagcagctcgtcgatctgcgacctcctcgaggacggtgagatagccgatgagggtgcggccatgggcatggacatctgcggcggcgtctctcccctcatcgtggacagtgctcagctcttgccacttccgaagcaacaagaggatgacgagttgatcgacatctatggtggcgtctcccctgtatcagtcaacaacttccctgattctcctcgttcgagcagcagcaggagcgactcctcatcatcctccagctctagcaatggctctggctcctcctcatcttccagcagtggcgcctcttctggatcatcatcctgcgccggttcatcctcctcgtcgtcgggaagtgacaccgacgccgacgccgacagtgcgagcaacaggccagacaccaccacagatcatcccaccgaagctgaggtgaagccaatggtggagcacgaggtcatggagcaagacaagaagctgaccactgagagggcagcagcatctcctgcatctcagctctgcatcacggacatgggcatagacatctgcggcggcgtctctcccctggtcgtggacaaggctcagttctcgccgctcccgaagcagcaacaggaggatgacgagttgatcgacatctgtggcggcatcgactcccctgtatcggtcagcaagttccctgaaactcctcgctcgagcagcagcgactcttccagcagttcatcttgcagcggttcatcctcctcgtcggaaagaaacgacagtgcgagcagcaggccagacaccaccgctgatcatcccaccgaagctgaagtgaagccaatggaggagcagaagctgatcattgagagggcagcatctcctcacactgagatgcaggagctgatcactgagagggcagcatctcctcacactgagatgcaggagctgatcactgagagggcagcatctcctcgcactgagatgcaggagctgattgcaagggcccaggagaggcagaaactccagcgtgagctcgagagagaggcagcgcgtgagctcgagagaaaggcggcgcgtgagcagctgcaggagatgaagaggacggcgcagccggtcttcgacatcatcgatcccagagacatgaagcagctggggatctccggcgaggcgcagtacattgtcagcccggtgaaatctagggacagcctgcgtcgccgtggaggcggcctgctacagaggcttggcttcttcctgaaagcagagttttga

SEQ ID NO: 30232 - DNA, 992 bp, Oryza sativa
  unsure (1)..(992): unsure at all n locations
  Clone ID: PAT_MRT4530_34657C.1
atggcggacaagccgagccgcgggctggtgctctacgccgcggggcacgcggcgctgctccctccggcgagcggcggcggcggcggagccggaggaggagggggagggagccacctcgacgccttcgcgtctctcgcgtcatgtggcttcctctccctccgctcgccccctctcgcgagtggggaggagaagcgtgacagcacgattcttgagctcgcgcagctgctcgacgtgtacgatgatctcttccctgctaaggtctaaaaaactggtcaagagactgcccaggtggatccactgcaactagcagttcccaagctatctgagaggtttatggggatcagagctgccatggtcaccaattgcccccttgttagttcttttgcagcaaatcttggttttcatgtatccgggactgaagatttagttgcacaatctggatcttccgctgcttctaaggaggctggaattatttcccaggcgttaagtctgcttggattttcagaggggaatgttcaggagacatctgaatttgatctggtgtttctgcatgttgccatggagaatacaaacagcaagttgggaaaattgggaatgaagactgatctaaatcggcttgataaattagttggtgcaatcatggaagcggcgcccataagttcagctatcgcctcccgtattcttgtatctgtgatgttgagctatgggtctgctgctgaaaataaggatgagttttccatctcaaaatcttcgactgaaatagattctgacttgaacttgcttcgcccacgccagagctatactatgaaagcaggaaatacattggatgatgttaggaatcatcatccgattctgttagcacagtggcaggaaggangttacacgctctgatttgaccgaaggttctcttttgaggaattcataaagcgtggtggaaatcntgctatgcttgctgaangctttctacatgaaggtggcatttaagctctngg

SEQ ID NO: 30233 - DNA, 1335 bp, Oryza sativa
  Clone ID: PAT_MRT4530_34658C.1
atggggtggaaggcgcccacgaggatccaggcggaggtcatccccttcgccctccaagggagggacgtgatcggcgtggggcagacggggtcggggaagacggcggcgttcgcgctgccgatcatccaggcgctgctcgagcacgagcaccgcccgtgcttcttcgcctgcgtgcttgcgcccacgagggagctggcgattcagattgcgaagcagtttgaggcgctcggatcagcgatcagcttgcaatgttcagtgctgattggtggaattcctcggacaagccaaaccatatcccttgcaaaacgtccacatgttgtggtttggtggcggtcttctagggcctgcctgcctgagcatcttcgcaagggcttcgactcttggcagctctggaaggagcggaactcgagggttggaactcctgggcgccttttggaccatttgaccaatacaaaaggtttcagttttaataaattgaagtacttggtactggatgaagctgatgatttacttaaagtggactttcagaaagccgtcgatgatatccttaatgttattcctaaagaacggagaactttcctcttttcagccacgatgactgaaaaggtgaaaaaactgcgacgtgcttgcctaaagaatcctgttaaggttgaagtagcctccaaatattccttggtggacacacttagacaggacttatatgttgttcctgcaaagtacaaggattgttatcttattcatgttctgaacaagatgccagggagcatgatcatggtctttgtccggacctgcgagtcaacaaggctccttgctcttatgctcagaaaccttcgatttaaagctatttctatcagcggccaaatgagtcaggataagagactaggtgctttaaacaggtttaggaccagagattgcaatatccttgtttgcacggatgtagcaagccgtggtctcgatattcaaggagttgatgtggtcatcaattacgatttcccactgaactctaaggattacattcatcgggtgggcaggactgcacgtgcagggcaatcaggatatgctgtgtctttggtgaatcaatttgagggcgaatttttcaagctaaccgagcagttccttgggggtgaagaaatcccggctcgcaaggttgatgcagatgaaataatgatacttcatgagcgcatatacgactcaaagagaatcgcattgaagacaatgaacgagagtggttaccacaagaggatgcgtagaaggatggaagatgatgaggaagaggtggaggaggctcctgtttccagtagatcaaggtccttgaagaaatcaagaagacgatga

SEQ ID NO: 30234 - DNA, 612 bp, Oryza sativa
  Clone ID: PAT_MRT4530_34659C.1
ctccagggggtttctctccatgctggtgaagatgtgaggatttgttcagagctttcaaatgtgcctattccctcagtaaagaaactttacctcaaaaacttcaatgaccgccttcgctgtgtgaattggaagttcatctggtgcaacagagcacctctaaaagtgcaattttttgcctggcttctagcaaaggaaaggttaccaacgaaacataatctaattaaaaaaggaatcgtttcctctgctacttgtgacatctgcaaccttgaagtggaagacggaagtcatttttgtctaaattgccccttcgctcaaggcttctgggaggcaataggtttaagccctcgaatacacatggttactgatatggccaatcttaaacccgatgggaatctgcctgaattgcacttcagggtgttctatctgctatgtttttggtccttgtggaaacatcgccatgacgttgtcttcaggaacatgtccccgtctctgcaatcggttcttcgcaaatgtatggaggaatgtggtctttggctagaacgcctcaaatttgagcatcgctctgtaataacttcttggaagcttatcttttcggctccacttcaaactctg

SEQ ID NO: 30235 - DNA, 716 bp, Oryza sativa
  Clone ID: PAT_MRT4530_3465C.1
gagagagagagatgctgcgggtgtcggaggacggcgggcggcggcggcggcgggaggcccacgcggcggggtacggcgagctcggccgcgccctgctcgacctgcaggctgccgccgaccaggtcttcgacgccgtcacggcgcggacggcggaggagcgggagaagctctcggccatttcccggcggatcagcgctgcaaaagctaagataaaaacattgtctcagtcagaggaaccgttgacaattgtatcaccagcgcagcatccttcaagttgtacaaaccaagaggacttcagaccgctgtttcatgacaaatatgatgacaatagtggtggaccgtccatagcaactatttcagtaaatggagggttcaacagagaatatggactagaaggcacacttgaactctttcagtttttctctgaggagaactgtgactatactccaaaagaaggccgtttaaaggttaaaaataaacctgctgaagctaaagatgacacatatttagggagtcttatggataaatccaactttccaactccgcaaaacatttcaatgtctggcaaggacatgaagattgaagaacttccacctccaccaccaagtctaatatcaaaacacctggctaaaaaccagagatctgatgatgttagattcgaatcaagttggagtccagcacactcagatattcctagtgcagagaaccgattgtaa

SEQ ID NO: 30236 - DNA, 3384 bp, Oryza sativa
  Clone ID: PAT_MRT4530_34660C.1
atgtcgtatgacattgaacaaaagaaatggtccttagccaacaagaaatgtttggctatggtaaagaacacgattgagcctaccatattgggctcaatcccagagtgtgacgctgtctcagagtaccttgaaagaataaagaggcagtttactggctcttcaaagacttatgctacacagctgatcaagcagcttgtgaccgaaaggtaccatggaggtggtgttagagaccacatacttagaatgagcaacatggcttccaagttgaagccaatggatttgggcataacagatgactttctggtccatctggttatggcctcattgccaaagcagtttgacaattttattgtcaactacaacataagtccagagaaatggaactttgaaaaactcattgctaattgtgtgcaagaggaggagagaattaaagagtcaaatggtggttcaattaactatgttaaagataacaagaaaaagaaccacaagtctcccacctcaaaagctaaacagtctcagcatctgcctcagcaacaacagttcgctgttgagaaagatcagtgtctccattgcaagaagacgggacattacaagaaagactgtcctgacttcttgaaaatgatcatggcaaggaaaggtgagaacattgttacatttgtaaatgaatctcattatgttggttactctagatccacatggtggattgattctggagcaattattcatgcttgtaattgtttaaaggcattccgttcgacgaggactacgcaaagaagagaaagctccattagagttgccaatggagttgaaaaaaaagttgaagctgttggagatcttcctctagagctcgcgaatggcttcacacttttacttcgagatgtcttttatgttccttctttgcaaagaaacttaataagtttatcaaagttggattttgatggatatgattgccgctttggaagtggcaaatgtgaactatgtgtggatggctatgactcgttcataacattcacagatgattactcccgctatggttatatttatccaattaaagagcgatcagaagcattggataaatttaagatattcaaagctgaagttgaaaatcagcatgatataaagattaaagtaaatggggtagctgaaaggcgtaaccgtacccttatggatatggtgcgcagcatgatgagctactccacactaccactgggtttatggatggaggcgttaaaaaccgctattcatattctcaacagagttccaagcaaatcggtgcccaaaacaccgtatgagctatggacaggaagcgtaccctcgatagctcacctccgtgtgtgggggagtcctgcagaggctaaagtatttaatccaaatattgggaagttggatcccaaaacagtcagttgccattttattggctatcctgaaagatcaaaaggctatcgtttctactgtccaaacagttatacaaagtttgtagaaacgagacacgccgtcttcttggaagacgaaatgattagggagagctcggtagttcgagaaattgatcttgaggagaggcgggtgtctgtacccgctccgtcgactcaggaacctttcttctctctacctgctgatgttgtgcctgcaatacctgtcattgaggaggagctgcaacagcctcaaatagataatgtgctagtacaggagactcaacaagagcctcaggtacaggatgtgccaaatgtgcaggcccctagaaggtctgaaagagtcaaaagatcggttatccgtgatgactataaagtttataatatagaagagtcgcatatggaggatgatcacacctcatatgaagaggccatgagaagcgctcgctcatctgaatggttggaagtcatgaaagatgaaatgaaattaatgaaactaaacaatgtttgggatttagaagaaattcctaaaggagacaaaacagtaggctgtaagtgggtctacaaaaccaaatatgactccagagggaatatagaaaagtttaaagcgcgacttgtggcaaaaggcttcacgcaacgagaagggattgattacaatgagacattttctccagtctcttgtaaagattccttcaggattataatggcactagtggcacattatgatttggaattacatcagatggatgtaaaaacgacatttctaaatggagatttggaggaaaaagtatacatggcgcaaccgaaaggttttgtcatgaaaggaaacggaaatatgggatgtcgtctaaagagatccatttatgaattaaagcaagcttcgagacagtggtacttgaagtttgatgggacaataaagaaatttgggtttcaagagaatgtcgaggacaactgtatttattcaaagtttaagaatgggagatttattttcctaattctgtatgtggatgacattctactggctagtagtgatgtcagtctactgcaggaaacaaagaaatttttgtcctcaaactttgacatgaaagacctcggtgaggcttcatatgttttgggcatagagattcaccgagatagaacaaagtatgcattgggactttctcaaaagacatatatagaaaaggtgttgaagaaattcaatatgtacagatgcagtgctacacctgctcctatagtcaaaggggaaaagtatggggcatcgcaatgtcccagaaatcagtatgagctcaatgaaatgaaaacaaagccatatgcgtcagctataggaagcctagagtacgcgcaagtgtgcacacgacctaacttggcatttgttattgggttacttggcagatttcagagtaatctaggcccagagcactggaaattggtaaagaaagtcttgcattattttcaaggaacaaaaggcctcatgctgtcttatagaagatcagaatcgcttcagattatggggtattcagattctgattttacaaaagataatacaaagtcaacatcgggatatgtgttcaccctggcaggaggagctatttcatggaaaagctcaaaacagactatcactgcagggtctactatgtatgccgagtttatagcatgctatgaggcaacggggcaggtgaactggctaaagaagttcatactcagtttaaaggtggttgacagtattgagaaaccactaaagttatactgcgacaacgaacccgcagtaatgtacgctcacagcaatcagtcaagtggtgctgccaaacacattgacataaagtactatgttgtgaaggacaaagtccgggatcaaacaatcagtctcgagcacattagaacagaaaggatgctcgcggatccactcacgaaaggcctaccacccaacgtgttcaaggaacatgtagccggcatgggtttaagggaagccttatga

SEQ ID NO: 30237 - DNA, 4224 bp, Oryza sativa
  Clone ID: PAT_MRT4530_34661C.1
atggcgcggcggcgcgagggccgccggcgtcggcgacgccgctcggcgcggccgcgcgcccgcgagaagagaagagaagctagggttttcggcggccggccgggagaggggggttttgatcctccgatctcggcgcccggccgtccgatcgaaaccctagctgatcggacggccggcgccggtggctactccttgatgggttgcattaaagatattccgaccctaaaaggagataactacgcagaatggaaaagaaaactcgaccttgcttttatcttgggagaggtggactgggtgttgactaccccatgtcctatagaacctgctgaacttgtcagaggtgaaaatgagtcagatgctgactggcaaaagagacagagggacaatgctcctctcgtcatgtcgtatgacattgaacaaaagaaatggtccttagccaacaagaaatgtttggctgtggtaaagaatacgattgagcctaccatattgggctcgatcccagagtgtgacactgtctcagagtaccttgaaagaataaagagtcagtttactggctcttcaaagacttatgctacacagctgatcaagcagcttgtgacagaaaggtaccatggaggtggtgttagagaccacatacttagaatgagcaacatggcttccaagttgaagccaatggatttgggcataacagatgactttctagtccatttggttatggcctcattgccaaagcagtttgataattttattgtcaactacaatataagtccagagaaatggaactttgagaagctcattgctaattgtgtgcaagaggaggagagaatcaaagaatcaaatggtggttcaataaactatgttaaagataagaaaaagaaccacaagtctcccacctcaaaaggtaaacagtctcagcatctgcctcagcaacaacagttcgctgttgagaaagatcaatgtctccactgcaagaagacaggacactacaagaaagattgtcctgactttttgaaaatgatcatggcaaagaaaggtgagaacattattacatttgtaaatgaatctcattatgttggttactctagatccacatggtggattgattctggagcaactattcatgcttgtaattgtttaaaggcattccgttcgacgaggactacgcaaagaagagaaagcaccattagagttgccaatggagttgaagaaaaagttgaagctgttggagatcttcctctagagcttgcgaatggcttcatacttttacttcgagatgtcttttatgttccttctttgcaaagaaacttaataagtgtatcaaagttggattttgatggatatgattgccgctttggaagtggcaaatgtgaactatggcataataatgcatgtattggtcttgctgtgttggggagaattgagagactagttaagaatgaaattcttcccccattggagttctcagacttagaacaatgcatagaatgcattaaaggaaaatttgtaaagagcatcaaaaagggtgcaaaacgaagcgcaggaattttagagatcattcatacagatatttgtggtccatttcctgtgaaaagtgtggatggctatgactcattcataacattcacagatgattactcccgctatggttatatttatccaattaaagagcgatcagaagcactggataaatttaagatattcaaagctgaagttgaaaatcagcatgatataaagattaaagtagtaagatctgaccgtgggggggagtactatggtcgacatacgccttatgggcaagtccctggaccttttgcaaggttcttgctagagaatggaatagtagcccagtattcaacaccgggcgaacctcaacagaatggggtagctgaaaggcgcaaccgtacccttatggatatggtgcgcagcatgatgagctactccacactaccactcggtttatggatggaggcgttaaaaaccgccattcatattctcaacagagttccaagcaaatcggtgcccaaaacaccgtatgagctatggacaggaagagtaccctcgctaactcacctccgtgtgtgggggagtcctacagaggccaaagtatttaacccaaatattgggaagttggaccccaaaacagtcagctgccattttattggctatcctgaaagatcaaaaggctatcgtttctactgtccaaacagttatacaaagtttgtagaaacgagacacgccgtcttcttggaagacgaaatgattagggggagctcggtagttcgagaaattgatcttgaggagaggcgggtgtctgtacccgctccgtcgactcaggaacctttcttctctctacctgctgatgttgtgcctgcaatgcctgtcattgaggtaccagcacctgttgttacccctcctgtggcaacaatgaatgagagtgaggaacctgttatacaggattcaacagaaatggttgccacaccagaggaggagctacaacagcctcaaatagataatgtgccagtacaggagactcatcaagagcctcaggtacaggatgtgccaaatgtgcaggcccctagaaggtctgaaagagtaagaagatcggctatccgtgatgactataaagtttataatatagaagagtcgcatatggaggatgatcccacctcatatgaagaggccatgagaagcgctcgctcatctgaatggttggaagccatgaaagatgaaatgaaatcaatgaaactaaacgatgtttgggatttagaagaaattcctaaaggagccaaaacagtaggctgtaaatgggtctacaaaaccaaatatgactccagagggaatatagaaaagtttaaagcacgacttgtggcaaaaggcttcacgcaacgagaagggattgattacaatgagacattttctccagtctcttgtaaagattccttcaggattataatggcactagtggcacattatgatttggaattacatcagatggatgtaaaaacggcatttctaaatggagatttggaggaaaaagtatacatggcgcaaccgaaaggttttgtcatgaaaggaaacgaaaatatgggatgtcgtctaaagagatccatttatggattaaagcaagcttcgagacagtggtacttgaagtttgatgggacaataaagaaatttgggtttcaagagaatgtcgaggacaactgtatttattcaaagtttaagaatgggagatttattttcctaattctgtatgtggatgacattctactggctagtagtgatgtcagtctactgcaggaaacaaagaaattcttgtcctcaaactttgacatgaaagacctcggtgaggcttcatatgttttgggcatagagattcaccgagatagaacaaagtatgcattgggactttctcaaaagacatatatagaaaaggtgttgaagaaattcaacatgtacagatgcagtgctacacctgctcctataatgaaaggcgaaaagtatggggcatcgcaatgtcccagaaatcagtatgagctcaatgaaatgaaaacaaagctatatgcgtcagctgtaggaagcctacagtacgcgcaagtgtgcacacgacctgacttggcatttgttaccgggttacttggcagatttcagagtaatccaggcctagagcactggaaattggtaaagaaagtcttgcgttatttgcaaggaacaaaaggcctcatgctgtcttacagaagatcagaatcactccagatagtggggtactcagattctgactttgcaaaagataatacaaagtcaacatcgggatacgtgtttaccctggcaggaggagctatttcatggaaaagctcaaaacagactatcactgcagggtctactatgtatgccgagtttatagcatgctatgaggcaacggggcaggtgaactggctaaagaagttcatacccggtttaaaggtggttgacagttttgagaaaccactaaagttatactgcgacaacgaacccgcagtaatgtacgctcacaacaatcagtcaagtggtgctgccaaacacattgacataaagtactatgttatgaaggacaaagtccgggatcaaacaatcagtctcgagcacattaaaacagaaaggatgctcgcggatccgctcacgaaaggcctaccacccaacgtgttcaaggaacatgtagccggcatgggtttaagggaagccttatga

SEQ ID NO: 30238 - DNA, 468 bp, Oryza sativa
  Clone ID: PAT_MRT4530_34662C.1
ccgcccacccggtccgggggggtgggcttcttcctccccttcccggttcggttcggttcgggtccggtccaattccgtttttttttcttcttcggggggtggggggaaaagcatggcggccccgaatgttaagtcccgttgtttcgtcggcggcctcgcttgggccaccaacaaccgttccttcaaagccgctttttccaccttcggcaaaatcctcaagtccaaaatcataaccaatcggaaaacgggaaggtcccccggtttcgggttcggaacgttctcaaccaaccaggccatgcccaacgccatcaaggggataaacggcaaggagctcgacggccgaaacatcacgcgaaacaaggcccagtcgcccccttccgaaggcggaggcgaagcgcgttacggcacagcgcggcgaaggcggaggctacggtggcggcggcggttacggtgttgccggcggcggtg

SEQ ID NO: 30239 - DNA, 2173 bp, Oryza sativa
  Clone ID: PAT_MRT4530_34663C.1
aatgcatcggtgcccaaaacaccgtatgaactatggatcctccgtgtgtgggggagtcctgcaaaggataaagtatttaacccaaaacagtaagctgccattttattggctattctgaaagatcaaagggtcatcgtttctactgtccaaacagttatacaaagtttgtagaaacgagacacgccgtcttcttggaagacgaaatgattagggggagctcggtaattcgagaaattgatcttgaggagaggcgggtgtctgtacccgctccgtcgactcaggaacctttcttctctctacctgctaatgttgtgccagcaatgcatgcccttgcggtaccagcacctgttgttacccctcctgtggcaacaatgaatgagagtgaggaacctgttatacaggattcaacagaaatggttgccacaccagaggaggagctacaacagcctcaaatagataatgtgccagtacaggagactcatcaagagcctcaggtacaggatgtgccaaatgtgcaggcccctagaaggtctgaaagagtcagaagatcggctatccgtgatgactataaagtttataatatagaagagtcgcatatggaggatgatcccacctcatatgaagaggccatgagaagcgctcgctcatctgaatggttggaagccatgaaagatgaaatgaaatcaatgaaactaaacgatgtttgggatttagaagaaattcctaaaggagccaaaacagtaggctgtaaatgggtctacaaaaccaaatatgactctagagggaatatagaaaagtttaaagtgcgactcgtggcaaaaggcttcacgcaacgagaagggattgattacaatgagacattttctccagtctcttgtaaagattccttcaggattataatggcactagtggcacattatgatttggaattacatcagatggatgtaaaaacggcattttctaaatggagatttggaggaaaaagtatacatggcgcaaccgaaaggttttgtcatgaaaggaaacgaaaatatgggatgccgtataaagagatccatttatgggttaaagcaaagcttcgagacaatgctacttgaagtttgatggaacaataaagaaatttgggttttcaagagaatgtagaggacaactgtattgattcaaagttaagaatgggagactcattttcctaattctgtatgtagatgacgttctactagctagtagtgatgtcaatctactgcaggaaataaagaaattcttgtcctcaaactttgacatgaaagacctcggtgaggcttcatatgttttgggcatagagattcaccgaaatagaacaaagtatgcattgggattttctcaaaaagcatatatatagaaaaggtgttgaagaaattcaatatgtacagatgcagtgctacacctgctcctatagtcaaaggcgaaaagtatggggcatcgcaatgtcccagaaatcagtatgagctcaataaaatgaaaacaaagccatatgcgtcagctgtaggaagcctatagtacgcgcaagtgtgcacacgacctgacttggcatttgttaccgggttatttggcagatttcaaagtaatccaggcctagagcactggaaattggtatagaaagtcttgcgtgattgcaaggaacaaaaggcctcatcatgtcttacagaaaagcagaatcgctccagatagtggggtattcggattctgactttgcaaaagataatacaaagttaacatcgggatacatgtttaccctggcagtaggagctatttcatggaaaagctcaaaacagacgaccactgcagggtctaccatgtatgccgagtttatagcatgccatgaggctacggggcaggtgaactggctaatgaagttcatacccggttttaaaggtggttgatagtattgagaaaccactaaagttatactgcgataaagaacccacagtaatgtactctcacaacaattagtcaagtggtgctgccaaacacattgacataaagtattatgttgtgaaagacaaagtccgggatcaaacaatcagtctcgagcacataagaacagaaaggatgctcgcggatccgctcatgaaaggcctacctcccaacatgttcaaggaacatgtagcatgcatgggttttaagggaagcctta

SEQ ID NO: 30240 - DNA, 4161 bp, Oryza sativa
  Clone ID: PAT_MRT4530_34664C.1
atggccggcacttcttcatcctccaacacctcaaccggtggctactccttgatgggttgcattaaagatattccgaccctaaaaggagataactacgcagaatggaaaagaaaactcgaccttgcttttatcttgggagaggtggactgggtgttgactaccccatgtcctatagaacctactgaacttgtcagaggtgaaaatgagtcagatgctgactggcaaaagagacagagggacaatgctcctctcgtcatgtcgtatgacattgaacaaaagaaatggtccttagccaacaagaaatgtttggctgtggtaaagaatacgattgagcctaccatattgggctcgatcccagagtgtgacgctgtctcagagtaccttgaaagaataaagagtcagtttactggctcttcaaagacttatgctacacagctgatcaagcagcttgtgacagaaaggtaccatggaggtggtgttagagaccacatacttagaatgagcaacatggcttccaaattgaagccaatggatttgggcataacagatgactttctggtccatctggttatggcctcattgccaaagcagtttgacaattttattgtcaactacaacataagtccagagaaatggaactttgagaagctcattgctaattgtgtgcaagaggaggagagaatcaaagaatcaaatggtggttcaataaactatgttaaagataagaaaaagaaccacaagtctcccacctcaaaaggtaaacagtctcagcatctgcctcaacaacaacagttcgctgttgagaaagatcaatgtctccactgcaagaagacaggacactacaagagagattgtcctgactttttgaaaatgatcatggcaaagaaaggtgagaacattattacatttgtaaatgaatctcattatgttggttactctagatccacatggtggattgattctggagcaactattcatgcttgtaattgtttaaaggcattccgttcgacgaggactacgcaaagaagagaaagcaccattagagttgccaatggagttgaagaaaaagttgaagctgttggagattttcctctagagctcgcgaatggcttcatacttttacttcgagatgtcttttatgttccttctttgcaaagaaacttaataagtgtatcaaagttggattttgatggatatgattgccgctttggaagtggcaaatgtgaactatggcataataatgcatgtattggtcttgctgtgttgcgagacgagctttatttgttatctctttctgagaatgtgaatgttgtgtcctcgttgacaaaagaaaacaagaaaagaaaggggagaattgagagactagttaagaatgaaattcttcctccattggagttctcagacttagaacaatgcatagaatgcattaaaggaaaatttgtaaagagcatcaaaaagggtgcaaaacgaagcgcaggaattttagagatcattcatacagatatttgtggtccatttcctgtgaaaagtgtggatggctatgactcgttcataacattcacagatgattactcccgctatggttatatttatccaattaaagagcgatcagaagcattggataaatttaagatattcaaagctgaagttgaaaatcagcatgatataaagattaaagtagtaagatctgaccgtgggggggagtactatggtcgacatacgccttatgggcaagtccctggaccttttgcaaggttcttgctagagaatggaatagtagcccagtattcaacaccgggcgaacctcaacagaatggggtagctgaaaggcgcaaccgtaccctcatggatatggtgcgcagcatgatgagctactccacactaccactcggtttatggatggaggcgttaaaaaccgccattcatattctcaacagagttccaagcaaatcggtgcccaaaacaccgtatgagctatggacaggaagagtaccctcgctaactcacctccgtgtgtgggggagtcctgcagaggccaaagtatttaacccaaatattgggaagttggaccccaaaacagtcagctgccattttattggctatcctgaaagatcaaaaggctatcgtttctactgtccaaacagttatacaaagtttgtagaaacgagacacgccgtcttcttggaagacgaaatgattagggggagctcggtagttcgagaaattgatcttgaggagaggcgggtgtctgtacccgctccgtcgactcaggaacctttcttctctctacctgctgatgttgtgcctgcaatgcctgtcattgaggtaccagcacctgttgttacccttcctgtggcaacaatgaatgagagtgaggaacctgttatacaggattcaacagaaatggttgccacaccagaggaggagctacaacagtctcaaatagataatgtgccagtacaggagactcatcaagagcctcaggtacaggatgtgccaaatgtgcaggcccctagaaggtctgaaagagtcagaagatcggctatccgtgatgactataaagtttataatatagaagagtcgcatatggaggatgatcccacctcatatgaagaggccatgagaagcgctcgctcatctgaatggttggaatccatgaaagatgaaatggaatcaatgaaactaaacgatgtttgggatttagaagaaattcctaaaggagccaaaacagtaggctgtaaatgggtctacaaaaccaaatatgactccagagggaatatagaaaagtttaaagcgcgacttgtggcaaaaggcttcacacaacgagaagggattgattacaatgagacattttctccagtctcttgtaaagattccttcaggattataatggcactagtggcacattatgatttggaattacatcagatggatgtaaaaacggcatttctaaatggagatttggaggaaaaagtatacatggcgcaaccgaaaggttttgtcatgaaaggaaacgaaaatatgggatgtcgtctaaagagatccatttatggattaaagcaagcttcgagacagtggtacttgaagtttgatgggacaataaagaaatttgggtttcaagagaatgtcgaggacaactgtatttattcaaagtttaaaaatgggagatttattttcctaattctgtatgtggatgacattctactggctagtagtgatgtcagtctactgcaggaaacaaagaaattcttgtcctcaaactttgacatgaaagacctcggtgaggcttcatatgttttgggcatagagattcaccgagatagaacaaagtatgcattgggactttctcaaaagacatatatagaaaaggtgttgaagaaattcaacatgtacagatgcagtgctacacctgctcctataatgaaaggcgaaaagtatggggcatcgcaatgtcccagaaatcagtatgagctcaatgaaatgaaaacaaagccatatgcgtcagctgtaggaagcctacagtacgcgcaagtgtgcacacgacctgacttggcatttgttaccgggttacttggcagatttcagagtaatccaggcctagagcactggaaattggtaaagaaagtcttgcgttatttgcaaggaacaaaaggcctcatgctgtcttacagaagatcagaatcactccagatagtggggtactcagattctgactttgcaaaagataatacaaagtcaacatcgggatatgtgtttaccctggcaggaggagctatttcatggaaaagctcaaaacagactatcactgcagggtctactatgtatgccgagtttatagcatgctatgaggcaacggggcaggtgaactggctaaagaagttcatacccggtttaaaggtggttgacagtattgagaaaccactaaagttatactgcgacaacgaacccgcagtaatgtacgctcacaacaatcagtcaagtggtgctgccaaacacattgacataaagtactatgttgtgaaggacaaagtccgggatcaaacaatcagtctcgagcacattaaaacagaaaggatgctcgcggatccgctcacgaaaggcctaccacccaacgtgttcaaggaacatgtagccggcatgggtttaagggaagccttatga

SEQ ID NO: 30241 - DNA, 1911 bp, Oryza sativa
  Clone ID: PAT_MRT4530_34665C.1
ggaatatctgttgcaggtgcatcactccggtcaaaaacatttcagctttgggatgttgttgctctgctaactgctaaggaagatatatcattttattgtgcccaaattttacaacattttgctttcttaattgtcaaaataaatgcagctatattttctccgttacaaaacaaacttttataataagaggacaacctcttaataaggctttgatttccttgtctgttggtaatataaacgaatggagtaccattattattatttcaatctcgctcgatatgaaaaggaaaagggatatatatataaaaatgatatattcactccgtcacaaaacaaaatatagctagttttaccggagactagagaggtgtaataagtaaattaggggatgatgaaattaaaagactcgagagtaaccacgaacgaaatcaccgttttggaatgcgtagcgtatagacttgtgcacgacgacggcgtcgtcactgcccaccacatcaacgccggtgagcagcaagaacctgtcgttcttcttcttgttgttgttgacgccggcgacgtggaagaatggatgaactgagatgttgtccttctcctcctcaacttcctcctcctcctcctcttccatgaacctggcgatgcagaacctaccggagccgaggtgcacggcgtaggcttccatcagaaaggattgcttgggcggcgccgccgccggcagacggtctaggccatccaaccagcacctgaccatcacctgcgcatcgtaggaacagcagagataggagagatcgcaggaacagaggtacagccccagcctcggcgtggaggagagcccaaaccattgcccgtgctcctccacgtactcgccgcgccccatgaacggcatccccttttcgccaagctccctccactccccaaccttggaattcgtgtcgaacgagaaggtcccggctccgtgcgccgtcacccacagctccgtctcgttcaccaccgcggaggcggtgatgtcgtactctcggcgctggcggtggcgccggaagtcgccgtcgtagccaaccttggcgaaaggaggcggcggaagagaccgccagtaccagcccatcctggaggacagtgagtcgtcgtcgtcggggagtaagccgtaggtgagagcctcgaagcagccggggttaccggacaagggcaccctctcgatgacgtagaggcggccatcgtcggcggtgaaggagattggctcgatcttgggcttgcacgggtcgggcatgtagcggacggcggcggaggcggcgctgtagagcagaccacggccgtcgacgtcgagggcggagaaggctgtcgtcgccgtcgctgccgccgccactgccgtagaggtacaagaaatcgacgtttccagggccggacaatgaggaagggtggaaggtgatggccggaggaggcaggccgccggcggcgtcctccacgtcatctggatctagtactttggctgctgcttgacgacgtgctggagatgaaaagagggccgatgcagcgacgcggtacagcttgcacgccgtcgcgtcggcgccgacgccggcggtgtccaccaccaaattcacaaaccgccgcatcatcgtctctgttgatattcttctactcaaaatttttcttttctatataccctttttttttccttttgacaaagagtatcttcgatccggaagaaatcacgcaccttctggagtatgcagtctcgctcgtcctcacgcgataggcggaccgccgaatctcctctcctcggtggcgcgtgatctcgacggcggggcgggatctcggggacggcggggcgagatctcggtagcggcctagcgggcggcacgggaggtcggggagcaatttttttttcttttcttttttttttgttgggccaatatatac

SEQ ID NO: 30242 - DNA, 2092 bp, Oryza sativa
  Clone ID: PAT_MRT4530_34666C.1
cctttcgataacagaccccaagacaatcagctgccattttattggctatcctgaaagatcaaatggttatcgtttctactgtccaaacagttatacaaagtttgtagaaacgagacacgccgtcttcctggaagacgaaatgattagggggagctcggtatttcgagaaattgatcttgaggagtggcgggggtctgtacccgctctgtcgactcaggagcctttcttctctctacctgttgatgttgtgcctacaatgcatgacgttgcggtaccagcacctgttgttacccctcctgtggcaacaatgaatgaaagtgaggaacctgttctacaggattcaacataaattattgccacaccagaggaggagctgcaacagccttagacagataatgtgccagtacaggagactcaacaagagcctcaggtacagaacgtgccaaatgtggaggcccctagaggtctgaaagagtcagaagatcggctatccatgatgactatcaagtttataatatagaagagtcgcatatggaggatgatcccacctcatatgaagaggccatgagaagcgcacgctcatctgaatggttggaaaccatgaaagatgaaatgaaatcaatgaaactaaacgatttctgggatttagaagaaattcccaaaaggagccaaaacagtaggctgtaaatgggtctttaaaaccaaatatgactccagagggaatatagaaaagtttaaggcgcgacttgtggcaaaaggcttcacgcaacgagaagggattgattacaatgagacattttctctagtctcttgtaaagtttccttcaggataataatggcactggtggcacattatgacttggaattacatcagatggatgtaaaaacagcatttcaaaatggagatttggaggaaaaagcatgcattgtgcaactgaaaggttttgtcatgaaaggaaacgaaaatatgggataccgtctaaagagatccatttatgaattaaagcaagctttgagatagtggtacttgaagtttgatggaacaataaagaaatttgggttttaagagaatattgaggacaactgtatttattcaaagtttaagaatgggagatttattttcctaattttgtatgtggatgacattctactggctagtattaatgtcagtctactgcaggaaacaaagaaattcttgtcctcaaactttgacatgaaagacctcggtgaggcttcatatgttttgggcatagagattcaccaagatagaacaaagtatgcattgggactttctcaaaaggcatatatagaaaatgtgttgaagaaattcaacatgtacagatgcagtgcttcacctgctcgtatagttaaaggggaaaggtatggggcatggcaaagtcccacaaatcagtatgagctcaacgaaatgaaaaaaaaagccgtatgcgtcagctgtgggaagcctacagtacgcgctgttgtgcacacgccctgacttggcatttgttaccgggttacttggcagatttcagagtaatccaggcccagagcattagaaattggtaaagaaagtcttgcattatttgcaaggaacaaaaggcctcatgctgtcagaatcgctccagatagtgggtattcagattctgactttgcaaaagataatacaaagtcaatatcgggatacgtgtttaccctggcaggaggagctctttcatggaaaagctcaaaacaggctatcactgcagggtctactatgtatgccgagtttatagcatgctatgaggccacggggcaggtgaacttgctaaagaagttcataccggatttaaaggtggttaacagtattgagaaaccactaaagttatactgtgataacgaacccgtggtaatgtaatgtcacaacaatcagtcaagtggtgctgccaaacacattgacataaattactatgttgtgaaggacaaagtccgagatcaaacaatcagtctcgagcacattagaacagaaatgatgctcgcggatttgctcatgaaaggcctaccgcccaacgtgttcaaggaacatgtagccggcatgggtttaagggaagcctta

SEQ ID NO: 30243 - DNA, 3587 bp, Oryza sativa
  Clone ID: PAT_MRT4530_34667C.1
atgattatctcaggtggctactccttgatgggttacataaaagatattccgaccctaacaggagataactacagagaatggaaaagagaactcgaccttgcttttatcttgggagaggtggactgggtgttgactaccccatgtcctatagaacctgctgaacttttcagaggtgaaaatgagtcaaatgcggaacggcaaaagagagagagggacaatgcttccctcatcatgtcgtatgaaattgaacatgcgaaatggtccttagccaacaagaactgtttggctgcggtaaagaacacgattgagccaagcatattgggctcattcctagagtatgacactgtctctatgtacctcaaaagtataaagagcaagtttactggttcttcaaagttttatgcgacacagctcataaagcagcttgtaacagagtggtaccatggaggtggtgtaaaagaccacattcttaggatgagcaacatggcttccaagttaaagtaaaaagatttgggcatctcagatgactttctggtccatctggttatgtcctcattgccagagaactttgacaactttgttgtcaactacaaagtaagtctagaaaaatggaatcttgaagagctcatctctaattgtgtgcaagaggaggaaagactcaaagagaccaatggtggctccattaaccttgttaaagataacaaggaaaagagccacgggtcaccctcctcaaaagcaaaacagcctcagcatctgcctcagcaacaacagttcacagttgagacaggatcagtgtctccactgcaagaagacaagacattccaagaaagatcgtcctgacttcctgacagtgatcatggcaaagaaaggtgagaacattattacatttataaatgaatctcattatgattggttattctagatctacatggtggatttattctagagcaactattcatatatgtaattgtttaaagggattctgttcgatgaggactacgcaaagaagcgaaagatccattagagttgcaaatggagttgaagcaaaagttgaagctattggagatcttctcctagagctcgcgaatggcttcacacttttacttcgagatgttttatgtccgttctttgcaaagaaacttaataagtgtatccaaattggattttgatagatatgattgccattttggaaatggcaaatgtgaactatggtataataatgcatgtattggtcttgttgtgttgcaagatcagctttatttgttatctctttctgagaatgtgaatgttgtgtccttgttgacaaaagaaaaagaaagcgaattcctgatgtctcatcaaaattatggcactgtcgtttaggccatatttcgagggggaggattgagagactggttaagaatgtaattcttcctccattggagttctcagttttggaaccatgcatacaatgcatagaatgcatcggtgcccaaaacactgtatgagctatggatcctccttgtgtgggggagtcctgcagaggctaaagtatttaacccaaatattgggaaattggatcccaaaaagtaagctgccattttattggctatcctgaaagatcaaagggttatcatttctactgtccaaacagttaaacaaagtttgtagaaacgagatggaaatgattaggggggagctcggtagtacgagaaattgatcttgaggagaggcgggtgtctgtacccgctcccttgactcaggaacctttcttctctctacctgctgatgttgtgcctgcaatgcatgatgttgcggtaccaacacctattgttatctctcctgtggcaacaatgaatgaaagtgaggaacctgttttacaggattcaacagaaattattgccacaccagaggaggagctgcaacagcctcaaacagataatgtgccaaatgaggaggcccctagaaggtctgaaagagtcagaagatcggcaatccgtgatgactatgaagttataatatagaagagtcgcatatggaggatgatcccacctcatatgaagaggccatgagaagcgctcgctcatctgaatggttggaagccatgaaagatgaaatgaaatcaatgaaattaaatggtgtctgggattttagaagaaattcctaaaggtgtcaaaatagttggctgtaaatgggtctacgaaaccaaatatgactgcagagggaatatagaaaagtttaaagcgcgacttgtggcaaaaggcttcacgcaaagagaagggattgattacaatgagacattttctccagtctcttgtaaagattccttcaggattataatggcactggtggcacattatgatttggaattacatcagaaggatgtaaaaagggaatttctaaatagagatttggaggaaaagtatacatggtgcaaccgaaaggttttgtcatgaaaagaaacgaaaatacgggatgccgtctaaagagatccatttatggattagaacatgcttcgagacaatggtacttgaagtttgatgggacaataaagaaattttgggttttcaagagaatgtcgaggacaactgtatttattcaaagtttaaaaatagtagatttattttcctaattctgtatgtagatgacgttctactaactagtagtgatgtcagtctattgcaggaaacaaagaaattcttgtcctcaaactttgacatgaaagacctctgtgaggcttcatatgttttgagcatagagattcaccgagatagaacaaagtatgcattgggactttctcaaaaggcatatatagaaaatgtgttgaagaaattcaatatgtacagatgcagtgctacacctgctcctatagtcaaaggcaaaaagtatggggcatcgcaatgtcccaaaaatcagtatgagctcaatgaaatgaaaataaagccatatgcgtcagctgtaggaatcctacagtacgcgcaagtgtgcacacgacctgacttggcatttgttaccgggatacttggcagatttcaaagtaatccaggcctagagcactggaattagtaaagaaagtcttgcgttatttgcaaggaacaaaaggcctcatgctgtcttacagaaaatcagaatcgctccagatagtggggtattcagattctaactttgcaaaagataatacaaagtcaacatcgggatatgtgttcaccctggcagtaggagctatttcatggaaaagctcaaaacagatcaccacttcagggtctactatgtataccgagtttatagcatgctatgaggcaacggggcaggtgaactggctaaagaaattcacacccggtttaaaggtggttgacagtattgagaaacaactaaagttatactgcgatagcgaacccacagtaatgtactctcacaacaatcagtcaagtggtgctgccaaacacattgacataaagtactatgttgtgaaagacaaagtccgggatcaaacaatcagtctcgagcacattagaacagaaaggatgctcgcggatccgctcatgaaaggcctacctcccaacatgttcaaggaacatgtagcatgcatgggtttaagggaagcctaa

SEQ ID NO: 30244 - DNA, 4176 bp, Oryza sativa
  Clone ID: PAT_MRT4530_34668C.1
atggtcgccttcccttccctaacccctctatgctctctcctagggtgccgccgccgcccgttcgcgcctcggcatcaccagtcgtcgccgccgttttcttccttcgcgccggccgccgtgttcgccggtggctactccttgatgggttgcattaaagatattccgaccctaaaaggagataactacgcagaatggaaaagaaaactcgaccttgcttttatcttgggagaggtggactgggtattgactaccccatgtcctatagaacctgctgaacttgtcagaggtgaaaatgagtcagatgctgactggcaaaagagacagagggacaatgctcctctcgtcatgtcgtatgacattgaacaaaagaaatggtccttagccaacaagaaatgtttggctgtggtaaagaatacgattgagcctaccatattgggctcgatcccagagtgtgacgctgtctcagagtaccttgaaagaataaagagtcagtttactggctcttcaaagacttatgctacacagctgatcaagcagcttgtgacagaaaggtaccatggaggtggtgttagagaccacatacttagaatgagcaacatggcttccaagttgaagccaatggatttgggcataacagatgactttctggtccatctggttatggcctcattgccaaagcagtttgacaattttattgtcaactacaacataagtccagagaaatggaactttgagaagctcattgctaattgtgtgcaagaggaggagagaatcaaagaatcaaatggtggttcaataaactatgttaaagataagaaaaagaaccacaagtctcccacctcaaaaggtaaacagtctcagcatctgcctcagcaacaacagttcgctgttgagaaagatcaatgtctccactgcaagaagacaggacactacaagaaagattgtcctgactttctgaaaatgatcatggcaaagaaaggtgagaacattattacatttgtaaatgaatctcattatgttggttactctagatccacatggtggattgattctggagcaactattcatgcttgtaattgtttaaaggcattccgttcgacgaggactacgcaaggaagagaaagctccattagagttgccaatggagttgaagaaaaagttgaagctgttggagatcttccgctagagctcgcgaatggcttcacacttttacttcgagatgtcttttatgttccttctttgcaaagaaacttaataagtgtatcaaagttggattttgatggatatgattgccgctttggaagtggcaaatgtgaactatggcataataatgcatgtattggtcttgctgtgttgcgagacgagctttatttgttatctctttctgagaatgtgaatgttgtgtcctcgttgacaaaagaaaacaagaaaagaaagcgaacttccaatgtctcatcgaaattatggcactgtcgtttgggccatatttcgagggggagaattgagagactagttaagaatgaaattctttccccattggagttctcagacttagaacaatgcatagaatgcattaaaggaaaatttgtaaagagcatcaaaaagggtgcaaaacgaagcgcaggaattttagagatcattcatacagatatttgtggtccatttcctgtgaaaagtatggatggctatgactcgttcataacattcacagatgattactcccgctatggttatatttatccaattaaagagcgatcagaagcactggataaatttaagatattcaaagctgaagttgaaaatcagcatgatataaagattaaagtaaatggggtagctgaaaggcgcaaccgtacccttatggatatggtgcgcagcatgatgagctactccacactaccactcggtttatggatggaggcgttaaaaaccgccattcatattctcaacagagttccaagcaaatcggtgcccaaaacaccgtatgagctatggacaggaagagtaccctcgctaactcacctccgtgtgtgggggagtcctacagaggccaaagtatttaacccaaatattgggaagttggaccccaaaacagtcagctgccattttattggctatcctgaaagatcaaaaggctatcgtttctactgtccaaacagttatacaaagtttgtagaaacgagacacgccgtcttcttggaagacgaaatgattagggggagctcggtagttcgagaaattgatcttgaggagaggcgggtgtctgtacccgctccgtcgactcaggaacctttcttctctctacctgctgatgttgtgcctgcaatgcctgtcattgaggtaccagcacctgttgttacccctcctgtggcaacaatgaatgagagtgaggaacctgttatacaggattcaacagaaatggttgccacaccagaggaggagctacaacagcctcaaatagataatgtgccagtacaggagactcatcaagagcctcaggtacaggatgtggcaaatgtgcaggcccctagaaggtctgaaagagtcagaagatcggctatccgtgatgactataaagtttataatatagaagagtcgcatatggaggatgatcccacctcatatgaagaggccatgagaagcgctcgctcatctgaatggttggaagccatgaaagatgaaatgaaatcaatgaaactaaacgatgtttgggatttagaagaaattcctaaaggagccaaaacagtaggctgtaaatgggtctacaaaaccaaatatgactccagagggaatatagaaaagtttaaagcgcgacttgtggcaaaaggcttcacgcaacgagaagggattgattacaatgagacattttctccagtctcttgtaaagattccttcaggattataatggcactagtggcacattatgatttggaattacatcagatggatgtaaaaacggcatttctaaatggagatttggaggaaaaagtatacatggcgcaaccgaaaggttttttcatgaaaggaaacgaaaatatgggatgtcgtctaaagagatccatttatggattaaagcaagcttcgagacagtggtacttgaagtttgatgggacaataaaaaaatttgggtttcaagagaatgtcgaggacaactgtatttattcaaagtttaagaatgggagatttattttcctaattctgtatgtggatgacattctactggctagtagtgatgtcagtctactgcaggaaacaaagaaattcttgtccacaaactttgacatgaaagacctcggtgaggcttcatatgttttgggcatagagattcaccgagatagaacaaagtatgcattgggactttctcaaaagacatatatagaaaaggtgttgaagaaattcaacatgtacagatgcagtgctacacctgctcctataatgaaaggcgaaaagtatggggcatcgcaatgtcccataaatcagtatgagctcaatgaaatgaaaacaaagccatatgtgtcagctgtaggaagcctacagtacgcgcaagtgtgcacacgacctgacttggcatttgttaccgggttacttggcagatttcagagtaatccaggcctagagcactggaaattggtaaagaaagtcttgcgttatttgcaaggaacaaaaggcctcatgctgacttacagaagatcagaatcactccagatagtggggtactcagattctgactttgcaaaagataatacaaagtcaacatcgggatacgtgtttaccctggcaggaggagctatttcatggaaaagctcaaaacagactatcactgcagggtctactatgtatgccgagtttatagcatgctatgaggcaacggggcaggtgaactggctaaagaagttcatacccggtttaaaggtggttgacagtattgagaaaccactaaagttatactgcgacaacgaacccgcagtaatgtacgctcacaacaatcagtcaagtggtgctgccaaacacattgacataaagtactatgttgtgaaggacaaagtccgggatcaaacaatcagtctcgagcacattaaaacagaaaggatgctcgcggatccgctcacgaaaggcctaccacccaacgtgttcaaggaacatgtagccggcatgggtttaagggaagccttatga

SEQ ID NO: 30245 - DNA, 2499 bp, Oryza sativa
  Clone ID: PAT_MRT4530_34669C.1
atggcggaagagagagaaagcttcgaaagccaatgggtgccgtccgacatgacggaagaaaacctgaaggagatggtggcgcacggcgttctccctgccaaggagatcatcgggtggcggccagcgtgcggtgaggcttttccaacccctgatacacatgagatcgtagtcttctcgcatttcttctatggcggcttcgctcttccgacctcgaaatttttccgcgggatcttgaacttctatggaatcagcttgcatcacctaaacccaaattccatagtgcatatcgccaatttcgtccatgtttgtgaagcctttttgggaatcaagcctcactttgccctgtttcgccggatcttcttcctcaaaccccaaccgaacaagagcaaaccgtgcgtagtcgggggggcaggattccagctgaggggaactctgagccaaaagtatttctctatgcccttcaagacttcgaacaaagggtggcatgcaaactggttctatgttcaaaatcctgagcctgctcttcccgggtactcttgtcttcctccggtgtaccaagatacctggaactctcttccaatcggagatgaagcagtccaagccttggagttgatggaccgcatgttaaaacttaaagaacaaggcttgcaaggagagcagattactcggcatttcattaaatgccgactggcgccaatcaaagaaagatcccgtacagcattcgagttcgacggcaagcatgatcccaaccgtgaagaaccggactctctggacttcaaaatcatgaaggagagaatgtataaaattttctcaaatgctattgtcgtcagctactcgcatcagctgccagttgtgccatataatgcattcaatccgcctccgcagaagcatctcattcaggaatatgtattgatgaaatctgatcccccaattgctcagcgccgatctccccgccagcacaccgttcagggaagtggagggccgacaatcaggtcagacccgcaacctcaaacttcccaaccgactgggcagacaggttctcgcaagagaaaactggtgctaaacgacgacgaaggcgacgacggcgacaaatctggggacaagggctcgcctcacaaactcccaaagcgtaccatgcccaagaagaaactggctggccgtcaaatgccaaagattagaacatcctccaggaaaccatccgacatagatccaaccgggaaagaccctgatccggctgtggcagaaccaaatatatccaaggatgctgagccgactgccgaaagccagccgactgccgaaagccagccgactggcgcccatgcttcggatgacaaggccaatccgagtgaccagccgccgactggaaaccagtcggcaacaactgaaactgcaacaacccgagagcccccaactagaaaccagtcggatgtaggtcttgatcaagaaatccctgaagttgaagcgcaagcgacagcttctcaaggaccagaggctggaaatgactcgatgattggttctcctgataaagaacaaggatcacctcgcgctcagccaggcacatcctcaggaacactaggtgatgacgaagaaacaattcctcgcataaaggcagctgatgacttccgtcctcctatcttgctcaaatggtgggacgagaactcgcaagctgccggcatcgttataaatcgtcagaaagaagatgaggaagtgtgccagctgaagaaagcacttggagaagccactcgcattgtaaataggatccatcttcgcaatgaggccaagaccacaaccttagaaaagctggttcctcatttgggaactcttgaagccgttagggaccagctgcatgaggccaaggagtatgctaaaaagacagagaaggagttaagggaccgaattgcccagctccaggattcaaacttcgagctaagtggttcatcaaaagcacaagctaccaggatggcacaaatggagaaacagattgaagccttgaaaagagacaaagtagaactagctgtgcaaagggactcagccttgaaggaggtcgaagaccgtaaaatcaaatctcaagctcagtttgatgtcctgattggtaagatcaagaagcttgaaggagcaagagacgaagtcgccaatgtcgctacaccactcatccaagctatgttccttaataacagtggtccgagtgcacttgacgcaactgaaatctttgacaagctgagagttgcaccggatgtatacttcaagaatatcaagaaagctggaagcatgggagctagcatggcattggcgatgaccaaatccttgtacccgagaattgaaatcgacaccattgatggatttgcagatgggacaagtgaagaagctgctcttgatcttattagtaatgctcaaagtgcggctgacaagattgcaagtgatgttgtagagcaattccgcaacaacgaccttcagccgagcaataataactctgatgatgaaaggactgattctgactga

SEQ ID NO: 30246 - DNA, 4044 bp, Oryza sativa
  Clone ID: PAT_MRT4530_3466C.1
atggtttacaccaggactggcaaccgcacgacaggcgagggcagcaacggcgaagaacgcgtggatggtgtgcaccccaacagtgattctggcaatggtccgccaccacttcccgagaatccgacccttgcccaagttatggcacatcagactcagatgatggcagccatgatgcagcagatgcagcagcagcaccagcagatgcaccagaggatgatgcagcacgccgaacagcagcaccagcagtttggtccccctccccctcagtccaagttgccggagtttctacgtgtcaggccacccaccttctccagcaccaccaaccctatggaggcaaatgactggctccatgcgatagagaagaagctgaatctcctgcagtgcaatgatcaggagaaggtcgctttcgccacacaccagcttcagggtcccgcgtcagcttggtgggacaaccacatggccacccgcccaccgggtactgaagtcacgtgggcagagttctgccgtagcttcaggaaggcacaggtgccagacggggtcgtggcacaaaagaagagggaattccgggcgctccatcagggcaacaggactgtgacagagtacctccatgagttcaatcgcctcgcgcgatatgcaccagaggatgtccgcaccgacgccgagaagcaggagaagttcatggcgggtctggatgacgagctgaccaaccaactgatatctggggactacgccgactttgagaggctggttgacaaggcaatccgccaggagaatcaacgcaacaagatggacaggaagaggaaggccgctcagttcagggcaccccaggaaagtcaccagaggtcgcgcttcactcccgggcaacagggtggacctaccaccatgattgttcgtcaacaccgcccgttcaaccccagcaacttccaccagggctccagtggcagccagaatcaccatggaagtcagcccaaccgcggtacagctccacgcccaccgatggcaccggcacagtcaggccagcccgcacaagccaagaaggagacgggagcaaaaccagggtcctgcttcaactgtggcgagcttggccacttcgctgacaaatgcccgaagcccaggcgtgccggaccaaggtttatccaggctcgtgtcaaccacgcatctgcggaggaggcacaagcagcaccagaggtcgtactggtcaccctgaccaatgagaaaggagaaaccgtggtgtacaaatctctagtctcgccaaagaaaggagcctcgttgaatcagattgagacggaaatcccagtggacgccgaagagaagaacttgagaaaattggaggacatacccatagtctgcgagtatccagaggtgttccccgaagacctcaccaccatgccacccaagagggagattgaattccggattgatttggcaccaggaaccgctccaatctataagagaccgtacagaatggcggccaacgaattagcggaggtcaagaagcaagttgatgaacagctgcagaaagggtacatacgaccaagcacttcaccttggggcgctccggtcatttttgtggagaaaaaggataagacaaagaggatgtgcgtcgattatcgcgcacttaacgaggtcacaatcaagaataaatatcctttgccgcgaatcgacgatttatttgatcaactgaaaggagctaaagtgttctctaagatagacctgcgatcaggctaccaccagttgagaatccgggaagaggatattccgaagacggccttcaccactcggtacgggctatatgagtgcacggttatgtccttcggacttactaacgcacccgcattcttcatgaatctgatgaacaaagtgttcatggaatttctggacaagtttgttgtggtattcatcgacgacattcttatctattcaaagtccgaggaagaacatgaacaacatctccgtctagtactcgagaagttgaaggagcaccagctatacgccaagttcagcaagtgtgacttctggttgacggaagtcaaatttctgggccatgtcattacagctcagggtgtagcagttgatccatcgaacgtggagtcagttaccaagtggaccccaccgaagacagtgtcgcagattcgaagttttctaggactggctggttattaccgtcgtttcatcgaaaacttctcaagaatcgcccgacccatgactcagttgcttaagaaagacgagaagtttaaatggacagctgagtgcgacaagagctttgaggagctcaaaaggaaattagtatccgcaccggttttgatcctgcccgaccagacgaaagacttccaagtctattgcgatgcatcccgtcacggacttggatgtgtcctaatgcaagagggcagagtggttgcatatgcctcgcggcagttgcgtccacacgaaggaaattatccaactcatgacttggaattggcagcagtggtccatgctttgaagatctggaggcactatctgatcggcaaccgctgcgaagtatatacggaccataaaagtctgaaatacatcttcacccaaccagacctaaaccttcgacaacgaagatggttggaactaatcaaagactatgacatgagtattcactaccacccgggtaaagccaatgtggtggcagacgctttaagccggaaaagttactgcactgctctatgcatcgagggcatgtgtgaggaattgcgacaggagcttgaacatctcaacatgggaattgttgaacacgggttcgtagccgctctggaggcacggcctacgctcgtggatcaagttagagccgctcaagtaaatgatccggaaatagcagaactgaaaaagaacatgagagtcggaaaggctcgggatttccttgaggatgagcatggcacaatctggatgggagaaagattgtgtgtaccggacgacaaggaattgaaggatctgatactcaccgaagctcatcagacccagtactccattcatccaggcagcactaaaatgtatcaagacctcaaggaaaaattttggtgggtcagcatgaggagagaaatagctgaattcgtcgcactctgcgatgtttgccaacgagtgaaagcagagcaccaaagaccagcaggtttactccaacctcttcaaatcccggaatggaaatgggaggagattggaatggactttataacaggactgccccggacatcatcgggtcacgattcaatctgggaagaattggggacccgtttaaacttcagcacggcctatcacccgcaaactgatggtcagaccgagcgtgtcaatcaaatcttggaggatatgttgagagcttgcgctcttgattttggtggagcctgggacaaaagcttaccatatgcggaattctcgtataacaacagctaccaggccagtttacagatggcaccgtttgaagctctatacggccggaagtgccgcacacctcttttctgggatcagacaggcgaacgtcaactgttcggaacagaagtattagcgggagcagaagagaaagtcagaatcatcagggagagattgaggattgctcagtctcgacagaagagctacgcggataaccgtcgaagggagctaacttttgaggccggagactacgtgtatcttcgtgtcactccgctccggggagtacaccgtttccagacgaaaggcaagttggcaccacgcttcgtgggaccatacagaatcttggaacgaaggggagaagttgcttatcagctagaacttccatccaatatgatcggcatccatgacgtgttccacgtgtcccaattaaagaagtgtttaagggtacctgaagaacaggctgattcggaacacatcgatatccaggaggacctgacatatgtggagaagccggaggttccggagctcgtcccgccgtcgtcgtcgtcctccgtcggccgccgtcgtcgaccgttgtcgccgccgctccccgccgccggtcggtcgccgtcggtcgccgccttgcgccgctgccgcatgcgcgccgccgccgtgtga

SEQ ID NO: 30247 - DNA, 844 bp, Oryza sativa
  Clone ID: PAT_MRT4530_34670C.1
ggggagctcggtaattcgagaaattgatcttgaggagaggcgggtgtctgtacccgctccgtcgactcaggaacctttctaatgttgtgccagcaatgcatgacgttgcggtaccaacacctgttgttatctctcctgtggcaacaatgaatgaaagtgaagaacctattctacaggattcaacagaaattattgccacatcagaggaggagctgcaccagcctcaaacatataatgtgccagaataggaggcccctagaaggcctgaaagagtcgcatatcgaggatgatcccatctcatatgaagaggccatgagaagccatgaaagatgaaatgaaatcaatgaaattaaatgatgtctgggatttagaagaaattcctaaaggagccaaaacagtaggctgtaaatgggtctacaaaaccaaatatgactccagagggaatatagaaaagtttaaagtgcgacttgtggcaaaaaggcttcacgcaacaagaagggattgattacaatgagacattttctccagtctcttgtaaagattccttcaggattataatggcactagtggcacattatgatttggaattacatcagatggatgtaaaaacagaatttctaaatggtgatttggaggaaaaagtatacatggcgcaaccgaaaggttttgtcatgaaaggaaacgaaaatatgggatgccgtataaagagatccatttatgggttaaagaaaagcttcgagacaatgctacttgaagtttgatggaacaataaagaaatttgggttttcaagagaatgtggaggacaactgtattgattcaaagttaagaatgggagactcattt

SEQ ID NO: 30248 - DNA, 2550 bp, Oryza sativa
  Clone ID: PAT_MRT4530_34671C.1
atggcggaagagaaagaaagctttgaaggccaatgggcgccatccgacgtgacggaggagaacctgaaggagatggtggcgcatggcgttcttcctgccaaggagatcatcgggtggcggccagcgtgcggtgaggcttttccgtcccccgatacacacgaggttgtggtcttctctcatttcttctatggcggcttcgctcttccgacctcgaaatttttccgcgggatattaagcttctatggaatcagcttgcatcacctaaacccaaattccatagtccacattgccaatttcgtccatgtttgtgaagccttcttgggaattaaaccccacttcgctctgtttcgccgaatcttctttctcaaaccccaaccgaacaagagtaagccatgtgtagtcggaggggccggatttcagctgaggggaactctgagccagaagtatttctcgatgcccttcaagacttcaaacaaagggtggcatgcgaactggttttatattcagaatcctgagcccgctcttcctgagtactcttgtcttcctccggtgtaccaagatacctggaactctcttcctattggggatgaagcagcccaagccttggaattgatggatcgcatgctaaaactcaaagaacaaggcttacaaggagagcagattactcggcacttcatcaaatgccgattggcaccaattaaagaaagatcccgtacggcattcgagtttgacggcaagcatgatcctaatcgtgaagaaccagactctctggattttaaaatcatgaaggagagaatgtataaaatcttctcaaatgctattgtcgtcagctactcacatcagctgccagttgtgccatataatgcattcaatccgcctccgcagtatgaatatgtactgatgaaatctgaccccccaattactcagcgccggtctcctcgtcagcacaccgttaagggaggtggagggccgacaatcagatcggactcgcaacctcaaacctccaatccgactgggcaaacaggttctcgcaagagaaagctgatgcttaacgacgacgaaggcgacgacgacaacaaatctgggaacaaaggcctacccaataaactcccaaagcataccactcccaggaaaaaactggctggccgtccaacgccaaagatcagaacatcttccaggcataaacctcttggtaccattttgctccagtatgcttctctcatgaaaataatactgaatattgaaaggacactttgcaggaaaccatccgacatagatccaactggaaaagatcctgatccggctgtgacagagccaagttcatccaaggattctgagccgactgccgagaaccagccgactagcgctcatacttcaggtgatacagccaatccgagtgaccagcctccgactggagaccagtcggcagcaaccgaaactacaacaacccaagagcccccgactggaaaccagtcggacgtaggtccagaccaagaaattcccgaagttgaagcgcagacgacgacttctcaaggaccagaggctggcaacgacgctatgattgggtcttcaaataaagaacaagaatcgcctcacgctcagctaggaacatcctcaggaccaccaggcgatgacgaagaagaaatccctcgcataaaggcggctgacgactctcgtcctcctatcttgctcaaatggtgggacgagaactcacaagctgctggcatcgtcataaatcgtcaaaaagaagatgaggaagtgtgccagctgaagaaggcgcttggagaagccactcgcattgtgaatagaatccatcttcgcaatgaggccaagacagcaactttagaaaagctggttcctcatttgggaactcttgaagcagtcagggaccagctacacgaggccaaggagcttgccaaaaagacagagaaggaattaagggaccgaattgcccagctccaggattcaaacttcgagctgagtggttcatcgaaagcgcaagccatcaggatggctcagatggagaaacaaattgaagtcttgaaaagagacaaagtagaactggctgcgcaaagggactcggccttgaaggaggttgaagaccgcaaaatcaaatctcaagctcaatttgacgtcctggttggtaagatcaaaaggcttgaaggagcaagagatgaagtcgctaatgtcgctacaccacttgtccaagctatgttcctcaataacagtggtccgagtgcactcgacgcaaccgaaatcttcgacaagctgagagttgctccggatgtatatttcaagaatatcaaaaaagctggaagtatgggagctagcatggcattggcgatgaccaaatctttgtacccaaggattgaaattgacgccattgatggctttgcagacgggacaagcgaagaagctgctcttgatcttatcagcaatgctcaaaacgcggctgacaagattgcaagtgacgttgtagagcaattccgcaataccgaccttccgccgagtagtaataactctgatgatgaaaaaactgattctgactga

SEQ ID NO: 30249 - DNA, 510 bp, Oryza sativa
  Clone ID: PAT_MRT4530_34672C.1
ttatgcacaaataagttcggaaattactagtgaattttcgggcgtgacatttgttaaggtattaaccagtattcttgattggttgatcaaagcatgttgcactgcgtagtcaatctgatcttggaagttgttaaattgtggttgtaatccattgccatctggaccaaggtcctgaaccaccccttcctgaaaaccgtcacctttgtcacctaattcaccagcagttactttaccagatgagcttgaaccaacttcatcggcagcaaccactttcagcttgtatttctagacaattgtcccttggcgggtttctttgaatgaattcatgaacttgtccttcacgctgctcatcatctgttcaagctcttgcctatgttcagccatcaatttgtccagtgtgactggaataatatttccttcatgaacttcagatccggttgaatttggaagcttgttttgaggatctgttgacttcgaagcttgcttgttgcccgacatatttatcgtgtc

SEQ ID NO: 30250 - DNA, 1148 bp, Oryza sativa
  Clone ID: PAT_MRT4530_34673C.1
aatgaattttctatgattttacaaagtttcagcatttatggcttagaacaagcttcgagacagtgatacttgaaatttgatggaacaataaagaaatttgggttttcaagagaatgtcgaggacaactgtatttattcaaagtttaagaatgggagatttattttcctaattctgtatgtagatgacattctacttgctagtagtgatgttagtctactgcaggaaacaaagaaattcttatcctcaaactttgacatgaaagacctcggtgaggactcacatgttttgggcatagagattcaccgagatagaacaaagtatgcattgggactttctcaaaaggcatatatagaaaaggtgttgaagaaattcaatatgaacagatgcagtgctgcacctgctcctatagtcaaaggcgaaaagtatggggcatcgcaatgtcccagaaatcagtgtgagctcaatgaaatgaaaacaaagccaaatgcatcagttgtaggaagcctacagtatgctcaattgtgcacacgacctgacttggcatttgttaccgggttacttggcagatttcagagtaatccaggcccagagcactggaaattggtatagaaagtcttgtgttatttgcaaggaataaaaggcctcatgctgtcttacagaaaatcagaatcgctccagacagtggggtattcagattctgactttgcaaaagataatacaaagtcaacatcgggatacgtatttaccctcacagtaggagctatttcatggaaaagctcaaaacagaccatcactgcagggtctactatgtatgccgagtttatagcatgctatgaggcaacggggcaggtgaactggctaaagaagttcatacccggttttaaaggcggttgacagtattgagaaaccactaaagttatactgcgatagcaaacccacagtaatgttctctcacaacaatccctcaagtggtgctgccaaacacattgacataaagtactatgttgtgaaagacaaagtctgggatcaaacaatcagtctcgagcacataagaacagagaggatgctcgcggatccgctcatgaaaggcctacctcccaacatgttcaaagaacatgtagcatgcatgggtttaagggaagcctta

SEQ ID NO: 30251 - DNA, 2481 bp, Oryza sativa
  Clone ID: PAT_MRT4530_34674C.1
atggcggaagagaaggaaagcttcgaaggccaatgggcgccgtccgacgtaacggaagagaacctgaaggagatggtggcgcacggcgttctcccagccaaagagatcattgggtggtggccagcgtgcggtgaggcttttccaacccccgatacacatgagatcgtagtcttctcacatttcttctatggcggcttcgctcttccgacctcaaaatttttccgcgggattttaaacttctatggaatcagcttgcatcacctaaacccaaattccatagtccatatcgccaatttcatccatgtttgtgaagcctttttgggaattagaccccacttctctctgtttcgccggatcttctttctcaagccccaaccgaacaagagcaagccatgcgtagtcggaggggcaggatttcagctgaggggaactctgagccagaagtatttctctatgcccttcaagacctcaaacaaggggtggcatgcgaactggttttatgttcagaatcctgagcctgctcttcccgagtactcctgtcttcctccggtgtaccaggatacctggaactctcttccgattggagatgaagcagcccaagccttggagttgatggaacgcatgctaaaactcaaagaacaaggcttgcaaggagagcagattactcggcatttcatcaagtgccgattggcaccaattaaagaaagatcccgtacagcattcgagttcgacggcaaacatgatcccaatcgtgaagaaccagactctctggactttaaaatcatgaaggagagaatgtataaaattttctcaaatgctattgtcgttagctactcacatcagctgccagtcgtgccatataatgcattcaatccgcctccgcaggaatatgcgttgatgaaatctgatcccccaatcactcagcgccggtcgcctcgtcagcacaccgttcagggaggtggagggccaaaaatcagaccagatccgcaacctcaaacctccaatccaactagacagacaggttctcgcaagagaaaactggtgctcgacaacgatgaaggtgacgacgataaatctggggacaagggctcgcctaataaattcccaaagcgtaccatgcccaagaaaaaactggctggccgtcaaatgccaaagattagaacatcttccaggaaaccatctgacatagatccaactggaaaagatcctaatccggctgtgacggaaccaaatttatccaaagacgctgagccgactgccgaaaatcagccgactgccgaaagccagccgaccggcgcccatgctttgggtgataaggccgatccgagtgaccggccaccaactggagaccagtcggcaacagctgaaactgcaacaacacaagagcccccgactggaaaccagtcggatgtaggtcccgatgaagaaatccctgaagttgaagcgcagacgacaacttcccaaggaccagaggctggtaaagactcaatgattgggtctctaaataaagaacaaggatcacctcatgtccagccaggaacatcctcaggaacactaggcgatgacgaagaagcaattcctcgcataaaggcggctgatgactcccgtcctcctatcttgctcaaatggtgggacgagaactcgcaagttgccggcatcgttataaatcgtcaaaaagaagatgaggaagtgtgccagctgaagaaagcacttggagaagccactcgcattgtgaatagaatccatcttcgcaatgaggccaagactacaactttggaaaagctggttcctcacttgggaactcttgaagcagttagggaccagctgcatgaggccaaggagtatgccaaaaagacagagaaggagttaagggaccgaattgcccagctccaggattcgaacttcgagctaagtggttcatcaaaagcgcaagctaccaggatggctcaaatggagaaacagattgaagccttgaaaagagacaaagtagaactagctgcgcaaagggactcggccttgaaagaggttgaagaccgtaaaatcaaatctcaagctcagtttgatgtcctggttggtaagatcaagaagcttgaaggagcaagagacgaagtcgccaatgtcgctgcaccactcgtccaagctatgttccttaataacagtggtccgagtgcacttgacgcaaccgaaatctttgacaagctgagagttgcaccggatgtatatttcaagaatatcaagaaagctggaagtatgggagctagtatggcattggcgatgaccaaatccttgtacccgaggattgaaattgataccattgatggctttgcagacgggacaagtgaagaagctgctcttgatcttatcagtaatgctcaaagtgcagctgacaagattgcaagcgatgttgtagagcaattccgcaacaacgaccttcagccgagcgataataactctgatggtgaaaggactgattctgactga

SEQ ID NO: 30252 - DNA, 3933 bp, Oryza sativa
  Clone ID: PAT_MRT4530_34675C.1
atgggttgcattaaagatattccgaccctaaaaggagataactacgcagaatggaaaagaaaactcgaccttgcttttatcttgggagaggtggactgggtgttgactaccccatgtcctatagaacctgctgaacttgtcagaggtgaaaatgagtcagatgctgactggcaaaagagacagagggacaatgctcctctcgtcatgtcgtatgacattgaacaaaagaaatggtccttagccaacaagaaatgtttggctgtggtaaagaatacgattgagcctaccatattgggctcgatcccagagtgtgacgctgtctcagagtaccttgaaagaataaagagtcagtttactggctcttcaaagacttatgctacacagctgatcaagcagcttgtgacagaaaggtaccatggaggtggtgttagagaccacatacttagaatgagcaacatggcttccaagttgaagccaatggatttgggcataacagatgactttctggtccatctggttatggcctcattgccaaagcagtttgacaattttattgtcaactacaacataagtccagagaaatggaactttgagaagctcattgctaattgtgtgcaagaggaggagagaatcaaagaatcaaatggtggttcaataaactatgttaaagataagaaaaagaaccacaagtctcccacctcaaaaggcaaacagtctcagcatctgcctcagcaacaacagttcgctgttgagaaagatcaatgtctccactgcaagaagacaggacactacaagaaagattgtcctgactttttgaaaatgatcatggcaaagaaaggtgagaacattattacatttgtaaatgaatctcattatgttggttactctagatccacatggtggattgattctggagcaactattcatgcttgtaattgtttaaaggcattccgttcgacgaggactacgcaaagaagagaaagcaccattagagttgccaatggagttgaagaaaaagttgaagctgttggagatcttcctctagagctcgcgaatggcttcatacttttacttcgagatgtcttttatgttccttctttgcaaagaaacttaataagtgtatcaaagttggattttgatggatatgattgccgttttggaagtggcaaatgtgaactatggcataataatgcatgtattggtcttgctgtgttgcgagacgagctttatttgttatctctttctgagaatgtgaatgttgtgtcctcgttgacaaaagaaaacaagaaaagaaagcgaactcccgatgtctcatcgaaattatggcactgtcgtttgggccatatttcgagggggagaattgagagactagttaagaatgaaattcttcctccattggagttctcagacttagaacaatgcatagaatgcattaaaggaaaatttgtaaagaacatcaaaaagggtgcaaaacgaagcgcaggaattttagagatcattcatacagatatttgtggtccatttcctgtgaaaagtgtggatggctatgactcgttcataacattcacagatgattactcccgctatggttatatttatccaattaaagagcgatcagaagcactggataaagatataaagattaaagtagtaagatctgaccgtgggggggagtactatggtcgacatacgccttatgggcaagtccctggaccttttgcaaggttcttgctagagaatggaatagtagcccagtattcaacaccgggcgaacctcaacagaatggggtagctgaaaggcgcaaccgtacccttatggatatggtgcgcagcatgatgagctactccacactaccactcggtttatggatggaggcgttaaaaaccgccattcatattctcaacagagttccaagcaaatcggtgcccaaaacaccgtatgagctatggacagggagagtaccctcgctaactcacctccgtgtgtgggggagtcctgcagaggccaaagtatttaacccaaatattgggaagttggaccccaaaacagtcagttgccattttattggctatcctgaaagatcaaaaggctatcgtttctactgtccaaacagttatacaaagtttgtagaaacgagacacgccgtcttcttggaagacgaaatgattagggggagctcggtagttcgagaaattgatcttgaggagaggcgggtgtctgtacccgctccgtcgactcaggaacctttcttctctctacctgctgatgttgtgcctgcaatgcctgtcattgaggtaccagcacctgttgttacccctcctgtggcaacaatgaatgagagtaaggaacctgttatacaggattcaacagaaatggttgccacaccagaggaggagctacaacagcctcaaatagataatgtgccagtacaggagactcatcaagagcctcaagtacaagatgtgccaaatgtgcaggcccctagaaggtctgaaagagtcagaagatcggctatccgtgatgactataaagtttataatatagaagagtcgcatatggaggatgatcccacctcatatgaagaggccatgagaagcgctcgctcatctgaatggttggaagccatgaaagatgaaatgaaatcaatgaaactaaacgatgtttgggatttagaagaaattcctaaaggagccaaaacaatggatgtaaaaacggcatttctaaatggagatttggaggaaaaagtatacatggcgcaaccgaaaggttttgtcatgaaaggaaacgaaaatatgggatgtcgtctaaagagatccatttatggattaaagcaagcttcgagacagtggtacttgaagtttgatgggacaataaagaaatttgggtttcaagagaatgtcgaggacaactgtatttattcaaagtttaaaaatgggagatttattttcctaattctgtatgtggatgacattctactggctagtagtgatgtcagtctactgcaggaaacaaagaaattcttgtcctcaaactttgacatgaaagacctcggtgaggcttcatatgttttgggcatagagattcaccgagatagaacaaagtatgcattgggactttctcaaaagacatatatagaaaaggtgttgaagaaattcaacatgtacagatgcagtgctacacctgctcctataatgaaaggcgaaaagtatggggcatcgcaatgtcccagaaatcagtatgagctcaatgaaatgaaaacaaagccatatgcatcagctgtaggaagcctacagtacgcgcaagtgtgcacacgacctgacttggcattcgttaccgggttacttggcagatttcagagtaatccaggcctagagcactggaaattggtaaagaaagtcttgcgttatttgcaaggaacaaaaggcctcatgctatcttacagaagatcagaatcactccaaatagtggggtactcagattctgactttgcaaaagataatacaaagtcaacatcgggatacgtgtttaccctggcaggaggagctatttcatggaaaagctcaaaacagactatcactgcagggtctactatgtatgccgagtttatggcatgctatgaggcaacggggcaggtgaactggctaaagaagttcatacccggtttaaaggtggttgacagtattgagaaaccactaaagttatactgcgacaacgaacccgcagtaatgtacgctcacaacaatcagtcaagtggtgctgccaaacacattgacataaagtactatgttgtgaaggacaaagtccgggatcaaacaatcagtctcgagcacattaaaacagaaaggatgctcgcggatccgctcacgaaaggcctaccacccaacgtgttcaaggaacatgtagccggcatgggtttaagggaagccttatga

SEQ ID NO: 30253 - DNA, 2499 bp, Oryza sativa
  Clone ID: PAT_MRT4530_34676C.1
atggcggaggaaaaagaaagctttgaaggccagtgggcgccatccgacgtaacggaagagaacctgaaggagatggtggcgcacggcgttctccctgccaaggagatcatcgggtggcggccagcgtgcggtgagacttttccgacccccgatacacatgagattgtggtcttctctcatttcttctatggcggcttcgcccttccgacctcgaaatttttccgcgggatattaagcttctatggaatcagcttgcatcacctaaacccgaattccatagtccatatcgccaatttcatccatgtttgtgaagcctttttgggaattaggccccacttcgctctgttttgccggatcttctttctcaagccccaaccgaacaagaataagccatgtgtagtcggaggggcaggatttcagttgaggggaactctgagtcagaagtacttctctatgcccttcaagacctcaaacaaagggtggcatgcgaactggttttatgttcagaatcctgagcctgctcttcccgagtattcttgtcttcctccggtgtaccaagatacttggaactctcttccaatcggagatgaagctgcccaagctttggaattgttggatcgcatgttaaaactcaaagaacaaggcttgcaaggagagcagatcactcggcatttcatcaaatgccgactggcgccaattaaagaaagatcccgtacagcttttgagtttgacggcaagcatgatcctaatcgcgaagaaccagactctctggatttcaaaatcatgaaggagagaatgtataaaatcttctcaaatgccatcgtcgtcagctactcacatcagctgccagttgtgccatataatgcattcaatccgcctccgcaggaatatgcattgatgaaatctgatcccccaatcactcagcgccggtcacctcgtcagcacaccgttcagggaagtggagggccgacaatcaggtcagacccacaacctcaaacctccaaaccggctgggcagacaggtcctcgcaagagaaagctggtgcttaatgacgatgagggcgatgacagcaacaaatctggggacaagggcactcccaacaaactcccaaagcataccatgcccgggaaaaaactggctggccgtcaaattccaaagattagaacatcttccaggaaaccatccgacatagatccaactggaaaagatcctgatccggctgtgacagagccaaatttatccaaagacgctgagccgactgccgaaaatcagccgaatgccgaaagccagccgactgccgaaagtcagccgactggcgcccaagcttcggacgacaaggccaatccgagtgatcagccgccgactggaaaccagtcggcagcaactgaaactgcaacaacccgagagcccccgactggaaaccagtcggatgtagatctaaatcaagagattcctgaagctgaagcgcagacaacttctcaaggaccaaaagttggtaatgactcagtgattgggtctccagataaagagcaaggatcccctcacgctcagccaggcacatcctcaggtccactaggcggcgacgaagaagaaattctccgcataaaggcagctaatgactctcgtcctcctatcttactcaaatggtgggacgagaactctcaagtttccggcattgttataaatcgccaaaaagaagacgaggaagtgtgccagctgaagaaagtacttggagaagccactcgcattgtgaatagaatccatcttcgtaatgaagccaagactgcaaccttagaaaagctggttccacatttgggaactcttgaagccgttagggaacagctacacgaggctaaggagcatgccaagaaaacggagaaggaattaagggagcgaattgcacagctccaggactccaacttcgagctgagtggttcatcaaaagcgcaagccaccaggatgactcaaatggagaagcaaatagaagccttgaaaaaagacaaggtagaactggctgcggaaagggactcagccttgaaggaggttgaagaccgtaaaatcaaatctcaagctcagtttgatgtcctggttggtaagatcaagaagcttgaaggagcaagagatgaagtcgccaatgtcgctacaccacttgtccaagctatgtttcttaataacagtggtccgagtgcacttgatgcaaccgagatctttgacaagctaagagttgcaccggatgtgtacttcaagaacatcaagaaagctggaagtatgggagctagcatggcattggcaatgaccaaatccttgtacccgagaatcgaaattgataccattgatggctttgcagacgggacaagtgaagaagctgctcttgatcttatcagtaatgctcaaagtgcggctgacaagattgcaagtgatgttgtagagcaattccgcaacaacgaccttcagccgagcaataataactctgatgatgaaaggactgattctgactga

SEQ ID NO: 30254 - DNA, 442 bp, Oryza sativa
  Clone ID: PAT_MRT4530_34677C.1
tcgtttaaatataatataaaaaaattttttttatggtataggttttttaatatttttaaattttattgtttttttataataattaaatttttaattaaagaaattgttttgttgatttgtactgaatggtcttaatattaatgatgataaattgtctatttattcttaaaaaaaaaaaaaataaaatttcagcaagattcaaaatttgaaaagtggaataaaaataaagaggttcgcactaattgctttttctgaaaattgaaaaggattcatgctatatgaaactattaatatagtaaattattaaattaggcaaagtgttaattataggctgggtgagtttttaacttgacaatgttttaggttttaatcttatatgattttaacgtttgtttgtttataaagttaaggtttttatcggggaatatctaaaggggcaggt

SEQ ID NO: 30255 - DNA, 1941 bp, Oryza sativa
  Clone ID: PAT_MRT4530_34678C.1
aatcctgagcctgctcttcccgagtactcttgtcttcctccggtgtacctagatacctggaactctcttccgattggggatgaagcagcccaagccttggagttgatggatcgcatgctaaaactcaaagaacaaggcttacaaggagagcagattactcggcacttcatcaaatgccgattggcaccaattaaagaaagatctcgtacggcattcgagtttgacggcaagcatgatcctaaccgcgaagaaccagattctttggattttaaaatcatgaaggagagaatgtataaaatcttctcaaacgctattgtcgtcagctactcacatcagctgccagttgtgccatataacgcattcaatccgcctccgcaggaatatgtattgatgaaatctgatcctccaatcactcagcgccggtctcctcgccagcacaccgttcagggaggtggagggccaacaatcagatcagatccgcaacctcaaacctccaatccaactggacagacaggttctcgcaagagaaaactggtacttgacaacgatgaaggcgacgacgacaacaaatctggggacaagggctcgcctaataaactcccaaagcgtaccatgcccaggaaaaaactggctaaccgcccaacgccaaagattagaacatcttctaggaaaccatctgacatagacccaactggaaaagatcctgatccggctgtgacagagccaaatttatccaaggatcctgagccgactggcgcccatgcttcgggtgataaggccgatccgagtgaccagccgccgactggaaaccagtcggcagcagctgaaactgcaacaacccaagagcccccgactggaaaccagtcggatgtaggtctcgatcaagaaatccccgaagttgaagcgcagacgacaacttctcaaggaccagaggctggtaacgactcgatgattgggtctccaaataaagaacaaggatcacctcacgctcagctaggaacatcctcaggaccaccaggcgatgatgaagaagagattcctcgcataaaagcggctgatgactctcgtcctccgatcttgctcaaatggtgggatgaaaactcacaagctgccggcatcgtcataaatcgtcaaaaagaggatgaggaagtgtgccagctgaagaaggcacttggagaagccactcgcatcgtgaatagaatccatcttcgtaatgaggccaagaccgcaactttagaaaagctggttcctcatttgggaactcttgaagcagttagggaccagctacacgaggccaaggagctcgccaaaaagacagagaaggaattaagggaccgaattgcccagctccaggattcaaactacgagctgagtggttcatcaaaagcgcatgccgccaggatggctcaaatggagaaacaaattgaagccctggaaagagacaaggtagaactggctgcgcaaagggactcggccttgaaggaggttgaagaccgcaaaatcaaatctcaagctcaattcgacgtcctggttggtaagatcaagaggcttgaaggagcaagagatgaagtcgctaatgtcgctgccccactcgtccaagctatgttcctcaataacagtggtccgagtgcactcgacgcaaccgaaattttcgacaagctgagagttgctccggatgtatatttcaagaacatcaagaaagctggaagtatgggagctagcatggcattggcgatgaccaaatccttgtacccgaggattgaaattgacgccattgatggctttgcagacgggacaagcgaagaggctgctcttgatcttatcagcaatgctcaaaacgcggctgacaagattgcaagtgacgttgtagatcaattccgcaatactgaccttcagccgagtagtaacaactctgatgatgaaaagactgattctgagtga

SEQ ID NO: 30256 - DNA, 444 bp, Oryza sativa
  Clone ID: PAT_MRT4530_34679C.1
cgatgaagcaggcaaagtcgatgctttggttctagatggtctaaaacaaattagccggtcacccatgtgcaagatggagtgacctgattcgtggcccagctttcgaggtgacgtgtcgatattgttgctgctgacgtggaagcctttttcggtttgtggctacagcgagctggcagtgctgtcactgtcgcgtgggtcccccggtcatcgcttggcccatgtgagccgtgccacgtcagctatatccacccgcgaccgccaacagattttcattgaatcgtcattttcctgtttcttttttcttctactgataatggaaatggactactagtatatctgtagcttctgctttaattatttttctttttcagtgatgctgtattatattgtgcctggatggaaatggtgaaatatgtttgcgttgtaaaaaaaaaaaaaaaaaaa

SEQ ID NO: 30257 - DNA, 3617 bp, Oryza sativa
  Clone ID: PAT_MRT4530_3467C.1
atggaggcgaatgactggctccatgacatagagaagaaactgaatctcctgcagtgcaatgatcaggagaaggttgctttcgccacacaccagcttcaaggtcctgcgtcagcttggtgggacaatcacatggccacccgcccgccaggcactgaagtcacttgggcggagttctgtcgtagcttcaggaaggcgcaggtgccagacggggtcgtggcacaaaagaagagggaatttcgggcactccatcagggcaacaggactgtgacagagtatctccatgagttcaatcgcctcgcgcgatatgcaccagaggatgtccgcaccgacgccgagaagcagaaaaagttcatggcaggtctggatgacgagctgaccaaccaactgatatctggggactacgcggattttgaaaggctggtggacaaggcaatccgtcaggaggatcagcgaaacaaaatggataggaagagaaaggcggcacagttccggtccaaccaaggaaaccatcagcgaccgcgcttcgctcccgggcagcagggtggacctaccaccatgatcgtccgccagtaccgcccgttcaaccctagcaacttccaccagggcgccagtggcagtcagaaccaccatggaggtcagcccaaccgcggtgcagctccacgcctaccagtggcaccggcacagtcaggcccgtccgcgcaagccaagaaggagactggaacaaaaccagggtcctgcttcaactgtggcgagcttggccacttcgctgacaaatgcccaaagcccaggtgtgccgggccaaggtttgtccaggctcgtgtcagccacgcgtctgcagaggaggcgcaagcagcaccagaggtcgtactgggtacatttcctgttaactcaatccctgcaacagtactttttgattctggtgcaacgcattctttcatttcaaagaaatttgtggggatgcatgggttaaggaaagaagagcttaatacaccaatgagggttcataccccgggaaatagttcaacctcggtcagttttagcccttcagtgctaatagaaatccaaagatcaccatttctagccaacctcattcttcttgaatccaaagacctagatgtcattcttgggatggattggctgaccaagttcaagggagtcattaattgtgcgaatcgcatagtcaccttgaccaacgagaagggagaaaccgcagtgtacaaatcactagtctcaccaaagcaaggggtcgccttgaatcagatggaggcggaaatcccagtggtcaccgaggagaagaatccgaggaaattggaagagattcccatagtttgcgagtacccagaagtctttcccgaagacctcactaccatgccacccaagcgagagattgaattccgaattgatttggcaccgggaaccgcgccaatttacaagagaccgtacaggatggcggccaacgagctagcagaggtcaagaagcaagttgatgagcagctgcagaaagggtacattcgaccaagtacttcaccttggggtgctccggtcatttttgtggagaaaaaggataagacaaagaggatgtgcgttgattatcgcgcactcaatgaggtcacaatcaagaataaatatcctttaccgcggatcgatgatttgtttgatcaactgaagggagctaaggtgttctctaagatagacatgagatcaggctatcaccagttgagaattcgggaagaggatatttcaaagacggccttcaccactcggtacgggctatatgagtgcacggttatgtctttcggacttaccaacgcacccgcattcttcatgaatttaatgaacaaagtgttcatggaatttctggacaagtttgttgtggtattcatcgacgacatacttatctatccaaagtctgaagaagaacatgagcagcatctccatttggtactcgagaagttgaaggagcaccagttatacgccaagttcagcaagtgtgatttttggttgacggaagtcaaatttctgggccatgttattacagctcaagttcagcaaactgagccacaaactaagccttacccactagacatgtggaagtacggtagtgctttgcaacagaggcccgagcttaatccttatagtacccgagctcagggtgtggcagttgatccatcgaacgtggagtcagttaccaaatggaccccaccgaagaccgtgtcacagattcgaagttttcttggacttgtaggttattaccgccgattcatcgaaaacttctccaggatcgcccgacccatgactcaattgcttaagaaagatgagaagtttaaatggacagctgagtgcgacaagagttttgaggagctcaaaaagaaattagtatccgcaccagttttgattctgcccgaccagatgaaagacttccaagtctattgcgatgcatcccgccacggacttggatgtgtcctaatgcaagagggcagagtggttgcgtatgcctcgcgacagttgcgtccacacgaagggaattatccaactcatgacctggaattggcagcagtggttcatgctttgaagatccggaggcactatctgattggcaaccgctgcgaagtatatatggaccataagagtctgaaatacatcttcacccaaccggacctaaatctccgacaacgaagatggttggaattaatcaaagactatgatatgagcattcactaccacccggagaaagccaatgtggtagcagacgcattaagcaggaagagttactgcactgccctaggcatcgagggcatgtgtgaggaattgcggcaggagcttgagcgtctcaacgtgggaattgttgaacacggattcgtagccgctctggaagcacggcctacgctcgcggatcaagtcagagcggctcaagtaaatgatcctgaaatagcagagctgaaaaagaatatgagagtcagaaaagcccgggattttcatgaagatgaacacggcacaatttggttgggagaaagattgtgtgtacctgacgacaaggaactgaaagatctgatactcaccgaggctcatcagactcagtactccattcatccaggcagcaccaaaatgtatcaagacctcaaagaaaagttttggtgggtcagcatgaggagagaaatagctgaattcgtcgcactctgcgatgtttgccaacgagtgaaggcagagcaccaaagaccagtaggtttactccaacctcttcaaatcccggaatggaaatgggaggagattggaatggactttataacaggactgccccggacatcatcgggtcacgattcaatctctgtcgtgaatgttaccctacttccttttgcaccatttgttgaagtacgaaggtctacatttggcattggcacttcgacatcagtgtcctcgaacatcatgtgcacaaagggatcacctctacttgtcattgcaatctagtcactgcaataaatatataaattgacaacctttccaatcgatctcagaaacatcaacaaatgattgtaattgctcaaacaaatatgaaaacaaggtacatcgatttgcactattgaattcctattaactatgctatagcttatattcagaat

SEQ ID NO: 30258 - DNA, 2544 bp, Oryza sativa
  Clone ID: PAT_MRT4530_34680C.1
atggcggaagagaaagagagcttcgaaggccaatgggcgccatccgacgtgacggaggagaacctgaaggagatggtggcgcacggcgttctccctgccaaggagatcatcgggtggcggccagcgtgcggtgaggcttttccgtcccccgatacacacgaggtcgtagttttttctcatttcttctatggcggcttcgctcttccgacctcgaaatttttccgcggaatattaaacttctatggaatcagcttgcatcacctaaacccaaattccatagtccatatcgccaatttcgtccatgtttgtgaagccttcttgggaattaaaccctacttcgctctgttccgccggatcttttttctcaagccccaaccgaacaagaataagccatgtgtagtcggaggggcaggatttcagttgaggggaaccctgagccagaaatacttctctatgcccttcaagacctcaaacaaagggtggcatgcgaactggttttatgttcagaatcctgagcctgctcttcccgagtactcttgtcttcctccggtgtaccaagatacttggaactctcttccgatcggggatgaagctgctcaagctttggaattgatggatcgcatgttaaaactcaaagaacaaggcttacaaggagagcagatcactcggcacttcataaaatgccgattggcaccaatcaaagagagatcccgtacagcattcgagtttgacggcaagcatgatcccaatcgtgaagaaccagactctctggactttaaaatcatgaaggagaggatgtataaaatcttctcaaatgctattgtcgtcagctactcacatcagctgccggttgtgccatataacgcattcaatccgcctccacaggaatatgtattgatgaaatctgatcccccaatcgctcagcaccggtctcctcgccaacacactgttcagggaggtggaggaccaacaatcagattagatccacaccctcaaatctccaatccaactggacagacaggttctcgcaagagaaaactggtgcttgacaacgatgaaggcgatgacaacaaatctgaggacaagggctcgcctaataaacccccaaagcgtaccatgcccagaaaaaaactggctggccgtccaatgccaaagatcagaacatcttccaggtataaacctcttggtaccatttcccttcgacatgcttctctaatagaaataatactgaatattgaaagaacaccttgcaggaaaccatccgacatagatccaactggaaaagatcctgatcaagctgcaacagagccaaatttatccaaggatcccgagccgactaccgaaagccagccgactgacgcccatgcttcaggtgacaaggacgatccgagtgaccagccgccgactggaaaccagtcggcagcagctgaaactgcaacaacacaagagcccccgactggaaaccagtcggatgcaggtcccgaccaagaaatccccgaagttgaaacgcagacgacaacttctcaaggaccagaggctggtaacgacccgataattgggtctccaaataaagaacaaagatcacctcacgctcagctaggaacatcctcaggggcaccaggcgatgacgaagaagcaattcctcgcataaaggcggctgatgactctcgtcctcctatcttgctcaaatggtgggacgagaactcacaagttgccggtatcgtcataaatcgtcaaaaagaagatgaagaagtgtgccagctgaagaaagtacttggagaagccactcgcatcgtgaatagaatccatcttcgcaatgaggccaagactacaactttggaaaagctggttcctcatttgggaacccttgaagcagttagggaccagctacatgaggccaaggagcacgccaaaaagacggaaaaagaattaagggagcgaattgctcaactccaggattcaaatttcgagctgagtggttcatcaaaagcgcaagccgccaggatggctcaaatggagaaacaaattgaagccttgaaaaaagacaaaatagaactggctgcacaaagggactcggccttgaaggaggttgaagaccgtaaaatcaaatctcaagctcagtttgacgtcctggttggtaagatcaagaggcttgaaggagcaagagatgaagtcgccaatgtcgctacaccactcgtccaagctatgttccttaataacagtggtccgagtgcacttgacgcaaccgaaatctttgacaagctgagagttgcaccggatgtatacttcaagaatatcaagaaagctggaagtatgggagctagcatggcattggcgatgaccaaatccttgtacccgagaattgaaattgacaccattgatggctttgcagacgggacaagcgaagaagctgctcttgatcttatcagtagtgctcaaaatgcggctgacaagattgcaagtgacgttgtagagcaattccgcaacaacgaccttcagccaagcaacaataactctgatgatgaaaggactgattctgactga

SEQ ID NO: 30259 - DNA, 2560 bp, Oryza sativa
  Clone ID: PAT_MRT4530_34681C.1
atggcggaagagaaagaaagctttgaaggccagtgggcgccgtccgacgtaacagaagagaacctgaaggagatggtggcgcacggcgttctccctgccaaggagatcatcgggtggcggccagcgtgcggtgagatttttccgacccccgatacacacgagattgtggtcttctctcatttcttctatggcggcttcgctcttccgacctcgaaatttttccgcgggatattaagtttctatggaatcagtttgcatcacctaaacccaaattccatagtccatatcgccaatttcgtccatgtttgtgaagccttcttgggaattaaaccccatttcgctctgttccgccgaatcttttttctcaagccccaaccgaacaagaataagccatgtgtagtcggaggggcaggatttcagttgaggggaactctgagccagaagtatttctctatgcccttcaagacctcaaacaaagggtggcatgcgaactggttttatgttcagaatcctgagcctgctcttcccgagtactcttgtcttcctccggtgtaccaagatacttggaactctcttcctatcggagataaagctgctcaagccttggaattgatggaccgcatgctaaaactcaaagaacaaggcttgcaaggagagcagattactcggcatttcatcaaatgccgactggcaccaattaaagaaagatcccgtacagcgttcgagttcgacggcaagcatgatcccaatcgtgaagaaccagactctctggactttaaaatcatgaaggagagaatgtataaaattttctcaaatgctattgtcgtcagctactcgcatcagctgccagttgtgccatataatgcattcaatccgcctccgcaggaatatgcgttgatgaaatctgatcccccaatcactcagcgccggtcgcctcgtcagcacaccgttcagggaggtggagggccaaaaatcagaccagatccgcaacctcaaacctccaatccaactggacagacaggttctcgcaagagaaaactggtgctcgacaacgatgaaggcgacgacgataaatctggggacaagggctcgcctaataaactcccaaagcgtaccatgcccaagaaaaaactggctggccgtcaaatgccaaagattagaacattttctaggtataaacctctcggtaccatttcccttcgacatgcttctctcatagaaattatactgaatatcgaaagaacactttgcaggaaaccatccgacatagatcccactgggaaagattctgatccgactgtgacagaaccaaatttatccaaggatcctgagccaactgccgaaagccagccgactgccgaaagccagccaaccggcgcccatgctttgggtgataaggccaatccgagtgaccggccgccaactggagaccagtcggcaacagctgaaactgcaacaacacaagagcccccgactggaaaccagtcgaatgtaggtcccgatgaagaaatccctgaagttgaagcgcagacgacaacttcccaaggaccagaggctggtaaagactcaatgattgggtctctaaataaagaacaaggatcaccctcatgttcagccaggaacatcctcaggaacactaggcgatgacgaagaagcaattcctcgcataaaggcggctgatgactcccgtcctcctatcttgctcaaatggtgggacgagaactcgcaagttgccggcatcgtcataaatcgtcaaaaagaagatgaggaagtgtgccagctgaagaaagcacttggagaagccactcgcattgtgaatagaatccatcttcgcaatgaggccaagactacaactttggaaaggctggttcctcatttgggaactcttgaagcagttagggaccagctgcatgaggccaaggagtacgccaaaaagacagagaaggagttaagggaccgaattgcccagctccaggattcaaacttcgagctaagtggttcatcaaaagcgcaagctaccaggatggctcaaatggagaaacagattgaagccctgaaaagagacaaagtagaactagctgcgcaaagggactcggccttgaaagaggttgaagaccgtaaagtcaaatctcaagctcagtttgacgtcctggttggtaagattaagaggcttgaaggagcaagagatgaagtcgccaatgtcgctacaccacttgtccaagctatgttccttaataacaatggtccaagtgcacttgacgcaaccgaaatttttgacaagctgagagttgcaccggatgtatacttcaagaatatcaagaaagctggaagtatgggagctagcatggcattggcgatgaccaaatccttgtacccgagaattgaaattgacaccattgatggctttgcagacgggacaagcgaagaggctgctcttgatcttatcagtaatgctcaaagtgcggctgacaagattgcaagtgatgttgtagatcaattccgcaacaacgaccttcagccgagcaacaataactctgatgatgaaagaactgattctgac

SEQ ID NO: 30260 - DNA, 2499 bp, Oryza sativa
  Clone ID: PAT_MRT4530_34682C.1
atggcggaagagaaagaaagctttgaaggccaatgggcgccatccgacgtgacggaggagaacctgaaggagatggtggcgcacggcgttctccctgccaaggagatcatcgggtggcggccagcgtgcggtgaggcttttccgtcccccgatacacacgaggttgtagttttctcccatttcttctatggcggctttgctcttccgacctcgaaatttttccgcgggatattaaacttctatgaaatcagcttgcatcacctaaacccaaattccatagtccacatcgccaatttcgtccatgtttgtgaagccttcttgggaattaaaccccacttcgctctgttccgccgaatcttttttcttaagccccagccgaacaagagtaagccgtgtgtagtcggaggggcaggatttcagctgagggggacgctgagccagaagtatttctccatgcccttcaagacctcaaacaaaggatggcatgcaaactggttttatgttcagaatcctgagcctgctcttcccgagtactcttgtcttcctccagtgtatcaagatacttggaactctcttccaatcggggatgaagctgcccaagccttgaagttgatggatcgcatgctaaaactcaaagaacaaggcttacagggagagcagattactcggcatttcatcaaatgccggttggcaccaattaaagaaagatcccgtacagcattcgagtttgacggcaagcatgaccccaatcgtgaagaaccagactctctggattttaaaatcatgaaggagagaatgtataaaatcttctcaaatgctattgtcgtcagctactcacatcagctgccagttgtgccatataacgcattcaatccgcctccgcaggaatatgtattgatgaaatctgatcccccaatcactcagcgccggtctcctcgccagcacaccgttcagggaagtggagggccaacaatcagaccagatccacaacctcaaacctccaatccgactggacagacaggttttcgcaagagaaaactggtgctcgacaacgatgaaggcgacgacaacaaatctggggacaagggctcgcctaataaactcccaaagcgtaccatgcccaagaaaaaactggctggccgtcaaatgccaaagattagaacatcttccaggaaaccatccgacatagatccaactggaaaagatcctgatccggctgcgacagagccaaatttatccaaagatgctgagccgactgccgaaagccagccgactgccgaaagccagccaactgccgaaagccagccgactggcgcccatgcttcggatgacaaggccaatccgagtgaccagccgccgactggaaaccagtcggcagcaactgaaactgcaacaacccaagagcccccgactggaaaccagtcggatgtaggtctaaatcaagagattcctgaagctgaagcgcaggcgacaacttctcaaggaccagaggctggtaatgactcggtgattgggtctccggataaagagcaaggatcacctcacgctcagctaggcacatcctcaggtccattaggcggcgacgaagaagaaattctccgcataaaggctgctaatgactctcgtcctcctatcttactcaaatggtgggacgagaactctcaagtttccggcatcgtcataaatcgccaaaaagaagatgaggaagtgtgccagctgaagaaagcacttggagaagctactcgcattgtgaatagaatccatcttcgcaatgaggccaagaccacaaccttagaaaagttggttcctcatttgggaactcttgaagccgttaggggccagctacacgaggccaaggagcatgccaagaaaacggagaaagagttaagggaccgaatcgctcaactccaggattcaaactacgagctgagtggttcatcaaaagcgcaagccgccaggatggctcaaatggagaagcaaattgaagccctggagagagacaaggtagaactggctgcgcaaagggactcggccttaaaggaagttgaagaccgcaaaatcaaatcccaagctcaattcgacgtcctggttggtaagatcaagaggcttgaaggagcaagagatgaagtcgccaatgtcgctacaccactcgtccaagccatgttcctcaataacagtggtccgagtgcactcgacgcaaccgaaatctttgacaagctgagagttgctccggatgtgtatttcaagaacatcaagaaagctgggagtatgggagctagtatggcattagcgatgaccaaatccttgtacccgaggattgaaattgactccattgatggctttgcagacgggacaagcgaagaagcagctcttgatcttatcagtaatgctcaaaatgcggctgacaagattgcaagtgacgttgtagatcaattccgcaacaacgaccttcagccgagcaacaataactctgacgatgaaagaactgattctgactga

SEQ ID NO: 30261 - DNA, 526 bp, Oryza sativa
  Clone ID: PAT_MRT4530_34683C.1
ccccgggctgcaggtttgcatcggcgggagtgccaggttttgtccgtacctcgcaccccgagagcgtgcagcgctccacgtgctgctgctaacgcacgtgtggacgagaagcaaacacccaaacacccaactaccaccgcgcacacagcacagcatgccggcgtggcccgccgccgccgtcgccaaggccgtcccgtccccgtccacgccgccgccgccgcactcgcgcggagcaggccgccgtcgcctccgcccgtgcggcgcaaagaagggccccgggaccgacgagcgaggcgccaccgccggcggcggcggcgtggtcaccaggggcgccctcctgcggtccggcgccgctctcttcgcgctcggcttcgtcgacgccgggtacagcggcgactggtcacgcatcggcgccatctccaaggacaccgaggaggcgctcaagctggccgcctacgccgtcgtgcctctctgcctcgccgtcgtgttctcgccatcgtcggaagacggcagtaacaacacctga

SEQ ID NO: 30262 - DNA, 2034 bp, Oryza sativa
  Clone ID: PAT_MRT4530_34684C.1
atggcgtcactcaccggcgcacgacggggatgggtctccggcggcgaacctcaacggggaaggggcggacgagggttttctcctgatttcacctgcattttcttggggtcatttgaaaattacaattttggcttgggaggaaaacttcggggtgtgacagctgcccaagccttggagttgatggatcgcatgctaaaactcaaagaacaaggcttacaaggagagcagattactcggcattttatcaaatgccgattggcaccaattaaagaaagatcccgtacggcattcgagtttgacggcaagcatgatcctaatcgtgaagaaccagactctctggattttaaaatcttgaaggagagaatgtataaaatcttctcaaacgctattgtcgtcagctactcacatcagctgccagttgtgccatataacgcattcaatccgcctccgcaggaatatgtattgatgaagtctgaccccccaatcactcagcgccggtctcctcgccaacacaccgttcagggaggtggagggccaacaatcagatcagatccgcaacctcaaacctccaatccgactggacagacaggttctcgcaagagaaagctggtgcttaacgacgacgaaggcgacgacggcaacaaatctgggaacaaagacttgcccaaaaaactcccaaagcataccactcccaggaaaaaactggctggccgcccaatgccaaagattagaacatcttccaggaaaccatccgacatagatccaactggaaaagatcttgatccggctgtgacagagccaagttcatccaaggattctgagccgactgccgagagccagccgactggcgcccatacttcaggtgataaagccaatccgagtgaccagcctccaactggaaaccagtcggcagcaactgaaactacgacaactcaagagcccccgactggaaaccagtcggatgtaggtccagatcaagaaattcccgaagttgaagcgcagacgacgacttctcaaggacctgaggctggtaacgactcgatgattgggtctccaaataaagaacaaggatcacctcacgctcagctaggaacaccctcaggaccaccaggcgatgacgaagaagaaattccccgcataaaggcggctgacgactctcgccctcctatcttactcaaatggtgggacgagaactcacaagctgccggcatcgtcataaatcgtcaaaaagaagatgaggaagtgtgccagctgaagaaggcgcttggagaagccactcgtattgtgaatagaatccatcttcgcaatgaggccaagaccgcaactttagaaaagctggttcctcatttgggaactcttgaagcagttagggaccagctacatgaggccaaggagcttgccaaaaagacagagaaggaattaagggaccgaattgctcagctccaggattcaaacttcgagctgagtggttcatcaaaagcgcaagccaccaggatggctcaaatggagaaacaaattgaagccttgaaaagagacaaagtagaactggctgcgcaaagggactcggccttgaaggaggttgaagaccgcaaaatcaaatctcaagctcaatttgacgtcctggttggtaagatcaagaggcttgaaggagcaagagatgaagttgctaatgtcgctacaccacttgtccaagctatgttcctcaataacagtggtccgagtgcactcgacgcaaccgaaatcttcgacaagctgagagttgctccggatgtatatttcaagaatatcaagaaagctggaagtatgggagctagcatggcattggcgatgaccaaatccttgtacccaaggattgaaattgacgccattgatggctttgcagacgggacaagcgaagaagctgctcttgatcttatcagcaatgctcaaaacgcggctgacaagattgcaaatgacgttgtagaacaattccgcaataccgaccttcagccgagtagtaacaattctgatgatgaaaagactgattctgactga

SEQ ID NO: 30263 - DNA, 1161 bp, Oryza sativa
  Clone ID: PAT_MRT4530_34685C.1
gcacgaggccgcttcactccctgtcggcgaccagccgactttccccaatgccggcgccgcccgccgcttcctggcgccggcacgctgctgccgccgccgcctcctcctccacgcgcaaaaccctcctcctcctcctccccgtcttcctcctcctcctcctcttcgtcctctccagggctcctgatctcaccctctcccccgcggccgcctcctcccgccacctctccgccggggttcgcccgttcgattgctacgcgtcgcagcaggcctcgccggtcttcgccagcctggtggagggcgtgccccaccccttcttctactccctcgccgacatgggggctcttcccgaccacccccacaagaacatcgctcgcatcctcaagggcaagcgcttccgcaagcccgacatctccgagacaatccagcagctgctcggggggaaggtggggatcggatcccgtggtgtggtggtcgacgtgggtgccaatgttgggatggcgtcgttcgccgcggccgtgatggggttccgggtggtggccttcgagcccgtcttggagaatctgcagaggatttgcgatggggtgtatctcaacagggtgcaggaccaggttgtggtgtaccatgccgcggcttctgatcgagttgggaacatcacaatgcataaggtgattggacgactcgacaacagtgctatatctgcaaccggtgcaaaattggcttttaaagcaaatgaagaaattgctgttgaggttgctacaataccactggatgaagtcattctagatgcagagcgagtggttttgatcaaaattgatgttcaggggtgggaataccatgttctgagaggtgcatcaaagttgctttcaaggaggaaaggtgatgctccctaccttatatatgaagaagatgaacgcctactgcaggcaagcaacagtagtgcacgagagataagggcatttcttagtagtgttggttacaatcactgtacacgtcatggcacagatgctcactgcacgaaaaactaggcatgtgctttttattcatgtaagttgatgatcatctatgaacagagaaacattcatatatgatgtgctgatctgtagaaaagcattttccctctcaggcagcactttcatgaataaaaatagttagtcaactttt

SEQ ID NO: 30264 - DNA, 2373 bp, Oryza sativa
  Clone ID: PAT_MRT4530_34686C.1
atggcggaagagaaggaaagcttcgaaggccaatgggcggcgtccgacgtaacggaagagaacctgaaggagatggtggcgcacggcgttctcccagccaaggagatcatcgggtggcggccagcgtgcggtgaggcttttccgacccccgatacacatgagatcgtagtcttctcgcatttcttctatggcggcttcgctcttccgacctcgaaatttttccgcgggattttaaacttttatggaatcagcttgcatcacctaaacccaaattccatagtccatatcgccaatttcatccatgtttgtgaagcctttttgggaatcagaccccacttcgctctgtttcgccggatcttctttctcaagccccaaccgaacaagagcaagccatgcgtagtcggaggggcaggatttcagctaaggggaactctgagccagaagtatttctctatgcccttcaagacctcaaacaaggggtggcatgcgaactggttttatgttcagaatcctgagcctgctcttcccgagtactcctgtcttcctccggtgtaccaggatacctggaactctcttccgattggagatgaagcggcccaagccttggagttgatggaacgcatgctaaaactcaaagaacaaggcttgcagggagagcaaatcactcggcatttcattaagtgccgattggctcccatcaaagaaagatcccgcacagcttttgaatttgacggcaagcacgatccaaaccgtgaagacccagattctctggattttaagatcatgaaggagaggatgtacaagatattctcgaatgctattgtcgtcagctactcacaccagctgccagttgtgccatataacgcattcaatccgcctccgcaggaatatgcattgataaagtctgatcccccaatcactcagcgccggtcacctcgtcagcacaccgttcaaggaagtggagggccgacaatcaggtcagacccacaacctcaaacctccaaaccggctgggaagacaggtcctcgtaagagaaagctggtgcttaatgatgatgagggcgatgacagcaacaaatctgaggacaagggcactcccaacaaactcccaaagcataccatgcccaggaaaaaactggctggccgtcaaattccaaagattagaacatcttccaggaaaccatccgacatagatccaactggaaaagatcctgatccggctgtgacagaaccaaattcatccaaagacgctgagccgactgtcgaaaaccagccgactgccgaaagccagccgactggtgcccatgcttcggatgacaaggccgatccgagtgaccagccgccgtctggaaaccagtcggaagcaactgaaactgcaacaaccagagagcccccgactggaaaccagtcggatgtagatctaaaggaccaaaatcaaggatgtccaccaggcggcgacgaagaagaaattctccgcataaaggtagctagtgactcccgtcctcctatcttgctcaaatggtgggacgagaactcgcaagttgccggcatcgttataaatcgtcaaaaagaagatgaggaagtgtgccagctgaagaaagcacttggagaagccacttgcattgtaaatagaatccatcttcgcaatgaggccaagactacaactttggaaaagctggttcctcatttgggaactcttgaagcagttagggaccagctgcatgaggccaaggagtacgccaaaaagacagagaaggagttaagggaccgaattgcccagctccaggattcaaacttcgagctgagtggttcatcaaaagcacaagctaccaggatggcacaaatggagaaacagattgaagccttgaaagaagacaaggtagaacttgctgcggaaagggactcagccttgaaggaggttgaagaccgtaaaatcaaatctcaagctcagtttgatgtcctggttggtaagatcaagaagcttgaaggagcaatagacgaagtcgccaatgtcgctacaccacttgtccaagctatgttccttaatgacagtggtccgagtgcatttgacgcaaccgaaatctttgacaagctgagagtagcaccggatgtatacttcaagaatatcaagaaagctggaagtatgggagctagtatggcattggcgatgaccaaatccttgtacccgaggattgaaattgacgccattgatggctttgcagacgggacaagcgaagaagctgctcttgatcttatcagtaatgctcaaagtgcggctgacaagattgcaagtgatgttgtagagcaattccgcaacaacgaccttcagccgagcaataataactctgatgatgaaagaactgattctgactga

SEQ ID NO: 30265 - DNA, 349 bp, Oryza sativa
  Clone ID: PAT_MRT4530_34687C.1
atggccgcctcgtcgtacgacggggtggtggcgctgtggctgctctggtactacgacgaggaggcatgggaatgcgggcatcggtacggagtttacaacctcaggaggggcgaggtggtggccgccggcagggagctcggcggcggcgacgacgtcatcctcgcgacgcagtatgtttaccaggagagcttcgcttctccagtggcccggagaggcgtcggcgacggcgctccgtcgccgcgaggagaactggccgccggcgccggcgaggcgtcctcttcgagcttgatcagaaattctccaggattttatggagttctaatcttttctttactttctttaaaatatg

SEQ ID NO: 30266 - DNA, 761 bp, Oryza sativa
  Clone ID: PAT_MRT4530_34688C.1
ttttttttttttttttttttttttgaacttttttttttttttttggtacaacaacttattctacatttctgctccttcatatgtgtatatgtctactatctgcaatacaggtatcagagggcagcagcagtacatctgctcacaagccctgaaaacaggttgacaaatctatatgtatgtaaatatgcatacatgatacacatgtatatgcacttattggacagctgtatctttctatcaactcaaccaaaaatgtgcatctccgcggctgatgatcatcctatcttatttccaccagtatatagacgagaatgctttcttgagggaacattatagatcagagttgattgcgaaaccgggaaataggcacggcccgagcgtcccgtcaatcaagcgttgccattgacggctttgtagcatttcaggctgcagagagggagattcagcttggagtccctataccggtatgcgttcgtgcatgatggtccggcacatttctctcgcgggggagggtagttgcaaggcttggagttgaagatgctgggaaggcctacttcttccgggaatgaaaccacggtgccctttgggcccatgacccacctgatggtgttttcaggaatagtttgtgctctggctgctctctcctggaagggggaagtaagagtctagttcagaagctagtagcatcaagatacattgataagggtactattattgataagggtactaaaacgcattagagaaaataagggtacaaaaac

SEQ ID NO: 30267 - DNA, 662 bp, Oryza sativa
  Clone ID: PAT_MRT4530_34689C.1
ccacgcgtccggttgggaggagcatcgacatggaatggcgcaaggctgaggaggccgcacgtccaagatatgaagcagccaactggttgcgaagggtagttggggtggtgtgtggaaaggaccttgcagaagagccctccgaggaggaattccggcttggcctgaggaatggcattgttctttgcaatgcactcaataaggttcaacctggtagcgtgcccaaggttgtggaggccccctcggactctgcagatggtgcagctctctgtgcatatcagtacttcgagaatgtgaggaatttcctcatgggcctacaagatttgggtctcccaacatttgaggcatccgatctagaaaagggtggaaaaggagttcgagttgtagactgtgttctttctctgaggtcattcagtgaaagtaagcaagtaggaagatcagctccattaaaatatggtggcattctaaagccttcaatgtctggaaagcacttcatccgcaagaactctgagccttttgtgaagacgatggtgagaagctactcagcagagttactcagagatggcgtatcactagagcaaagcttaggtcttgatttttcactagagcatgtggaaagaactactccagactccatcagaatggcttgtccaaacaatgctctc

SEQ ID NO: 30268 - DNA, 196 bp, Oryza sativa
  Clone ID: PAT_MRT4530_3468C.1
gcgtccgggcgaacgcgcgggtcggcggggcagcagcgcggcggcgcgacgcggtggcagcagcacggcgcagcaaccggcactggctaaatagcgccgggagcaaggcagagacagccaccatacagggactgaaggcaggcagaggcaggcaacaagctatagaggagaggaagaggagattaggaatgttgtg

SEQ ID NO: 30269 - DNA, 627 bp, Oryza sativa
  Clone ID: PAT_MRT4530_34690C.1
atggcgaggtcgccgtcgaggtcggagggtggcgcagaggacggtggaaccgggggcgggggccgcggtggtgaggtgcgcgccctcctcctcgaacccgtcgccgtcgccgtcgtcttcgatgacggagacgacggcgggagaggaagcaaagggagccgggcggaaaggacacgcgagcggcggcaagccggagagcaacaggcgattgtggtggcgcttatcccacgcttgtcccatagccctcgctcgttgcacgagttcctctcgcagatgcggcacggcgaggcggagggtgcgcgaccgctcgccgctagggtttggggcaagttgggcgatagggatgaggaggaaggaggaagggatgagggagtgattctcaggttgcttgtttcttcaccgattctcagcttttatccaatatgcaatggcatgaaccaactaatactgggaatcaagctggatgatggatctgttggttctgaacttctctttgcggattcagaacaatggaagtccataaaaaggaagaagggacaacaaacatgtgtacaaaaagataataaagtattggctcagtacgggattgcttgtgatgtaaacattgaaaatctagagctagcataa

SEQ ID NO: 30270 - DNA, 671 bp, Oryza sativa
  Clone ID: PAT_MRT4530_34691C.1
agagaatgctgggcactatgttctgattgctaacatgtatgcagctgctggttgctgggatgaactagcaacagtcaggaaactaatgcgtgacttaggtgtcacaaaagcacctgggttagcatggactgatcttggcaatgggttcaccccttttttagttggagatagatcaaaccctctagcaccggagatctatgtggttttagatgaattatctgagcaaatgaggaatatcaataattgcagtgatctagacatattagcggaaaacatagaataaacaggtaatgataggacgtgaaggaaatgttcttgctttttgtgtagtagagatcacaatgaactccaaaaatgagatggtgcagtgagtcacaaagatccaaaaaatgaagcagcagcacatagatatatggatcaattctggagaaaattgctacaaaatggacactgcaacatatgtaggtttctaactgatatgtcaattgcttgcattgccttttgaaactgcaaaataatgtgctcaagtcaattgcccacaagacacttacttttcttggctagtgatacatcttagacaccatcttgaagcacatttgattttacatcaatgtggttattggtttcccttcgttatacacaataatatgccgttgtcacaaaaaaaaaca

SEQ ID NO: 30271 - DNA, 431 bp, Oryza sativa
  Clone ID: PAT_MRT4530_34692C.1
tctttctgaatttctttctccccaaaccaaacgaggctttgacttacccatgcgtgtcgtgaaattcggagcaaggaagaacaaggcgccgcgccggatttagccccgcccccctctccggagtatcccccctcctctcctctggtcggttcttgcggtgaatcccccgctgatttgtcctgtcaattcttgtgagattatttttctttttttttttggggcggttggcttgggatttggattggcggggagtttttctgatctgtgtggtcgtgtgagcggtgactactacaagcaccgcggtgcactaacttattttaggagcgtgttccacccggggagcaacctcgccaccaagagcctcggtgccaacctattaaaccgcccctagaccaactcctccaccgtctacaactgggtgtacagcgacg

SEQ ID NO: 30272 - DNA, 157 bp, Oryza sativa
  Clone ID: PAT_MRT4530_34693C.1
atggcgtggaggggcgtcagccgcggccggggacaccggatccgtgacgacagctgccgcgacgcggacgcgagagcgttgcgttgggggggaggtggatggatggaatggatcggtccggtgatgatgggctgcggggccgcgaccagcggacacg

SEQ ID NO: 30273 - DNA, 173 bp, Oryza sativa
  Clone ID: PAT_MRT4530_34694C.1
ccgtgcacgcgcgcggcccccccccgtccccgttgcattgctgcccatttcctgtgctgccttccccctcggcatcgcggcctctggcgttggtgtgtacacgacatcgggagaatccctgccggtaacgattgcaccggtcacgggccccaggcttccgcgccccgcaccat

SEQ ID NO: 30274 - DNA, 684 bp, Oryza sativa
  Clone ID: PAT_MRT4530_34695C.1
atgagtgctaaatgccagtccaatgggatagttcccttgaaaaagtggccaagcatagatgaattgactgctgtttccatcataggacttggagcaccccatttgggccatgctattgtaatttggaaaaaagctatgatatgcataggaccccgaatcattttcgttctaggtttgccactagacgggagggtggaggaggaggacggctggcgttgtaggcggcaccgcatctcttgggagagagttgatggcagcggccgacaggagaggtgcgtggtgactggcgaggagaagctcgaggaccggcggacgcatcctcgcccacctcaactcccaccagccgctcacgcacttcgcctctctcgaggagaaccttgtctcccactccgcattgctcgacaaggccttagccgccgcgacacctacacctccgagtccctcgtggtgttggaggcccatgaggccgctgtccccgcgtgcctcgacaagactgaggccgtgttgtccacggatcccccgctcactgattttcagggcacactccaaattgatgtgtggtttcatggacgccgccgcgcaggcgcttcatggcggcatgccaacgggagctcgtcgccgtttggaaagaggttggtccctcattgtcaccacgtcggtcgacccatcccgcctcatgcttga

SEQ ID NO: 30275 - DNA, 279 bp, Oryza sativa
  Clone ID: PAT_MRT4530_34696C.1
gaaaagctcgatgattttttattggagaccaaggtaaagcatgagacatgacagttactaactagtactcgtgtctttaccgagctattcgagcgggggggggggaagtacacgagcctcatttcaagctcgagctcggttcgttttaggctaaagccgagctcgagccgagcctataacgagtcgagttcgagtagcttgcgagtctcgagcttttttgacagccctaactgggatacatccagttttgcaaaggagccccttaagattgggcaattt

SEQ ID NO: 30276 - DNA, 603 bp, Oryza sativa
  Clone ID: PAT_MRT4530_34697C.1
atggcggcggaggcggcgcaggagcccaaccaggagttcctcgatgcctgcatgccgtcgccgtcatcggccagggaggcggcccgccgccgcgtgccgccgctcagcgacgacgacatcgggtggttccactgcgaggcctgcgacgagccgaggctgctgtacgaccgccgccgcgtgtccggcgggtgcgcgcacgagctctgcgtcgcctgcgtcgtcggccacgtcgaggcccgcgtcgcggcgggggaggtgcccgtgcgctgccctttccaattcccggccggctcctcccactgcgacgccgtcgtgcacccggaggactgcaaggacctgctctacataggcgacttcgacgcgtggtgcgtcgcgctctgcgagctcgccgtcggcggcccgggcgccttcgcgcgctaccccaacccggactgcggcgagcggctcgacaccggcgccggcggcgagcgcgcggtgtccggggcgacctgcctccgctgctcccgcgcgttctgcctgcggtgcgagcagccgtgggacgaacgccaccgtgacggcgaaggctgcgtgcctcccggaaatggagacgctgccgcgccatga

SEQ ID NO: 30277 - DNA, 1342 bp, Oryza sativa
  Clone ID: PAT_MRT4530_34698C.1
atagctaaggtaggcagagctttcatccgaagtaattcagataaatactgctccccgaatcattccctgccatctggaggggaacgacgttggtattctttacagtccaactgtcggggttaatctcatctctgagtcttttgcatttgcttatctgagcgataaggcagtaaccccgacaaacaaattcttcaagcacccgaacggaaatatcattgaaggatttggaattgtacaatatgtgcctgtccgttttgaagacagggaggcagtcttgaatttccacgtcttcaaaaatccaagattttgacattctaatcggccttcccattgagcaacttctcataaacatgcccaagttggatagcctcaagataactttgggagggaatgaattctcagtcccattctcgcgggcaaggttcgccttaaccggctctctcctagagattgaatcagcggaggaggttacggtagttccccctcacaagtctcacgagacccttctggaaaatgaaatccccgacttcatcaaggaagaagcggaacccggagagactctcgatcttccaatcctgtgagaatttgagcatttgagttcattttgagcatttgcaacgaccaagctctctgaagacgagactcaacgtcttctgtctgtgttagaaaagcatcacgctgctcttggctattcccttcaagatctcagagggattaatcccgcgctttgtgctcatcgtatccctattaaccccgagagtaccccctccagggaacctcaacgacggctcaataacgcgatgtgagaagttgtaaagaaagaggtcttgaaactcctgcatgccgggattatttatcccgtaccatacagtgagtgggttagcccggtccaggttgtgccgaaaaagggaggaatgacggtcgttgcaaatgctcaaaatgaactcattccgcaacgaaccataaccggatggaggatgtgcatagattacagaaaacttaacaaggctacgaaaaaagatcatttcctgctacccttcattgatgaaatgttggaacggctggcaaatcattcttttttctatttccttgatgggtattccgggtatcatcaaattcccatccatccggaggaccaaagtaagactacgttcacatgtccgtacggtacctatgcttatcgtaggatgtccttcggactgtgtaagctcctgcatcttttcaaacgtgtatgatgtctattttctcggacatgatcgaggacattatggaaagaccttcggtcattatctacaaaatttagacaaagtcttacaacgatgccaagagaaggacctgctac

SEQ ID NO: 30278 - DNA, 378 bp, Oryza sativa
  Clone ID: PAT_MRT4530_34699C.1
atgggcttgtggaagaaccgaagaagagacatgagagatgggggcaaaggaggtgccagcaacaatgaccagattccaggaacgaacagacgtgatgaggaccaggagctgccgtcatgtacggcttcacatggaaaccggagatcagcacgaggccaacgaacgcatttcacagctgacacggcgcccacacaccggcacgatggttgccgaggcccgaggggaaaacgggagccgatccaccgcgcgagccgcggcggcagccggcgggtggacgcaaggttggatctttctgggctgaaaactacggattttaacactccagctcgttccactttgacccacttgcaccctcttcctctgtcaaattccgaaaga

SEQ ID NO: 30279 - DNA, 5460 bp, Oryza sativa
  Clone ID: PAT_MRT4530_3469C.1
atggccggtcacccacccaaccaccgcggagaaggcatgatcgatttcgtggcagagttggcacgcatgacattggtggtgggctaccccgacgcgccggagtacacgaccatcccaccgctcagtggcgagcttcctcaccgtgtccgcttggaggtccatggttacgtggggacttgcctcgctaacatggcggtcgaggcgtcaggaggcacagcagatcatgcctgtcaggaggcagcctacctgatgatggccagactacgggagcgccacaactacatcttccacgacacggcgtaccgctaccaccccagtcgagcccacggtgatggcgtcagctccttccgtccgacagctggcgagaacgacaccaccttcggtcacatgtgcgcggtgatgaggggtctggacaggatgcactcggatctgcacaaggcgactaaggccttgaatgatgggaagctcatgaggatcgtcgctttgaaggacgagatagcgcgtctgaagaaggagaacgctcagcttaagggtctcccagcgccaggaggagtccggatccgcactacgccccgcaagactacgaaggcacccgtgcgcatccagctcgcgcccaggaacccacctccagcagcagctcccgcagcacctccagttccgcccgcagctcctgcagctccagttcctgcagctccagctccagctcccgcgttcgttctctccttcgccccagcgtcagccgtcagaggtccagccagtggcatcgggggttggttgcctgctacccccagtggcagccgcgatcgcagctccagtggctcgcagacgggcagcagcgagacgtacctgccaggctccaggagtcgttcagagggacctggttgcttgtttgggatggtcaacaccaggactggcaaccgcacgacaggcgagggcagcaacggtgaagaacgcgttgatggtatgcaccccaacggcgatcccggcaacggtccgccaccacttcccgagaatccgacacttgcccaagttatggcgcatcagactcagatgatggcagccatgatgcagcagatgcagcaacagcaccagcagatgcaccagaggatgatgcagtacgctgaacagcagcaccagcagtttggtccccctccccctcagtccaagttgcctgagttcctacgagtcaggccacccaccttctctagcaccaccaaccctatggaggcaaacgactggctccatgcaatagagaagaagctgaatctcctgcagtgcaatgatcaggagaaggtcgctttcgccacacaccagcttcagggtcctgcgtcagcttggtgggacaaccacatggccacccgcccaccgggtacggaagtcacctgggcagagttctgccgtagcttcaggaaggcacaggtgccagatggggtcgtggcacaaaagaagagggaatttcgcgcactccatcagggcaacaggacggtgacagagtacctccacgagttcaatcgcctcgcgcgatatgcaccagaggatgtccgcaccgacgccgagaagcaggagaagttcatggcgggcctggatgacgaactgaccaaccaactgatatctggggactacgccgactttgagaggctagtcgacaaggcaattcgtcaagaggaccaacgcaacaagatggacaggaagaggaaggccgctcagttcagggcacatcagggaagtcaccagaggccgcgtttcactcccggacagcagggtggacctaccaccatgatcgtccgtcagcaccgcccgttcaaccctagcaacttccaccagggcaccagtggcagtcagaaccaccatggaggtcagcccaaccgcggtgcagctccacgcccaccaatggccccggcacagtcaggccagcccacgcaagccaagaaggagactggagcaaaaccagggtcctgcttcaactgtggcgagcttggtcacttcgcggacaaatgcccgaagcccaggcgtgccgggccaaggtttatccaggctcgtgtcaaccacgcatctgcggaggaggcacaagcagcaccagaggtcgtactgggtacgtttcctgttaactcaatccctgcaacagtactttttgattctggtgcaacgcattcgttcatctcaaagaaatttgtcgggatgcatgggttaataagagaagaacttagcacaccgatgcgggttcataccccagggaatagctccacttcggttcaattcagcccttctataacaatagaaatccaaagatcaccatttctagccaacctcatccttctcgactccaaaggcctagatgtcatcctcgggatggattggctgactaagtttaagggagtcatcgattgtgcgaatcgcacagtcaccttaaccaacgagaagggagaaaccgtggtgtacaaatccctagtctcgccaaggaaaggggtctcgttgaatcagattgagacagaaatcccagtggacaccgtagagaagaactcgagaaaattggatgatatacccatagtctgcgagtatccggaagtgttccccgaagacctcactaccatgccacccaagagagagattgaattccggattgacttggcaccgggaaccgctccaatctataagagaccgtacagaatggcggccaacgaattagcggaggtcaagaagcaagttgatgaacagctgcagaaagggtacatacgaccaagcacttcgccttggggcgctccggtcatttttgtggagaaaaaagataagacgaagaggatgtgcgtcgattatcgcgcacttaacgaggtcacaatcaagaataaatatcctttgccgcggatcgacgatttatttgatcaactgaaaggggctaaagtgttttctaagatagacctgcgctcaggctaccaccagttgagaatccgggaagaggatatcccgaagacggccttcaccacgcggtacgggctatatgagtgcacggttatgtccttcggacttaccaacgcacccgcattcttcatgaatctgatgaacaaagtgttcatggaatttctggacaagtttgttgtggtgttcatcgacgacattttgatctattcaaagtccgaggaagaacatgaacaacatctccgtctggtactcgagaagttgaaggagcaccaactatacgccaagttcagcaagtgtgacttctggttgacggaagttaaatttctgggtcatgtcattacagcccagggtgtggcagtcgacccatcgaacgtggagtcagttaccaagtggaccccaccgaagaccgtgtcgcagattcgaagttttctaggattggccggttattaccgccgattcatcgaaaacttctccagaatcgcccgacccatgactcagttgcttaagaaagatgagaagtttaaatggacagctgagtgcgataagagttttgaggagctcaagaagaaattagtatccgcaccggttttgattctgcccgaccagatgaaagacttccaagtctattgcgatgcatcccgtcacggacttggatgtgtcctaatgcaagagggcagagtggttgcatatgcctcgcggcagttgcgtccacacgaaggaaattatccaactcatgacttggaattggcagcagtggttcatgctttgaagatctggaggcactatctgattggcaaccgctgcgaagtatatacggaccataagagtctgaaatacatcttcacccaaccggacctaaaccttcgacaacgaagatggttggagctaatcaaagactatgacatgagtattcactaccacccgggtaaagccaatgtggtggcagacgctttaagccggaaaagttactgcactgccctatgcaccgagggcatgtgtgaggaattgcggcaggagtttgaacatctcaacataggaattgttgaacacgggttcgtagccgctctggaggcacggccgacgctcgtggatcaagttagagccgctcaagtaaatgacccggaaatagcagagctgaaaaagaacatgagagtcggaaaggctcgggatttccttgaggatgagcatggcacaatctggatgggagaaagattgtgtgtacctgacgacaaggaattgaaggatctgatactcaccgaggctcatcagacccagtactccattcaccccggcagcaccaaaatgtatcaagatctcaaagaaaagttttggtgggtcagcatgaggagagaaatagctgagttcgtcgcactctgcgatgtttgccaacgagtgaaggcagagcaccaaagaccagcaggtctactccaacctcttcaaatcccggaatggaaatgggaagagattggaatggattttataacgggactgccccggacatcatcgggacatgattcaatctgggtagtcgtggatcgactcaccaaggtggctcacttcataccagtacataccacctatacgggaaagagattggcagagttgtacctcgcaaggatcatgtgtttgcatggggtacccaggaagatagtatctgaccgagggagtcagttcacctcaaaattctggcagaagttgcaggaagaattggggacccgtttaaatttcagcacggcctatcatccgcaaactgacggtcaaaccgagcgagtaaatcaaatcttggaagatatgttgagagcatgcgctcttgattttggtggagcttgggacaaaagcttgccatatgcggaattctcgtacaacaacagctaccaggccagtctacagatggcaccgtttgaagctttatacggccggaagtgccgcacacctctcttctgggatcagacaggcgagcgtcaactgttcggaacagaagtattagcagaagcagaagagaaagtcagaatcatcagggaaaggttgaggattgcccagtctcgacagaagagctacgcggataaccgtcgaagggagctcacctttgaggcaggagattacgtgtatcttcgtgtcactccgctccggggagtacaccgttttcagacgaaaggcaagttggcaccacgcttcgtgggaccatacaaaattttggaacgaaggggagaagttgcctaccagctagaacttccgtccaacatgatcggcatccatgacgtgttccacgtatcccaattaaagaagtgcttaagggtacctgaggaacaggctgattcggaacacatcgatatccaggaggacctgacctatgtggagaagccggttcgcatacttgataccagcgaaaggaggaccagaaacaaggtcaccaggttttgccgagttcaatggagtcatcattccgaagaggaagcaacctgggaaagggaagatgagttgaaagccgcccatccgcacctcttcaccagctcctccgaatctcggggccgagattccgtttaa

SEQ ID NO: 30280 - DNA, 979 bp, Oryza sativa
  Clone ID: PAT_MRT4530_346C.1
atatacactactaatcatttgagccaagagtttaggaatggagttgttgaatttctgaatgttgtggataatgataagaggatttgaggaacggatatatggtatgtccatgtgtagactgcagaaatgagaagatgtttttagaaagggtgttggtgcagtctcatctaatacatagaggatttataaaggataaaacatgttggaccaggcatagagagcaagagccatcgaatattccagttactgaagtgcgagatgtatagaacatggaacaagatcgagattacatgtttgtaccatctccattgggtggtgatatcatcaatgtcatcccagataccctcggaaatattaaggagtcagcctataatgagagggattatgagaaatttagcacgttagtgacagattctaagaagcctctatatcctggaaacaagcgaagcacaccaagttatatgacatgttggatcacatgaagcttaaggcaaataacggttggctacacaagagtttctcggaactgttttagtttcatggatctgcttgacttgctaaaggacttgctaccagaggggaacaaaatgccaagacgacttatgatgcaaagcaagtgttatgcccattagaggctggaggttaattagaagaattcacgtatgttgaaatgacatattgtagtacaaataatacaccaactttgatgcgtgttctgtatctgctatttctcaatacaaatgaaataatggtagtgctgaaggtaagaagttaaagatgattagtctcgctaaggttgtttggtatctccctattaccgatcacatcaagaaaatgtttgccaatcctacggaggttgagttagtttgttggcataaaagataggttgatgtaagctaatatacttgacaaattcaacgtagtcgaggaatattgataggatatacttagaatttaaaaataaaaaaagagaaaaaaa

SEQ ID NO: 30281 - DNA, 1565 bp, Oryza sativa
  Clone ID: PAT_MRT4530_34700C.1
atgggcgaggaggagaagaaggaggcggcgaaggccaaggaggaggagaagcccaagcaggaggagaagcccaaggagcaggaggaaggcaagaaggaggagaagcccaaggaggaaggggagaaggggaaggacggcggcggcggcgaggagaagaaggacggcgaggcggctgcggcggcggacgctccaccgccgccgccgccgccggaggaggtggtgatgcgcgtctacatgcactgcgagggctgcgccaggaaggtccggaagatcctcaagggattcgatggagtggaggatgtgatcgccgactcgaaggcgcacaaggtgttggtgaaagggaagaaggcggctgcagacccgatgaaggtggtggagcgagttcagaagaagaccggccggaaggtggagctcctgtcgccgatgcctcctccaccggaggagaagaaggaagaggagaagaaagaggaacctgagcctccaaagcctgaggagaagaaggagccgccggtgatcgcggttgtgctgaaggtgcacatgcattgtgaggcctgtgctcaggggatcaggaagaggatcctcaagatgaaaggggtacaatcagctgagcctgacctgaaggcgtcggaggtaaccgtgaagggtgtgtttgaggaggccaagctggccgagtacgtgcacaagcgcaccggcaagcacgctgccatcatcaagtctgaaccggtagcccctcccgagaaggtggcagccgaaggtggcgatgagaagaaggcagccgaaggcggcgatgagaagaaggacgagaaggaggagaagaaggatggaaaagaggaaggtggcaatggtggcggagatgagaagaaggaagagaaggagaaggagaaggagggtggcaatgccgatggcgaggagaaggacaaggacaaagagaaagaccccgccgccattgccgccgcgaacctatacctgcattatccaaggttcgcattccctgccggatactacccgcccgggccgggttatgcctacccaccgccctaccctccatcctacccgccaccataccagccatcctacccgccatacccgtcgcacccttcgcaccacccgtcgcagatcttcagcgacgaaaacccgaatgcctgctctgtcatgtaaaaagttttagaacctgggggatctagagtgaaaaagaataagaagagcacaggactgcataatttggagggtgtcattgcaacaattgccctttgagcaaagcaaagctaaaatggcagcttgaagaaagtaccaggcttttttgggggttaggtttctttttaactttcttttgtaattttaacccttttctttcatctggtataaactacaaagcaagtctggacttccttgtcagtttatggatgctatcttatgtagaattttgctctctgtactgtttcaccttcaaactaatgtaaaaactgtactatactagtataatttttaggtgtaaaaaaaaaaaaaaaaactaatgggctccatttttactcatgaaacctgaaacctgaagtattatggtggtg

SEQ ID NO: 30282 - DNA, 656 bp, Oryza sativa
  Clone ID: PAT_MRT4530_34701C.1
aaaagggcggttgcaaataaaaagaagcaagaactgtttttccaaactaaaaaattcagacatcatcaagttcagacaataacttggtagcagcaaccacaatccccaattgatgcaattattttatttatattgcaacaacaattaactaacctaagcatccattcatataccattgaagctccttcaggggaggtcttgaggacactccccaatttctcattcatcatctgtaaatgtagtccagaattccatattctatagcgagtatatgtattgctatctctaaaaattcccaattcaactcattcgttcatacacttgattgtaaattttgtaatgccattgtaccaaccttccgtaactccattcattaaattggttactacagctgtaaataatcactgtactaaactgaacttgtgaattcgcgatctactaacatcaatgaggcatcgagatggatgtgtatatcattttcctttgttccttttcaccagcaagatttgacaaaagctcatcacatcacctggcgctcggctgcatctgcgacgattggcagccgcggcgtcttccctagcaggcacgcgcccccgccgtagactaggcagacgagcaggaagaggaacacggtgctcttcatactctggaagagc

SEQ ID NO: 30283 - DNA, 446 bp, Oryza sativa
  Clone ID: PAT_MRT4530_34702C.1
ccccgggctgcaggaatcggcacgagcgcgtcccattcccacccggctcgcacggcgcagatcgcgctcgccctccgccgcctgccgcctctccttctccgacgtctgccgcctcaacaggaatcgccgccgatccggtctcccgctcggcctccgcatcaaccatcattgctgcggccgccgccgccgatccggtctcccgccctcctcccaataccgcacctcgcgctcgacctccgctggcgcctctccgatgactgcctgacgccgccgcctcaaccggcatcgccgctgtctcctcggtctccgcctcaatccggtctcccgccgccgtccctacaccgccgaaatcgcttcggcgacttcctcccaaccctaaacgccgctgccctaagatcctctctcccaccctcgccgatgcccgtcgcttcgccgcggatcccctc

SEQ ID NO: 30284 - DNA, 1215 bp, Oryza sativa
  Clone ID: PAT_MRT4530_34703C.1
atggcggccatctccaccaccaccgccgcctacttctcctcgcagccgcagctccccgccacggctgccgccaagtccggcgggcggcagcagcagcggcggcggagcagcttcgtgatgctcgaggcggcggcggcgtccgggagcggcggcggagggggaggggcggtggggaggacgaggagcctgacggaggaggacctggaggagctcaagggctgcctcgacctcgggttcgggttcgcctaccacgagatccccgagctgtgcgggacgctcccggcgctggagctctgctactccatgacgcggaggttcctcgacgagcagagggcgcccgggcaggagccggagtcgcccgccacgccgccgctccccaactggagaatctctggccccggtaaagctttcccctccccccgtgcagattttgattctgataatgttctaggtttgggattgtgtgaatatatacttgattacttcttggttgtgaagcgaagtagtatagacttagttgatcgtgaaagaattgattatcctatgttctacccaggtagagcactcaagataaaagacagatttgctttgttcatgatgtctcttttcttagtgagcaaatacactgatgaggtgcttatgcctcgtgttatcgaggcaacacgatcgatcagttatttcgcaaaacttcaaaggggagactggtcaccccacggaacagcaagaaaactcaaggtgatccgtggtccgagcttttctgaaggcatcagaagcttgtcattcctcatggaggtctctgcatggtgcagggtttgcaactgcgagacctgctagtttttgctcttgtcatgatctttaggagcaccaattgctgtactgtaccgggtggggcgggggtttggctgatccatgggtggatcagtttcagtatggctttgttctgatattctgtttaattttcatttgctttgaagtagaagattctgctatactgcaaagtttgcagatagtatgctccgaaaaatgatttatccatgcagtctaacaataaactgtagctgctgatattgtgtagtactaccatgtgatgctactgaacttgtatgcctgtatccccattctcaacgctttcagtttgagactggtaaaagatttgattggattatgctgctgggataacaccctcgtgccgattcctgcagcccggggatccac

SEQ ID NO: 30285 - DNA, 5009 bp, Oryza sativa
  unsure (1)..(5009): unsure at all n locations
  Clone ID: PAT_MRT4530_34704C.1
agtggccaggttaaattcattggccaagctattatggaatcaagacagctcgataggtcggtggacgagctcaacgaatcagagcaatctggaaggaggcgagtaggaatgagatcggcggcaanacaaatggcaagctccatagcagcgctacgttgaatgaatcccaccttgatgtcgagattttacttcccatcataccctttgtaatggacagttggatatgaatggtacctcgtacctcatagtaccttgtgagaccttttcaaggatgggaaagatgctcataaaatttgcttacgtttataaagtgctgcagaagcttgccatttgtgttgccgccgatctcattcctactcgcctccttccagattgctctgattcgttgagctcgtccaccgacctatcgagctcgcccgtcacgccgcccgtcgtgctcgagcttgtccgcctgtgcactcgagagtcgagcctgctcgtgcttggagctcctcctctgcggcttcgtgctgtcttgattccataatagcttggccaatgaatttaacctggccacagtgcggtgacgcatgaccaatgatgaagccgagccatccatctttgatgcaccaccaccaccaccaccaccgctgccgccgcttccagtgccacttgatagcccgccgcagccaccagctgccaccaaagccacagccgccaccttgggataggtttggatggggatttccggtgtgtgtggcgggagcgacgagtccgattgggtgtagttcaaccagccgcttctagcaccgattgcctgggaggaaaggaggccggtgggggcgggcttgacattggtcttgaggatctgagaggcggcggcgtggcagcggcggtcggcgaagcggccgcgacgtctgtcttgaggacttggcggagaggaagccggcggtggcggacttcgagaggaggccggcggcggcggtcttgggcgtggaggaggcgctggcggtcggggaggccggatcttgaaccgggaggcggcggcggtggtcggggaggccggatccatgagggctcgtggacgacgagggaggaggaggccgtggtcggtgaaccgggagggcgacggcggtgtcgaggaggacgaggcggcggtggcggcgtcgaggagaaggaggcggcggtggcagtcgggaggcgacggcttggaggaggaggaggaggcggcggcggtggatgtgagagggtgatagagtgagaggcggcgtcggcggtggatcgcaccacccccgtgggccgctggcatagcggtgccgccgccatggaccactgccgagctgagcggcgtgatgggcgtgcagcacgccatcggcaccgagcacaccgtcgccgccgtccacgtcaagcccgcgacgacaacgacgatggccggccggacttcctcctcctcaacaacgacgctcggcacggcgcacgcccgcaagagaaaggagagggcgccgcggcacaaccgctcgacggcggcgcactcacccttgagtggctactccttgatgggttacattaaagatattccgaccctgaaaggagataactacgaagaatggaaaagagaactcgaccttgcttttatcttgggagaggtggactgggtgttgactaccccatgtcctatagaacctgctgaaattttcagaggtgaaaaagagtcagatgctgaatggcaaaagagagagagggacaatgcttccctcatcatgtcgtatgacattgagcatgcgaaatggtcttcagccaacaagaattgtttggctgcggtaaagaacacgattgagccaaccatattgggctcaatcccagagtatgacactgtctctaagtacctcgaaagtataaagagccagtttagtggttcttcaaagttttatgcgacacagctgataaagcagcttgttacagagaggtaccatggaggtggtgtaaaagaccacattcttaggatgagcaatatggcttccaaattgaagcaaaaagatttgggcatctcagatgactttctggtccatctggttttgtcctcattgccaaagaactttgacaaccttgttgtcaactacaaaataagtacagagaattggaatattgaagagctcatctctaattgtgtgcaagaggaggaaagacacaaagagaccaatggtgactccattaaccttgtcaaagataacaaggaaaagagccacaggtcaccctcctcaaaagaaaaacagcctcagcatctgcctcagaaacaacagtttacagttgagacaagatcagtgtctacactgcaagaagacaagacattccaagaaagatcatcctgacttcctgacagtgatcatggcaaagaaaggtgagaacattattacatttgtaaagaatctcattatgattggttattctagatccacatggtggattgattctggagcaactattcatgtgtgtaattgtttaaagggattccgttcaatgaggactatgcaaagaagtgaaagatccattagagttgccaatggagttgaagcaaaagttgaggctggagatcttcgcctagaactcgcgaatggcttcacacttttacttccagacgtttttatgttccttctttgcaaagaaacttgataataagtgtatccaaattggattttgatagatatgattgccattttggaaatggcaaatgtgaactatggtataataatgaatgtattggtcttgtgttgcaagatcagctttatttctttctgagaatgtgaatgttgtgtcctcgttgacaaaagaaaagaaagcgaacttctgatgtctcatcgaaattatggcactgttgtttatgccatatttcgagggggagaattgagagactggttaagaatgtagttcttcctccattggagttctcagttttagaacaatgcatacaatgcatagaatgcatcggtgcccaaaacaccgtatgagctatggatcctccgtgtgtgggggagtcctgcaaaggataaagtatttaacccaaaacagtaagctgccattttattggctattctaaaagatcaaagggtcatcgtttctactgtccaaacagttatacaaagtttgtagaaacgggacacgtcgtcttcttggaagacgaaatgattagggggagctcggtaattcgagaaattgatcttgaggagaggcgggtgtctgtacccgctccgtcgactcaggaacctttcttctctctacctgctaatgttgtgccagcaatgcatgccgttgcggtaccaacacctgttgttatctctcctgtggcaacaatgaatgaaagtgaggaacctgttctacaggattcaacagaaattattgccacatcagaggaggagatgaaacagcctcaaacagataatgtgccagaataggaggcccctagaaggcctgaaagagtcgcatatggaggatgatcccatctcatatgaagaggccatgagaagccatgaaagatgaaatgaaatcaatgaaattaaatgatgtctgggatttagaagaaattcctaaatgagccaaaacagtaggctgtaaatgggtctacaaaaccaaatatgactctagagggaatatagaaaagtttaaagtgcgactcgtggcaaaaggcttcatgcaacgagaagggattgattacaatgagacattttctccagtctcttgtaaagattccttcaggattataatggcactagtggcacattatgatttggaattacatcagatggatgtaaaaacggcatttctaaatggagatttggaggaaaaagtatacatggcgcaaccgaaaggttttgtcatgaaaggaaacgaaaatatgggatgccgtataaagagatccatttatgggttaaagcgaagcttcgagacaatgctacttgaagtttgatggaacaataaagaaatttgggttttcaagagaatgtagaggacaactgtattgattcaaagttaagaatgggagactcattttcctaattctgtatgtagatgacgttctactggctagtagtgatgtcaatctactgcaggaaataaagaaattcttgtcctcaaactttgacatgaaagacctcggtgaggcttcatatgttttgggcatagagattcaccgaaatagaacaaagtatgcattgggattttctcaaaaggcatatatatagaaaaggtgttgaagaaattcaatatgtacagatgcagtgttacacctgctcctatagtcaaaggcgaaaagtatggggcatcgcaatgtcccagaaatcagtatgagctcaataaaatgaaaacaaagccatatgcgtcagctgtaggaagcctacagtacgcgcaagtgtgcacacgacctgacttggcatttgttaccgggttatttggcagatttcaaagtaatccaggcccagtgcactggaaattggtaaagaaagtcttgcgtgtttgcaaggaacaaaaggcctcatgatgtcttacagaaaagcagaatcgctctagatagtggggtattcggattctgactttgcaaaagataatacaaagttaacatcgggatacatgtttaccctggcagcaggagctatttcatggaaaagctcaaaacagactaccactgcagggtctaccatgtatgccgagtttatagcatgccatgaggctacggggcaggtgaactggctaatgaagttcatacccggttttaaaggtggttgatagtattgagaaaccactaaagttatactgcgataaagaatccacagtaatgtactctcacaacaattagtcaagtggtgctgccaaacacattgacataaagtactatgttgtgaaagacaaagtccgggatcaaacaatcagtctcgagcacataagaacagaaaggatgctcgcggatccgctcatgaaaggcctacctcccaacatgttcaaggaacatgtagcatgcatgggttttaagggaagcctta

SEQ ID NO: 30286 - DNA, 397 bp, Oryza sativa
  Clone ID: PAT_MRT4530_34705C.1
gacaagggcgatctggaacatggcagatgcatgctggctgttgcaatgaaaatgggacctggtgtgtgactgcaaaaatgatgtgcagaccgtgtcgttgaagctgcaccttactcccagaattgtggagatcgacacgggccctaatactatgggtgtgtttagttcacccaaaattgaaaatttggttgaaattgggaacgatgtgatgggaaaagttggaagtttatgtgtgtaggaaagtttggatgtgatggaaaagatggaattttgaagaaaaagttgggatctaaacaaggcctatggaatcaccaagatggtttaagatatgtcatattcgattatagtttgttatatttaacagggataaatcagccggactaaaaaaaaaaaaaaa

SEQ ID NO: 30287 - DNA, 990 bp, Oryza sativa
  Clone ID: PAT_MRT4530_34706C.1
atggccccgacgtcctggagcgcggacgcggcagggacgccgcgcgcgcgttggtgtgcatggctcgatgcgaagcccgcgcggtcggtggtgtacgtctgcttcggcagcctcacctggttcccgcacgagcaggttgcaaaagctcggcatggggctcatggactccggcgtgaacttcatgaggtcggcgaagagcggcacgaggaggtcgacggcgacagcgaagaccccgcgagctcgcagctaggtaggtcgtcggcgctctcgtgcctgcccgtgagccccgcggcctcggcggggcaaggcgacatccatgccaacactacatgcacatcttctttggttgagcatctgaacatcctagctaggatgctggaaacagcaacagattttctcaactgggatggctcagggcgcggcccgagagaaaggggcggctcggccgaacttaacgggtcggccggcccaagaaggcggcccaaggcgcgcgcgggcggggaggagagaggaagccggtgggccgggtccatcccgcgtggtcccgggtgggacccgcttgtcggcggctcggcttaccccacgcgggccggcgagaggaagacgaaggcgccggccgcgaatggacggcgggcggcggcggtttctccgggacgccgtgcgacgacaaggggcgacggggtgtacaccggaatggcgagggagaacgagagggagcgagctaacggcttggattcgccggagggagctcgacggcggcggattgcggcggcggcaaccggcggcgagggaaggggaaacggcgacgaggtcacgaggggccgattcccggtggtgagagcatctacgcggccacgggaatccatcccttgcgccggattaggcagagctacgccgagcgaggccggcgacgagagacgctatcgagctcgggccgacggcggcaagcacatagcgagcggcggcagcagtaggggcggcgccagctag

SEQ ID NO: 30288 - DNA, 1566 bp, Oryza sativa
  Clone ID: PAT_MRT4530_34707C.1
atggccaggacttcctcctcatccaacgcgtcaaccggtcacatccctaaacccttttcccttaatctctatttttttcaatcattcaacccaaatagaacaacccaactagatctaaacctaggtgatccaatagacaaccctaacaatggtggctactccttgatgggttacattaaagatattccgaccctaaaaggatataactatgaagaatggaaaagagaactcgaccttgcttttatcttgggagaggtggactgggtgttgactaccccatgtcctatagaacctgcggaccttgtcagaggtgaaaaagagtcagatgctgaatggcaaaagagagagagggacaatgctcccctcatcatgtcgtatgacattgaacatgtgaaatggtccttagccaacaagaactgtttggctgcggtaaaggacacgattgagccaacaatattgggctcaatcccagagtatgacaccgtctctaagtacctcgaaagtataaagagccagtttactggttcttcaaagttttatgcgacacagctgataaagcagcttgtgacagagaggtaccatggaggtggtgtaaaagaccacattcttaggatgagcgacatggcttccaagttgaagccaatggatttgggcatctcagatgcctttttggtccatctggttatgacctcattgccaaagaactttgacaactttgttgtcaactacaaaataagtccagagaaatggaatcttgaagagctcatctctaattgtgtgcaagaggaggaaagaatcaaagagaccaatggtgcctccaataaccttgttaaagataacaaggaaaagagccactgggggagctcggtagttcgagaaattgatcttgaggagaggcgggtgtctgtacctgctccgtcgactcaggaacctttcttctctctacctgctgatgttgtgcctccaatgcatgacgttgcggtaccaacacatgttgttatctctcctgtggcaacaatgaatgaaagtgaggaacctattctacaggattcaacagaaattattgccacactagaggaggagctgcaacagcctcaaacagataatgtgccagaacaggaggcccctagaaggtctgaaatagacagaagatcggctatccatgatgactatcatgttcataatatagaagagtcgcacatggaggatgatcccacctcatatgaagaggccatgagaagcgctcgctcatctgaatggttggaagccatgaaagatgaaataaaattaatgaaattaaacaatgtctgggatttagaagaaattcctaaagaagccaaaacagtaggctgtaaatgggtctataaaaccaaatatgactccagagggcatatggaaaagtttaaagcgcgacttgtggcaaaaggcttcacgcaaagagaagggattgattacaatgagacattttctctagtctcttgtaaagattccttaaggattacaatggcactagtggcacattatgatttagaattacatcagatggatgtaaaacggcatttctaa

SEQ ID NO: 30289 - DNA, 793 bp, Oryza sativa
  Clone ID: PAT_MRT4530_34708C.1
gcatatatatagaaaaggtgttgaagaaattcaatatgtacatatgcagtgctacacctgctcctatagtcaaaggcgaaaagtatggggcatcacaatgtcctagaaatcagtatgagctcaatgaaataaaaataaagccatatgcgtcaactgtaggaagcctacagtacgctcaagtgtgcacacgacctgacttggcatttgttaccgggttatttggcagattgcaaagtaatccaggcctagaacactggaattagtaaagattatttgcaaagaacaaaagccttatgctgtcttacagaaaatcagaatcgctccacatagtggggtattcgaattctgactttgcaaaagataatacaaagttaacatcgggatacatgtttaccctggcagtaggagctatttcatggaaaagctcaaaacagactaccactgcagggtctaccatgtatgccgagtttatagcatgccatgaggctacggggcaggtgaactggctaatgaagttcatacccggttttaaaggtggttgatagtattgagaaaccactaaagttatactgcgataaagaacccacagtaatgtactctcacaacaattagtcaagtggtgctgccaaacacattgacataaagtactatgttgtgaaagacaaagtccaggatcaaacaatcagtctcgagcacataagaacagaaaggatgctcgcggatccgctcatgaaaggcctacctcccaacatgttcaaggaacatgtagcatgcatgggttttaagggaagcc

SEQ ID NO: 30290 - DNA, 4113 bp, Oryza sativa
  Clone ID: PAT_MRT4530_34709C.1
atgggttgcattaaagatattccgaccctaaaaggagataactacgcagaatggaaaagaaaactcgaccttgcttttatcttgggagaggtggactgggtattgactaccccatgtcctatagaacctgctgaccttgtcagaggtgaaaatgagtcagatgctgactggcaaaagagacagagggacaatgctcctctcgtcatgtcgtatgacattgaacaaaagaaatggtccttagccaacaagaaatgtttggctgtggtaaagaatacgattgagcctaccatattgggctcgatcccagagtgtgacgctgtctcagagtaccttgaaagaataaagagtcagtttactggctcttcaaagacttatgctacacagctgatcaagcagcttgtgacagaaaggtaccatggaggtggtgttagagaccacatacttagaatgagcaacatggcttccaaattgaagccaatggatttgggcataacagatgactttctggtccatctggttatggcctcattgccaaagcagtttgacaattttattgtcaactacaacataagtccagagaaatggaactttgagaagctcattgctaattgtgtgcaagaggaggagagaatcaaagaatcaaatggtggttcaataaactatgttaaagataagaaaaagaaccacaagtctcccacctcaaaaggtaaacagtctcagcatctgcctcaacaacaacagttcgctgttgagaaagatcaatgtctccactgcaagaagacaggacactacaagaaagattgtcctgactttttgaaaatgatcatggcaaagaaaggtgagaacattattacatttgtaaatgaatctcattatgttggttactctagatccacatggtggattgattctggagcaactattcatgcttgtaattgtttaaaggcattccgttcgacgaggactacgcaaagaagagaaagcaccattagagttgccaatggagttgaagaaaaagttgaagctgttggagatcttcctctagagctcgcgaatggcttcatacttttacttcgagatgtcttttatgttccttctttgcaaaggaacttaataagtgtatcaaagttggattttgatggacatgattgccgctttggaagtggcaaatgtgaactatggcataataatgcatgtattggtcttgctgtgttgcgagacgagctttatttgttatctctttctgagaatgtgaatgttgtgtcctcgttgacaaaagaaaacaagaaaagaaagcgaactcccgatgtctcatcgaaattatggcactgtcgtttgggccatatttcgagggggagaattgagagactagttaagaatgaaattcttcctccattggagttctcagacttagaacaatgcatagaatgcattaaaggaaaatttgtaaagagcatcaaaaagggtgcaaaacgaagcgcaggaattttagagatcattcatacagatatttgtgatgattactcccgctatggttatatttatccaattaaagagcgatcagaagcactggataaatttaagatattcaaagctgaagttgaaaatcagcatgatataaagattaaagtagtaagatctgaccgtgggggggagtactatggtcgacatacgccttatgggcaagtccctggaccttttgcaaggttcttgctagagaatggaatagtagcccagtattcaacaccgggcgaacctcaacagaatggggtagctgaaaggcgcaaccgtacccttatggatatggtgcgcagcatgatgagctactccacactaccactcggtttatggatggaggcgttaaaaaccgccattcatattctcaacagagttccaagcaaatcggtgcccaaaacaccgtatgagctatggacagggagagtaccctcgctaactcacctccgtgtgtgggggagtcctgcagaggccaaagtatttaacccaaatattgggaagttggaccccaaaacagtcagttgccattttattggctatcctgaaagatcaaaaggctatcgtttctactgtccaaacagttatacaaagtttgtaaaaacgagacacgccgtcttcttggaagacgaaatgattaaggggagctcggtagttcgagaaattgatcttgaggagaggcgggtgtctgtacccgctccgtcgactcaggaacctttcttctctctacctgctgatgttgtgcctgcaatgcctgtcattgaggtaccagcacctgttgttacccctcctgtggcaacaatgaatgagagtgaggaacctgttatacaggattcaacagaaatggttgccacaccagaggaggagctacaacagcctcaaatagataatgtgccagtacaggagactcatcaagagcctcaggtacaggatgtgccaaatgtgcaggcccctagaaggtctgaaagagtcagaagatcggctatccgtgatgactataaagtttataatatagaagagtcgcatatggaggatgatcccacctcatatgaagaggccatgagaagcgctcgctcatctgaatggttggaagccatgaaagatgaaatgaaatcaatgaaactaaacgatgtttgggatttagaagaaattcctaaaggagccaaaacagtaggctgtaaatgggtctacaaaaccaaatatgactccagagggaatatagaaaagtttaaagcgcgacttgtggcaaaaggcttcacgcaacgagaagggattgattacaatgagacattttctccagtctcttgtaaagattccttcaggattataatggcactagtggcacattatgatttggaattacatcagatggatgtaaaaacggcatttctaaatggagatttggaggaaaaagtatacatggcgcaaccgaaaggttttgtcatgaaaggaaacgaaaatatgggatgtcgcctaaagagatccatttatggattaaagcaagcttcgagacagtggtacttgaagtttgatgggacaataaagaaatttgggtttcaagagaatgtcgaggacaactgtatttattcaaagtttaagaatgggagatttattttcctaattctgtatgtggatgacattctactggctagtagtgatgtcagtctactgcaggaaacaaagaaattcttgtcctcaaactttgacatgaaagacctcggtgaggcttcatatgttttgggcatagagattcaccgagatagaacaaagtatgcattgggactttctcaaaagacatatatagaaaaggtgttgaagaaattcaacatgtacagatgcagtgctacacctgctcctataatgaaaggcgaaaagtatggggcatcgcaatgtcccagaaatcagtatgagctcaatgaaatgaaaacaaagccatatgcgtcagctgtaggaagcctacagtacgcgcaagtgtgcacacgacctgacttggcatttgttaccgggttacttggcagatttcagagtaatccaggcctagagcactggaaattggtaaagaaagtcttgcgttatttgcaaggaacaaaaggcctcatgctgtcttacagaagatcagaatcactccagatagtggggtactcagattctgactttgcaaaagataatacaaagtcaacatcgggatacgtgtttaccctgacaggaggagctatttcatggaaaagctcaaaacagactatcactgcagggtctactatgtatggcgagtttatagcatgctatgaggcaacggggcaggtgaactggctaaagaagttcatacccggtttaaaggtggttgacagtattgagaaaccgctaaagttatactgcgacaacgaacccgcagtaatgtacgctcacaacaatcagtcaagtggtgctgccaaacacattgacataaagtactatgttgtgaaggacaaagtccgggatcaaacaatcagtctcgagcacattaaaacagaaaggatgctcgcggatccgctcacgaaaggcctaccacccaacgtgttcaaggaacatgtagccggcatgggtttaagggaagccttatga

SEQ ID NO: 30291 - DNA, 522 bp, Oryza sativa
  unsure (1)..(522): unsure at all n locations
  Clone ID: PAT_MRT4530_3470C.1
gctcaccacttcacctctctctctctttcttctccctgtaacctcccaattcaaaaacaattataaaccaaacttgattaatatatatttctttatcatcatctcttcgaaatgcaagatattcatgatttctccatgaacggagttggtggtgggggagaggagaagaggaaggtttttnnntggangaatcggnggnggaggaggtggtgatcgaaggatgagagctcatnagaacaatatacttaaccatcatcaatctctcaagtgtcctcgttgtaattctcttaacacaaagttctgttactacaacaattacaatctttctcagcctcgtcacttttgcaagaactgtcgtcgttactggactaaaggtggtgttctccgtaacgttcccgtcggaggtggttgccggaaagctaaacgttcgaaaaccaaacaggttccgtcgtcgtcttcagccgacaaaccaacgacgacgccngatgatcatcacggggaggagaaatcgagtccaggatc

SEQ ID NO: 30292 - DNA, 1466 bp, Oryza sativa
  Clone ID: PAT_MRT4530_34710C.1
tcacgaaattttcaattttttggcaaccatcgaaattccggtgcaaccgaaattgcaaactcggatcatgccatatggaaggcgcgtattcttgtgattgttcggggtgctcggttggaaggttctcataggagcagatcaagctccagttgtcattcttcgagaaaaggagggcgaaaaggaaattatcatcaacaaaccagattgtgatgaatggatttcgacaaatcaacaggtgctttcatatttgctttcctccatgactaaagatctacttgttcaagtggcaacatgtagcacaacagcctcggcatggagtatgatccaagagatgttcgggtccatgactcgggcacgaacaatcaacacgcgactctccctcaccacgctgcagaagggcgacatgaacatcacgacgtttgttgggaaggtgcggcctttggctaatgaacttgcaatcatcggcaaacccattgatgatgatgatctgatcagctatatcattgctggtcttgatgaagaatatgtgccggtaatctcgtccattgttgggcgaccagatcaggtgaccgtcagtgaggcctttgcttagttgataagcttcaagcagaggctagcactttgccagagtggagaatggagaatcctggcctcggctaatagcgcaagctgtgtccagggtcagcaacaaggcgtcagaggtggcggcggacaacaatcaatgaccgagaacgttaatacgtgaacgttcgcgtaatggtggaaactgaagtcgaggaagaggcagccctagcggtggtcgaagaaacataggaggtgtcgacaacaggcccaagtgtcaactttgctacaaaaggggacacacggtaaaagattgctagtaccgtttcgatgaagactatgttccatagatgaaaggtttgcaggttctgctgcattctacggcattgatttcaattggtatcttgacaccggcgctacaaatcatgtcaccggagagcttgagaagctaatagttcgtggcaaatatcatggcaatgatcaaattcatatagcgagtggtgcatgtatggagattagtcacatggtaattctgttgttcagatccctagttgagatttacagtgaaaaagtgttctttatgttcctaaggccaagaaaaatcttgtttcatctcatagacttacttgtgatatcttgcctacatagtcatagaattagtatatcgtaaatttttctttataaaggatttggccatgagaagaactctacttagggtcgttgtcataaaggactatatgctcttccatcttcatcctcgaatcaaacgcatacccgtagctcacccggtatgccaacgccccgccggttgccaccattcggccagtggaagaccatgtcttgggattatataacatgtgttatccgacaccaggttttaaatccaaatttgccttaatccccaa

SEQ ID NO: 30293 - DNA, 3000 bp, Oryza sativa
  Clone ID: PAT_MRT4530_34711C.1
atgtcgtatgacattgaatataagaaatggtccttaaccaacaagaaatgtttggctgtggtaaagaacacaattgagccaaccatattgggctcaatcccagagtgtgacgctgtctcagagtacctcgaaagaataaagagtcaatttactggctcttcaaagacttatgctacacagctgataaagcagcttgtgacagagaggtaccatggaggtggtgtaagagaccacattcttaggatgagcaacatggcttccaagttgaagccaatggatttgggcataacagatgactttctggtccatctggttatggcctcattgccaaagcactttgacaactttattgtcaactacaacataagtccagagaaatggaattttgaaaagctcatcgctaattgtgtgcaagaggaggaaaaaatcaaagagtccaatggtggctctattaactatgttaaagataacaagaaaaagaactacaagtcaccctcctcaaaagcaaaacagcctcagcatttgcctcagcaacaacagttcgctgttgaaaaggatcagtgtctccactgcaagaagacaggacattacaagaaagactgtcctgacttcctaaaaatgatcatggcaaagaaaggtaaaaacattattacttttgtaaatgaatctcattatgttggttattctagatccacatggtggattgattctggagcaactattcatgcgtgtaattgtttaaaggcattccgttcgatgaggactacgcaaagaagcgaaagctccattagagttgccaatggagttgaagaaaaagttgacgctgttggagatctttccctagagctcgcgaatggcttcacacttttacttcgaaatgtcttttatgttccttcttttcaaagaaatttaataagtgtatcaaaattggattttgatggatatgattgccgctttggaagtggcgaatgtgaactatgggggagaattgagagactagttaagaatgaaattcttcctccattggagttctcagatttagaacaatgcatagaatgcattaaaggaaaatttgtaaagaacatcaaaaagggtgcaaaacgaagcgcaggatttttggaaataattcacacagatatttgtggtccatttcctgtgaaaagtgtggatggctatgactcgttcataacattcacagatgattattcccgttatagttatatttatccaattaaagaaagatcagaagcattggataaatttaagatattcaaagctgaagttgaaaatcagcatgatatgggcaagtccctggaccttttccttttgcaagctgaaaggcgtaaccgtacccttatggatatggtgcgcagcatgatgagctactccaccctatcattgggtttatggatggaggcgttaaaaaccgccattcatatcctcaacagagttccaagcaaatcggtgcccaaaacaccgtatgagctatggacaggaagagtaccctcgctagctcacctccgcgtgtgggggagtcctgcggaggctaaaatatttaacccagaccttaggaaattggatcccaaaacagattcaacagaaattattgccacaccagaggaggagctgcaacagcctcaaacagataatgtgccagtacaggagactcaacaagagcctcacatacagaatgtgccaaatgtggaggcccctagaaggtctgaaagagtcagaagatcggctatccgtgatgactatcaagtttataatatagaagagtcacatatggaggatgatcccacctcatataaagaggccatgagaagcgctcgttcatctgaatggttggaagccatgaaagatgaaatgaaatcaatgaaactaaacgatgtctgggatttagaagagattcctaaaggagccaaaacagtaggctgtaaatgggtctacaaaaccaaatatgactccagagggaatatagaaaaatttaaggcgcgacttgtggcaaaaggcttcacgcaaagagaagggattgattacaatgagacattttctccagtctcttgtaaagattccttcaggattataatagcattgatggcacattatgatttggaattacatcagatggatgtgaaaacgacatttctaaatggagatttggaggaaaaagaaacaaagaaattcttgtcatcaaactttgacatgaaagacatcggtgaggcttcatatgttttgggcatagagattcatcgagatagaacaaagtatgcattgggactttctcaaaaggcatatatagaaaaggtgttgatgaaattcaacatgtacagatgcagtgctacacctgctcctatagtcaagggcgaaaagtatggggcatcacaatgtcccagaaatcagtatgagctcaatgaaatgaaaacaaagccatatgcgtcagctgtgggaagcctacagtatgcgcaagtgtgcacacgccctgacttggcatttgtcaccgagttgcttggcagatttcagagtaatccaggtccaaagcactggaaattagtaaagaaagtcttgtgtttttggaaaggtacaaaaggcctcatgatgtcttacagaagattagagtcactccagatagtggggtattcagattctgattttgcaaaagacaatacaaagtcaacatcgggatacgtgttcacccttgcgggaggagctatttcatggaaaagctccaaacagactatcactgcagggtctactatgtatgccgagtttatagcatgctatgaggccacggggcaggtgaactggctaaagaagttcatatctggtttaaaggtggttgacagtattgagaaaccactaaagttatactgcgataacgaacccgcagtaatgtacgctcacaacaatcagtcaagtggtgctgccaaacacattgacataaagtactatgttgtgaaggacagtccgagatcaaacaatcagtctcgagcacattag

SEQ ID NO: 30294 - DNA, 4008 bp, Oryza sativa
  Clone ID: PAT_MRT4530_34712C.1
atgtccggcgcctcttcctccacgaactcctcaaccggtggctactccttgatgggttgcattaaagatattccgaccctaaaaggagataactacgcagaatggaaaagaaaactcgaccttgcttttatcttgggagaggtggactgggtattgactaccccatgtcctatagaacctgctgaacttgtcagaggtgaaaatgagtcagatgctgactggcaaaagagacagagggacaatgctcctctcgtcatgtcgtatgacattgaacaaaagaaatggtccttagccaacaagaaatgtttggctgtggtaaagaatacgattgagcctaccatattgggctcgatcccagagtgtgacgctgtctcagagtaccttgaaagaataaagagtcagtttactggctcttcaaagacttatgctacacagctgatcaagcagcttgtgacagaaaggtaccatggaggtggtgttagagaccacatacttagaatgagcaacatggcttccaagttgaagccaatggatttgggcataacagatgactttctggtccatctggaggagagaatcaaagaatcaaatggtggttcaataaactatgttaaagataagaaaaagaaccacaagtctcccacctcaaaaggtaaacagtctcagcatctgcctcagcaacaacagttcgctgttgagaaagatcaatgtctccactgcaagaagacaggacactacaagaaagattgtcctgactttttgaaaatgatcatggcaaagaaaggtgagaacattattacatttgtaaatgaatctcattatgttggttactctagatccacatggtggattgattctggagcaactattcatgcttgtaattgtttaaaggcattccgttcgacgaggactacgcaaggaagagaaagcaccattagagttgccaatggagttgaagaaaaagttgaagctgttggagatcttccgctagagctcgcgaatggcttcacacttttacttcgagatgtcttttatgttccttctttgcaaagaaacttaataagtgtatcaaagttggattttgatggatatgattgccgctttggaagtggcaaatgtgaactatggcataataatgcatgtattggtcttgctgtgttgcgagacgagctttatttgttatctctttctgagaatgtgaatgttgtgtcctcgttgacaaaagaaaacaagaaaagaaagcgaactcccgatgtctcatcgaaattatggcactgtcgtttgggccatatttcgagggggagaattgagagactagttaagaatgaaattcttcctccattggagttctcagacttagaacaatgcatagaatgcattaaaggaaaatttgtaaagagcatcaaaaaggatgattactcccgctatggttatatttatccaattaaagagcgatcagaagcactggataaatttaagatattcaaagctgaagttgaaaatcagcttgatataaagattaaagtagtaagatctgaccgtgggggagagtactatggtcgacatacgccttatgggcaagtccctagaccttttgcaaggttcttgctagagaatggaatagtagcccagtattcaacaccgggcgaacctcaacagaatggggtagctgaaaggcgcaaccgtacgcttatggatattgtgcgcagcatgatgagctactccacactaccactcggtttatggatggaggcgttaaaaaccgccattcatattctcaacagagttccaagcaaatcggtacccaaaacaccgtatgagctatggacagggagagtaccctcgctaactcacctccgtgtgtgggggagtcctgcagaggccaaagtatttaacccaaatattgggaagttggaccccaaaacagtcagctgccattttattggctatcctgaaagatcaaaaggctatcgtttctactgtccaaacagttatacaaagtttgtagaaacgagacacgccgtcttcttggaagacgaaatgattagggggagctcggtagttcgagaaattgatcttgaggagaggcgggtgtctgtacccgctccgtcgactcaggaacctttcttctctctacctgctgatgttgtgcctgcaatgcctgtcattgaggtaccagcacctgttgttacccctcctgtggcaacaatgaatgagagtgaggaacctgttatacaggattcaacagaaatggttgtcacaccagaggaggagctacaacagcctcaaatagataatgtgccagtacaggagactcatcaagagcctcaggtacaggatgtgccaaatgtgcaggcccctagaaggtctgaaagagtcagaagatcggctatccgtgatgactataaagtttataatatagaagagtcgcatatggaggatgatcccacctcatatgaagaggccatgagaagcgctcgctcatctgaatggttggaagccatgaaagatgaaatgaaatcaatgaaactaaacaatgtttgggatttagaagaaattcctaaaggagccaaaacagtaggctgtaaatgggtctacaaaaccaaatatgactccagagggaatatagaaaagtttaaagcgcgacttgtggcaaaaggcttcacgcaacgagaagggattgattacaatgagacattttctccagtctcttgtaaagattccttcaggattataatggcactagtggcacattatgatttggaattacatcagatggatgtaaaaacggcatttctaaatggagatttggaggaaaaagtatacatggcgcaaccgaaaggttttgtcatgaaaggaaacgaaaatatgggatgtcgtctaaagagatccatttatggattaaagcaagcttcgagacagtggtacttgaagtttgatgggacaataaagaaatttgggtttcaagagaatgtcgaggacaactgtatttattcaaagtttaagaatgggagatttattttcctaattctgtatgtggatgacattctactggctagtagtgatgtcagtctactgcaggaaacaaagaaattcttgtcctcaaactttgacatgaaagacctcggtgaggcttcatatgttttgggcatagagattcaccgagatagaacaaagtatgcattgggactttctcaaaagacatatatagaaaaggtgttgaagaaattcaacatgtacagatgcagtgctacacctgctcctataatgaaaggcgaaaagtatggggcatcgcaatgtcccagaaatcagtatgagctcaatgaaatgaaaacaaagccatatgcgtcagctgtaggaagcctacagtacgcgcaagtgtgcacacgacctgacttggcatttgttaccgggttacttggcagatttcagagtaatccaggcctagagcactggaaattggtaaagaaagtcttgcgttatttgcaaggaacaaaaggcctcatgctgacttacagaagatcagaatcactccagatagtggggtactcagattctgactttgcaaaagataatacaaagtcaacatcgggatacgtgtttaccctggcaggaggagctatttcatggaaaagctcaaaacagactatcactgcagggtctactatgtatgccgagtttatagcatgctatgaggcaacggggcaggtgaactggctaaagaagttcatacccggtttaaaggtggttgacagtattgagaaaccactaaagttatactgcgacaacgaacccacagtaatgtacgctcacaacaatcagtcaagtggtgctgccaaacacattgacataaagtactatgttgtgaaggacaaagtccgggatcaaacaatcagtctcgagcacattaaaacagaaaggatgctcgcggatccgctcacgaaaggcctaccacccaacgtgttcaaggaacatgtagccggcatgggtttaagggaagccttatga

SEQ ID NO: 30295 - DNA, 528 bp, Oryza sativa
  Clone ID: PAT_MRT4530_34713C.1
atggcgcggcggcgcgaagaggtggactgggtgttgactatcccatgtcctatagaacctgctgcacttgtcagaggtgaaaatgagtcagatgctgactgggaaaagagacagagggacaatgctcttctcatcatgtcgtatgacattgaacataagaaatggttcttagccaacaagaaatgtttggctgtgctgataaagcagcttgtgacagagaggtaccatggaggtggtgttagagaccacattcttaggatgagcaatatggcttccaagttgaagccaatggatttgggcttaacagatgacttcttggtccatttggttatggcctcattgccaaagcagtttgacaattttattgtcaactacaacataagtccagagaaatggaactttgaaaagctcatcgctaattgtgtgcaagaggaggagagaatcaaagagtcaaatggtggttcaattaactatgttaaagataacaagaaaaagaaccacaagtctcccacctcaaaagctaaatag

SEQ ID NO: 30296 - DNA, 2499 bp, Oryza sativa
  Clone ID: PAT_MRT4530_34714C.1
atgacggaagagaaagaaagcttcgaaggccaatgggcgccgtccgacgtgacggaagagaacctgaaggagatggtggcgcacggcgttctccctgccaaggagatcatcgggtggcggccagcgtgcggtgaggcttttccaacccccgatacacacgaggtcgtggtcttctctcatttcttttatggtggatttgctcttccaacctcgaagttcttccgtgggatactaaatttctatggaatcagcttacatcatttgaatccgaactccatagtccatattgcaaatttcgtccatgtctgtgaagcttttttgggcattagacctcattttgctctgttccgccgaatctttttccttaagcctcaaccgaacaaaaacaaaccatgcgtagttggtggggctggatttcaactgaggggcactctgagccagaagtatttctctatgcctttcaagacttcaaacaaaggatggcacgccaactggttttatattcaaaatcccgagcctgctctccccgagtactcttgtcttcctccggtgtaccaagatacttggaactctcttccgatcggagatgaagctgcccaagccttagaactgatggaacgcatgctgaagctcaaagagcaaggcttacagggagagcaaatcactcggcatttcattaagtgtcgattagctccaatcaaagagagatcccgcacagcattcgagttcgacggcaagcatgatccaaaccgtgaagacccagactctctggactttaaaatcatgaaggagagaatgtataaaatcttctcaaatgctattgtcgtcagctactcacatcagctgccagttgtaccatataatgcattcaatccgcctccacaggagtatgtattaatgaaatctgatcccccaactgctcaacgccgatctcctcgccagcacaccgttcagggaagcggagggccgacaatcaggtcagacccgcaacctcaaacctctaaaccggctgggcagacaggttctcgcaagagaaagctggtgcttaatgacgacgaagatgatgacagcaacaaatctggggacaaaggaacgcccaataaacccccaaagcataccatgcccaggaaaaaactggctggccgtcaaatgccaaagattagaacatcttccaggaaaccgtccgatatagatccaactggaaaagaacctgatccggctgccacagagccaaatttatccaaagatgctaagccaactgccgaaagccagccgactgccgaaagccaaccgactgccgaaagtcagccgactggcgcccaagcttcggacgacaaggccaatccgagtgatcagccgctgactggaaaccagtcggcagcaactgaaactgcaacaacccgagagcccccgactggaaaccagtcggatgtagatctaaatcaagagattcctgaagctaaagcgcagacaacttctcaaggaccagaagttggtaatgactcagtgattgggtctccagataaagagcaaggatcacctcacgctcagccaggcacatcctcaggtccactaggcggcgacgaagaagaaattctccgcataaaggcagctgatgactctcgtcctcctatcttactcaaatggtgggacgagaactctcaagtttccggcattgtcataaatcgccaaaaagaagatgaggaagtgtgccagctgaagaaagtacttggagaagctactcgcattgtgaatagaatccatcttcgcaatgaggccaagaccacaaccttagaaaagctggtccctcatttgggaactcttgaagccgttaggagccagctacacgaggccaaggagcacgccaaaaagacggagaaagaattaagggagcgaattgctcagctccaggattcaaacttcgagctgagtggttcatcaaaagcgcaagccaccaggatgactcaaatggagaaacaaattgaagccttaaaaagagacaaagtagaactggctgcggaaagggactcagccttgaaggaggttgaagatcgtaaaatcaaatctcaagctcagtttgacgtcctggttggtaagatcaagaagcttgaaggagcaagagacgaagtcgccaatgtcgctacaccactcgtccaagctatgttccttaataacagtggtccgagtgcacttgacgcaaccgaaatctttgacaagctgagagttgcaccggatgtatatttcaagaatatcaagaaagctggaagtatgggagctagtatggcattggcgatgaccaaatccttgtacccgaggattgaaattgataccattgatggctttgcagacgggacaagtgaagaagctgctcttgatcttatcagtaatgctcaaagtgcggctgacaagattgcaagtgatgttgtagagcaattccgcaacaacgaccttcagccgagcaataataactctgatgatgaaaggactgattctgactga

SEQ ID NO: 30297 - DNA, 1170 bp, Oryza sativa
  Clone ID: PAT_MRT4530_34715C.1
atggccactagatggagtgtttgcaagtttttagaagcaagggttatggagttctatgcaagccctcatccaccgccgctgcacgtccgccccgcgccgtcgtccgccgccgccgcacagccgcggcccgctgttgtccgcgccgccgccgcacggccacggcccgctgtcgtcaacgcggatctgggagggaggggcggccgggagccgccgccgccgcagcacggccgcggctcgccgtcgtcaacgtggatctgggagggaggggcggccgggagccgccgccgccgcagcacggccgcggctcgccgtcgtccgcgccgccgccgcacggccccggcccgctgtcgtcaacgtggatctgggagggaggggcggccgggagccgccgccgcccgccgtcgtccacgccgccgccgcatgaccacggcccgccgtggtcactccagatctaggagggaggggcggccgggagccgccgtcgccgccgcacggccgcggcccacctgcgtccgcgccgccgctgcacggccacggcccaccgtcgtcactccagatctgggagggaggggcggccgggagcagccaccgccgcctcaaccgccctcgccgccgtggtcgtgctgccgcctcgaccctcctcgccaccaccgcccgccgccgtgctccccccgcccccctccggccagatatgggagggaggggccaggagcgcgccgccgccgccctccaccgtcaccgcccgccgccggccgccgctgccgggagaggagagaggcggacatcaaatttcacctcgatttatatttttgtaggcggtcatttggttctaaagagacacgctgcacgctgcccgcaccgccgcacgtaaggaaagaaggtaagaacatggcgtggaaagcagcattggccgctctgcttctgttcatggttgtggctgccaacggcgaggtcggccatggtggccacgccgccgtgccgctcaggcgaagcctgggcctgggctggatgaccggcttgaagggtggcccgcctaccggcatgcagccatcatcaatccgtcctgctgcaactggagaaggtgggaggcgtttgagcagcgaaggggagaagttcatccacacgctgccggccttcaagcgaccgcctatcccaccgacgtctaattaa

SEQ ID NO: 30298 - DNA, 195 bp, Oryza sativa
  Clone ID: PAT_MRT4530_34716C.1
tttgtttctaccgactatgacaatctcagcagggcggattttgtgtgtcttcattgacactcacatcatgtgaagctctattggctgagctactagcaactatactagaaacatgatttgttggacagaaaaaaacatcggcggacgaatactggtgagataagcacggtcgaaatgaaacatggagctcatgta

SEQ ID NO: 30299 - DNA, 4119 bp, Oryza sativa
  Clone ID: PAT_MRT4530_34717C.1
atgattatttcaggtggctactgcttgatgggttgcattaaagatattccgaccctgaagggagataactacgcagaatggaaaagaaaactcgacattgctttcatcttgggagaggtggactgggtgttgactaccccatgtcctatagaacctgctgcacttgtcagagttgaaaatgagtcagatgctgactggcaaagaagacagagggacaatgctcccctcataatgtcgtattacattgagcaaaagaaatggtccttagtcaacaagaaatgtttggctgtggtaaagaacacgattgagccaaccttattgggctcaatcccagagtgtgacaccatctctaagtaccttgaaagaataaagagccaatttactggttcttcaaagacttatgctacacagctaataaagcagcttgtgacagaaaggtaccatggaggtggtgtaagagaccacattcttaggatgagcaacatggcttccaagttgaagccaatggatttgggcatctcagatgactttcttgtccatttggttatggcctcattgccaaagcactttgacaactttgttgtcaactacaatataagtccagagaaatggaactttgaaaagctcatcgctaattgtgtgcaagaggaggaaagaatcaaagagtccaatggagactctattaactatgttaaagataacaagaaaaagaactacaagtcaccctcctcaaaagcaaaacagcctcagcatctgccttagcaacaacagttcactgttgaaaaggatcagtgtctccactgcaagaagacagggcattacaagaatgattgtcctgacttcctgaaaataatcatggcaaagaaaggtgagaacattattacatttgtaaatgaatctcattatgttggttattccagatccacatggtggattgattctggagcaactattcatgtgtctaattgtttaaagggattccgttcgacgagaactacgtaaagaagcgaaagctccattagagtcgccaatggagttgaagcaaaagttgaagctgttggagatcttcgcctagagctcgcgaatggcttcacacttttacttagagatgatttttatgttccttctttgcaaagaaatttaataagtgtatcgaaattggatttcggtggataggattgccattttggaaatggaaaatgtaaactatggtataataatgcatgtattggtcttgctgtgttgcaagacgagctttatttgttatctcttcctgagaatgtgaatgttgtgtcctcgttgacaaaagaaaacaagaaaagaaagagaactcctgatgtctcatcgaaattatggcactgtcgtttaggccatatttcaagggggagaattgagagactagttaagaatgaaattcttcctccattagagttatcagatttagaacaatgcattgaatgcattaaaagaaaatttgtaaagagcataaaaaagtgtgcaaaacgaagcgtaggaattttcgagatcattcacacagatatttgtggtccatttcctgtgaaaagtgtagatggctatgactcgttcataacattcacagatgattactcccgatatggttatatttattcaattaaagaaagatcagaagcattggataaatttaagatattcaaagctgaagttgaaaatcagcatgacataaagattaaagtagtaagatctgaccgtggggggagtactatggtcggcatacgccttatgggcaattccatggaccttttgcaaggttcttgctagagaatggtatagtagcccagtattcaacaccaggtgaacctcaacagaatggggtagtgaaaggtgtaaccgtacccttatggatatggtgcgcagcatgatgagctactccaccttaccattgggtttatggatggaggcattaaaaacctcaattcatatcctcaacatagttccaagcaaattggtgcccaaaacaccgtatgagctatggacaggaagagtaccctcgctagctcacctccatgtgtgggggagtcctgcagaggctaaaatatttaacccaaaccttgggaaattggatcccaaaacagtaagctgtcattttattggctatcctgaaagatcgaagggttatcgtttctactgtccaaacagttatacaaagtttgtagaaatgagacacgccgtcttcttggaagacgaaatgattaggaggagctcggtagttcgagaaattgatcttgaggagaggcaggtgtctgtaccggctccgtcgactcaagagccttttttctctctacctgctgatgttgtgcctgcaatgcatgacgttgcggtactagcacctattgttacccctcctgtggcaacattgaatgaaagtgaggaacctgttctacaggattcaacaaaaattattgccatacaagaggaggaggtgcaacagcctcaaacagagaatgtgccaaatgtggaggcccctagaaggtctgaaagagtcagaagatcggctatctgtgatgactatgaagtttataatatagatagtcgcatatggaggatgatcccacctcatatgaagaggccatgagaagcgttcgctcatctgaatgattggaagccatgaaagatgaaatgaaatcaatgaaactaaacgatgtctgggatttagaagaaattcctaaaggagccaagacagtaggctgtaaatgggtctataaaaccaaatatgagtccagagggaatatagaaaagtttaagacgcggcttgtggcaaaagttttcacgcaaagagaagaaattgattacaatgagacattttctccagtctcttgtaaagattccttcaggattataatggctttggtggcacattatgatttggaattacatcagatggatataaaaacggtatttctaaatggagatttgaaggaaaaagtatacatggcacaaccgaaaggttttgtcgtgaaaggaaacgaaaatatgggatgtcgtctaaagagatccatttatggattaaaacaagcttcgagacagtggtacttgaagtttgatgggacaataaagaaatttgggtttcgagagaatattgaggacaactgtatttatacaaagtttaagaatgggagattcattttcctagttctgtatgtaaatgacattctactggctagtagtgatgtcagtgtactgcaggaaacaaagaaattcttgtcctcaaactttgacatgaaagacctcggtgaggcttcatatgttttgggcatagagattcaccgagacaaaacaaagtatgtattgggactttctcaaaagacatatatagaaaaggtgttgaagaaattcaacatgtacagatgcagtgccacacctgctcctatagtcaagggtgaaaagtatgggacatggcgatgtcccaaaaatcagtatgagctcaacgaaatgaaaacaaagccatatgcgtcagctgtgggaagcctacagtatgcgtaagtgtgcacacgtcctgacttggcatttatcaccgggttacttggcagatttcagagtaatccaggcccagagcactggaaattggtaaagaaagtcttgcgttatttgcaaggtacaaaaggcctcatgttgtcttatagaagatcagagccgctccggatagtggggtattcaggttctgattttgcaaaagataatacaaagtcaacatcaggatacgtgttcacccttgcagggggagctatttcatggaaaagctccaaacagactatcactgcagggtctactatgtatgccgagtttatagcatgctatgaggccacggggcaggtaaactagcgaaagaagttcatacccggtttaaaggtggttgacagtattgagaaaccactaaagttatgctgcgacaacgaacccacagtaatgtacgctcacaacaatcagtcaagtggtgctgccaaacacattgacataaagtactattttgtgaaggacaaagtccgggattaaacaatcagtctcgagcacattagaacagaaaggatgctcgtggatccgctcacgaaaggcctaccacccaacgtgttcaaggaacat

SEQ ID NO: 30300 - DNA, 2454 bp, Oryza sativa
  Clone ID: PAT_MRT4530_34718C.1
atggcggaagagaaggaaagctttgaaggccaatgggcgccatccgacgtgacggaggagaacctgaaggagatggtggcgcacggcgttctccctgccaaggaaatcatcgggtggcggccagcgtgcggtgaggcttttccgacccccgatacacacgaggctgtggtcttctcccatttcttctatggcggcttcgctcttccgacctcaaaatttttccgcgggatattaagtttctatggaatcagcttgcatcacctaaacccaaattccatagttcacatcgccaatttcatccatgtttgtgaagccttcttgggaattaagccccacttcgctctgtttcgccgaatcttctttctcaagccccaaccaaacaagaggtggcatgcaaactggttttatattcagaatcctgagcctgctcttctcgagtactcttgtcttcctccggtgtaccaagatacctggaactctcttccgattggggatgaagaagcccaagccttggagctgatggatcgcatgctaaaactcaaagaacaaggcttacaaggagagcagattactcggcacttcatcaaatgccgattggcaccaattaaagaaagatcccgtacggcattcgagtttgacggcaagcatgatcctaatcgtgaagaaccagattctctggattttaaaatcatgaaggagagaatgtataaaatcttctcaaatgctattgtcgtcagctactcacatcagctgccagttgtgccatataacgcattcaatccgcctccgcaggaatatgtattgatgaagtctgaccccccaatcactcagcgccggtctcctcgtcagcacaccgttcagggaggtggagggccgacaatcagatcagatccgcaacctcaaacctccaatccgactgggcagacaggttctcgcaagagaaagctggtgcttaatgacgacgaaggcgacgacggcaacaaatctggggacaaaggctcgcccaataaactcccaaagcataccactcccaggaaaaaactggctagtcgtccaaggccaaagatcagaacatcttccaggtataaacctctcggtaccatttcacttcgacatgcttctctcatggaaatagtactgaatattgaaagaacactttgcaggaaaccatccgacatagatccaactggaaaagatcctgatccgactgtgacagaaccaagttcatccaaggattctgagccaactgccgaaagccagccgactggcgcccatacttcaggtgataaggccaatccgagtgaccagccttcgactggaaaccagtcggcagcaactaaaactacaacaacccaagagcccccgactagaaaccattcggatgtaggtccagatcaagaaactcccgaagttgaagcgcagacgacaacttctcaaggaccagaggctggtaacgactcgatgattgggtctccagataaagaacaaggatcaccccacgctcagctaggaacatcctcaagaccaccaggcgatgacgaagaagaaattcctcgcataaaggcggctgatgactctcgtcctcctatcttgctcaaatggtgggacgagaactcacaagctgccggcatcgtcataaatcgtcaaaaagaagatgaggaagtgtgccagctgaagaaggcacttggagaagccactcgcattgtgaatagaatccatcttcgcaatgaggccaagaccgcaactttagaaaagctggttcctcatttgggaactcttgaagcagttagggatcagctacacgaggccaaggagctcgccaaaaagacagagaaggaattaagggaccgaattgctcagctccaggattcaaacttcgagctgagtggttcatcaaaagcgcaagccgccaggatggctcaaatggagaaacaaattgaagccctggaaagagacaaggtagaactggctgcgcaaagggactcggccttgaaggaggttgaagaccgcaaaatcaaatctcaagctcaatttgacgtcctggttggtaaaatcaagaggcttgaaggagcaagagatgaagtcgctaatgtcgctataccactcgtccaagctatgttcctcaataacagtggtccgagtgtactcggcgcaaccgaaatcttcgacaagcagagagttgctccggatgtatatttcaagaatatcaagaaagctggaagtatgagagctagcacggcattggcgatgaccaaatccttgtacccgaggattgaaattgacgccattgatggctttgcagacgggacaagcgtagaggctgctcttgatcttatcagcaatgctcaaaatgcggctgacaagattgcaagtgacgtcgtagatcaattccgcaacaccgaccttcagccgagtagtaataactctgatgatgaaaggactgattctgactga

SEQ ID NO: 30301 - DNA, 252 bp, Oryza sativa
  Clone ID: PAT_MRT4530_34719C.1
atggggcccacgtggcaatgcctgcttcattcttctctcctggaccctggtgatggggaggcggtcgggaagaagcgcaagacgagtccgaggcgggagaggaatggagaggtggtcggcgagcccatccaagctcaagctcgcccggcctccatgcgagggaggtggacggaggagcgtgagagccctgatccaacggagcacgtcgaagcccagcgcagcacaccagatcagttaccagccaacaaataa

SEQ ID NO: 30302 - DNA, 743 bp, Oryza sativa
  Clone ID: PAT_MRT4530_3471C.1
gtttaagcattggtcttgtagtcagtggcggcacagttcttttgcttctggctctttgtgctcccctcgcaacacatctagagaaggccacaaacaattttgataaaagtcgtgaggttggtgggggagggcatggcattgtgtacaagggaatacttgacctacatgttgtggccatcaagaaatcaaagatagtagtacaacgagaaattgaccaattcataaatgaggttgcagttctttcccaaatcaaccatagaaatgtagtgaagctcctaggatgctgccttgagacagaagttccattgttggtttatgagtttgtttcaaatggaacactttatgatcatcttcatgttgaagggccaatgtcagttccgtgggatgaccgactaaggattgcacttgaagttgctagagctgttgcgtatctgcattcagctagttctatgccaatattccatagagatattaaatcttccaatatacttcttgatgatagcttgacagcaaaggtgtcagactttggagcttcaaggtacattccaatcgatcaaacaggagtgacaacagctgttcagggaacatttggatatttagatccaatgtactattacactggaaggctaactgacaggagtgatgtttttagttttggtgttcttctcgtggaattgcttactagaaagaagccgtttatcctcaagtcatggaagagggagatggagaagtccaagaagtag

SEQ ID NO: 30303 - DNA, 4022 bp, Oryza sativa
  Clone ID: PAT_MRT4530_34720C.1
gtggctactccttgatgggttgcattaaagatattccgaccctaaaaggagataactacgcagaatggaaaagaaaactcgaccttgcttttatcttgggagaggtggactgggtattgactaccccatgtcctatagaacctgctgaccttgtcagaggtgaaaagtgtgacgctgtctcagagtaccttgaaagaataaagagtcagtttactggctcttcaaagacttatgctacacagctgatcaagcagcttgtgacagaaaggtacaatggaggtggtgttagagaccacatacttagaatgagcaacatggcttccaagttgaagccaatggatttgggcataacagatgactttctggtccatctggttatggcctcattgccaaagcagtttgacaattttattgtcaactacaacataagtccagagaaatggaactttgagaagctcattgctaattgtgtgcaagaggaggagagaatcaaagaatcaaatggtggttcaataaactatgttaaagataagaaaaagaaccacaagtctcccacctcaaaaggtaaacagtctcagcatctgcctcagcaacaacagttcgctgttgagaaagatcaatgtctccactgcaagaagacaggacactacaagaaagattgtcctgactttttgaaaatgatcatggcaaagaaaggtgagaacattattacatttgtaaatgaatctcattatgttggttactctagatccacatggtggattgattctggagcaactattcatgcttgtaattgtttaaaggcattccgttcgacgaggactacgcaaagaagagaaagcaccattagagttgccaatggagttgaagaaaaagttgaagctgttggagatcttcctctagagctcgcgaatggcttcatacttttacttcgagatgtcttttatgttccttctttgcaaagaaacttaataagtgtatcaaagttggattttgatggatatgattgccgctttggaagtggcaaatgtgaactatggcataataatgcatgtattggtcttgctgtgttgcgagacgagctttatttgttatctctttctgagaatgtgaatgttgtgttctcattgacaaaagaaaacaagaaaagaaagcgaactcccgatgtctcatcgaaattatggcactgtcgtttgggccatatttcgagggggagaattgagagactagttaagaatgaaattcttcctccattggagttctcagacttagaacaatgcatagaatgcattaaaggaaaatttgtaaagagcatcaaaaagggtgcaaaacgaagcgcaggaattttagagatcattcatacagatatttgtggtccatttcctgtgaaaagtgtggatggctatgactcgttcataacattcacagatgattactcccgctatggttatatttatccaattaaagagcgattagaagcactggataaatttaagatattcaaagctgaagttgaaaatcagcatgatataaagattaaagtagtaagatctgaccgtgggggggagtactatggtcgacatacgccttatgggcaagtccctggaccttttgcaaggttcttgctagagaatggaatagtagcccagtattcaacaccgggcgaacctcaacagaatggggtagctgaaaggcgcaaccgtacccttatggatatggtgcgcagcatgatgagctactccacactaccactcggtttatggatggaggcgttaaaaaccgccattcacattctcaacagagttccaagcaaatcggtgcccaaaacaccgtatgagctatggacaggaagagtaccctcgctaactcacctccgtgtgtgggggagtcctacagaggccaaagtatttaactcaaatattgggaagttggaccccaaaacagtcagctgccattttattagctatcctgaaagatcaaaaggctatcgtttctactatccaaacagttatacaaagtttgtagaaacgagacacgccgtcttcttggaagacgaaatgattagggggagctcggtagttcgagaaattgatcttgaggagaggcgggtgtctgtacccgctccgtcgactcaggaacctttcttctctctacctgctgatgttgtgcctgcaatgcctgtcattgaggtaccagcacctgttgttacccctcctgtcgcaacattgaatgagagtgaggaacctgttatacaggattcaacagaaatggttgccacaccagaggaggagctacaacagcctcaaataaataatgtgccagtacaggagactcatcaagagcctcaggtacaggatgtgccaaatgtgcaggcccctagaaggtctgaaagagtcagaagatcggctatccgtgatgactataaagtttataatatagaagagtcgcatatggaggatgatcccacttcatatgaagaggccatgagaagcgctcgctcatctgaatggttggaatccatgaaagatgaaatgaaatcaatgaaactaaacgatgtttgggatttagaagaaattcctaaaggagccaaaacagtaggctgtaaatgggtctacaaaaccaaatatgactccagagggaatatagaaaagtttaaagcgcgacttgtggcaaaaggcttcacgcaacgagaagggattgattacaatgagacattttctccagtctcttgtaaagattccttcaggattataatggcactagtggcacattatgatttggaattacatcagatggatgtaaaaacggcatttctaaatggagatttggaggaaaaagtatacatggcgcaaccgaaaggttttgtcatgaaaggaaacgaaaatatgggatgtcgtctaaagagatccatttatggattaaagcaagcttcgagacagtggtacttgaagtttgatgggacaataaagaaatttgggtttcaagagaatgtcgaggacaactgtatttattcaaagtttaagaatgggagatttattttcctaattctatatgtggatgacattctactggctagtagtgatgtcagtctactgcaggaaacaaagaaattcttatcctcaaactttgacatgaaagacctcggtgaggcttcatatgttttgggcatagagattcaccgagatagaacaaagtatgcattgggactttctcaaaagacatatatagaaaaggtgttgaagaaattcaacatgtacagatgcagtactacacctgctcctataatgaaaggcgaaaagtatggggcatcgcaatgtcccagaaatcagtatgagctcaatgaaatgaaaacaaagccatatgcgtcagctgtaggaagcctacagtatgcgcaagtgtgcacacgacctgacttggcatttgttaccgggttacttggcagatttcagagtaatccaggcctagagcactggaaattaataaagaaagtcttgcattatttgcaaggaacaaaaggcctcatgctgtcttacagaagatcagaatcactccagatagtggggtactcagattctgactttgcaaaagataatacaaagtcaacatcgggatacgtgtttaccctggcaggaggagctatttcatggaaaagctcaaaatagactatcactgcagggtctactatgtatgccgagtttatagcatgctatgagacaacggggcaggtgaactggctaaagaagttcatacccggtttaaaggtggttgatagtattgagaaaccactaaagttatactgcgacaacgaacccgcagtaatgtacgctcacaacaatcagtcaagtggtgctgccaaacacattgacataaagtactatattgtgaaggacaaagtccgggatcaaacaatcagtctcgagcacattaaaacagaaaggatgctcgcggatccgctcacgaaaggcctaccacccaacgtgttcaaggaacatgtagccggcatgggtttaagggaagcctta

SEQ ID NO: 30304 - DNA, 2451 bp, Oryza sativa
  Clone ID: PAT_MRT4530_34721C.1
atggcggaggagaaagaaagctttgaaggccaatgggcgccatccgacgtaacggaagagaacttgaaggagatggtggcgcacggcgttctcccagccaaggagatcatcgggtggcggccagcgtgcggtgaggcttttccgacccctgatacacatgagatcgtagtcttctcgcatttcttctatggcggcttcgctcttccgacctcgaaatttttccgcgggatcttgaacttttatggaatcagcttgcatcacctaaacccaaattccatagtgcatatcgccaatttcgtccatgtttgtgaagcctttttgggaatcaagcctcactttgccctgtttcgccggatcttcttcctcaaaccccaaccgaacaagagcaaaccgggaactctgagccaaaaatacttctctatgcccttcaagacttcaaacaaagggtggcatgcaaactggttctacgttcagaatcctgagcctgctcttcccgggtactcttgtcttcctccggtgtaccaagatacctggaactcccttccaatcggagatgaagcagtccaagccttggagttgatggaccgcatgttaaaactcaaagaacaaggtttgcaaggagagcagattactcggcatttcatcaaatgccgactggcgccaattaaagaaagatcccgtacagcttttgagttcgacggcaagcatgatcctaaccgtgaagaacctgactctctggatttcaaaatcatgaaggagagaatgtataaaatcttctcaaatgccattgtcgttagctactcacaccagctgccagttgtgccatataatgcattcaatccgcctccgcaggaatatgtattgatgaaatccgatcccccaattgctcagcgacgatctcctcgccagcacaccattcagggaagtggagggccgacaatcatgtcagacccacaacctcaaacctccaaaccggctgggcagacaggtcctcgcaagagaaagctggtgcttgatgacgacgagggcgatgacagcaacaaatctggggacaagggcacgcccaacaaactcccgaagcataccatgcccaggaaaaaactggctggccgtcaaatgccaaagattagaacatcttccaggaaaccgtccgatatagatccaaccggaaaagatcctgatccggctgtgacagaacaaaatatatccaaggacgctgagccgactgctgaaagccagccgactgccgaaagccggccgactggcgcccatgcttcggatgacaaggccaatccgagtgaccagccgccgactggaaaccagtcggcaacaactgaaactgcaacaacccgagagcccccaactggaaaccagtcggatgtaggtcctgatcaagaaatccctgaagttgaagcgcaagcgacatcttctcaaggaccagaggctggaaatgactcggtggttggctctccagataaagaacaaggatcatctcgcgctcagccaggcacatcctcaggaacactaggcgatgacgaagaaacaattcctcgcataaaggcggctgatgactcccgtccccctatcttactcaaatggtgggacgagaactctcaagtttccggcattgttataaatcgccaaaaagaagatgaggaagtgtgccagctgaagaaagcacttggagaagccactcgcattgtgaatagaatccatcttcgtaatgaggccaagactgcaaccttagaaaagctggttccacatttgggaactcttgaagccgttagggaacagctacacgaggccaaggagtatgccaagaaaacggagaaggaattaagggaacgaattgcacagctccaggactccaacttcgagctgagtggttcatcaaaagcgcaagccaccagaatggcccagatggagaaacagattgaagccttgaaaagagacaaggtagaactggctgcgaaaagggactcagccttgaaggaggttgaagaccgtaaaatcaaatcgcaagctcagtttgatgtcctggttggtaagatcaagaagcttgaaggagcaagagacgaagtcgccaatgtcgctacaccactcgtccaagctatgttccttaataacagtggtccgagtgcacttgacgcaaccgaaatctttgacaagttaagagttgcaccggatgtatacttcaagaacatcaagaaagctggaagcatgggagctagcatggcattagcgatgaccaaatccttgtacccaagaattgaaatcgacaccattgatggatttgcagatgggacaagcgaagaagctgctcttgatcttatcaacaatgctcaaaatgcggctgacaagattgcaagcgatgtggtagatcaattccgcaacaacaaccttcagccgagcaacgataactctgatgatgaaaggactgattctgactga

SEQ ID NO: 30305 - DNA, 584 bp, Oryza sativa
  unsure (1)..(584): unsure at all n locations
  Clone ID: PAT_MRT4530_34722C.1
tcgctcttttctctctcgcgcacgaccgcgcngacgcgaggtcgccgccgccggcgaccttcgcgtcgccgcgccttgcaccgccggcgtccgggcagcgcctcgccccgccgccatcttttctctttcccctcaccatctctagccctccacccctctaccgagtgaagtgagagagagggacggccgaacgagatggcagcgccaccgcgggccccctcgccggcacgtgcgtgcacccgctggtgcgcgcacggccgtcgaggggctccttgacgacgccctgtgccctcccccattccccctttgccggcgttgacgatggccagcgacgagggatgcaagatatcgaagatcgatggaaattgctgccgcctacaaggtgcaagaaatcatcacatccggcatttaagtgtgtgaaagactggttctgatttttttttttgctttgttgtgtttcttctctgtgccatagctagaagctagactgaaaacaactatggattttttaggcttttttatcttagtgaattcatgtaaaaatatttagttatggttctatccagtttttgatggtgttcttg

SEQ ID NO: 30306 - DNA, 2499 bp, Oryza sativa
  Clone ID: PAT_MRT4530_34723C.1
atggcggaagagagagaaagcttcgaaagccaatgggcgccgtcggacgtgacggaagaaaacctgaaggagatggtggcgcacggcgttctccctgccaaggagatcatcgggtggcggccagcatgcggtgaagcctttccaacccccgatacacacgaggtcgtggtcttctctcatttcttttatggcggatttgctcttccaacctcaaagttcttccgtgggatactgaatttctatggaatcagcttacatcatatgaatccgaactccatagtccatattgcaaatttcgtccatgtctgcgaagcttttttgggcattagacctcattttgctctgttccgccgaatatttttccttaagcctcaaccaaacaaaaacaaaccatgcgtagttggaggagctggatttcaactgaggggcactctgagccaaaagtatttctccatgcctttcaagacttcaaacaaaggatggcacgccaactggttttatattcaaaatcccgagcccgctcttcctgagtactcctgtcttcccccagtataccaagatacatggaactctcttcccatgggagatgaagctgcccaagccttagaactgatggaacgcatgctgaaactcaaagagcaaggcttacagggagagcaaatcactcggcatttcattaagtgccgattagctccaatcaaagaaagatcccgcacagcatttgaatttgacggcaagcatgatccaaaccgtgaagacccagattctctggattttaagatcatgaaggagagaatgtacaagatattctcgaatgctattgtcgtcagctactcacatcagctgccagttgtaccatacaacgcattcaatccgcctccgcagaaatacgtattgatgaaatctgatcccccgattgctcagcgccgatctcctcgccagcacactattcagggaagtggagggccgacaatcaggtcagacccacaacctcaaacctccaaaccggctgggcaaacaggtcctcgcaagagaaagctggtgcttgatgacgacgagggcgatgacagcaacaaatctggggacaagggcacgcccaacaaactcccaaagcataccatgcccaggaaaaaactggctggccgtcaaatgccaaagattagaacatcttccaggaaaccgtccgatatagatccaaccggaaaagatcctgatccggctgtgacagagccaaatatatccaaggatgctgagccgactgctgaaagccggccgactgccgaaagccagccaactgccgaaagtcagccgactggcgcccaagcttcggacgacaaagccaatccgagtgatcagccgccgactggaaaccagtcggcagcaactgaaactgcaacaacccgagagcccccgactggaaaccagtcggatgtagatctaaatcaagagattcctgaagctgaagagcagacaacttctcaaggaccagaggctggtaatgactcggtgattggctctccagataaagaacaaggatcacctcgcactcagccaggcacatcctcaggtccactaggcggcgatgaagaaacaattcctcgcataaaggcagctgatgactctcgtcctcctatcttactcaaatggtgggacgagaactctcaagtttctggcattgtcataaatcgccaaaaagaagatgaggaagtgtgccagctgaagaaagtacttggagaagctactcgcattgtgaataggatccatcttcgcaacgaggccaagaccacaaccttagaaaagctggttcctcatttgggaactcttgaagccgttaggagccagctacacgaggccaaggagcatgccaagaaaacggagaaggaattaagggagcgaattgcacagctccaggactccaacttcgagctgagtggttcatcaaaagcgcaagctaccaggatggctcaaatggagaaacagattgaagccttgaaaagagataaagtagaactagctgcgcaaagggactcagccttgaaggaggttgaagaccgtaaaatcaaatctcaagctcagtttgatgtcctggtgggtaagatcaagaagcttgaaggagcaagaggcgaagtcgccaatgtcgctacaccacttgtccaagctatgttccttaatgacagtggtccgagtgcacttgacgcaaccgaaatctttgacaagctgagagttgcaccggatgtatacttcaagaatatcaagaaagctggaagtatgggagctagcatggcattggcgatgaccaaatccttgtacccgaggattgaaattgataccattgatggttttgcagacgggacaagtgaagaagctgctcttgatcttatcagtaatgctcaaagtgcggctgacaagattgcaagcgatgtggtagatcaattccgcaacaacaaccttcagccgagcaacgataactctgatgatgaaaggactgattctgactga

SEQ ID NO: 30307 - DNA, 570 bp, Oryza sativa
  Clone ID: PAT_MRT4530_34724C.1
atgtggattcgccggggtggtgtcagggaggacccctgggcttcctggcacacttggaggtctcccgacgtggctgatccccacgggctgggtgatccggttgctgaagaagatgaagcggatccggctgatgaagagttcttccaagagcaacccggcttcgatgattgtgagctcgggatctgtccgcagcccaacatgactgttaatttggagcgtcacgggctagttccggtcggcatggtgcgcatggctggtgtagaccgggagtggttacacagcatggcacatgcgctggcactggacacatggacgtggccaagagaggacgttcctggcttagggttgatcgagggggcgtcgatctctcttaagggggtgagggtatgtaagtgggcccggcctgggggagacgggacgttacatgtcaacacggtggcggttgtggagtggaaggccccagtattctgttttgaaggcgggcaggggatggccgctggaggagtgctggtgcggcaaggtactcatgtttgcacaggtcacgggttgtgggaaatatcactgcgatga

SEQ ID NO: 30308 - DNA, 261 bp, Oryza sativa
  Clone ID: PAT_MRT4530_34725C.1
atggtggggtggtcgatgactaggaaagccgctagatccagtggaatcagcaaacaacaatggcgattggcatggccacctctcaatggtggctatggtattttgagggagcgatgggaggaccatggtcaacgactaagaagactgttggatctagcgaaaccggcaacaacacatagggttgtggttggcatagctatctccctagggtatttcaacaccaaccaatgtgatggtggtgcaatttacttggatgaataa

SEQ ID NO: 30309 - DNA, 2499 bp, Oryza sativa
  Clone ID: PAT_MRT4530_34726C.1
atggcggaagagagagaaagcttcgaaagccaatgggcgccgtccgatgtgacggaagaaaacctgaaggagatggtggcgcacggcgttctccctgccaaggagatcatcgggtggcggccagcatgcggtgaggcctttccaacccccgatacacacgaggttgtggtcttctctcatttcttttatggcggatttgctcttccaacctcaaagttcttccatgggatactaaatttctatggaatcagcttacaccatatgaatccgaactccatagtccatattgcaaatttcgtccatgtctgcgaagcttttttgggcattagacctcattttgctctgttccgccgaatatttttccttaagcctcaaccgaacaaaaacaaaccatgcgtagttggaggggctggatttcaactgaggggcactctgagccaaaagtatttctccatgcctttcaagacttcaaacaaaggatggcacgccaactggttttatattcaaaatcccgagcccgctcttcctgagtactcctgtcttcccccagtataccaagagacatggaactctcttcccatgggagatgaagctgcccaagccttagaactgatggaacgcatgctgaaactcaaagagcaaggcttacagggagagcaaatcactcggcatttcattaagtgccgattggctcccatcaaagaaagatcccgcacagcatttgaatttgacggcaagcacgatccaaaccgtgaagacccagattctctggattttaagatcatgaaggagaggatgtacaagatattctcgaatgctatcgtcgtcagctactcacaccagctgccagttgtgccatataacacattcaatccgcctccgcaggaatatgcattgatgaaatctgatcccccaatcactcagcgccggtcgcctcgtcagcacaccgttcagggaggtggagggccaaaaatcagaccagatccgcaacctcaaacctccaatccagctggacagacaggttctcgcaagagaaaactagtgctcgacaacgatgaaggcgacgacgataaatctggggacaagggctcgcctaataaattcccaaagcgtaccatgcccaagaaaaaactggctggccgccaaatgccaaagattagaacatcttccaggaaaccatccgacatagatccaactggaaaagatcctgatccggctatgacggagccaaatttatccaaggatgctgatccgaccatcgaaagccagccgactgccgaaagccagccgactgccgaaaatcagccgactggcgcccatgcttcggatgacaaggccaatccgagtgaccagccgccgactggaaaccagtcggcaacaactgaaactgcaacaacccgagagcccccgactggaaaccagtcggatgtaggtcccgatgaagaaatccctgaagttgaagcgcagacgacaacttcccaaggaccagaggctggtaaagactcaatgattgggtctctaaataaagaacaaggatcacctcatgttcagccaggaacatcctcaggaacactaggcgatgacgaagaaacaattcctcgcataaaggcggctgatgactcccgtcctcctatcttgctcaaatggtgggacgagaactcgcaagctgccggcatcgtcataaatcgtcaaaaagaagatgaggaagtgtgccagctgaagaaagcacttggagaagccactcgcattgtgaatagaatccatcttcgcaatgaggccaagactacaactttggaaaagctggttcctcatttgggaactcttgaagcagttagggaccagctgcatgaggccaaggagtatgccaaaaagacagagaaggagttaagggaccgaattgcccagctccaggattcaaacttcgagctaagtggttcatcaaaagcgcaagctaccaggatggctcaaatggagaaacagattgaagccttgaaaagagacaaagtagaactagctgcgcaaagggactcagccttgaaggaagttgaagaccgtaaaatcaaatctcaagctcagtttgatgtcctggttggtaagatcaagaagcttgaaggagcaagagacgaagtcgccaatgtcgctacaccactcgtccaagctatgttccttaataacagtggtccgagtgcacttgacgcaaccgaaatctttgacaagctgagagttgcaccggatgtatatttcaagaatatcaagaaagctggaagtatgggagctagtatggcattggcgatgaccaaatccttgtacccgaggattgaaattgataccattgatggctttgcagacgggacaagcgaagaggctgctcttgatcttatcagtaatgctcaaagtgcggctgacaagattgcaagtgatgttgtagatcaattccgcaacaacgaccttcagccgagcaacaataactctgatgatgaaagaactgattctgactga

SEQ ID NO: 30310 - DNA, 177 bp, Oryza sativa
  Clone ID: PAT_MRT4530_34727C.1
atggtttcagggccagcagaccggcggtggatactgaagcggcgttgcaactgccagggctatggggaggccttcgccgtcattgtcatcactggagggagctacttgactgtgtcttctcttctccgtatgaggaagctcgttggagggagggggaggaaggggctcgccggataa

SEQ ID NO: 30311 - DNA, 2484 bp, Oryza sativa
  Clone ID: PAT_MRT4530_34728C.1
atggcggaagagaaagaaagctttgaaggccagtgggcgccgtccgacgtaacggaagagaacctgaaggagatggtggcgcacggcgttctcccagccaaggagatcatcgggtggcggccagcgtgcggtgaggcttttccgacccctgatacacatgagatcgtagtcttctcgcatttcttctatggcggcttcgctcttccgacctcgaaatttttccgcgggatattaagcttctatggaatcagcttgcatcacctaaacccaaattccatagtgcatatcgccaatttcgtccatgtttgtgaagcctttttgggaatcaagcctcactttgccctgtttcgccggatcttcttcctcaaaccccaaccgaacaagagaaaaccgtgcgtagtcgggggggcaggattccagctaaggggaactctgagccagaaatacttctcaatgcctttcaagacttcaaacaagggatggcatgcgaactggttttatgttcagaatcctgagcctgctcttcctgaatattcttgtcttcccccggtgtaccaagatacttggaactctcttccaatcggagatgaagctgcccaagccttggaattgttggatcgcatgttaaaactcaaagaacaaggcttgcaaggagagcagattactcggcatttcatcaaatgccgactggcgccaattaaagaaagatcccgtacagcttttgagttcgacggcaagcatgatcctaattgcgaagaaccagactctctggatttcaaaatcatgaaggagagaatgtataaaatcttctcaaatgccattgtcatcagctactcacaccagctgccagttgtgccatataatgcattcaatccgcctccgcaggaatatgtattgatgaaatccgatcccccaattgctcagcgacgatctcctcgccagcacaccattcagggaagtggagggccgacaatcaggtcagacccacaacctcaaacctccaaaccggctgggcagacaggtcctcgcaagagaaagctggtgctttatgacgacgagggcgacgacagcaacaaatctggggacaagggcacgcccaacaaactcccgaagcataccatgcccaggaaaaaactggctggccgtcaaatgccaaagattagaacgtcttccaggaaaccgtccgatatagacccaaccggaaaagatcctgatccagctgtgacagaacaaaatatatccaaggacgctgagccgactgctgaaagccagccgaccgccgaaagccagccgactggcgcccattcttcggatgacaaggccaatccgagtgaccagccgtcgactggaaaccagtcggcaacaactgaaactgcaacaacccgagagcccccaactggaaaccggtcggatgtaggtcctgatcaagaaatccctgaagttgaagcgcaagcgacagcctctcaaggaccagaggctggaaatgactcggtggttggctctccagataaagaacaaggatcatctcgcgctcagctaggcacatcctcaggaacactaggcgatgacgaagaaacaattcctcgcataaaggcggctgatgactcccgtccccctatcttactcaaatggtgggacgagaactctcaagtttccggcattgttataaatcgtcaaaaagaagatgaggaagtgtgccagctgaagaaagcacttggagaagccactcgcattgtgaatagaatccatcttcgtaatgaggccaagactacaactttggaaaaactggttcctcatttgggaactctagaagcagttagggaccagctgcatgaggccaaggagtgcgccaaaaagacagagaaggagttaagggatcgaattgcccagctccaggattcaaacttcgagctaagtggttcatcaaaagcgcaagccaccagaatggcccagatggagaaacagattgaagccttgaaaagagacaaggtagaactggctgcggaaagggactcagccttgaaggaggttgaagatcgtaaaatcaaatcgcaagctcagtttgatgtcctggttggtaagatcaaaaagcttgaaggagcaagagacgaagtcgccaatgtcgctacaccacttgtccaagctatgttccttaatgacagtggtccgagtgcacttgacgcaaccgaaatttttgacaagctgagagttgcaccggatgtatacttcaaaaatatcaagaaagctggaagcatgggagctagcatggcattggcgatgacaaaatccttgtacccgagaattgaaatcgacaccattgatggatttgcagatgggacaagtgaagaagctgctcttgatcttatcaataatgctcaaagtgcggctgacaagattgcaagtgatgttgtagagcaattccgcaacaacgaccttcagccgagcaataataactctgatgatgaaaggactgattctgactga

SEQ ID NO: 30312 - DNA, 2013 bp, Oryza sativa
  Clone ID: PAT_MRT4530_34729C.1
atgcccttcaagacttcaaacaaagggtggcatgcaaactggttttatgttcagaatcctgagcctgctcttcccgagtactcttgtcttcctccggtgtaccaagatacttggaactctcttccgattggggatgaagcagcccaagccttggagttgatggatcgcatgctaaaactcaaagaacaaggcttacaaggagagcagattactcggcacttcatcaaatgccgattggcaccaattaaagaaagatcccgcacagcattcgagttcgacggcaagcatgatcctaatcgtgaagaaccagactctctggattttaaaatcatgaaggagagaatgtataaaatcttctcaaatgctattgtcgtcagctactcacatcagctgccagttgtgccatataacgcattcaatccgcctccgcaggaatatgcattgatgaagtctgaccccccaatcactcagcgccggtctcctcgtcagcacaccgttcagggaggtggagggccaacaatcagatcagacccgcaacctcaaacctccaatccaactggacagacaggttctcgcaagaggaaactggtgcttgacaacgatgaaggcgatgacgacaacaagtctggggacaagggctcgcctaataaactcccaaagcgtaccatgcccaggaaaaaacttgctaaccgcccaacgccaaagattagaacatcttccaggaaaccatccgacatagatccaactggaaaggatcctgatccggctgtgacagggccaagttcatccaaagatcctgagccgactgccgaaagccagccagctagcgcccatgcttcgggtgataaggccgatccgagtgaccagccgccgactggaaaccagtcggcagcagctgaaactgcaacaacccaagagcccccgactggaaaccagtcggatgtaggtcccgatcaagaaatccccgaagttgaagcgcagacgacaacttctcaaggaccagaggctggtaacgactcgatgattgggtctccaaataaagaacaaggatcacgtcacgctcagctaggaacatcctcaggaacaccaggcgatgacgaagaagcaattcctcgcataaaggcggctgatgactctcgtcctcctatcttgctcaaatggtgggacgagaactcacaagtcgccggcatcgtcataaatcgtcaaaaagaagatgaggaagtgtgccagctgaagaaggcacttggagaggccactcgcatcgtgaatagaatccatcttcgcaatgaggccaagactacaactttggaaaagctggttcctcatttgggaactcttaaagcagttagggaccagctacatgaggccaaggagctcgccaaaaagtcagagaaggaattaagggaccgaattgcccagctccaggattcaaacttcgagctgagtggtgcatcaaaagcgcaagccgccaggatggctcaaatggaaaaacagattgaagccttgaaaaaagacaaagcagaactggctgcacaaagggactcggccttgaaggaagttgaagaccgcaaaatcaaatctcaagctcaatttgacgtcctggttggtaagatcaagagacttgaaggagcaagagatgaagtcgccaatgtcgcaacaccactcgtccaagccatgttcctcaataacagtggtccgagcgcactcgacgcaaccgaaatattcgacaagctgagagttgctccggatgtatatttcaagaatatcaagaaagctggaagtatgggagctagcatggcattggcgatgaccaaatccttgtacccaaggattgaaattgacgccattgatggctttgcagacgggacaagcgaagaagctgcccttgatcttatcagcaatgctcaaaacgcggctgacaagattgcaggtgacgttgtagatcaattccgcaataccgaccttcagccaagtagtaataactctgatgatgaaaagactgattctgactga

SEQ ID NO: 30313 - DNA, 527 bp, Oryza sativa
  unsure (1)..(527): unsure at all n locations
  Clone ID: PAT_MRT4530_3472C.1
aacacaaacacattgtatatattgaattcagagggcaaatacccaatacaacctgtagcaataacatcgtgctcatctttatttcgggcacgtatacaagttgcaccaaaacgtagaacaaacaacaaacatggatggcatgttgctgcaagcaggggcacgtgtggggccgctagagccggagtagccgccggagctcgtcggtcgctccgacgtccacgccgccaccgccggccacctccacggggcacgcggtcgccgtcttcctcccggccggtgcaccgaccagcagggacgttggtattggaacgcagcttggggggggggacaccgagtacagtgagtccgttgttgtagtccattccgacgncttttggtggatggtcggcggcgtctttttgttggagggggtcttctgtgcagggatgggaaatggggtttttttattggggcgctaggttttggttgtagatgatgattgtggaagtggttttgggttggtttttggggtaggtggggggtggggg

SEQ ID NO: 30314 - DNA, 201 bp, Oryza sativa
  Clone ID: PAT_MRT4530_34730C.1
atggagtccaccatggacagtggggaagaggaagaagaagaagaagacacgccaagagagcaattatggagtcatgatgcggtagtgattgagatggagaggaacaggaacgcagcaaaagctgatatctcgataaacgggagcatcacagctctccatgtactacgcattcaagactacagtacgggatggttggagtag

SEQ ID NO: 30315 - DNA, 2442 bp, Oryza sativa
  Clone ID: PAT_MRT4530_34731C.1
atggcggaagagaaagaaagctttgaaggccaatgggcgccgtccgacgtaacggaagagaacctgaaggagatggtggcgcacggcgttctccctgccaaggagatcatcgggtggcggccagcgtgtggtgagattttttcgacccccgatacacacgagattgtggtcttctctcatttcttctatggcggcttcgctcttccgacctcgaaatttttccgcgggatattaagcttctatggaatcagcttgcatcacctaaacccgaattccatagtccacattgccaatttcatccatgtctgtgaagcctttttgggaattaggccccacttcgctctgtttcgccggatcttctttctcaagccccaaccgaacaagaataagccatgtgtagtcggaggggcaggatttcagttgaggggaactctgagtcagaagtacttctctatgcccttcaagacctcaaacaaagggtggcatgcgaactggttttatgttcagaatcctgagcctgctcttcccgagtattcttgtcttcctccggtgtaccaagacacttggaactctcttccaatcggagatgaagctgcccaagccttggaattgttggatcgcatgttaaaactcaaagaacaaggcttgcaaggagagcagatcactcggcatttcatcaaatgccgactggcgccaattaaagaaagatcccatacagcttttgagtttgacggcaagcatgatcctaatcgcgaagaaccagactctctggatttcaaaatcatgaaggagagaatgtataaaatcttctcaaatgccatcgtcgtcagctactcacatcggctgccagttgtgccatataatgcattcaatccgcctccgcagcacaccgttcagggaagtggagggccgacaatcaggtcagacccacaacctcaaacctccaaaccggctgggcagataggtcctcgcaagagaaagctggtgcttaatgacgatgagggcgatgacagcaacaaatctggggacaagggcactcccaacaaactcccaaagcataccatgcccaggaaaaaactggctggccgtcaaattccaaagattagaacatcttccaggaaaccatccgacatagatccaactggaaaagatcctgatccggctgtgacagagccaaatttatccaaagacgctgagccgactgccgaaaatcagccgactgccgaaagccagccgactgccgaaagtcagccgactggcacccaagcttcggacgacaaggccaatccgagtgatcagccgccgactggaaaccagtcggcaacaactgaaactgcaacaacccgagaacccccgactggaaaccagtcggatgtagatctaaatcaagagattcctgaagctgaagcgcagacaacttctcaaggaccaaaagttggtaatgactcagtgattgggtctccagataaagagcaaggatcccctcacgctcagccaggcacatcctcaggtccactaggcggcgacgaagaagaaattctccgcataaaggcagctaatgactctcgtcctcctatcttactcaaatggtgggacgagaactctcaagtttccggcattgttataaatcgccaaaaagaagacgaggaagtgtgccagctgaagaaagtacttggagaagccactcgcattgtgaatagaatccatcttcgtaatgaagccaagactgcaaccttagaaaagctggttccacatttgggaactcttgaagccgttagggaacagctacacgaggctaaggagcatgccaagaaaacggagaaggaattaagggagcgaattgcacagctccaggactccaacttcgagctgagtggttcatcaaaagcgcaagccaccaggatgactcaaatggagaagcaaatagaagccttgaaaaaagacaaggtagaactggctgcggaaagggattcagccttgaaggaggttgaagaccgtaaaatcaaatctcaagctcagtttgatgtcctggttggtaagatcaagaagcttgaaggagcaagagacgaagtcgccaatgtcgctacaccacttgtccaagctatgtttcttaataacagtggtccgagtgcacttgatgcaaccgagatctttgacaagctaagagttgcaccggatgtgtacttcaagaacatcaagaaagctggaagtatgggagctagcatggcattggcaatgaccaaatccttgtacccgagaatcgaaattgataccattgatggctttgcagacgggacaagtgaagaagctgctcttgatcttatcagtaatgctcaaagtgcggctgacaagattgcaagtgatgttgtagagcaattccgcaacaacgaccttcagccgagcaataataactctgatgatgaaaggattgattctgactga

SEQ ID NO: 30316 - DNA, 2451 bp, Oryza sativa
  Clone ID: PAT_MRT4530_34732C.1
atggcggaggagaaagaaagctttgaaggccaatgggcgccgtccgacgtaacggaagagaacctgaaggaaatggtggcgcacggcgttctccctgctaaggagatcatcgggtggcggccagcgtgcggtgagatttttccgacccccgatacacatgagattgtggtcttctcgcattttttctacggcggcttcgctcttccgacctcgaaatttttccgcgggatcttgaacttctatggaatcagcttgcatcacctaaacccaaattccatagtgcatatcgccaatttcgtccatgtttgtgaagcctttttgggaatcaagcctcactttgccctgtttcgccggatcttcttcctcaaaccccaaccgaacaagagcaaaccgtgcgtagtcggggaggcaggattccagctgaggggaactctgagccaaaagtatttttccatgcccttcaagacttcaaacaaagggtggcatgcaaactggttctatgttcagaatcctgagcctgctcttcccgagtactcttgtcttcctccgatgtaccaagatacctggaactctcttccaatcggagatgaagcagtccaagccttggagttgatggaccgcatgttaaaactcaaagaacaaggcttgcaaggagagcagattactcggcatttcattaaatgccgactggcgccaatcaaagaaagatctcgtacagcattcgagttcgacggcaagcatgatcccaaccgtgaagaaccagactctctggatttcaaaatcatgaaggagagaatctactcacaccagctgccagttgtgccatataatgcattcaatccgcctccgcaggaatatactttgatgaagtctgaccccccagtcactcagcgccgatcgcctcgccagcacaccgtccagggaggtggagggccagcgatcagaccagatccgcaacctcaaacttcccaaccgactgggcagacaggttctcgcaagagaaaactggtgctaaatgacgacgaaggtgacgacggcgacaaatctggggacaagggctcgcctcacaaactcccaaagcgtagcatgcccaagaagaaactggctggccgtcaaatgccaaagattagaacatcctccaggaaaccatccgacatagatccaaccgggaaagatcctgatccagctgtgacagaaccaaatatatccaaggatgctgagccgactgctgaaagccagtcgactgccgaaagtcagccgactggcgcccatgcttcggatgacaaggccaatccgagggaccagccgccgactggaaaccagtcggcaacaactgaaactgcaacaaccagagagcccccgactggaaaccagtcggatgtaggtcccgatgaagaaatccctgaagttgaagcgcaaacgacaacttcccaaggaccagaggctggtaaagactcaatgattgggtctctaaataaagaacaaggaccacctcatgttcagccaggaacatcctcaggaacactaggcgatgacgaagaaacaattcctcgcataaaggcggctgatgactcccgtcctcctatcttgctcaaatggtgggacgagaactcgcaagttgccggcatcgttataaatcgtcaaaaagaagatgaggaagtgtgccagctgaagaaagcacttggagaagccactcgcattgtgaatagaatccatcttcgcaatgaggccaagactacaactttggaaaagctggttcctcatttgggaactcttgaagaagttagggaccagctgcatgaggccaaggagtatgctaaaaagacagagaaggagttaagggaccgaattgcccagctccaggattcaaacttcgagctaagtggttcatcaaaagtgcaagccaccagaatggctcagatggagaaacaaattgaagccttgaaaagagacaaggtagaactggctgcggaaagggactcagccttgaaggaggttgaagaccgtaaaatcaaatctcaagctcagtttgatgtcctggttggtaagatcaagaagcttgaaggagcaagagacgaagtcgccaatgtcgctacaccactcgtccaagctatgttccttaataacagtggtccaagtgcacttgacgcaaccaaaatctttgacaagctgagagttgcaccggatgtatatttcaagaatatcaagaaagctggaagtatgggagctagtatggcattggcgatgaccaaatccttgtacccgaggcttgaaattgataccattgatggctttgcagacgggacaagcgaagaagccgctcttgatcttatcagtaatgctcagagtgcggctgacaagattgcaagtgatgttgtagagcaattccgcaacaacgaccttcagccgagcaataataactctgatgatgaaaggactgattctgactga

SEQ ID NO: 30317 - DNA, 1481 bp, Oryza sativa
  unsure (1)..(1481): unsure at all n locations
  Clone ID: PAT_MRT4530_34733C.1
ccccagccaacgacccaaccccagcttctcctcctcctcctttcaaatcacacccttcgtcctcggaattctctgcgctgcagcaccagcatctcgcaagtcaaaccatccttatttattctggttttcttgccttgctgctgctgctgctgcggttgattttgatcttggaagaggaggaggaggaggggttgggttggtgggggtagcagcagcagcagagccgccggtgatggaggaacggcaggcggtcaacccggcctgccccaacgccgccaaccccttccaccgctgcgccgactactgccccgtccctgctcccgccgccgccaccgccaagccgcccccaccgccgccgtcttcccgaccggcgcagaacgggaccgcggcgccgcagaacgggacggccgcggcgcagaacggaatcgcggagcagaacgggagcacgcacagcgacggcgagctgcaggcgaagccgcgccgccgcgacagggccggcggatccgggggcctccccttctacgtcttcctgcgcgagggagccgacggcgacggcaagaaggtggacccgcgatgccccaacgcgcccaacccgttccacgtctgcaccgagcactgcgccgccaagatggccgaggtcagccgctcgtcggagggcgggaagtcccccatgtccctcttctcccgccactcgcgccgctcctcctcctctgaagatggcagcgtgagatcggggagcagcaagaaggtggatcctaagtgcccaaatgctggcaatccattccatgaatgcactgagcattgtgctgccaagatgaaggaggtgggtcagcagaataagactgttaagaagtcgtcctcacgcaagaaagggggaaaggagatctctgttgtgcagaactggaaggtggatccgaggtgcccaaatgcgtccaacccattccatatatgcgcccaatactgctttgatcatttgaatgaaacgggtcagaaagatacaagcaaaccagactcaaggaagggcaaagctgttgtgaaagcagagcaaacaggagaaatcaatcctgattgtgtgaatgcgtccaatccctaccacaagtgtggggaacattgtaagagaaagggtgacaggtgctgaanggctggcgatacaaggtttcctctccagatgatgatggtgaaaaaaaaagtatatcccgacaatagtcctgtaggtttcaatagaagctgtgtttccatcggctccgctttttattgtggctgcagcatcacaatctttgctgtattatcatgtactttctacacactttcttaccgccattcactcctataaaagagtcccatattctagatctagtagtataatttattccgtgaagattgtaaaaatagaagcgtgttgtttctttttttcccccttctttttgtaagataattgcctgcttatataagttataattttgtcaaaaaaaaaaaaaaaa

SEQ ID NO: 30318 - DNA, 2403 bp, Oryza sativa
  Clone ID: PAT_MRT4530_34734C.1
atggcggaagagaaggaaagctttgaaggccaatgggcgccatccgacgtgacggaggagaacctgaaggagatggtggcgcacggcgttctccctgccaaggagatcatcaggtggcggccagcgtgcggtgaggcttttccgacccccgatacacacgaggctgtggtcttctcccatttcttctatggcggcttcgctcttccgacctcaaaatttttccgcgggatattaagcttctatggaatcagcttgcatcacctaaacccaaattccatagtccacatcgccaatttcgtccatgtttgtgaagccttcttgggaattaagccccacttcgctctgtttcgccgaatcttctttctcaaaccccaaccgaacaagagtaagccatgtgtagtcggaggggccggatttcagctgagggggactctgagccagaagtacttctctatgcccttcaagacctcaaacaaagggtggcatgcaagctggttttatattcagaatcctgagcctgctcttcccgagtactcttgtcttcctccggtgtaccaagatacctggaattctcttccgattggggatgaagcagcccaagccttggaattgatggatcgcatgctaaaactcaaagaacaaggcttacaaggagagcagattactcggcacttcatcaaatgccgattggcaccaattaaagaaagatcccgtacggcattcgagtttgacggcaagcatgatcctaatcgtgaagaaccagattctctggattttaaaatcatgaaggagagaatgtacaaaatcttctcaaatgctattgtcgtcaactactcacatcagctgccagttgtgccatataacgcattcaatccacctccgcaggaatatgtattgatgaagtctgaccccccaatcactcagcgccggtctcctcaccagcacaccgttcagggaggttctcgcaagagaaagctggtgcttaacgacgacgaaggcgacgacggcaacaaatctgggaacaaaggcttgcccaataaactcccaaagcataccactcccaggaaaaaactggctagccgtccaatgccaaagattagaacatcttccaggaaaccatccgacatagatccaactggaaaagatcctgatccggctgtgacagagccaagttcatccaaggattctgagccgactgccgaaagccagccgactggcgcccatacttcaggtgacaaggccgatccgagtgaccagcctccgactggaaaccagtcggcagcaactgaaactacaacaacccaagagcccccggctggaaaccagtcggatgtaggtccagatcaagaaattcccgaagttgaagtgcggacgacaacttctcaaggaccagaggctggtaacgactcgatgattgggtctccaaataaagaacaaggatcacctcacgctcagctaggaacatcctcaggaccaccaggcgatgacgaagaagaaattcctcgcataaaggcggctgatgactctcgtcctcctatcttactcaaatggtgggacgagaacttacaagctgccggcatcgtcataaatcgtcaaaaagaagatgaggaagtgtgccagctgaagaaggcacttggagaagccactcgcattgtgaatagaatccatcttcgcaatgaggccaagaccgcaactttagaaaagccggttcctcatttgggaactcttgaagcagttagggaccagctacacgaggccaaggagctcgccaaaaagacagagaaggaattaagggaccaaattgctcagctccaggattcaaacttcgagctgagtggttcatcaaaagcgcaagccgccaggatggctcaaatggagaaacaaattgaagccctggaaagagacaaggtagaactagctgcgcaaagggactcggccttgaaggaggttgaagaccgcaaaatcaaatctcaagctcaatttgacgtcctggttggtaagatcaagaggcttgaaggagcaagagatgaagtcgctaatgtcgctacaccactcgtccaagctatgttcctcaataacagtggtccgagtgcactcgacgcaaccgaagtcttcgacaagctgagagttgctccggatgtatatttcaagaatatcaagaaagctggaagtatgggagctagcacggcattggcgatgaccaaatccttgtacccgaggattgaaattgacgccattgatggctttgcagacgggacaagcgtaggggctgctcttgatcttatcagcaatgctcaaaacacggctgacaagattgcaagtgacgttgtagatcaattccgcaataccaaccttcagccgagtagtaataactctgatgatgaaaagactgattctgactga

SEQ ID NO: 30319 - DNA, 250 bp, Oryza sativa
  Clone ID: PAT_MRT4530_34735C.1
cggccggccgcgatccttgcacactaagccgctgctctggacgaaataagaggaaggaagcatggtagtgcgcacggagattcaccacaaggtctgcatgtctggctgcagtgacgccttcgggctttgatctcgcgggcctggatgggacccacatttggctatctgaattgtgctttcgggttatcttgccggagcatcggcttgtatgttccggtcacattggtttgctaggggatggatgggtttg

SEQ ID NO: 30320 - DNA, 2592 bp, Oryza sativa
  Clone ID: PAT_MRT4530_34736C.1
atggagaatatgttggatcgtgacaatatggtatcagagcagtcgattcatgggattccgatccgggagatgcagtggacgacacatgggggcagtgacgactgttggggccaggatttgagccatggaggtgacactgtcagaggcgcccgccaggtgttcgatgaaatgccaagccggttaggaagtgctgcaggtgctgcactccatgtccaagtgaaccacctcatctaccctgtgtctaccaatgtgatgcatcaagtcttcaacccctatggagcagtggcggtgcagatgcttgcggtcgatgcatggcgtgtggaggcaattgtttggtttcggacgacctgcgacgcagagtgggctcaggatgaactccacggccgcaatatctacgacgggggctgcgtgttggatgtgcaacatgtgccgacctcgctcgaagacagagccgacactgcgcccaccaagtgtttgatgcaagtaccaggatgtgccaccacaaaatcagataccgagagcactcctactactctggaacacgtgtttccggccaccatgagtctatctgcggccaaatcagcagtcacaacaacgtcggtttcactcaccgaggccatggaggctgaggctagcatggacaaggtggtggagaacgcaggcaaggccattcaagacctgtgcaccaggatcgatcggattttggaggcatttcacgacaccaaggtggatttatccgagaacaaggattccactagagatgtggcagagttgagcgccaacactagtccaactaccattgcattggaggtcagtgctgaggctggcccaactaaccatgttgacttagccaagcttggcatgggaacaaccatcgagtgttcaatgaagggaaagaatcagttggttgatgatgatggcaaagacatggctaacgatgagagaactgagctcattgaagtggataccaagtttacttctgtgaatttatgcttcagagatccatggttagccctcaatgcaattccttccaggatcttgattgggtgtctgagccatgaccttggtgttaacaatctctcgttggttccatctacattggaagtgccttaccattgctttgtattgggctcagtatgtagagctagctcaccaccagtaccactttggagagtggcagttccatggtacagcgatcaggtcttttcaggttctcggccctcgccatggcctgatccatggttgtattcaggcaacggaagtgtggtggtatttcagcctctccaaccatggccaccccctctacaagccaagagcaaaggttctattgttgaacggcagctagaaccgtggcatgatcctcaaataaaacaagataacagaggcgttgtggtgaatctcctacaacccagactttcacctgacagatggaatgagtcttggttcagttgtgataatgcttgggagttaacacaaagtcactgcaagctcttgctgacagaacatatggccttgatggcgcataatgaagagaatcgccttgagcagaatctgagtctgtgcgtggtgagcaaaagggcatcatctcttcaattcaacgctgacttttggaagtcagcttggtgtgtccaacttgtgttcaagcaaacatttgcaattcagaaagttatgttttctaatgaggcaataatgaagtcttgggatcatgttgctgccaaacgagacacagattatgacatctctcctatgtttgacgtctctacaatgacaaggttgctggcaagaatcaatttgcttgattccaatttcggacaggtggatatgcagacattccaagcaagtgcaaatgttgtcactgttgttggcctgaagtactctcctttggtggttagaatggcctttgctaatcacctgcacgcaccctgggaccctggaggcagtaacctggacactctcttgcatgttaggaaggacaggcaacaaccacaactacaaccactgcaaaatgcctttcctgatagtgtgagggcggacatgaaaccattgctgcagatcatggctttaatgacaaagttaattaaactatactcttggcctgcttctggaagatggggagatcaagtactaaatcaagttcatgaattgtgcaagtgcagtcaagatcagagcctattccagttcactatctccacagagatgaagatgacatggcttggggatcttgagactatcaaacctacgctttgcatgagtatcaagctacctgactgcagttttggaagaatggagttgccatgggatcctgggggcatgaattttgtgcctcatttgcaccagcttgagggcaagctgattttcaaggggagaggaatgtcatgtgctggacatggacttcacagtgggccggatgtgggttgtcataggaaagggggcttggcccaggagcaagtcatccagagtataagtacacactccaacaagagaaagggggcaatgaattattttgaaccaatggttgcggcctcctcctcctcctcctccttctctgtgtcttcttcctcctctctagagttctcccacccccaactctga

SEQ ID NO: 30321 - DNA, 201 bp, Oryza sativa
  Clone ID: PAT_MRT4530_34737C.1
atgacgatgtcgccgtcgacgccgtgggcgatgttctcgagcaccgccggtgccgcgtcctcctccgatcctccactgggtgaggttgcacacggggaagatgacggtgcaagcagccaagcaggcaccgacgagagtacaagtcggctcagattcgtagtattagaatatgtcacatcgatgtacgaggttgtgggatga

SEQ ID NO: 30322 - DNA, 1182 bp, Oryza sativa
  Clone ID: PAT_MRT4530_34738C.1
atggcggcggccgacctcctaccggacgacgtgctggaggagatcctccgccgcctcgccccgtcgccgcgcagcctcgccgcgtgccgcgtcgtctgcaaggcctggcgcgccgccgtcgacacccggtgcccgcccccgcgcccggacctcctcccgctctccctcgccggcatcttcttctccggcttctacttcgcacatgagtacctaccggggttcttcgcacggcgggggcaccatcactgcgaccggatcttccccaagctcgactacctcgacgacgcacccatctccaagctggaggccatcgaccactgcaacggcctcctcctaatgcaagagtacatcgtcaacccggccacgcggcggtgggcacggctgcccccgacgccggagtggagccccgcgggatcggacttggaggcggtggtcaccgactcatgtcgcgaggagtacctcgtgtttgacccaaccgtctcgccgcactacgaggtgttctccatccccgagcttgtcttctgcagaggtgatgacaaagacaatgccgaatcggtggtaagacagcatgagtggccgccatcgccatttgtcgtgcaagtctattcgtcggcgacggggaggtgggagaaaaggtcgctcgtccggcgaggggaggccgccgggaccattgctgatgtgcactactcatcttggatggcaagtcaccacctctacggcgtttattggcggggtgcacttcacgttcagatgaaaaataacgatgttataagaataaccttgttagatgacaagtatcaagtgatcaagtcaccaagcgatatcaatctaaacaatcatccttatatttaccttggaagatcaaagaagggggtttggctgctgcacgaagtactgcttggtggtggtcagatggagtggatgctgatacacgacgtcagtctcgagcagatcatggcagatttccgctggaatcctgaagctgttaagccatggatcaaacataatacgtaccgtggcgagaacaagaataatgaagaaatatcagaagatgaatctcctggttgggactctgaggatgatagcatcgttgtttatacggaagatatggtgtatgactggctatgggcttcgtgtacatggcgtcgttacatgggtagagacgatgatggtgttctttag

SEQ ID NO: 30323 - DNA, 279 bp, Oryza sativa
  Clone ID: PAT_MRT4530_34739C.1
atggccgacccggcgtcgcaggggccgctacccccgccgcaccttctaccagctcgtcgacgtcaacctaacttgctctgcctccgcaacaaccccaaactctgcccctccatgacagacgtcacccgagcactcgagcacccctcccccccctcccaactctcccggtccagccgcaaggcgccggggcggcagggcggggatgaggtcacattagccgacggtggtcatggtgacgcagaagcaggatttgcaatttcggtggttgctgaaaatttg

SEQ ID NO: 30324 - DNA, 2091 bp, Oryza sativa
  Clone ID: PAT_MRT4530_3473C.1
atgagagttgtgttttcgctatctgtacttgcagttctgctgctacagctgctgttgggtgtagcaacggcggcagcagctaattgcagcacccactgtggcaacatcggaatctcctatccatttggagtagagcctggctgctaccacgagggcttcaacctcacctgcgatcgctcgcacaagccgcccaagctgttccttggtgatggctccgttgaagtgctcgagatctcgattcctagtggcacggtgcgcatcaacagcagcagtatcgttccagtatcaacatcaagtgctgttggaactggcagtgtcaacaagacagggaaataccacacatggggtggactgagaaagggcggcccgttcttcatctcgccgtacaagaacaagttcctggttctatcatgcagcaatgttcaagttcttcttcttggaggcgataattccactgtcaatgcctgtgctacttactgccctccagcccccaagaaaggccaaccttttcagttcccaatgcgcaacgagtgttctggtattggctgctgcagtgcggccatccccaaaggctacacatcctatagcatccagatccaacctgccaatgaaatttcagagtttgatgcagagtcctctgtgtacatagctgaggaggggtcctataatgccacacgccttatctttgaaactgtcagtgcactcccagctttgctggactgggctattagcaattcgacatgtggtacgaagccatctgcagcccctgcacctgcatgccgcagcagtaacagctattgtcaaaactatacaagctatgtctacaatggctatcagtgtcgctgcaatgctggttatcaaggcaacccttacattccaaacggatgccaaggtttaagcattggtcttgtagtcagtggcggcacagttcttttgcttctggctctttgtgctcccctcgcaacacgtaagattaagctacggaagatgaagaaaacaaaagaaagatttttcaagcaaaatcatgggttgctattgcagcaattaatttcacaaaaggtggacattggggaaagaatgatcattaccttatcagatctagagaaggccacaaacaattttgataaaagtcgtgaggttggtgggggagggcatggcattgtgtacaagggaatacttgacctacatgttgtggccatcaagaaatcaaagatagtagtacaacgagaaattgaccaattcataaatgaggttgcagttctttcccaaatcaaccatagaaatgtagtgaagctcctaggatgctgccttgagacagaagttccattgttggtttatgagtttgtttcaaatggaacactttatgatcatcttcatgttgaagggccaatgtcagttccgtgggatgaccgactaaggattgcacttgaagttgctagagctgttgcgtatctgcattcagctagttctatgccaatattccatagagatattaaatcttccaatatacttcttgatgatagcttgacagcaaaggtgtcagactttggagcttcaaggtacattccaatcgatcaaacaggagtgacaacagctgttcagggaacatttggatatttagatccaatgtactattacactggaaggctaactgacaggagtgatgtttttagttttggtgttcttctcgtggaattgcttactagaaagaagccgtttgtacacacctctagcaacggcgatgctcttgttttacattttgtttcactacatacagaaaacaacttggtcgacatattagatcctcaagtcatggaagagggagatggagaagtccaagaagtagctgcactagcagcaacgtgtattaaattgaagggagatgaccggcctacaatgagagaagtggagatggcacttgaaaatatacgagttaagaagaagcatgctacacttggtacaacatcaaatagatgtgatggggaccaaattgtatgtgattatttgtcgactagaggaatcactgacgaatcaacaagacaatacactatggaagaggaaatattgtcgtctggtacctatcctcgatga

SEQ ID NO: 30325 - DNA, 417 bp, Oryza sativa
  Clone ID: PAT_MRT4530_34740C.1
atggcggcgacgacgacggcgccatgtgcagcgcgcagcgcatcgcgtcgcgtcgcgtggcatatcgcattattgtttctgtggacgcagaccaagtccaaaacgatcgagcagggtgtcgggttggtttcttggttcggtgtgcagactattgacaggttcgagatcactgacgaccagaacatatttccattggcaaatacgtgcgacggtgaagaccgaagatatgcgagggatcggcagcgcatcacctcgccggtgttctggcggttgggtggaatggagatcgccggcgagatgctgacacggcggcgaaggatgctctaccgtgtagtagcatcaccggtgttgccaataccaagtgaaggggtcatggatgtgctgggatatgatatggttttacgtgtaaaacactag

SEQ ID NO: 30326 - DNA, 1271 bp, Oryza sativa
  Clone ID: PAT_MRT4530_34741C.1
gtggcggcgggaggggtggaggacgtgacggtgactgggtttgcccagacccgagttgtggcaatgtgaactttgcaaggaggactgaatgcaacaagtgtggagcaccttctcctgctggaggtggaggtggaggtggaggtggagggtataataaatctggtggagagctcaggggtcccccggttccccgcgcgcctactccctctctctctctaaaacctcgctgtctttctctatctagcgggtcgcggtgagtcgtcgtcgtcgtcgccggcgatggggaagggaggcgggctgagcaagctgaggtgcatgatcaggaggtggcactcgtcgagccgcatcgcgcgggcgccgccgtcggcgggggagctggaggagggctctgcggcggcggcggggagggcggcgtcgttccacggcgcggacgaggtgcccaaggggctccacccggtgtacgtcggcaagtcgcggcggcggtacctcatcgccgaggagctcgtcggccacccgctgttccagaacctcgtcgaccgcaccggcggcggcggcggcggcggcgccgcgaccgtcgtcggctgcgaggtcgtgctgttcgagcacctgctctggatgctggagaacgccgacccgcagccggagtccctcgacgagctcgtcgagtactacgcctgctgagaaaggccgccgcgccgcgccgcgcggcttacctccccccaccaccaccggccgtgacggcggcggcgacgcgccggagttggaagcttccagaagctgcggtaaaatctttcgaaaaaaaaaatctgtgttttggtaggggtagaagtgaaatttcggacgccggggtcgaagtgaagagtacgaagcggcagctagcgttttttttttacttaaccccggcgtcggtgctaattggggaatttaccatttgttactgtgctgttaattctctctgatcgttcatgtattagctattgggtttctcattatttctttattttgccccaaaataagatctatgggcaaacatgcccatcggtccaatgtacattccagtgtaaaaaattatcatgtaattgccgagttaatttgtccccttctgctacattgtgcttaatagaaggctttcattatagggttgagattttttttttatgatggaaacgggtaatatctctgtcctctgtccgtagtcacatagccataggattgagaatgtcctctttttgttcaatataatctgccctgtttcggtgctgatataccat

SEQ ID NO: 30327 - DNA, 633 bp, Oryza sativa
  Clone ID: PAT_MRT4530_34742C.1
tgcgcaagtgtgcacacgacctaacgtggcattagttaccgggttacttggcagatttcaaagtaatccaggcctagagcattggaatttgtaaagaaagtcttgcgctatttgcaaggaacaaaaggcctcatgctgtctcacagaaaatcagaatcgctccagatagtggggtattcagattctgactttgcaaaagataatacaaagtcaacatcgggatatgtgttcaccctggtagtaggagccatttcatggaaaagctcaaaacagactatcactgcagggtctactatgtatgccgagtttatagcatgctatgaagcaacggggcaggtgaactggctaaagaagttcatacccggtttaaaggtggttgacagtattgtgaaaccaataaagttatactgcaataacgaacccgcagtaatgtactctcacaacaatcagtcaagtggtactgccaaacacattgacataaagtactatgttgtgagagacaaagtccgggatcaaacaatcagtctcgagcatattataacagaaaggatgctcgcggatccgctcacgaaaggcctacctcccaacatgttcaaggaacatgtagcatgcatgtgtttaagggaagcctta

SEQ ID NO: 30328 - DNA, 1984 bp, Oryza sativa
  Clone ID: PAT_MRT4530_34743C.1
atggatatgttagtgtcgctgtacacgatcctgaaggagcgtgagggcgtcggccatggcgccgcggcgcgaaggctgccggtgtcggcgacgccgctcggcacggcgcacgcccgcaagagaaagaaggagggggcgccgcggcacaaccgctcgacggcagcgcactcaccctcgagtggctactccttgatgggttacattaaagatattccgaccctgaaaggagataactacgaagaatggaaaagagaactcgaccttgcttttatcttgggagaggtggactgggtgttgactaccccatgtcctatagaacctgctgaaattttcagagagtatgacactgtctctaagtacctcgaaagtataaagagccagtttagtggttcttcaaagttttatgcgacacagctgataaagcagcttgttacagagaggtaccatggaggtggtgtaaaagaccacattcttaggatgagcaacatggcttccaaattgaagcaaaaagatttgggcatctcagatgactttctggtccatctggttttgtcctcattgccaaagaactttgacaaccttgttgtcaactacaaaataagtacagagaattggaatattgaagagctcatctctaattgtgtgcaagaggaggaaagacacaaagagaccaatggtgactccattaaccttgtcaaagataacaaggaaaagagccacagggggagctcggtaattcgagaaattgatcttgaggagaggcaggtgtctgtacccgctccgtcgactcaggaacctttcttctctctacctgctaatgttgtgccagcaatgcatgccgttgcggtaccaacacctgttgttatctctcctgtggcaacaatgaatgaaagtgaggaacctgttctacaggattcaagagaaattattgccacatcagaggaggagctgaaacagcctcaaacagataatgtgccagaataggaggctcctagaaggcctgaaagagtcgcatatggaggatgatcccacctcatatgaagaggccatgagaagcgctcgctcatctgaatggttggaagccatgaaagatgaaatgaaatcaatgaaattaaatgatgtctgggatttagaagaaattcctaaaggagccaaaacagtaggctgtaaatgggtctacaaaaccaaatatgactccagagggaatatagaaaagtttaaagtgcgactcgtggcaaagttttcacgcaaagagaaggcattgattacaatgagacttttctccggtctcttgtaagattccttcagatttaatggcactagtggcacattatgatttaaaattacatcaaatggatggtaaaacggcatttctaaatggaaatttggaggaaaagtatacatggcgcacccaaaaggtttgtcatgaaagcgaaacaaaaatgggatggcgtataaaaaatccattaatgggttaagcaaagcttcagaaaaacctcttgaagtttgatggaaaataaaaaaattgggtttcagaagatggaaagacactgttttgcagaagaatatccgagtggttcggtgttatacactgtttcgcacagccccatgatattgttgttacccctgtcccccatctcccctctacggccacggtcacgccgccgcctgggacgacgacctcaagaagacttcgcccgggcatccgcccacgtcgctgccccagtccgtcccgtcgggcttcacgccgccgtccgctcgcccgccccccgcttcgcccctccccgacggcttcgcgctgctgcgtgccggaagacgacgacgacgaggctggcgccctccgcttggctccgccgcccgccgagtcgcagccgcatgcggacgggagctcgacgccgcccgccgcggaggaggaggagaccacggcgctcaagactctgcaagctccatctagctttgcaaggcccatcaaccgcagcatcat

SEQ ID NO: 30329 - DNA, 514 bp, Oryza sativa
  Clone ID: PAT_MRT4530_34744C.1
aaaggaaaaaaaaagggttttttatttttaggcaaaaaacggggcagtacaaaaaaaaaaaaaaaggggggggaatttatttatttaatttttttttacccccaagccccccaaaaaggattttgccccattaaaaaacctttgggagcttttgttttggattggggggaatgcccccaacccatttccttttttatgctggagcccttgaacctttttttttgaaaagcgaaatgcttttgctaaaaaattttttgggaaaacacggaaaaaggaaccttttcctggaaggggggtaaccaaaaaaaaaggaagggtcttaaaagcaaagaaaacacaaccttttttttgggccttttttaaaacgggaaagggggggggaaaaaaaaaaaactgccccggggaaaactccccctaaaaaacttttttttcattggtggtgaaaacttgaacccgggcccgggcttgaataaaaaacaccaccctgggagggttggtgttccaaaagggggaa

SEQ ID NO: 30330 - DNA, 3092 bp, Oryza sativa
  Clone ID: PAT_MRT4530_34745C.1
atgacgacgatggccgacgcttcttcatcctccaacacctcaaccggtggctactccttgatgggttgcattaaagatattccgaccctacaaggagataactacgcagaatggaaaagaaaactcgaccttgcttttatcatgggagaggtggactgggtgttgactaccccatgtcctgtagaacctgttgaacttatcaaaggtgaaaatgagtcagatgctgactggcaaaagagtcagagggacaatgctcctctcgtcatgtcgtatgacattgaacaaaagaaatggtccttagccaacaagaaatgtttggctgtggtaaagaacacgattgagcccacaatattaggctcaattccagagtgtgacgctgtctcagagtaccttgaaagaataaaaagtcagttcactggcttttcaaagacttatgctacacagctgatcaagcagcttgtgacagagaggtaccatggaggtggtgttagagaccacattcttaggatgagcaacatggcttccaagttgaagccaatggatttgggcataacagatgactttctggtccatctggttatggcctcattgccaaagcagtttgacaattttattatcaactacaacataagtctagagaaatggaactttgaaaagctcatcgctaattatgtgcaagaggaggagagaatcaaagagtcaaatggtggttcaattaactatgttaaagataacaagaaaaagaaccacaagtctcccacctcaaaagctaaacagtctcagcatctacctcagcaacaacagttcgctgttgagaaagatcagtgtctccactgcaagaagataggacattataagaaagactgtcctgacttcttgaaaatgatcatggcaaggaaagatgagaacattattacatttgtaaatgaatctcattatgttggttactctagatctacatggtggattgattctggagcaactattcatgcttgtaattgtttaaaggcattccgttcgacgaggactatgcaaagaagtgaaagctccattagagttgccaatggagttgaagaaaaagttgaagctgttggagatcttcctctagagctcgcgaatggcttcacacttttacttcgaaatgtcttttatgttccttctttgcaaagaaacttaataagtgtatcaaagttagattttgatggatatgattgccgctttggaagtggcaaatgtgaactatgggggagaattgagagactcgttaagaatgaaattcttcgtccattggagttctcagacttagaacaatgcatagaatgcattaaaggaaaatttgtaaagagcatcaaaaagggtgcaaaacgaagcgcaggaattttagagatcattcatacagatatttgtggtccatttcttgtgaaaagtgtggatggctatgactcgttcgtaacattcacagatgattactcccgctatggttatatttatccaattaaagagcgatcagaagcattggataaatttaagatattcaaagttgaagttgaaaatcagcatgttataaagattaaagtgaatggggtagctgaaaggcgtaaccgtacccttatggatatggtgcacagcatgatgagctactccacactaccactgggtttatggatggaggcgttaaaaaccgccattcatattctcaacagagttccaagcaaatcggtgcccaaaacaccatatgagctatggacaggaagagtaccctcgctagctcacctccgtgtgtgggggagtcctgtagaggctaaagtatttaacccaaacattgggaagttggatcccaaaacagtcagctgccattttattggctatcctggaatatcaaagggctatcgtttctactgtccaaacagttatacaaagtttgtagaaatgagacatgccatcttcttggaagacgaaatgattagggggagctcggtagttcgagaaattgatcttgaggagaggcgggtgtctatacccgctccgtcgactcaggaacctttcttctctctacctgctgatgttgtgcctacaatgcctgtcattgcggaggaactgcaacagcctcaaacagataatgtgctagtacaggagactcaacaagagcctcaggtacaggatgtgccaaatgtggaggcccctagaaggtctgaaagagtcagaagatcggctatccgtgatgactataatgtttataatatagaagagtcgcatgtggaggatgatcccacctcatatgaagaggccatgagaagcgctcgctcatctaaatggttggaagccatgaaagatgaaatgaaatcaatgaaactaaacgatgtttgggatttagaagaaattcctaaaggagccaaaacaatagatgtaaaaacggcatttataaatggagatttggaggaaaaagtatgcatggcgcaaccgaaaggttttgtcatgaaaggaaacgaaaatatgggatgccgtctaaagagatccatttatggattaaaatttcagagtaatccaggcccagagcactggaaattggtaaagaaagtcttgcgttatttgcaaggaacaaaaggcctcatgctgtcttacagaagatcagaatcactccagatagtggggtattcagattttgactttgaaaagataatacaaaggtctactatgtatgccgagtttatagcatgctatgaggcaaatgaggcaacggggcaggtgaactggctaaagaagttcatacccggtttaaaggtggttgacagtattaagaaaccactaaagttatactgcgataacaaacccgcggtaatgtatgctcacaacaatcagtcaagtggtgctgccaaacacattgacataaagtactatgttgtgaaggacaaagtctgggatcaaacaatcagtctcgagcacattagaacagaaaggatgctcgcggatccgctcacgaaaggcctaccacccaacatgttcaaggaacatatagatctcccatccgtcgggcccaacggcacaacggaccttgaccgcgccctgttcgggggcggccagtccaatagctg

SEQ ID NO: 30331 - DNA, 108 bp, Oryza sativa
  Clone ID: PAT_MRT4530_34746C.1
tttcgtttgctgccactgcggacactgattttgagagagagccttaaggagtaggaagggatggcaaagaaggtcttcttcagggacatacggcccccaactgaagaa

SEQ ID NO: 30332 - DNA, 249 bp, Oryza sativa
  unsure (1)..(249): unsure at all n locations
  Clone ID: PAT_MRT4530_34747C.1
gcagcagcanccccaggaacagaggcacaacagnccagcncngaccggaaaagccgcaagcngagaacaaaggggggaacggcaggggngnnngnnaacngnaaaccancacccacacagagggaagagacaagagnnggngaccaggacnggcncnncagcngccgggcgaccccnaaaaaaacggcaggacccccgagggancagcaaggggggaggcnaccgagcagngnnncncgcngcggccca

SEQ ID NO: 30333 - DNA, 5598 bp, Oryza sativa
  Clone ID: PAT_MRT4530_34748C.1
atggagaacaagaaaacccaggatggccgtcgtcgtaccatctccaccgtcgagctaccaccgcctccacccaaggctagatcagcgagtcttaggttagatctggcaaggagggggcatggagtgatcatcgtcgagccgccgctggctcggtcgagctgcagagatgacgaggtacaccgccaccacaaaagccacaacaacagccacgcacagctggacccggagctgtgccagcagtgggggtgggggagggggaaggggagcggcgctagcggcggcttcttcccaagaatgaatcgccctaggggagggcgattcattgttgggaaggagccactacacaattgctatggcccagttggtccggcttgcttggaattctctctacccttccggattccggccacctccctgccttccactccgccgtgcgccgcctccgcgccctcctccatgtcgctccgccgcctagcccgttccccctcgtcgcgctctctctgcgccccgcgctccttctccttctccacctccgcctctccgcctccgcgcgctcccgtgcccgcatccccttcctacctcgcccaccacctgctcgacgaattctcccgcccgcgcgccacccgcgacgcggcgcgcctccgccggctcgccgccgagctcaccgcccccgccgcggagtccgtcctcctccggctcccgtcctggcgccacgccctcgacttcttccgctgggccgccgaccagccgggcttccgccactcctgctactcgctcaacgccatggcctccctcctcccccgccaccagcgcgcgcatctcgaccgcctcgccgccgacgcgatctccgcgcgctgcctcatgacgccaggcgcgctcgggttcctcctccgctgcctcggcgccgcggggctgcccgacaccgccgtccgcgccttcgacgccgcgagggcctccttcggttgcacccccaactcgtacacctacaactgcctcctcgacgcgctcgccaaggccggccgcgcggacgatgcccaggcaaggctccgggagatggtggcgaggtgcggcgacgggagcgttgataagtacacgctcacctcactcctgcggtgctactgcaatgcaggtcgtcctgatgacgccaacgacgtgttccaaaggatgagcgagctggggtgggtggacgagcatgtgcttacgacgctgatggtggcgttcagcaagtgggggaaggtggacggtgcggttgagctgctagggagcatggaagcactggggatgaggttgagtgagaagacattgagcgtgcttgtccacgggttcaccaagcaaggcagggttgacaaggccatggacatgtttgccaagatggtcagttacgggtttgttgtcgatttggcaatgtacagcgttttaattgaggggctctgtcagcagaaggacattgcgagagcagtgaagttgttcaaggaaatgaagagcagtggagttgctcctgacgtccgcttactcaagaaggtgatcgaggctttttgtagagaaggggattttgccgttattggtccgttcattaatgagaatgcagagtatttgaaatccggcagtgttgtcccactatacaatgtagttttagaagagcttgtccattgtggtgaggtagaagcagcttatcagttgctccgctccatggagctgtcagagaacgatgagaaaatcaagtccttagtcagcatgggttttccagaagatgaagcaaagacggctattactagatgtggaaatgtttactctgcaaacctatctgactatgaggcctttcgtgagcggatccgcgagcatcctttctggtctaatgtgctcgagactgattgtttgatcccggactttgtcctttacaacatagtactttatgtcaatgtgtttggcagcaccacttgactgattgttgtgagcgtacattactgcgggttcattgtcgcagtataactttagtggtttctcaatactgtcaaccacctttaaaccgggtatgaacttctttagccagttcacctgccccgttgcctcatagcatgctataaactcggcatacatagtagactctgcagtgatagtctgttttgagcttttccatgaaatagctcctcctgccagggtaaacacgtatcccgatgttgactttgtattatcttttgcaaagtcagaatctgagtaccccactatctggagtgattttgatcttctgtaagacagcatgaggccttttgttccttggaaataacgcaagactttctttaccaatttccagtgctctaggcctggattactttgaaatctgccaagtaacccggtaacaaatgccaagtcaggtcgtgtgcacacttgcgcgtactgtaggcttcctacagctgacgcatatggctttgttttcattttattgagctcatactgatttctgggacattgcgatgccccatacttttcgcctttcactataggagcaggtgtagcactgcatctgtacatgttgaatttcttcaacaccttttctatatatgtcttttgagaaagtcccaatgtatactttgttctatctcggtgaatctctatgcccaaaacatatgaagcctcaccgaggtctttcatgtcaaagtttgaggacaagaatttctttatttcctgtagtagactgacatcactactagccagtagaatgtcatccacatacagaattaggaaaataaatctcccattcttaaactttaaataaatacagttgtcctcaacattctcttgaaacccaaatttctttattgtcccatcaaacttcaagtaccactgtctcgaagcttgctttaatccataaatggatctctttaaacgacatcccatattttcgtttcctttcatgacaaaacctttcggttgcgccatgtatactttttcctccaaatctccatttagaaatgccgtttttacatccatctgatgtaattccaaatcataatgtgccactagtgccattataatcctgaaggaatctttacaagagactggagaaaatgtctcagtgtaatcaatcccttctcgttgcgtgaagccttttgccacaagtcgcgctttaaacttttctatattccctttggagtcatatttggttttgtagacccatttacaggctactgttttggctcctttaggaatttcttctaaatcccaaacatcgtttagtttcattgatttcatttcatctttcatggcttccaaccattcagatgagcgagcgcttctcatggcctcttcatatgaggtgggatcatcatccatatgcgactcttctatattataaactttatagtcatcacggatagccgatcttctgactctttcagaccttctaggggcctgcacatttggcacatcctgtacctgaggctcttgttgagtctcctgtactggcacattatctgtttgaggctgttgcaactcctccttttcattcattgttgccacaggaggggtaacaacaggtgctggtacctcaatgacaggcattgcaggcacaacatcagcaggtagagagaagaaaggctcctgagtcgacggagcgggtacagacacccgcctctcctcaagagcaatttctcgaactaccgagctccccctaatcatttcgtcttccaagaagacagcgtgtctcgtttctacaaactttatataactgtttggacagtagaaacgatagccttttgatctttgaggatagccaataaaatggcagctgattgtcttgggatccaacttcccaatatttgggttaaatactttggcctctacaggactcccccacacacggaggtgagctagcgagggtactcttcctgtccatagctcatacggtgttttgggcatcgatttgcttggaactctattgagaatatgaatggcagtttttaacgcctccatccataaacccagtggtagtgtggagtagctcatcatgctgcgcaccatatccataagagtacggttgcacctttcagctaccccattctgttgaggttcgcccggtgttgaatactgggctactattccattctctagcaagaaccttgcaaaaggtccagggacttgcccataaggcgtatgtcgaccatagtactcccccccacggtcagatcttactactttaatctttatatcatgctgattttcaactttagctttgaatatcttaaatttatccaatgcttctgatcgctctttaattggataaatataaccatagcgggagtaatcatctgtgaatgttatgaacgagtcatagccatccacacttttcacaggaaatggaccacaaatatctgtgtgaatgatctctaaaattcctgcgcttcgttttgcaccctttttgatgctatttacaaattttcctttaatgcattctatgcattgttctaagtctgagaactccaatggaggaagaatttcattcttaactagtctctcaattctccccctcgaaatatggcccaaacgatagtgccataatttcgatgagacatcgggagttcgctttcttttcttgttttcttttgtcaacgaggacacaacattcacattctcagaaagagataacaaataaagctcgtctcgcaacacagcaagaccaatacatgcattattataccatagttcacatttgccacttccaaagcggcaatcatatccatcaaaatccaactttgatacacttattaagtttctttgcaaagaaggaacataaaagacatctcgaagtaaaagtgtgaagccattcgcaagctctagaggaagatctccaacagcttcaactttttcttcaactccattggcaactctaatggagctttctcttctttgcgtagtcctcgtcgaacggaatgcctttaaacaattacaagcatgaatagttgctccagaatcaatccaccatgtggatttctctggacttatgttgtagttgacaataaaattgtcaaactgctttggcaatgaggccataaccagatggaccagaaagtcatctgttatgcccaaatccattggcttcaacttggaagccatgttgctcattctaagtatgtggtctctaacaccacctccatggtacctttctgtcacaagctgcttgatcaactgtgtagcatacgtctttgaagagccagtaaactgactctttattctttcaaggtactctgagacagcgtcacactctgggattgagcccaatatggtaggctcaatcgtattctttaccacagccaaacatttcttgttggctaaggaccatttcttttgttcaatgtcatacgacatgacgagaggagcattgtccctctgtctcttttgccagtcagcatctgactcattttcacctctgacaagttcagcaggttctataggacatggggtagtcaacacccagtccacctctcccaagataaaagtaaggtcgagttttcttttccattctgcgtagttatctccttttagggtcggaatatctttaatgcaacccatcaaggagtagccaccttcgcgccgccgcgccat

SEQ ID NO: 30334 - DNA, 3690 bp, Oryza sativa
  Clone ID: PAT_MRT4530_34749C.1
ggtgtaaaagaccacattcttaggatgagggacatggctttcaagttgaagccaatggatttgggcatctcagatgcctttttggtccatctggttatgacctcattgccaaagaactttgacaactttgttgtcaactacaaaataagtccagaaaaatggaatcttgaagagctcatctctaattgtgtgcaagaggaggaaagaatcaaagagaccaatggtgcctccaataaccttgttaaagatacaaaggaaaagagccactggtcaccccccccccctcaaaagcaaaacagcctcagcatctgcctcagtaacaacagttcacagttaagacaagatcagtgtccccactataagaagacagggcattgcaagaaagttcgtcctgacttcctgatagtgatcatggcaaagaaaggtgagaacattattacatttgtaaatgaatctcattatgattggttattctagatccacatgatggattgattctggagcaactattcatgtgtgtaattgtttaaagggattccgttcgatgaggactacgcaaagaagcgaaagctccattagagtcgccaatggagttgaaggcaaaagttgaagctgttggagatcttctcctagagctcgcgaatggcttcacacttttacttcgagttgttttttatgtcccttctttgcaaagaaatttaataagtgtatcgaaattggattttgatggatatgattaccattttggaaatgtcaaatgtgaactatggtataataatgcatgtaatggtcttgctgtgttgcaagacgagctttatttgttatctctttatgagaatgtgaatgttgtgtcctcgttgacaaaagaaaacaagaaaagaaagagaactcctgatgtctcatcgaaattatggcactttcgtttatgccatatttcgagggggagaattgagagactagttaagaatgacattcttcctccattggagttctcagatttagaacaatgcatagaatgcattaaaggaaagtttgtaaagagcatcaaaaagggtgcaaaacgaagcgcaggaattttggaaatcattcacacagatatttgtgatccatttcctgtgaaaagtatggatggctatgactcattcataacattcacacacaattactcccgttatggttatatttatccaattaaagaaagatcagaagcattggataaatttaagatattcaaagctgaggttgaaaatcagcatgatgtaaagattaaaatagtatgatctgaccgtgggggggagtactatggtcggcatacgccttatgggcaagtccctagaccttttgcaaggttcttgcttgagaatggaatagtagcgcagtattcaacaccgggcgaacctcgacagaatggggtagctgaaaggcgtaaccgtacccttatggatatggtgcgcagcatgatgagctactccactctaccattgggtttatggatagaggcattaaaaaccgccattcatatccttaacagagttccaagcaaatcggtgcccaaacactgtatgagctatggacgggaagagtaccctcgctagctcacctccatgtgtgggggagtcctgcagaggctaaaatatttaacccaaaccttggaaattggatcccaaaatagtcagctgtcattttattcgctatcctgaaagatcaaaaggttatcgtttctattatccaaacaattatacaaagtttgtagaaacgagacacgccgtcttcttggaagacgaaatgattagggggagctcggtagttcgagaaattgatcttgaggagaggcgggtgtttgtacccgctccgtcgactcaggagcctttcttctctctacctgctgctattgtacgtgcaatgcatgacgttgcggtaccagcacctgttgttacccctcctgtggcaacaatgaatgaaagtgaggaaccctttctacaggattcaacagaaattattgccacaccagaggaggagctgcaacagcctcaaacatataatgtgcctgaactggcccctagaaggtctgaaagagtcagaagatcagctatccgtgatgactatgaagttcataatatagaagagtcgcatatggaggatgatcccacctcatatgaagaggccatgagaagcgctcgctcatccgaatggttggaagccatgaaagatgaaatgaagtcaatgaaaataaacgatgtctgggatttagaagaacttcctaaaggaaccaaaatagtaggctgtaaatgggtctacaaaaccaaatatgactccagagggaatacagaaaagtttaaggcgcgacttgtggcaaaaggcttcatgcaaagagaaaggattgattacaatgagacattttctccagtctcttgtaaagattctttcaggattataatggcactggtggcacattatgatttggaaatgtaaaaacgacacttctaaatgtttggaggaaaaagtatacatggcacaaccgaaaggttttgtcgtgaaaggaaacgaaaatataggatgccgttaaagagatccatttatggattaaagcaagcttcgagacaatggtacttgtagtttgatgggacaataaagaaatttgggtttcaagagaatattgaggacaactatatttatacaaagtttaagaatgggagattcattttcctaattctgtatgtagatgacattctactggctagtagtgatgtcagtctattacaggaaacaaagaaattattgtcctcaaactttgacatgaaagacctcgttgaggcttcatatgttttgggcatagagatttaccgagatagaacaaagtatacattgggactttctcaaaaggcatatatagcaaaggtgttgaaaaaattcaacatgtacagatgcagtgcgacacttggtcctatggtcaaagggttaaagtatggggcatgacaatgtcccagaaatcagtatgagctccacgaaatgaaaacaaagccataagcgtcagctgtgggaagcgtacagtatgcgcaagtgtgcacacgccctgacttggcatttatcacagggttacttggcagatttcagagtaattcaggcccagagcactggaaattggtaaagaaagttttgcgttatttgcaaggtacaaaaggcctcatgttgtcctacagaagatcagaatcgctctagatagtggggtatttagattccgattttgcaaaagataatacaaagtcaacattgggatacatgttcacctttgcaggaggagctatttcatggaaaagcttcaaacagactatcactgcagggtctactatgtatgccgagtttatagcatgctatgaggccacggggcaggtgaactggctaaaaatgttcgtatccagtttaaaggtggttgacagtattgagaaaccactaaagttatactgcgataatgaacccgcagtaatatacgctcacaacaatcagtcaagtggtgctgccaaacacattgacatgaagtactatgttgtgaaggataaagtccgagatcaaacaatcaatctcgagcacattagaacaaaaaggatggtcgtggatccgctcacgaaaggcctaccacccaacgtgtccaaggaacatgtagccggcataggtttaagggaagccttatga

SEQ ID NO: 30335 - DNA, 168 bp, Oryza sativa
  Clone ID: PAT_MRT4530_3474C.1
ctttacttttacctctacaaccaaggtcgttgcgatgggcctctttgactgacccgcggtgtaaaaaacaggactagacccatgtgacggccgttagtttaaaatgaagagaggcatgctcactatgcctccagtgaactatggcacgacatgcatggaatgatcttg

SEQ ID NO: 30336 - DNA, 903 bp, Oryza sativa
  Clone ID: PAT_MRT4530_34750C.1
atgctgtacacatttgattctgacggcaccaaggcgacgggcctctacagcctcgtggagaagaaggcgtacgttttgccgctccaggatctacctaataggcatatcatagtgtcctgctatggctggattgtaaacgccgatgagagatcagagttgcaccttgtcaatcccatcactggcgagcagatcgccctgccatcggtcaccaccattgagcaggtgaagcccatctatgacgacgatgctgctgctgccaacgggtacaaatacttgtggcacacgggagaggtgacggtttccgactcgtcctcgatcctctattacaaggcatttgtgtcttgtgatccatccatgggaggaggatatactgtggtgctcatccacaatccgtattgccagctctcgttcgcaagggctggtgatgataagtggacatggctgcccccgtattccgactatgaggactgtttttttaaagatgggttgctgtatgctgcgactttgttaggagaaatacacatgtttgatcttaccgacccaaaggtcgcgccaaagatagttatgggtaaggtgaaggactttctgtatgagaatatttatatcgttgaagcttcatgcggtaacctactgcaaatttggcggtccgatgatctaccgaagtgggatgtaccggagggggatgaagatgatgatcactcgtttgattcagaatctgagttcgactctgagtcatatgtgtgtgatactaacacgatcaagaacaaccatcgtgatattggagtgttggacttggaaaatttccgccgtgaagaaattgtgtccccgcagatttggtccaactggccaccccctatttggctgattccgaatcccaggaggatgaaattggcatcgcattag

SEQ ID NO: 30337 - DNA, 5317 bp, Oryza sativa
  Clone ID: PAT_MRT4530_34751C.1
ggggccttgaccgcgccctgatcgggggcgcccagcccaatggctggtgggcccccgtcacactgcgccatataaaagaggggtggaggccggcacggcacaagccagtgacgggaagcgccaccgccgcgccacacctcatcgccgggacatctacgaccgtcactcccgcagccgtcatcgtcgtcgacctcaccggcgccgcatccacgacaaccgagcgccaacgacgacgatggccggcacttcttcatcctccaacacctcaaccggtggctactccttgatgggttgcattaaagatattccgaccctaaaaggagataactacgcagaatggaaaagaaaactcgaccttgcttttatcttgggagaggtggactgggtgttgactaccccatgtcctatagaacctactgaacttgtcagaggtgaaaatgagtcagatgctgactggcaaaagagacagagggacaatgctcctctcgtcatgtcgtatgacattgaacaaaagaaatggtccttagccaacaagaaatgtttggctgtggtaaagaatacgattgagcctaccatattgggctcgatcccagagtgtgacgctgtctcagagtaccttgaaagaataaagagtcagtttactggctcttcaaagacttatgctacacagctgatcaagcagcttgtgacagaaaggtaccatggaggtggtgttagagaccacatacttagaatgagcaacatggcttccaaattgaagccaatggatttgggcataacagatgactttctggtccatctggttatggcctcattgccaaagcagtttgacaattttattgtcaactacaacataagtccagagaaatggaactttgagaagctcattgctaattgtgtgcaagaggaggagagaatcaaagaatcaaatggtggttcaataaactatgttaaagataagaaaaagaaccacaagtctcccacctcaaaaggtaaacagtctcagcatctgcctcaacaacaacagttcgctgttgagaaagatcaatgtctccactgcaagaagacaggacactacaagagagattgtcctgactttttgaaaatgatcatggcaaagaaaggtgagaacattattacatttgtaaatgaatctcattatgttggttactctagatccacatggtggattgattctggagcaactattcatgcttgtaattgtttaaaggcattccgttcgacgaggactacgcaaagaagagaaagcaccattagagttgccaatggagttgaagaaaaagttgaagctgttggagattttcctctagagctcgcgaatggcttcatacttttacttcgagatgtcttttatgttccttctttgcaaagaaacttaataagtgtatcaaagttggattttgatggatatgattgccgctttggaagtggcaaatgtgaactatggcataataatgcatgtattggtcttgctgtgttgcgagacgagctttatttgttatctctttctgagaatgtgaatgttgtgtcctcgttgacaaaagaaaacaagaaaagaaaggggagaattgagagactagttaagaatgaaattcttcctccattggagttctcagacttagaacaatgcatagaatgcattaaaggaaaatttgtaaagagcatcaaaaagggtgcaaaacgaagcgcaggaattttagagatcattcatacagatatttgtggtccatttcctgtgaaaagtgtggatggctatgactcgttcataacattcacagatgattactcccgctatggttatatttatccaattaaagagcgatcagaagcattggataaatttaagatattcaaagctgaagttgaaaatcagcatgatataaagattaaagtagtaagatctgaccgtgggggggagtactatggtcgacatacgccttatgggcaagtccctggaccttttgcaaggttcttgctagagaatggaatagtagcccagtattcaacaccgggcgaacctcaacagaatggggtagctgaaaggcgcaaccgtaccctcatggatatggcgttaaaaaccgccattcatattctcaacagagttccaagcaaatcggtgcccaaaacaccgtatgagctatggacaggaagagtaccctcgctaactcacctccgtgtgtgggggagtcctgcagaggccaaagtatttaacccaaatattgggaagttggaccccaaaacagtcagctgccattttattggctatcctgaaagatcaaaaggctatcgtttctactgtccaaacagttatacaaagtttgtagaaacgagacacgccgtcttcttggaagacgaaatgattagggggagctcggtagttcgagaaattgatcttgaggagaggcgggtgtctgtacccgctccgtcgactcaggaacctttcttctctctacctgctgatgttgtgcctgcaatgcctgtcattgaggtaccagcacctgttgttacccttcctgtggcaacaatgaatgagagtgaggaacctgttatacaggattcaacagaaatggttgccacaccagaggaggagctacaacagtctcaaatagataatgtgccagtacaggagactcatcaagagcctcaggtacaggatgtgccaaatgtgcaggcccctagaaggtctgaaagagtcagaagatcggctatccgtgatgactataaagtttataatatagaagagtcgcatatggaggatgatcccacctcatatgaagaggccatgagaagcgctcgctcatctgaatggttggaatccatgaaagatgaaatggaatcaatgaaactaaacgatgtttgggatttagaagaaattcctaaaggagccaaaacagtaggctgtaaatgggtctacaaaaccaaatatgactccagagggaatatagaaaagtttaaagcgcgacttgtggcaaaaggcttcacacaacgagaagggattgattacaatgagacattttctccagtctcttgtaaagattccttcaggattataatggcactagtggcacattatgatttggaattacatcagatggatgtaaaaacggcatttctaaatggagatttggaggaaaaagtatacatggcgcaaccgaaaggttttgtcatgaaaggaaacgaaaatatgggatgtcgtctaaagagatccatttatggattaaagcaagcttcgagacagtggtacttgaagtttgatgggacaataaagaaatttgggtttcaagagaatgtcgaggacaactgtatttattcaaagtttaaaaatgggagatttattttcctaattctgtatgtggatgacattctactggctagtagtgatgtcagtctactgcaggaaacaaagaaattcttgtcctcaaactttgacatgaaagacctcggtgaggcttcatatgttttgggcatagagattcaccgagatagaacaaagtatgcattgggactttctcaaaagacatatatagaaaaggtgttgaagaaattcaacatgtacagatgcagtgctacacctgctcctataatgaaaggcgaaaagtatggggcatcgcaatgtcccagaaatcagtatgagctcaatgaaatgaaaacaaagccatatgcgtcagctgtaggaagcctacagtacgcgcaagtgtgcacacgacctgacttggcatttgttaccgggttacttggcagatttcagagtaatccaggcctagagcactggaaattggtaaagaaagtcttgcgttatttgcaaggaacaaaaggcctcatgctgtcttacagaagatcagaatcactccagatagtggggtactcagattctgactttgcaaaagataatacaaagtcaacatcgggatatgtgtttaccctggcaggaggagctatttcatggaaaagctcaaaacagactatcactgcagggtctactatgtatgccgagtttatagcatgctatgaggcaacggggcaggtgaactggctaaagaagttcatacccggtttaaaggtggttgacagtattgagaaaccactaaagttatactgcgacaacgaacccgcagtaatcatcgtgctggagaagaagacgttcttggtggagcggttcgacaagtacgtcaagacgctcggatccgggatccacgtgctcgcccccctcgtcgaccacatcgcgtacgtccactcactcaaggaggaggccatccccatccccgaccagtccgccatcaccaaggacaacatctccatccagatcgacggtgtcctctacgtcaagaatttttggggaaacttcaaattgcatgttctagatgaagcacttcttgctttcaagaaggcagttacaacttctgatgggatattcctcaactggcgtgaacaagatgtggatccttgcaattggaaggatgttagatgtgacagtcacaccaagagactcaaggcaaggagaggcagtgtctcatgggaatcaggggtaaggtgcttctcgattggcccatcagaactggtagcacgtggttcgaaggtatggctatccacgcgcgcaggggggcacctggaagcaggcggcgtcgacgatgccgaaggcggcgacggcgacccaggcggcccagccggaaggctgcctcttgccgcgcgaggcggcgaaggcgacgagcagtgtgccggcggggaggaggcgaagctcggcgacgaagaaggggcccgtcttggctatgacccccttcatggccaccatggccgtgccccagaagaagaagggcgacaccagcgacgcccactcccaccactccctccccacgaatgccgccgaggccgagacgccatcctcctcctcggagacccgcgcgaggccttcgacgaagcactcgacgtccgtgcccgtgccgacgcagtcaaccgcgtccggcggggagggcggcatcgcctcgcggcggaagggttccgcacctgggcggtcgtcgacgtagcactcaacgtcggcggcccgtgccgacgcagtcaaccgcgtcaccgggttaggcggcgtgtggcggggcgcggccgccgccgcgagccgccgcgagatgtcgcacgccacggccaccgcgcgggacggagtagacagtggagggcgggaggatggagtacggcggggcggggcaagacggagtacggcggcgcgggagtacggcggggcggggcggcgctgactgagggcggcggcggacgcgaatggaggcagcggcgcgagtggactgggtga

SEQ ID NO: 30338 - DNA, 322 bp, Oryza sativa
  Clone ID: PAT_MRT4530_34752C.1
atggcggcgacgagctctcccggcaaggtggcagcagatccgcgattgccgtcgctggatctggcctgccccaggctcgattcgaccgaagcaggcggcgccgtggcgtggcgtgacggaggcggtgtggccgacgacaaagggggccgctgcaagatggctcgcgaagcaggcacgcaggtggcggagggcggcacacgtgaggtggcgcccaccgtcaccccctctccagcggcaaaggcagtgtggcgcgagccggcatgcgaggcaagaatgcgcgaggccgtgcccaccgtcgctctttccggtgcggccgtcggcg

SEQ ID NO: 30339 - DNA, 1200 bp, Oryza sativa
  Clone ID: PAT_MRT4530_34753C.1
atggagacgtacggtttggtgaaggatgagctgcttcacggcatcggaggagggcaggggcgcctgtactgcgaggttaagccgacagcagcgccggcggtgatcacagctgccggtggcggcgctaagagcgtgaagagaaggaagagagagccatcggcggcggcgatgtcggctgtgacagtggccggcaatggcaaagaggccggcggtagcaatgcggctaacaagagaagctcaaggtttaggggtgtgagcaggcaccgttggacaggcagatttgaggcacacctgtgggacaaagggacatggaacccaacgcagaagaagaaagggaaacaagtttatctcggggcgtacaacgaggaagatgcggcagcgagagcttacgatctggcggcgctcaagtactggggacctaccacctacacaaacttccctgtcgctgactatgaaaaagagctgaaactgatgcagggtgtatccaaggaggagtacctagcctcaataagaaggaagagcaatggcttctctcgtggagtttccaagtacagaggcgttgcacggcaccaccacaacggcaggtgggaggcccggatcggcagggtgttcggcaacaagtacctctacctgggcacctactccacccaggaggaggccgcccgcgcctacgacatcgccgccatcgagtaccgcggcatcaacgccgtcaccaacttcgatctcagcacctacatccgctggctcaagcccccctcctcctcctccgccgccggcacgccccaccaccacggcggtggcatggtcgtcggcgccgaccgcgtgctcgccccggcgcagagctacccgatcagcgccgccgccgacgacgacgtggccggctgctggcggccgttgccgtcgccgtcgtcgtcgacgaccacggcgctcagcctgctgctccggtcgtcgatgttccaggagctcgtggcgcggcagcccgtcgtggaaggcgacgacggacagttggcggtggtgtcgggcgacgacgccgacgccgacgccgactccgacgtgaaggagccgccgccggagagcgagtacggcgaagtgttcgccagcgacgaggcggcggcggcggcggcgtacgggtgctccatgtacgagctggacgacagcttcgccctcatcgatgactcggtgtggaactgcttgatctga

SEQ ID NO: 30340 - DNA, 3593 bp, Oryza sativa
  Clone ID: PAT_MRT4530_34754C.1
atgcctgtccccgtctacgccgccgccgccatgctgccgccgtcgccgtgcccgtctcttgccgccgccgtcctcgtctacaagggatggctgcaaggggccgaccgcgcatgtcggggtgctcctcccgcaatgggatgcccagctatatctagtaggaatcacctgatacctggtaggtatcatccgatacctcgcaagtatcacgcgatacatggtagaaatcgtctgatacctgacaagtatcacatgatacctcgcgagaatcacgcgatacgtggtagaaatcgtttgatacatgacaggtttcacatgatacctcgcgagtatcacgcgatacgtggtagaaatcgcatgatacctgataagtatcacctgaaacgtggctactccttgatgggttgcattaaagatattccgaccctaaaagaagataactacgcacaatggaaaagaaaactcaaccttgctttcatcttgggagaggtggactgggtgttgactaccccatgtcctatagaacctgctgcacttgtcagaggtgaaaataagtcagatgctgactggaaaaagagacagagggacaatgctcctctcgtcatgtcgtatgacattgaacaaaagacatggtccttagccaacaagaaatgtttggctgtggtaaagaatacgattgagccaactatattgggctcaatcctagagtgtgacgctgtctcagagtaccttgaaagaacaaagagtcagtttactggctcttcaaagacttatgctacacagctgatcaagcagcttgtgacagaaaggtaccatggaggtggtgttagagaccacatacttagaatgagcaacatggcttccaagttgaagccaatggatttgggcataacatatgactttctggtccatcttgttatggcctcatttccaaagcagtttgacaattttattgtcaactacaacataagtccagagaaatggaactttgagaagctcattgctaattgtgtgcaagaggaggagagaatcaaagagtcaaatggtggttcaattaactatgttaaagataagaaaaagaactacaagtctcccacctcaaaagctaaacagtctcaacatctgcctcagcaacaacagttcgctgttgagaaagatcagtgtctccactgcaagaagacaggacattacaagaaagactgtcctgacttcttgaaaatgatcatggcaaggaaaggtgagaacattattacatttgtaaatgaatctcattatgttggttactctagatccacatggtggattgattctggagcaactattcatgcttgtaattgtttaaaggcattccgttcgacaaggactacgcaaagaagagaaagctccattagagttgccaatggagttgaagaaaaagttgaagctgttggagatcttcctctagagattgcgaatggcttcacacttttacttcgagatgtcttttatgttccttctttgcaaagaaacttaataagtgtatcaaagttggattttgatggatatgattgccgctttggaagtggcaaatgtgaactatgtgtggatggctatgactcgttcataacattcacagatgattactcccgctatggttatatttatacaattaaagagcgatcagaagcattggataaatttaagatattcaaagctgaagatgaaaatcagcatgatataaagattaaagtagtaagatctgaccgtgggggggagtactatggtcgacatacgccttatgggcaagtccctggaccttttgcaaggttcttgctagagaatggaatagtagcccagtattcaacaccgggcgaacctcaacagaatggggtagctgaaaggcgtaaccgtacccttatgtatatggtgcgcagcatgatgagctactccacactaccactgggtttatggatggaggcgttaaaaaccgctattcatattctcaacagagttccaagcaaatcggtgaccaaaacaccgtatgagctatggataggaagagtaccctcgctagctcacctccgtgtgtgggggagtcctgtacaaacacctgttgttacctctcctgtggcaacaataaatgaaaatgaggaacctgttatacaagattcaatagaaatggttgccacaccagaggaggagctgcaacagcctcaaacagataatgtgccagtacaggagactcaacaagagcctcaggatgatcccacctcatatgaagaggccatgagaagcgctcgcttgtctgaatggttggaagccatgaaagatgaaatgaaatcaatgaaactaaacgatgtttgggatttagaagaaattcctaaaggagcgaaaatagtaggctatggatgtaaaaacgacatttctaaatggagatttggaggaaaaagtatacatggcgcaaccgaaaggttttgtcatgaaaggaaacgaaaatatgggatgccgtctaaaagatccatttatggattaaagcaagcttcgagacagtggtacttgaagtttgatgggacaataaagaaatttgggtttcaagagaatgtcgaggacaactgtatttattcaaagtttaagaatgggagatttattttcctaattctgtatgtggatgacattctactggctagtagtgatgtcagtctactgcaggaaacaaagaatttaaattcttgtcctcaaactttgacatgaaagatctcggtgaagcttcatatgttttgggcatagagattcaccgagataaaacaaagtatgcattgggactttctcaaaagacatatagaaaaggtgttgaagaaattcaacatgaacagatgcagtgctacacctgctcctatagtcaaaggggaaaagtatggggcatcgcaatgtcccagaaatcaatatgagctcaatgaaatgaaaacaaagccatatgcgtcagctgtaggaagcctacagtacgcgcaagtgtgcacatgacctaacttggcatttgttaccaggttacttggcagatttcaaagtaatccaggcccagagcactgaaaattggtaaagaaagtcttgtgtgcctcatgctgtcttacagaagatcagaatcgctccagatagtggggtattcagattctgattttgcaaaagataatacaaagtcaacatcgtgatatatgttcaccctggcaggaggagctatttcatggaaaagctcaaaacagactatcattgcagggtctactatgtatgccgagtttatagcatgctatgaggcaacggggcaggtgaactggctaaagaagttcatacctggtttaaaggtggttgacagtattgagaaaccactaaagttatactgcgacaacgaacccgcagtaatgtacgctcacaacaatcagtcaagtggtgctgccaaacacattgacataaagtactatgttgtgaaggacaaagtccgggatcaaataatcagtctcgagcacattagaatagaaaggatgctcgcggatccgctcacgaaaggcctaccacccaacatgttcaaggaacatgtagccggcataggtttaagggaagcctta

SEQ ID NO: 30341 - DNA, 2460 bp, Oryza sativa
  Clone ID: PAT_MRT4530_34755C.1
atggcggaagagaaagaaagcttcgaaggccaatgggcgccgtccgacgtgacggaggagaacctgaaggagatggtggcgcacggcgttctccctgccaaggagatcatcgggtggcggccagcgtgcggtgaggcttttccgacccccgatacacacgaggccgtggtcttctctcatttcttttatggcggatttgctctcccaacctcaaagttcttccgtgggatactgaatttctatggaatcagcttacatcatttgaatccaaactccatagtccatattgcaaatttcgttcatgtctgtgaagcttttttgggcattagacctcattttgctctgttccgccgaatctttttcctcaagcctcaaccgaacaaaaacaaaccatgcgtagttggtggggctggatttcaactgaggggcactctgagccagaagtatttctctatgcctttcaagacttcaaacaaaggatggcacgccaactggttttatattcaaaatcccgagcccgctcttcctgagtactcctgtcttcccccagtataccaagatacctggaactctcttcccatgggagatgaagctgcccaagccttagaactgatggaacgcatgctgaagctcaaagagcaaggcttacagggagagcaaatcactcggcatttcattaagtgccgattagctccaatcaaagagagatcccgcacagcatttgagtttgacggcaagcatgatccaaaccgtgaagacccagattctctggactttaagatcatgaaggagaggatgtacaagatattctcgaacgctattgtcgtcagctactcacatcaactgccagttgtaccatacaacgcattcaatccacctccgcaggaatatactttgatgaagtctgaccccccagtcactcagcgccggtctcctcgccagcacaccgtccagggaggtggagggccagcgatcagaccagatccgcaacctcaaacctccaatccaactggacagacaggttctcgcaagagaaaactggtgctcgacaacgatgaaggcgacgacgacaaatctggggacaagggctcgcctaataaactcccaaagcgtaccatgcccaagaaaaaactggctggccgtcaaatgccaaagattagaacatcctccaggaaaccatccgacatagatccaactggaaaagatcctgatccggctgccacagaaccaaatttatccaaagatgctgagccgactgccgaaagccagccgactggcgcccatgcttcggatgacaaagctaatccgagtgaccagccgccgactggaaaccagtcggcagcaactgaaactgcaacaacccgagagcccccgactggaaaccagtcggatgtaggtctaaatcaagagattcctgaagctgaagcgcagacaacttctcaaggaccagaagttggtaatgactcggtgatcgggtctccagataaagagcaaggatcacctcacgctcagctaggcacatcctcaggtccactaggcggcgacgaagaagaaattctccgcataaaggcagctgatgactctcgtcctcctatcttactcaaatggtgggacgagaactctcaagtttccggcattgtcataaatcgccaaaaagaagatgaggaagtgtgccagctgaagaaagtacttggagaagctactcgcattgtgaatagaatccatcttcgcaatgaggccaagaccgcaaccttagaaaagctggttcctcatttgggaactcttgaagccgttaggggccagctacacgaggccaaggagcatgccaagaaaacggagaaggaattaagggaacgaattgctcagctccaggattcaaactacgagctgagtggttcatcaaaagcgcaagccaccaggatggctcaaatggagaagcaaattgaagccttgaaaaaagacaaagcagaactggctgcagaaagggactcggccttgaaggaggttgaagaccgtaaaatcaaatcgcaagctcagtttgacgtcctggttggtaagatcaagaggcttgaaggagcaagagatgaagtcgccaatgtcgctacaccacttgtccaagctatgttccttaataacagtggtccgagtgcacttgacgcaaccgaaatctttgacaagttgagagttgcaccggatgtgtatttcaagaacatcaagaaagctggaagtatgggagctagcatggcattggcgatgaccaaatccttgtacccgagaattgaaatcgacaccattgatggatttgcagacgggacaagcgaagaagctgctcttgatcttatcagcaatgctcaaaatgcggctgacaaaattgcaagtgacgttgtagagcaattccgtaacaacgaccttcagccgagcaacaataactctgatgatgaaaggactgatactgactga

SEQ ID NO: 30342 - DNA, 4440 bp, Oryza sativa
  Clone ID: PAT_MRT4530_34756C.1
atggcgggtgcagcgaaggcgtcgtggatggtggcgatgagcgtgggcgccgtggaggcgctcaaggaccagggcggactctgccgctggaactacgcgctgcggtccatccacaaagcagccaaggccaacgccgccggcgtctctcagggcaagaagctgcctgcttctgcggcggcggtggcggagaggaggagagcggagaaggccgaggaggggctgaggacggtcatgtacctcagctgctggggtcccaattgtggctactccttgatgggttgcattaaagatattccgaccctaaaaggagataactacgcagaatggaaaagaaaactcgaccttgcttttatcttgggagaggtggactgggtattgactaccccatgtcctatagaacctgctgaccttgtcagaggtgaaaatgagtcagatgctgactggcaaaagagacagagggacaatgctcctctcgtcatgtcgtatgacattgaacaaaagaaatggtccttagccaacaagaaatgtttggctgtggtaaagaatacgattgagcctaccatattgggctcgatcccagagtgtgacgctgtctcagagtaccttgaaagaataaagagtcagtttactggctcttcaaagacttatgctacacagctgatcaagcagcttgtgacagaaaggtaccatggaggtggtgttagagaccacatacttagaatgagcaacatggcttccaagttgaagccaatggatttgggcataacagatgactttctggtccatctggttatggcctcattgccaaagcagtttgacaattttattgtcaactacaacataagtccagagaaatggaactttgagaagctcattgctaattgtgtgcaagaggaggagagaatcaaagaatcaaatggtggttcaataaactatgttaaagataagaaaaagaaccacaagtctcccacctcaaaaggtaaacagtctcagcatctgcctcagcaacaacagttcgctgttgagaaagatcaatgtctccactgcaagaagacaggacactacaagaaagattgtcctgactttttgaaaatgatcatggcaaagaaaggtgagaacattattacatttgtaaatgaatctcattatgttggttactctagatccacatggtggattgattctggagcaactattcatgcttgtaattgtttaaaggcattccgttcgacgaggactacgcaaagaagagaaagcaccattagagttgccaatggagttgaagaaaaagttgaagctgttggagatcttcctctagagctcgcgaatggcttcatacttttacttcgagatgtcttttatgttccttctttgcaaaggaacttaataagtgtatcaaagttggattttgatggatatgattgccgctttggaagtggcaaatgtgaactatggcataataatgcatgtattggtcttgctgtgttgcgagacgagctttatttgttatctctttctgagaatgtgaatgttgtgtcctcgttgacaaaagaaaacaagaaaagaaagcgaactcccgatgtctcatcgaaattatggcactgtcgtttgggccatatttcgagggggagaattgagagactagttaagaatgaaattcttcctccattggagttctcagacttagaacaatgcatagaatgcattaaaggaaaatttgtaaagagcatcaaaaagggtgcaaaacgaagcgcaggaattttagagatcattcatacagatatttgtggtccatttcctgtgaaaagtgtggatggctatgactcgttcataacattcacagatgattactcccgctatggttatatttatccaattaaagagcgatcagaagcactggataaatttaagatattcaaagctgaagttgaaaatcagcatgatataaagattaaagtagtaagatctgaccgtgggggggagtactatggtcgacatacgccttatgggcaagtccctggaccttttgcaaggttcttgctagagaatggaatagtagcccagtattcaacaccgggcgaacctcaacagaatggggtagctgaaaggcgcaaccgtacgcttatggatatggtgcgcagcatgatgagctactccacactaccactcggtttatggatggaggcgttaaaaaccgccattcatattctcaacagagttccaagcaaatcggtgcccaaaacaccgtatgagctatggacagggagagtaccctcgctaactcacctccgtgtgtgggggagtcctgcagaggccaaagtatttaacccaaatattgggaagttggaccccaaaacagtcagttgccattttattggctatcctgaaagatcaaaaggctatcgtttctactgtccaaacagttatacaaagtttgtagaaacgagacacgccgtcttcttggaagacgaaatgattagggggagctcggtagttcgagaaattgatcttgaggagaggcgggtgtctgtacccgctccgtcgactcaggaacctttcttctctctacctgctgatgttgtgcctgcaatgcctgtcattgaggtaccagcacctgttgttacccctcctgtggcaacaatgaatgagagtgaggaacctgttatacaggattcaacagaaatggttgccacaccagaggaggagctacaacagcctcaaatagataatgtgccagtacaggagactcatcaagagcctcaggtacaggatgtgccaaatgtgcaggcccctagaaggtctgaaagagtcagaagatcggctatccgtgatgactataaagtttataatatagaagagtcgcatatggaggatgatcccacctcatatgaagaggccatgagaagcgctcgctcatctgaatggttggaagccatgaaagatgaaatgaaatcaatgaaactaaacgatgtttgggatttagaagaaattcctaaaggagccaaaacagtaggctgtaaatgggtctacaaaaccaaatatgactccagagggaatatagaaaagtttaaagcgcgacttgtggcaaaaggcttcacgcaacgagaagggattgattacaatgagacattttctccagtctcttgtaaagattccttcaggattataatggcactagtggcacattatgatttggaattacatcagatggatgtaaaaacggcatttctaaatggagatttggaggaaaaagtatacatggcgcaaccgaaaggttttgtcatgaaaggaaacgaaaatatgggatgtcgtctaaagagatccatttatggattaaagcaagcttcgagacagtggtacttgaagtttgatgggacaataaagaaatttgggtttcaagagaatgtcgaggacaactgtatttattcaaagtttaagaatgggagatttattttcctaattctgtatgtggatgacattctactggctagtagtgatgtcagtctactgcaggaaacaaagaaattcttgtcctcaaactttgacatgaaagacctcggtgaggcttcatatgttttgggcatagagattcaccgagatagaacaaagtatgcattgggactttctcaaaagacatatatagaaaaggtgttgaagaaattcaacatgtacagatgcagtgctacacctgctcctataatgaaaggcgaaaagtatggggcatcgcaatgtcccagaaatcagtatgagctcaatgaaatgaaaacaaagccatatgcgtcagctgtaggaagcctacagtacgcgcaagtgtgcacacgacctgacttggcatttgttaccgggttacttggcagatttcagagtaatccaggcctagagcactggaaattggtaaagaaagtcttgcgttatttgcaaggaacaaaaggcctcatgctgtcttacagaagatcagaatcactccagatagtggggtactcagattctgactttgcaaaagataatacaaagtcaacatcgggatacgtgtttaccctggcaggaggagctatttcatggaaaagctcaaaacagactatcactgcagggtctactatgtatgccgagtttatagcatgctatgaggcaacggggcaggtgaactggctaaagaagttcatacccggtttaaaggtggttgacagtattgagaaaccactaaagttatactgcgacaacgaacccgcagtaatgtacgctcacaacaatcagtcaagtggtgctgccaaacacattgacataaagtactatgttgtgaaggacaaagtccgggatcaaacaatcagtctcgagcacattaaaacagaaaggatgctcgcggatccgctcacgaaaggcctaccacccaacgtgttcaaggaacatgtagccggcatgggtttaagggaagccttatga

SEQ ID NO: 30343 - DNA, 2481 bp, Oryza sativa
  Clone ID: PAT_MRT4530_34757C.1
atggcggaggagaaagaaagctttgaaggccaatgggcgccgtccgacgtaacggaagagaacctgaaggagatggtggcgcacggcgttctcccagccaaggagatcatcgggtggcggccagcgtgcggtgagatttttccgacccccgatacacacgagattgtggtcttctctcatttcttctatggcggcttcgctcttccgacctcaaaatttttccgcggaatattaaacttctatggaatcagcttgcatcacctaaacccaaattccatagtccatatcgccaatttcatccatgtttgtgaagccttcttgggaattaaaccccacttcgctctgttccgccgaatcttttttctcaagccccaaccgaacaagaataagccatgtgtagtcggaggggcaggatttcagttgaggggaactctaagccagaagtatttctctatgcccttcaagacctcaaacaaagggtggcatgcgaactggttttatgttcagaatcctgagcctgctcttcccgagtactcttgtcttcctccggtgtaccaagatacttggaactctcttccgatcggagatgaagctgctcaagccttggaattaatggaccgcatgctaaaactcaaagaacaaggcttgcaaggagagcagattactcggcatttcatcaaatgccgattggcaccaattaaagaaagatcccgtacagcattcgagttcgacggcaagcatgatcccaatcgtgaagaaccagactctctggactttaaaatcatgaaggagaggatgtataaaattttctcaaatgctattgtcgtcagctactcacatcagctgccagttgtgccatataatgcattcaatccgcctccgcaggaatatgcgttgatgaaatctgatcccccaatcactcagcgccggtcgcctcgtcagcacaccgttcagggaggtggagggccaaaaatcagaccagatccgcaacctcaaacctccaatccaactggacagacaggttctcgcaagagaaaactggtgctcgacaacgatgaaggcgacgacgataaatctggggacaagggctcgcctaataaactcccaaagcgtaccatgcccaagaaaaaactggctggccgtcaaatgccaaagattagaacatcttccaggaaaccatccgacatagatccaactggaaaagatcctgatccggctgtgacagagccaaatttatccaaagacgttgagccgactgccgaaaaccagccgactgccgaaagccagccgactagcgcccatgcttcggatgacaaggccgatccgagtgaccagccgccgactggaaaccagtcggaagcaactgaaaccgcaacaacccaagaacccccgactggaaaccagtcggatgtgggtctaaatcaagagattcctgaagctgaagcgcaggcgacaacttctcaaggaccaaaagctggtaatgactcggtgattgggtctccggataaagagcagggatcacctcacgctcagctaggcacatcctcaggtccattaggcggcgacgaagaagaaattctccgcataaaggcagctgatgactctcgtcctcctatcttactcaaatggtgggacgagaactctcaagtttccggcatcgtcataaatcgccaaaaagaagatgaggaagtgtgccagctgaagaaagtacttggagaagctactcgcattgtgaatagaatccatcttcgcaatgaggccaagaccgcaaccttagaaaagctggttcctcatttaggaactcttgaagccgttaggggccagctacacgaggccaaagagcatgccaagaaaacagagaaagagttaaggaaccgaatcgctcaactccaggattcaaactacgagctgagtggttcatcaaaagcgcaagccaccagaatggctcaaatggagaaacaaattgaagctctgaaaagagacaaagtagaactggctgcgcaaagggactcggccttgaaagaggttgaagaccgtaaaatcaaatctcaagctcagtttgacgtcctggttggtaagatcaaaaggcttgaaggagcaagagatgaagtcgccaatgttgctgcaccactcgtccaagctatgttccttaataacaatggtccgagtgcacttgacgcaaccgaaatctttgacaagctgagagttgcaccggatgtatacttcaagaatatcaagaaagctggaagtatgggagctagcatggcattggcgatgaccaaatccttgtacccgaggattgaaattgacgccattgatggctttgcagacgggacaagcgaagaagctgctcttgatcttattagtaatgctcaaaatgcggctgacaagattgcaagtgatgttgtagatcaattccgcaacaacgaccttcagccgagcaacaataactctgatgatgaaaggactgattctgactga

SEQ ID NO: 30344 - DNA, 2481 bp, Oryza sativa
  Clone ID: PAT_MRT4530_34758C.1
atggcggaagagaaggaaagctttgaaggccaatgggcaccatccgacgtgacggaggagaacctgaaggagatggtggcgcacggcgttctccctgccaaggaaatcatcgggtggcggccagcgtgcggtgaggcttttccaacccccgatacacacgaggctgtggtcttctcccatttcttctatggcggcttcgctcttccgacctcaaaatttttccgcgggatattaagcttctatggaatcagcttgcatcacctaaacccaaattccatagttcacatcgccaatttcgtccatccccaaccaaacaagagtaagccatgtgtagtcggaggggccggatttcagctgagggggactctgagccagaagtacttctctatgcccttcaagacctcaaacaaagggtggcatgcaaactggttttatattcagaatcctgagcctgctcttcccgagtactcttgtcttcctccggtgtaccaagatacctggaactctcttccgattggggatgaagcagcccaagccttggagctgatggatcgcatgctaaaactcaaagaacaaggcttacaaggagagcagattactcggcacttcatcaaatgccgattggcaccaattaaagaaagatcccgtacggcattcgagtttgacggcaagcatgatcctaatcgtgaagaaccagattctctggattttaaaatcatgaaggagagaatgtgtaaaatcttctcaaatgctattgtcgtcagctactcacatcagctgccagttgtgccatataacgcattcaatccgcctccgcaggaatatgtattgatgaagtctgaccccccaatcactcagcgccggtctcctcgccagcacaccgttcagggaggtggagggccgacaatcagatcagatccgcaacctcaaacctccaatccgactgggcagacaggttctcgcaagagaaagctggtgcttaatgacaacgaaggcgacgacggcaacaaatctggggacgaaggctcgcccaataaactcccaaagcataccactcccaggaaaaaactggctagtcgtccaaggccaaagattagaacatcttccaggtataaacctcttggtaccatttcacttcgacatgcttctctcatggaaataatactgaatattgaaagaacactttgcaggaaaccatccgacatagatccaactggaaaagatcctgatccgactgtgacagaaccaagttcatccaaggattctgagccgactgccgaaagccagccgactggcgcccatacttcaggtgataaggccaacccgagtgaccagcctccgactggaaaccagtcggcagcaactgaaactacaacaacccaagagcccccgactggaaaccagtcggatgtaggtccagatcaagaaactcccgaagttgaagcgcagacgacaacttctcaaggaccagaggctggtaacgactcgataattgggtctccagataaagaacaaggatcaccccacgctcagctaggaacatcctcaagaccaccaggcgatgacgaagaagaaattcctcgcataaaggcagctgatgactctcgtcctcctatcttgctcaaatggtgggacgagaactcacaagctgccggcatcgtcataaatcgtcaaaaagaagatgaggaagtgtgccagctgaagaaggcacttggagaagccactcgcattgtgaatagaatccatcttcgcaatgaggccaagaccgcaactttagaaaagctggttcctcatttgggaactcttgaagtagttagggaccagctacacgaggccaaggagctcgccaaaaagacagagaaggaattaagggaccgaattgctcagctccaggattcaaacttcgagctgagtggttcatcaaaagcgcaagccgccaggatggctcaaatggagaaacaaattgaagccctggaaagagacaaggtagaactggctgcgcaaagggactcggccttgaaggaggttgaagaccgcaaaatcaaatctcaagctcaatttgacgtcctggttggtaagatcaagaggcttgaagaagcaagagatgaagtcgctaatgtcgctacaccactcgtccaagctatgttcctcaataacagtggtccgagtgcactcgacgcaaccgaaatcttcgacaagctgagagttgctccggatgtatatttcaagaatatcaagaaagctggaagtatgggagctagcacggcattggcgatgaccaaatccttgtacccgaggattgaaattgacgccattgatggctttgcagacgggacaagcgtagaggctgctcttgatcttatcagcaatgctcaaaatgcggctaacaagattgcaagtgacgtcgtagatcaattccgcaacaccgaccttcagccgagtagtaataactctgatgatgaaaggactgattctgactga

SEQ ID NO: 30345 - DNA, 251 bp, Oryza sativa
  Clone ID: PAT_MRT4530_34759C.1
attcacaacaaattacacattatttgatccggagttagacatacgtgcggaccaattacaacaatcggagattttatgtcccaggatacaacaccgggccctcaggaaattaagaaaacaaacaaggggtataaccctgctcacatggcagatgaaaagagactaaaggaattcattggttatgtaaaacagattcataaatgacgacgaaacgacgtacgaacaatcgtacagcagtttgttggacgcgt

SEQ ID NO: 30346 - DNA, 252 bp, Oryza sativa
  Clone ID: PAT_MRT4530_3475C.1
atggcgactgcgagcaaggcggtggcgatgactgcaacgactggcaggccaaatgatgccggcggcgcctgcgtggatggtgggaaagacgacaccggcgctgcgcagctgctgccagcgacagttgcgcggatggcagactcgatgacgacagcggcggacgaggcaagcatggcggtggtggatggcggcctaaacctcggcgacgaaggcagccgcggcggcagaggtcgcgtggcaccccgaatcaac

SEQ ID NO: 30347 - DNA, 1249 bp, Oryza sativa
  Clone ID: PAT_MRT4530_34760C.1
ctctcccagcaccagctgtttcgccgccggcgaacattgcgatcttcagctggatatacgcaggagcttgagattgactcaagctatagtgcaacacgtacgaggcgagtacgtctcacgtgtctcacctagctcttgcagacacggatatataggcatatataccaattaactacactgacgaactaaacagtggctcgcgcttgctgcaccgagttcttatttggttcatacatggctaagctaatagtggctgatatatatatgccactaggtgatctagctcgatcgatccctagattatatatgtagtagtccattcttaattagttgcaatatatagtttggaaggctagctgcatctgcaattaatattgcaggaggcatattgcatgcctgcaagaggggcttaatttggtttttggcagtttggttaattagcggcggcgagcggccgtctctcgctgcgcgttgaagtagacggcggcgacggggaggccgaggtcgttgtcggcggcgaagcggcgggtgctgaagtagtccctggaggatggcggggtcaccgcctgacggcgcttctgcttgaacagcacgaggacgaacctgtggatgccaatgttgggcttcgggctctcgtagctcaccacctccctcccaaaggaagcatcagtggtgccaggaatatcagtgacgatccagtggaggtgctccctcaggtacggatcactaggccctggcacgtctggatctgtcataaccagtgtgaagaaagacctcaggtcgccgccctgaacctcgactcgcggcttggacacgaccgccgacgggaataactcgtggccgttgaacacctgcttgttggagctgtaggtcgccgtcatcttcaccgtggggttgaagttgtcgatgacctctccgatcaccttcccgacgacgagaggctccagcaccctagacatggtggctagctgcaagaggctaatctcttgagaacgtactgaagggagagaaggtgaataccggtgatgagatcgagagggtgtgtgtatagtagctcgtggtgtgtaggtaaacacgagataaacagtctcgagtggttgctggtcttgctgatgacaatgggagggccggccggggctctatttatagctgcgtggagccgatggatcgaactgataaggaaaatgtataaacaatgtaaagtattagaaaatatgtaaattgtcccatcttcaaaaaaaaaaaaaaa

SEQ ID NO: 30348 - DNA, 2547 bp, Oryza sativa
  Clone ID: PAT_MRT4530_34761C.1
atggcggaagagaaggaaagctttgaaggccaatgggcgccatccgacgtgacggaggagaacctgaaggagatggtggcgcacggcgttctccctgccaaggagatcatcgggtggcggccagcgtgcggtgaggcttttccgacccccgatacacacgaggttgtggtcttctcccatttcttctatggcggcttcgctcctccgacctcaaaatttttccgcgggatattaagcttctatggaatcagcttgcatcacctaaacccaaattccatagtccacatcgccaatttcgtccatgtttgtgaagccttcttgggaattaagccccacttcgctctgtttcgccgaatcttctttctcaagccccaaccgaacaagagtaagccatgtgtagtcggaggggccggatttcagctgagggggactctgagccagaagtacttctctatgcccttcaagacctcaaacaaagggtggcatgcaagctggttttatattcagaatcctgagcctgcccttcccgagtactcttgtcttcctccggtgtaccaagatacctggaactctcttccgattggggatgaagcagcccaagccttggaattgatggatcgcatgctaaaactcaaagaacaaggcttacaaggagagcagattactcggcacttcatcaaatgccgattggcaccaattaaagaaagatcccgtacggcattcgagtttgacggcaagcatgatcctaatcgtgaagaaccagattctctggattttaaaatcatgaaggagagaatgtataaaatcttctcaaatgctattgtcgtcaactactcacatcagctgccagtggtgccatataacgcgttcaatccgcctccgcaggaatatgtattgatgaagtctgaccccccaatcactcagcgccggtctcctcgccagcacaccgttcagggaggtggagggccaacaatcagatcagacccgcaacctcaaacctccaatccaactgggcagacaggttctcgcaagagaaagctggtgcttagcgacgacgaaggcgacgatggcagcaaatctgggaacaaaggcttgcccgacaaactcccaaagcataccactcccaggaaaaaactggctagccgtccaatgcaaaagattagaacatcttccaggtataaacctcttgataccatttcacttcggcatgctgctctcatgaaaataatactgaatgttgaaagaacactttgcaggaaaccatccgacatagatccaactggaaaagatcctgatccggctgtgacagagccaagttcatccaaggattctgagccgactgccgaaagccagccgactggcgcccatacttcaggtgacaaggccgatccgagtgaccagcctccgactggaaaccagtcggcagccactgaaactacaacaacccaagagcccccggctggaaaccagtcggatgcaggtccagatcaaaaaattcccgaagttgaagcgcggacgacaacttctcaaggaccagaggctggtaacgactcgatgattgggtctccaaataaagaacaaggatcacctcacgctcagctaggaacatcctcaggaccaccaggcgatgacgaagaagaaattcctcgcataaaggcggctgatgattctcgtcctcctatcttgctcaaatggtgggacgaaaactcacaagctgccggcatcgtcataaatcgtcaaaaagaagatgaggaagtgtgccagctgaagaaggcacttggagaagccactcgcatcgtgaatagaatccatcttcgtaatgaggccaagaccgcaactttagaaaagctggttcctcatttgggaactcttgaagcagttagggaccagctacacgaggccaaggagctcgccaaaaagacagagaaggaattgagggaccaaattgctcagctccaggattcaaacttcgagctgagaggttcatcaaaagcgcaaaccaccaggatggctcaaatggagaaacaaattgaagccctggaaagagacaaggtagaactggctgcgcaaagggactcggccttgaaggaggttgaagactgcaaaatcaaatctcaagctcaatttgacgtcctggttggtaagatcaagaagcttgaaggagcaagagatgaagtcgctaatgtcgctacaccactcgtccaagctatgttcctcaataacagtggtccgagtgcactcgacgcaaccgaaatcttcgacaagctgagagttgctccggatgtatatttcaagaatatcaagaaagctggaagtatgggagctagcacggcattggcgatgaccaagtccttgtacccgagaattgaaattgacgccattgatggctttgcagacgggacaagcgtagaggctgctcttgatcttatcagcaatgctcaaaatgcggctgacaagattgcaagtgacgttgtggatcaattccgcaacgccgaccttcagccgagtagtaataaatctgatgatgaaaagactgattctgactga

SEQ ID NO: 30349 - DNA, 2484 bp, Oryza sativa
  Clone ID: PAT_MRT4530_34762C.1
atggcggaagagaaggaaagctttgaaggccaatgggcgccgtccgacgtgacggaagaaaacctgaaggagatggtggcgcacggcgttctccctggcaaggagatcatcgggtggcggccagcgtgcggtgaagcctttccaacccccgatacacacgaggtcgtggtattctctcatttcttttatggcggatttgctcttccaacctcaaagttcttccgtgggatactgaatttctatggaatcagcttacatcatttgaatccgaactccatagtccatattgcaaatttcgtccatgtctgcgaagcttttttgggcattagacctcattttgctctgttccgccgaatatttttccttaagcctcaaccgaacaaaaacaaaccatgcgtagttggaggggctggatttcaactgagaggcactctgagccaaaagtatttctccatgcctttcaagacttcaaacaaaggatggcacgccaactggttttatattcaaaatcccgagcccgctcttcctgagtactcctgtcttcccccagtataccaagatacatggaactctcttcccatgggagatgaagctgcccaagccttagaactgatggaacgcatgctgaaactcaaagagcaaggcttacagggagagcaaatcactcggcatttcattaagtgccgattagctccaatcaaagaaagatcccgcacagcatttgaatttgacggcaagcacgatccaaaccgtgaagacccagattctctggattttaagatcatgaaggagaggatgtacaagatattctcgaacgctattgtcgtcagctactcacatcaactgccagttgtaccatacaacgcattcaatccgcctccgcaggaatacgtattgatgaaatctgatcccccaattgctcagcgccgatctcctcgccagcacaccattcagggaagtggagggccgacaatcaggtcagacccacaacctcaaacctccaaaccggctgggcagacaggtcctcgcaagagaaagctggtgcttaatgacgacgagggcgatgacagcaacaaatctggggacaagggaacgcccaacaaactcccaaagcataccatgcccaggaaaaaactggctggccgtcaaatgccaaagattagaacatcttccaggaaaccatccgacattgatccaactggaaaagatcctgatccggctgtgacagagccaaatttatccaaagacactgagccgactgccgaaaaccagccgactgccaaaaaccagccgactggcgcccatgcttcggatgacaaggccgatccgagtgaccagccaccgactggaaaccagtcggaagcaactgaaactgcaacaacccaagaacccctgactggaaaccagtcggatgtgggtctaaatcaagagattcctgaagctggagcacaagcgacaacttcccaaggaccaaaagctggcaatgactcggtgattgggtctctggataaagagcaaagatcacctcacgctcaactaggcacatcctcaggtccattaggcggcgacgaagaagaaattctccgcataaaggcagctgatgactctcgtcctcctatcttactcaaatggtgggacgagaactctcaagtttctggcattgtcataaatcgccaaaaagaagatgaggaagtgtgccagctgaagaaagtacttggagaagctactcgcattgtgaataggatccatcttcgcaatgaggccaagaccacaaccttagaaaagctggttccacatttgggaactcttgaagccgttagggaacagctacacgaggccaaggagcatgccaagaaaacggagaaggaattaagggatcgaattgcacagcttcaggactccaacttcgagctgagtggttcatcaaaagcgcaagccaccaggatggctcaaatggagaagcaaatagaagccttgaaaaaagacaaagcagaactggctgcagaaagggactcagccttgaaggaggttgaagaccgtaaaatcaaatctcaagctcagtttgacgtcctggttggtaagatcaagaaacttgaaggagcaagagacgaagtcgccaatgtcgctacaccacttgtccaagctatgttccttaataacagtggtccgagtgcacttgacgcaaccgaaatctttgacaagctgagagttgcaccggatgtatacttcaagaatatcaagaaagctggaagtatgggagctagtatggcattggcgatgaccaaatccttgtacccgaggattgaaattgataccattgatggctttgcagacgggacaagtgaagaagctgctcttgatcttatcagtaatgctcaaagtgcggctgacaagattgcaagtgatgttgtagagcaattccgcaacaacgatcttcagccgagtaataataactctgatgatgaaaggactgactctgactga

SEQ ID NO: 30350 - DNA, 1237 bp, Oryza sativa
  Clone ID: PAT_MRT4530_34763C.1
cccgtgctgcaggacgcccgcacgggtcacaaggaaatttaagcgaccacggccgggaaacaactacacaagtcgactatcattacaaggaaatttaagcgaccacgaagagtatgacgctggtgaagattggtccgtggggcggaaatggagggtcagctcaggacatcagtgtgccacccaagaagctgttaggcgtgacaatctacagctcagatgcaatcagatccattgccttcaactacatcggtgtggatggacaggaatatgccattggtccatggggtgggggcgaaggcacctctacagagattaaactgggctcctctgagcagatcaaggagatttctggaacccatggcccagtctatgatctggctgacattgtcacctatcttaagattgtgacaagtgctaataatacatacgaggctggagtcccaaatggaaaggaattcagcattccactgcaagactctggccatgtcgttggattctttggaaggtctggaacgcttatcgacgcaattggcatctacgtccacccttgattcccagtggtcaaagaattactacctactaccatatctacgaaataatgttccatggtgttgttgtacttcatgcaatccccccattgtctgtgtacgtgttgcaccgatccgtagtacaataaagttggcgatatatatgttgtcccaatcgactttaaaaaatttattacaacaataagttaggatcagagtggattatatatgtatttgcacaaccgaatatttcaataattccactctgattctgtgtcgtaagtcatatatatgtattgtaaatcgtatatgtattgtaagttgagggatcctgctgagtctgcgttctacctgataacctcaaaccttgccttgttattattgtcctaccggtgttgagtggtgactatgactgcttttgtccatcgacggcgggcgggactgtagtgcacgccgcgcatggtgtggcgctgatcaagtttggcccttccgagcgtgtgaaggaagtttctggaactcatggcacgctccaaaccctagcggatattctgacgtacctgaagattgtcacggatgttaccacgcacgagtttggtgtcccgaatggaacggccttcagtgtcccgctccaggacgacgctcgtgccgtcggcttctttgcgcgctctggactgctcgtcgatgctattggcgtctatgtccaaccatga

SEQ ID NO: 30351 - DNA, 2332 bp, Oryza sativa
  Clone ID: PAT_MRT4530_34764C.1
tgatacacatgagatcgtagtcttctcgcatttcttctatggcggcttcgctcttccgacctcgaaattcttccgcgggatattaagcttttatggaatcagcttgcatcacctaaacccgaattccatagtccacattgccaatttcatccatgtctgtgaagccttcttaggaattaaaccccacttcgccctgttccgccgaatcttctttctcaaaccccaaccaaacaagagtaagccatgtgtagtcggaggggccggatttcagctgaggggaactctgagccagaaatacttctcaatgcccttcaagacttcaaacaaaggatggcatgcgaactggttttatgttcagaatcctgagcctgctcttcccgaatactcttgtcttcccccggtgtaccaagatacttggaactctcttccaatcggagatgaagctgcccaagccttggaattgttggatcgcatgttaaaactcaaagaacaaggcttgcaaggagagcagatcactcggcatttcatcaaatgccgactagcgccaattaaagaaagatcccgtacagcttttgagtttgacggcaagcatgatcctaatcgcgaagaaccagactctctggatttcaaaatcatgaaggagagaatgtataaaatcttctcaaatgccattgtcgttagctactcacaccagctgccagttgtgccatataatgcattcaatccgcctccgcaggaatacgtattgatgaaatctgatcccccaattgctcagcgccgatctcctcgccagcacaccattcagggaagtggagggccgacaatcaggtcagactcacaacctcaaacctccaaaccggctggtcagacaggtcctcgcaagagaaagctggtgcttaatgacgacgagggcgatgacagcaacaaatctggggacaagggcacgcccaacaaactcccaaagcataccatgcccaggaaaaaactggccggccgtcaaatgccaaagattagaacatcttccaggaaaccatccgacatagatccaaccggaaaagatcctgatccggctgtgacagaaccaaatatatccaaggatgctgaaccgactgctgaaagccagccgactgccgaaagtcagccgactggcgcccatgcttcggatgacaaggccaatccgagtgaccagccgccgactggaaaccagtcggcaacaactgaaactgcaacaaccagagagcccccgactggaaaccagtcggatgtagatctaaatcaagagactcctgaagctgaagcgcagacaacttctcgaggaccagaagctggtaatgactcagtgattgggtctccagataaagagcaaggatcacctcacgctcagccaggcacatcctcaggtccactaggcggcgacgaagaagaaattctccgcataaaggcagctgatgactctcgtcctcctatcttactcaaatggtgggacgagaactctcaagtttccggcattgttataaatcgccaaaaagaagacgaggaagtgtgccagctgaagaaagtacttggagaagccactcgcattgtgaatagaatccatcttcgcaatgaggccaagactgcaaccttagaaaagctggtccctcatttgggaactcttgaagccgttaggagccagctacacgaggccaaggagcacgcaaaaaagacggagaaagaattaagggagcgaattgctcagctccaggattcaaacttcgagctgagtggttcatcaaaagcgcaagccaccagaatggctcagatggagaagcaaatagaagccttgaaaaaagacaaggtagaactggctgcggaaagggactcagccttgaaggaggttgaagaccgtaaaatcaaatctcaagctcagtttgatgtcctggttggtaagatcaagaagcttgaaggagcaagaaacgaagtcaccaatgtcgctacaccacttgtccaagctatgtttcttaataacagtggtccgagtgcacttgacgcaaccgagatctttgacaagctaagagttgcaccggatgtgtacttcaagaacatcaagaaagctggaagtatgggagctagcatggcattggcaatgaccaaatccttgtacccgagaattgaaattgataccattgatggctttgcagacgggacaagtgaagaagctgctcttgatcttatcagtaatgctcaaagtgcggctgacaagattgcaagtgatgttgtagagcaattccgcaacaacgaccttcagccgagcaataataactctgatgatgaaaggactgattctgactga

SEQ ID NO: 30352 - DNA, 320 bp, Oryza sativa
  Clone ID: PAT_MRT4530_34765C.1
gtgacttgatgcctcgtgagagtattgccgatgatggaccgggagttgacttggagataaggcgacgtctggacggtcagatatcatgcgggatacttaggctagagttcaatgcacgtagttggttcggtggtctaatagtcgagacaccagcggtcataccggcggcatcgcggcggtcagaccgcgacggattcaaggcggtcagaccggtgacggcaacagggagcaggggcgacttcaaggcggtcggactgagcattctacttcggtcagaccggcacgactgcttcggtcagaccgtgatctgtcgaatttga

SEQ ID NO: 30353 - DNA, 2496 bp, Oryza sativa
  Clone ID: PAT_MRT4530_34766C.1
atggcgaaagagaaagaaagcttcgaaggccaatgggcaccatccgacgtgacggaggagaatctgaaggagatggtggcgcacggtgttctccctgccaaggagatcattgggtggcgaccagcgtgcggtgaggtttttccgtcccccgacacacatgaggttgtagttttttcccatttcttctatggcggcttcgctcttccgacctcaaaatttttccgcgggatattaaacttctatggaatcagcttgcatcacctaaacccaaattccatagtccatatcgccaatttcatccatgtttgtgaagccttcttaggaattaaaccccacttcgctctgttccgccgaatcttttttctcaagccccaaccgaacaagaataagccatgtgtagtcggaggggcaggatttcagttgaggggaaccctgagtcagaagtatttctctatgcccttcaagacctcaaacaaaggatggcatgcaaactggttttatattcagaaccctgagcctgctcttcccgagtactcttgtcttcctccggtgtaccaagatacttggaactctcttccgatcggagatgaagctgctcaagccttggagttgatggaccgcatgctaaaactcaaagaacaaggtttacaaggagagcagattactcggcatttcatcaaatgccgattggcaccaattaaagaaagatcccgcacagcattcgagtttgacggcaagcatgatcccaatcgtgaagaaccagactctctggactttaaaatcatgaaggagagaatgtataaaatcttctcaaatgctattgtcgtcagctactcacatcaactgccagttgtgccatataacgcattcaatccgcctccgcaggaatatgtactgataaaatctgatcccccaatcactcagcgccggtctcctcgccagcacaccgttcagggaggtggaggaccaacaatcagaccagattcgcaacctcaaacctccaatccaactggacagacaggttctcgcaagagaaaactggtgccaaatgacgacgaaggcgacgagaaatctggggacaaaggctcgcctaataaactcccgaagcgtaccatgcccaggaaaaaactggctggccgtccaatgccaaagattagaacatcttctaggaaaccatctgacatagacccaactggaaaagatcctgatccggctgccacagagccaaatttatccaaagatgctgagccgactgccgaaagccggccgattgccgaaagccagccgactgccgaaagccagccgactggtgcccatgcttcggatgacaaggcccatccgagtgaccagccgccgactggaaaccagtcggcagcaactgaaactgtaacaacccaagagcccccgactggaaaccagtcggatgtaagtctaaatcaagagattcctgaagctgaagcgcaggcgacaacttctcaaggaccaaaggctggtaatgactcgatgattgggtctccaaataaagaacaaggatcacctcacgctcagctaggaacatcctcaggaccaccgggcgatggcgaagaagaaattccccgcataaaggcggctgatgattctcgtcctcctatcttgctcaaatggtgggatgagaactcacaggttgccggcatcgtcataaaccgtcaaaaagaagatgaggaagtgtgccagctgaagaaggcgcttggagaaactactcgcattgtgaatagaatccatcttcgtaatgaagccaagaccgcaactttggagaagctggttcctcatttgggaactcttgaagcagttagggaccagctacacgaggccaaggagctcgccaaaaagacggaaaaagaattaagggagcaaattgctcagctccaggattcaaacttcgagctgagtggttcgtcaaaagcgcaagccaccaggatggttcaaatggagaaacaaattgaagccttgaaaaaagacaaagtagaactggctgcgcaaagggattcggccttgaaggaggttgaagatcgtaaaatcaaatctcaagctcagtttgacgtcctggttagtaagatcaagaggcttgaaggagcaagagatgaagtcgccaatgtcgctataccactcgtccaagctatgttcctcaataacagtggtccgagtgcactcgacgcaaccgaaattttcgacaagctgagagttgctccggatgtatatttcaagaacatcaagaaagctggaagtatgggagctggcatggcattagcgatgaccaaatccttgtacccgaggattgaaattgacgccattgatggctttgcagacgggacaagcgaagaggctgctcttgatcttatcaacaatgctcaaaacgcggctgacaggattgcaagtgacgttgtagagcaattccgcaacaacgaccttcagccgagtaacaataactctgatgatgaaaggactgattctgactga

SEQ ID NO: 30354 - DNA, 579 bp, Oryza sativa
  Clone ID: PAT_MRT4530_34767C.1
atgaaggagacaagggtagccaggcatggttcgaccattcctgcaatcaatttctgcggcggtgggtgcatctctgccactctccgtgctgtcaccgcacttgctcaagatgatgagcgccgccctggacaccctgtcttggtcaccgcggcctccggcggcgtcggccactccggctgcgttgcttccatgtcacagctcaccatttggagcgtggaacattggggagccgcgccggagccacggccgccgccccgtgccccgccggccccgcgcctcgccgccgccgccctcccccggcctccctccggccggatctgggaggggaggggaggggagccgccgccgccccccggcctccctccggctgaatctgggaggggaggggaggggagccgcgccagagccgccgccaccgtcccgcgcctccccgccgccgccctccctccggccggtcttggaggggagtggaggggagccgcgccgccgccgccgaccgtggctggccctgcgcctcgcctcgccgccgccgcccttccccggcttccctctggccggatctgggaggcggtcatttag

SEQ ID NO: 30355 - DNA, 468 bp, Oryza sativa
  Clone ID: PAT_MRT4530_34768C.1
atggagggggatgggtgtagggtggagaagggggggcgggggttttatagggcgcgggagaggggcggcagcggcgacgcgacgcgcgcggcggcacggagctcggagcgatgggactggcggcgcgagcgcgacggcgacgagcggacgggcggcagggcacaggcgacggtgacacgcggcagcgcggtggcacggggctcggagcggcgacgcgacgggcgggcggcgtggcttggcacagggctcggcgcgacggcgacaggcgacgcgaaggcgacgcggcgcggcagtggcgcggggcgcgaggcgacgggacggcgcgtggcgcgacagcggcgatggcgacggcgcgcggcggcaggcggcgatgggacagcgcgaggcgacggcgacgcgacggcgtcggcggcgcggggctcggggccggctaggctaggaccacatcaagcaccttgtaggcaatga

SEQ ID NO: 30356 - DNA, 2484 bp, Oryza sativa
  Clone ID: PAT_MRT4530_34769C.1
atggcggaagagagagaaagcttcgaaagccaatgggcgccgtccgacgtgacggaagagaacctgaaggagatggtggcacacggcgttctccctgtcaaggatatcatcgggtggcggccagcgtgcggtgaggcctttccaacccccgatacacacgaggtcgtggtcttctctcatttcttttatggcggatttgctcttccaacctcaaagttcttccgtgggatactgaatttctatggaatcagcttacatcatttgaatccgaactccatagtccatattgcaaatttcgtccatgtctgcgaagcttttttgggcattagacctcattttgctctgttccgccgaatatttttccttaagcctcaaccgaacaaaaacaaaccatgcgtagttggaggggctggatttcaactgaggggcactctgagccaaaagtatttctccatgcctttcaagacttcgaacaaaggatggcacgccaactggttttatattcaaaatcccgagcccgctcttcctgagtactcctgtcttcccccagtataccaagatacatggaactctctccccatgggagatgaagctgcccaagccttagaactgatggaacgcatgctgaaactcaaagagcaaggcttacagggagagcaaatcactcggcatttcattaagtgccgattagctccaatcaaagaaagatcccgcacagcatttgaatttgacggcaagcatgatccaaaccgtgaagacccagattctctggattttaagatcatgaaggagaggatgtacaagatattctcgaacgctattgtcgtcagctactcacatcaactgccagtcgtaccatacaacgcattcaatccgcctccgcaggaatatgtattgatgaaatctgatcccccaattgctcagcgccgatctcctcgccagcacaccattcaaggaagtggggggccgacaatcaggtcagacccacaacctcaaacctccaaaccggctgggcagacaggtcctcgcaagagaaagctggtgcttaatgacgacgagggcgatgacagcaacaaatctggggacaagggctcgcccaacaaactcccaaagcataccatgcccaggaaaaaattggctggccgtcaaatgccaaagattagaacatcttccaggaaaccgtccgacatagatccaaccggaaaagaccctgatccggctgtgacagagccaaatatatccaaggatgctgagccgactgctgaaagccagctgactgccgaaagccagccgactggcgcccatgcttcggatgacaaggccaatccgagtgaccagccgccgactggaaaccagtcggcgacaactgaaactgcaacaacccgagagcccccaactggaaaccagtcggatgtaggtcctgatcaagaaatccctgaagttgaagcgcaagcgacagcttctcaaggaccagaagctggtaatgactcgatgattgggtctccagataaagagcaaggatcacctcgcactcagccaggcacatcttcaggtccactaggcgacgacgaagaagaaattctccgcataaaggcagctaatgactctcgtcctcctatcttactcaaatggtgggacgagaactctcaagtttccggcattgttataaatcgccaaaaagaagatgaggaagtgtgccagctgaagaaagtacttggagaagccactcgcattgtgaatagaatccatcttcgtaatgaagccaagactgcaaccttagaaaagctggttccacacttgggaactcttgaagccgttagggaacagctacacgaggccaaggagcatgccaagaaaacggagaaggaattaagggagcgaattgcacagctccaggactccaacttcgagctgagtggttcatcaaaagcgcaagccaccaggatggctcaaatggagaagcaaatagaagccttgaaaaaaaacaaagcagaactggctgcggaaagggactcagccttgaaggaggttgaagaccgtaaaatcaaatctcaagctcagtttgatgtcctggttggtaagatcaagaagcttgaaggagcaagagacgaagtcgccaatgtcgctacaccacttgtccaagctatgttccttaataacagtggtccgagtgcacttgacgcaaccgaaatctttgacaagctgagagttgcaccggatgtatacttcaagaatatcaagaaagctggaagtatgggagctagtatggcattggcgatgaccaaatccttgtacccgaggattgaaattgataccattgatggctttgcagacgggacaagtgaagaagctgctcttgatcttatcagtaatgctcaaagtgcggctgacaagattgcaagtgatgttgtagagcaattccacaacaacgaccttcagccgagcaataataactctgatgatgaaaggactgattctgactga

SEQ ID NO: 30357 - DNA, 277 bp, Oryza sativa
  Clone ID: PAT_MRT4530_3476C.1
cccgggctgcaggaattcggcacgagggctgcttccccgtgttgcatcttgccccatatctagtacctactttagtacttctccttacattacttcctctcgcaatctgtagaactcatggacattccggtagacctactttagtacttgtccttatgttacttcctctcgcaatctgtagaactcatggacattccggtagagaagagagcaaggaaatcgatggtcgtagtccgtgacgccaatggtgaatattgcagcggatgcgtgttgaaat

SEQ ID NO: 30358 - DNA, 2412 bp, Oryza sativa
  Clone ID: PAT_MRT4530_34770C.1
atggcggaagagaaggaaagcttcgaaggccaatgggcgccgtccgacgtaacggaagagaacctgaaggagatggtggcgcacggcgttctcccagccaaggagatcatcgggtggcggccagcgtgcggtgaggcttttccgacccctgatacacatgagatcgtagtcttctcgcatttcttctatggcggcttcgctcttccgacctcgagatttttccgcgggatattaagcttctatggaatcagcttgcatcacctaaacccaaattccatagtccacattgccaatttcatccatgtatgtgaagccttcttaggaattaaaccccacttcgccctgttccgccgaatcttctttctcaaaccccaaccaaacaagagtaagccatgtgtagtcggaggggccggatttcagctgaggggaactctgagccagaaatacttctcaatgcccttcaagacttcaaacaaaggatggcatgcgaactggttttatgttcagaatcctgagcctgctcttcccgaatactcttgtcttcccccggtgtaccaagacacttggaactctcttccaatcggagatgaagctgcccaagccttggaattgttggatcgcatgttaaaactcaaagaacgaggcttgcaaggagagcagatcactcggcacttcatcaaatgccgactggcgccaattaaagaaagatcccgtacagcttttgagtttgacggcaagcatgatcctaatcgcgaagaaccagactctctggatttcaaaatcatgaaggagagaatgtataaaatcttctcaaatgccattgtcgtcagctactcacaccagctgccagttgtgccatataatgcattcaatccgcctccgcaggaatacgtattgatgaaatctgatcccccaattgctcagcgccgatctcctcgccagcacaccattcagggaagtggagggccgacaaacaggtcagacccacaacctcaaacctccaaaccggctggtcagacaggtcctcgtaagagaaagctggtgcttaatgacgacgagggcgatgacagcaacaaatctggggacaagggcacgcccaacaaactcccaaagcataccatgcccaggaaaaaactggctggctgtcaaatgccaaagattagaacatcttccaggaaaccgtccgacatagatccaactggaaaagatcctgatccggctgtgacagagccaaatttatccaaagatgctaagccgtctgccgaaaaccagccgactgccgaaagccagccgactgccgaaagccagccgactggcgcccatgcttcggatgacaaagccgatccgagtgaccagccgccaactggagaccagtcggcaacagctgaaaccgcaacaacacaagagcccccgactggaaaccagtcggatgtaggtcccgatgaagaaatccctcatgttcagccaggaacatcctcaggaacactaggcgacgacgaagaaacaattcctcgcataaaggcggctgatgattcccgtcctcctatcttactcaaatggtgggacgagaattcgcaagttgccggcatcgtcataaatcgtcaaaaagaagatgaggaagtgtgccagctgaagaaagcacttggagaagccactcgcattgtgaatagaatccatcttcgcaatgaggccaagactacaactttggaaaagctggttcctcatttgggaactcttgaagcagttagggaccagctgcatgaggccaaggagtacgccaaaaagacagagaaggagttaagggaccgaattgcccagctccaggattcaaacttcgagctaagtggttcatcaaaagcgcaagctaccaggatggctcaaatggagaaacagattgaagccttgaaaagagacaaagtagaactagctgcgcaaagggactcagccttgaaggaggttgaagaccgtaaaatcaaatctcaagctcagtttgatgtcctggttggtaagatcaagaagcttgaaggagcaagagacgaagtcgccaatgtcgctacaccacttgtccaagctatgttccttaataacagtggtccgagtgcacttgacgcaaccgaaatctttgacaagctgagagttgcaccggatgtatacttcaaaaatatcaagaaagctggaagtatgggagctagtatggcattggcgatgaccaaatccttgtacccgaggattgaaattgataccattgatggctttgcagacgggacaagtgaagaagctgctcttgatcttatcagtaatgctcaaagtgcggctgacaagattgcaagtgatgttgtagagcaattccgcaacaacgatcttcagccgagtaataataactctgatgacgaaaggactgactctgactga

SEQ ID NO: 30359 - DNA, 2577 bp, Oryza sativa
  Clone ID: PAT_MRT4530_34771C.1
atggaggaagagaaagaaagctttgaaggccaatggacgccgtccgacgtaacagaagagaacctgaaggagatggtggcgcacggcgttctccctgtcaaggaaatcatcgggtggcggccagcgtgcggtgagatttttccgacccccgatacacacgagattgtggtcttctctcatttcttctatggcggcttcgctcttccgacctcgaaatttttccgcggaatattaagtttctatggaatcagcttgcatcacctaaacccaaattccatagtccatatcgccaatttcatccatgtttgtgaagccttcttgggaattaaaccccacttcgctctgttccgccgaatctttttcctcaagccccaaccaaacaaaagtaagccatgtgtagtcggaggggcaggatttcagttgaggggaactctgagccaaaaatatttctctatgcccttcaagacctcaaacaaagggtggcatgcgaactggttttatgttcagaatcctgagcctgctcttcccgagtactcttgtcttcctccaacgtaccaagatacttggaactctcttccgatcggagatgaagctgctcaagccttggaattgatggaccgcatgctaaaactcaaagaacaaggcttgcaaggagagcagattactcggcatttcatcaaatgccggctggcaccaattaaagaaagatcccgtacagcatttgagtttgacggcaagcatgatccaaaccgtgaagacccagattctctggattttaagatcatgaaggagaggatgtacaagatattctcgaacgctattgtcgtcagctactcacatcagctgccagttgtgccatataatgcattcaatccgcctccacaggagtatgcattgatgaaatctgatcccccaatcactcagcgccggtcgcctcgtcagcacaccgttcagggaggtggagggccaaaaatcagaccagatccgcaacctcaaacctccaatccaactggacagacaggttctcgcaagagaaaactggtgctcgacaatgatgaaggcgacgacgataaatctggggacaaggactcgcctaataaacccccaaagcgtagcatgcccaagaaaaaactggctggccgtcaaatgccaaagattagaacatcttccaggtataaaccccttggtaccattttatttcggcatgcttctctcatgaaaataatattgaaggttaaaagaacacttcgcaggaaaccatccgatatagatccaactggaaaagatccggatccggctgcgacagagccaaatttatccaaagatgctgagccaactgccgaaaaccagccaactgccgaaagccagccgactgccgaaagccggccaactggcgcccatgcttcagatgacaaggccaatccgagtgaccagccgccgactggaaaccagtcggcagctgctgaaactgcaacaacccaagagcccccgactggaaaccagtcggatgcaaatctaaatcaagagattcctgaagctgaagcgcagacaacttctcaaggaccagaagttggtaatgactcgatgattgggtctccggataaagggcaaaaaacacctcacgctcagctaggcacatcctcaggttcactaggcggcgacgaagaagaaattcttcgcataaaggcagctgacgactctcgtcctcctattttactcaaatggtgggacgagaactctcaagtgtcaggcattgtcataaatcgccaaaaagaagatgaggaagtgtgccagctgaagaaagtacttggagaagctactcgcattgtgaatagaatccatcttcgcaatgaggccaagaccgcaaccttagaaaagctggttcctcatttgggaactcttgaagccgttaggggccagctacatgaggccaaggagcatgccaagaaaacggagaaagagttaagggaccgaatcgctcaactccaggattcaaactacgagctgagtggttcatcaaaagcgcaagccaccagaatggctcagatggagaaacagattgaagccttgaaaaaagacaaagcagaactagctgcagaaagggactcggccttgaaggaggtcgaagaccggaaaatcaaatctcaagctcagtttgacgtcctggttggtaagatcaagaggcttgaaggagcaagagatgaagtcgccaatgtcgctacaccacttgtccaagctatgttccataataacagtggtccgagtgcacttgacgcaaccgaaatctttgacaggctgagagttgcaccagatgtatatttcaagaacatcaagaaagctggaagtatgggagctagcatggcattggcgatgaccaaatccttgtacccgagaattgaaatcgacaccattgatggatttgcagacgggacaagcgaagaagctgctcttgatcttatcagcaatgctcaaaatgcggctgacaaaattgcaagtgacgttgtagagcaattccgcaacaacgaccttcagccgaacaacaataactctgatgatgaaaggactgactctgactga

SEQ ID NO: 30360 - DNA, 462 bp, Oryza sativa
  Clone ID: PAT_MRT4530_34772C.1
atggcgcacgcacggggcggtgctcgcgctcctgtgaaggtggcggccctccccgccgtgcccgccacccgccctctccaccgcgccttccgcccgcccgcccgaacgcggtcgccgtcgccgcctgccctccccggcgtgcccgccgtgcccctagcggatgagagagaagagagagaggggggtgagagggtgttctcgcgcaagcgcgccgctgctgcagcctccacgcctagcgacgaggacgcgtcgtcctccgcctccgctccggccgtggcggccgtcctacaaggacccgggacaacgtcctggcgtcgctgcctgctcgtgttcgtcatgcgctcgtccggcggggagaaggcggagtgcgcggtgtgcatcacggagctgagggacaggccgtccctagggtcgtgcagccaacgcgcccgcacagggcccccaattttcaggggcccctag

SEQ ID NO: 30361 - DNA, 347 bp, Oryza sativa
  Clone ID: PAT_MRT4530_34773C.1
ggacccccaaaggagggacacattttaaatttcttcaccaggaaaacccaaaaaaataaaattcccttcccattccggaaaaaaaaaaaaaaacgggcccttcaaaaaacgttttttttcaaaaaaaaaaaaaaggggaaatctttatgcaaaaaaactagccacctaggggggaggggggggaggaaattgccacaggggagtatgaaaccaaacaacaaagggggccaaaaaaaaaagggttctaaactctgctttgaaaagggatccccaaaagggggaatctctttcggaaatctgggcccaaccgaaaataaactctttaacacattcagggacggggtttt

SEQ ID NO: 30362 - DNA, 3258 bp, Oryza sativa
  Clone ID: PAT_MRT4530_34774C.1
atggccgacccagaggacgccgccgccgccgccgccgccgggaatgaagacgacgtggaggacctctacgcggacctcgacgaccaggtggcggccgcgcttgccgccgccggggagagcggaggctccaacccggccaccgacggcgaggccgaggccgaggcgccgggagcccaccacacggaggccgacgcgaacgaggcggtggacttgggcgacgggactgcgggctacatcagcagcgacgaggagagcgaggatgacctccatatcgtgctcaacgaggatggcgccgcgccgccgcctcctcctcctgctggccgatgcgaggaggggagcgaggaaggggaggtttcgggtagctgtgtgaaaggcctgtctactgatggcggtcggggcaagttaatcccaccccacaagggaattgagagggatttggaggggaataagcttggtgagcttcaccggaaggggcttttcgagaaaacaacagcaccgatcacaggacaaggtgatcgaagccaccagcatgcatttcaaaaggaattcaattttttcttaccaaggaacaggacagtttttgacgtagacattgaagcatttcaagagaagccctggagacagcatggtgtggatctcacggactacttcaatttcggtctggatgaagaaagctggagaaaatattgttttgacatggaacacttcaggcatggaaccagaacacttgcaaatgaattgtcaggattgcaacaggagttccattacaatcttggattgagtaaatcagtgccaaagtcagagatttattctgtattgaaagaaggaaatgggattgctaagccaaagggtagagcaatccatgttgaaggtggtatgcatgaacgtcttccatcagcagatatgtggcctccaagacaaagggattctgatgtgatacaggtaaacatgatgttcccaccctcaaaccgctccagttcagatgacaggtccacagtaaatgacaaatgcatcactaccaaaagatgtgggccatccaataaccatccaggtgttgatgaatatctgaaggaaactagctctgtggtggacagagtggttgataaagaagtgcacaagagaggttcctcagagtgtaccaggagcaaaacggttctaggagattctgcctgtgcaggggctcaatcttctactcctgataattctgacatgctttctgaagaatcaacagaagattttcattttaagaggaagcgtggaaaatcaaattccaatgctttttatgtggaaaccaaccgtaaggatgagcatgtcttatcagatttttgccgtcatgcaagtaaatcagaccaagaaagtagcaagggtgagagccatagatataccccctctcctgctgatgacagatatcacaaggcaactaaacgtcagaggatggatgaagctggagcatgcatttctagtcgatctcttaataactgccaaagtgatcaccatctccatgaatctggacatagagcaaaaaaagaactgaagaggcaaagtttagctggtggaaaacatgccctctttgagagacaagaaaacacaacagataactactctagtaggtatgctcgaaagcataagcataaaagatctagctcaactttccttggcaccaattatcgagttcacaatcaattgtgcgaaaagcaagagtatttaccgctgggaagagcagctttgagaaatgatgaacaatgcagcgctgattataatcaaagacataggcgatcttggcgtgaaatcaacgatgatgaagatattgtggggtgctattccgccaggcggtggcagcaacgccatgatgatctacatggatcccattcaatgctaaaagctgaggtttgtgatgatattgatggacatatgtacagagaaaggcgatacgaggaaacaagaaaaatcagacatgaccgcaatggggatgatgaatttttccattacactgattacagatttggcaaggtactggatcctgaggataggcgcagatgcagaagtcaatctgcagaaagctgtgatgagcatttcagacgttctgaacatcttgtgtttgatcatttcacacatcctgaccaacttatgttgtctcatcaggcaaatgacaaccacaggaaatctgagaagggttggcctgggcctgctgcaagtttgacctttatgagatcaagaaacagattcattgataacgaaagaatccaaaatggtaaaatgaaatacaaccatgatggatattatgaaaagaaaaggcagcatgattctgtatttgatgttgacgacattcagcaacctgctttgtacactggttctgttgctgagactggtcaatgtattcgaccagtgaagaggagggttcatgctgatcattccatgaaccgtaaagatcgtttcaattcatcatatcaaaaaggaaggagattgatgcatggttggtccatgatcagtgatagagatctttatgttgctgagatgcacaattctccaaaggatattgatgtagaagctatgtgtagtcccaatgatatgagaaatagcaataatattccaaacatttatgataagataaggcatgaagtcgtgaatttgcagccgagggacacagataacatgctcttgatccataggaagagaaagtttaagcgacaaggaattgagataaggcgtgtggtcgaaagtgacagtgagggatgtcttcctgctgacagtgacttgcacggttccaaacataagaacatacatcagaaagtgcgtaaaccaagagccttccgtatctcgcgcaatcaggcctcagagaaatctgaacaacaaaaacagcaacatgtgagcaacaatcaagaatatgaagagattgaggagggagaactgatcgaacaggaccatcaggatactgcttccagaagcaagtctaaccaccaaagaaaagtagtactgaaatcagtgatagaagcaagctcagcatgccagggaggggtgattaatgcaacatcaaaagacgctgattgcagcaacggagctacaggggaatgtgataataaacatatacttgaggtaatgaaaaagatgcagaaaagaagtgaaaggttcaaagcgtctattgcaacccaaaaggaggaagatgaagacaggaaagaatcgttggccgtgacttgtgatgtagatgacatcaagaatcagcgacctgcaaggaaacggctttggggttgtagtggttaa

SEQ ID NO: 30363 - DNA, 533 bp, Oryza sativa
  Clone ID: PAT_MRT4530_34775C.1
ttgttttaagtttggaaacctcaatctagcaaacgaatggaatcttaaccagcaaagtagatcctcattggagagtacattgtacacataaaaagagtataaagcagagcctaatctatttggtaaaaaaatcatacaaatggtaggaacctgagagcaaaattaacacatggctcatcctttggtgctctttttcagaacgtatagttaaggattgggccaaaatgctgtctattctgaacatatacagttcttggtacagactagcagaattttcatctcatctagatgagtttcttcttccgaaagaaccgtttgaggtgccacaattgcgcaattgaggcgataacgcagaccgaaagggacattaagcttaaccatgtgaacttaaaatttgtccaatcacttacatctctcatgtctgattctttggatcttgaggtacatccaagtttccatggactgcttgaacagctgtctctagcttgggtaatttcagtgcaactcccctcgagtctatctatcttggcaag

SEQ ID NO: 30364 - DNA, 135 bp, Oryza sativa
  Clone ID: PAT_MRT4530_34776C.1
atggttcagctccacgactcggtgaagctcagcggcccggctaggtggaggagcgggtcatcaacagcgctgtccagtcgtggcgttgctatggagtcctcattcaactccacatcaaaagatttcttcgggtga

SEQ ID NO: 30365 - DNA, 295 bp, Oryza sativa
  Clone ID: PAT_MRT4530_34777C.1
aatcagaataaagtataatcatgtaccaaacctccatattaaatagacacctagagccataaaaggtatatcattttttgaaaagctactagtaatttctacttgagcggatacaactaaaaccgcaaagaccacagatgtatatcacaaaccgacaaattaaaaccatatgttcatccggagatattacatccccaattttcgagaccatccatcctttccgaccaggacgcatcgcaggtcatcctcgttaagccctgaacgatataagggcaataaggatccatgaacagct

SEQ ID NO: 30366 - DNA, 357 bp, Oryza sativa
  Clone ID: PAT_MRT4530_34778C.1
gtataccctctatccttggataaacgatgagtactgatacggtatgctcgcgcgtatacggatagttcctatatgcgttaaggaaatatatcacgtgatagaaacagaatccacggatggaaggaatcctactcggacgagactgggtctttaccatatcgtgaggggtccgatatctccgaatcctacttggagatcaactgacccgcggtataaaagggaacccctaggcaggacctaagccatcgaatatcaccgctaacacatccaccatagcctacgaagccggagcctacaggagctaagttgccgggtgatctagtcgaaccaactcgactacggtctcatcggtatcat

SEQ ID NO: 30367 - DNA, 277 bp, Oryza sativa
  unsure (1)..(277): unsure at all n locations
  Clone ID: PAT_MRT4530_34779C.1
tttttgtggaaacaatatgtttctctctgtgaacatgattggtgctgtattcgtctttatttggtggatctgccaaaaataactccagaaatattgtcagtgtgttttggtgaactccgtattttgtttattcggattcgtttgccntcttatttctacggtctgccctcttgccactgtccatggctagatacaattacatggtaatcaccggtctctaatccgtggttaatgtaatgttccttcctgttcgtgtgaattgaaaaaaaaaaaaaaa

SEQ ID NO: 30368 - DNA, 204 bp, Oryza sativa
  Clone ID: PAT_MRT4530_3477C.1
atggcggggcgtcggcaacacgagaggcggaggatcggcgtgacggcgatggcgagcgctcggtctaggtatctaagaaggatgtgtggcggcgcgctggcgacgctgtggagcggcggagagggccctggtggcggcgcgcaagggatcggcgtgggtctgggtttcgccggtggtggggggagggggaaggagcagcggtga

SEQ ID NO: 30369 - DNA, 589 bp, Oryza sativa
  Clone ID: PAT_MRT4530_34780C.1
agttgtgctaccgttcatgagcaaaggcctgttgttggcagggtgattgatatttcaactatggatatgatgatctgatctatgagctggatttgcaaaattatctggaggtgaagtaacactaggattgcttccaaccacatattttgctgtggatctccagatggtggccgagtatcagggagatggagggactgatgattctgatatttttatcttagatgtaggcgttggagcacttatcatgtgacatagtacctagctgctcgtctgcatttgttgcctctgcaactttaactgtcagcggcatttgtcgccgctggaaccatctaagtacgtgtttataagctgtaagctatgacaagcgcattagagggtgctggtactgttagaacattaattaatgtcagtagcatgctttgatcttacgtgatgcttttcctatgttgaccggagttcagtataacatgatggtggctttgggagacctcatgttttgaaaccttggtgctgatcgctgatttgtaactataaatttagttgtatttctaccacttagcttattaatttatcatcgtttccatcaact

SEQ ID NO: 30370 - DNA, 279 bp, Oryza sativa
  Clone ID: PAT_MRT4530_34781C.1
atggcgaagcagctgtccttgccgccgctgacgagcgccaccacctccatctccgccgccgccgcctcgcacctcctagggcggctgcgcgcggcggagcaggacggagcagggcgcggcggacggtgcggcgagtccacggcggcggcgcggtgtgtggactgtggaggaggcgtgaagcgtgaggtggtgcgagctcgaggctaccgaggcccagagaccgagcccaatgttttggaaaattttgtggcccatcagaagatttaccggcccacgtaa

SEQ ID NO: 30371 - DNA, 2160 bp, Oryza sativa
  Clone ID: PAT_MRT4530_34782C.1
atgaccgggatcgacctcaacaccgtcgaggaggaccaagaggaggcggcggaggaagtggcggcgaacggctcgtctccggctccggcgaaggcgggcgcggtgtgcctcgagctgtggcacgcctgcgccgggcccgtggcgccgctgccgaggaaagggggcgtcgtcgtgtacctgccgcaagggcatctcgagcacctcggcgacgcgcccgcggcggcggcggccgcggccgccgtgccgccgcacgttttctgccgcgtcgtcgacgtcaccctcctcgcgaacgcggcgaccgacgaggtgtacgcgcagctctcgcttgtcccggagaaggaggaggtggcgaggcgggcggaccacggcgagggcgaggacggggacggcatgaagcagcggttcgcgcggatgccgcacatgttctgcaagacgctcacggcgtccgacaccagcacgcacggcggcttctccgtgccgcgccgcgccgccgaggactgcttccctccactggattacagccagcagcggccgtcgcaggagcttgttgccaaggatttgcacagcactgaatggaggttccgccatatttaccgaggccagccacgtcggcaccttttaaccacaggttggagtgcatttgttaacaagaagaagcttgtttctggggatgccgtactatttttgcgaggtgatgatggggagctaagactgggagttcgccgtgcagctcagcttaaaaatgggtctgcttttccagcactttacaaccagtgttctaatcttggtacacttgccaatgttgcacatgcagtggctacagaaagtgtgttcaacatatactacaatcccaggttaagtcagtccgaattcattgtaccctactggaagttcatgaaaagcctcagccaaccattttctgttgggctgaggttcaaaatgagatatgaaagtgaagatgctactgaaagaaggtacaccgggataattactggaagtggtgatacagaccctatgtggcatggttcgaaatggaaatgtttgttggtgaggtgggatgacgacgctgagttccgtcgaccaaacagggtctctccttgggagattgagctgactagttcagtgtcaggatcccatttgtccacaccccattcaaagcgattgaaaccatgtcttccccatgttaatccagaatacatggttccacgtggaggtggttgtcctgattttgcggaatctgcccaattccacaaggtcttgcaaggtcaagaattattgggttttaaatctcatggtggtactgctgctgctacttctcagccatgtgaagcaaggcatttacagtacatcgatgagcggagttgctccagcgatgcgagtaacagtatcctaggggttccaagacttggtgatagagcaccacttggaaacccaggattttcctaccattgctcaggctttggggagtctcacagactccaaaaggtcttgcaaggtcaagaattatttcgtccctaccgaggaactttggttgatgcgtctatgggtagtaatgggtttcatcaacaagatagtcctcgtgcaccaggtgtggtgaataaatggcaggcacaacttcatggccgtgctgcttttcatggaccaccagcactggctcttccatctcaatcatcatctccgccatctgtcctaatgtttcagcaagctaattcaaagatgcccaggttggagtttgggcatggacagttggacaagcacgagaatgataggcgtgttaggtttggtccttctgaaggaattgaaagaagagagcaaagaataccactccagccttatcctacttctggagaagtgatagatggacaggttacagttgagaagtctcactcccctggtcgacatggaaaggatggtccagataacaaagctgttggcacaaatagttgcaaaatatttggcatctctttgactgagaaggttccagcaagagaagaactagatgatggcgacgccaactattcactccagtctttgaagcaagtgccaaaatccctgggcaatagttgtgctaccatggtggccgagtatcagggagatggagggactgatgattctgatatttttatcttagatgtaggcgttggagcacttatcatgtga

SEQ ID NO: 30372 - DNA, 2952 bp, Oryza sativa
  Clone ID: PAT_MRT4530_34783C.1
acggcaatagcttcgcgtagcttagctcggcttccccctcattcatggccattaccacgatgtgtcaccccaccccaccaccgcccgctgctccacttctcctcctcctcctcctcctctcctagtagtagcaagcttccggcaccacccccacccgcttcatttatcacttgtctccccctctccctcgcctgctccgctgctcttgtgcttcgcgcctcgcctgacctcgctgtcgctgccgccagccatgaccgggatcgacctcaacaccgtcgaggaggacgaggaggaggcggcggaggaggtggcggcgaacggctcgtctccggctccggcgagggcgggcgcggtgtgcctcgagctgtggcacgcctgcgccgggcccgtggcgccgctgccgaggaaagggggcgtcgtcgtgtacctgccgcaggggcatctcgagcacctcggcgacgcgcccgcggcggcggcggccgcggccgccgtgccgccgcacgtcttctgccgcgtcgtcgacgtcaccctcctcgcggacgcggcgaccgacgaggtgtacgcgcagctctcgcttgtcccggagaaggaggaggtggcgaggcgggcggacgacggcgagggcgaggacggggacggcatgaagcagcggttcgcgcggatgccgcacatgttctgcaagacgctcacggcgtccgacaccagcacgcacggcggcttctccgtgccgcgccgcgccgccgaggactgcttccctccactggattacagccagcagcggccgtcgcaggagcttgttgccaaggatttgcacagcactgaatggaggttccgccatatttaccgaggccagccacgtcggcaccttttaaccacaggttggagtgcatttgttaacaagaagaagcttgtttctggggatgccgtactatttttgcgaggtgatgatggggagctaagactgggagttcgccgtgcagctcagcttaaaaatgggtctgcttttccagcactttacaaccagtgttctaatcttggtacacttgccaatgttgcacatgcagtggctacagaaagtgtgttcaacatatactacaatcccaggttaagtcagtccgaattcattgtaccctactggaagttcatgaaaagcctcagccaaccattttctgttgggctgaggttcaaaatgagatatgaaagtgaagatgctactgaaagaaggtacaccgggataattactggaagtggtgatacagaccctatgtggcatggttcgaaatggaaatgtttgttggtgaggtgggatgacgacgctgagttccgtcgaccaaacagggtctctccttgggagattgagctgactagttcagtgtcaggatcccatttgtccacaccccattcaaagcgattgaaaccatgtcttccccatgttaatccagaatacatggttccacgtggaggtggttgtcctgattttgcggaatctgcccaattccacaaggtcttgcaaggtcaagaattattgggttttaaatctcatggtggtactgctgctgctacttctcagccatgtgaagcaaggcatttacagtacatcgatgagcggagttgctccagcgatgcgagtaacagtatcctaggggttccaagacttggtgatagagcaccacttggaaacccaggattttcctaccattgctcaggctttggggagtctcacagactccaaaaggtcttgcaaggtcaagaattatttcgtccctaccgaggaactttggttgatgcgtctatgggtagtaatgggtttcatcaacaagatagtcctcgtgcaccaggtgtggtgaataaatggcaggcacaacttcatggccgtgctgcttttcatggaccaccagcactggctcttccatctcaatcatcatctccgccatctgtcctaatgtttcagcaagctaattcaaagatgcccaggttggagtttgggcatggacagttggacaagcacgagaatgataggcgtgttaggtttggtccttctgaaggaattgaaagaagagagcaaagaataccactccagccttatcctacttctggagaagtgatagatggacaggttacagttgagaagtctcactcccctggtcgacatggaaaggatggtccagataacaaagctgttggcacaaatagttgcaaaatatttggcatctctttgactgagaaggttccagcaagagaagaactagatgatggcgacgccaactattcactccagtctttgaagcaagtgccaaaatccctgggcaatagttgtgctaccgttcatgagcaaaggcctgttgttggcagggtgattgatatttcaactatggatatgatgatctgatttatgagctggatttgcaaaattatctggaggtgaagtaacactaggattgcttccaaccacatattttgctgtggatctccagatggtggccgagtatcagggagatggagggactgatgattctgatatttttatcttagatgtaggcgttggagcacttatcatgtgacatagtacctagctgctcgtctgcatttgttgcctctgcaactttaactgtcagcggcatttgtcgccgctggaaccatctaagtacgtgtttataagctgtaagctatgacaagcgcattagagggtgctggtactgttagaacattaattaatgtcagtagcatgctttgatcttaaaaaaaaaaaaaaaaaaaaaaaaaaaaaaaaaaaaaaaaaaaaaagggggggagcctcgtccgaattcctgcagcccgggatgcttttcctatgttgaccggagttcagtataacatgatggtggctttgggagacctcatgttttgaaaccttggtgctgatcgctgatttgtaactataaatttagttgtatttctaccacttagcttatt

SEQ ID NO: 30373 - DNA, 823 bp, Oryza sativa
  Clone ID: PAT_MRT4530_34784C.1
gtgaggtgagcctgcgggagtggctggaccggccagggcgggcggtggaggcgccggagtgcctgcacgtgttccgccaggtggcggagtcggtggccatcgcgcacgcgcagggggtggccgtcggcagcgcgcgcccttcctgcttcgtcgtgtcgccgcccttcgcccgcgtcgcgttcatcgagtccgcctccggctccgacgtctcgggctcctgctccggctccgacggctcggaggaggccgacccggaaccctcgcctcctcggcggcgacgggacggcgccagcggtggggaggaccgcggcgggaagacgttcccgctgaggagcgtgctggcgatggagctcacctggtacaccagccccgaggaggccgacgaccgcggcggcgctactttcgcctccgacgtgtataggttaggagtgctcttgttcgagttgttctgtacgttcgagacgatggaggagaagatgcgagcaatggcgaacctacggcaccgcgtcttgcctccacagctgctgctcaagtggcccaaggaagcatcattctgtcagttgttgatgcaccctgtgccggagacccgaccgaagatgagtgatgtgctacaaagtgagttccttaatcggtcaagaaatagtctggaggagcgtgaagcagcacttcggttacgcgaagagatagaagaacaagaattactggctggatttttttctccaactacagagaagaaagcaggattagcagaccatttgcaggacacagttgcatttctctcttctgacatcaatgaagcgcaccagcagtcagctctggggca

SEQ ID NO: 30374 - DNA, 1604 bp, Oryza sativa
  Clone ID: PAT_MRT4530_34785C.1
ccccaatcttacatcaactacctacttcctacgtagcccagtaactatacattattaaggctaaccagtaactaactaaggcacacgtacgcaatggtggcgctcggacgccgttcatggctggtcccgctggccatggtgctcgccgtctccagctgcctccggcgctcacctcgcacaccactccacctagctgcgccccgtcttttctatgtagtcgccaaccatcggcttcccaaggcccagccccgctgcggctcctactgctctcgtgccgccccggcgccggccggagaccgggcgacccgaccgtgttctggggccgtaacaagaaccagggtcgacgggtccaaccctgaaggagaccggcgccaggcctctacacccagccgtcgggaaccctcgtcatatccttctacaccgtgttccgccacgcccgcaactgggcctccccctccggccccgacccccgcgtcatcgccgccgacatcaagcactgccagaccaagaacatcttcgtcttcccctccatcggcggcgggcaaggactactccctcccgacctccaagtcgccgccgccgacgtcgccgacaacatctggaacgcccacatggacggccgccgccccggcgtgttccgccccttcggcgacgccgccgtcgacggcatcgacttcttcatcgaccagggcgcgcccgaccactacgacgacctcgcccgcaacctctacgcctacaacaagatgtaccgcgcccggacgccggtgaggttgacggcgacggtgcgctgcgcgttcccggacccgaggatgaagaaggcgctggacaccaagctgttcgagcgcatccacgtccgcttctacgacgacgccacctgctcctacaaccacgcggggctcgccggcgtcatggcgcagtggaacaagtggacggcgaggtaccccggcagccacgtctacctgggcctcgcggcggcgaacgtgccggggaagaacgacaacgtgttcatcaagcagctctactacgatcggcttcccaatgtgcagaaggcgaagaactatggcggaatcatgctctgggacaggttctacgacaagcagaccggttacggcaaaaccgtcaagtactgggcttaactaattcacctactactactatggaagtaaacgtaccttaaaccttcaacattagccctgatcattcactggattcatgtacttactacaattagtatgttcagtaagaaagtaagtaagattaaattatgttgatgtataaagaaagatggaaatgatatattaaaagattgaggtctatatgtaacgatggagatcatgatgtgatttaatgttgatcaaaaatcagataaaggtgtggagatgtattagaaacgtttagttgtttactgctactatgcgttaatttgtgcgtgtgtgtttgagaataaaatatgttggtgtgtgttggtttttttatgtaggtatatgaataaaacgagatccatatgtaacgatggagatctcgagttgtttgtttgttggtcatcaatcgaataaagtgtatgaacaatatatcagaaatggttattatgtaattttgtctct

SEQ ID NO: 30375 - DNA, 354 bp, Oryza sativa
  Clone ID: PAT_MRT4530_34786C.1
atgggcttgcagcggttggatccgacgactaacgaagtcttcgacgacttcatagtcgtcctcagaacgctccggttggacctcaggcacaacaagaatcgggtcgagttctttgagctcgaggtacaaccatctcgatctccattggctccgggatgtgtggcattggagagggatgtatttcgcctccatgccgtcacgaaggcgaaactcacaacatcccgaaacccgatttgcttccatccaccggagttcgtagaagaagtgaaagaggtcaaggagaggtactaccctaatttaggcctcgcagaggtgagcaaaaatgctcaagaaagcgatggaattggggtttag

SEQ ID NO: 30376 - DNA, 318 bp, Oryza sativa
  Clone ID: PAT_MRT4530_34787C.1
atgtcgggatctgacagggcattgcgtagatggggttttagtttaggtgaccgactggggtggtgccaaagggtggcggtgaggactagcagcgtcggcaaacttggtggtggcgtcggggaggcattgggcggagacggggctagtcctccatccttttctttgtcaacccctccctttgtcaccggtggcgacggcggtgggagaggctcttggaagcgccattctagagatggcaattgccaagcgagcgtcagcaccaaggtttggctgcggataggtgtcgacgacggtggagcatctccaacaagctcatag

SEQ ID NO: 30377 - DNA, 141 bp, Oryza sativa
  Clone ID: PAT_MRT4530_34788C.1
atgatgcaacttctacgtggatccctgaaactctggactgcatgtgagaagccccactctcctgaggctgccctgctgtggaggaagccaggtcacacagagggggcacatggaggcaatccagcctacagacctgctcag

SEQ ID NO: 30378 - DNA, 359 bp, Oryza sativa
  Clone ID: PAT_MRT4530_34789C.1
atggcaatcagtagcggcaatcaacttcagtcgagccctgttccctgcagcgcgcttgcgagccaaaccaacaagcagctggtagaggaggaggaggggaccttcttgccgactggggaagtgcgacggcggcagcggcggctggggaagtgcagcggctgtggcggccctagcggttggcggcggcggcggcagctggggaagtgcggcggtggcggctggggaagtgcagcagctgtggcggccctagcggttggcggcggcggcggcagctggggaagtgcggcggtggcggcagctggggaagtgcggcggcggcggcggccctagcggctggcggtggcgcactggcgaactaa

SEQ ID NO: 30379 - DNA, 1896 bp, Oryza sativa
  Clone ID: PAT_MRT4530_3478C.1
atgcagccggcgctgcgacggcggcggcggcgccaaggcttcctcctccccttcgcctgcctctccgccgccctcatcgccgctgccctgctccccggcgccgctttcgccgatggcgtcacgccctccgaggcccgccggctccgcgacgaggtcaaagatatgttctatcatgcatttgatgggtacatgcaacatgcttttccacttgatgaattgcggcctttaagttgccaaggagaagattcacttggtggctatgcacttactcttatagactctttggataccttggctttactaggggataaggagagatttgatgctgccgtggagtgggttggtaagaatgtccgctttgatattaataaaactgtctctgtttttgaaaccaacatacgcattcttgggggtctgctatcagctcacctgattgccagtgattatgcaactttctcgttgcagataacttcaacagctggtggtggcactttgacactggaatttggtgtcctgagtcgtttgactaatgatagcgtttatgaacgagttacaaaaaactctgtgcgtggaatatgggcacgcaggtcgaaacttgaccttgttggtgcccatataaatgtatttactggtgaatggacacagaaggatgcaggaattggcacaagcattgactcattctatgagtatcttctaaaggcgtatttattatttggagatgaagaatatttgtatatatttcaggaggcttacaaggctgccatgcattatctccatcatgatccctggtatgtggaggtaaatatgaattctggtgctactgtttggccactattcaacagtctccaggcattctggccaggacttcaggtgttagctggagatgttgatcctgccattcgaactcatgctgccttcttcagtgtatggaaaaaatatggcttcaccccagaagggtttaatcttgctacatccactgttcagaatggacaaaggagctacccgctgcggcctgaattgattgaaagcacatattggctgttcaaggctactagagattataggtaccttgatgttggaagggatatattagcaagccttcaatatggtgctaaatgtccatgtggttactgccatatttcagatgtagaaacccaccagcaggatgaccacatggagagttttttccttgcagaaacagtcaaatatctctggcttctttttgatttagctgcaggccctgataatattgttgaaaatgggccatataaatacatatttagtacagaaggtcatctgttgcctgctactcctcagataaccttgttagatgagcattgcttgtatgctggagcattctgcaatggtactgcaggccatggatatggtaccggtgatagttctaataagcatcaaaatgcaaactctgttccgttcgatgatagtcgaacaccttccgatcaatctttatccaatattttgtctacgacaagagggtacatcaagggagtttgtccaggattaactcatgcccagaaacttggcatatcatactctgccgaggaggataactcaatacagcagaattctggaagtagtgagaatcttgatgaatcacacgtgatcaaatccagtgtccaagctcaatcaagttctgttatattgatatcgcatccagtcgcaagccaaactgaggagcctacgtcgggcagaagtcagtacaatgcaaacattgtggcaactgctgagtctgtagggactgatactgccggcgcctcatcccaccccgaggatcttgttaaggaaactgagagcgtctctgaacagaaagaaatcaatgacaaagagatcgcttctcagggtagtcaaccgaccgaaggaagatacctgacctaa

SEQ ID NO: 30380 - DNA, 458 bp, Oryza sativa
  Clone ID: PAT_MRT4530_34790C.1
gggggtgttacaattaaccggtcttgttcttttaattggggttggttttgtcatttacaggcccttttttcgggaacacaaaggggcgaaccccggggaggcccgccccccccctccccggggggggccacccgggactcaccacagggggggggggtccaggatttcggccccaaaaaccagggcggggtgtttgcagaacccccagcgtggggggggaaaacccccccggggggccctcttgggcaataccatcttaaaaccaccaccaggctcgcccaaaatgggccccggatagaaaaagggttaccggtgctctgccaccgggggggacaaccccttggggcaaaggtggacttcctggggcccatctgacccaatttcgaagggggggcggcccccccccaaagaaagggggaaaaggggccaatgccggggggcaaaaaaaagcccaaagt

SEQ ID NO: 30381 - DNA, 279 bp, Oryza sativa
  Clone ID: PAT_MRT4530_34791C.1
tcatggttggcctgcgacgccgttactgatggcgacatcatcttcaccgatcggcatgccttcgccgccgccgactggtgtctccgccttcacggttggcctattatgccgccattgttgggcgtctacgacttcaccgccggccttcaccgccgccgattggtgtctctgcggttggttggtcacaccaccgttcttgagcgtccacgtcttcactgccggcttgccttcgccgccgccgactggtgtctccgcaccaccgttcatgggcgtccacat

SEQ ID NO: 30382 - DNA, 2412 bp, Oryza sativa
  Clone ID: PAT_MRT4530_34792C.1
atggcggaagagaaagaaagctttgaaggccaatgggcgccgtccgacgtgacggaggagaacctgaaggagatggtggcgcacggcgttctccctgccaaggagatcatcgggtggcgtccagcgtgcggtgaggcttttccatcccccgatacacacgaggttgttgttttttcccatttcttctatggcggcttcgctcttccgacctcgaaatttttccgcgggatattaagcttctatagaatcagcttgcatcacctaaacccaaattccatagtccacatcgccaatttcgtccatgtttgtgaagccttcttgggaatcaaaccccacttcgctctgtttcgccgaatcttctttctcaaacctcaaccgaacaagagcaagccatgtgtagtcggaggggccggatttcagctgagggggactctgagccagaagtacttctcgatgcccttcaagacttcaaacaaagggtggcatgcgaactggttttatgttcagaaccctgaacctgctcttcccgagtactcttgtcttcctccggtgtaccaagatacttggaactctcttccgatcggagatgaagctgcccaagccttggagttgatggaccgcatgctaaaactcaaagaacaaggcttacaaggagagcagattactcggcacttcatcaagtgccgattggcaccaattaaagaaagatcccgtacggcattcgagtttgacggcaagcatgatcctaatcgtgaagacccagattctctggattttaaaatcatgaaggagagaatgtataaaatcttctcaaatgctattgtcgtcagctactcacatcagctgccagttgtgccatataacgcattcaatccgcctcctcaggaatatgtattgatgaagtctgaccccccaattactcagcgccggtctcctcgccagcacaccgttcagggaggtggagggccaacaatcagatcagacccgcagcctcaaacctctaaaccgactgggcagacaggttctcgcaagagaaagctggtgcttaatgacgacgaaggcgacgacggcaacaaatctggggacaaaggcacgcccaataaactcccaaagcacaccattcccaggaaaaaactggctggccgtcaaatgccaaagattagaacatcttccaggaaaccatctgacatagatccaactggaaaagatcctgatccggctgtgacagagccaaatttatccaaggatcctgagccaactgccgaaagccagccgactggcgcccatgcttcaggtgaaactacaacaacccaagagcccccgactggaaaccagtcggatgtaggtcccgatcaagaaatccccgaagttgaagcgcagacgacaacttcccaaggaccagaggctggtaaagactcaatgattgggtctccaaataaagaacaagggtcacctcacgctcagctaggaacatcctcaggaccaccaggcgatgacgaagaagaaattcctcgcataaaggcagctgacgactctcgtcctcctatcttgctcaaatggtgggacgagaactcacaagctgccggcatcgtcataaatcgtcaaaaagaagacgaggaagtgtgccagctgaaaaaggcacttggagaagccactcgcattgtgaacagaatccatcttcgcaatgaggccaagactgcaactttagaaaagctggttcctcatttgggaactctggaagcagttagggaccagctacacgaggccaaggagcacgccaaaaagacagagaaggaattaagggaccgaattgcccagctccaggattcaaacttcgagctgagtggttcatcaaaagcgcaagccaccaggatggctcaaatggagaaacaaattgaagctctgaaaagagataaagtagaactggctgcgcaaagggactcggccttgaaggaggttgaagaccgcaaaatcaaatctcaagctcagttcgacgtcctggttggtaagatcaagaggcttgaaggagcaagagatgaagtcgctaatgtcgctaccccactcgtccaagctatgttcctcaataacagtggtccgagtgcactcgacgcaaccgaaatctttgacaagctgagagttgcaccggatgtatatttcaagaatatcaagaaagctggaagtatgggagctagcatggcattggcgatgaccaaatccttgtacccaagaattgaaattgacgccattgatggttttgcagacgggacaagcgaagaagctgctcttgaccttatcagcaatgctcaaaacgcggctgacaagattgcaagtgacgttgtagatcaattccgcaacaacgaccttcagccgagcaacaataactctgatgatgaaaggactgattctgactga

SEQ ID NO: 30383 - DNA, 2502 bp, Oryza sativa
  Clone ID: PAT_MRT4530_34793C.1
atggcggaagagaaagaaagcttcgaaggccaatgggcgccgtccgacgtgacggaggagaacctgaaggagatggtggcgcacggcgttctccctgccaaggagatcatcgggtggcggccagcgtgcgatgaggcttttccgacccccgatacacacgaggccgtggtcttctctcatttcttttatggtggatttgctcttccaacctcaaagttcttccgtgggatactgaatttctatggaatcagcttacatcatttgaatccgaactccatagtccatattgcaaatttcgtccatgtctgtgaagcttttttgggcattagacctcattttgctctgttccgccgaatctttttccttaagcctcaaccaaacaaaaacaaaccatgcgtagttggtggggctggatttcaactgaggggcactctgagccagaagtatttctctatgcctttcaagacttcaaacaaaggatggcacgccaactggttttatattcaaaatcccgagcccgctcttcctgagtactcctgtcttcccccagtataccaagatacctggaactctcttcccatgggagatgaagctgcccaagccttagaactgatggaacgcatgctgaagctcaaagagcaaggcttacagggagagcaaatcactcggcatttcattaagtgtcgattagctccaatcaaagagagatcccgcacagcattcgagtttgacggcaagcatgatccaaaccgtgaagacccagactctctggactttaaaatcatgaaggagagaatgtataaaatcttctcaaatgctattgtcgtcagctactcacatcagctgccagttgtaccatataatgcattcaatccgcctccacaggagtacgtattgatgaaatctgatcccccaattgctcaacgccgatctcctcgccagcacaccgttcagggaagtggagggccgacaatcaggtcagacccgcaacctcaaacctccaaaccggctgggcagacaggttctcgcaagagaaagctggtgcttaatgacgacgaaggcgatgacagcaacaaatctggggacaagggcacgcccaataaactcccaaagcataccatgcccaggaaaaaactggctggccgtcaaatgccaaagattagaacatcttccaggaaaccgtccgatatagatccaactggaaaaaatcctgatccggctgccacagagtcaaatttatccaaagatgctgatccgaccgccgaaaaccagccgactgccgaaagccagccgactgccgaaagtcagccgactggcgcccatgcttcggatgacaaggccaatccgagtgaccagccgccgactggaaaccagtcggcagctactgaaactgcaacaacccaagagcccccgactggaaaccagtcggatgtaggtctaaatcaagagattcctgaagctgaagcgcaggcgacaacttctcaaggaccagaggctggtaatgactcagtgattgggtctccggataaagagcagggatcacctcacgctcagctaggcacatcctcaggtccactaggcggcgacgaagaagaaattctccgcataaaggcagctgatgactctcgtcctcctatcttactcaaatggtgggacgagaactctcaagtttccggcattgtcataaatcgccaaaaagaagatgaggaagtgtgccagctgaagaaagtacttggagaagctactcgcattgtgaatagaatccatcttcgcaatgaggccaagaccacaaccttagaaaagctggttcctcatttgggaactcttgaagccgttaggagccagctacacgaggccaaggagcatgccaagaaaacggagaaggaattaagggaacgaattgctcagctccaggattcaaactacgagctgagtggttcatcaaaagcgcaagccaccaggatggctcaaatggagaagcaaattgaagccttgagaaaagacaaaacagaactagctgctgaaagggactcggccttgaaggaggttgaagaccgtaaaatcaaatctcaagctcagtttgacgtcctggttggtaagatccagaggcttgaaggagcaagagatgaagttgccaatgtcgctacaccacttgtccaagctatgttccttaataacagtggtccgagtgcacttgacgcaaccgaaatctttgacaagctgagagttgcaccggatgtatatttcaagaacatcaagaaagctggaagtatgggagctagcatggcattggcgatgaccaaatccttgtacccgagaattgaaatcgacaccattgatggatttgcagacgggacaagcgaagaggctgctcttgatcttatcaacaatgctcaaaatgcggctgacaagattgcaagtgacgttgtagagcaattccacaacaacgaccttcagccgagcaacaataactctgatgatgaaaggactgactctgactga

SEQ ID NO: 30384 - DNA, 2496 bp, Oryza sativa
  Clone ID: PAT_MRT4530_34794C.1
atggcggaggagaaagaaagctttgaaggccaatgggcgccatccgacgtaacggaagagaacttgaaggagatggtggcgcacggcgttctcccagccaaggagatcatcgggtggcggccagcgtgcggtgaggcttttccgacccctgatacacatgagatcgtagtcttctcgcatttcttctatggcggtttcgctcttccgacctcgaaatttttccgcgggatcttaaacttctatggaatcagcttgcatcacctaaacccaaattccatagtgcatatcgccaatttcgtccatgtttgtgaagcctttttgggaatcaagcctcactttgccctgtttcgccgaatcttcttcctcaaaccccaaccgaacaagagcaaaccgtgcgtagtcgggggggcaggattccagctaaggggaactctgagccaaaaatatttctctatgcccttcaagacttcaaacaaagggtggcatgcaaactggttctacattcagaatcctgagcctgctcttcccgggtactcttgtcttcctccggtgtaccaagatacctggaactcccttccaatcggagatgaagcagtccaagccttggagttgatggaccgcatgttaaaactcaaagaacaaggcttgcaaggagagcagattactcggcatttcatcaaatgccgactggcgccaattaaagaaagatcccgtacagcttttgagttcgacggcaagcatgatcctaatcgtgaagaacctgactctctggatttcaaaatcatgaaggagagaatgtataaaatcttctcaaatgccattgtcgttagctactcacaccagctgccagttgtgccatataatgcattcaatccgcctccgcaggaatatgtattgatgaaatccgatcccccaattgctcagcgacgatctcctcgccagcacaccattcagggaagtggagggccgacaatcaggtcagacccacaacctcaaacctccaaaccggctgggcagacaggtcctcgcaagagaaagctggtgcttaatgacgatgagggcgatgacagcaacaaatctggggacaagggcacgcccaacaaactcccgaagcataccatgcccaggaaaaaactggctggccgtcaaatgccaaagattagaacgtcgtccaggatacttcgcaggaaaccgtccgacatagatccaactggaaaagatcctgatccggcagtgacagaaccaaatttatccaaagacgctgagccgactgctgaaagccagccgactgccgaaagccagccgactggcgcccatgcttcggatgacaaggccaatccgagtgaccagccgtcgactggaaaccagtcggcaacaactgaaactgcaacaacccgagagcccccaactggaaaccagtcggatgtaggtcctgatcaagaaatccctgaagttgaagcgcaagcgacatcttctcaaggaccaaaggctggaaatgactcggtggttggctctccagataaagaacaaggatcatctcgcgctcagccaggcacatcctcaggaacactaggcgatgacgaagaaacaattcctcgcataaaggcggctgatgactcccgtccccctatcttactcaaatggtgggacgagaactctcaagtttccggcattgttataaatcgccaaaaagaagatgaggaagtgtgccagctgaagaaagcacttggagaagccactcgcattgtgaatagaatccatcttcgtaatgaggccaagactgcaaccttagaaaagctggttccacatttgggaactcttgaagccgttagggaacagctacacgaggccaaggagtatgccaagaaaacggagaaggaattaagggaacgaattgcacagctccaggactccaacttcgagctgagtggttcatcaaaagcgcaagccaccagaatggcccagatggagaaacagattgaagccttgaaaagagacaaggtagaactggctgcggaaagggactcagccttgaaggaggttgaagaccgtaaaatcaaatcgcaagctcagtttgatgtcctggttggtaagatcaagaagcttgaaggagcaagagacgaagtcgccaatgtcgctacaccactcgtccaagctatgttccttaataacagtggtccgagtgcacttgacgcaaccgaaatctttgacaagttaagagttgcaccggatgtatacttcaagaacatcaagaaagctggaagcatgggagctagcatggcattagcgatgaccaaatccttgtacccaagaattgaaatcgacaccattgatggatttgcagatgggacaagcgaagaagctgctcttgatcttatcaacaatgctcaaaatgcggctgacaagattgcaagcgatgtggtagatcaattccgcaacaatgaccttcagccgagtaacaataactctgatgatgaaaggactgattctgactga

SEQ ID NO: 30385 - DNA, 1684 bp, Oryza sativa
  Clone ID: PAT_MRT4530_34795C.1
aataaagcacgtgtttcctatgtttttgtttattttgtgtacttagttatactagtgcgctcacacatatcattgtttttttttgcgctaaacactagtatactgtgtcattttagggtatgacttatgcaagcgtaagtgactaaacaaacacgaagatcaggtaaaatagcaaaacacaaaaatgtgcctagctgaccattttccaccacacagaccggggcccatgtctagctttcttctgcgttaggttgttcctcctccttggcctcttccataggagatgttgcggaattcatcttggccctcttcatgatcagtgtttccactaaactttccaagcattcatctgcatgtctcttccggttgcagcgcagcatgatgctatcacgatcgactggttcctcgtcgatctcgtcgagcagtggaccgatttcaccgttcctcggcatgagtttatcggccacgtctgccggagtggtgttggtctcgctcagcagtccctcaatttcactgaatagtgagtgctcggtgatgtttaggtagttcttggcgagcatcttgaaggcctcgaaccggcagtaggacatctcgatgtccatatccatccttccacgccgggtcagcgccgggtcgaggtggtcaacgtggttcgttgtaaacacgaagattcgttcactgccgcacgccgaccacagcccgtcgatgaagttgagcagccctgacagtgtcactttacttttgtcgtgattcttgtcggacagccctatcaccacatgtttgtcgtcgccgttggctgccttcttgcccttgcggttggttgtgagctcgacctcaatcgcatcgatgtcctcgataacgatgatggatttgtcggtcgtatcaaggaagagcttccgcaagtcggcattgtttaggacggatattaagtcgaggtcgtagacgtcgtagtcgaggaagttggccatagccccgatcatggtggtcttgcccgtgcccggtggcccgtgtagaaggtatccccgcttccacgccttgccgaccttggagtggtactccttccccttctggaatgctctgagatcgtccatgatctcaaccttcttggcaggttccatggcgagcaagtcgaatgtcgacgggggattgtacgggacattgctccacatgctcttcccgtctttgacgtggttggtgaacaatagcctctgtcggttcttagcgattagctcacgccactgccggacgacgcctggaaggtaggagttcagcacgagctgccggtggcgcttgtgaaacaccagcctcaagctccgcggctcgtccgagtccccaggcaagaagctgatgatggtgccccccctcttcttggaggtcttggggaacagcctccaccacatgcgggcgccctcgaagctgtcggcgacctcctggttctcctccagactaataagtgggtcgtcattgctgttgttgcggagctgggccctgagcttgtcggacacagtgatctgctcgtaggggttgaagtaggacatcgccatgggaaccaagctactgatgatgtacctagcctcctcatggacgtgctccggcattcgggaccaaagcaagccgacgccagccatagctgacccgaaccctacccacttctccacagaaaacgccatggcatgagcttatt

SEQ ID NO: 30386 - DNA, 2502 bp, Oryza sativa
  Clone ID: PAT_MRT4530_34796C.1
atggcggaagagaaggaaagcttcgaaggccaatgggcgccgtccgacgtaacggaagagaacctgaaggagatggtggcgcacggcgttctcccagccaaggagatcatcgggtggcggccagcgtgcggtgaggcttttccgacccctgatacacatgagatcgtagtcttctcgcatttcttctatggcggcttcgctcttccgacctcgaaatttttccgcgggatattaagcttctatggaatcagcttgcatcacctaaacccgaattccatagtccacattgccaatttcatccatgtctgtgaagccttcttaggaattaaaccccacttcgccctgttccgccgaatcttctttctcaaaccccaaccaaacaagagtaagccatgtgtagtcggaggggccggatttcagctgaggggaactctgagccagaaatacttctcaatgcccttcaagacttcaaacaaaggatggcatgcgaactggttttatgttcagaatcctgagcctgctcttcccgaatactcttgtcttcccccggtgtaccaagatacttggaactctcttccaatcggagatgaagctgcccaagccttggaattgttggatcgcatgttaaaactcaaagaacaaggcttgcaaggagagcagatcactcggcatttcatcaaatgccgactggcgccaattaaagaaagatcccgtacagcttttgagtttgacggcaagcatgatcctaatcgcgaagaaccagactctctggatttcaaaatcatgaaggagagaatgtataaaatcttctcaaatgccattgtcgttagctactcacaccagctgccagttgtgccatataatgcattcaatccgcctccgcaggaatacgtattgatgaaatctgatcccccaattgctcagcgccgatctcctcgccagcacaccattcagggaagtggagggccgacaatcaggtcagacccacaacctcaaacctccaaaccggctggtcagacaggtcctcgcaagagaaagctggtgcttaatgacgacgagggcgatgacagcaacaaatctggggacaagggcacgcccaacaaactcccaaagcataccatgcccaggaaaaaactggctggccgtcaaatgccaaagattagaacatcttccaggaaaccgtccgacatagatccaactggaaaagatcctgatccggctgtgacagagccaaatttatccaaagacgctgagccgtctgccgaaaaccagccgactgccgaaagccagccgactgccgaaagccagccgactggcgcccatgcttcggatgacaaagccgatccgagtgaccagccgccaactggagaccagtcggcaacagctgaaactgcaacaacacaagagcccccgactggaaaccagtcggatgtaggtcccgatgaagaaatccctgaagttgaagcgcaaacgacaacttcccaaggaccagaggctggtaaagactcaatgattgggtctctaaataaagaacaaggaccacctcatgttcagccaggaacatcctcaggaacactaggcgatgacgaagaaacaattcctcgcataaaggcggctgatgactcccgtcctcctatcttgctcaaatggtgggacgagaactcgcaagttgccggcatcgttataaatcgtcaaaaagaagatgaggaagtgtgccagctgaagaaagcacttggagaagccactcgcattgtgaatagaatccatcttcgcaatgaggccaagactacaactttggaaaagctggttcctcatttgggaactcttgaagcagttagggaccagctgcatgaggccaaggagtatgctaaaaagacagagaaggagttaagggaccgaattgcccagctccaggattcaaacttcgagctaagtggttcatcaaaagcacaagctaccaggatggcacaaatggagaaacagattgaagccttgaaaagagacaaagtagaactagctgtgcaaagggactcagccttgaaggaggttgaagaccgtaaaatcaaatctcaagctcagtttgatgtcctggttggtaagatcaagaagcttgaaggagcaagagacgaagtcgccaatgtcgctacaccacttgtccaagctatgttccttaatgacagtggtccgagtgcacttgacgcaaccgaaatctttgacaagctgagagtagcaccggatgtatacttcaagaatatcaagaaagctggaagtatgggagctagtatggcattggcgatgaccaaatccttgtacccgaggattgaaattgacgccattgatggctttgcagacgggacaagcgaagaagctgctcttgatcttatcagtaatgctcaaaatgcagctgacaagattgcaagtgatgttgtagagcaattccgcaacaacgaccttcagccgagcaataataactctgatgatgaaaagactgattctgactga

SEQ ID NO: 30387 - DNA, 2466 bp, Oryza sativa
  Clone ID: PAT_MRT4530_34797C.1
atggcggaagagaaagaaagctttgagggccaatgggcgccatccgacgtgacggaggagaacctgaaggagatagtggcgcacggcgttctccctgccaaggagatcatcgggtggcggccagcgtgcggtgaggcttttccgtcccccgatacacacgaggttgtggtcttctctcatttcttttatggcggcttcgctcttccgacctcgaaatttttccacgggatattaagcttctatggaatcagcttgcatcacctaaacccaaattccatagtccacatcgccaatttcatccatgtttgtgaagccttcttgggaattaaaccccacttcgctctgtttcgccgaatcttctttctcaaaccccaaccaaacaagagcaagccatgtgtagtcggaggagccggatttcagctgaggggaactttgagccagaagtacttctcaatgcccttcaagacttcaaacaaagggtggcatgcgaactggttttatgttcagaatcctgagcctgctcttcccgagtactcttgtcttcctccagtgtaccaagatacttggaactctcttccgattggggacgaagcagcccaagccttagagttgatggaccgcatgctaaaactcaaagaacaaggcttacaaggagagcagatcactcggcacttcatcaaatgccgactggcgccagttaaagaaagatcccgtacagcttttgagtttgacggcaagcatgatcctaatcgcgaagaaccagactctctggattttaaaatcatgaaggagagaatgtataaaatcttctcaaatgctattgtcgtcagctactcacatcagctgccagttgtgccatataatgcattcaatccacctccgcaggaatatgtattgataaaatctgatcccccaatcactcagcgccggtctcctcgccagcacaccgttcagggaggtggagggccaataatcagaccagattcgcaacctcaaacctccaatccaactggacagacaggttctcgcaagagaaaactggtgcttgacaacgatgaaggcgacgacgacaacaaatctggggacaagggctcgcctaataaactctcgaagcgtaccatgcccaggaaaaaactggctggccgtcaaatgccaaagattagaacatcttccaggaaaccatccgacatagatccaactggaaaagatcctgatcaagccgtgacagagccaaatttatccaaggatcctgagccaactgccgaaagccagccgactggtgcccatgcttcgggtgataaggccgatccgagtgaccagccgccgactggaaaccagtcgacagcagctgaaactgcaacaacccaagagcccccgactggaaaccagtcggatgcaggtcccgatcaagaaatccctgaagttggagcgcagacgacaacttcccaaggaccagagactagtaaagactcaatgattgggtctccaaataaagaacaagggtcacctcacgctcagctaggaacatcctcaggaccaccgggcgatggcgaagaagaaattccccgcataaaggcggctgatgattctcgtcctcctatcttgctcaaatggtgggacgagaactcacaggttgccggcatcgtcataaaccgtcaaaaagaagatgaggaagtgtgccagctgaagaaggcgcttggggaagccactcgtattgtgaatagaatccatcttcgcaatgaggccaagactgcaactttagaaaagctggttcctcatttgggaactctggaagcagttagggaccagctacacgaggccaaggagcacgccaaaaagacagagaaggaattaagggaccgaattgcccagctccaggattcaaacttcgagctgagtggttcatcaaaagcgcaagccaccaggatggctcaaatggagaaacaaattgaagccttgaaaaaagacaaagtagaactggctgcgcaaagggactcagccttgaaggaggttgaagactgcaaaatcaaatctcaagctcaatttgatgtcctggttggtaagatcaagaggcttgaaggagcaagagatgaagtcgccaatgtcgctacaccactcgtccaagctatgttcctcaataacagtggtccgagtgcactcgacgcaaccgaaattttcgacaagctgagagttgctccggatgtatatttcaagaacatcaagaaagctggaagtatgggagctagcatggcattggcgatgaccaaatcattgtacccgagaattgaaattgacgccattgatggctttgcagacgggacaagcgaagaagctgctcttgatctcatcaccaatgctcaaaatgcggctgacaagattgcaagtgacgttgtagagcaattccgcaacaacgaccttcagccgagcaacaataactctgatgatgaaagaactgattctgactga

SEQ ID NO: 30388 - DNA, 2583 bp, Oryza sativa
  Clone ID: PAT_MRT4530_34798C.1
atggcggaagagagagaaagcttcgaaagccaatgggcgccgtctgacgtaacggaagagaacctgaaggagatggtggcgcacggcgttctccctgctaaggagatcatcgggtggcggccagcgtgcggtgagatttttccgacccccgatacacacgagattgtggtcttctcgcatttcttctacggcggcttcgctcttccgacctcgaaatttttccgcgggatcttgaacttctatggaatcagcttgcatcacctaaacccaaattccatagtgcacatcgccaatttcgtccatgtttgtgaagcctttttgggaatcaagcctcactttgccctgtttcgccggatcttcttcctcaaaccccaaccaaacaagagtaagccatgtgtagtcgggggggcaggattccagctgaggggaactctgagccaaaagtatttctctatgcccttcaagacttcaaacaaaggatggcatgcgaactggttttatgttcagaatcctgagcctgctcttcccgaatactcttgtcttcccccggtgtaccaagatacttggaactctcttccaatcggagatgaagctgcccaagccttggaattgttggatcgcatgttaaaactcaaagaacaaggcttgcaaggagagcagatcactcggcatttcattaaatgccgactggcgccaattaaagaaagatcccgtacagcttttgagtttgacggcaagcacgatcctaatcgcgaagaaccagactctctggatttcaaaatcatgaaggagagaatgtataaaatcttctcaaatgccattgtcgttagctactcacaccagctgccagttgtgccatataatgcattcaatccgcctccgcaggattacgtattgatgaaatctgatcccccaattgctcagcgccgatctcctcgccagcacaccattcagggaagtggagggccgacaatcaggtcagacccacaacctcaaacctccaaaccggctggtcagacaggtcctcgcaagagaaaactggtgcttaatgacgatgagggcgatgacagcaacaaatctggggacaagggcacgcccaacaaactcccaaagcataccatgcccaggaaaaaactggctggccgtcaaatgccaaagattagaacatcttccaggtataaacttctcggtaccatcttgtttcggcatgcttcccttatagaaattatgctgagtatcgaaaggacgctttgcaggaaaccgtccgacatagatccaactggaaaagatcctgatccggctgtgacagagccaaatttatccaaagacactgagccgtctgccgaaaaccagccgactgccgaaagccagccgactgccgaaaaccagccggctggcgcccatgcttcggatgacaaagccgatccgagtgaccagccgccaactggagaccagtcggcaacagctgaaactgcaacaacacaagagcccccgactggaaaccagtcggatgtaggtcccgatgaagaaatcccggaagttgaagcgcaaacgacaacttcccaagaaccagaggctggtaaggactcaatgattgggtctctaaataaagaacaaggaccacctcatgttcagccaggaacatcctcaggaacaataggcgatgacgaagaaataattcctcgcataaaggcggctgatgactcccgtcctcctatcttgctcaaatggtgggacgagaactcgcaagttgccggcatcgttataaatcgtcaaaaagaagatgaggaagtgtgccagctgaagaaagcacttggagaagccactcgcattgtgaatagaatccatcttcgcaatgaggctaagactacaactttggaaaagctggttcctcatttgggaactctagaagcagttagggaccagctgcatgaggccaaggagtgcgccaaaaagacagagaaggagttaagggaccgaattgcccagctccaggattcaaacttcgagctaagtggttcatcaaaagcgcaagccaccagaatggctcagatggagaaacagattgaagccttgaaaaaagacaaagcagagttggctgcagaaagggactcagccttgaaagaagttgaagaccgtaaaatcaagtctcaagctcaattggatgtcctggttggtaagatcaagaggcttgaaggagcaagagatgaagtcgccaatgtcgctgcaccactcatccaagctatgttcctcaataacagtggtccgagtgcactcgacgcaaccgaaatattcgacaagctgagtgttgctccggatgtatatttcaagaatatcaagaaagctggaagtatgggagctagcatggccttggcgatgacaaaatccttgtacccgagaattgaagttgacaccattgatggctttgcaaacgggacaagtgaagaagctgctcttgatcttatcagcagtgcacaaaatgcggctgacaaaattgcaagtgatgtcgtagagcaattccgcaacaacgacctccaaccgagtaacaatgactctgatgatgaaatgactgattctgactga

SEQ ID NO: 30389 - DNA, 2496 bp, Oryza sativa
  Clone ID: PAT_MRT4530_34799C.1
atggcggaagagaaagaaagctttgaaggccaatgggcgccatccgacgtgacggaggagaacctgaaggagatggtggcgcacggcgttcttcctgccaaggagatcatcgggtggcggccagcgtgcggtgaggcttttccgtcccccgatacacacgaggttgtggtcttctctcatttcttctatggcggcttcgctcttccgacctcgaaatttttccgcgggatattaagcttctatggaatcagcttgcatcacctaaacccgaattccatagtccacatcgccaatttcgtccatgtttgtgaagccttcttgggaattaaaccccacttcgctctgtttcgccgaatcttctttctcaaaccccaaccgaacaagagtaagccatgtgtagtcggaggggccggatttcagctgagaggaactctgagccagaagtacttctcaatgcccatcaagacttcaaacaaagggtggcatgcgaactggttttatattcagaatcctgagcccgctcttcctgagtactcttgtcttcctccggtgtaccaagatacctggaactctcttcctattggggatgaagcagcccaagccttggaattgatggatcgcatgctaaaactcaaagaacaaggcttacaaggagagcagattactcggcacttcatcaaatgccgattggcaccaattaaagaaagatcccgtacggcattcgagtttgacggcaagcatgatcctaatcgtgaagaaccagactctctggattttaaaatcatgaaggagagaatgtataaaatcttctcaaatgctattgtcgtcagctactcacatcagctgccagttgtgccatataatgcattcaattcgcctccgcaggaatatgtattgatgaaatctgaccccccaattactcagcgccggtctcctcgccagcacaccgttaagggaggtggagggccgacaatcagatcggactcgcaacctcaaacctccaatccgactgggcaaacaggttctcgcaagagaaagctgatgcttaacgatgacgaaggcgacgacggcaacaaatctgggaacaaaagcctacccaataaactcccaaagcataccactcccaggaaaaaactggctggccgtccaacgccaaagatcagaacatcttccaggcataaacctcttggtaccatttcgctccggaaaccatccgacatagatccaactggaaaagatcctgatccggttgtgacagagccaagttcatccaaggattctgagccgactgccgagaaccagccgactggcgctcatacttcaggtgatacagccgatccgagtgaccagcctccgactggagaccagtcggcagcaactgaaactacaacaacccaagagcccccgactggaaaccagtcggacgtaggtccagaccaagaaattcccgaagttgaagcgcagacgacgacttctcaaggaccagaggctggtaacgacgctatgattgggtcttcaaataaagaacaagaatcgcctcacgctcagctaggaacatcctcgggaccaccaggcgatgacgaagaagaaatccctcgcataaaggcggctgacgactctcgtcctcctatcttgctcaaatggtgggacgagaactcacaagctgccggcatcgtcataaatcgtcaaaaagaagatgaggaagtgtgccagctgaagaaggcacttggagaagccactcgcattgtgaatagaatccatcttcgcaatgaggccaagacagcaactttagaaaagctggttcctcatttgggaactcttgaagcagtcagggaccagctacacgaggccaaggagcttgccaaaaagacagagaaggaattaagggaccgaattgcccagctccaggattcaaacttcgagctgagtggttcatcaaaagcgcaagccaccaggatggctcagatggagaaacaaattgaagtcttgaaaagagacaaagtagaattggctgcgcaaagggactcggccttgaaggaggttgaagaccgcaaaatcaaatctcaagctcaatttgacgtcctggttggtaagatcaaaaagcttgaaggagcaagagatgaagtcgctaatgtcgctacaccacttgtccaagctatgttcctcaataacagtggtccgagtgcactcgacgcaaccgaaatcttcgacaagctgagagttgctccagatgtatatttcaagaatatcaagaaagctggaagtatgggagctagcatggcattggcgatgaccaaatccttgtacccaaggattgaaattgacgccattgatggctttgcagacgggacaagcgaagaagctgctcttgatcttatcagcaatgctcaaaacgcggctgacaagattgcaagtgacgttgtagagcaattccgcaataccgaccttcagccgagtagtaataactctgatgatgaaaaaactgattctgactga

SEQ ID NO: 30390 - DNA, 314 bp, Oryza sativa
  Clone ID: PAT_MRT4530_3479C.1
cccggggggggaatttatcaaaaaagcataggggcaaaaaaatgggatttgaacaaacccctcgaaccagaaacgaaaaccttagattcaggtggggtaacgacaagggggctaaaaccccaaaaaggaaaattttaattggcacaaaaaaaagaagggaaaagcccccagaaagttacaggggggaaggtggctttatgccaagcgcaaaagctaaagggggggccaaaggaacaactgggaaaaaagacacgaggggctccttgttctcaaaggaaaaatggcacgaagggcaataggggcaaacacggggg

SEQ ID NO: 30391 - DNA, 798 bp, Oryza sativa
  Clone ID: PAT_MRT4530_347C.1
atgactatctccagggagaggacacggaggttgtttgcgatgcagatagccatcgtgtcgcctgttgccattgttctatatgcctccgccattgcaggaggcacgccatttattactacagctgcactcgtgttcgtgtttcaactaatcgccggtggtctcattgccatttatctggacgacctccttcgaaagggttatggattcttgtccggtctctccttgttctcggccgccaattgctgtgcatgtattttctggaaggccttgaaccatgcatacccctggatgatgatgcttgctactttggccttctttttgttagtgttgataatactgggagaccatcacatcaccttgccgccgatgcttagcatcaagtatggcgagacgaataaagtggtgaacatgcttggcatttggaaggaaatgaggcagtatcctgggcactactggcctgtcagtgggatcgcctcttacataacaacgccactaacagtttgctcacgttcaaaaagatacctcgtcaggcttctaaagaagacgcaacgaacaagagtgtcgcctgagcagctgctgcaggagcatgacgaggacgagtcgattagtcccaggcgatgcaggcactacatgaccatggcagcatatatcgttggaatttgtgttggtttactgaatctgttggctggtttcatgggtttgggtggctctggccctgcgatcatgcttgctgtgaccgtcatccataacctcgttgaaggtagaaacactggtcatgttgctgcctttggcctctga

SEQ ID NO: 30392 - DNA, 2547 bp, Oryza sativa
  Clone ID: PAT_MRT4530_34800C.1
atggcggaagagaaggaaagctttgaaggccaatgggcgccatccgacgtgacggaggagaacctgaaggagatggtggcgcacggcgttctccctgccaaggaaatcatcgggtggcggccagcgtgcggtgaggcttttccgacccccgatacacacgaggctgtggtcttctcccatttcttctatggcggcttcgctcttccgacctcaaaatttttccgcgggatattaagcttctatggaatcagcttgcatcacctaaacccaaattccatagttcacatcgccaatttcgtccatgtttgtgaagccttcttgggaattaagccccacttcgctctgtttcgccgaatcttctttctcaagccccaaccaaacaagagtaagccatgtgtagtcggaggggccggatttcagctgagggggactctgagccagaagtacttctctatgcccttcaagacctcaaacaaagggtggcatgcaaactggttttatattcagaatcctgagcctgctcttcccgagtactcttgtcttcctccggtgtaccaagatacctggaactctcttccgattggggatgaagcagcccaagccttggagctgatggatcgcatgctaaaactcaaagaacaaggcttacaaggagagcagattactcggcacttcatcaaatgccgattggcaccaattaaagaaagatcccgtacggcattcgagtttgacggcaagcatgatcctaatcgtgaagaaccagattctctggattttaaaatcatgaaggagagaatgtataaaatcttctcaaatgccattgtcgtcagctactcacatcagctgccagttgtgccatataacgcattcaatccgcctccgcaggaatatgtattgatgaagtctgaccccccaatcactcagcgccggtctcctcgccagcacaccgttcagggaggtggagggccgacaatcagatcagatccgcaacctcaaacctccaatccgactgggcagacaggttctcgcaagagaaagctggtgcttaatgacgacgaaggcgacgacggcaacaaatctggggacaaaggctcgcccaataaactcccaaagcataccactcccaggaaaaaactggctagtcgtccaaggccaaagattagaacatcttccaggtataaacctcttggtaccatttcacttcgacatgcttctctcatggaaataatactgaatattgaaagaacactttgcaggaaaccatccgacatagatccaactggaaaagatcctgatccgactgtgacagaaccaagttcatccaaggattctgagccgactgccgaaagccagccgactggcgcccatacttcaggtgataaggccaatccgagtgaccagcctccgactggaaaccagtcggcagcaactgaaactacaacaacccaagagcccccgactggaaaccagtcggatgtaggtccagatcaagaaactcccgaagttgaagcgcagacgacaacttctcaaggaccagaggctggtaacgactcgatgattgggtctccagataaagaacaaggatcaccccacgctcagctaggaacatcctcaagaccaccaggcgatgacgaagaagaaattcctcgcataaaggcggctgatgactctcgtcctcctatcttgctcaaatggtgggacgagaactcacaagctaccggcatcgtcataaatcgtcaaaaagaagatgaggaagtgtgccagctgaagaaggcacttggagaagccactcgcattgtgaatagaatccatcttcgcaatgaggccaagaccgcaactttagaaaagctagttcctcatttgggaactcttgaagcagttagggaccagctacatgaggccaaggagctcgccaaaaagacagagaaggaattaagggaccgaattgctcagctccaggattcaaacttcgagctgagtggttcatcaaaagcgcaagccgccaggatggctcaaatggagaaacaaattgaagccctggaaagagacaaggtagaactggctgcgcaaagggactcggccttgaaggaggttgaagaccgcaaaatcaaatctcaagctcaatttgacgtcctagttagtaagatcaagaggcttgaaggagcaagagatgaagtcgctaatgtcgctataccactcgtccaagctatgttcctcaataacagtggtccgagtgtactcgacgcaaccgaaatcttcgacaagctgagagttgctccggatgtatatttcaagaatatcaagaaagctggaagtatgggagctagcacggcattggcgatgaccaaatccttgtacccgaggattgaaattgacgccattgatggctttgcagacaggacaagcgtagaggctgctcttgatcttatcagcaatgctcaaaatgcggctgacaagattgcaagtgacgtcgtagatcaattccgcaacaccgatcttcagccgagtagtaataactctgatgatgaaaggactgattctgactga

SEQ ID NO: 30393 - DNA, 264 bp, Oryza sativa
  Clone ID: PAT_MRT4530_34801C.1
atggtccagcagcaatgcaaacaagcaatgctgatccgggtaggaatgggcgagttcaagtcgttgtgtcacgcagggttcttcttccccgaggcgaagatcaagggacactggaagtggagcaagacgattaaggtcgtcgaaagcgagacgctcggcagcgctacctatggtaagaataggaagatcttacaatcgaattcagggcgttcaggttctgcaacttccatgcagctcattatcagaacatcaaacttctattga

SEQ ID NO: 30394 - DNA, 2466 bp, Oryza sativa
  Clone ID: PAT_MRT4530_34802C.1
atggcggaagagaaggaaagctttgaaggccaatgggcgccatccgacgtgacggaggagaacctgaaggagatggtggcgcacggcgttctccctgccaaggaaatcatcgggtggcggccagcgtgcggtgaggcttttccgacccccgatatacacgaggctgtggtcttctcccatttcttctatggcggcttcgctcttccgacctcaaaatttttccgcgggatattaagcttctatggaatcagcttgcatcacctaaacccaaattccatagttcacatcgccaatttcgtccatgtttgtgaagccttcttgggaattaagccccacttcgctctgtttcgccgaatcttctttctcaagccccaaccaaacaagagtaagccatgtgtagtcggaggggccggatttcagctgagggggactctgagccagaagtacttctctatgcccttcaagacctcaaacaaagggtggcatgcaaactggttttatattcagaatcctgagcctgctcttcccgagtactcttgtcttcctccggtgtaccaagatgcctggaactctcttccgattggggatgaagcagcccaagccttggagctgatggatcgcatgctaaaactcaaagaacaaggcttacaaggagagcagattactcgacacttcatcaaatgccgattggcaccaattaaagaaagatcccgtacggcattcgagtttgacggcaagcatgatcctaatcgtgaagaaccagattctctggattttaaaatcatgaaggagagaatgtgtaaaatcttctcaaatgctattgtcgtcagctactcacatcagctgccagttgtgccatataacgcattcaatccgcctccgcaggaatatgtattgatgaagtctgaccccccaatcactcagcgccggtctcctcgccagcacaccgttcagggaggtggagggccgacaatcagatcagatccgcaacctcaaacctccaatccgactgggcagacaggttctcgcaagagaaagctggtgcttaatgacgacaaaggcgacgacggcaacaaatctggggacaaaggctcgcccaataaactcccaaagcataccactcccaggaaaaaactggctagtcgtccaaggccaaagattagaacatcttccaggaaaccatccgacatagatccaactggaaaagatcctgatccgactgtgacagaaccaagttcatccaaggattctgagccgactgccgaaagccagccgactggcgcccatacttcaggtgataaggccaatccgagtgaccagcctccgactggaaaccagtcggcagcaactgaaactacaacaacccaagagcccccgactggaaaccagtcggatgtaggtccagatcaagaaactcccgaagttgaagcgcagacaacaacttctcaaggaccagaggctggtaacgactcgatgattgggtctccagataaagaacaaggatcaccccacgctcagctaggaacatcctcaagaccaccaggcgatgacgaagaagaaattcctcgcataaaggcagctgatgactctcgtcctcctatcttgctcaaatggtgggacgagaactcacaagctgccggcatcgtcataaatcgtcaaaaagaagatgaggaagtgtgccagttgaagaaggcacttggagaagccactcgcattgtgaatagaatccatcttcgcaatgaggccaagaccgcaactttagaaaagctggttcctcatttgggaactcttgaagcagttagggaccagctacacgaggccaaggagctcgccaaaaagacagagaaggaattaagggaccgaattgctcagctccaggattcaaacttcgagctgagtggttcatcaaaagcgcaagccgccaggatggctcaaatggagaaacaaattgaagccctggaaagagacaaggtagaactggctgcgcaaagggactcggccttgaaggaggttgaagaccgcaaaatcaaatctcaagctcaatttgacgtcctggttggtaagatcaagaggcttgaaggagcaagagatgaagtcgctaatgtcgctacaccactcgtccaagctatgttcctcaataacagtggtccgagtgcactcgacgcaaccgaaatcttcgacaagctgagagttgctccggatgtatatttcaagaatatcaagaaagctggaagtatgggagctagcacggcattggcgatgaccaaatccttgtacccgaggattgaaattgacgccattgatggctttgcagacgggacaagcgtagaggctgctcttgatcttatcagcaatgctcaaaatgcggctgacaagattgcaagtgacgtcgtagatcaattccgcaacaccgaccttcagccgagtagtaataactctgatgatgaaaggactgattctgactga

SEQ ID NO: 30395 - DNA, 125 bp, Oryza sativa
  Clone ID: PAT_MRT4530_34803C.1
ttcctgcagcccgtgactgctgccatactggacgcctggtcccgttaattggccataagcccacaaggtgggtcacagcggcgaggatgccgtcgacaactcgacatcgtggtgtttcagactga

SEQ ID NO: 30396 - DNA, 456 bp, Oryza sativa
  unsure (1)..(456): unsure at all n locations
  Clone ID: PAT_MRT4530_34804C.1
atggcgtgccaagtgccaacaagaagtcctgccagtgcaaatgggtggctgtgttggattctcttnccgggattgcacgccgccccaggtgcaaacaggcacacggccagcggaaacgacacaaaaaaaaacaacagcgggcaggggacgggcggcacaaaaacaaactacaacggcacaacagcaagcaccaacgggaggaaaaagcggagaaagcggaaagaccagcgacggcaagacgaaaacagggagcgggaggacaacgcccgaacagacgggaaccggccggcccaccggagcggaaaaaaaaaaaacagagcacgaggcaagaaacgaccacagcaccagccaaaccgccacgagaagggaanngnnnnnggaacccaatcctctcttggccccaaatcctctctgctctacgcctgcatgagggtgggatgcatcgatcatgcatga

SEQ ID NO: 30397 - DNA, 261 bp, Oryza sativa
  Clone ID: PAT_MRT4530_34805C.1
ctctctagcttctctatcctcctggtgttatccccattctgaactctgacaccgcggagggcatctaacccatctcgatggcggcgccgtcgaaaccgcagacggagccggagcccgccgcgggcggcgcggggctggaggcgctggaggggcttgcgctggacaccgctatcgccaaggccggggtgggccaggccgtggcgttagactgagccagtacacgcctctgtgatcgcgcggggaaacaaccacctgtggcgc

SEQ ID NO: 30398 - DNA, 294 bp, Oryza sativa
  Clone ID: PAT_MRT4530_34806C.1
atgtccatgtccccttcacacattggtgtccctcagcccttcaccgtattcgggccctaccggccttcacacacttggttgccgtacgcgacacagcacgccggcgtgctgcagcacctcgacatcggcgggaagcctgcgtgggttcttgtgcaaccatgtaggcagtgtgggcttcaagagtggagcggtggaggcggcacccggagcgtggtcaccaacaaggcggaggtatcaatgggtgagaagggctcaaggccaggagttgtgctgcttagcttgttacttgcctga

SEQ ID NO: 30399 - DNA, 341 bp, Oryza sativa
  Clone ID: PAT_MRT4530_34807C.1
cgtttcgcgtccgttgttgtcgtcccggtgaggtaagttcaagaggcagccctgtgaagctgcaatggctactacagctcatcctgccaagatgggagatacgaaggcccaagccttgacaggaggcaagtgctgctaagtctgggacagtctgaaacacgaccctgaagatccgcccatgcgaatcatcatatggccccacgacctgcaatgattttaaaggcgcatggtgccctcaagagatttatccaggttggtacactctgagcctgggcctgttcttcttgtataaccgctaccactcaatgctgctggggaggaaatcgaagacgacagcactt

SEQ ID NO: 30400 - DNA, 438 bp, Oryza sativa
  Clone ID: PAT_MRT4530_34808C.1
aaaattcaaaacaaacaggcggaatacttgggaaggattcattatttacattcgtatattacctgcctaaatccatggccactggggacctgcaaaaacaatacaacaccttgttgactgacgttagcacctttggaaccgatggggcatatactttataatttaccaagacagggaataggaaaaaatgaacatttgtttctgcatagcattttttcgtatgctgcagggaagttttttaccctcccagccccgaaaaacccacaaaataaacagaggattcctcaccgatttactacagtaagttcacaaactaaaatcagttcagcacaacacccaaatttcccacttttttggggcaaccattctgaatcaaacaaacaatttaaagccagggatttcttcttccttccttctgggggccaaatggcttcccac

SEQ ID NO: 30401 - DNA, 738 bp, Oryza sativa
  Clone ID: PAT_MRT4530_34809C.1
aatccaagttagtgacgaaaaactactatagtccttagtatacaggaaatacaaattttgcatctaagatttgtatccacaaggaagacaaaagtattcccatacattctaactccagtgtaaaatgagatattctcttttcttcagatcaagtagtcatctccatagacctttgaaaatgcatcaagcacatatgaattcctttcttcgatcattatacaaacattttcagcatcctgctgacgcatgcacttgatatacatatgaacaagtatagtttgcattaccacgttcatttcagaacccatcttgatgagatgagcgtgtatctgccttccataatgcaatagtccttggtaccggcaaaggcttaaaagccctgccaaagtgtatttgtcaggcctaatgcatgccagctccatttggcggtaaatatttatcgttgcaactggctgtccatctgctgcataacctgaaagtagggcattccaggaaataaggtttctctcattcatccgaagaaatagtagccgagcgacctcaatgcagccacactttgcgtacatgtcaataagctccgtttccaaaaccacattcatcttgtttatggtcttaatggcatgcccgtgaatttgccttccatactctttatacctctgactgccacagagcttaagaaggttaagcaaattatgcctgttatactttatgtttgcacaacccattttgccggaaaat

SEQ ID NO: 30402 - DNA, 292 bp, Oryza sativa
  unsure (1)..(292): unsure at all n locations
  Clone ID: PAT_MRT4530_3480C.1
ccgtctcctccttcctttcgcctctnatctaccccgtngctctcaccgtcgcgttattttttcgccccccatctttgaaccaaacagccaacctcctcctcctcctcctnctcctcctcctcggcctcggcctcggttcctcctccccgccgatcccgccgctataaatncctcccagccgngcggctcggagacgcgctcgcggctcgntcgntcgtggctgctctgttccacaacngncggcggccggagagggagggaaaggagatggaggtaggggggaggcgggggc

SEQ ID NO: 30403 - DNA, 1937 bp, Oryza sativa
  Clone ID: PAT_MRT4530_34810C.1
atgcgtgtaggtatctcggaattcccgtgtcgcatcagcggccgaccgcggcagaagtggaggaggatggagcgtttcgttgacgacctactcaggtctctcaagaagaacgccacgttaaagatagaatcaatatatcggatatgtaatgcttgcgtcaacccaaaaagaatacctgacttaatcgagaaagttcttgccacggcgatacatgaaaagttgatagaaattacttcctcattggagatcaaaaccaatgcagcccaactcaaaatcccacatgttggcaggagtgagaggagggaggcggtgggctggaacttattccgtaattacttgactggtcccattccgtcgttcatcggaaaatttacttcaatgcaatacttgtcattatctttcaatccactatctggactacttccaaaggaactaggaaacctcaccaatcttctttcattgggcattagctcagacaattttacaggaagtcttccagaagaactgggtaacttgaccaaacttcagcaattgagtgcatcagataatgtattcaaagggaaaatacctgcttatttgggcacaatgactaatttggtgggcagatggattggagatattataaatggggtctctccgttggcatttatcagtaatatggcatccctgagcacactaatattgaggaactgcaagatatctagtgatctcggagcagtagaattttccatgtttaaacagttaaaattgctgtttcttgggaacaatagccttacaggaaagttgccggatggtataagctcttcattaaaagtgatagatttttcgtacaaccaactcactgggagcattccttcttgggctagacaaaacaatttacagttgaatttggtggcaaacaacttcttactcgataccaccagtgaaagtacgctaccttggggaataaactgcctccaacaagacaccccttgtttccgtggatctccagaatattattccttcgcagttgactgtggcagtaatgcatccataagaggctcagatgacactatttatgaagcagatcctacaaatcttggagctgcaacatattatgttaccggtcaaacaagatggggtgtcagtagtgtagggaacgccatagatgcaaagaatattatatatagctcccaaccttttcaaaatgtagttgattcagagttgtttgaaactgcaaggatgtcatcatcatctctgaggtactatggacttggacttgagaatggaaattacactgttttgctccaattcgcagaattagcttttccagactcacagacttggctaagcttagggagaagagtttttgacatatatatccagggtgctctaaaacaaaaggatttcgatataaggaaaacagcaggtggaaaatcttttaccgtagttaataggagtttcatggtaactgtgtctaaaaacttccttgagatccatctattctgggctggcaagggcactgttgacatacctactaaagataattactatgggccaatgatctcagcattgagcgtcactccaaattttactcctaccgttcgaaacggcataccaaaaaggaaaagtaaagcaggtgcaatttccggaatattgattggtgcaatagttttagtattagcagcattatttggagtgtttacactagtaaagaagcggagagcattggcacaacagaaagaagaactatacaacctggttggacgacctgacgtttttagttatgctgagctaaagctagccacagacaatttcagttctcaaaatattctaggcgaaggtggattcgggccagtgtataagctggttataaatttatctgatttggcattgaagtgctgtgttttagcaacatttgtctatgctcaaaatacacatgtaaaaaccttggcagg

SEQ ID NO: 30404 - DNA, 203 bp, Oryza sativa
  Clone ID: PAT_MRT4530_34811C.1
tcggtagtagaatttccaaccccggatgggtcagatgtaccttcaacaaaaaacgcattggcccgggtcgcatagtaacaacactatcccaagggccgtccccgcattactcctgagaccaaagcatttgaaacggacgagctggagccttcattgaaactgcttggcttgatgctgcttactatacccctatggtctatgct

SEQ ID NO: 30405 - DNA, 1234 bp, Oryza sativa
  unsure (1)..(1234): unsure at all n locations
  Clone ID: PAT_MRT4530_34812C.1
atactggcacgaggctccaaccaaagatgagcaacaccaccatggctatcttccaccatccttctcttcctcctcgccggcctcgccgccgcccacggcgacggcgacaccatcatccgtctcccaagcgacggcgccaaagcaccaccacgcccgcccaaaccctgggactgctgcgacaacatcgagatctccccgctcgtgatcttcccgccactgtaccgctgcaacgacgaggtgaagcagtgctccgccgcctgcaaggagtgcgtggaggcgcccggcgacttccccggcggcgccttcgtctgccgcgactggttctcgacggtgctcgaccccggccacatgtgcacggcggcctggatcggccgacgacggagaggcccgtggaagtgctgtgacagcatcgtgcagcggctgccgacgatgctacccgccgtactggcgctgcgacgacgaggctggagcccggccagtgcaccgccgcgtgcaagtcgtgccgggaggcgccggggccattcccggggacgctcatctgcgaggacatctactggggcgccgacccgggccccttgtgcacgccgccggccatggggggattgctgcgacaaggccttctcgcaacaagatgaacccgccgacctgccgctgcatggacgaggtgaacaagtgcgccgccgcgtgcaaggattgccagcgtgtggagtcgtcagagccgcctcgctacgtctgcaaggaccgcttcaccggccagcccgggcccatgtgcaaaccccgagcggagaactagctagctacagatgatcgatgatcgatctgtgtgtccatcaataaaactcgccctagcttgcagctagctgatcgttcgttcgatcattcagagttggtatagctagaggctagagcttagctccatccagatttttcagtgctctgcagcttttgtgcatcttgcatgctttgttagtttgtgtgctccatgtgtgtgggtgtgtttaatttgtccctgttcgcttgtgtggaccaagagggaaaataaaatatatatgcaacgcaagcatgcacccatatagagttgtctcaatatcataaataagagatatgagcgagcgataaaaaaaaaaaaaaaaaaaaaaaaaaaaaaaaaaaaagttgaatagctaagtataaaagcataaaaaaaaaaaaaaaaaaaaaaaaaaaaagggggggggcctcgtgccgacnaccc

SEQ ID NO: 30406 - DNA, 201 bp, Oryza sativa
  Clone ID: PAT_MRT4530_34813C.1
tttttctctactttcaccactaaaacaactctggaatattgttactcagcgcagttcggttgggcccgcacctacctcaataaatgccatttctatcatgttcttatttaccaatcactacttcaggtgacaatcccatgaagttgaaaaaatggaccatcaccttgaggcaataacttgatttttatttatgagcagaac

SEQ ID NO: 30407 - DNA, 736 bp, Oryza sativa
  Clone ID: PAT_MRT4530_34814C.1
cttagcgaatccagcagcagaagctgctgccgacggcgacggtgatcgtgtacgaggtgctgaccccgatcgtcaccaacaccggcgactgccacgtggcgaacaaggtcgtcacgccggtgatcctggtgctctgcgccttcttctgcgcgttctcgcagttcacggacagctacgtcggcgccgacggcaaggtgaggtacgggctggtgacggcgagggggctgctgccgttcagcggcggcggcggcgccgacggcggggacgccgccggcagggacttctccaagtacaggctgcggttcggcgacttcgtccacgccttcttctccgtggcggtgttcgccgcggtggcgctgctcgccgacgccaacacggtgtcgtgcttctacccgtcgctcaaggaccagcagaagaaggtggtcatggcgctccccgtcgtcgtcggcgcgctcgccagcgtcgtcttcgtcgtgttcccgtccacccgccacgggatcggctacccgccggcgaagcccgccacggcgtcgctggcgtcgctgtaggcggcgagcccgattagtcgatttgcattgccatgcaggcatgtgcttcctttttatgggttgtgtttttttaaatatttgcacgtgtgcatatgtgttctgtctgatgcttttgttcgcatttgttcatctgtctgtttgtgacctaataaggccaagagctagtttgatctcgttgatttgcctcc

SEQ ID NO: 30408 - DNA, 179 bp, Oryza sativa
  Clone ID: PAT_MRT4530_34815C.1
ggggccataaactgcaaatgaaaaccattttgtcacttttttcaagccgtgcattatctaaaaaaagtttacgatgccttagggcttaggccgacaaaaacttaaaaccacccaccaagttaaaaacaaatttcaaaaccttcttgagacaaaattaaattgtaaagatagtgtcccac

SEQ ID NO: 30409 - DNA, 396 bp, Oryza sativa
  Clone ID: PAT_MRT4530_34816C.1
aggagtagtatgaccgaacaattttttttagaaaaagtaaaatttaatcaatagtagttggcgtatacaatttgccctgtggttgtttatatttggtatggaggcatggagccttatttaaatcctctgctttatctgaaaatatcttgtctgatcgatgtgggaccttctggatttggacagactagttaggactaaacaacgtcctgggacagaaaaccctacggttttggtcttcttgtggttagttccactgtccatttatgctgccagcggcctatcaccagcacacgaaccggtcgcacggacaaaacggtacaacttgctttgcctgaattctgaccggtcatcgtacacgtatcggtgaccaatcatagattctttataggtgaggga

SEQ ID NO: 30410 - DNA, 564 bp, Oryza sativa
  Clone ID: PAT_MRT4530_34817C.1
atggtctgtaagaatggtagttacctttgcaacgtgatatcaacaaccactggtcaccctgtgttctacttagcaagtccatgtggaagactggtgctaatgaagcttttgttggttgacttatccttttcttcccagttggcatcatactttgtcataatatgtgttatagtagctgtgttttattgcttcctgaagcaactggcagaattttctgatacagaccatcaaacagttcgggatcaagatgcaaggaacaatgaaacagaaccaattctaccaagaaaaagggtggttttcagctatggagcgacggaagagcagcctgagtcgagcatgtgctcttcagaagatatgtgcagtgagaatgtctgcaagatctgctatgatgctccacggagttgcttcttcataccctgtggccatggttttgcatgttttacatgtgcaaggaggatcgcggaagacaaaaatcaggcatgcccaatttgccgaaggctgatccacagagtaaggaggctggtggagcccttaggttcgtcttgtggtaaagactttcagtag

SEQ ID NO: 30411 - DNA, 3060 bp, Oryza sativa
  Clone ID: PAT_MRT4530_34818C.1
ccagagggggaacttcataaactcaacttctatcccatgatttcccgcaaaactcatggataagaatgaatgtgtagcaccagaatcgaaaagcactgttgcaggaactaagttaacaagaaacgtacccaaaatcacatctggagcatcttgagcttctgcagcagcaacatgattgacacgggcctttggcgctggtgcggtagagttgctctgggcagggacaaccttcacacgtcgaggcttcggacacttgtcagcgtaatgtcctgggtctccacagttgaaacacaccacgggcttgctgccttgctccctcttggcaggttgttgctgtgtcgaggctgcaacaggacgtggagcttgattacggatgttgttgccagcattgttgttgaagaactgacgctgcggacgaacaacagacgaagaacctccctgtggcatagactggggtcctaaagtaagacgcggcttctgattattcccctgttgtgtcttgaattgagcaatccggcgtttcttctgctccatgcgattgtatttgtcctcctggcgaatagccttatccactaacttctggaaatcatgataatctccagtcatgagtgggtaagaaagctcatcattaagtccttccaagaacttctcctggcgctcttcatcagtgcgcacatcttccggagcataacgagccagacgattgaactcgtgcagatactccgtaactgagcgagatccctgggtgagcgacctgaattccttcctcttgagagacaccactcccgatggtatatgcgtcttccggaaagcagcggtgaattcaagccaagtgataggttcagcagtagtcctattcaggcggaagtgatcccaccattcagaggcagggccatgcaattggtgtgatgcaaatgagaccttctcctgatcagtgcactgaagcaaatctaacttcttctcaatagtgtgcaaccaatcacctgcttccactgggttagtagtgctagaaaaggtaggtggcctcacacgaagaaaattagctaacttgttctgcggcggtggagcattgttgtttccttggttgagctggttctgcatctgctgtatcatcatgttcattaactgagtctgttgagccagaacttgagcaagagttgggttatcttcattattattgtttccacttccacggctcacgggagacggggacgatgacgtcagcgatgacgtcaccaccggcggcggcggctcggcggctcgacagctcggacggcgcaagctcaccggcgaacggcggtgcttcggcacgaacggagcccttttcgcctcctccgctcgttttcgccgctccccggccgccccctcgctcgttgggccgacgccgccatcaccgttgtagtggtcgtccttcccgcgtcgggatttaatacgcaaaatagtctggaaatttgggttaaatttctgggcgtgacaaagtggtatcagagccaactcgactttgttaaaccgtggaggataaaccgtcagcttcgtgtctgttcggaagtcaagtcaagcatcaagcttcatgcagcaaagagcgggaagcagatggtcagtgtgaggggcaatttcaacggatcaggatcccgtcagtttcatggatcaactcagctcaattctataagcttcccacgtcaacctctcaaagatcagccacaatcccaagtcatggctaatcagactcagacagtggaagagttgttacagcagatgcgacgtcggtaccagatctatctgatgcagcagatgcaacggcaatgtcaggagccgcgtcaagtccaccagccacaaatgcaagtccaggtgccagcccggaacctgaatcagagtcaggagttcccaatatcggcacctaagacccctgtcaaaatgatgtccagatccccgaagataacttcagccaactcaccgtcggaccaaaggaaaataagtgctacctgttatgactgtggtgagcaaggtcattatgtaaggaactgtccatggaaggtgtttgccaggtcacctgaaaaagacgagaagcagtgcccagggagtaaccaagctccaagtcagtctaccgacaagaaggatggtactttgcagcgcaactctggagcgaataggacagtgatatggaagatggataatggtaggaccatgatcatcaccggttcagaatttactcctgaagacgcagcaaggatacccaagcgtcggagaggaagaaataccttccgaggagcgcgtcagctaacccgtcatctcataaagtacggtccacccagacccgaagatgatgaatcaggagaacggttttctgctgatgacaatgacgacaacgatgatgataatgatgacaatgatgatgcgacccttgacagtttcagggaaagagagttgaagtgcaaagcatgtgctagatgtgggatagtcggacatactgctagtttatgcctccccacatgtcgctgtggtgaatacacccattactcagatgcatgccctttgaggaaggtcacatgtttcttgtgtgaaggaacagatcatgtgcctaaggactgtcagttgaacgcggtcctagctatgaccaagaaagaacaaggggcaaccgtgcaacccattcgtcaaccaatggtggtcgacaacaacagtctcaacccttctactctttcaccaaccacagctccagtggaagccaaccttggaagaagcaacgtcgccagggatgttcatgaatcactatgtgttccagtttcagctgccaaagtgcataatcagaagcctgcaccccgagacccagcaagtcgattctgtcgcaactgtcgtaagccaggacatcgtttcagtgattgtcctcttccaagagcagcaaaggcagttcgtcgtgattcccaagttaccagcactgcccatgacaccaatcgacacctgaatgtgcaacctccgcctcaacggattatcgtcaagggcaccgtcaaaggtcacattgttccaccggccatcgtttcaagcctacagcaccagcaccagtag

SEQ ID NO: 30412 - DNA, 1434 bp, Oryza sativa
  Clone ID: PAT_MRT4530_34819C.1
atgccactaaccttcaagactatggctgacaagaccctccgtgaattcgttgctccctctgctgacaacgtggccattggctcgcaaatcaacatgggagacgtggattttgatctgaagtctagccttatcacaatggcgcaggctagcccgtactgcggcaagcctaacgaggatgccaatgcttacctgcaacaattcctggagatctacaacacgtacactatgaaggaagtcagtcctgacgccatcaggctacggctgtttccagtttccctcctttggaacgcgaagcagtggttttatgccaactgtgctacaatcaacacctgtgacaaatgctctacggcattcttattaatgttcttcccgaggggcaaatccaacgcccttcgtggaagaatttcaagcttccagcagacgacggacgagtccattcctaaggcatgggaacgacttcaggaatatgtggccgcctgtcctcatcatggaatggacgactggcttatcctgcaaaatttttatattggattcactcccatgtctcgcgaccacctgaacatggtagctggaggagcatttttctctaagacggttcgagaagccatcgatttaatagagaaaatggtctccaatatgggttggagcgaggaacgactccagacccgtcagcgaggagtgcacaccatcaaggagatggagattcttgctgccaagctggacttcctcatgaaacgcttggacgaccatgacaagaggccacaaggcaccgtcaaggccttggactcacacgtcacgtgtgaggtccgcggcagcacgggtcaccctaggaatgactgcccggagacccatgaagaggcgatgtacatgggcaacaacaataatgggtatcgtccacaaggaggtcaggggtggaaccagccatgcccatattaccaaggagcccgaatcttccgtagaaatgttaaggtgatcataacgaggggaggtaagtctactcgtgatccgccatatcctaaccttacaaggactagcagtatcaccagagaagcaccatccggtaatacgactgacgaagaggttcagcaagagaagactatgccgcaggagtactacgacacccggttgctgccgtttcctgaaagaagcaggaaaccgtcagtggacgagcagttcactcattttgttgaagtaattcagaagatccatatcaacgtgccattgttggatgctatgcaagtgccaacatacgcgtgttatctcgaggatatcctcaataacaaaaggtcgcttccgacaactaaggtggtcaagctgatggagcagtgcagcaatgccatactccagaagctcctagaaaagaaggatccgggtgtcccacgatcacctgctcaatcgggacacagcaattcgaccaagccctctgtgacttag

SEQ ID NO: 30413 - DNA, 1135 bp, Oryza sativa
  Clone ID: PAT_MRT4530_3481C.1
tttttttttttttttttttttttttttttttttttgttgagaaaaaagatgacagatctatgatccgggcaaagatggaataatacaatgaatcaatgatgatgatgacagcaacataaaataaattaaaagtagatgatctcagtggtacagtacaagggcgggcaggcagcagctagcagagtcatatcgtgggcgtagcagagagaagaagaagaagaagaaagaaacaaaagaatccgaggcatggcgatcgctcaatcatcaaatgtggttgggagagtggtaaagccaaagccaaagctaaggtccctcctcctcctccctcccgtcccgtaaaagaatcgacgagcaaaatacagcgcaaaatgtggtggggcgcaccggccgctgccatctgcgtcgtcgtcgttgctcacgtcgttgcacgacgccgttttgcttaggcgaggagggcgacgaggccgagcgccacggcgcacgccgacgcgatcgcctgcacgctggtcctccctgcggctcccgtggagtcggcggcgacaccgtcgccggcggggccgggggcgtcggccgtggacgaggcggcgggggccttagccttcttggagtgcttgggggactcggcgacggcgacgggggccggggcgggggccttggagctcttcttcttcttcttggatggcggggagggcttcttcttcttggccggcgccggcgcgggtgcgtcgggcttggtggggatggtggcgggcgcctcggcggcgggggaaggaggcgacgcgacgggagcctcgaccgggggagacgaggccggcggcggggtggccttggccgccttgggcgccggggcgggtgccttggtggacttggtgggtggcgctttggtcggagccggggtggtgggcgcctcggcgggggccggggtggcgggggtggtcggcgccgcggcgggcggggtggaggcggcgggcggggtggtggtggtgggcgccgcggcgggcgcgggcgtcttcttggaggaggccggtggcgtggtggccggcgccgcggcgggggtgggggtcgccttctgcgcggacgcggacgccgcgacgaggcagagcagcgcgaggcagagtgcggctgcgcgcgccat

SEQ ID NO: 30414 - DNA, 1821 bp, Oryza sativa
  Clone ID: PAT_MRT4530_34820C.1
atggcccgcacaacggcaaatgcgacggcgtcgatggcacggctcggcgcggcggctagtggcgaccagagcagcggcggcggcggcggagaggagggcgacggcgctagggtgatagagagcatgggaggactcagcgaaatggggaaaaagagaaaggggatggcggtgcaattggtcagcatgagggacaatttcatcggatcaggatctcaacagtttcatggatcaactcagcacaactctatgagcttcccatgtcaacctttcgaagatcagcctcaatccaaagtcatggctaatcagactcagacagtggaagaattgttgcgacagatgcgacgtcggtaccagatataccagatgcagcagatgcaacggcaatgtcaggagccgcgtcaaggccaccagccacaaatgcaagtccaggtgccaacccggaacctgaatcagagtcagagtcaggagttcccaatatcggcacctaagacccctgtcaaaatgttgtccagatccccgaagataacttcagccaactcaccgtcggaccaaaggaaaataagtgctacctgttatgactgtggtgagcaaggtcattatcccaactctggagcgaacaggacagtaaaatggaagatggataatggcaggaccatgttcatcaccagttcagaatttactcctgaagatgtagcaaggatacccaagcgtcagagaggaagaaataccttccgaggagcgcgtcagctaacccggcatctcataaagtacggtccgcccagacccgaagatgatgaatcaggagagcggttctctgctgacgacgacgatgatgatgatgatgatgatgatgacgatgatgatgcgacccttaacagtttcatggaaagaggattggagttcaaagcatgtactagatgtgggatagtcggacacactgctagtttatgcctccccacatgccgttgtggtgaatacacccattactcagatgcatgccctttgaggaaggtcacatgtttcttgtgtgaaggaacagatcatgtgcctaaggactgtcagttgaacgcggtcatagctaagaccaagaaagaacaagggacaaccgtgcaacccattcgtcaaccaatggcagtcgacaacaacagtcacaacccttctgctcttcctccaactccagctccagtggaaaccaaccatggaagaagcaacgtcaccaaggatgttcataagtcactacttgttccagtttcagctgtcaatgtgcataaccagaagcttgcacctcaggaccaagcaagtcggttttgtctcaattgtcgtaagccaggacattgtttcagtgattgtcctcttccaagagcagcaaaggcagttcatcgtgattcacaagttaccagcactgcccacgacaccaatcgacacctgaatgtgcaacctccgcctcaacggattatcgtcaagggcaccgtcagaggccgcattgttccaccggccatcgtttcaagcctacagcaccagcgccagcagggtaagcaatgccaggagaacaacagctcgctacagttacaaaggggaggtacgctccttcgtcagcacccgcagcaagtgtcgccagcaccaggtcgctcgactattgtcagttctagcaatgcacctcgtattgctccaattcggaggtccatcggcaaatcaccgcttggtaaccccacgggcaagaagatcctacctgttacagctgtcaagacagttgccactccaccatcaaagattagcaagcagggcaacgttcccggtgaagcttcagctagtaggagttaa

SEQ ID NO: 30415 - DNA, 1087 bp, Oryza sativa
  Clone ID: PAT_MRT4530_34821C.1
atggaaacctggcctttagccaactgccaggcgacggactctcttagggtttgcctaaggattaaaactgagctccagaaggcagatttaggagtattaaggggcacatttcaaaaggaagtagtgcagaagtatagctcaaattaaggtcagtcaatggaagagaaagtaatgtaaggcaggtcattcaatagaatcattcaacaatagtattgcagtcttgcagtaatctagacaaagaaactttcacatttctccagccagccactggggacatcgcagggggatgcaaggtcatctggacaaggacgtgcatgccaaccaaacagggaggccttggcgtaccaaacttggcgaaattcacaagggccttacgactgcgttggttatggcatgaatggaaagagccgagcaagcattgggtgggcctcgagatgctttgtaatcgacaagaccctcttcgcggcagcaacaaacttctcaatcagtgatggaaacacaacccgcttctggaactcgccatgggttgatgggcgcaggccaaaagacgccatgccacttgtctacgcaatctctatgaagaaaagaaaatccttgcaccaaggaaagaagaacgacgcatgggtctgagatctagacctagaagcgaacccgctaatgtcgctcgagctaattgaccagcttttggctttgtggactatggtccacaacgtgcatttgagcgacgagtagccccatcagattaattggaagctcaccagtcatgggcactactcggcatctttagcttatgaagcccaatgttttgggcccccagcacaaccttcaacttgctgatctggaaggtttgggcgcctgggaagtgcaaacttcaggcctagcttatcatccaaaacagagtgtggacctctgacagactcgcgaccaggggctggcagaataatggatgttgtcctctttgcataagagaggttgaaatggcactgcacctcattgccgaatgtcactacttaaaaaggatttggaccttcgtagccagctgggtgggaaaccaacatcttgaacttgggcactatgggaggccgct

SEQ ID NO: 30416 - DNA, 2348 bp, Oryza sativa
  unsure (1)..(2348): unsure at all n locations
  Clone ID: PAT_MRT4530_34822C.1
atggggcaactcagtgcaattctaatagtattccacgtcagcctcttgaagatcagcctcaaccccaagtcatggctaatcaaactcagacagtggaagagttgttacaacagatatgacgtcggagttcccaatatcggcatcgaagacccctgtcaaaatgctgtccagatccccgaagataacgacagccaagtcaacgtgttcgccaggtcacctgaaaaagacgagaagcagtgcccagggagtaaccaagctccaagtcagtctaccgacaagaaggatggtactttgcagcccaactctggagtgaacaggacagtgatatggaagatggataatggccggaccatgatcatcaccggttcagaatttactcctgaagacgcagcaaggatacccaagcgagaacggttttctgctgatgacgatgacgacaacgatgatgataatgatgacaatgatgatgcgacccttgacagtttcagggaaagagagttgaagttcaaagcatatcatgtgcctaaggactgtcagttgaacgcggtcatagctaagaccaagaaagaacaagggacaaccgtgcaacccattcgtcaaccaatgacaatcgacaacagtggtcacaatccttctgctcttcctccaactccagctccagtggaagccaaccatggaagaagcaacgtcaccaaggatgttcataagtctctgcttgttcccgtttcagctgccaaagtgcataatcaggagcctgcaccccgggaccaagcaagtcgattctgtcgcaactgtcgtaagccaggacatcgtttcagtgattgtcctcttccaagagcagcaaaggcagttcgtcgtgattcacaagttaccagcactgcccatgacaccaatcgacacctgaatgtgcaacctccgccccaacggattatcgtcaagggcaccgtcaaaggtcgcattgttccaccggcaatcgtttcaagcctacagcaccaacgccagcagggtaagcaatgccaggagaacaacagctcgctacagctacaaagaggcggtacgctccttcgtcagcacccgcggcaagtgttgtcagcaccaggtcgcgcaactgttgtcagatctagcaatgcacctcgtattgctccaatctggaggcccatcgacaaatcaccgctcggtaaccccacgggcaagaagatcctacccgttacagctgacaagacagttgcccctccaccatcgaagatcaacaagcagagcaacgttcccgaagtagagggtgttctaacacaaagcggaacttctcccgattacaaggttggcaacagaataacagacatcagccaaaaaatggttgaagaactaaaggagtctgtgaaagaagagcaggctgagaaaaaggaggaggcagccaaggagaagccagatgaaccacaagagatcgtactgaaagtcgacatgcactgcgaaggatgtgcaaagaaggtcgagaaatccctcttgagatttgaaggagtcgaaaacgtcaaggctgacagtcgatcgaagacggttgtggtgaaaagcagggccgcagatccctcaaaggtctgcgagagggttcagaggaagacaaagagaagagttgagctgattttccctcttcctccacctccagaagaggagaagaaagaggaggctccagcaccacctccagaagaaaagaaagaggagccaccgaagacaataactgtcatcttgaaggtccagatgcactgcgacgcttgtgcgcagattctgcaaaagcgtataagcaggacagaaggtgtagaatcggtcgagactgatctcctcaacggcctagtggtcgtcaaaggggtgatggatccggctgtgctcatcgaaagcatccagcggaagacgcggaggccggcagtcatcgtcgaagaggtgaagccgcgggaggaggagaagaaggcagaggaggaagagaagaagccagatgaggataagaaggccgacggcatcgaagatgtcaagaagtatgacttctggccgcccgtccagtactatgtcgagtacgtctacccatacccgctaccgccgccaccgacggcactggtgtccgaggagttcaatgacgagaacccgaacgcttgcaccgtcgcgtgataccatctgaagctgttcttttgcttagacggtggtttctatgctagaaatgcatgctgatatggtaataaaatgagtggttttgagaacttgtacaagattgtgttattaagtatcatgaaaagtgagctcgcattgctcaattgactaaaaaaaaaaaaaaaaaaaaaaaaaaaaaaaaaaaaaaaaanaaaaaa

SEQ ID NO: 30417 - DNA, 1190 bp, Oryza sativa
  unsure (1)..(1190): unsure at all n locations
  Clone ID: PAT_MRT4530_34823C.1
ataaaaacctgaagtcctacacatgatatcagcacacaaaaaacgaccacaccaatttcacaggattcagagcacatccaacccaccacacagcctacgggaatggttcatcaccttgacgactgacgtgatgtcgcggagtgggctcctcgggtaccactcgggcagggggctcctcctcttgggttagaatcacctaactatggtggaatagatccctagggtttggagcttggaggtggctatggctatggctatgggctctaactaacgggagggggggagaccaggaaaggcggcgcgtgggcggggggattcttatcgcgttttgaaatggccggtgcacggcgtgatccgtggaccgagagcagcatctcgccgtccgtaggagggatggacggcggggattgttccggtgtatggaccacgttgtggagcagatagaaaaagaaaaaaaagacgaattacccctcgaactattatggtcgtccgaattacccctctaaaccataaaaccgaacatcctttacccccaactatgcaaaccggatgaattaccctcctcgacccaatctacggtggttttggtctacgtagcgtacgcgtggcagtccagaagaacgtggtgncgacggtgtgcggncggtggcgaagcgcggggagnacgcancggtgaggcgagcgcggcgacggaggaggcaagggggcggcggaagagcgcggtggagtcggagtcctccacctagcctactccgccctagccgccggagtgctcgtctcccctccaaggccgcagcctcctccgccgccgccggctctcctcgcctcacctcgccgccgcagcctcctctgccgcagcagcctcccctcgcctcacctcaccgccgcagcctcctccgccagtgctcgcctcctccgctgccacagcctcttgcgccgccgtcacctcgcctcgcctcacctcgccgctgcagcctcctctgcctctgctgcggcatgtaactcgaaatggcttgctgatcatgatgctgggcaaagcttcgtcttccacctgtgcaatatcctcatattaactctacttcttagcctagctcttagcacttgcatatcgtccgccgaagagcagtatgtatatttacccaaacatatagactgatcagccctgatcaacgtgctcaacacatccaaaa

SEQ ID NO: 30418 - DNA, 458 bp, Oryza sativa
  Clone ID: PAT_MRT4530_34824C.1
cccgggctgcaggaattcggacgagaggagcttcatgttttcctacctggagcaagttgctgatagggtagacacacgtgaggaagatcgccttcttgatgctgttagaaaattggctacccgggctgaacatcttcaatgggcctctgaattttcccggagatgcgaagtaacctctcaccttccctatattcgtgagatgcaccattgtttcacaatagtggcacgacatcgtagtcaacaccttgttgatattagttataattataagtttttgaaaatatagttacctgatggtaacaaatattcaacctttcaagtttgcagttggacaatactataatgaagacaaacataactatctgtttcttacattgaagactgaactgttgcacacatactccttcatggtgtgtgcacctgatcctaagtcagaaatgccttcctcacttgttgtt

SEQ ID NO: 30419 - DNA, 616 bp, Oryza sativa
  Clone ID: PAT_MRT4530_34825C.1
ccggggatcgccgtggacagaaacggcaacattatcctggtggctagccataacctggtggggggagctggagctagcttgggggaatttgcccaaattttgcaacagttgggggcggtgaatgcgttgaatttagatggcggcagttccacctccctggccctggggggtcagttgctggatcgatcgccagtgacggcggcccgggtgagcaatgccattggcgtgtttgttcgttaaataatggttgtgccgaccctaatcaatgctgagggggtccacgtcaatatccaggtaaacggagctagggcaaatttgtttaattctctccagcggcaaaattactttgatgaagctgggatatttaactaacaactgccagcgataccgttgggcaatgcggagaatactggccggggcgggtcccaaaatctccacggtcttgggtaaaagttgttcacacaaaacggcgatcgcctggatcgttttttccacctccctttcattggtccccagacaacggagcaaaattaacttgccgtaggggggataatttaacatttcccgtaagagtaactcctgggcgataaaaccatggtaattgtgggttttaacg

SEQ ID NO: 30420 - DNA, 1521 bp, Oryza sativa
  Clone ID: PAT_MRT4530_34826C.1
atgtcaggagtcacgtcaatgtcacccaccgcaggtgcgagatcagatgccagcccggaacccgaatcagagtcagagtcaggagttcccaatatcggcaccgaagacccctgtcaaaatgctgtccagattcccgaagataacgacagccaagtcaacgtcagaccaaaggaaagtcattatgtaaggaactgtccatggaaggtgttcgccaggtcacctgaaaaagacgagaagcagtgcccagggagtaaccaagctccaagtcagtctaccgacaagaaggatggtactttgcagcccaactctggagcgaacaggacagtgatatggaagatggataatggcaggaccatgatcatcaccggttcagaatttactcctgaagacgcagcaaggatacccaagcgtcagagaggaagaaataccttccgaggagcgcgtcagctaacccgtcatctcataaagtacggtccgcccagacccgaagatgatgaatcaggagaacggttttctgctgatgacgatgacgacaacgatgatgataatgatgagaatgatgatgcgacccttgacagtttcagggaaagagagttgaagttcaaagcatgtgctagatgtgggatagtcggacacactgctagtttatgcctccccacatgccgctgtggtgaatatacccattactcagatgcatgccctttaaggaaggtcacatgtttcttgtgtgaaggaacagatcatgtgcctaaggactgtcagttgaatgcggtcatagctaagaccaagaaagaacaagggacaaccgtgcaacccattcgtcaaccaatgacaatcgacaacagcggtcacaatccttctgctcttcctccaactccagctccagtggaagccaaccatggaagaagcaacgtcaccaaggatgttcataagtctctgcttgttcccgtttcagctgccaaagtgcataatcagaagcctgcaccctgggaccaagcaagtcgatcctgtcgcaactgtcgtaagccaggacattgtttcagtgattgccctcttccaagagcagcaaaggcagttcgtcgtgattcacaagttaccagcactgcccatgacaccaatcgacacctaaatgtgcaacctccgccccaacggattatcgtcaagggcaccgtcaaaggtcgcattgttccaccggcaatcgtttcaagcctacaacaccaacgccagcaaggtaagcaatgccaggagaataatagctcgctacagctacaaagaggcagtacactccttcgccagcacccgcggcaagcttcgtcagccccaggtcacccagcagttgtcagctctagcaatgcacctcgtattgctccaatccaaaggcccatcggcaaatcaccgctcggtaaccccgcgagcaagaagttcctacctgctgcagctgtcaagagagttgttactccaccatcgaagatcaacaagcagagcaacattcccggtgagacttcagccagtaggaattaa

SEQ ID NO: 30421 - DNA, 2092 bp, Oryza sativa
  Clone ID: PAT_MRT4530_34827C.1
atggagcggggcgggccctgcgacggcctctgtcgcttccagattcacctaggcacgagaggggactgcccgttgcccgctggggacggggaggaccagccgtcaacttcatgtctgttcggaagtcaagtcaagtcaagcctcaagcttcatgcaaggagcgagaagatcagttcaaagtcatcgttccgcgaagatcaagtgaatgcaattctaatagtattccacgtcagcctcttgaagatcagcctcaaccccaagtcatggctaatcaaactcagacagtggaagagttgttacaacagatgcgacgtcggagttcccaatatcggcaccgaagacccctgtcaaaatgctgtccagatccccgaagataacgacagccaagtcaacgtcagaccaaaggaaaggagtaaccaagctccaagtcagtctaccgacaagaaggatggtactttgcagcccaactctggagcgaacaggacagtgatatggaagatggataatggcaggaccatgatcatcaccggttcagaatttactcctgaagacgcagcaaggatacccaagcgagaacggttttctgctgatgacgataacgacaacgatgatgataatgatgacaatgatgatgcgacccttgacagtttcagggaaagagagttgaagttcaaagcatatcatgtgcctaagaactgtcagttgaacgcggtcatagctaagaccaagaaagaacaagggacaatcgtgcaacccattcgtcaaccaatgacaatcgacaacagcggtcacaatccttctgctcttcctccaactccagctccagtggaagccaaccatggaagaagcaacgtcaccaaggatgttcataagtctctgcttgttccagtttcagttgccaaagtgcataatcagaagcctgcaccccgggaccaagcagcaatggcagttcgtcgtgattcacaagttaccagcactgcccatgacaccaatcgacacctgaatgtgcaacctccgccccaacggattatcgtcaagggcaccgtcaaaggtcgcattgttccaccggcaatcgtttcaagcctacagcaccaacgccagcagggtcgcccaactgttgtcagttctagcaatgcacctcgtattgctccaatctggaggcccatcgacaaatcaccgctcggtaaccccacgggcaagaagatcctacccgttacagctgacaagacagttgcccctccaccatcgaagatcaacaagcagagcaacgttcccgtcaacaaggtatatggcatagaatctcttttcaacaaatcatctttaccgaagatatggatgcgaagtggttatgatcaaagagcagaaactctcggcagcatcaaacgcccaggccagccgcgcctcgtccgctgcttggtcttcgtcttccgccgctccaacccatcctctaagttcgccggtcaagagcgaccccgtccgccctccgtcctcgcaagccgccatcaggcaatcgtcgtcgccgtcatcttcctccgcgccggccgccgcttccggccgatctgggccgtccacgtggtggacacgcacccgaggccacgtgtggaccatgtccaccgtgcgccctccccctttgagtcgctgacatgtggggcccgcgtgtcggcgccggccgccccttgctgacgtcagcgaggtccatttccgtacttaccacaagccagcgtgggcaacggctgggcttgtagtgtagctttcctctagtcgacgcatccaggcaagggtgggcgtgatggagtttggatgggccctgcgacggcctatgcggcttccggattcacctaggcatgagaggggactgcccgctgccttgcgaggagtgggggtgaaacctgaggtgtggtgtacttggttagagggggttatgcgaagggtcctgtcacggcctctttccgacgtggatctgtatgtcaactttgtcgtttgtgtaccccggccggtcctggacggggactttaatgcacattctgcttggaattctattcgggaatttctgggcgtgacaagcgcggagggaagggggtctcatctggca

SEQ ID NO: 30422 - DNA, 405 bp, Oryza sativa
  Clone ID: PAT_MRT4530_34828C.1
atggggttcggggaagggatccttggggcatgccttgtggaggtccgtgtagtcgatgcacatccggagcttgccgttggccttggcgacgaccaccgggttcgccagccaccctgggtggatgacctctcggatgaaaccggcctccaggagtcacgtcacctccttgtggatgaaggcttgccgctccggggcctagcgccgtaccttctgccggacgggtcgcgcgtccggtcgcacggcgagacggtgaagacgtcggagttctcccgcaggaatgagacgagcgcgtcttcctatttggcatccaagttcgagccgctgtggagcgtaataccctactcctgtgtgtgggttgatcttcgaattgttacagggaactcaaatcctaggagaaacaactag

SEQ ID NO: 30423 - DNA, 1314 bp, Oryza sativa
  unsure (1)..(1314): unsure at all n locations
  Clone ID: PAT_MRT4530_34829C.1
gcgcggctctctcctcctcctaaaccgggcagcttctctctctcgcgttgctgccgcgcgcggggcacacagtccggctagtgtcgccattgccattgtcttggaaggaggttggttagcatggctcgcgtgtcggcggcggcggttgccgtgctggtggtggcgttcgcggcggcggcggcggcgcaggagagctgcaacaccgagctgccgggcgtgctcgtcggcaactactccggcctgaattgccagccggtctggaacaatttcgtgctccggtatcaccaagacaagaacaacgtgctgagggtggtgctgtcgacgatgtacagcacggggtgggtggggatggggttctcccgggacggcctcatggtgggctcgagcgccatggtcgggtggatcgggcggaagggcctcccgcacgtcaagcagttcgcgctgcgcggcaagacgagcggcaaggtggtcgtcaaccgcggcttcctcgtctccaactccaacaaccacgaccacaccgtcgtggtgcagcaggccaggatctacctcgcgttccagctccagttctcctaccgactcacccaccagcacatcatcctcgccttcggctcctccatccccgtcaacaacaagctcaccaagcaccaggacaagacatccttcaccttcgatttcaccactggtaaagctttcgtggacgggtcgttcccctacggtctgaggagggcacacggtgctctgaacctgttcgcgtggggcgtcctgatgccgatcggcgccatcctggcgcgctacttccggcggatggaccctctctggttctacctccacgtcggcgtccagttcgtcgccttcatcatcggcctcgccggcgtcgtcgccggagttgccctctacaacaagatccaggccgacatcccggcgcacaggggcctcggcatcttcatcctcgtcctcggcatccttcagattttggcgttcttcctgcggccgaacacggactccaagtaccggaagtattggaactggtaccaccactggtcgggcaggctggtgctgttcttcgccgccgtcaacatcgtgctcggtatccacgtcggcggcggggacaactcgtggaagatcgggtacggcttcaacctcgccatcatcctcctcgccgtcatcgggctggagttcatgctgcggacgaggtggtccaaggaaagcgagcccacgccgacgtactaggcgcggcgccgcgcgccgccggctatcctccgggccccaagcttacgcgtacccccagctttcttgtaccaagtgtcnatatga

SEQ ID NO: 30424 - DNA, 610 bp, Oryza sativa
  Clone ID: PAT_MRT4530_3482C.1
cggcacgagctcgtgccgaattcggcacgagagatcaaccacaccaaattaatcgggctcagttcatcgcaaatcgatcaatcgatcaacatgtcggacaagtgcggcaactgcgactgcgctgacaaaagccagtgcgtgaagaaaggaaccagctatggcgtcgtcctagttgacgccgaaaaaaccacttccaaatggctgaggaggtcggctacaaagaaaacgacaggcgggtgcaagtgcaccaccggctgctcctgcgccgggtgcaactgcggcaagtgatgaacaaagctatcctctgcaacctggccccacaatccagtgtgtcttccgttatgcgcccctgcgtgcatatatatgcatatgcctgcctgcctgctaaataatgtttcgtgtggggtatgtgtgccatgggacttgctataatgggcgttataacctgcacctttgggtgtttatatgaatgaacgtgtcctgggatgggaggatgaacctgtggtgttatatatatggagtatactgatatataacttaatgggtgtgcttgtaaaaaaaaaaaaaaaaaaaaaaaaaaaaaaaaaaaaaaaaaaaaaaaaaaaaaaaa

SEQ ID NO: 30425 - DNA, 1423 bp, Oryza sativa
  Clone ID: PAT_MRT4530_34830C.1
atgggggtcgcggcggcggcgggccggctcctggcggcggtggactgggagcctcccctctcgatccttcttcatccagcttcgcggccggcgcggcggaggagagatcgatttcttgctcctactcgattcggcctccggcggcggatgggggtcgcggcggcggcgggccggctcctggcggcggtggactgggagcgggaggtctacccggcgtaccgcgacttcttcgcgctccccttgttcgccgtcttcttcctcgtcgtccgctacctcctcgacagcttcgtcttcgagtggattggaagaaaacttatatttggaaaggaaaaggttgattatgagaaggaggaaacaagaaagaagataagaaaatttaaggaatcagcttggcaaatgtgtctatttcctatctggagagattttatctttgtcagttacatataatgagccacatatcccaaacactcacttatgctttgggaaaccaggcgttcagattttggcgtgtcaatgtcacaaaattttgcaactgttgcgctgatatatgtatcttatgtgttcaggtttgctagagttggctcagtagtattggcaattcatgatgcaagtgatgtgttcctggaagtagggaaaatggccaaatatagccattgtgatttgcttgccaatgttgcatttcttcttttcgtcgtttcatgggttcttctccgtctcacatattttccgttctggattctcagaagtacaagctatgaagtcttgttgaccttggacaagaagaagcacaattttgatggtcctatatattactatgtgttcaattctctcctattttcactacttgttcttcacatatattggtgggttctgatatatcggatgcttgtgagacaaatcaagacaagaaatgttggagatgatgttcgatctgactctgaaggtgaagacgagcatgaagattgattgctgaaccatctggtttctatcttctcatgatgctaggaacgccaatatctcagcttatgatgaattcttttcctggatgagggaacatgtgcagattgtttggatatgagtattattgttcatgcgaattcgctacagagccgagcaatcatttcctctgtcccggtaggatatttgtgtgttgatgcattgtatgcacgagaggtcgcactccgaaccttccctctggctgatcatcacagaagatattctttgacttctcagttcttgtagagattgaaatgtaccgaaaggtgtaccagtagcgaaaatgtagtatataattccagaaatgcagtctacatatactaaaaccctttcttggtcatttgtgtaagatacgtataccatatgaccattatatgaaattgtgtactattactatcgttctatcagtattaaactacattacagc

SEQ ID NO: 30426 - DNA, 805 bp, Oryza sativa
  Clone ID: PAT_MRT4530_34831C.1
ggcacgaggtgtttaactgactagtattaggcattgtgatttgcaaaagcttcattctgtgcaagactttcgccagttagcctcaactgagcacacactttaataattactactgttaagcgcttgaatgagtgtagggactgaaaaaaaagttggcagtaacacgcataccaagaaaatgaaagcaagggggggggggggggtgttggcaggaatggactgatgaaaatgtgagggagtgaggctatttctggtttactctttgtgtagttgatttcaacaggtgggtcaactaaagatagtgttgcaactaaaatgctaaatgagaattccaatgactcgtctctagttaatgcttactgttggctgcttgttattgcctcctctaggtgctatgcatgacctgtacatgatattttctcccctcataagaaaactcatccttaagcagcacttcaggtagcaatgtgcagcacatggtgacctgtatttctgcgggttcaatattttcatgggactacctaaaaatcattcgccacaaaacagagccaaacgcagtcggtttttttctcagtcgctaatccatacctaacgactcagtggacatccaactatgtacacactttgatgattaattaggaactagtacatactttatttcttaaaccatatgattataacactatataacattcaacacattagtaaaaaatacaaagtaaatatcatgtaactatagtgtaagtgttatctaattacattataaccgtagtgtaagtgctatgtaattacattgtaactatag

SEQ ID NO: 30427 - DNA, 419 bp, Oryza sativa
  Clone ID: PAT_MRT4530_34832C.1
ttggaactttatctgagagtccctgaaggactcaagatcccaaatccgaaaggaaattgcaacatctatattgttcgcctgcagcggaatcaatgtacggatcaaaacaatccggaaggatgtgattcaatcaattaaatagatatcctcctaaagagaggtttcccaaacaattatgattgtccccctgtgtttataaagaaatccctgaatgcattttgtatcatctcggtctatgtcaattatctaaatatccttggcaccacacaggacattaaacaagcaatggcttatcttaatattgagcttgagatgaaggacttggggaaagcctagttctgcttgggcctattgctcaagcatctccctaaaggagtgtttatggaccgtcttatatatttgcataaaattttgaataa

SEQ ID NO: 30428 - DNA, 238 bp, Oryza sativa
  Clone ID: PAT_MRT4530_34833C.1
tgtgtgtttgcctcttgtgggagggagaggcgaagccgcgaagcaggcagagccggcggctgcgcgtgccagccacggcgaggctcggcggcggcaagccccggcggccggccgagccgtgcggcggcggcggcgaggcgcggctgcccggggggaggcggcgggcggcgcggcagcagatcgggacgcgcgtcatggcgtggtggcgcgccagggtcgtcgtgcccgtgcgccgtgc

SEQ ID NO: 30429 - DNA, 339 bp, Oryza sativa
  Clone ID: PAT_MRT4530_34834C.1
atggatgcagagtactcagcattaatgaagaatagaaccggcaccttgttccttatcaagaaggggttggagtctacaacaactggatgttcagaatgcctcttgtatggagtgatagaggaggaggtgtacatgagacaacccccagatttcgcgctgaaagatcttggagagcttcattatttcttggcattgaggttaacaagatgcaaattggctaggtgtcttgatgaccggcggtccactggagggtttgctgtttatctggctccaatcttgtgtcatggagtgcaaggaaacaagctacagtctccagtccagtacagaagcagaatataa

SEQ ID NO: 30430 - DNA, 183 bp, Oryza sativa
  Clone ID: PAT_MRT4530_34835C.1
atgggattacgtgggtggagcggggcgggggtgtggtgggtggatcctccacgtcgcctcagcttggtctgtgtgtactgtatcaacggccaaccggcaaccggtgaagccgtcaatactcaagacagagaccccaacgtgtctgcctctgtgcgcgccaatgcctggaggctgcccgccact

SEQ ID NO: 30431 - DNA, 996 bp, Oryza sativa
  Clone ID: PAT_MRT4530_34836C.1
cccgcgcagcctccgctcgaggagtgccagcgtctcgccgctgtcgccgaacacgctggtggtggtggcgctcgccgcgccgccggtgccggcgaacatggagcgcaggagcagcgccgtctcgccggccgccatgaggctcaagcaatggaagtccagctcaatgatcagcgagaagcggcggcgcacctcgaggtcgttgcagacgtgctgcacgagcgtcgtcttcccgaggccttggcggccaactatggagaggacggcgagctctgcccccgccggctcgccgccgccatcgccgtcgctgtcatgcagcaagaagtcgaagacgcggcgcctctcgacctgccggccaaacatctggttgtcggcgtagatgttcgtgttcagcggccggtgcagtgccggcgggcagctctgcagcatcgtgatgaacccggtgagatcgccggagacgctctccaggtcggcaaggacgccgtcgagctccgcagccgcgccgccgtcccagaacaccagcctcctcgccgcgacgcgcagccgcttggccgggttgagcgggttcgccaccgccgcctcgccgcgcccgccgccgtcgtgatccgtcgccacggggaacgcgtcgaggaagtagcggccctggagcgcgccgtcgacgagctcggagagccacgcgaggagcgcgcggccggtgatccgcctcgcctcggcggcctccaccgcgctctcgatcctgacgacgaggcgccgcagcctgcgcagcttctcctcggcgtcgccccgccggtcgcgcagctggccggcgacgagggacatgagcctgccgaccatgtcggcgacgacgccggagacgatggcgtcgctggccatgtgggaattcgaaggtggtggaaacgagctcaacggctcaaatctggtgcaaagtcagacgggattagactaagcacccattatatgattattatatcccacttatttggaaaaaaaaaaaaaaaa

SEQ ID NO: 30432 - DNA, 1662 bp, Oryza sativa
  Clone ID: PAT_MRT4530_34837C.1
atggcatcatccaagtcgttgtcgttcccggtggcggcggcgtccaagtcgttgtcgttcccagcggcggcgcagagcaacaagggaacgccggcggcgcggaagaggataaagtccggtggcggcgcgagagagaaaaaagagaacagcggtggcgcgagagaggaacaagggaaggatgacagcgtgggagaggaacaagtccagcggcggcgtgatggaagacggcggcgccgcgggacaggactaatggagatgcgggagaggcaaattctagggtttctgagcatctaccgtctgctctctctatcattggcacgcggaattacattactgcccttccacctacattcaacacgaggtaccgcatcagggttagaactggtaccccgcagtaccaatctctgccagccgttggatctgcccggatccaacggtcgagaatcggtaccgcaagcaagaagcttggtgctctccaacgaagacgacttagcactggagagagaactcatgatgcttaacaagccctatgtgaaatctttcaaggatagctatggtgtagtttttgattgcgtggacatctacagacagcctgcattcgatcatcctcttctcaagaatcacaaacttcagattccaccgcgctcatactccaaaagtttgataactcattttggtctgcaagaaagttgccctgatggaacggttctcattcgaaggactctcaaggaggatctcctaagggcacgcgcgtttcgtggaccgttgaaaccacagaaagaccaatcatttacgccaatgagttacactagtacaattcctggacaacatttcgccctattgttgatcaacagcgaagaaggctcaaaattccaagctacgggcgcagtgctcgaggtgtatccgctcaatgttcaacagggccagtcttcgtcggctcaaatactgcttgttgatgatagctccaacgcagttagtgtcatacaatctggatggcatgtcgatcctgaccgcgagagcgacacccagacacgattggtgacttattggacggccgatgactaccacaagaccggctgcatgaacatgctctgcccaggctttgtgctgctgagcagaactacctctcctgggatggtacttacaacaggatctattcctctgaatatgaccaaggtgatcaatgctgttcatcacattgcactgaacctttttaatgttaagaaaggggcctgttcagtttgttgccaaaatcaaccttaccatttgttggtaaagccaaattttagcaatgccaacattttggatatccaaaccgggaactggcaggtggtggtcggtgacgaggtcgtgggctacttccccaaggagatcatcaacgggatgagcggcgggacggaggtgcagatgggagggatcgtgtacgcgtcgccggggcagaagagcccacccatgggcaacggcatccagcccgtgcacggcggcaactaccgcgccgccaggttcacgtgggtggcggcccaaggcgccaggatcgccaactggacggtggcgagagatgtcgccgacatcaacatctacgacgccacggtcacctcgagctcgggaacaggcccggagggagctgtgttcgaatatggcggtcctggaggccagccgtga

SEQ ID NO: 30433 - DNA, 333 bp, Oryza sativa
  Clone ID: PAT_MRT4530_34838C.1
atggagcttgaagcaaagcttaatgaccgagatttgttccggtccaaccaaaagtatatggaggcaccggtaccttacgtgatcaagccaagatacgtatacagtgacgccgtgtcggacttactcgcgtatcgtggccagcagtctctcactaggcagccatgcagtcacgtccgcagcggaggaggcgcatcgcatgatgcggagtcggagggaggcggcatgcgatgggcgctggtgggggaggggagggggagctgcgccgcctgtggggaaagcggaggggaaggggagcgacccacggaagcctcgtacagttcagagcttatgtaa

SEQ ID NO: 30434 - DNA, 337 bp, Oryza sativa
  Clone ID: PAT_MRT4530_34839C.1
tagatggccaagaggcccgaggcccgaggcccgacggcccggcccatggcacggcattttggcccggcccaagcacggcacggcccgacggaggtatgggccgtgccggccccgcccgaccaccgggtcgtgcctgggcccctccactggcatgttgcgccggcccggcacgatcggtcggcccggcatgatgggccggcagctaggcccgatacacaaaaaaatgcccatgggccggcacggcccggcacgcagtgcctatcgggccgtgccggcccgatggctgctgggccgtgccctgccgtgcctgggccgggccaggccgggcgagcccttt

SEQ ID NO: 30435 - DNA, 326 bp, Oryza sativa
  unsure (1)..(326): unsure at all n locations
  Clone ID: PAT_MRT4530_3483C.1
aaaccaactacaggggccccatcngnaaaatccactttttgcncntggcnctgnnaagngcagacgcgacggggtncccttcgaagnaanngggacacgtccgnatngtncacatcngngagatggatcgngcttcaccgantaccctgcctgcggatagcgtggaccaagccaccgggggcncctccaaagacatgggaatcganggnngatccagcccctgcgggcggcccnacgncaggtntatttnagancnatcgngaanantggcgnccncgncttcttccacngaaggggctnccgcanccaggcgcgcggaccccacc

SEQ ID NO: 30436 - DNA, 355 bp, Oryza sativa
  unsure (1)..(355): unsure at all n locations
  Clone ID: PAT_MRT4530_34840C.1
aaaaanatgcaagtacttgaaactccattccagaggaccaaatggtgccaagttggaatagtaacattgaggtttttttctgatcactttttaagcatgacaaaaatagggggaatcacattgttttgtaagggacataaacaagattttggaacaaatgattactttcattgcaccaaatgggaatgtccctaaattttaaacccttttaagccgaagggttttgaacctccccttgggaatttccttgttgaaaatccttggggtccttgccgtcgccggggcccccaaccttgacgcaggtccaaaggttttctttgacgggcccggccttttttttggccttggacctgtt

SEQ ID NO: 30437 - DNA, 290 bp, Oryza sativa
  Clone ID: PAT_MRT4530_34841C.1
ggaaagcctttcgcgggggcaacttgggttaacaccacccgtagggaatgccgttatctcttatgagtccagaaccaagcttgtccttggcgaaccttaattccaaaccgccagctaatttgggtccttggttatggttaacctgtgttaacttttggcgttggcattgtggttttgggcaccggcaaccaagggttttaaccgagaaaccaccttcacacaataacctgatatcccaatggccttactggaaaaactggcctttttgaagaagccgttttcctggccct

SEQ ID NO: 30438 - DNA, 164 bp, Oryza sativa
  Clone ID: PAT_MRT4530_34842C.1
gccggccggaatccggtcgcccacgcgtcgcctgttccgggctctctactggacgccactcctggctccaccgggcggcttctcctcgttctccaccggcggctcgccaccggcccttcgcctgaccggcgttcgtggggaggcccgggctgagatcgcatgac

SEQ ID NO: 30439 - DNA, 6050 bp, Oryza sativa
  Clone ID: PAT_MRT4530_34843C.1
atgtcgtcgtcgtcgtccaggcggaggcccccgcggccggagcgggtcatggacaactgggagcgcctcgtccgcgccgccctcaagcaccagcaccgcgccccctccgccaccgcctcctccgccgccgggatcggcctcgcctccgccgtgcccccctcgctcggcaagaccaccaacatcgagcacatcctgcaggctgccgacgacatcgaggatgacgaccccaacgtcgcccggatcctttgtgagcaagcctacaccatggcacagaatctcgatcccgacagcgatggccggggtgttcttcagttcaagacgggtttagcttctgtcatcaagcaaaagcttgctaagaaggatggcgcgcccatagaccgccagaatgacatccaagtcctctggaacttctatctacaatacaagagtcgccgtcgggttgatgatatgcagcgtgagcaggagaggctccgcgaatcgggaacttttagtacagacatgggatctagggctgtcgagatgaaaaagatctatgctactttgagggctttgcttgatgttctggaaattctcattggacaatcaccatccgatagacttggtaggcaaattctagacgagattaggagaataaaaagatctgatgcagccctgagaggtgaacttatgccatataatattgtaccccttgatgcaccatcatcagtggcaaatactattggttttttcccggaggtcagggctgcaatagctgcaattcaaaactgtgaggacctgccacgatttccttctgatgcacttcaactacagctaagacacaaagatgtttttgaccttctgcaattcgtatttggcttccaggaagataatgttcgcaatcagcgtgagaatgttgtgcttgccttagccaatgcccaatcccggctcggcttgcttgatgtgacagagccgaaaattgatgagagggctgtgacagaagtatttttgaaagtgctggacaactacatgaaatggtgtaggtacttgggcaagcgtgttgcatggaccagccttgaagcagtcaacaagaacagaaaaatcatattggttgctctgtattttcttatttggggtgaagctgcaaatgtccgttttcttccagaatgcctatgctacattttccacaatatggcaaaggaacttgatgggattcttgattcatctgaagctgaacgtgcaaagagctgtactattactaatgattctgcttcgtatctggagaaaataattactccgatatatcaaactatggaagcggaggcacagaataataataatgggaaagctgcacattctgcatggcgaaattatgatgacttcaatgaatatttctggtcacgctcctgctttaatcttggttggccacctgctgaaggttctaaatttttgcgcaagcctgctaagaggaaacgaactggaaagacaaactttgttgagcatcgcacttttctgcacttgtaccgtagttttcatcgcctttggatttttctaatattaatgttccagtgcctaactattatagcttttcatcatgggaagatagacattggtaccattaaaatattagttagtgctggaccagcatttttcatactgaacttcattgagtgctgcttggatgtgctgctcatgtttggagcatataagacagctagaggttttgccctatcaagattagtcatccggttcatttggttgactgcagtctcaacatttgtaacctatctttatttgaaagtcttggatgagaaaaatgcaagaagctctgattcaatttatttccggatttacgttcttgttcttggtggttatgctgctgttcggcttgtgtttgcattgatggccaagataccagcgtgtcacaggctctccaatttttctgatgggtcacagtttttccaattctttaagtggatataccaagagcgatattatattggacgaggactttatgagagtataggcgaatataccagatacgttgtgttttggttggttatactggcatgcaaatttacttttgcatattttctccagattcgacctctagtcgatcctacgaatgtgattgtgacactccgtaatctgcattattcctggcatgatcttgtatcaagtgggaataaaaatgctttgaccatcctgagtctatgggcaccagtcttagctatatacctgatggacattcacatttggtacactcttttatctgctctcgttggtggtgttatgggtgctagagatcgccttggagagatccgttcaatagaaatgcttcataaacgttttgagagctttcctgaagcttttgcaaaaaccctttccccactgaggatatctaacggaccagttgctcagggtccagaaattactaagatgcatgcctcgatattctccccgttttggaatgatattattaagagcttacgtgaagaggactatatcagcaacagtatcatgacaaagttctctttcagggaaatggatttgcttatgatgccaagtaactgtggcaatctaagacttgtacagtggccattgtttcttctgactagcaagattatgttggcgaatgactatgcttcagattgtaaagactcacagtatgagttatgggacagaatatcaagagatgaatacatggcctacgccgtcaaggaatgctatttcagtgcagagagaattcttcactctttagttgatggtgaagggcagcgttgggttgaaaggctttttcgggatctgaatgaaagtatagcacaaggttcacttttagtgaccataaatctcaagaagctgcaattagtccagtcgaggcttactggtttgacaggacttctgatacgcgatgaaactgctgatcgtgcagctggtgttacaaaagctctccgtgagctttatgaggttgttacccatgagtttctggcaccgaacctgagggaacaattcgatacatggcaactactgttaagagctagaaatgaggggcgtctgttctctaggattttctggccaaaggatctggaaatgaaagaacaagttaagcggttacacctacttttgactgttaaagactctgctgccaacattcccaaaaatttggaagctcagagaaggttgcaattttttacgaactctctattcatggatatgccggcagcaaagcctgtctcggagatgatacccttcagtgtgtttaccccatactacagtgagacagtgctttatagcatgtctgagctatgtgttgagaacgaagatggcatttctatacttttctatcttcaaaaaatctatcctgatgagtggaacaacttcttagaacgaatcggtcggggagaatcatccgaagatgatttcaaggaaagtccaagtgacatgttagaactgcggttttgggtatcatatcgtggacaaactttggcaaggacagtgcgtggcatgatgtactaccgaagggccttgatgttgcagagttacctggagaagagatatcttgggggcattgaagatggatattctgcagctgaatatattgacactcaaggttatgaggtgtctccagatgcacgggcccaagcagatcttaaatttacttatgttgtttcttgccaaatatatggacagcagaagcaaaggaaagcaccagaggctgcagatattgcgctcttaatgcaaagaaatgaagctcttcgggttgcttttatacacgaggaggatgtgtcaagcgatggccgtaaagagtactactccaagctagttaaggctgatgttcatggaaaagatcaagaaatatactccattaaactgcctggtaatcccaagctcggcgagggaaaacctgaaaatcagaaccatgctattatattcactcgaggagatgcaatacagacaattgacatgaatcaggataactacttagaggaagcaatgaaaatgaggaatttacttgaagagtttcgtggtaagcatggaatccgccctccaacaattcttggtgttagggaacatgtgttcacgggaagtgtttcttcgcttgcatcatttatgtctaaccaggaaacaagttttgttactttggggcaacgtgttcttgcttacctcaaggttcgaatgcattatggacatcctgatgtttttgatcgcatatttcatataaccagaggtggcataagcaaagcatccggggtgattaatataagtgaagatatatatgctggattcaattcgactctgcgccagggaaatatcacacaccatgaatatatccaggttgggaaaggacgagatgttggtttgaaccaaatagcacttttcgaagggaaagtagccggtggtaacggtgaacaagttttaagcagagatgtgtaccgtctggggcagctgtttgacttctttaggatgcttactttctttttcaccacagttggttattatgtctgcacaatgatgaccgttctaactgtgtatatctttttgtatggaagggtttatctggcactctctgggctcgactatgaaatatctcgtcaatttaggtttctgggaaacactgcactcgacgctgctttgaacgctcaatttttggtccagattggtatttttactgcagtaccgatgataatgggtttcattttggaactggggctactgaaggctattttcagttttattacaatgcaactgcagttctgctcagtgtttttcacattctctcttggaactagaacacattattttgggagaacaatacttcatggtggtgcaaagattttttctgacgcatggccctttatgcagtatcatgctactggtagaggttttgttgttcgtcacataaaatttgccgaaaattatcggctctattctcgaagccactttgtgaaagcgcttgaagttgctctcctcctcattatctacattgcatatggttatacaaggggcggttcatcttcctttattctattaactatcagtagttggttcctcgtcgtgtcctggctcttcgcaccatacattttcaacccttctggtttcgagtggcaaaagactgttgaggactttgatgactggacaaattggttactttataaaggtggagttggtgtaaagggggaaaacagctgggaatcttggtgggatgaggagcaagcccacatccagacattaagaggacgtatcctagagactatcctaagcctcagatttcttattttccaatatggcattgtttataagctcaaaattgcttcacacaatacatctcttgcggtttatggcttctcatggattgtacttctcgttttggtgctcctatttaagctttttactgcaactccgaagaagtcaaccgccttgccaacttttgttcggtttctacagggcctccttgcgattggaatgattgcaggaattgctctacttattgcattgacaaagtttacaattgctgatctatttgcaagtgcgcttgcttttgtagcaactggatggtgtgttctatgtctggctgtcacatggaagcgcctcgtgaaattcgttgggctctgggactcagtccgtgagattgctcggatgtatgatgccggaatgggtgctctcatctttgtgcccattgtgttcttttcatggttccccttcgtatccaccttccagtcacgtttcctgtttaatcaagctttcagccgtggtctggagatctccctcatcttggcaggaaacaaggcaaatcaggaggcatgaaaagcctaaccacctaaccgcctggatatttttgttgtatattcttggaattgattagtggtacttgatttgaacaacacctttgtacataactgcctgccattttaggagcaaattatgtatccaaactaacagtgccatgccagtttagatgtgagtattcatctcttgtttgtagccgtaacgacctgtaatttgaacattccggtaatttggatgcgacaattcagatagcctgattgctgtatttgagcaaaaaaaaaaaaaaa

SEQ ID NO: 30440 - DNA, 293 bp, Oryza sativa
  Clone ID: PAT_MRT4530_34844C.1
cttcgaagctgtgaaaagaccagaatacccctcatgctcaaaagccccaaacccgatgaggccagcggaggaggaggaggagctcgtctgcggccagcgatggctgcggcggtgtcggagctgcgggagacgctgaagcaggcgatcgtggcgtacacggggctgtcgccggcggcgttcttcaccgacgtggcggtggaggcggcgctgtaccacgtcgtgtcggggatcttcgcggggtcgaccgcggcgccgccctggacgatggacgagcccaaggcggagtcgatccc

SEQ ID NO: 30441 - DNA, 114 bp, Oryza sativa
  Clone ID: PAT_MRT4530_34845C.1
atggcaatggaggctcttggtgatggcatcctagggaaggtagggtacttctccctaaaagctgcggcaactctgaacttgattggcatatgcattgttgcctactcaggctag

SEQ ID NO: 30442 - DNA, 324 bp, Oryza sativa
  Clone ID: PAT_MRT4530_34846C.1
atgtcgccgggatgcttggacgtcgtcgccttgccggtcgtggcctcttctccgcaacgccgtcgacgtccgctcgccctcatcaacgcagctatcttcttcacactcattgccttgctgcttgaagagaacgccggccggagcaccactactcggtgcacgcaaggcgtcattacctccggctgcgtcatgaactatcttgttggagtggccgtggtcgccaaggtgctggttgccgatatccggagaccggaggtcactaacatggatgtcccactgagactactaatcggcgacgccctcagtcccccacgctcgtcgtag

SEQ ID NO: 30443 - DNA, 232 bp, Oryza sativa
  Clone ID: PAT_MRT4530_34847C.1
gcagtagctagctcgcacctatgatcacatcgacggtgaagaaagtaggaggagatcgacggccaagccaagcgccgatccagagaccgacgtgcacgctgtatacgacgtctggtccaccgacctctgcgactgagatgacgactgcggcctatgctgcttgacacagctgagcgcgagcataacgtatgaaagggtggccgatataggagacaggcactgctcatcgtgc

SEQ ID NO: 30444 - DNA, 165 bp, Oryza sativa
  Clone ID: PAT_MRT4530_34848C.1
atggcggcgacggcggtgcaacagcagcagcacgctcggcgtgggaggtggagcggcggcgtgctagccttcgtcttctccaatggcggcaatggcaagccgtcccacgtcaacttcggcgctcccaccgcccactccatctactaccacgacgacctcgtctag

SEQ ID NO: 30445 - DNA, 890 bp, Oryza sativa
  Clone ID: PAT_MRT4530_34849C.1
gctccatgaaagacgatacaacttggtcagcaaaaggacatgcaactcagcagacaggcaccacccaaccacatgcaaaagaccatagacgaccggatcacatgtcccctagaaataggcaattcagaacgaaaacacatactaaaatgttcacattgctaggacatcatccatgtgaaggaccggatgagagaacatgcaagagtgtcttttgtcaggaggaacaaattctccatgtttccaatatacaaatctgctgaatcacagcaccagaaatcaccaatgtgtcctccagagaatcacacaccacatggactcaaaaaaaatggtaagaatgaaactatgagataacactgatcaattcaggttcagaactcctcaactgcgatgccttccctggggacctcataagcatccttctgcctcagcttcttcacgccggctatgaagcagatcttgtcagacctgaagctctccaagcttatgctagccaccttcacccacacaaccaccttggtcttcatgccttcgatcgcggagagcttgcctcgagacagagtcaccttgacacgaggcgcgtaccgtatcacggatgaatccttgaagctcacctcacagggcttagacaggtgcacaacaagcttcgagcttgtttgatcatattcgtagcagatgatattccgagggaagaggcctggaggaaggttgtactctcgcaggagatcagagagtgacttgtttggtttgcctttgagcttgtcgaaaacccatttcgccttctcctcaacagtgctcgagagacgggagatatcgccgccaatggcggagagctcctgcttggccttccgggagatggtgaagctgccgatcttggtgagcgccttctccat

SEQ ID NO: 30446 - DNA, 746 bp, Oryza sativa
  Clone ID: PAT_MRT4530_3484C.1
gtcagtactgcagtagatgtcaatatagttgagatatcactaacctattaaaaattcgacagtattaaaacttatttaagatttagtactataaaaattttggcacgacattaatccaaacaagcctaactgtaactatttttctccgtcagtactacgtcctgtctttagtatagtagtatactctgtttttctagaattccacctgtgaaggtatgaccggaaagaactgtgaagatgcagaagatatgactggaaaggactgtgaaaaaggtgcaggcaaaaaaagacagcgaaagaattgatgtaagttatgcatgtgtttctcgtaattgcatttttactgtaatcttattgttttgactgattgtaacatgttgatgcacagtctaccatggatagatgggatgggcagctacgtgccactgcacccagctggtgaaaaaaaaggacactgcatagtctgctacgataaagtcagtatcagcacactacactgcatttgcttaaagttcatactaccggcgctgatgccgcgaagtatggaaaaactataaatgttggcttatgtgatactccactaaaatcactatctgagtgctgggacacctgtgcctgcggtacatggtacaacactctactcaagcgagtttgctttgagtttgtgtcactgaatgtttgtttactgatttgattttacaatttgctttagcttttgaagaacaagacatctctttaggggtctc

SEQ ID NO: 30447 - DNA, 380 bp, Oryza sativa
  Clone ID: PAT_MRT4530_34850C.1
cccacgcgtccgggaaaaggcaagaggaaggtctaaagaaaaggttatcaatggaatggcagttggaaagaataaggaaaacactcttactgattatgaaatacgtcgcaaaggtgtcatagcagcaaacaatgaaatgttacaatctctaaacctcccgcccatgggcagcaatacgcatgttcaacaacgacccaagaaaatacctaaggtaactgatggtagaaacatggtgccatgtggagatcataacttgcggtctaggtcaagaaataacctagaggaaaatgtagatgaaaatgttggcgatgatcctgaataccaaccagaagaagatgccatggatgacaatgaagatgtagaagaaattcttgaacttg

SEQ ID NO: 30448 - DNA, 1479 bp, Oryza sativa
  Clone ID: PAT_MRT4530_34851C.1
atggcggcggcgacggtgtggcgttgcgcggtggtggtcggagtggtgatcatggcggcggcggcggtggtggatgggctcggggtgaactggggcacaatggcgacgcaccggctgccgcccaaggtgatggcgcggctgctcaaggacaacgggttcaagaaggtgaagatcttcgacgccgacgcgacgaccatgtcggggctcgccggcaccggcatcgaggcgatgatcgccgtccccaacgacatgctcgccgccgtcggcgactacggccgcgccagggagtgggtgaaggagaacgtcacgaggtacagcttcgacggcggcgtcgacatcaggtacgtcgccgtcggcaacgagccgttcctcaaggcgtacaacggccagttcgaccgcgccaccgtgccggcgctgaggaacatccagcgcgcgctcgacgaggccgggtacgggaagcggatcaaggcgacggtgccggtgaacgccgacgtgtacgactcgccggcgagcaacccggtgccgtcggcggggaggttccgcgacgacgtcgccggcaccatggccgacatggtcaggttcctcaaccgcagcggcgcgccgctcacagtcaacatctaccccttcctcagcctctacggcaacgacgacttcccgctcgactacgccttcttcgacggcgggccgccgccgcggccggtggtggacaacggcatcaactacaccaacgtgttcgacgccaacttcgacacgctggtgtcggcgctgaagaggatcgggttcgggagcctcccgatcgtgatcggcgaggtcgggtggccgacggacggcgacaagcacgccaccgtgccgtacgcgcagcggttctactccggcctgctcaagcggctggcggcgcggcgcggcacgccgctccggccgcgcgcgcgcatcgaggtgtacctgttcgggctgatggacgaggacaccaagagcgtggcgccgggcaacttcgagcgccactggggcatcttcacgttcgacggccggcccaagttcccgctcgacctccgcggcgccgggcggccggcgatgccggtgccggcgaagggcgtcaagtacctgccacggcggtggtgcgtgctgaacccgaacgtgacggacgacgacgccggccggctcgccgacaacgtcgggtacgcgtgctcgcactccgactgcacggcgctcggctacgggtgcagctgcggcgcgctcgacgcgcgtgggaacgcgtcgtacgcgttcaacgtgtactaccaggcgcaggggcaggccgacgcggcgtgcgacttccaggggctcgccgtcgtcaccgaagacgacagggacgtggcgcagggcgcctgcaacttcagcgtgcaggtcgccgccgcggcattggtgggcgccgccgttgccgccgccgcggcggtggcgtgcgcggcggccgtggtggccgcgctccttgcgttggtctga

SEQ ID NO: 30449 - DNA, 327 bp, Oryza sativa
  Clone ID: PAT_MRT4530_34853C.1
gcgttcgtccagcgtgcaaaaaaggatgccaggttgtgcttatggaaactgatcgtgttgagtcaagcctcacaacgaggaatggtacagaaattgtaaaagctaaaatgattagactgtggacttgaagacttaatctgaattacacatgggacatgatcagaaatagctcttgcctaaggcttaaccgaagtccttgtattgcctgcggtccaagtatttttttttagaaccagtcaagctgcttttattgaggtcaatgccgcttgtttcttctgtaatttgcaaatcaaacatcctttgttctttgttggatttatcaagatc

SEQ ID NO: 30450 - DNA, 997 bp, Oryza sativa
  Clone ID: PAT_MRT4530_34854C.1
ccgtaccgtaagccttggatccttctgtggcggccgccctttttcccccccccccccccttttactaaaatgtgaaattctatcatatgaaactgtactgtagatgtttacaaatgagagcacctggtgataatcagaaactactgccatcctcatttcacttgaactaacacaggtatcagtgaatatctgaccctatcaatcaagaatggaatcaaggtagctcacttcagtttgacagaatcatcaaggtcatgatatcttcacactatgaacaaaacaaaaatgtaactttccacagtttgtagtattgttggtcattgttgcttcaaaacttgcagtcttctttgactatgttctatcagaagatctggcataaatctgttgaggcgaccagtccgtatcaaaatagcatggcgtaatgtcatgcttcctgtacagagtatagaaatgctatgcaatggactataatgatccacaacaccagtactttcctaattttccaatttttttgttagatcgctctctctgtctctggggagacttgctgttgctggtaccctgagagctactggaactactagaaaggcttcgtttcacatgacttgggaaacaggaagttgtaggactgtgctgtggatgctcctcacttgagtgttcatctactttatcatttttcactgacttttgcggtgaatctccagctatggtggcatggttatcgagattgttaacaaacccttgttcaggtggactgataaccacgctatctgatttactagctgcagctacgctgaacttgctgtctgtatgttcttcatcagctgcgtcatggtcattcctaatctccctcagaaatgcatcagaatcgaagtactcttcagaaatcatagtgcgttgacttgagtattccgaagttgatgcggaggaatctgagtttaagaagtcattcaattctatgtagccctccctagaaggggcatgattacactcgtgc

SEQ ID NO: 30451 - DNA, 150 bp, Oryza sativa
  Clone ID: PAT_MRT4530_34855C.1
atggaagataaaggaaaggcggtgaaaggagagttgaagccactgcagcaaattaacagcgcacagatcgcgggtgaatataacaactgcgcgacgacgctagtgacgcaaggcggcacggaaattggcagacgaaccgtgcgcaagtaa

SEQ ID NO: 30452 - DNA, 357 bp, Oryza sativa
  Clone ID: PAT_MRT4530_34856C.1
atagaaccaacagaaacaaaaaaaaaaaaaaaaagagggaaaaataaaaaaaaaaccccagcgaatcccccccaaaaaaaaaaagagatggaagcccgcgcgagcggaccaccgctaccgccgggggggccgctcagggggacccaggataggggcccacgcacccgcaaagaaacaggccctccagggcacccgccaaaccaaaaaaacgggcgggggaacccaaccaagcgggcgggaaaaacccccccgatcgcccaaccaggcggcctagcgaaaaagcccccttggcccggcgggccaaaaaccaaacagccccgcgcggtaggcgggcccgcccaagggggggcccaaaag

SEQ ID NO: 30453 - DNA, 1210 bp, Oryza sativa
  Clone ID: PAT_MRT4530_34857C.1
caccgccgcgccggccatggctcccctcctcctcctcctccccccactccgcctcctccccgccaccctcctccgcgccacaagccgcccggcgtcgccaaggcgcggcctctcctactcctaccccaggcgcgtcgccgccgtcctgcgacaatgccgcgccgcggcgccgcctccgcctgctcctccggatgccgtgccccggtggcacgcggcgctcgcggctgcggcggggctgtacccggcgtacgtgacggccggcgccgcggtggccgtggcgcggcccgatgcgttccggtggttcgtcgcgctggcgccggggtcgtacacgttcgccctgggactcatcatgctcgccatgggcctcaccctcgagctccgggagttcttggctctcctccgcgagaggcccctctccatattgtttggttgtgctgcacagtacaccataatgcctgcctttggagcaattgttagccgggtgctggggctctctccaccaatatcagtgggactaattctgctaggatgctgtcctggaggaactgcttccaatgtggtgactttagttgctaaaggtgatgttccactatcaatcgtcatgactgtgtgcagcactcttggtgcagtgttccttactccactgttaacaaaaattcttgctggtgcttatgttccagtggacgcggtgaagctttccttaagtactctgcaggtggttgttgctccaattctattaggttcctctatacaaagtgcattcccatcagtagttaaatttgttactccttttgcccctcttctagcggtcttaacttcatcacttctggcgtgcagcgtgttctctgagaactttgtacggctgagatcaacaattgctgatgcatcatatgggaatggaggcctgttttctggggatattggggttgtgatgctgtctgtcttcttgctgcactgtgctggttttgttgtcgggtacacgacagcagctataggtggtttcaaggaaagacaaaggagagcgatatccattgaggtagggatgcagaattcatccttaggagtagtattagcaactgcacatttctcctcttccttggtcgccttgccagctgcactctccgctgtcatcatgaacataatgggtagcacattaggtcttgtatggcaatttatgacaccgcctgattcgaagaacgaaaaccgttga

SEQ ID NO: 30454 - DNA, 267 bp, Oryza sativa
  Clone ID: PAT_MRT4530_34858C.1
atggcaagagccgcgaccgtggccgccgtagccgcggcgtgcgtcctcgcgctggccgcgggggcgggccaggcgccggccagctgggagcgggagcgggagctggggatcggcggcattaataacccccgcatgaatggcaccaagtggaaagatggaaagggcaaggtggccgagcagaaacagtcgtcggccaagaaggacgcactggagtctagcaagaaaaagaaacaaaatcgcaaaaagaaaagaaagcgtaaggcgtag

SEQ ID NO: 30455 - DNA, 440 bp, Oryza sativa
  Clone ID: PAT_MRT4530_34859C.1
ggcccgatgcgcgccatccactcgctcgccgcggcgccggcggcgccggcgccggcgacggagacggcgacgcgaccactccggcgaaggaccagcgccgcccgcgcctcgcgggagtcctcgcggcagccgcaagcgcttccggacctcccctctcgccgggcggcgctactagcgctcgtcctggccggctcgacgccccgcccgcccaccgccgccgccgccttctccctcggcatccctgggccgaaggagttgctgcgggagcagaagaagaagtcggcgcgcttcctactcgcgcccatcgccgcctcccgcgaaatcctcctcaaggcccagagccttctcgcttcggcgaatgtgggtgctgactacatctaggaggtggggcggatgctcgccgcggaaggtcgagactgtgtgccgtggtggaggaactg

SEQ ID NO: 30456 - DNA, 1317 bp, Oryza sativa
  Clone ID: PAT_MRT4530_3485C.1
caggtatagtgatttagggtttctagcaaagcacttgtagaaaaatgaagatcaagcttgatttccacatgattaagggggatggtgactcaagctacgcaaagaactctagtacccagggaaaagccattctttcaaccaaaccaatggttgagaaagccacgaaagaaatatgcatggatcttcaacctcggtcaatggtcgtagctgacctaggatgctcctctggtgcaaacacgctcctctttatctctgaggtcattgctatcataagtgaagaaacccctgctaacaacaacaatagggagtgccccatggaggtccaattcttcctcaatgacctacccaacaatgatttgaaccacaatttccagttgctagagcaattcaagcagtcaatagtgcgagattgtgctcgcagagggctacaacatcctccatactacgttgctggcgtgccaggatctttctacaccaggctcttcccttgcaatagtgtccatatcttccactcatccttcagcctcatgtggctctctcaggtcccagatcttcttggtagcagcatgaacaaagggaacatttacagtgattttgcctcccattatctttttacagaccacaaaatcacttactaaagatttttgatttagaataaaaaaatatttcatgattcttttattatcttacacaatagggtcgtgtggagaaggagaagctggactctttcaaccgaccaatgtacggcccttctgtggatgagctgaagcagctggtacaagagagccagttgttcgacatcatagacatccgggcctttgatttaacttttgatcccatagacaaattggagttggaagagagcgccaccgctacaacagggagaccatatagtgttcatgaggctatcgataacaaccacaccacaactttaagagcggtgacggagaccctattggcaagccattttggggagtctataatggatgatctcttcacgctctttgcatgtaatgtcacgcggcatcttgagagctgtgcgtgggaggagagcagcattatggccatttctgtgtcactggacacaaaagtgcgaggatgatagccaattaggaacataagaactggttgagaatttagatatggtctcggtagcccaaccagatcagttcaacctgttgtctacatgacagtactgagtcttgatccagcaagtgtctcctccaagcttagggctagtccgaaccagcactgttcaccctcagaaaacatgatggattattagcacatgattatgtattaaatattataaaagaa

SEQ ID NO: 30457 - DNA, 302 bp, Oryza sativa
  Clone ID: PAT_MRT4530_34860C.1
ataaccgacgtgaacactagcgtccatccctatcacatttcactagcacgataaggaaccaacaagcaggatgccaaaacacttacaaaaacaaacaccttaaaaaatacaccccccccccaaactaccacctataaaacaaaagccaaactcaaaacaaaccccaaccccgaaaaaaaacacccgaagaaacacagcaagccacccacaatacttgcaccacaatccaattgggacaaaaaccttggaacctacacaaaaaactccaaaccaggaaaaaccccccaagcaccctccccgaa

SEQ ID NO: 30458 - DNA, 957 bp, Oryza sativa
  Clone ID: PAT_MRT4530_34861C.1
atgaaggcccacacgaagacgaagcaaatcccagagctacccatgagtggcccgatgcgcgccatccactcgctcgccgcggcgccggcggcgccggcgccggcgacggagacggcgacgcgaccactccggcgaaggaccagcgccgcccgcgcctcgcgggagtcctcgcggcagccgcaagcgcttccggacctcccctctcgccgggcggcgctactagcgctcgtcctggccggctcgacgccccgcccgcccaccgccgccgccgccttctccctcggcatccgtacgaatacctcccttgactctgcacttgttgcagctcgccggagaccgtgctctcacctcttctcctctccggttgttctcgctgttgttgtttgttgggatgccgcagctgggccgaaggagttgctgcgggagcagaagaagaagtcggcgcgcttcctactcgcgcccatcgccgcctcccgcgaaatcctcctcaaggcccagagccttctcgcttcggcgaatgtgggtgctgacgacgtcgaggaggtggggcggatgctcgccgcggcggggcgagactgtgtgccgcggcagaggaactcactcgtctcgctgcagtcgcggagcggcgttgaggtgtttgatggaattacgcttcaggtctgcacattcagcttgatactgaagaatgccgcgtcgctgctcacggataaggaccctctcaaggttgaagctgatgctaggcttgccgagctaatacagtcattctctgacctgggaactgtggtggataacagtaacattgagctcactgctgatagggagaagatgaaggatggcttgctgagcaccgtctctgccatcgataaatttgaacagagtgttaaagactgtttagatgaaatgctagaatattcatctgcaatagcagttttggcaattcctgataaatttatttga

SEQ ID NO: 30459 - DNA, 382 bp, Oryza sativa
  Clone ID: PAT_MRT4530_34862C.1
aggagtagttcatttattatttgattaccgtgctttacacaaaagcaaaacaagtacttgaggattctcaattttactcgagtcattttgtatggaattatttgtacgtacttgttatccaccgatttgcacaggcatagattcgccactggtcacgcttgtcgcgttagccctattggtttggttgccagggacaacggaagaacctatgcttttgcagccgacatcgtcggtgtcttgcagggcactgtagccatagccgatggtgatgggccagcagtagaatgtgtgtgccggaccattattagaaggagactgagcattagaaggagccggagccggagccggaaacggaggcggaggcggaggcggaggcgaaggc

SEQ ID NO: 30460 - DNA, 381 bp, Oryza sativa
  Clone ID: PAT_MRT4530_34863C.1
atggaggtgtgcaacgcgcaggggttcgtgtacggcatcatcccggagaagggcaagccggtgagcagcgcctccgacaacctccgctcctggtggaaggagaaggtccgcttcgaccgcaacggcccggccgccatcgtcaacactgcgacccgccgcagcgccgctttctgcttgagaagggcgtgccgccgccgtggtggccggaggggacaggcgtggtggcccgaatccgtcgtgccctcaccatcgcggcccccgcccccgtttccaccgtcctccacgccgccctccgacctcgacggcatcctcgccatgggcggcgacggcatcctctcccgtcggcgccggcgcgcgccgctccctctccgtcacgcctga

SEQ ID NO: 30461 - DNA, 906 bp, Oryza sativa
  Clone ID: PAT_MRT4530_34864C.1
atggcgttgtcgagcttgcaagattctgccttgggcggtggcggtggcacttcctcatcccgctcggcgtcgtcgtctacacactcgccagcccgcgtgtggtgtatgaccgcctcatggccgtcgccagctagcgccgctcgcgactgctccgccgacctctcgcgcaacggccaggcgtgtggccccgtcgccggcaacttcaagggctcctacctcgccatgctcagctcggggggactcgtcttcggcatcatcaacatcgtcggcaacttcggaacggtcttcgtcgacaacatactccgcgtgtcgaggtccgccgtgctcagcttcggcttcttcatgggggagcaagacgggatcctcaagtacatgctcaagatgatggaggtgtgcaacgcgcaggggttcgtgtacggcatcatcccggagaagggcaagccggtgagcagcgcctccgacaacctccgctcctggtggaaggagaaggtccgcttcgaccgcaacggcccggccgccatcgtcaagtaccaggctgacaatttgttggcgacaatgccgtgccggggtgcgacggcaacgtcggcggcgccgcgccggcagggccgcacttcctgcacgagctgcaggacaccacgctgggttcgttgctctcggcgctcatgcagcactgcgacccgccgcagcgccgctttctgcttgagaagggcgtgccgccgccgtggtggccggaggggacaggcgtggtggcccgaatccgtcgtgccctcaccatcgcggcccccgcccccgtttccaccgtcctccacgccgccctccgacctcgacggcatcctcgccatgggcggcgacggcatcctctcccgtcggcgccggcgcgcgccgctccctctccgtcacgcctga

SEQ ID NO: 30462 - DNA, 291 bp, Oryza sativa
  Clone ID: PAT_MRT4530_34865C.1
atggacggccatgatcggtcagtttgtggctactggaagaaaagaaaaggcaagaaactagtctatttcctgttcatcggtggtggcggtggcggtggtggtgcgggtcccgcaaacggagcagaaggaattggcatgaatgaacctgttgtcggtggtggcggggggactggaggtggatcagaagttggcggtggagggggcgatgtagactctggtggcgggggatgctcaggtggtggcggcggctgttcaaatgcatcagatggcagtggcggaggtggcgattga

SEQ ID NO: 30463 - DNA, 249 bp, Oryza sativa
  Clone ID: PAT_MRT4530_34866C.1
atggcagtggtggctcggccacaggtcggctatggcagcggcacgtgggccaccagacagcgatggcagcggtgggctagcgacggcagcggcgggaatacaacatcagtgacaagctggctatgggttggagatggcagctgcacgcgggccacgggatggcgacaacagcaggaggccggccacgcgccggaggcctccgcggtggatgactcagcaaagagggcaaagaggagggctacggcttga

SEQ ID NO: 30464 - DNA, 668 bp, Oryza sativa
  Clone ID: PAT_MRT4530_34867C.1
ggaaaatctcttttttttgctatttatttcagcatccgggagagcatggcttgatcatattcgggctatgactatttgcttctctgttctttgtatctggagtactccctccgtccaaaaaaagacaaaccctggtttccgtgtccaacgtttgaccgtctgtcttatttgaaaaaattatgaaaaaaattaaaaagataagtcacacataaagtattaatcatgttttatcatctaacaacaatgaaaatactaattataaaaaaaattcgtataagacggacagtcaaacgttggcacgaaaacccatggtttgcctttttttgggacggagggagtatgtatatatttctctcatacgcctgcttttctttcctcttgcagcgcgtaggttccaataaaggtgaacagtcagacattgatgtagagcagtgaacagatctacatggttgccagatgatttgtgattgtggtcacggttttctgtagttctgctaggacgcagccgcttgtcttttttgggggtccaaaactttgaattgcgttgcggttgctgaaagagtcgatgttattgccacatgcctgaaaaggatgatatttggtgtggaagtggaatgccatatgcaagtgtaataaaagaagggagcctttctttccaagaagagagc

SEQ ID NO: 30465 - DNA, 876 bp, Oryza sativa
  Clone ID: PAT_MRT4530_34868C.1
atgggcgaccgggcgtacgtgccggcatcgaagccggtgccggtggcggcggcgcgggcggcgaacggggtggcgaacggaggcggaggaggggttgggggtgggggagggggaggggcggcgcggccgccgcccatggtgccagggcgcgtgcccccgccgccgatgtacaggccgaagccgatgcaagcgccggcgaggcggaggcggagccggcgcgggtggtgctgcgcgtgctgcctgtggatgacgctggtggtggtggggctggtgttcctgggcgccatcgcggcgggggtgttctacgtggcgtaccacccgcagctccccaccttcgccgtcacgtccctccgcctcgccgcgctcaacgtgtccgactccgacgccgtcacctcccgcatcgagttcaccgtcaccgcccgcaaccccaacgacaagatcgccttcgcgtacggcgacatcgcggccgcgttcgccgcggacggcgccgacgtcggcgacggcacggtcccggggttcgtccaccccgccggcaacaccaccgtcatcaagggcgacgcctccgccgccgccgccaccgtggacccgctggtggcgaacggcctcagatccaggaagtcgcacgccatgtcggtggagatggactccaaggttgggttccagatcggccgcttcaagtccaagcgcatcaacgtccgcgtcctctgcgccggcttcaccgccgccctcgccaagaacaccccctccgctccaccgatcgtcgtcgccgccgccccgtcgccggtgaggtcggtcgtcaaggcctcctcctcctcctcgagcacgacggacgccaagtgtaagctccgggtcaagatctggatttggacattttga

SEQ ID NO: 30466 - DNA, 154 bp, Oryza sativa
  Clone ID: PAT_MRT4530_34869C.1
aggaggaaacagctttcaaggactcggggggtgagaaaatttaaatggccaaaaggagccccaaaaccaggacattcttctggccgacaataaaattatacctcaaactttgcgattaatactaaccctaccttgggggcccgcaattcctact

SEQ ID NO: 30467 - DNA, 297 bp, Oryza sativa
  unsure (1)..(297): unsure at all n locations
  Clone ID: PAT_MRT4530_3486C.1
caccctttggtcagaaaacaacttttaacttactgtaccttcctaaggcaagtactagtaatagcttnttnttggcctgtgactggtctctctgttcattttcatgaatgtaacggcttnctcttcttcttattattaattcttggtagagtattagtattatggagctacgtatgtgatgtgctggtctctcctctgacctctaatctgcttgtcatgtatgaaatgaatgcctcatctcgatcatctggttatcaatcaattgatgaaagcatttatctaaaaaaaaannnaaaa

SEQ ID NO: 30468 - DNA, 135 bp, Oryza sativa
  Clone ID: PAT_MRT4530_34870C.1
atgaagaaatttcatatactagccaactacccgtgcgttaccatggaatccaagggcatgctggggattgagagcagtggcggccggattgaggatatggcgaagctggagacggggacaccagagaagaagtag

SEQ ID NO: 30469 - DNA, 3093 bp, Oryza sativa
  Clone ID: PAT_MRT4530_34871C.1
gcttctcgtctccgtcgagggccgcaccaccctcgcctctgtctcctcctcttctctgtctagcctagctcaggtctctcaacgtctctctctccagctgcaccttctgcggggccgccattcccaaggctaccaccaccaccaccaccacgcagcagcggcctaggagtacttgcggcggctgcttgatcggttttcttggctcgtcagttgcagtattccctcctcaaaatatataaaaaggaaggagctccctgaggctagttggattggatgacgtctcgtgaaagttgcaagtgatggtgctctgactggtcttttgcctttgatgtctctgctggcgatgggataagttggcgcactatctatcttggctgtgtgttctgttgaatcttgcctagttgtgggtgtgtgtgtgatggggtcgtctggttgcagctctgagatagttgagttcaccgaagaattcgacgataatgcgccggttagttgccccaatttgatgcatattagagtgaagcctgaggagaaagatgggaggtgttaccctgtggaggatgaccttgaacagcttctcaaggcgatcgacagcaggaccttccgtcggacgcttagccctggtcaggctggcgccgacgctctgcggaagaatggtcagaagaaatcgtctaggtctgggccggctcaagctgcggggatcgggatttcgtccaagcctgttaatatgaagcaggcgttgaggaggctgtgcatttcgcaggcgtcggagatggccgcgatgaagaggctgtcgatgtcgcctggatcatcgagttcgtcggaagtggggactatccacaggctttatgcctccttgatggtccagagcaacggtgagagccatctgcatgatgatgagaagatgaacttgattgagatatcgatcactccagaaaagtttagtaagaactcgtccagagcaacaagcgagttcagtgaagactgtgatttcgagacagccgacgggagtgcagtcacctccctgcattctgcatcatctacctcggctgagatacagaagatcaggatccaagatgtcatcagtggtgaccctatagacagcgagagttctatggtggaaaatgagaaattaaacaagaaagtttccacagctaccgacggtagctctcccagagcccctatcttgagcaaaccgatcactacctcacggcttgttaagccagtcttccgatgcaagaccatcggtaagaagaaactgaaagaagaaccaccttcattgggtacttcctccaacagtacaaaattctgctcttcaaaggagtccatctcccttgcatcaaccagttgctcttcaacatccagcataacaaatcccactagctgtgcagatgatgagaaaacaaatctcgggccagaaaaatctggtgataaatcgcctgagtggttaagatcagaggaaaagggggagtgctcccagaattcaaacagcattagtgagtatggatgtagcacgagcatcagtgatgagagccaatttggattgtgtagctacaacaacagaccacacatggcaaaggatctgcgttggataaccatccgtgagttggcattgcaacaaggatccttaggtcttgacaatttcaagcttctgaagaggcttggttgcggcgatatagggactgtgtacctagctgagttggttgattcagagtgcttgtttgctttgaaggttatggacatagagtacctgatcaatagaaagaagatgctgcgtgcacaggctgagagggagattctagaaatgctggatcacccattccttccgactctttatgcccattttaccacagacaatctttcgtgcttggtcatggagtactgtccaggaggtgatttgcatgttcttcgtcaaagacaacctgggagaagctttccggaaccagctgcaaggttttatgttgcagaggttctccttgcacttgaatatcttcacatgttgggggtcatataccgtgatcttaagcctgagaacatcctagtccgtgaagatggtcacattatgctatcggactttgacttgtccttaaggtgctcagtgaaccccgtactcctccgatcatcctctgtagcagcaaaccatcaaccaaggaagcttgcaggaccttgtgcagaaagcagctgcatcagttcatcatgccagccttcttgtgcccaaacatcttgtttcatggcacgtcctccattgccaaagcctcggaagcctaaatcttcacacagaaagctccctcagcttgttgttgaacctatagatgcaaggtccaattcctttgtaggaacacacgagtacctcgcaccagaaatcatcaaaggggatggtcatggtagtgctgtggactggtggacctttggcgtcttcctttatgaactgttgtacggtaagacacctttcagaggtcctgggaatgatgaaacattggcaaatgtggtttcgcagaatctcaagttcccagaaaatccatctgtcagcagtaatgccaaagatcttatcaaaggtttgctagtgaaggagccagagaacagacttggatcattgagaggagcagctgaaatcaagcaacaccctttctttgaaggcttaaattgggccttgatacgatctgccgctcctccagagacgcgaccctgtgacgttgtgaccctcacgacagcgaagaagaagaaagaaggcaagtgcctggagttcaggagtaactctgaggacctggaatttgaagttttttagcaagtgtctttggtacagtttagcactcttctgccaaatagagtctacatttttcttttgggtagccaaaggctgggggtgtacattgtacaagtagatgtatttctggttactgctatgtacctgttaatagatcactaaattcaaaggaatgatggaagttgaagccaaaaaaaaaaaaaggaaaaaaaaaaaaaatcaaacactgatggctatactcttgttgtgcagtctaacactgatgagtcatgtagctttgctgctgctgttcttgctaacttatcataattttcttgtcgaagttacaactt

SEQ ID NO: 30470 - DNA, 426 bp, Oryza sativa
  Clone ID: PAT_MRT4530_34872C.1
atgaggaggacgcacggatctgagcgaccggcgagccgtcgttgggaggtcttctgccgcaccgttgtggaggccgcccgcacgcgccccgccactagtgaggccactagccacccaccgagccccaccagagggctgcccaccactaatcgggccccgcggaggggaggccgcacctcgccaccatggaggcttcctacggttgaagggaggctgccaacgctcgtcgccgtggagaccacccaccgtctgcgagcctcctccaccgctgctgccaccggcagtagcaccaccaccgctgatctggaggggggatgcaaaggaggaggaggagggggccggggatgtgtgagagagagagcgagagaggtcagagagagtgagagggagagcgaagggggtagcggggtgagagcaaagggataa

SEQ ID NO: 30471 - DNA, 1260 bp, Oryza sativa
  Clone ID: PAT_MRT4530_34873C.1
ccaccactcaccaccaacatggcgacgacgacggcggcggcgatggtggtggcaatgtcggtgctgctgctgggtggcggcgaggcggcggcgccgcggaagccggtggacgtggcgttcgagaagaactacgtgccgacgtgggcggaggaccacatccactacgtggacggcgggcgcgaggtgcagctctacctcgacaagtccaccggcaccggcttccagacccggggctcctacctcttcggccacttcagcatgcacatcaagctcgtcgccggcgactccgccggcaccgtcaccgccttctacctgtcgtcgcagaactcggagcacgacgagatcgacttcgagttcctggggaacaggacgggggagccgtacatcctgcagacgaacgtcttctccggcgggaagggggaccgggagcagaggatctacctctggttcgaccccaccaaggactaccactcctactccgtcctctggaacctctacatgatcgcgttcttcgtggacgacacgccgatcagggtgttcaagaacagcaaggacctgggcgtgcggtacccgttcaaccagccgatgaagctctactccagcctgtggaacgccgacgactgggccacccgcggcgggcgggagaagaccgactggtcgcgggcgccgttcgtcgcctcctaccggggcttccacgtcgatggctgcgaggcgtcggcggaggcccggtactgcgccacccagggcgcccggtggtgggaccagccggagttccgcgacctcgacgccgaccagtaccgccgcctcgcctgggtccgcaagacgcacaccatctacaactactgcgacgaccgcgaacgctaccccgccatgtcgcccgagtgccaccgcgaccgcgacgcctgagatctcatcgagatctgtgatcgatgcttgctggccgtccgatggatggatggatggatggggatgagtacgtgtacggctacgattaatcatgatttgagtgcgtgcagttaattaattaatgggtaacgttttgggggtaatttgggcttgaattgattgtatgtatgcatgtatgtatcgtcgtcgtgccaggtgtgctgaattgggcgcgtgatatatgtattgccaaattattttggtggtttcgcttgtactatatatatacgcgcgctgtgatcgatttcgatcggtcagagttaattaatgaattaatttgggttttggtaaaaaaaaaaaaaaaaaaaaaaaaaa

SEQ ID NO: 30472 - DNA, 1209 bp, Oryza sativa
  Clone ID: PAT_MRT4530_34874C.1
atgctatcgttaaggatcgcggccgcctcgcgcctgcgagggctgctgggcggcggcgcagcgaccggggcgcgcacacgcgccttctcctatgggagggtggtggatgccgctgcccgggacggcgagctccgagttttcgtggtcgccggtgaggtctcaggcgactcgctcgcctcgcgcctcatggcgtctctcagggcgctctcaccgaggaagattgaggatactgcagatgctgctgtattgtttcagcctcatgctgtagttactgttgattcaaaggggttctcttttcgcctcctgaagcaattgaaatgtagatacaatcaagttgcccgtcctctacatgtccactatgttgcaccatcattctgggcctggaaagatggtgaaagaaggcttgcaaagttgcataattttgtggaccatttgttgtgtatccttccatttgaggaagaaatttgcagattaaatgggttgcctgctacatatgtgggccatccattattggatgatgctattggcttgaatatggagaaggaactatcttctgtcaattccatgcatcaacgaagtggtgaagattttcgacaggagcatgaaatttccccagttgctcctcatcgggatgtgagggtatatgttgataatgttgttcgatcagggccatttccagtggtactgataactggggaaacactaaaagaaagatatgatgcattcaatgtctgcagtcgatttcttgcagtttccagaattcatgctagtagagcagcattatgcacttcaggaacagctgtcatggagctgatgttagcaaagctaccctgcgtggtagcttaccgggctcatttcatcacggaatgtttgattcatctgaggaaaaagatagactttatttctctacccaacattcttttaaactctccaattgtccctgagatcctttttggggcttgcacagcggaaaatctagctgcaaaactaagtgaggtcatttgtaatgatgaagcccgtcagctccaagttgaatcagctgaacagttactggagatgctttatgaacctatcaagcaacgaggtggcctatttcaagaggagctgcacaactcgagcctgccgtcaaatatctactccccaagcacgattgcagcattgacagtgctttatacagataaccatcaacaagcggtgcaccagaattga

SEQ ID NO: 30473 - DNA, 1074 bp, Oryza sativa
  Clone ID: PAT_MRT4530_34875C.1
atggctgccgccgggcacggcccctccggccgccgccgcgtgtggcaccgccacccgccatggccgccgccgccgcccgccacggccgccgccggccaccggatgggaagtgaggagggggaggagaggggtgaggaaggggaggaggggggaggaggagttagatctgtgaagaggaaggggaagggatctgtgaagtgtaggagtggcaacagcccttggcctctgatagcgatcggcttgctactttcgttgctgctgtttttgctggtgtacaagacattgctggatgcgccgctggtggcctctgagtctcctgaagctgcagttgacatttgtgctgcaaaaagaaacaagaccatcaaatcagcggtggtggtgctactgccggtggcagcagcggtggaggaggctcgcagacggtgggtggtctccacggcgacgagcgttggcagcctcccttcaaccgtaggaagcctccatggtggcgaggtgcggcctcccctccgcggggcccgattagtggtgggcagccctctggtggggctcggtgggtggctagtggcctcactagtggcggggcgcgtgcgggcggcctccacaacggtgcggcagaagacctcccaacgacggctcgccggatgctttggggatgttgatggcttgggatatcttctctgtgttgatgctttggggatgttgatgtggatgatggtatcagttctaaaaccaacacctataatctcaggaataggtgccaaaaacaaaaccggcacggtcttaaccaagtactatgccatggcaagtgaggacaagttcaacaaccttttgaggcggatcgaggagttcgagtggacgcaggtagaggtagataagaggagtgatgaatcgctctctcaagacggtggtagcatcatggatacccaaatccaaaagaatgctaaagacttgcaaatttcggttgagaaaaagcagaccaaagtcctcaaggagttggacgttggtgcggacactacctgcaccaccaacatcgatgtccctgaccatcccaaggagactgttgttgggccttag

SEQ ID NO: 30474 - DNA, 276 bp, Oryza sativa
  Clone ID: PAT_MRT4530_34876C.1
atgctccttcccccaacgtcgggggtgacacatgtagccaagggcgacgaagaggaggtctcctcgacctgtggcatcctttaccctttatcctcgcgcctcggcatccttgcgctattacagcacgaggccctcgtcggcaacatctcctcccatggtgagggagctaagcgcgtgaggattctaccgacgcaacaatctggttgtcgcaagcctcctagaccacgacgcattgggggatcggacgggacattgggggtggaagacagtggatag

SEQ ID NO: 30475 - DNA, 411 bp, Oryza sativa
  Clone ID: PAT_MRT4530_34877C.1
atgcggccgggcgcagaggcagtggcggcggcggttgtggccgggcgcggaggcggcggcggcggatgtggccggggtcggaggcggcagtgccggatgtggccggggcagaggcgacgtacagtgtacgtcgccgtcaaggagaggggcgacggcaacacctcgccgttgccactcccttcatgccctcaacgccagcggccgaggcgatgctgcgggctgcggctactcgcgtcggcaagggaggcggggggcggacgggtggatctgacggtggcggcggaaatcggcggcgacgacgacattgagggtcctcagctgctgctcacgccatcgagatgtggcggcaacgacgacagcgacggtggatcctcagctccatccccgtccgcgccgctgctccgaggttga

SEQ ID NO: 30476 - DNA, 430 bp, Oryza sativa
  Clone ID: PAT_MRT4530_34878C.1
cccacgcgtccgcccacgcgtccgcccctctcttctttttctctccctccgtctcctctccaaatgcaaagctctcttctcttctctcgctcctcgctctctccatccatggccatgagggcctaaatgccaaagcagtcaagctgataagaccgagagagaaaggtgttcctttccgtcctcgcaccccccggctccgattttctgctcccgccatgccgccgccgccaaggctgctgttcttgctcgtcatgctgctggtggtcgcggcgcccggcgcgccggtgttcggggcgaacgcgccgccggaggtgaaggcggagatcgacgcgctactcatgttccggagcgggctgcgcgacccttacgccgccatgtccgggtggaaccgcgtcttcgccgccgggccctggtcctggcgcggggtggc

SEQ ID NO: 30477 - DNA, 235 bp, Oryza sativa
  unsure (1)..(235): unsure at all n locations
  Clone ID: PAT_MRT4530_34879C.1
tttaaatccaacattagtatcanngganncccacagnaaaaaaggcgccggcctcagcaatagcccgagggaagaagaaccacccaaggcacaagcagaaccggaagcctgtcaacccgccacaacctgactaacgacccccatgcccgtaagccgtggagaaacaccgacactccacttctaacccccccgcagacaaccaaaacagcctcaaaacccccccggaaaaccgaac

SEQ ID NO: 30478 - DNA, 1345 bp, Oryza sativa
  unsure (1)..(1345): unsure at all n locations
  Clone ID: PAT_MRT4530_3487C.1
ttgctttgcacaggtgaccaagttcacctgcggtggattcgcggtggggttctgctttagtcacctggtgttcgatggtctgggtgtcgtttatttactgtatcttatttcattttttttttctcatatctttcctctccttttaatacatatatttcatttatatttttttctttctttttcttttttgtttctttttcagtttttcttttttcttttcctttcctttgcgccttttattttttgctctttttccccttctatttcttattgtcttttagtgtgtcgtttgtctgtatctggctctgtcttttttgttattttttttttgtgtttcttttttgccctgttatttttttcttgtttttatttttttgttattttctttgttctttgtcattattttattctgtctgcgatattgtttcttctatttgctacaggctccattttagtaccttctgtgtcatccttatcattctctctaatcatctttttctttctttttcttttttttcttttgttttctcttcgttgtatttttttgttctttacattcttatatactctctatatatttcatctcctgatatcactttcttcttcccacctctctatttactgttcgttctgtctcttatcatttattatttttttttgttattttctcttcttgttctctctctctctctttttctttcttgttctcctctttcacccttctgcgtagttctatatccacctctcttgttctttgtttcttatcttccgtacttgttctctcttgtacttatttattttatactttctctctcttctcttgttcctcttgtcgcttgctatgcgtcgtttgttgcatgtctatttctttctcttctcgtgtattcttgctgtctatttcttatgttctcatcagctctctacaccttctattcttgtatctcttcctctactttctattcgtcttctacgatatctctttcttgctctctctactttatctcttcattgttcttattgctcgataatcgctcattatacttntaatatgtcatgttgtcgctcgtcgttctctattctcttattatgtacttatttcatatatcttatctctctcatttcctatctctcgtgtattcttttcgtgtgagttgtntgtgagttgctgcactcgtcctcttgtcttctcgtatcattgtctctctaatatatatatataattatatcatntctatatctcggttatctggcatctctctctattatattatcattttctgatctttgttctgtctcttctgtatcttatactttctctttcgtatctgtctcttgttcttcttct

SEQ ID NO: 30479 - DNA, 381 bp, Oryza sativa
  Clone ID: PAT_MRT4530_34880C.1
tttgtgtttttttttttttttttttttttttttttttttttttttttttttccaacaatcaacaccataattaatttttacctcccaaaaaggcccaaccccaaattaagtccgtagcaaaaatttcccggaggggccccggtttttgactggaaaattttccctaaaaaacaaagcctgggttaccataccataaccaattttaactaaaaggaaaaggctaaaaattttggaccctagaccggaaaaagctttttaatctaaaatttaaatggaccaaaacaccgttttttggtaaagggaagcagtttaaggggcctgacaagggggttttttttgggacccaggaagggacaggggtacacaaatccagcctggggg

SEQ ID NO: 30480 - DNA, 819 bp, Oryza sativa
  Clone ID: PAT_MRT4530_34881C.1
ctaccacctctgaccgaagctaccctgctgcccaaaaccatagcccggatcaaaccccatgcgacttccctgaaagcctgttccaaaaccttcctcctcctcctccctgaagctacctctttgcccccaatctttgttgctgcacccattgtaatcatctttcctccttgccatccctcccttccgaacctccttcttctcctcttcggctctaacctgcagctcgccgcctacacacagacccccttcttcgccgcctctttgcctccctaatggggaaagtaacaaattaagctcgatcttatgcttaacggtcagaataatattcaactctatgagattttgtggagttgaatgttctagctccacaaacctataaatcaagaaaatccccgaaagctgcacaccgaaggccctgtactcccatgatacgccgggcgagaggatgctgaggagcgcacacacgatcccctgggagagcgtggtgcctacgaagacgacggaatcctcgaacgccatatactttgcgatgacctccgcacgatcacgatcagaatccggcgctgccgccgccgcctgcatcgtcttcggttggtaaggctcctcgatctgggagacgcagacagaccatccaaattttctgtaatgatcccaagctggaaccacggctccgatcaggaaaatgaccgagaacaacaatcccaaggtccggtgatccactgatatgctgggccagaggaaactgaggagcgcacacaagatgcccagagagagggagatgactgtcaagacgacggaacacgtcagtttcccacgcat

SEQ ID NO: 30481 - DNA, 288 bp, Oryza sativa
  Clone ID: PAT_MRT4530_34882C.1
atgaccacggcgtcggttgttgttgcgggagttgttgttggaggtgttggtggaggtcgccgagcgagcggtggtcgaggaagcagcgaggaaggccgtggcagtaacgggcggccggtggcctttcgtcagctcatcgaggagaagctgtgcgcgagccttggcgaacgtcgggaacaggacttgcagaggcaagagggacttgaggttgtcgaatttgtcgttgaggccgccgatgagggtgaggatgagagaccgatccttgacaggttcaccgacgtcggcgag

SEQ ID NO: 30482 - DNA, 362 bp, Oryza sativa
  Clone ID: PAT_MRT4530_34883C.1
gctaataaacattaatcctttttaatacatatgctttcgacaataacttgactgtcctgcaagtggcgagaaaaaagagaaatgttgaaatataaactacaagaggggaggttcactgaacgcactttctggtttcgagaatgacaacaattggtactatagactggttaggtggaaaacaaaccatattgaattaccaatatgcctgctttaccaacatgcatatacgcggtgcgggatgggaagaacatgcaaccatatcgagaaaggaggtgatatcaaatccaagctcacggatgatgaccatggatctgtatcttaaagtccagccccaaaaccttgggtagttggcaaagcacaaa

SEQ ID NO: 30483 - DNA, 394 bp, Oryza sativa
  Clone ID: PAT_MRT4530_34884C.1
ttttcgtttcgcacgcagtaaacagtgacagggctagcacagacacaaacgcacgcgcatacacccaccctcaccgcacaaggaaggaaacaagccgaagaatccacaggattctctctttctctctcttctttccccattttgctcttgccgacggccacgccgttgctgctccgtcgatggtagcctctgctgctacgagggcgctgggatctggacatctgatacggaggattgcgggatggaggccagcaccagactggccgccatctcccacaaccggaacgagctcgatgtgatacgtctggacggagagcccgggccgaagccggtgaagcatactaatgggcaagcgtgccagatttgcagcgaccacgtcggccttacccccgac

SEQ ID NO: 30484 - DNA, 563 bp, Oryza sativa
  Clone ID: PAT_MRT4530_34885C.1
agcgggccgggccctttattatttatttatttatttatttatttattttatttattttatttatttttattattttttatttatttttatttttttttttttttattttttaaaaaaacccaaaaaggggggccccttccaaaaaaaacccaggaacaaaaccgggaattaccaaaagggggggggggactcccggggggggttaagggaaaaagggaaaaaagaaaaacaaaaacccccctttggcggggggggcaaccctaccgggtgggaacccacctggggcaaaaaaaccccaaaaaagggggggccggtttaaaaagggggggggggggaatccaagggccaatttaggttttaaaaggagggccccgcccggggggggggctttttaagggaccaccaaaatcccaaaccttggggggaccccctttggggggggaaaaaacttggggccccctaataaaacgaggggaacggggggggtacccaggggttaaaaaaagaggagcccacggcctggggagaagaaaaaaacaaaaccgggccccccgggggggggg

SEQ ID NO: 30485 - DNA, 306 bp, Oryza sativa
  Clone ID: PAT_MRT4530_34886C.1
atggccatcggacgcaaggaagggcgtcattctgttgctgcttattttctaacggtgactcaggacaggaagcgggccgacgacggtggccaccaggctcgagatcgtgacgaagtcgagggtgaagtgtctcttgttaatgttggtagatgggatgaagatgatgccatcgttgctgccgccaccattgtgtcgttgtggccattggtagtaggggctgtcagcggcgtccccggggagcaggagcccgttggtggagcagatgcgatccacggaccacggatggatgcatgggactccgggtaa

SEQ ID NO: 30486 - DNA, 747 bp, Oryza sativa
  Clone ID: PAT_MRT4530_34887C.1
atgagggtgacacggaggcggcggtgggggaggggggataaggaggcagccaccaacgaccgcgaggcagaggaggtggaggcggatgcgaggcccacgaagatggaggcggaagcggccgccgccggcacagtcgaacgtcgctacggcgaaagaggagcggtaggagaggtcacacaatgtggacgcgaggcgggagaggtcgcggtccgagcggcggtggagcgcggcatgggcctcggcgaggagctgcttgagcgccaggagcacctcacggaaacacccgtgcccgacgatgtagccgccgtggggaataacaggctgccgcagtgggtacccgggaggcccgtctccgccttcgtgcccggcgccgacgccgcttcctccccctgcgccctgtttgctctgcccccgcaggctgctgcgtctcctgcggcattttttaaccgcggtgcaccgaggcaagcaatggagctagctaaggcaaatagcagaggcgagcagtgcttaggtcatggagctcgccgtcgatcttgccgcctccacgacaaacttgaagccacctgtgccgcctccttcatgagtttgccgttgcatggcaccaggctgcggaggccgaggacgagcggcgcgtcggttgctgcgagcctcctcacaccggtggccgagatgaggcgtgcgctggtggtggccggtctatcaagctcactagccaggcctcgtcctcctgaggcccccctctcctcc

SEQ ID NO: 30487 - DNA, 152 bp, Oryza sativa
  Clone ID: PAT_MRT4530_34888C.1
ctccgtgccatctattgcgtgcggattgcgatggatcaaaacaggctgggcgatcaccttaagcgaagcgggctgaaaaaaaggttacatctccgccttggaaccccccactctgggccggatggatggaggggcttcggatgcgccgaaaa

SEQ ID NO: 30488 - DNA, 2283 bp, Oryza sativa
  Clone ID: PAT_MRT4530_34889C.1
atggcgacctccctgaccctgatcgccacaccatgcacggctcctagatcatcctcgtccttcgcactcgctccacggctgccgcctcgttgcagcaacgcgactgcagcacgtcgccgcgccgtgagggcaaccacgctgcaatcggatcaggaacctgcaggatcaggagacagcggcgccacgacgacgaagctgtctgcctcgaccagcgtccgccaagaacgctgggaaggcgacctgcccatcgagggatgcctccctccttggctgaatggcacgtacatcaggaacgggccggggatgtgggacgtcggggagcacgcgttccaccacctgttcgacggctacgcgacgctcgtccgcgtctccttccgcggcgggggtggtgcgcgcgccacgggggcgcaccggcagatcgagtcggaggcgtacagggccgccgtggcgcgcggccgcccggtcctccgcgagttctcccactgccccgcgccggccaagagcctgctccaccgcttcggcgatctcgtcggcctcgtcaccggcgccgcgctcaccgacaaccccaacagcgccgtgctgccgctcggcgacggccgggtgatgtgcctcaccgagaccaccaagagctccgtcctcatcgacccggacacgctcgagacggtgggcaggttccggtacacggacaggctgggtggcatggtgcagtcggcgcacccgatcgtgaccgacacggagttcctgacgctgctgccggacctcgtccgtccgggccacctcgtcgtgaggatggaggccgggagcaacgagaggaaggtgatcgggagaatggactgccgcggcgggccgtcgcccgggtggctgcactcgttcgccgtcacggagaagtacgccgtcgtgccggagatgccgctccggtactcctccgccagcctgctcgcctccgagctcgccccgttctacgccttcgactgggtcccggcgtccggcagctacatgcacgtcatgtgcaagtccaccggcaagaccgtggcgagcgtggaggtgcctcctttcatggcgatccacttcatcaacgcatacgaggaggaaggcgacgaggccgccgtcgttgtcgactgctgtgagcactacggtgaccctgccatcatcgagacactcgtcctcagtagactgagattgttaaggggcaaggacgttttacctaacgccagggtggggcggttcaggatcccgctggatgggagcccgttcggcgaacttgagacggcgctggacccggaggagcacgggcgggggatggacatgtgcagcatcaacccggcgcgcctcggcaggaagtaccagtatgcctacgcgtgcggcgcgcgtcgcccgtgcaacttccccaacacgctcaccaagatcgacctggtggagaagaaggccaagagctggcacgaggagggctccgtgccgtccgagcctttcttcgtcgcgaggccgggagccaccgacgaagacgatggagtggtgatatctattgtaagctccgacgatggcgaagggtacgcactggtgctagacgcgaccacgtttgaggagattgcgcgcgtcaggttcccctacggattgccctacggcttccatggctgctggatccctgcgacggaagaaccggccaccaccagcgcacgcctcatctcggccaccggtgtgaggaggctcgcagcaaccgacgcgccgctcgtcctcggcctccgcagcctggtgccatgcaacggcaaactcatgaaggaggcggcacagggcgcagggggaggaagcggcgtcggcgccgggcacgaaggcggagacgggcctcccgggtacccactgcggcagcctggctactctgctgctgtcacgtattgctcggcgcggctccccccctccccctctccctctatcaacgcgcacgggtgtttccgtgaggtgctcctggcgctcaagcagctcctcgccgaggcccatgccgcgctccaccgccgctcggaccgcgacctctcccgcctcgcgtccacattgtgtgacctctcctaccgctcctctttcgccgtagcgacgttcgactcttgcgaggccgcgctagccgaggccgtgggggccgccacgtgccggcggcggccgcttccgcctccatcttcgtgggcctcgcatccgcctccacctcctctgcctcgcggtcgttggtggctgcctccttatcccccctcccccaccgccgcctccgtgtcaccctcatcccccgcctgctgcccgtga

SEQ ID NO: 30489 - DNA, 4716 bp, Oryza sativa
  Clone ID: PAT_MRT4530_3488C.1
atgggttgcaagatggccggtcacccacccaaccaccgcggagaaggcatgatcaactttgtggcagagttggcacgcatgacactggtggtgggctaccccaacgcgccagagtacacgacgattccaccgctcagtggcgagcttcctcaccgtgttcgcttggaggtccacggctacgtgggtacctgcctagctaacatggtggttgaggcatccggaggctcaacagatcacgcctgtcaggaggcagcatacctgatgatggctagactacgggagcgccacaactacatcttccacgacacggcgtaccgatttcaccctcgtcgagccagtggtgatgatatcagtaccttccgtccgacagccggcgagaacgacaccacctttagtcacatgtgtgctgtgatgaggggattggataggatgcactcggacctgcacaaggcgaccaaggccttgaacgatgggaagctcatgaggatcgtcactctgaaggacgagatagcgcgcctgaagagggagaatgctcagttaaagggtcttcccgcgccaggaggagtccggatccgcactacgcccgcaagacgacgacggcacccgtgcgcatccagcttgcgcccaggaacccacctccatcagcagctcccgcagcacctccagttccgcccgcagttcctgcagctccagctccagctcccgcgtccgctctctccttcgctccagcatcagccgccagaggtccagccagtggcaccggaagttggttgtctgctactcccagtggcagccgcgatctcagtagcagcagctccagtggctcacagtcaggcagcggcgagacttacctgccaggctccgggagtcgctcagaggtaccggatggtctacaccaggaatggtagccgcgcgacaggcgagggcagcaacggcgaagagcgcactgatggggcgcatccccacagcgattctggcaatggtccgccaccacttcccgagaatccgacgctagcccaagtaatggcacatcagacccagatgatggcagccatgatgcagcagatgcagcagcagcaccagcagatgcaccagcggatgctgcagcacgccgaacagcagcatcaacagtttggtccccctccccctcagtccaagttgcctgagttcctgcgtgtcaggccacccaccttttccagcaccaccaaccctatggaggcgaatgactggctccatgccatagagaagaagctgaatctcctgcagtgcaatgatcaggagaaggttgctttcgccacacaccagcttcaaggtcctgcgtcagcttggtgggacaatcacatggccacccgcccaccagatggggtcgtggcacaaaagaagagggaattccgggcgctccatcagggcaacaggactgtgacagagtacctccatgagttcaatcgcctcgcgcgatatgcaccagaggatgtccgcaccgacgccgagaagcaggaaaagttcatggcgggtctggatgacgagctgaccaaccaactgatatctggggactacgctgattttgagaggctggtggacaaggcaatccgtcaggaggatcaacgcaacaagatggacaggaagaggaaggccgcacagttcagggcacctcagggaagtcaccagaggccgcgcttcactcccggacagcagggtggacctaccaccatgatcgtccgccagtaccgcccgttcaatcctagcaactttcctcagggcgccagtggcagtcagaaccaccatggaggtcagcccaaccgcggtgcagctccacgcccaccaatggcaccggcacagtcaggcccgcccgcgcaagccaagaaggagactggagcaaaaccagggtcctgcttcaactgtggtgagcttggccacttcgctgacaaatgcccgaagcctaggcgtgctgggccaaggtttatccaggctcgtgtcaaccacgcatctgcggaggaggcacaagcagcaccagaggttgtactggacctagatgtcattcttgggatggattggctgaccaagtttaagggggtcatcgattgtgcgaatcacacagtcaccttgaccaacgagaagggagaaaccgtggtgtacaaatcactagtctcaccaaagcaaggggtctctttgaatcagattgagacggaaatcccagtcgacaccgtggagaaaaacttgaggaaattggaatatatacccatagtctgcgagtatccagaagtgttccccgaagacctcactaccatgccacccaagagagagattgaattccggattgacttggcaccgggaaccgctccaatttacaagagaccgtacagaatggcagccaacgaattagcagaggtcaagaagcaggttgatgagcagctgcagaaagggtacattcgaccaagtacttcaccttggggtgctccggtcatttttgtggagaaaaaggataagacgaagaggatgtgcgttgattattgcgcactcaacgaggtcaccatcaagaacaaatatcccttgctgcgaatcgatgatttgtttgatcaactgaaaggagctgaagtgttttctaagatagacctgcgatcaggctaccaccagttgagaattcaggaagaggatattccaaagacggccttcaccactcggtacgggctatatgagtgcacggttatgtctttcggacttaccaacgcacccgcattcttcatgaatctgatgaacaaagtattcatggaatttctggacaagtttgttgtggtgttcatcgacgacattcttatctactcaaaatccgaagaagaacatgagcaacatctccgtttggtactcgagaagttgaaggagcaccagctatacgccaagttcagcaagtgtgacttctggttgacggaagtcaaatttctgggccatgtcattacagctcagggtgtggcagttgatccgtcgaacttacttaagaaagatgagaagtttaaatggacagctgagtgcgataagagtattgaggagctcaagaagaaattagtatccgcaccagttttgattctgcccgaccagatgaaagacttccaagtctattgcgatgcatcccgccacggacttggatgtgtcctaatgcaagagggcagggtggttgcgtatgcctcgcggcagttgcgtccacacgaagggaattatccaactcatgacctggaattggcagcagtggttcatgctttgaagatctggaggcactatctgattggcaaccgctgcgaagtatatacggaccataagagtctgaaatacatcttcacccaaccggacctaaatctccgacaacgaagatggttggaactaatcaaagactatgacatgagtattcactaccacccgggtaaagccaatgtggtggcagacgcattaagccggaaaagttactgcactgccctatgcatcgagggcatgtgtgaggaattgcggcaggagtttgagcatctcaacgtgggaattgttgaacatggttttgtagccgctctggaggcacggcctacgctcgtggatcaagtcagagcagctcaagtaaatgattctgaaatagcagagctgaaaaagaacatgagagtcggaaaagcccgggatttccacgaagatgagcatggcacaatctggttgggagaaagattgtgtgtacctgacgacaaggaactgaaggatctgatactcaccgaggctcatcagacccagtactccattcatccaggcagcactaaaatgtatcaagacctcaaagaaaagttttggtgggcagagcaccaaagaccagcaggtttactccaacctcttcaaatcccggaatggaaatgggaggagattggaatggacattataacgggactgccccggacatcgtcaggtcacgattcgatctgggtagtcgtggatcgactcactaaggttgctcacttcataccagtacataccacatatacgggcaaaaggttggcggagctttacctttcgagaatcatgtgcctacatggagtacccaaaaagattgtatctgaccgagggagtcagttcacctcaaaattctggcagaagctgcaggaaaaattggggacccgtttaaatttcagcacggcctatcacccgcaaactgatggtcagaccgagcgggtcaatcaaatcttggaagatatgttgagagcttgcgctcttgattttggtggagcttgggacaaaaatttgccatatgcggaattctcgtacaacaacagctaccaggccagtctacagatggcaccgtttgaagctttatacggccggaagtgccgcacacctctcttctgggatcagacaggcgagcgtcaactgttcggaacagaggtattagcggaagcagaagagaaagtcagaatcatcagggaaaggttgaggattgcccagtctcgacagaagagctacgcggataaccgtcgaaggaagctcacttttgaggcaggagattacgtgtatcttcgtgtcactccgctccggggagtacaccgttttcagacgaaaggcaagttggcaccacgattcgtgggaccatacaaaatcctggaacgaaggggggaagttgcttatcagttagaacttccatccaacatgatcggcatccatgacgtgttccacgtgtcccaattaaagaagtgctaa

SEQ ID NO: 30490 - DNA, 3597 bp, Oryza sativa
  Clone ID: PAT_MRT4530_34890C.1
atggagtatatgtctaatggagaccttgattaccatcttcatgtcaagaatagcctcgattcattggacataagattgaacattgctatagattgtgcagatgctctagggtatatgcattccatgtgcagccctgttttacatggtgatgtcaagccctccaacattcttctagatgacagttttaatgcaaaaatatcagattttggaatatctaggcttctctcaacagacaaaactcatactgaaaatatgattacatgttatatggaccctctgtattaccaggaggggcgtctcacctcaaaaagtgatgtttatagttttggaattgttctaatggaactaatcaccaagaaaagggctacatgtctcactcaagctcttgctgaaggacaagagatgacagaattgcttgatcctatgattgctaatgagagcaacatgaaggttctactggagattgaaaaactagtgcaggaatgcctagcagaggatattgatagacgccctgatatatgtgatgtggctgcataccttcggatgcttaggaagatgagtcaacaagcaccacaagaaaattttggttggcacttgtttgcagaaacacaaaatgattttaaaaagcaaagccatcaaggtacaaacattatcagctctatcaagatggtgttccctaggatgatgggcattctcaacgtgaacatggccaaatctgaaaacaaaggaactccgctctatgttagtggcaaaagaatattcacagcattggaaataaagaaaataacaggaaactattcaagaattatcggtaaagatatgtttactgtggtctactctggaattcttgaggataacacacaggtggcagtgaagacacacaacatgtttgaacgtgggaagtggagatgtgccaatgaactgaatagcctttctgaacttatccataagaacattatcaatctgttgggtttctgctatgagatggacgctgtaatattggtttatgaattgatcgagcgagggcacctctgcaacattctccacggcaatgatactaaaagattccctctcccactagatttacgtctagacattgctattgggttggcagaaggattgtcatatatgcatagtagatcaaaacccatactacatggaaacataagaacagtcactgtacttctcgacgacaaatttgtcccaaagatatcgggttttgggtcatcaaagattggtgaagatggtaaatgcaggattgtggggagcgagatgggctacatggatgaaacattcgttaataccagagttctcacacggaagagcgatgtctatagttttggagttgttctcttggaactgattaccaggaaacgaatttattataatggtaaggacaataatactgccatcaattttgccaaagtttatgagaaagagggcagtgggagggctatgtttgacaatgagatcagtgctgacaaaaatatccctaccctcgaagacattggcattctagcaatgaagtgcttcaatccggacatagataagcgccctgaaatgaaagaaggcagctacagcctggaagtgttctgggctcccatcctcctaatccaccttggtgggcaagatgttataactgcgtacaacatcgaagacaatgagctttggaggaggcaggcagctatgcagatgtttgtctttggagttctcaaatgcatagagaagccgtgggctctcaggagcgctagcattaacatgcttgttagctctaatagcctcattacaaagatagaaaagagcaatgaagaaggggatagaattgatatttctcttgagtcctatgtggaagaagcgaggaaatttgtcttgaatccttctgatgttgacggaaactatgttggtagtagcatcaagccttgtgattcatctggaagcatcatagtgttggttcttcaacatgtcaaatctgggtggaaggattatataacaaatgttgcctcttatcggatgttcaatgataacaggggccaatggtcgcttcagcgcaacaactgtgacaatgaagacctagcttggaatgtaagggcaccatttgatgagagcgtccttctctggcacctcgcaactgatttgtgcttactaagtgaaggatataccaatgagggagccacacggagcatagaaatttccaactatatgatgtacctactgttgaataatcctgatatgctaatggccggcaccaaaaggagtctcttcacaactgctattcatgagctcaaaggcatcattggggatgaaacacttgaggacatagatcttgcacacaagataattgccaagatggagtcaagcgaaggttgccctagttttatccacaacgcttgtgtgctttctaaggcactgttgtgtcttgataatacgaagatgtgggaggtgatcgagggcgtgtgggtagagatgctatgcttctctgcatctagatgcagagggtacctacatgcgaagagtctgggtaatggcggagagttgctcacctttgtatggctcctgttgttacaaatggggatggagcccctagcagagaagctgcagagggcagagattccaaaaagaggaggaaacggagccgctagtgctgcttcattgtcttctgataagagcttggcactacagcgaaagaagactgaggttccaagtggagatgaaggaaatattgccgatgcgcaggcggcgacagtggcaactcctgtgctggcgacgcccgacctatcggcggcggcggcggcggtgatgatgccgccgcaatcgccgcctccgaaccccgaggaggagacgctcctggcggattactaccggctcgcgacggaccagatctacttccgcaacctggtgcgccaggcgcgcatcacgttcgagttactccgcgggatcctgctgcgggacgacgagcgcgcggaggtgctcggcctcacgggcgtcgccgggttcggcgccgccgcgtccgcgccgacctgcgtgccgcggcagtcttcctcaggggaacccatagccacatctatcatcgtgtccggtggttatgaagatgatgacgatcgcggcgatgtacttgtatacactggacatggtggccgtggccccaacctccacaagcattgcgttgatcagaagtttgagggtggcaaccttgccctcgagccggcgcgggtcaagcggcagcagcggtgcacacggctggcggcggcgcgggacgagcggtcggcaggggcgcgcgggtcaaacgggagcggcggcgcgcacggcggggggcggcgtgggacggccggtgggcaggggtgggcaggcgtgcggtcggcgcagacggcggcgctcatggcggcgcggggacgggcgggggttggtgggcgggccgtcggcgcgcatggcagcacgcacggcgcggcggagacatggacgggacggtggccaggggccgcggcgaggcgggggagggggtggggcggcgcatacggaggcggaggcgaagagggcgcttgcggcggcgacgggtggctgagacagaggctggcgctggtggcggcggcgggcggctga

SEQ ID NO: 30491 - DNA, 1055 bp, Oryza sativa
  Clone ID: PAT_MRT4530_34891C.1
atggcgatcgtggccgccctcgtcgcgcccaccgcgaacccccacaacccactccggctcatcgccgcggcgccgcaccggcaatggcggcgcgtcgccgccgccgcctcctcctcggcggcgcccggggttgacctcaaggcgctccaggccgccatcgacaagaaggacagcgaggaagtgaagcaggcgatggaccagctgaaggagctcgggtgggccaagcggtggagctcgcagccgtacgtgtcgcgccgcacgacatctctgcgagagctcaccacgcttgggataaagaacgctgagaacctggcgattccgagtgtcagaaatgatgcagcatttttgttcactgttgttggttcaaccggattcttaggcgttcttgcaggccagcttcctggggattggggctttttcgttccttacttgattggaagcatctcattgatagtattggctatcggaagtatttctcccggtcttctgcaagcagcaattggtgcattttcaactgtttttcctgactatcaggagagaattgctaggcatgaagctgctcattttttggttgcctatttgattggactaccaattctgggatattccttggacattggaaaggagcatgttaacttgatagatgatcaattgcaaaagctaatatacagtggccagcttgatcaaaaggaaatagacaggttagctgtagtgtcaatggcagggctcgctgctgaaggtctagaatatgacaaagttgtcggtcaatcggcagatcttttcacccttcagagattcataaaccggactaagccgccattaaccaaggatcagcaacaaaaccttacaagatgggcagtcctattttcggcatcacttctgaagaacaataaagcagctcatgaagctctcatgtctgccatgtcgcagaaggccagtgtcttgggctgcatcgaagccatagagaatgcctcttgattgcaatggaacgttgaatgtcctaacacggttgaaattgatgaaaatgagaaaaatataaaagtcacgatatgacg

SEQ ID NO: 30492 - DNA, 354 bp, Oryza sativa
  Clone ID: PAT_MRT4530_34892C.1
atgtgggaggtgatcgagggcgtgtgggtagagatgctatgcttctctgcatctagatgcagagggtacctacatgcgaagagtctgggtaatggcggagagttgctcacctttgtatggctcctgttgttacaaatggggatggagcccctagcagagaagctgcagagggcagagattccaaaaagaggaggaaacggagccgctagtgctgcttcattgtcttctgataagagcttggcactacagcgaaagaagactgaggttccaagtggagatgaaggaaatattgccgatgtgccatcgacttccaatgacagtatagtcattgatattggagacaatgcttcttga

SEQ ID NO: 30493 - DNA, 1678 bp, Oryza sativa
  Clone ID: PAT_MRT4530_34893C.1
gttgctactgaagactccggccatggcatcggcagccatgctcgtgccgctcgtgctggttctctgcacggcagcagcaagcgcggccgtcgtggagcacaccttcaaggtgggcggtacgaagatcacccagctatgcatgaacagtgtgatctacacggccaaccagcagctgccgggaccgaccatagaggttaccgaaggcgatacactggtcgtccacgccgtgaacgactcaccgtaccctctgtcactccattggcacggtgtataccagctccggagtggttggaatgacggggccaacaagatcacgcaatgccccatccagccttctggcaatttcacgtaccggttcaacatcaccggccaggaggggacgctgtggtggcacgcgcactcctcgctcctccgagcaaccatctacggcgcgctcatcataaaacccaggaatgggccgagtgggtacccgttccctgaaccatatgaagagatcccgatcctactaggtgagtggtggaacagaaatgtggacgatgtggagaatgatgggtacctgaccggcttagggcctcagatttcagatgcgctcaccatcaacggcatgccaggtgaccagaatcgctgcaaaggttccgccatgtatgaagtggaggtggagtacggcaagacttgcctcctgcgcatcatcaacgctgcagtcaatgtggagctcttcttcaaggtggccggccacaccttcaccgtggtcgccgccgacgccagctacaccaaaccatacgccacggacgtcatcgtcatcgcgccgggccagacggtggacgccctcatgaacaccacagcatcgcccggtcggtactacatggcggcacacgtcttcgacagcaagaccgtcgccgtgccgttcgaccagtccaccgccacgggcatcgtgaagtacaagggcgtgccgaattacgccccggcggccatgccgtccctgccgccccacgacgacgtcgtcaccgccggcagattctactggtcactcaccggcctcgcgcgcccgagcgacccgggcgtgccaacaaccgtcgaccacaacatggtggtgacgttcgggctggaccaggcgccgtgcgcgcccaaccagacgaagtgcagcgggttcgcgctcgtggcggccatgaacaggaactcgttccagttcccggatcagaaggtgtcgctactcgaggcgctctacaagggcgtaccgggcgtgtactccgaggacttcccggacttcccgccgccgatgcaggggttcaggaaggcgacggcggtgaagaaagtgaagtacaacgacgtggtggaggtggtgctgcagagcgagcagtacagtagcacgctcggcaccgagaaccacccgatccacctgcacgggttcgacttctacctgctggcgcaggggctcggccggttcaacccgtcgatgaagagcaagtacaacctcgtggacccgcaggtgcgcaacaccgtcgccgtgccggccggcggctgggcggtgatccggttcatggcgaacaacccaggtgagcccgcggcgcttaatttatttttaccttacatgatttggtgcaaccgtgcaagtgactgtcgagttgttgagttgcaactgatttctgattggttccatgcatcggggatgaaactgtag

SEQ ID NO: 30494 - DNA, 2473 bp, Oryza sativa
  Clone ID: PAT_MRT4530_34894C.1
atggagatggacacatcgccatcgtcttcggcgccgtcgtcgccggcggcgtcgtcggactccatcgacctcaacttcctgccgttcctcaagagggagcccaagtcggagccggcttcaccggagcgagggcctctgccgctgccggcagcggcaccgccgcctccacctccgccgccgcccccaccaccgccaccgcaggtgcaggcggcgacggtggcaactccggtgccggcgacgcccgacctctcggcggcggcggtgatgacgccgctgcagtcgctgccgccgaaccccgaggaggagacgctcctggcggagtactaccggctcgcgacgctatacctgtcgtcggcgggggcggccggcgtaatcgtgccggcggcggcgccggaggcctccgcgggggcggtggcgcagcccgggtcggggtccggcgcgaagaagcggcggccgcggtcgtcggagctggtgcgggtgtcctcgctgagcgtgcaggaccagatctacttccgggacctggtgcgccgggcgcgcatcacgttcgagtctctccgcgggatcctgctgcgggacgacgagcgcgcggaggtgctcggcctcacgggcgtccccgggttcggcgccgtcgaccgccgccgcgtccgcgccgacctgcgtgccgcggcgctgatgggggaccgagacctgtggctcaaccgcgaccgccgaatcgtggggccgatcccggggatctcggttggggacgccttcttcttccgcatggagctttgcgtgctagggctacacggccaggtgcaggctgggatcgactttgtcacggctgggcagtcttcctcaggggagcccatagccacatctatcatcgtgtccggtgggtatgaagacgatgacgatcgcggcgatgtacttgtgtacacaggacatggtggtcgtgaccccaacctccacaagcattgtgttgatcagaagcttgagggtggcaaccttgccctcgagcgtagcatggcctatggtattgagatccgcgtgatccgtgctgtcaagtccaagcgcagccccgtcggcaaggtatacttctatgatggcctctataaggttgttgactactggcttgaccgtgggaagtctggcttcggtgtttacaagtacaaaatgctgcgcatcgaggggcaggagtcgatgggctctgtaaattttcgactagccgaacagcttaaggtcaatgccctgactttccggccaacagggtatttgggctttgatatttccatgggtcgagagatcatgccggttgcactgtacaatgatgttgatgatgatcgtgacccacttttatttgagtatctggcgcggccaatatttccgtcctctgcagtccaagggaagtttgctgagggtggtggcgggtgtgagtgcactgagaattgctcaattggatgttactgtgcacagaggaatggcggtgagtttgcatatgacaagctcggtgctcttttacggggcaaaccactggtatatgagtgtgggccatattgccggtgcccacctagttgccccaacagggttagtcagaaggggcttaggaatcggcttgaggtattccggtcaagggagactgggtggggtgttcggtctttggatctcattaaggctggaaccttcatctgtgagtttagtgggatagtgctcactcatcaacagtcagagattatggctgcgaatggtgattgcttggtgcggccaagcaggttccctccaaggtggttagattggggtgatgtctctgatgtctatccagagtatgtggcaccaaacaatccagctgttcctgacttgaaattttcaattgatgtgtcaagggcaaggaatgtggcttgttatttcagccatagttgcagtccaaatgtgtttgtccagtttgtgctgtttgaccattacaacgcagcttatcctcacctcatgatctttgccatggagaacattccaccattgagggagctaagcattgactatggaatgattgatgaatggggcgcggcgtttcccagctaggttgtcacgccaaggatgttggcatggcaaggctatgacgtagcacagtctttcagtgtgtcacgttccatcatgccagggcgaataacagaagcttgcatatgggatgatgtttcaagccttcccatgaggaaggcaaagtcacagctcattgtcatccactaggcatcaaccgtccgttgtatatttttgcatggtagctgcagtgccccgtggctgattccctctcacccttgaagcttgatgcttgcttttgtaggaagcttgttttgcgcagcaagcaccgagtttcatacttgacctctgtttttctttttttttcccttcaattgctacgagaactccatatgtacatatatctgtacattacatgacttcaaaatgtgtcccacttctgtctgtaaatgctggttggccc

SEQ ID NO: 30495 - DNA, 279 bp, Oryza sativa
  Clone ID: PAT_MRT4530_34895C.1
atgagttcgtgcacgggcgccggcatcgagcgtgtaaccgggccagcgttccaaggacgaccgtcgctgccgcccgctcgacctcccacgccgacgtccatcactgccggccatcccgtcctcgcccccgcctgcgtcgtctcgttgccttggggcgccgccactctaccgatgagttgctggttacctccgtccccgttgcttgcaggtggtgctgttgaggccaccactctcatcacactgtcccgatctgctccgccacctttctcaaccatctga

SEQ ID NO: 30496 - DNA, 570 bp, Oryza sativa
  Clone ID: PAT_MRT4530_34896C.1
atggacgccaaggcgcgtattgttcatcgcacttactctctggttggaggggatgacattgaggccaataattatattgtcataacaaaacaaatttacaaacttactggtcagactcatcatttggctctcattcaagctgctcgccgttcgtcgttcaagctactcaccgcgcacctgccagagacctctcctcggacgctcaccgtccaggtcttctcctctgatgagggcgggtgggaccctcctctcgcctgcgccattctccaggaatgcgagctccacagctacttacgccaagcccgtcgtcctgcgcggcgccgtccactggctctgcctcacatactcgcgtcaccgaatcctcgtcctcaagtgggaacatcctccacgcggacgctgcgacgtcgcttcgccgccgctgaaggcgtcgctgatgagactcccgacgccgtgccacacgacatgtgcctcgtgctatcgcaggcaacaaacgacgtcggcaggacgagccatcgcgctgcagcgtccctgagtgtggtcgccctcccaggcaaccgcatcgccgtctag

SEQ ID NO: 30497 - DNA, 507 bp, Oryza sativa
  Clone ID: PAT_MRT4530_34897C.1
cacacaaaaggtcgctaaattcccttcctccggctagaagaaacctttactcaaaagttcctatgacattatggaattacatgtttgtcctcaggtctttcctttgttttttttctccattttcttttatctctctctgtcacatattcatttttacaaattcagacccttgaatttacacgcagcccaaccacattccccatcacttccacccacccttcacatgcatgcaacgaccaggattcgtccacgtcatccctcctcagcatcgacggccaggattcgtccacgtttgagctccacatgcatcggcgaccgtgcgccacggatcatcgctcctctccaccattgcaccgtgttcgtccgttcgtccgcgcggtcacgacgcgccgccagtcatgctcaccagcctcatcgccgggatgcccagcttctcgtggaggtacgacaagccgcgcaccacgccgacggcgatcctcatcctcgccggccaatccagcaccaccc

SEQ ID NO: 30498 - DNA, 480 bp, Oryza sativa
  Clone ID: PAT_MRT4530_34898C.1
ccccccgggagatatttccccaatttcgtggcgacagagctcccgcaagcgtgccccagatggctggacaaggaacggacaaagtgctggtggaaagggacactgggtagaatctggctgctgtgcgaggactgcgcccactgcctggacactgccagggctgtgcaacccctgtggagggacaccctaacaacacttcgggcaaccaggattccacaccaggattgcttcaagcatcagcgcacatgagcattcagacgaggacagagtctgcatgaggcatgacgcacagacatgcacagcacagcatggaggacgacagcacaggcgagagcaaagatgggagggaggtgcagatctgaagcagcacatggttggtccaatgtgcaggcacaccccaatgctgcactgggagcacactgagtgtgctgctaatgagctgttgatgctggactgctgtgctgcttgcgccatttgtgt

SEQ ID NO: 30499 - DNA, 1305 bp, Oryza sativa
  Clone ID: PAT_MRT4530_34899C.1
atggaactccatgccgactgcctcgtccgcgcactccctctcctcttcccggccgctctgccgatgcgcactctcggtgccgcgccgtccctggagcgccgcctctatgaaagttggtcgcgctccgccgctggctctcctttctctccaccaccgcttgcgttgtttcctctcaccggtgagctccccgcttcgccgcgtcatgcccccgtgaagccgccgccgcccaccgtttgttctcctgccagcctccttcattctcttcttgccagcccacgtggctgccacaaaggcgccacgtcggcgcgaccgggtcaaaatagcccagtcggccccttctcggtgcacctcacgccgaaccgcatccaccaaaccctagcgtcgcatctcgcatgcgtcctctcctccgtgagcctcgccactgaccagtgggcgccatcccgggatcctgaggtccaccggctccctctcgcgcaccacgcccggccttgggccgtctcgctcgcgcgccggcccgcttgcctcggccgcgccgcgcaaatcaagattgcgatgattcatgtttgtcaccgtgggtaccagcgctatgtcctgggactgctactgagatcgcgatttcataggaagcagttcgcgccctttttcctacgacacgctcctgtcagcctctacacctcatccttctccctcatctttctccccttctctccaaacccccctttcctctcccatccgccaccgctgccctatccccatccccaccgcatctcgggctgcgtccccatccaccgccgccgccgcagctcgggctccgcccgccggtgccgctctcttcgccggcggtggtgcggcgacgcgaggaggcgggcggccgcgcgcggtggtgcagcaacgcggggaggcgggggaggcgagacgccggcggctcgcgacgacgacctcgacgccgctcggggtggagctcggcggcggcagctcgcgacgacctcgacggcggatctagaggggggtggcagcggagctcggcggtggcggtggcggtggccggccacgcgaagacgaggcggcggtggccggccgcgcgacgacgggacggcgggggccggccgcgacaatgacggggcaacgacgccctcgtcgcaggtgccgtccgtccagggctccgccggctacctatccgggagaccgccggcctgccagctatccatccaggggcagcgccgccggccgcccgtccagggcaccaccacctcgccgtcgaccgtccatccaggttgcctcgacgatgacatgcgcttttactga

SEQ ID NO: 30500 - DNA, 336 bp, Oryza sativa
  Clone ID: PAT_MRT4530_3489C.1
ctctagcctgccttttgatttccaataagggtttcatcggggtttcagccgatgagttatctagatattgcatcggcttataaagattatatccaattggtttctactggattatattgttgttttgttgcattatcatcagccgattgtctttgtttacatcaagtgtcagactctacatcaaccatatagccgatagctcaaaatcctatcgctatcggttggatcaaactgactggcacacccgtatcttatcaacttttggacctgcactggagctaagcagatatcccaggccgttgtgttcatcgacttagttcgcgccaacacagtttt

SEQ ID NO: 30501 - DNA, 567 bp, Oryza sativa
  Clone ID: PAT_MRT4530_348C.1
ctagccgaggacgtggcagacggctgcatctggccggcgcgggagagtacggaggaggggtcggagaccggcttggcgcagagaggcgcagccgatggcagcggaggccggctcggcacgagaggcgcgggcggcagagatggaggccagcttggcgcgagaggcgcgtccggtggaggaggccggtttggtgcgagaggcgcagccggtggaggaggccggtttggcgcgagaggcgcggtcggcggaggaggaggcgaccctggtgcgaggaggagatgccggtgggcgtggcacgaaggatggccagcggggggcgccagtgcgggggtcccacatgtcggcagaggttgtgtggtggtggagcatcgatgcgtcagccgtagattcgcaggtggtgtgcggcgggtgtaaacccagtccggccttagccgggccaacaacgatggttaattccccctcctgagggcgttgtcgtgttgtctcacccctcaagggcagttgccgggcgaaagcccagtcctggctcctttgagcccggacggacggcggcggcggtttttccat

SEQ ID NO: 30502 - DNA, 447 bp, Oryza sativa
  unsure (1)..(447): unsure at all n locations
  Clone ID: PAT_MRT4530_34900C.1
agaaatcacgagagacaacagagagagctagtctctgtgtgctcgtgttaccctcactcacgacgggaactatggcgattggcaagaagcacaaggaggctgctgcactgtcgtcatcatcatcgcctcttctccctgcagatcggaaggctttgctcttgctgctgctgctgctcatcgtcttgctagctcgccctgctgcatcctccgatggagtgcgctatgattacagagcttacactgagtgcaaatcgcatcctgaacctgcactgtacaacggtggcatcctgcgctgggcgaacaaagtgacggacttcagaacagaggacgatggcaactattcgccggcatttgtgctgtataatatgtccgcggcaacagtatacagcttctcctgctgggtgaaaatcgatgggccaacaactgctcatgtgaagccaagtattn

SEQ ID NO: 30503 - DNA, 159 bp, Oryza sativa
  Clone ID: PAT_MRT4530_34901C.1
atgacactggaggggcggcacgggcttgagctagcatcggcggcctcacaacgggcagatccagccctccaacaacgacgaagggccttgggagcggtggggactatttcggctatgacgacgacaatgacgcactgcgacaacgacggcggtggctag

SEQ ID NO: 30504 - DNA, 558 bp, Oryza sativa
  Clone ID: PAT_MRT4530_34902C.1
atggcccctaagcttgaggacaacacaatagagggagatgttgctagcgagccgattgaatggcacaacgagatagcggaagaaaatgagagttcgaaaggtgcggcacgcacctgtgacaagggcgtcgtcgccccgtcgtcgtcgcagccggccaccgccaccgccaccgccgagttccgccccgagctccgctgccgcccccctctagatccgccgtcgaggtcgtcgcgagtcgccgccgccgagctccaccccgagcggcgtcgaggtcgtcgttgcctcgggtcgtcgtcgcgagccgccggcgtctcgcctcccgcctccccacgtcgccgcaccaccgcgtgcggccgcccgcctcctcgcgtcgccgcaccaccgccggcgaagagagcggcaccggcgggcggagccagagcggcggcagcagctgcggtggatggggatgcagccagagcggcggtgggggtggggatggagcggcggcggcggatgggagagggaagggggtttggagagaaggtgagaaagatgagggagaagaagaaggtgtag

SEQ ID NO: 30505 - DNA, 410 bp, Oryza sativa
  unsure (1)..(410): unsure at all n locations
  Clone ID: PAT_MRT4530_34903C.1
gatcataagggtgaaatgcatttggagggaactgtgtgttgctggaactggctgttggtttgctgtgtgaaaagtgtgctgatgatgccattggatgattnaggtgatacnctatgtggctttggtttttcagataccttaagtgcttagaaaattgaggtttcaggtgccgtggattgccattcacgtgcagagtgattagatggtgtgttatgatgcgagatgtgcacgtgtctgacctctgtatatggttgatgctgtgctatatgatgaaataattgggttatatcnagttctgaacacaccttttgaatagctttgacatgttctaaggtgtgcacgtgcatgaagcangcanttnataaattatagtaaatgnccttttgttaaaattttaaaaaaaaaaaaaa

SEQ ID NO: 30506 - DNA, 862 bp, Oryza sativa
  Clone ID: PAT_MRT4530_34904C.1
ccatcgacgaccggaggttagcttcctcgggtgtctctgttgccccacattgggggatcgggaggaacagccgccatgggaggcgccaataatggccaccacctttggaggcataccccggtacaagaagaggaaaaggttgcactcagcactcagcgccagtagagggaggagctggaggctggagctggacaagcatggtttggttggagtccagctctgcaatttttagttgatcattttcaccctgtgtgttcttttgtttcagctgagccctagtcagtgctcttgcaagttcagggggggttggccaaatggaggggccaacatttgattcttcttctgattatgcaattgttacagttgattgattagttagcaatggaaagattctggttttgtggagatctttccctggcccagaaaggtactagtgtaaagagcagaggaaaaggcctgaaaactgataaagagctcttgctcaaagtagggaggaagtcctcactgagatgtggagacagagagagggaatcccaattcccaagtattgagtagaagtcattttttgtggatactgtatggttaaaaattactctctgttgagtcatgccattttggttcattagcaatttcctgatgctaaagccaaacagtggtagtacatttttgttgcaagaactgattgatagtagttggatagccagggggcaggggccatctctctcattgtacttcactctactctctcgtgtctcgtgtgcaattgctgaccatgagtggttgggaattgtttattgatatctgtgggacgaaaggaagaaatgcgtttgctcggtgccaaaaaaaaaaaaaaaaaaaaaaa

SEQ ID NO: 30507 - DNA, 366 bp, Oryza sativa
  Clone ID: PAT_MRT4530_34905C.1
atgcctgctcctgcttctgcagcgacatgcttcgtctttgccgcgtcgggcgtcaggtgcagggcattctctacgccgatcaccaagaatgcgcgacaaggcgagggagagagagagggggagcttactgggcacacccggaaaagaggcgcgctgggaaggtggcggtggcgaggatttggtggcggcgcctcgtgggttgatgccgtggacggagctccggcggcgagcgacgtcggtagaggggcgcccgaggagcggcacaacctggggaagatgagagagtggttaggagagggaggagtggcacgaagcggcaggaagaggttgccggagatggagatcgcggaggggctcactgggtga

SEQ ID NO: 30508 - DNA, 870 bp, Oryza sativa
  Clone ID: PAT_MRT4530_34906C.1
tttcttctcttctcctctcttctcgacgcagccggcggcagatggggaaaggcggccgtcgagcccggccctggccgagctctgccgccgccaccgctcgctgggctcggtcaaggaggggccggtgagcctgttcggaagtagagcagcagcgggatgcgcgagcggcgcgccgcaggactacaacattgtcaccaaccacaagccgccgccgccgagaagcgtcgccacgctctgcccgccgaggacaaccacgatgttggcaaggaccaccgcccaccaccgcagcctcttgctggacacaggcggcggcgccgccgcagttgcatctgctcgagacgtgcccatgtcacactctgctaccacgtcttcttggcctcggacacctgtaatctgcagctgaatttcagcagcatcgctcattgtgaggttcagaaaaaggataaacaacaagatgtgcctagtgctcgtcgtccataggtccagcagcagtggaaggctggaacgccaccgcttgctgagctcgcgttggaggagcgcggcctcatcagagacatggctgctgccacgacgattacggccgcgaggcagctgctgcctgctgccgccgcctccgcctccgccattggcgtcggcgcccatgtagctgctcccccgccgcctacgcccgcctgcgcgccactctgccgcccgcccgcgagcggcttcgtcccccaccgcctgcgcccgccggctaccgccggtgcaactgctcccccaccggtgcccgtgaagaagacaggagagaggaagagaggtggagaggggatggggaaaaaagatgctgtggctacgtgggaatcccgttcggattttcgggaccgctcacat

SEQ ID NO: 30509 - DNA, 315 bp, Oryza sativa
  Clone ID: PAT_MRT4530_34907C.1
atggagcctcaggacagcaagattacaagggtcatggaagacaaatgtctggttggggatctaaaaactggaggaatcgtggagctgcagaagggcgccgggaagaaggcgtgcagctgcggcagctcgcagcggcaaaggcagcccggcggcagcagaagctgtgggaggtcggataagggggagaacaggctagggctggagacaaggtgccggggacgcggaagacgccgggcgcgtggaagatcggcttctctcggcgccgaaggaattatcgggatggaggcgctgagccggggcgggagcgaggcctaa

SEQ ID NO: 30510 - DNA, 850 bp, Oryza sativa
  Clone ID: PAT_MRT4530_34908C.1
ttatttcttctcttctcctctcttctcgacgcagccggcggcagatggggaaaggcggccgtcgagcccggccctggccgagctctgccgccgccaccgctcgctgggctcggtcaaggaggggccggtgagccacaagccgccgccgccgagaagcgtcgccacgctctgcccgccgaggacaaccacgatgttggcaaggaccaccgcccaccaccgcagcctcttgctggacacaggcggcggcgccgccgcagttgcatctgctcgagacgtgcccatgtcacactctgctaccacgtcttcttggcctcggacacctgtaatctgcagctgaatttcagcagcatcgctcattgtgaggttcagaaaaaggataaacaacaagatgtgcctagtgctcgtcgtccataggtccagcagcagtggaaggtccggcgagtcaatgtttatgtcctgccccggccgagctctgccgccgccaccgcttgctgagctcgcgttggaggagcgcggcctcatcagagacatggctgctgccacgacgattacggccgcgaggcagctgctgcctgctgccgccgcctccgcctccgccattggcgtcggcgcccatgtagctgctcccccgccgcctacgcccgcctgcgcgccactctgccgcccgcccgcgagcggcttcgtcccccaccgcctgcgcccgccggctaccgccggtgcaactgctcccccaccggtgcccgtgaagaagacaggagagaggaagagaggtggagaggggatggggaaaaaagatgctaacacatggggcccatgtgggtcccacgctgagtcagctcacatcgaataa

SEQ ID NO: 30511 - DNA, 265 bp, Oryza sativa
  Clone ID: PAT_MRT4530_34909C.1
ccagctaaattaaccctcctaaaggaatagcttgcgcccgtcttgctcttatgggcgccgccattacagtccggctgagcatgggagcggcggctatctcctactggcgagcaaagcgggggacaggatcttgactacctgaacgcgcctctctcatggaaagttgctcggcgtgagaacaacgttaccaagaggggttctgtctcctgagacgacaaaacgcgactggatttttctgtgggaccccttgtgctacgatcctttt

SEQ ID NO: 30512 - DNA, 3916 bp, Oryza sativa
  Clone ID: PAT_MRT4530_3490C.1
atgggttgcaagatggccggtcacccacccaaccaccgcggagaaggcatgatcgactttgtggcagagttggcacgcatgacactggtggtaggctaccccaacgcgccagagtacacgacgattccaccgctcagtggcgagcttcctcaccgtgttcgcttggaggtccacggctacgtgggtacttgcctagctaacatggtggtcgaggcagctggaggcacagcagatcacgcctgtcaggaggcagcatacctgatgatggccagactacgagagcgccacaactacatcttccacgacacggcataccggtttcaccctcgtcgagccagcaatgatgatgtcagttccttccgtccgacagctggcgagaacgacaccacctttggtcacatgtgtgctgtgatgaggggattggacaggatgcactcggacctgcacaaggcgaccaaggccttgaacgatgggaagctcatgaggatcgtcgctctgaaggacgagataacgcgcctgaagagggagaacgcccagttaaagggtcttcccgcgccaggaggagtctggatccgcactacgccccgcaagactacgacggcacccgtgcgcatccagcttgcgcccaggaacccacctccatcagcagctcccgcagcacctccagttccacccacagttcctgcagctccagctccagctcccgcgtccgctctctccttcgctccagcatcagccgccagaggtccagccagtggcaccggaggttgtttgtttgggatggtctacaccaggaatggtagccgcgcaacaggcgagggcagcaacggcgaagagcgcactgatggggcgcacccccacagcgattctggcaatggtccgccaccacttcccgagaatccgacccttgcccaagttatggcacatcagactcagatgatggcagccatgatgcagcagatgcagcagcagcaccagcagatgcaccagaggatgatgcagcacgtcgaacagcagcaccagcactttggtccccctccccctcagtccaagttgcctgagttcttacgtgtcaggccacccaccttctccagcaccaccaaccctatggaggcgaatgactggctccatgcaatagagaagaagctgaatctcctgcagtgcaatgatcaggagaaggtcgcttttgccacacaccagcttcaaggtcctgcgtcggcttggtgggacaaccacatggccacccgcccaccgggtactgaagtcacatgggcagagttctgccgtagcttcaggaaggcacaggtgccagatggggtcgtggcacaaaagaagagggaatttcgcgcactccatcagggcaacaggactgtgacagagtacctccacgagttcaatcgcctcacgcgatatgcaccagaggatgtccgtaccgacgccgagaagcaggagaagttcatggcgggtctggatgacgagctgaccaaccaactgatatctggggactacgccgactttgagaggctagtcgacaaggcaattcgtcaggaggatcaacgcaacaagatggataggaagaggaaggccacacagttcagggcacctcagggaagtcaccagaggccgcgcttcactcccggacagcagggtggacctaccaccatgatcgtccgccagtaccgcccgttcaatcctagcaactttccccagggctctagtggcagtcagaaccaccatggaggtcaatccaaccgcggtgcagctccacgcccaccaatggcaccggcacagtcaggcccgtccgcgcaagctaagaaggagactggggcaaaaccagggtcctgcttcaactgtggcgagcttggccacttcgctgacaaatgcccgaagcctaggcgtgccgggccaaggtttatccaggctcgtgtcaaccacgcatctgcggaggaggcacaagcagcaccagaggtcgtactgggtacgttccctgttaactcgatccctgcaatagtactttttgattctggtgcgacgcattctttcatttcaaagaaatttgtcgggatgcatgggttaataagagagaaacttagcacaccgatgcgggttcataccccagggaatagctccacttcggttcaattcagcccttctataacaatagaaattcaaagatcaccatttctagccaacctcattcttctcgaatccaaagatctagatgtcattcttgggatggattggctgaccaagttcaagggagtcatcgattgtgcgaatcgcacagtcaccttgaccaacgagaaggggaaaacggtagtgtacaaatcaccagactcaccaaagcaaggagtctccttgaatcagattgaagcggaaatcccagtggacaccgtggagaagaatttgaggaaattggaagacatacccatagtctccgagtacccagaagtgttccccgaagacctcactaccatgccacccaagagagagattgaattccggattgacttggcaccgggaaccgctccaatttacaagagaccgtacagaatggcggccaacgaattagccgaggtcaagaagcaggttgatgagcagctgcagaaagggtacattcgaccaagtacttcaccgtggggtgctccggtcatttttgtggagaaaaaggataagacgaagaggatgtgcgttgattatcgtgcactcaacgaggtcacaatcaagaacaaatatcccttgccgcgaatcgacgatttatttgatcaactgaaaggagctaaagtgttttctaagatagacctgcgatcaggctaccaccagttgagaattcgggaagaggatattccgaagacggccttcaccactcggtacgggctatatgagtgcacggttatgtccttcggacttaccaacgcacccgcattcttcatgaatctgatgaacaaagtgttcatggaatttctggacaagtttgttgtggtgttcatcgacgacattcttatctattcaaagtccgaagaagagcatgaacaacatctccgtctggtactcgagaagttgaaggagcaccagctatacgccaagttcagcaagtgtgacttctggatgacggaagtcaaatttctgggtcatgtcattacagctcagggtgtggcagtcgacccatcgaacgtagagtcagtcaccaagtggaccccaccgaagaccgtgtcacagattcgaagttttctaggactggcaggttattaccgccgattcatcgaaaacttctccagaatcgcccgacccatgactcagttgcttaagaaagatgagaagtttaaatggacagctgagtgcgataagagtttcgaggagctcaagaagaaattagtatccgcactagttttgattctgcctgaccagatgaaagacttccaagtctattgcgatgcatcccgtcacggacttggatgtgtcctaatgcaagagggcagagtggttgcgtatgcctcgcggcagttgcgtccacacgaaggaaattatccaactcatgacttggaattggcagcagtggttcatgctttgaagatctggaggcactatgtggaattttcagagctctagaaataattttaaccaattaaaattgagcaagcaatattttattccagggaaaatcctttttcctttttctttttctttttcctctctttttcctcctttttgtcaaatgggccgtcggcccatttctccttttcttcccccccctctctgttgggccggccgcaggccgaggcccagcccggcagccggccgcccgcctccctccctcccggggtcgccgacaggtgggacccacctgtcagacccgtttcccacctcccgccgatcccggcgcgccgccgcgcccgcaaccgtcgccgcgcccacg

SEQ ID NO: 30513 - DNA, 2115 bp, Oryza sativa
  Clone ID: PAT_MRT4530_34910C.1
ttttttttttttttttcttgcacacctgcatgaacgtcagtagatgtctctgtcgtatacattggtcaacccctcaaccccttgaaatggtacagaagattctcagctctacaaacccagaagccgaaaacggcgggctactcaagcgagagcccagtttgatcaaaatatatatgtacactatgtgataatacatgcaaaatatcgtgccactttttaatggcgacctggtgggcttctatgcgccccgaacaggttgtccatgtacgtctgcttcaggttcgtcatgatgttgggcagcttcatcagccttccgtcctcctgtgcggccggctcaggcgccgtcggcgagggcctatcggcgtcaccgttccagtcatccatgaagtcgagcagcgtcctgccgttgggtgaccctgtcattttgcagggggcatccacctcgccagcctgctggtggtggtgctccgcggcgtcgttggccatagccggcgccggcggcgcctccttcttggccttctccctggcgtggtcgtcggcgttgaggacgtcctctatccgggacatgacgttgaaggccaagctctccagcaccctggagtagctctccaggatggcgaacccgacgtccctgttttcctgtatcttggcgatgtcgagggtggactgggggatgccggggtaccggtgcttgatgatgagcaggagcgtctgcgcgcgctcctcgaactgctccctcttctcctggctgacggccgatccccacgccgacttgccgtccttgttgtgcaccttcctgttccagatgatcaccgacgcctcgatccggtccttgaggtccaggatcttgtgctccgacgtaaggtccaccgtcgacaggaacacgtccgggtcgaactccacgtcggtgatgatccggtacagcgcgtcgccgaggctcgccctcccgttcttggggagggattcgaggtaggattccgggatggccatctccatgaggcagttggcgttgatggccatggccgccttgagcacctggttcaccagctccttctggtgctggagccaccctctggacgccggcgagagcccgccaggcgggaccttcacgatcgggatccaccatttctcgtctgatctctgctcgtcgctatccgagcacgagtcgcgcttcacgtaccagaactcgttccgatccttgaagttgtccaggtaatccaggagcatcgtgtcgatcttgcgcaacgccggtatgttcgcctggagatctctccgctgctgcgtgcccatcacctccatctcaacgccgttgtccaagacttgtttcttcgcgacgaactcgacgatgtgatcggcgacggatagaagccagccgacctctttcttccacctccccttcctgtccggcgccatgggctccagcttccgttgctcaccaaacacagaagctgcaagattggtgatggcgttggacacggccagcgccgacggcacgcccttcccggaccccgacatgtcctccccgagcagcagcttggcgaacttctccttcatcagctccatctcggaaggtcctccgccgccgtgttcgccggtgtccttggcgagccgcgacttgggcgccgcgctgtccttgtcgagcacggcgccaatcttgagcgtgccgccgccgccgagatcctcatcggccggcgtgccccggccctcctcgctcaccatactctgcgaccgtcgcaccgagcttcgtctctctagcagcgacccaccgccgctcgctgccatcaaccgatcaactccaccgtggccagctgtaaaggacgcagctttctgcggcctcgagcgacgtgtgcagaagcaaacgatgatgatccaggattggcgctgcagaacacccacgcagagagagccacgagaaggaacaaaaaggggagggttgaaatgattaatcccgaggtgatgatgattgttgtttgtcccggtaatccaagaaccgggtggttcgatcgatcgtccccgacgtcgcggtaagaagaagccccggggaagagggggagcataattagggagcggcacatgctttattattagaaagtgccttgcctgccatagcgccat

SEQ ID NO: 30514 - DNA, 735 bp, Oryza sativa
  Clone ID: PAT_MRT4530_34911C.1
atggtcatcggaaggctggccttgagctccttcttccacaacaaggccagggacacctcgccgtccccgcctcccgccccggcaaccgcacctccgtgggtgtggccgtcctgcaagaacccaaggacgcagtccttccgcgccgcgacggcgccgccgcctcccccgggctccaggaccattgcctccatcttcctcgactccgccgagtcctccttcacgacctcctccgcgcggcacgactgctccgacagcctctccacggcgtccgaggcgtcggcgggggccgaggccgccgacacggccgacgacgccatcgtgcgcggcctccgctcctccgaccggctcctcttcgacccgggagcgtcggcaacgagctccatactggaggagaagtcgtcggacgccgccggcgaggcctccttcatcggcggcgtggcggtggcgttcgagtcggaggacccgtacgtggacttccgggtgtccatggaggagatggtggtcgcgcacggggtcggcaactggggctggctggaggagatgctgggatggtacctgcgagccaacggcaaggacacgcacgccgccatattggcggcgttcatcgacgtcatcgtcgccatcgccgacccggccctcgcgtcctgctcgtcgcaccggaggagctcgacttgcacgatcacggaggagtcgtcgttggaggtcgccgagaagcaggcaaaactcgccgtgtag

SEQ ID NO: 30515 - DNA, 799 bp, Oryza sativa
  Clone ID: PAT_MRT4530_34912C.1
tccggattcccgggtcgacccacgcgtccggctaacataaggtcggtcggtcgatcgacatggccactctctgcggcagcgtctgcttcttgtttgtaataatggtcattgcgtcgtcgccggcggcagtggcggcggcgggcgaggatatagtggaggagacgtgcgggcaatgcagcaggagcaaccccaacgtgaactacaccctgtgcgtgtcgtccctgtcggggtacccaggcgccgacctccatggcctcgccctcttctccaccatgccgctccgctccgccctggccaccatcgcctccgaggccagggtgctccgcgacagggcgccgccggggtcgccgccgaggtcctgcctcgactcgtgcctggaggtgttccgcgacgccgcctacaacctcggcaacgccgtggcggcgatcgagtcgtggaggtacggcgacgccaagacggcgatgagcgccaccaccgacgcgccggtgacctgcgaggacgagttcaaggggcagggcatggccacgccgccggccatcaaggccaggaccaagcccctcttccagcacggcgtcatctccctcgccatcatctccttgctctagccatattgctaccagctactactaccaattaattcgatatccaaatatcactagctagtactatcatgcatgcatgtctgtgtagtgtgtacgatcgatgatccattaatcaatgcatacttactgcatgatgatatatgcagaacttaaaaaaaaaaaaaaaaaaaagaaaaaaacgtggggggggggaaagg

SEQ ID NO: 30516 - DNA, 492 bp, Oryza sativa
  Clone ID: PAT_MRT4530_34913C.1
aaaaaccccttaaaaagggggtggttccatttattttggaaaagggttggaccacccgtttttgaaccaatttacattaaaccaaaccggtttcaaatttaaaaactggggggggcggttgaaacttgggggggaaaaaaaaaactttttaacccgggaaatcccaggttggggaaagggaaaatttttagggttgttccccaagggccccaaagccccccttaacttttttttttttcccaatgggggaaagggttggggggcttcccgaaggttaaacattttttgggtttttaaaaaaggcttttaacttaacaacaagtttcccggctttccttggcaaaacggtttttttgttttttttggaaaaaacaaaaaaacgccttggggaggcgataaaaagttcttttttcctggtaaaaggcccaccaaaaattttttggtggttaatagggttggccccaaaaatttttttaacccctttttggcctt

SEQ ID NO: 30517 - DNA, 319 bp, Oryza sativa
  Clone ID: PAT_MRT4530_34914C.1
atggcgtggctcgtattgcttgtgtgcgtccgtccacgtcgtcaaagtgtttcgacgtgcgccgacgcagcggagagtcgaaagcgaagagtgactgggtcgtggtcgaaagcgtcggtgcgcacccaaaaaaaaaaagcgtcggccaaccatagcggacgtactcacgtacgtgactacgtgagcagtaagcctacggccatcacgactctcctccagtcctcatgtccccgacctgcaagggcggctgatcgggaacgaactcgaatgcgggtagtcgacgctccagaggagtaacgtgcccggctgcccgcgccat

SEQ ID NO: 30518 - DNA, 561 bp, Oryza sativa
  Clone ID: PAT_MRT4530_34915C.1
ggccgcttttttttttttttggctagtgtaatattgcatcattatcatttccctttcttttatgtgagatctcactttgctctcgatacatccaagaagattgtggcaccatgcatgttttacaaatccatgcaaagaaatgctattttgtttcgaaaagaatacggtctagtacttctgatcacttgtaggtttctataggtgggtatctgtccttgaacaacggtgtgccttcctttggcttggaccaagggtacttcatggttggatcccttgggaacttcctgaagttgacgaatggtgcccacaacatcatcccggggaagaagaggtacgtgaacatgaactgcaggtacgtctcgacgaacttgcgcttgaaccacctcagcctcatccagttcatgataatcggctgcagaaacaaaggaaaaaaaaaaccatcacaaacctgtacacccgatctctgaattagcctcgcaagaaaccaagaatggcggcccgtatctcaccgggagacgaacaggaaacgaaggcgatggcgccaccgtcgcagatccccag

SEQ ID NO: 30519 - DNA, 585 bp, Oryza sativa
  Clone ID: PAT_MRT4530_34916C.1
atgcccatgcagcttctctgccactctgcctctggcaactggaggtctggccctctactcgtctacgcctgcactgctacaccaggcgacccggcgtatatgtccttcgcgccggtgtggcatggtctaaactcaagtcgtcccatctccatctcaatccgaggcaggcgccagcctttcttcacacatccgcggcgtcgtgcggtcgtgcggtcgtggcgaggcggcgaatggcgatggcaggatgcagacggacagcagcggggcaggacaggatcaaccaagcaagggaatcacaggtacccagccttcccagtccttcatactacctactacctagtcctagtactagtccgagctcttcgtttttccagcggtaaatcacaagtggtgcccagcgccgcgcgtctgcatccgttcggccgtccctgtcctcggtactcgaccagtcgaccttgcagtgacagcagtggactagtggtagcgcagttgacggacgctttgattcattgcgccaatgcggaagggaatcgcgggacaccgtcgcagctttgcaggagatgctctgagcgtcttgtagagacg

SEQ ID NO: 30520 - DNA, 216 bp, Oryza sativa
  Clone ID: PAT_MRT4530_34917C.1
atggtggaagacagctcgtgtgacagcaacggcgacgggctcagcttgggcgacggcgacgatggcgggctccagtggtggggagggcgagggaagcggcggcgggatcggcgacggcagcgggtggcggggtgctcggcgacggcggatccagcaatggatcaggcgatggtggcgctcgacgaggactcgcgctacctcaccaaactctcttga

SEQ ID NO: 30521 - DNA, 601 bp, Oryza sativa
  Clone ID: PAT_MRT4530_34918C.1
gatttttagggtgtggcatttcgacagtcttaggtccacgcgcatgaaactgaaccccgaaaagtgtgtgttcggcgtgccagcggtcaaactcctcggttttctagtctcctcccgaggcatagaagctaatcctgagaaaatacgcgcgatagagaggatgcgcccccccagcaagcttattgatgtgcagtgcgtcactggatgcatggccgcgctaagtcgattcatatcgaggctgggagagagggcgctgcccctattcaaactcctcaagcgccccgggccgtttgtgtggacagaggaggcggagcaagctctcaatcagctgaaagcttacctgacctcccctcccatcttggtagccccagggacggaggaaccattgctgctttacttggctgcgaccccccacgcggtgagtgccaccctagtagtcgagcgcgacgagagcagaccgggagcccctcgactggcgatggcccttcatcccccgaaggctcggtacctgaagcccccaacccccgggaggaccccgaggcccccgtgggaggaagggaggctctggcgggtggtcccgaggcctatagtcctgacatga

SEQ ID NO: 30522 - DNA, 507 bp, Oryza sativa
  Clone ID: PAT_MRT4530_34919C.1
atggattggtcctggagaggaatattcttcttagatccgggaccaactgatccgggaaaatatgacggaccaacttgggatgagcaaacggcgtcacaacggcttctcgcgtgctcgccgccctgctcgccgcttattgtccgcgtgctcggcgtgatggtggaagacagctcgtgtgacagcaacggcgacgggctcagcttgggcgacggcgacgatggcgggctccagtggtggggagggcgagggaagcggcggcgggatcggcgacggcagcgggtggcggggtgctcggcgacggcggatccagcaatggatcaggtgcacggcatgagcgtcgtccttcttctccgcgtgctcgtcctcccgctgctctctcgcaagcagccagcctgctcgctggccgtgctagctctcccggccaccggtcactgccgattggtccgattagagcaggcgatggtggcgctcgacgaggactcgcgctacctcaccaaactctcttga

SEQ ID NO: 30523 - DNA, 703 bp, Oryza sativa
  Clone ID: PAT_MRT4530_3491C.1
agcaaaaagctagctgctaatgacaagaccctggaaaatataaatgttaagctagatggttttgcttatgcattccaaaactagcttagttttaataaaatgatcgaaacctagcaggcacaattagctgctttagtacctgctaatgaatctgggaggattcttggacaacggacccctccgttaaaaatgttaaggcaatcacgacgagggaaggagctggcaacaacaatagggaagcaccatctagcgatgcggctgaagaaaaggtttagcaagagaagaccatgccgcaggagtactgcgacacaaggctgctgccattcccccagagatacaacaagccattggtggactagcagttcgcttgttttgttgaggtgatccagaaaatccatattcacgtgccactgttggacgccatgcaagtgcccacctacgcgcgttacctcaaggacatactcaataacaagagaccacttccgacgaccgaagtggttaaactaatggaggaatgcagcaatgcgatactcgacaaactccctgaaaagaagaaggatccggggtgtcccacaatcacttgctcgatcgggacacaaagatttgaccaagacctttccgacctaggagcaagcataagcgtcatgcccaaagacgttttcgacatgctcaacttcacggtgttggcaccaacaccgatgcg

SEQ ID NO: 30524 - DNA, 484 bp, Oryza sativa
  Clone ID: PAT_MRT4530_34920C.1
aaaaaaccagaaaatattaatccgagccgtcgaggttttattaaaaatacttcgtttggtcttgcagggacatctttagccggtggtagcgtaaatgcattgcttacaacagaagccgttgccgcagaaatgcaaactgtcgttactgccgcacattggggcgcattaggtgtcgtagttgaaaacggtaaagtggttaaatccggtccggcaatgccagtttctgttgaaaatgaattacaaacagttgtgccagatcaagtgcatggcgaaacacgtataaaatatccaatggtacgtaaaggctatttagctggcaataaagacacttctttacgtggtcgagatgaatgggttcgtatttcttgggataaagcctttgaattagtcagcgatgaaatgaaacgtgtgcgtgatacttatggcccaagtagtatttttggtggttcttatggttggtatagttcaggttcattgcatgcgg

SEQ ID NO: 30525 - DNA, 285 bp, Oryza sativa
  Clone ID: PAT_MRT4530_34921C.1
atgggaaaaagaaagtgtatcattgtatttcgtcgctgtgtatgctttaccaggacatcggacaaaagcaggcagcagggagaagaaggtgattgtgtcctcaggcggcccaagaaggatccaccaccgaatacaccgccatcattctcggccgaacatgccatcatttctggatccaaccgctacgagttggccgccagatttacgctccctgccacgtactccgttgtcccgaaaaatatgttcacgttgattgacttagatgtatcacatcttattttagat

SEQ ID NO: 30526 - DNA, 2980 bp, Oryza sativa
  Clone ID: PAT_MRT4530_34922C.1
tcatttcgagcgaaacttgccactgactgaatcataagttggcacgttcagaacgtttccatgagatgccattgtcaatggtgatgatatgattttctcagcaagggctgtaatgtctttcagagtaacaccatcaacagccttgagaaggtgctcaacaggtttcctttcaccaaaggccaatatttgccgtcccatgtcttcagttgctgatgcctttgattccaggttcatcaagattgctgatttagctgtcgctttagcacggtcaagttgagtttggtcaacttttccaggagtggcaagagaagtgagctctctggttgccaagtcaatagccttaggaacgaatgctgcatcagtagatgtatgaattccaaaaatgccagtgttactgtgaacatccttgaaagcagctatcgatctaatctggtcgaattcatttgcgagatgatttagacttgaatgcaagccttttccatgccttccccaggaatatgtgccaccgccaccaagaagggtctgaagaactgatactgttacaaattctttttctttgagccacccaccagggacctcaaatgccaaagcaacatctgtgttcgatgaatcagcagttcttctatattccccaccaacataggtagactttggctttgctggtccagttacaccaggcatgtcagacagaagtggttcagcaatagataccaattcatcatgatcaacacctgttgcagctagaacaattcggggagcagtgtaattctccagataaccagtagaatgaagagcctccaaaagaaaagtttcagggttacttgaagcttctgcaagctctgccttcagtttcattatctgttccttgacttcccaatcaagaaaagcaggattgcgtacacaatcaataagcacctcaaccatggctgcagtacacgggcaggaggcgtgcgtgttgttgtcgggtattttgttttgcttttttatagatgaaatatttattcaagtgtttcagcattcgtgtcaaagattttgcaaggagaccggtattttgtacaggccctggccgccaccgaaagtgggccctaaaaattacaggcccataaaactgatgaaaacagcataaaaaattccaactcaagtggacaaatgttgcagaaaaaggtaaaatatggtattctcaatcatccagagttaaatgatcaaaattgtatgaagctccttatttttctctctgaaaccctgccaatgaatggcctgaggaaaaactatcaacagttaaaacttgtccaggaggaggataacaatgaccacattactactcatttcgggcgcaactggccactgactcaatcataacttggcacgttcagaacgtgttcatgagatcccattgtcaatggtgatgataggattttcttagcaaaggggtgtaatgtctttctgtagtaataccttccacacccttgagtcatgtgctcaacaagtttgcttacacaaagggcccaatatttgccgtcccatgtcttcagttactgatgcctttcattcatggtacatacacattgccggtttagctgtagctatccggcccttaacatgggtatggttcttagaccaggctcaagaagctcctgagacatcttggttgaaaagtctttaggcttaggaatgaatgttgcatcagtagatgtatgaattcttaaaatgcacagggtttctgtgaacatcttggaaacaagctatagctctaatagggttggaattccatctgggaaatgatttatacatgaatgcaaccctttaccaagcgttcgccaggaatatgtgccaccgccacctagaagggtctgaagaactgatactgttacaaattctttttctttgagccacccaccagggacctcaagtgctaaagcaacatctgtgttcgatgaatcagcagttcttctatattccccaccaacataggtagactttggctttgctggtccagttacaccaggcatgtcagacagaagtggttcagcaatagataccaattcatcatgatcaacacctgttgcagctagaacaattcggggagcagtgtaattctcagctaagaagtattctaggacattcgtattcaatcggctaactgaggattctgaggcaatcagaggggttgccaaagcaccagaataaccagtagaatgaagagcctccaaaagaaaagtttcagggttacttgaagcttctgcaagctctgccttcagtttcattatctgttccttgacttcccaatcaagaaaagcaggattgcgtacacaatcaataagcacctcaaccatttcaggcatgtaagttttcagggctgcataactgtagctcatcatctcacggttagcagatgctttcacattgccacctactgcctcgatttcacgcacaacacgcaaatggctcctgtttgtagtggttgtaaaggccatcttcttcaacagctgagtggcacctagtgtttcaggtgcttcatgtacagaaccacaattaacatatactccaactgaacaagatggtcctggagttgtctcagaagcaatttttacaccatttgcaagtgttgtgatttttgtcttgccaggctccacaaggtcaggtagcggaggtggaatggtgacccctggaagtgtaaaatctggaggaggtaatgcatttgaccgtgcacctgtcagccaggtccagaagccacctgatgacctctgtgcaacacttgtgctagcacacctaatcgcaacattcaacatttgaccatccagtccatgccgcttgatggccccgaggccggaggcggcgcggtacatggcgacccggtgcccgcggaggggtcgcccgtcggagtcgtcgccggcggcggcgcggcggcggaggcggaggcggagatggggaggaagcgaagggaaggcgagggcccgcccgcgccccgggcctccactag

SEQ ID NO: 30527 - DNA, 199 bp, Oryza sativa
  Clone ID: PAT_MRT4530_34923C.1
gcatgctggaagggcaaacatgtccttcagtgtttgactgaactgcgtgctatgaatacatattgagtttagctagattttttattagtgggtattaagtcaaagtgtcaaactagtttctgcaaaattggtcaatagtattagtggtcaaagtaaatttcatcgagtcattgtgtttattatagaaaaaaaaaaaaaa

SEQ ID NO: 30528 - DNA, 420 bp, Oryza sativa
  Clone ID: PAT_MRT4530_34924C.1
aattgtttgtttttttaattttttgggtttttcccccctttccttttttttttttttttttttttttttttttttttgaccccaagggattttacctaaatccctatataaaaaccatgctttccaaacaccccatttattattacaaacccccccctgggacaaaaccaaaacgcaaccccctcctccaggggggaaaacaggaaacattcccgacttcccaggaaaattaaaccaggaagggattctccggtttaaactaaaccagatctagggggcccatgtttttccagggtggtgcctagggtgggggggccatttttactttgagcgggacccccccgaatttaacccggaacaagcttattaacgaaaaggtcgacctttgggatttaacagccctaaaaagggggccctttg

SEQ ID NO: 30529 - DNA, 309 bp, Oryza sativa
  Clone ID: PAT_MRT4530_34925C.1
ataacaaagcaatttacaaggggttcaaaaactttaaggggggtaacaaacataattcggtataccaacatagctaatcaaacccactaacttaaacaaacggctgctagctgctactcccaacacatccgaccatacaaagggcttaaaatcctcaaatacaactaattcaactgcgactacaaactctcatacttcatgtggtaatatcccatgaaataaaataccccatcaggcaaccacaaatgcttcggcttgttggatattttcaaatgctcgatcaaacgggaacgcaaaaaggaaaacccc

SEQ ID NO: 30530 - DNA, 426 bp, Oryza sativa
  Clone ID: PAT_MRT4530_34926C.1
atgtgggatcatgtaaaaacaccagcaaacgcaatggaaatgctcaatggcgagtcaaaaccattgccttaccttgtggattttgtgctaaatctcaccgaggatagggagaggaaragggaggcggtgggtggcctggagatgagaggggagaagaggggagaaggtggcctggtgtgcggagcgaggggagcggcacggcggcaggcgagcagccgcggcggcggcggcggcggcaggcgatcggcggcggaggcggcagtcgagcggcggcggcgacaggcgaggtcacacacgcggggcttggtagtgcggctagggcgaggatggccggaggagggcgaggatgcagcggcgacggcgcgcgcaaaggaagaagggcgaggcggcggcgagaggcgacggcgtggcggcgtagtcgcgtag

SEQ ID NO: 30531 - DNA, 157 bp, Oryza sativa
  Clone ID: PAT_MRT4530_34927C.1
agggtgcgctgacgtattagagacaccggtgaggaggccgcgctgaggtactacagctcaactttccggatctccggcgaggccgcgaggatcaacttgcgccagctcacgcggggggggacccacatcggcacggcaattcacgcggggggggact

SEQ ID NO: 30532 - DNA, 402 bp, Oryza sativa
  unsure (1)..(402): unsure at all n locations
  Clone ID: PAT_MRT4530_34928C.1
agctagctcagttccttggtcaaccgttctcgggtgctgaagaagaagctggtgttgtcacagagattgcagacctctgcagcattgacaatttgaggaaccaaaaagctaacaagtatggctccattggcgggaagatctcgcatgaatccttctttaggaaggggatggcaggggactggacgaaccacatgactcttgagatggcagagcgtttggattctatcctccgggagaagctcgatgggtcagggctaattgtgtgacgttattccttttatttattttgatttgtcttggtatgatgataaatctgtttccatgccaaaaataaatcggtattncacaaagtcctgatctttaccagctttctagttcttttctccatacatggttttaagg

SEQ ID NO: 30533 - DNA, 355 bp, Oryza sativa
  Clone ID: PAT_MRT4530_34929C.1
gtataccctctacctctggatatatgccgtatactgatacggtatacctgcgcgtatacggatgtttcctgtacacgttaaggaaattcatcacgtaatagaaacggagtctacggatggaaggagtcctactcggactgaactgggtcgtcactgtatcgtgtggggtctgatatctccgagttctacttggagatcaactgacccgcagtataaaagggacccccgggaggacctaaggcattgaatctcactgccaacacaaccaccacagcctacgaagtcgaagcccacaggagccaagtcgccgggtgatctagtcggaccaactcgactacggtctcgtcggtatcat

SEQ ID NO: 30534 - DNA, 5452 bp, Oryza sativa
  Clone ID: PAT_MRT4530_3492C.1
atggccgaccacccacccaaccaccgcggagaaggcatggatgattttgtggcagagttggcttgcatgaccctggtggtgggctaccccaacgcgccggagtactcgaccgttctgctgctcagtggcgagcttccccaccgtgttcgtctggaggtccatggctatgtgggcacctgcctcgctaacatggtggttgaggcatctggaggcaacagagatcacgcctgtcaggaggcagcatatctgatgatggctaggcttcgtgatcgccacaactacatcttctacaacacggcgtaccgcttccaccctcgccgagcaagtggcgacgacgccagcaccttccgcccgacagtcggcgagaaccacaccaccttcgggcacatgtgcaccgtgatgaggggaatggacaagatgcactctaacctgcacaaggcatccaaggccttgaatgatgggaagcttgtgaggatcatagctctgaaggatgagatagcacgcctgaagaaggagaacgctcagttgaagggtctcccagcggcaggaggagtccggatccgcaccacgccccgcaagtctacgattgctcccgtgtgcattcagcttgcgcccaggaacccagcacccacagctcctcccacagttcccgcagctcctcccgcagctcctccagctccagtcccagctcctgttccagtgttagctcccgtgtccgctctctcctttgctccagcgtcagctgccaggggtccagccagtggcaatggaggttggttgcctgctactcctagtggcagccgcgaccacagcagcagcagttccagtggctcagagccgggcagcggtgagacgtatctgccagactccaggagctgctcagagggacccggcctcttccttccgatggtcaacaccaggaatggcagccgtgcagcaggtgagggcagcaacgacgaagaacgcgccgacggtggatatcccaacagcgcctctggcaacggtccgccaccgctccccgagaactcgactcttgcacaagtgatggcccatcagactcagatgatggcggccatgatgcagcagcagcactagcagatgcaccagaggatgcggtagcaagccgagcagcagcagtagcagtttggtccccctccccctcagtccaagctgccaaagtttccacgagtcaggccacccaccttctctagcaccaccaaccccatggaggcaaatgactggctccatgccatagagaagaagctcaatcttctgcagtgcaatgatcaagagaaggtcgccttcgccacacaacagctccagggtcccgcgtcagcttggtgggacaatcacatggctacccatccgccaggtacggaagtcacttgggcggagttctgtcgcagctttaggaaggtgcaggtgccagacggggtagtggcacaaaagaagagagaattccgagcactccactagggcaacaggacagtaaccgaatacctgcatgagttcaatcacctagcatgatatgcaccggaggatgtccgcactgacgcagagaaacatgagaagttcctagcaggcctggatgacgaactgaccaaccagttgatctacggggattacgctgacttcgagaagctggtagacaaggccatccgtcaggaggatcaacgtaacaaaatggacaggaagagaaaggcagctcaattccgatccaaccaaggaagtcaccagcgaccgcgcttcacttccggacagcagggtggacctaccaccatgattgtttgacagcatcgtccttacaacccaagcaacttccaccccggcagtagtggcaaccatcttggccaagggcagcacaaccgcggcgcagccccacacccgccaatggcgcctgttcagcaaactgcacccgctcccccaaagtacaccggaggcaagccaggagcctgcttcaactgtggtgagtctggtcacttcgccgacaagtgtccaaagctcaggcgcgctggacccaagtttgtccaggctcaggttaaccacgcgtccgcagaagagacgcaagcagcaccagaggtcgtactgggaacgtttcctgttaactcaatccctgcaacagtacttctctattctggtgcaacgcattcattcatttcaaagaagtttgttgggtacatgggttaataagagaggaacttagtacaccaatgcgggttcataccctcgggaatagctccacctcggttcaattcagcccttctgtaacaatagaaatccaaagatcaccatttctagccaacctcatccttctcgaatccaaagacctagatgacattcttgggatggattggctgaccaagttcaagggtgtcattgattgtgcgaatcgcacggtcaccttgaccaatgagaaaggagaaacggtggtgtagaagtcaccagtcgcactaaaacagggaatctccttaaatcagattgaggtggaaaattcggtggtcaccgcggagaagagttcgaggaaattggaagatatccccatagtctgcgagtattcagaggtgttccctgaggacctcactaccatgccacccaagagagagattgaattccggattgatttggcaccggggactgctccaatttacaagagaccgtacaaaatggcagccaacgaactagcagaggtcaagaagcaggtggatgagcaactgtagaaacggtacattcaaccaagtacttcgccttggggtgctccggtcatttttgtggagaagaaggacaagacaaagagaatgtgcatcgattatcgcgcactcaatgaggtcccatcaagaataaataccctttgccgcggattgatgatctgtttgatcagctgaaaggagccagggtgttttccaaaatagacctacgatcgggctaccaccagttgaggattcaggaagaggatattcccaagacagccttcaccactcggtatgggttgtatgagcgcacggttatgtcttttggacttaccaatgcacctgcattcttcatgaacctgatgaacaaagtgttcatggaatttctggataagtttgttgtggtattcattgacgacatacttatatattcaaagtctgaagaagaacatgagcaacatctccgtctggtactcgagaagttgaaggagcaccagttatatgccaagttcagtaagtgtgacttttggttgtcggaagtgaaatttttgggtcacgtcattacggctcaaggtgtggtagtggatccatcgaatgtggagtcagttgccaagtggaccccacctaagacagtatcacagattcggagtttccttggacttgcgggttattaccatcggttcattgaaaatttctccaggattgccagacctatgactcagttgcttaagaaagacgagaaattcaagtggacagccgagtgtgacaagagttttgaggagctcaagaagaaattagtgtctgctccagttttgattctgcccgatcagacgaaagacttccaagtctattgcgacacgttccgtcacgggcttggatgcgttctaatgcaagagggcagagtggtcgcttatgcctcgcggcagttgcgtccgcatgaaggaaactatccaacacatgacctgaaattggcagcggtggttcacgccttgaaaatctggaggcattacctgattggcaactgctgtgaagtatatacggatcacaagagtttgaaatatatcttcacccaacctgatctgaacctccgacagcgaagatggttggagttaatcaaagattatgacatgagcattcactaccatccaggcaaagccaatgtggtggcagatgcattaagcaggaagagctactgcaatgctttgtgcaccgagggcatgtgtaaggaattgcagcaggtgcttgaacatctcaacttgggaatcgtagaacacaggttcatggctactctagaggctcggcctacgctcgtggatcaagtcagagcagctcaagtaaatgatcctgagatagctgaactgaaaaagaatatgagggtcggaaaagcccggggtttccttgaggatgaacatggcacaatctggatgagagaaagattgtgcatgcctgatgacaaagagctgaaagatctgatactcaccgaggctcatcagactcagtactccattcatccaggcagtaccaaaatgtaccaagaccttaaagaaaaattttggtgggccagcatgagaagggaaatagctgaattcgttgcactctgtgatgtttgtcagcgagtcaaagcagaacaccagaggcccgcaggattgttacaacctctccagatcccgaaatggaaatgggaagagattggaatggatttcataacaggtctgcccaggacatcatctagccacgattcaatctgggtagtcgtggattgactcactaaagttgcccatttcatcccagtgcataccacgtatacgggaaagaaattggcagagctatacttagcaaggatcatgtgtctgcatggggtacccaagaagattgtatctgatcgagggagtcagttcacctgaaaattttggcagaagctgcaggaagaattggggacccgtttgaatttcagcacagcctaccacccgcagactgatggccagaccgagagggtcaattagatcttggaggatatgttgcgagcctgtgcgcttgattttggtggagcttgggataaaagtctgccttatgctgaattctcatacaacaacagctatcaggccagtctacaaatggcaccattcgaagcgttgtatggtcggaagtgccgcacacctctcttctgggattaaacaggcgaacgtcaactattcggaatagaagtgctaatagaagcagaggagaaagtcagaaccgtcagagagaggctaagagttgcacagtctcgacagaagagctacgcaaacaaccgccgaagagagctcacttttgaagccggggattatgtgtacctccgtgtcactccgctctagggagtacaccgtttccagacgaaaggcaagttggcaccacgcttcgtgggaccatacaaaatcttggaatgaagaggagaagttgcctattagctagaacttccatccaacatgatcggtatccatgacgtgttccatgtgtcccagttaaagaagtgcttgaggctacccgaagaacaagccgattcggagcacattgacatccaagaagatctgacatatgtggagaagccagttcgcatccttgagaccagtgaaaggaggactagaaacaaggtcaccaggttctacagggttcagtggagccaccactcagaagaagaagcaacctgggaaagggaagatgagttaaaggccacccatccgcacctcttcaccagctcttccgaatctcggggtcgagattccgtt

SEQ ID NO: 30535 - DNA, 1008 bp, Oryza sativa
  Clone ID: PAT_MRT4530_34930C.1
ccggccgggtttttcgatcggctctcccctctcttctccttccccccttcccctcctgcaagtaaaacaagcgagagactccccccctcaatggcgtcccggatcgcgaggctgctacagcaccagaaccgccgcctcctctccaccgccgcggaggcctcctcccgccgtccgccgcgcgctcccctcagcggcgccatccccaagcatgaagttgcaaaggctgaagcctcatctttaaaaaaatcaaggtggtacatgatcaagtcaaacccttcaagtcctctcacaacacagcgtgaaagccacaaagtatctactcatttagttaggccttctgcatcctactccacacaagcttcagagcagaacccaaaagagggtacaaaagacctgaaaactgttgaagatccatttgattcccctacctacaacatacctgagaagccagtgacatttgctgaaggggcttcctacagtcttgtaatagttgcgggacttggaattgcagcagtggctggatatgctgttttcaaagaacttatatttgaaccaaaagagtacaagatttttggaaaagcgctagcaagagtacagaatgacagtcaggttacagcaaaaattgggtatcctgttactggatatggcaatgaaagtagaaatcgtgcagctcggcagcgcattcctaacaaggtttggacagatgaggacggtgttgaacatgtggaggtaaacttctatatccgaggaccacatggagctggaaaggtgtattcagagatgttcaaagataacaatgacaggagttggaagttcacataccttattgttgagattgtgtctccgcatcgtgtacaactaatgttagaatcttacgtaccagcataaggatgcaagaaacaagcagttagcagtggcagaattgttgtaaggttcatgcctccacacttacctatccaatgtgtacatctctcatatttagaaatcatcctttgattacagaagttt

SEQ ID NO: 30536 - DNA, 1223 bp, Oryza sativa
  Clone ID: PAT_MRT4530_34931C.1
atgctcccggcccttctccccggctgcctcgccgcgcccccgcccccgccgccgcttgtcaccaccagcagcaccgcatcccctagcgcgcacctcagaacgctccggctcccctctggccttgcggtatcccgacgcgcgggcttcggggaggccgcgcgtgcagcggccaccgagcgaggcgccatcgaggaggaggaggaggaggaggaggggttcccggagtgggggaacggcgacgaggatgagtacgaccacgacccggagatcggcgacataatgggggagtacttcgacgaccccaacaaagcccagtctcgcatggaggagaggataaagaagaagcggcacaagatcgtgcaggccaagaccggctcacccaaccccatgaaggtcgtcttcaacaagtttgacttctccaattcgtacatatggttcgagttctaccatgctttactgccaaaagatgtgaccttaatttgcgatgctctgcggtcatggcatatagttgggcgcctgggcgggtgcaattctatgaatatgcagctatcacagttgcctttagactgtcaaagaccaacttatgatgctcttgaaggagcgaataccacaccaacatccttttacaatattggtgatcttgagattcaagataatatagcacgtgtatgggtagacattggtattcacgaaccgttgcttttggacatcctgcttaatgcattaacgaccataaattcagacttcctgaatcatccacctcacaagggcttcaaccgctatgatcttgcagttctaactgagaagaaaagcgacgacaccatccttaagcctgaaaagtttgttgccattttcctgcaaagaacctttgcttggaaaaggttgcctattattatgcaaagaagccagcccatcaagatgcaaatagatcctaagatgagtgaaggtgcgcatgatttcttcaatctcatctacttggaatataggcaacaaagtacggtgattgataagatataattggagagttgttacagaaattttgcttcgattaatcaagacttcaagagagttcagaagtagtataacatttttcactgtggtacacagattattgtcataggcgatgtttgtaggatttttcacataaattttcgaaagatcgattttcacaaaaaaaaaaaaaaaaaaaaaaaaaaaaaaaaaaaaaaaaacctgcagcccgg

SEQ ID NO: 30537 - DNA, 1528 bp, Oryza sativa
  Clone ID: PAT_MRT4530_34932C.1
ccttcctgcagcctccagcttccctccgccaatccaccatcgccgttggattcgtaatcgtcggacacctcgaatcgccgcaaaaataaaggcgagcacccaaccgcaccgcaacctcctttcgatcggctctcccctctcttctccttccccccttcccctcctgcaagtaaaacaagcgagagactccccccctcaatggcgtcccggatcgcgaggctgctacagcaccagaaccgccgcctcctctccaccgccgcggaggcctcctcccgccgtccgccgcgcgctcccctcagcggcgccatccccaagcatgaagttgcaaaggctgaagcctcatctttaaaaaaatcaaggtggtacatgatcaagtcaaacccttcaagtcctctcacaacacagcgtgaaagccacaaagtatctactcatttagttaggccttctgcatcctactccacacaagcttcagagcagaacccaaaagagccaaaggcagtccaagtcagagcaaggcatggcagtctgggtaggcttcttgttaggctgggcaaccaactggatggcaagacgttcactgctcctctcacctccaccctcctggcattggctactgaatgtggtcctcaatctttgctggctggagttataagagagaggaagggcagctcccaggcagagaggaagggaatagaggtagaagagacaggtttgctctatgccccatacctccttactggcagggcagtcttgtctatgggtacaaaagacctgaaaactgttgaagatccatttgattcccctacctacaacatacctgagaagccagtgacatttgctgaaggggcttcctacagtcttgtaatagttgcgggacttggaattgcagcagtggctggatatgctgttttcaaagaacttatatttgaaccaaaagagtacaagatttttggaaaagcgctagcaagagtacagaatgacagtcaggttacagcaaaaattgggtatcctgttactggatatggcaatgaaagtagaaatcgtgcagctcggcagcgcattcctaacaaggtttggacagatgaggacggtgttgaacatgtggaggtaaacttctatatccgaggaccacatggagctggaaaggtgtattcagagatgttcaaagataacaatgacaggagttggaagttcacataccttattgttgagattgtgtctccgcatcgtgtacaactaatgttagaatcttacgtaccagcataaggatgcaagaaacaagcagttagcagtggcagaattgttgtaaggttcatgcctccacacttacctatccaatgtgtacatctctcatatttagaaatcatcctttgattacagaagttttgagttttgatcttccccagtagcacaactatctgagtctgatcatttctggtatcttaaatatggtgtagcatggaaggacctaatgttactttgttcagctgaaggccattaagatacatgcatacatcacaatttttat

SEQ ID NO: 30538 - DNA, 627 bp, Oryza sativa
  Clone ID: PAT_MRT4530_34933C.1
gttttatactacattgtggatgccctagaattgaacgaactagtgcatctggggggaatgatctagaatgttcaactccatcaaaatccagatgacatcacttggaattggtctgaatcaggtgtttactcatacaagagtgcctacttgtaccaatttgaaggctcatttacctcaattgattttaaatcaatttggaaagcaccagctgaaccaaaaatgaaatttttggggtggttgattcttcatcaaaaaactcttacagcacaaaaccttctcataagacactggccgtgtgattggatttgttgcctctgctcgagtgcgttcgaagacacaaatcatttgttcagtgaatgtgactttgttcgggaggtggttcctgcttggcaaaacttatcaatttctacctccaatccgcaagctggagctacaaactggtggtccaaggtaaatctgactgtttcaaaggttgataagatcgcaacaagaggagccttgctcacaacgtggtggaatatttggttagaaagaaatagaaggatttttaatcataaaagcctttcggaaagagaagtggctcacttagtgaaacatgacttagacttacgtagctgggcgtttaag

SEQ ID NO: 30539 - DNA, 621 bp, Oryza sativa
  Clone ID: PAT_MRT4530_34934C.1
atggcggacaagcaggcaggcggagcgttggagagcggagcaggcggcgggcggcgacgggcgagcgcgactactagcggcgacggcgggcaagaaggcacccggagcgacggagagcggtgcctgcggcgagcggcggctgcagctgctgatgctgagcggcgtcgggctgcgtgggcagctggagaagcacggcatcctcccgtgttggaccagcccacggtcgggcagggcatggtcggcgagcgcggcggcggagcatcagcggcctgcccatcctcctgctcgccgtcgagccctctcccggccgctctcctccgcatcctccgccggtgtcgtgccgaggaggtgcgtggtgccgtggaggcggcgtggctggcgacagcaaggtcgccgctcgccccctcacccgccgtggctccagatggggagaggcgggcgccagccgccgctcccgccgtcgcgggcggtcacgtgcgagtggtcacgccggccgcctctctccccttctctggcgctggccgcctcctctcccgcttcttccccgcgcgccgcagcgcccatggcgccggcagccgcgcccgctccgctgtcggccgccatctgctcgcctgcgcgtga

SEQ ID NO: 30540 - DNA, 577 bp, Oryza sativa
  Clone ID: PAT_MRT4530_34935C.1
agcgatttgaatgtccaactccatcaaaatccagatgacatcacttggaactggtctgaatcaggtgtttactcatgcaagagtgccttgtaccaatttgaaggctcatttgcctcaattgaattttgaatcaagctggaaggcaccagctgaaccaaaaatgaaattttgggggtggttaattcttcaccaaaaaactgttacagcacaaaaccttctcataagacactgaccgtgtgattggatttgttgcctttgctcgagcgcgttcgaagatacaaatcacttgttcagtgaatgtgactttgtccgtcaggtgtggaacctagttcatgcttggcaaaatttgccaaattctacctccaatccgcaagttggaactgcaaactggtggtccaaggtaaatctggctgttttgaaggttgataagatcgcgacaagaggagccttgctcacaatgtggtggaatatttggttagaaagaaatagaaggatttttaatcataaaagcctctcggaaagggaagtggctcacttagtaaaacaggactttgacttgcgtagctgggcgtttaag

SEQ ID NO: 30541 - DNA, 272 bp, Oryza sativa
  Clone ID: PAT_MRT4530_34936C.1
tgaaatgcaatgatgcggatgagtgatgatgagttgccaaatcccgtgctgcaatgtgcccaaacccccgaccaaccaaccaaactgaccgtggttgccaatgggatgttgaatgggtttgataacatttggtttgcttggtgcccaaatgattgatgactgcaccccgttgcaaatataagcttgtagaattcaaaatttgtaccacgtataacatttctatggcttttatggagaacctagaactgatctagagccaaaaaaaaaaaaaa

SEQ ID NO: 30542 - DNA, 210 bp, Oryza sativa
  Clone ID: PAT_MRT4530_34937C.1
atggggatcaattgtagagtactccacttgaaaagtggtgcaactggccaggacctcacttcggatttctctgatgaggtcttgtcaatttcggcggtgcgggctcaccccatcctagtggagctgcctctcccctctccggtgcagattggagcgtcgcagcatggatcaaggcggcacagcgagcgctctccactcgacagcgtctag

SEQ ID NO: 30543 - DNA, 300 bp, Oryza sativa
  Clone ID: PAT_MRT4530_34938C.1
aagcttcactagcaataaagatcatcgccaaagcttcactagcctatgtgtgtgccctatcactcgtgttgctaagcttcactagcctatgtgtgtgccctatcactcgtgttgctccactaatcagtgcgtgaagtccaacctagtagataatgcatcctccaagacatcgcatactcttaatatttatactccctggtttaatgtgtatacatatcaaacaaggtgctgtcataaaatgggatttatatgtctattatgtattctcagttcgtttttctattcaaaaaaaaaaagctt

SEQ ID NO: 30544 - DNA, 337 bp, Oryza sativa
  Clone ID: PAT_MRT4530_34939C.1
atggacgttgcggtaggtgtcggcgtcttgtatccttccggcatcatcctcaagatcgtcaatggtcggaaataccgtacagatgccctccgcagcggcggcgtcatctttgaaggtctgacttttagtcgacaacagggtagccttcctcctcgaatccgtgtccggcgagatcagagatagcgctttcgtatctcatgacattatccggagacaccgtaggggaatagccatgcctatccctgaagtcgatatccggcggcgtgtcttggcgtatgtaggcttgtatgttgtgtcttctggtgggcgtacgttgattgtcatgggtgtcttccat

SEQ ID NO: 30545 - DNA, 2079 bp, Oryza sativa
  Clone ID: PAT_MRT4530_3493C.1
ttgatgaagggaggagctaacaacattgtagcttccagttcccagcctgttgaaattggagcatcaacctctcatcctgatcaaattgaaacttcaatttcctagcctgctagcattgctagaccaagcacaggctagcccgttctgtggcaagccaaacaaggatgccaactcacatttgcaacagttcttggagatctgtagcacgtacacgatgaagggcatcagtcctgacggcgtcaggctctgattgtttccattttctctcattgggaaagcgaagcagtggttctatgccaaccgcgctacgatcaacacctgggacaaatgctgaacaacattcctatcaaagttctttccgatggaggcgtgggaacgactgcaggagtacgtggccgcctgtcctcatcatggaatggacgactagttaatcctgcaaaacttctataatggactcactcccacgtcacatgatcaccttgacgcggtagctagaggagccttcatttctaagacggtcagaggagtcgtcgatcttttagaaaagatggtctccaacatgggctggagcgaggaacgactatagacccatcagcgaggaatgcacaccgtcaaggagatggagttgctcgctgcaaaactggacctcctcatgaatcgtttgaacgaccacgagaaaaaaccccaaggcaccgtcaaggccttggactcccacgttacgtgcgaagtctacggaggcacgggtcattctgggaacgattgcctagaaacccgtgaagaggcgatgtacatgggcaataacaacaacaacgggttccgttcgccaggctcaggggtggaaccagccacgcccatatttccaaggaggcaacaataacggcaacttttctaaccagccttccttgaaggatcttgtttttgcgcaagccaaaactacaaacgctcttagcaaaaagctagctgctaatgacaagttagctgctttagtacctgctaatgaatctgggaggattcttggacaaccgaaccctccgttaaaaatgttaaggcaatcacgacgaggggaggtaagtccacttgcgatctgacatatcctaaccttgtaggagctggcaacaacaatagggaagcaccatctagcgatgcggctgaagaaaaggtttagcaagagaagaccatgccgcaggagtactgcgacacaaggctgctgccattcccccagagatacaacaagccattggtggactagcagttcgcttgttttgttgaggtgatccagaaaatccatattcacgtgccactgttggacgccatgcaagtgcccacctacgcgcgttacctcaaggacatactcaataacaagagaccacttccgacgaccgaagtggttaaactaatggaggaatgcagcaatgcgatactcgacaaactccctgaaaagaagaaggatccggggtgtcccacaatcacttgctcgatcgggacacaaagatttgaccaagacctttccgacctaggagcaagcataagcgtcatgcccaaagacgttttcgacatgctcaacttcacggtgttggcaccaacaccgatgcgcctacagctagtcgattcttcggtctattttccagctgggatagcggaagacgtaccggttaagatacgggatttcttcatcccggttgacttcgtggtgttggatatggattcagacaaggagacgccacttatcttggggcatccgttccttagcaccgcgaacgccaactttgatgtgggggcgggaagtatctgtctcctatcaacaggaaggaggagaagtttgagtttcagccgaggacagagcaatgctccatggtgaggataaaatacagggcaaacccacagaacattcaagtggtctaagtggagcaacccaagatggatagcctggtaaagtttatgcaaaacttcctggaaaagggatcatctgttcccaggacccgttattggaagacatcggtacaatccattacaccggccaaaaaaccatagaagacggctccaaagatgccgccaaccacacctaagaggaagaaggtg

SEQ ID NO: 30546 - DNA, 658 bp, Oryza sativa
  unsure (1)..(658): unsure at all n locations
  Clone ID: PAT_MRT4530_34940C.1
ntcgaacccaacgcccgtccgcactcacagtctgctcgggtgttgtctgttcgcatggaacnactggnnggaggacttcctcgccgtaacgacagcactggaacgccgaacgagactggaggagaaagacggcacacaagnactgacgtgcacatttcccgccatgtcctgtcgctgtgtgtctattggcgcactggctggcgcactggtccatttatactagtctattcctctcgatgggctcattgctatccacgccgacgacgaccactacgaccgggacggcagtagaatacagacggacagatgggcgacgcctcctccttgaccgtccgcgccaaggtcatggcgtcggtgtctgacatatccatcacggactacatgtggtggatcgacgtgcagggctacaggttgctcaggccgctgaggaagaccgtgtggaaccttcacacggagctcgtcgacttgtacgacgtgctctgggctaacaaggtcaagcccggcggcgacaaggactcctttatcacgcacgacgaggctccggagctagacgaggacatggttctatggccatatatgagaggatatgtgtgcgcatatgtactgccatggcaagatgcaaggtcttgtgcataaagacaatgagcatgatgttgtt

SEQ ID NO: 30547 - DNA, 354 bp, Oryza sativa
  Clone ID: PAT_MRT4530_34941C.1
gggggaaacttgttttcgggccctttttatatatattggggcggaaaacaacaaaaatgggctgaatttgccgcccgccctagggtggggggattccagggcccgatggaacaccttttttggtgggcccaagccctccagaaatttttttcccaacattattgaaacccccccctccaaattaagcagggtttttaaaccccggttttgagcatcggaccagggccacttgccttgagcggggccaaccccggaaccttttgtaggggttcagtctttcctgttcgtcagataaaaatggcaaaggtccctttcctagggaaacacaaatgggtttttatttcctttgggccc

SEQ ID NO: 30548 - DNA, 722 bp, Oryza sativa
  unsure (1)..(722): unsure at all n locations
  Clone ID: PAT_MRT4530_34942C.1
tgcgtgcgtcgtctcctctcctttcgctgacctcttcctctggactatggccgggggcagataaactagtttcgttgctgttctagattcttcttcctgcttgcctcttcttgatatttgccctggtctagctgtcttggccttatagcagacagagctgtattctctggtgattgaacagaggattggaggttgttcttgggggttggaggagaatcatctcccttgtcagctctctacaagcaggaggaagaagacgacacggcagtacagaggatcaatggaggaagaaccgagtgcaacgtgntaggtacttttgccacatgtgctcgctgatcgtgaggccggagatgggcatcgaggaggtgaagtgcccccactgccactccggcttcgtggaagagatggtcggcggcgacgacgacgaatggacggcgaagcggcaacgccgccgccggaggccgcggcgctgccagtgaggagaacgccgacgacgaggcgacgccgctccgcctcnttnggcgcctatnctcatagacctcctcggcgtctcgtcccgacgncacggcctcgatgatggcagcagcgacctngccgccttcgcgcggaggnagtaccgaacatcgccttcctncagtttcttcancgagctccaggacgactacgaagccgtcgtgacaaagccggngacttggggcnaaagggcttgttntggttaaccc

SEQ ID NO: 30549 - DNA, 1257 bp, Oryza sativa
  Clone ID: PAT_MRT4530_34943C.1
atggatcagcttacaagtagcaccgtgttctggctcaccaccgccgtagctttcctgctgatcaacacggtcatactgagagcgttgcagaagagaaagagcagcccggccgcggcggcggcggcggcgccgccgcccgttgtgcagggagtcggtcttgtacggttcgtgcgcgccatggcgagggacgggccactggaggcgatccgcgaacagcaggcgaagctggggagcgtgttcacggcgagcgcaccgttgggcctcttcaaggtgaccttcctcatcgggtcggaggtgtcgagccacttctacgtggcgtcgtactcggagatcagcatgggcagattgtacgagttcaccgtgcccatctttgggcccggggtcctctatggcgtggacctggaaaccagaaaagagcagatacgcttcaactgggacattctcaagccacgtagcctcaaggccagtgtaggtgccatggctgaggaggtcgagatggggagatcagggtacggtcgatctgaagcacgaactggagcaggtactgatgctgaccgcgagtcggtgcctgctgggaaaggagttgcgagagagagcgtgccaggcaaactatgcgagctcttcggtgagcttgacaatggcttgcatctcatcagcggtctgctcccatacctcccgatcccggcgcaccgtcgtcgtgacagggcacgccagaggcttggggagataataaccgaggtgatcaggttacgcaggaactccagccgtggtgctgctggcactgacgagaacaacgatgatatgttgcaatgcctcatcaactccagatacaaggacgggtgcgccatgacggacgcggagattgccggtctggtcgtggcgctcatgttcgcggggaagcacacgagctccggtgtaagcatctggaccggtgtccacctgctctctaacccaaaccacctcgctgccgtcgtcgctgagcaggataggttgatggcttcgtgtcctggaagaaccgatgactatcatcgcctcgactacgacacagtgcaggagatgagatctctgcactgctgcgtcaaggaggcgctccggctgcacccgccggtggcagcggtccgtcaagcttacaagcacttcactgtgcagaccaaggaagataaagagtacacgatcccaggagggcacatggtggttagcacgatcttggtgaaccactacttgccccacatctacaagggaccctcatgtgtttga

SEQ ID NO: 30550 - DNA, 644 bp, Oryza sativa
  Clone ID: PAT_MRT4530_34944C.1
gcacgagggcgactgcgagcagctaattacagattaagggaagttggtactatacctgtcttgggcgtgtcctttgctggttgtgttttgtgcttgcattcatggcgaccttcaccgaacgtacccgtctcctcgcggcgctgcttgtcgtcgtctccgcggtgatcatcggctgctccgtccacgtctgccacggcgcccaagagggtggttgtttggttcatagccatacttatcacaagatgctttctccatcatgcagcacagcaggagctcgctgccatccccaccaaaggcatgagccgactgcccgagagtggggacgtcgacgaggtggccaagcttctattagcgatcaagttgtgggggctcttcgcagtgaccggccacatcatgcggagccgttcctggacaagatcctcaccgcaacgagggagttcttccacctatcgccgaaggagaaggtgatgtacagcaacatggtcgacgccgacgtggcggcggtgagaggttccttcctgaggtctaccgcatcgaccacatcgacaccaacaggcagatcctcaactggtgcgaccggctatacctccaggtctagccagaggaggaacgtcggctggatttctagccagaacacctgctag

SEQ ID NO: 30551 - DNA, 672 bp, Oryza sativa
  Clone ID: PAT_MRT4530_34945C.1
ataaactccaaattgaagtatcaagtgtacactatcatgatagtgccagtacactggtacattgatgaagccacaatgcaatccgatgaagcagagggcatcatcacatcgtattcagaggaaagctatcttaggttacccatgaatcttcccacgcccagctgggcgttacatccgtacaccggatccgggagaaatataaccggcgagggcgctgggattggatactaggagggctccaacaacaacgagcccggcgagggtcacggcccaacacataaacacggtggttccaccctccacagcgtcaccggggggaaaccatccctcccccaaacatattggactgactcctgacaccctagcaccgtacttgctaactaatagattcacccccttccccatgctactgcttcctgatgcgtgaatatcgactgacatgccacccactatgctgtacggattgtccgtcttgatcttcttacaacgcttcggcaccattgtgaaggaggaccccacgcgggagatgcacagaaggcccttggcaccacccggcgccaccaatgaggaagggatattggatgtgatcgtacccacctgccgaataattggttctgacggccgcctaatctttggccagtagggccaaattccctataatgacgtagctga

SEQ ID NO: 30552 - DNA, 363 bp, Oryza sativa
  Clone ID: PAT_MRT4530_34946C.1
gaaacactgcttgaggggctgggggactatatcgtatcatagatgacaataacaacatgcaatggactacacctgttccaatgagaacgtcaattatggctacataacggtagaagaacatctaacactgtactggacggatatgagggcgtaatccactgttacagagccactggacactgagaacgacataactcgacgatgaccagagtctgacactgattgctaacgacaactgcgcactatggctcataccaaataatagctccagcaaccgcacgagtactgacataagcccatgacacgggaggcattgtaaaccaagtcgccaagacatagggcaagaacttaactgaagtcaac

SEQ ID NO: 30553 - DNA, 284 bp, Oryza sativa
  Clone ID: PAT_MRT4530_34947C.1
gccttggcaacaatggcctctccatcttcggtgaatcttgcttcagcgctggggatacatgttgcggtgaccgccgcacctgcaactttgtgggcttttcaactggcaatacctctaactttggaaaatcttgtggcagcatggatgaagactgctgcacttgcagcttcttggccggaggtgggctaggcaatgacataggacgcttctgggcaaatgttgaagggcatatcactggaggccatagtggcagtgatgaatttacttttgccagtgggagctga

SEQ ID NO: 30554 - DNA, 628 bp, Oryza sativa
  Clone ID: PAT_MRT4530_34948C.1
atgataccgataagaccgcagtcgagttggtccgactatatctcccggcgacttggctcctgcacgctctagctccgtaggctgtggtgggtgtgttggcagtgatatttgatgccttaggtcctgcccagggggtcccttatataccgcgggtcagttgatctccaagtaggactcggagatatcggacccctcacgatatggtaaagacccagttttgtccgagtagaactccttccatccgtagataccgtctctatcacgtgatagatttccttaacgtatacggaaactattcgtatacgcgcgggtataccgtatcagtatgtgctgactcatagtcgacaacagggtagccttcctcctcgaatccgcatccgtcgagatcaaaaatagcgctatgtctctcctgacagtatccgtagacaccataggggactaccatgcttatctctgaagttgatatccggcgtcttgtcttggcgcatgttcgcttgtatgttgatcttgtatcttgatctattgttccgtatcccctctcctccgagggggccttgtattttgtaacacccgcctcgcgccccgagcctccgcgtgtcgtcgcctgccgccgcgccaccgtcgccat

SEQ ID NO: 30555 - DNA, 308 bp, Oryza sativa
  unsure (1)..(308): unsure at all n locations
  Clone ID: PAT_MRT4530_34949C.1
ggcatcatgaaggcgtccatggcgttcaccgtcctcgcgctcgccgtcgtcgccgtctccggtgcggcggcggcgtcgaccaccaccttcaccatgcacaacctctgcccctacacggtctggccgctcgtcacccccaacgccggtcagcccgccatcatcaccggcggcgccaccatccgcctcgaccccaacggcctcgccagcctcgcgttcccggccgccgccgggtggtcgggccgcgtcgtgccgcgcaccggctgcaccggggcggncacgtgcggcaccggaacgcgncgncggcaacc

SEQ ID NO: 30556 - DNA, 405 bp, Oryza sativa
  Clone ID: PAT_MRT4530_3494C.1
accaaattagtgcatccagcttagaaaggcattgggcattttaccgttctgttacaaccttttacctttccacgtaacactcggtttgtcgttgaacccctgcatcctcccgtactccacgccacatcattgtaccgcatcaacgccgcggacacatctggcttaaatcccggtagcagatcaccatctttatattaagcattgcctgactccccaagaatcaccaatcacctgttcaccactttaccattgccttccagcaacccaaaaaaaaaaaagcttaccaaatggctttgttgagtgtgtcctaaattcctaaccatgacatgctatccgcttatcaatgttttcataattcgtgatctgactaattcctggccgttgatgcgttcagcctacttcatt

SEQ ID NO: 30557 - DNA, 410 bp, Oryza sativa
  Clone ID: PAT_MRT4530_34950C.1
ctgcaggaatcggcacaggggagtggatgcgtacctagctatctacgccttgcgtgggggaggaggtacgtggcgttcggagatgagaggatacggattagcttaaatttaatggctcaaaataatgggtccacctattttaagtgaaaatcaatggttggaattttctctatttaatataatgccacgtggcgatttaggagggttttgaggaagccacgtgacggtttgagagtgtttttagaaagtttcatggacttttagtatataatagatagatagatagatagcatgggaaacaagtagatattttcttgagtgatagaaaacatttgtcccttatggcaggtgcatgttgtgggtggttggttcatctccaatagaaagcgcgggtaattaacttacactca

SEQ ID NO: 30558 - DNA, 435 bp, Oryza sativa
  Clone ID: PAT_MRT4530_34951C.1
gtgatttaaagaacctatgtatagcttcagcatataggccagttcatgaacttttagaagaagaaaagaaggaaggtccgtgtagccaaaatacgggtctaagaccccttaggacttgatgatttcattcaagcaaaagccaaggtaagcccgtctgtttcgtatgatgcgacgagcatgaacgaattaagaaaatggaacgaacagtatggtgaaggtggcagcaggacgagatcaccttttgggttcggcaactgacatactgtatacacatctgtactagtgattcttcaaccctgttgtatttgtaacaccaataggctgcctagtcacaggaggaggtctcccttttttatttagagctatttataacgttgcaatcattttgtaccatagaaaaatatctaatgaaatggcttcttttttaccttccac

SEQ ID NO: 30559 - DNA, 1899 bp, Oryza sativa
  Clone ID: PAT_MRT4530_34952C.1
atgtggcgccgccacctcctccgccgcctcctgccgtctccggccaccgccgccgccgccgccgcctccccctcgccggcgatccgcctcctatccaccgcctccccggatcccgccccgccggcgacgctcgcctcctccctcgccggggcgctctccgcgctgtcctccaccccgccaccggccacctccccggacgcctacttctccctccacttctccgacgtgcgccccaccaacgcgctgctcgccgaggcgctcgcgctcgccccgccggccacgtcccgcgccgccgcggagctcttccgcttcctcgtccgccgccgctcgctccacccctccgactccgcgctcgcgcccgtcgtgcggcatctcgcccgccgccgcgacttccccgcggtgcgctcgctcgtccaggagttcccctccgcgctggggcacgacacgctcgacgcgtacctcctcagcctcgccagggccggccgcgccaccgacgcggtcaaggtgttcgacgaattgcccccgcagctccgcacgcgccaggcgctcacttccctggtctcctcgctctcggctgagggctggccctcgcacgcggaaggcgctgtcaagaaggtcgctaatgagatcttcccggatgataacatctgcactctgttggtatctggctatgccaatgctgggaagcttgaccatgctctgaggttgatcggtgagacgcgccgtggtgggtttcagccagggttggacgcctacaacgcggttcttgattgtatctgccggctatgtcgcaagaaggacccgttgaggatgcctgcggaggcagagaagttcttagttgacatggaggccaatggcattccccgcgatgcaggtactttccgggttctgatcactaatctttgcaagattcgcaagactgaggatgcaatgaatctgttccggcgaatgggtgagtggggatgctcaccagatgccgacacctacttggtgcttattaagagcttgtatcaggctgcccggatttctgaaggggatgagatgatgacatggatgcggtctgcagggtttggtgctaagcttgatagaaaggcatattatgggttcatcaagattttatgtggcattgaaagggttgagcatgctgtcaaggtgttcaggatgatgaaaggatatggacatgcacctgggacaaagtcatatagcttgctgattgagaagctgactaggcataacttaggagatcgtgctaatgcactgtttagggaagcagtggcacgtggtgtgactgtgacgccaggagtgtataagattgataagaagtatgtgaaggcgaagaaggagaagaaggtaaagaagaggctgactttaccagagaagatgagattgaagagcaagaggctgtacaagcttagaatgagctttgttaagaagcctaagcgtcgaatggtccgggtttgagcaggctttgggttggagcggatgatcatgggaagagagaatcagaaagaggccatttataattttgaagagcagtaaattgtcgtccttcaattttccccacattacaagtggctcactgaccgcaacatttttctgatcggagtccttcgtgtggtttctatctcttggacaatggattgctgacactttgctgtgctgttttatgttctctgcaatgccttgtgtttcattaacacaaataatgaatgtatcattttacttaagtttatgttcaccacagttgagaggaaacttttggtatatgatgaagcaactgtcttgcagatccgtagttatcgtttgagcaatgttttgtacacctctagtttctcatgaactcatgaaatattttataaaaaaaaagccgaaaaaaaaaaaaaaaacccccggcccgcc

SEQ ID NO: 30560 - DNA, 1104 bp, Oryza sativa
  unsure (1)..(1104): unsure at all n locations
  Clone ID: PAT_MRT4530_34953C.1
ttttttttttttttttttttttttttttttttttttttttttttttttntnaacgaatccctactccattgtagtattcttctataattctattactcttaattagtttattactactcctactcccaccttgaattgttcttccattgactaactaattaattagttaattccgtactctaccaaacacttataaatcgacctattcaatttattcaaacaaaatcgattcgccctccaattagatcaactgaaacccaatcagaaaatcaaccaaagatgatgataaacaatatttaatgcactcggaatgaaaagactaatcaattaattaagcacgtacaaacacggcgctcaataattgccagtagcgttttaatttgcaggtagatctctcttctctacgccttgacgaagacggtgtactcgacgatggtctcgccggagttggcgccggagtcgacggtgcgggcctcgacgtagcccctcgccatgcggaacttgccggagccgccgacgatgctcatctccctcaccgccgagagcacctcgttccggccgacgatggcgagggtgctccccttgtggtcgccggcggtgaacacgaagttcatgttcatgaggaggccgaacgtcttctggtcggcgaacgtgtagctcccctgggcgcgccccacctccgacgacgacgacgccgcgtcggtcgtcagcgggtcgtcgatggccaccacggcgccgaagaaggtggaggagccgttcgtcgacgccgcctgcgccaccctgatcgccgtcggcttcgtcccgcccaccacgtcgtggaagtacaccttgaacttggtcatccccgccgcgccgtcgtccgccgcccgcgccaccgccgccgccgcgcacagaagcacggcaagaacgaggaaagccggtgacgccgccatggccggagctgagcaagatgaggaggagggaggaggtagctagagctagtgagagatcgagtacttatgaagcaagaaatggagattggagagtggttggtgtaggagatgatgaaattcagtgagatagcgtgggtgtggctgagcaagcatatgcaggttgccttttctc

SEQ ID NO: 30561 - DNA, 357 bp, Oryza sativa
  Clone ID: PAT_MRT4530_34954C.1
atgtacacgattgaatattatgtatggatcaatgcacatgatcggcctatccaagggcatccggatgatcacggcacctcccccaacccaaaccgaggaagtcccctccaagtctctggtccaaaactacagctctacaacgcccaacagataggaggatttgagaagtcgcttatgtttcctgagccagagcctgacgccagccctagctggctggccgcccgccgcccaacgcctgaaggtgcgcccgtgcctagtggccccaacgccggctggtatcgtctccaaatacaatcgtcaacgaagggggtaccagagtatggagtaggatggctgctggctgcaagtgctttgtga

SEQ ID NO: 30562 - DNA, 2207 bp, Oryza sativa
  Clone ID: PAT_MRT4530_34955C.1
cgaatgaaaagaatacacaatgcactactaataaccagatctccctgatacaggtttgagaacttgcaatggatggcagagtatatgaggaacaaaatttgacagaatataggtagtagtagaacattgcatgctccatccccatcacggcatgatcacaacctcatttggtgaacttctggggaacccaactttgcaacctctgacggtatccagcatcgcggtgggaagcaatctcgggcagcatggcgaaatggcgagtcgcagtcagacttcgctttagtggagcagaagagcaagggagtttgtggcctctactgatcatctcagctcgctgtgcagccatgggagagatcctctcagcgtgcacgctggtgaatctccacgctgccagcggaagcctggttcgcggctcggttgctcccgaagttcttgcggtttgattctctcgctattcttgaaccaaactggattgcccgctttggttgaagtgcagcctcttttaagcccagtaggtttgcaacctctctcaagatcttcttgtcgccctttccaacaggttcatcaagtttagcaatatcccacaatggaatttccaacaaagttttgatcacattctcatcaagaaatggaaaacgtgcctccttgccatggtcagaaatgcacctatcgtctcttcccatatttcttttccagattctctgtacatctagtctcatctcctcatcaagtaaaacccagcctccaagtctatatttagtcctatgtcttccataaccagcgcactgctcatcagccccagaaccgactaaaagaactctagaagttgacttgtacttgtagcgacaaccatcttgcatgttgcatatacttccatccacccaaccatccccaccagcagccaaccagagagctataccaatatttaaatccatataagtatttgaagggtatataagtgacatcacatgttcactttctcctttcaagtttgtcaaaactgtgtcaatctcaacaagacgccatctacggataggggaaattctctgaagttccttcagtcctgccagtgcagaaatcctatctggagcaagttgcccatcaaaactgacattcaacaaatcaattgtccatttggaatcaaggcactggtctaataatgtaccaagaggcttcttctcccgaatgcatcccggccaaaccacattgtttttgagtccttctgcctttcagtatatcaaagcccaggggcctttgattgtggaaaggatctgtggaactgatttcccaacacttccacaacagagacatgcttcatctctaacaagagcatggcactcacaggaacaacaagattccagtgatgacagaagtgattgagtatcattttggtcatcagcaacatggactcctccatagatctcaccgttatatactaaaacatttcctgattgacccaccatcggctgcaaaatcggctcagctcccctgagcggcagcgttgctccgatgaagcacaactcagtgttacccaattggatgctgtatatcccacaaggaagctcttcccagtaactcatgttggtggactcaggaaaatcattatcttcccctgactccataactttgacagttggcgctgcctgccagtatatcaaagcccaggggcctttgattgtggaaaggatctgtggaactgatttcccaacacttccacaacagagacatgcttcatctctaacaagagcatggcactcacaggaacaacaagattccagtgatgacagaagtgattgagtatcattttggtcatcagcaacatggactcctccatagatctcaccgttatatactaaaacatttcctgattgacccaccatcggctgcaaaatcggctcagctcccctgagctgcagcgttgctccgatgaagcacaactcagtgtcacccacatcacccccattcccaactccacaatcacacccatcactccctaaggtcgtgccatccgcgcggacgcggagcctctcgcagccgaggctatccgggccacgccgccgcagggctgccttgagctcatccaccgtcacgcccttcccctcgtcgcttggttggattccgacggcagcaacggcggcggcggcggcggcggagggagcgacgactacgcggccgccgccggagaggacgagggctatgccgcacat

SEQ ID NO: 30563 - DNA, 1266 bp, Oryza sativa
  Clone ID: PAT_MRT4530_34956C.1
atggtggttcccgacggtgaagtccttacccttttgccgcgccactccactgcccccgctggcaccgtggtggttcctgatggcaagctgaactatgacggttacgacggttggaatggtcggaattaccctccaaccgtcataggggcttcatctcagccgtccagccaaaacctggatccaacggtggccaggcgaaacagactgccactgtgccacaccatccaccgttcgccggcgccggcgccggccgccgccagccccggcccaccagctcttccccaccaccgcaccgccgcccccaagccaaaccccaacgctgcgtgcgagatgaaccgcctccgccgtcgccgcggcacctcagtggcgccgccggtgaccctgccggacgacgacgacctcctctcggagatcctcctccgcctcccgccgcgtccctcctcgctcccccgcgcctccctcgtctgcaagcgctggcgccgcctcgtcaccgaccccgccttccaccgccgcttccgcgcccgccaccggaatccacccctcatcggcgtcttcgaggactacctcggataccccttcttccggtccgttctggatccgccggatctcatcccacgggagcgcttcaggttgcggctcgccgaggacgagggcggccagtggcgcttctacggctgccgccatggccgcgtcctcctcttcaaccgggccaagaatgagatccttgtgtgggtccccgacaccggcgaccaccgccgggtggccgttccgccggagattgacggcaaggagaagatcatttggaatggggcagtgctgtctgctgccaatgccgacgacgggttcagctcttgccccttcaaggtggtgttggtaggcgtcgccggcaacaacacacagatgttcgcctgcgtttactgctcggagtccggcaaatggagtgatctcatctcagtagctgctcccttcttggtgtttttctttcgtgatcctggcatacttgttggccatgccctgtattggatggcttctggtgatcatgggagtaccattcttcagtttgatttggatgatcaaacccccgccgtgattgagtggccctccgattccgatccaaattgctacactcagacctggctgacagaaggtgttgccaagtgggtgctgcagaagacgtatgagctgaagaatgttcttaacccggagattaggttgaatgtagagtatgtaacaaagctggggtatgctcaggatataaaggtgtag

SEQ ID NO: 30564 - DNA, 1161 bp, Oryza sativa
  Clone ID: PAT_MRT4530_34957C.1
atgaaccgcctccgccatcgccgcgccatctcactggcgccgccggtgaccctgccggacgacgacgacctcctctccgagatcctcctccacctcccgccgcgcccctcctcgctcccccgcgcctccctcgtctgcaagcgctggcgccgcctcgtcaccgaccccgccttccaccgccgcttccgcgcccgccaccggaatccaccacccctcatcggcgtcttcgaggactacctcgggtaccccttcttccggtccgttctggacccgccggatctcatcccaagggagtgcttcaggctgcggctcgccgaggacgagggcggccagtggcacttctacggctgccgccatggccgcctcctcctcttcaaccgggcgaagaatgagatcgttgtgtgggtccccgacaccggcgaccaccgccaggtggccgttccgccggagattgacggcaaggagaagatcatttggaatggggcagtgctgtctgctgccaccgccgacgacggccccttcagggtggtgttggtaggcgtcgccggcaacaacacacagatgttcgcctgcgtttactgctcggagtctggcaaatggagtgatctcatatcggtagctgctccattcttggtgtttttctttcgtgatcctggcatacttgctggcaatgccctgtattggatggcttatggtgaacgttggcttaccgttcttcagtttgatttggataagcaaaccctcagcgtgattgaatggccctacgattccgagccatacagtcagacctggctgacagaaggtgattgtcttggcgccgccactttgtctcgcagcagccttcaaatgtgggagaggaaagtctgttctggaggtgttgccaagtgggtgctgcagaagacgtatgagctgaagaatgttcttaacccggagtttaggttgaagatagggtatttaacaaaactggggtatgctcaggatatcaaggtgatgtttctatgggctgatcacagtgtcttcatgctccaacttgatacgttgcaggccaagaaagtttgggaaagttgtgtcatcgcgccaattcatccctacgcaagtacttatgttgcagtcctgtcaaaagagggtaaaaagtcagaagcatcaccaggaagaaattaa

SEQ ID NO: 30565 - DNA, 1435 bp, Oryza sativa
  Clone ID: PAT_MRT4530_34958C.1
tcagctgcatatcttattttcttctcttttcttctccctgctgttgctgctcccgtccctgccctgaccgcggtacactagatccgcagccgccgccggagtcctcgtcgttgctgccggctggagagcgtgctgttgggggaggtcgcgtcggactcctcgtgtcctcctcgctaaagatgcccccctcgtcgtcgtcgtctccgccgctggcgctggccggttcacgtcgatcccccgcaagaacggcatctcgacgtcgtggcactccatcatcgccgtcatcccccgaccggaggagaagaggccggcgccgccgttcaagccgcatagctgttgcggctgcggggcggcaccacggcgcggcggcggctcgtcggaggaggttgcgtagccatcagaaaaggaaaagagacgggagagagagagatcgcggtgatggccggagatgcggaggatggcgacggcgagagggtgcggctgttcatcggccaggtgccctgcagcatggcggaggaggagatccttgccgtggaccgtgtcgctgctcgcgccaatgacgccaccgtcatccgctactgcgccgccgtacgtgttcacgttccaaaggtgcctccgaaagtccggatgacgacttggaccgccccaccactgccgcggagcctcgaaggcggccaccgcattgtgcacggcgacggatagcgccgtcctgtcgggagaaaggtggctgggccccgcgggaggaagcatgccgccattgccgctctgcccgccgccggcctcctcactctcccgcggtggcggcgtcctcgacggcggaggcggcgcgatggcctcggcggcggaggtcctcaaggtggcggactcatatctagacagacagcgacgcgacggcccacgcggcggctcggccaccaccgacgtcgacgtgaggcagctccaaccgacggcgacgcggcagcccacgtggcggcggcaacggctcggccgacgacggcaacctcggcggttgcctcgtcgtcctccgcggatctggagcagtggcacaacgtcctcgggctcgtcttcggccggcgcggcgtccacagcaatctcgagcggcgcggcgtcctcgggcttgtctctggccggcgcggtggcctcggcggcggaggtcctcgaggcagtggcttcctcggggccaaagcggcgacggtggcgtcctcggcactccctccgccgtccgctatgccctcgccttccctctgctccaaccgacggcgatgcggcggcccacatggggaacaagcgagggaacgacctccacagtgcaagaaacggcaacacgcgccctcgatttcgacgagataactcgtcgcccagttggggggcgagcaaccaaacagagctccgcgccctagtgccacgcaagctcgaatccgatgtgtcgagctaa

SEQ ID NO: 30566 - DNA, 487 bp, Oryza sativa
  Clone ID: PAT_MRT4530_34959C.1
cccacgcgtccgcccacgcgtccgctctttcgcttcgcgagattggttgattcatctcgcgattgatcgagctcgagcggcggtgaggtgaggtggaggaggaggaggaggaggagatcgggatggggagagggagggtggagctgctgaggctcgtcaacaagatcacctggcgggcgccgttcgcagaatgcggtgattgggctgctcaagaaggcgtaccagctctgcgcgctctgcgacgccgaggtcgccctcatcatctcttacaaccgcggtcagctctacgagtcctgtagcggtcaaagcatgaccagaactttggagagacacccgaaagcccgttatggtgggccagattctgctatacacaacaaggaaaatgaatcagtgcaaagcagccgcaatgagtacctcacactgaaagctcaggtggttatttacataggaccctacggaatcttcttggcgaagatcctgagacact

SEQ ID NO: 30567 - DNA, 2823 bp, Oryza sativa
  Clone ID: PAT_MRT4530_3495C.1
atgatcgtccgccagcatcgccctttcaactcgagaagcttccaccagggcgctagtggcagccagaaccaccagggaggtcagcccaaccacagtgcagctccgtgcccgccaatggcaccagcacagtcagctccatcagcccaagccaagaaggagactggaacaaagccagggtccttgttcaactgtggcgagcatggccactttgctgacaaatgcccgaagccaaggcgtgccgggccaaggtttgtccaggctcgtgtcaaccacgcgtccgtcgaagaggcgcaagtagcaccagaggtcgtactggatgtcattcttgggatggattggctgaccaagttcaagggagttattgattgtgcgaatcgcacagtcaccttgaccaatgagaagggagaaacaatagtgtacaaatcatcagtctcaccaaagcaaggggtctccttgaatcagattgaggtggaaattccagtggtcaccgaggggaagagttcgacgaaattggaagatatccccatagtctgcgagtatccagaagggtttcccgaggacctcactaccatgccacccaagagagagattgaattccggattgatttggcaccgggaactgctccaatttacaagagaccgtatagaatggcagccaacgagctagcagaggtcaagaagcaggttgatgggcagctgcagaaagggtacattcgaccgagtacttcaccttggggtgctccggttatttttgtggagaaggacaagacgaagagaatatgtgtcgattatcgcgcactcaatgaggtcaccatcaagaacaaatacccgttgccgcggattgatgatctgttcgatcagctgaaaggagccaaggtgttttccaaaatagacctgcgatcaggctaccaccatttgaggattcgggaagaggatattcccaagacagacttcactactcggtatgggttgtatgagtgcacggttatgtcttttggacttaccaacgcacctgcattcttcatgaacctgatgaacaaagtgttcatggaatttctggataagtttgttgtgaaagatgagaaatttaaatggacggccgagtgtgacaagagttttgaggagctcaagaagaaattagtgtctgctccagttctgattctgcccgaccagacaaaagacttccaagtctactgtgacgcgtcccgccatgggcttggatgtgttctaatgcaagagggcagagtggtcgcttatgcctcgcggcagttgcgtccacatgaagggaacaatccaactcatgacctggaattggcagcggtggttcatgcttggaagatctggaggcactatctgattagcaaccgctgcgaagtatatacggaccacaagagtctgaaatatatcttcacccaaccggatctaaatctccgacaacgaagatggttggagctaatcaaagattatgacatgagaattcactatcatccggaacacgggttcgtagccactctagaggcacggcctacgctcgtggatcaagtcagagcagctcaagtgaatgatcctgagatagctgaactgaaaaagaatatgagggtcggaaaagcccgggactttcttgaggatgaacatggcacaatctggttgggagaaagattgtgcgtgcctgatgacaaagggctgaaagatctgatactcaccgaggctcatcagactcaatactctattcatctgggtagtaccaagatgtatcaagatctcaaagaaaaattttggtgggctagcatgaggagggaaatagctgaattcatcgcgctctacgatgtttgtcagcgagttaaagcagaacatcagaggcccgcaggattgttacaacctcttcagatcccggaatggaaatgggaagaaattggaatggatttcataacaggtctgcccaggacatcatctggccacgatttaatctggaaattgcaagaggaattgggaacccggctgaatttcagtacagcctaccatccgcagaccgatggtcagactgagcgggtcaatcaaatattggaggacatgttaagggcttgtgcacttgattttggtggagcttgggacaaaagcttgccgtatgtggagttctcttacaacaacagctatcaggccagtctacaaatggcaccgttcgaagcgttgtacggccggaagtgccgcacacctctcttctgggatcaaacaggcgaacgtcaactgttcggaacagaagtgttaacggaagcagaagagaaagtcagaaccgtcaaagagaggctgagaattgcccagtctcgacagaagagctacgcagacaaccgccgtagggagttcacttttgaagcaggggattacgtgtaccttcgtgttactccactccggggagtacaccgttttcaaacgaaaggcaagttggcaccacgcttcgtgggaccatacaaaatcttggaacgaagaggagaagttgcttatcagctagaacttccatccaatatgatcagtatccatgacgtgttccacgtgtcccagttaaagaagtgtctgagggtacccgaagaacaagccgattcggagcacattgatatccaagaagatctgacgtatgtggagaagctagttcgtattcttgagaccagtgaaagaagaaccagaaacaaggtcaccaggttttgccgggttcagtggagccaccattcagaggaagaagcaacctgggaaagggaagatgagttgaaggccgcccattcgcacctcttcgccagctcttccgaatctcggggtcgagattccgtttaa

SEQ ID NO: 30568 - DNA, 450 bp, Oryza sativa
  Clone ID: PAT_MRT4530_34960C.1
atgggtactcgaagtagtgggtcttcttcaagtgcccagaggagaaggtccgaccttcccctgataaagtgcccttgctgctgcgtgaagaacatcgtggagctcactgcaacgacagatgctaatcgcgggcgcatttttttcacatgtcctgaccacgagaaggatggttctggatgcaatttctggtacaggaaagaagggtatgtgaagtatcttgagaggaaaggctacattgctgacaaggagctaagagatgtgaagcacatgtcagagaggaagaaggctgtgaacaatgaagatggtggggaagatgaagtgaagaagctaatgttatctctagtttccattgggttggagatagttcagatcttgaagggcatgctagttggttttattttacttgttgttgctttagtgtgtttggtgcttgctgtatggctgaaataa

SEQ ID NO: 30569 - DNA, 255 bp, Oryza sativa
  Clone ID: PAT_MRT4530_34961C.1
acagaatagcactgtagcacttcaccttcgggtgatcctaaaaggatatcgaactcagggaacgtgtgtaatctacctaaggctaagacaatccaagaacaacaactatagcgtggttccgactatagctctatgatttatccgaacgtggaggattactaggacgggattcagggctgtcaccacctgccgcctacctctgacaaatccatgggatacacaacaaacaaaggtgagccccgctatgctcaccta

SEQ ID NO: 30570 - DNA, 108 bp, Oryza sativa
  Clone ID: PAT_MRT4530_34962C.1
ggaccaaaggagtatacgagatatatatgagcttgacatagtggctggtaactttaagctcgtctttgcttcaaggagcgtgaagtcttcatctatggggtcatgggg

SEQ ID NO: 30571 - DNA, 278 bp, Oryza sativa
  Clone ID: PAT_MRT4530_34963C.1
cgtccgcacccggtcgccccgcgtccgcaaaattccaaatccatggacctccggatccccgcgggggcgccccctccgcggagttcgagatctccggagtcccgtctctccggcgctgtcaagaaggtgatagatctcgatgagctgaggatgctggctgtcaggggtccctgcggcccgcgccgtctactggtgaactgtgtgggctattgccatgtcgtgcctggggagcaggattggcaaaaaagaccagaccagctttaagaagatccttacac

SEQ ID NO: 30572 - DNA, 271 bp, Oryza sativa
  Clone ID: PAT_MRT4530_34964C.1
atgaggtggtggctgcggcggcggccgtggagcgcggcgacgcgggccggcgacggcgacggtgaccaccacctcgacgtcgagcagcaccagcacgtggacgacgtcgagaccgggtcggcgtcgtcggagcaccacttgcgggcgccggggctgcccgtggaggagccggtccacgtcgaggattcggcggtgacgcagcatcatcctgcagtgtcstcgtcggaggaggaggaggaggagctaggtagcggcaccagcgggagtgatg

SEQ ID NO: 30573 - DNA, 405 bp, Oryza sativa
  Clone ID: PAT_MRT4530_34965C.1
atgacgacaaggtcgcaaatcccattccccaagtttcaacatcccccaaagcagataaattttgcaagaaaccaagtaatagttgatcgattcttagtttcaattttgcagaagttggggaagggcgacacaatacacaccatcatcaagttcttgtcgaacaagctatcggggcatgagccgacgtgcaagcggatcgtcgcggtcgggacggggagtagcaagtcggagagcgtcgttgccgtcgacaaggtggagagcatgctctgcaacctcgaccgcttcgaggccaacgcccaacatgaagtagggccgacaacgccagactgcaactactcctcaccaggctgcttcaacgccaacgtcaagcaggccgcgatggccacgcgttggcgaactcggtga

SEQ ID NO: 30574 - DNA, 243 bp, Oryza sativa
  Clone ID: PAT_MRT4530_34966C.1
atgcccatcaagaagccgcaggacttcgtcagggagttctgcaacaaggttgacctcgtccggatggggactcgcctcaaggtccacaagccacctcccgtcaccgatggcctcgtctccaagctcatccgtgcgatacgaattcctggcactatggacttgcatccacacatgaggaagatgttacgcaagcggttagagtttgtatcgaatatatgtataaagtcggttaaaatagagtaa

SEQ ID NO: 30575 - DNA, 1517 bp, Oryza sativa
  Clone ID: PAT_MRT4530_34967C.1
tttttttttttttttatcaacatgtcatgctctaataactggacgtctattgcacagctcaaatcattgtacatcatacatctggaaacccatctgaaacacactaaaaagaatttacatcacatgcctcttttagccacaatagcaagacctctacgttctttgcccaatcagacagcacaagtgaattacacagggtttgaaaagtaattctgggaacactctcttcggaggccatgtagtacccaaccagcaatgctgtcagtactaaggtgtacctttaaaaatatttaactctacgatatcggaaggaaaccgtaaaatttacatggaacatatttggtgcatatgggaagtgagggcacaggcgaaattgtcccatcacaattcttgcccatccaaatctgtcctgacagggtaatcaaggccctgtagaactggcattcttctcaaatcctcttctgagtacgcagggatgaaccaatacctcttgtcatttccaaaaacctgaatgaaattcctcttccggccaatatcatacatccagcgtggcgtagttttcttttcatatgcctcaattgttgttgtattagcagaaacaagtgaaacatgcataatcataaaacccagaacactcaaggaaaaggccaggttcaacacaaaggtgaggaaagtggttgcaagtgctgcaggacttcctgggatatcaatatcactaaagaaggctatgaagtgaggcaatagagaaagggtaaccagtgttgtctcaaggaaggtgtaaaactgcatggaatcattaaaaacatgaactcaggccccaactcctgcagccccccgtacacaatgatgatccatcttaagaacacatcttccacaaacagagcaatgatggcatcgaggtggcttcatctggttgcacttcctacaatacctagcccttggatgtcctgtgtcattgtgagcgatagattgttgcgagtttacctggctattgaaatctaagccagaaaggggggcagtttctcccctctcctcatcaaagtcgagattccaatttggtggaacagaaccagggtcggtgaatacaacagaaaagtagctccataaaagcataacaagcaggaagtggaagaggagcaggacgacgagcgcgaggagggtgctggcgccgccggcgaagagcgcggggccgtagttgtacaccacgaccgcgtagtaggtgaccccgacgatggagaggacgagcaggatcatgatggagcccagccccctcagcgcagtgcagaacctgaacacgttccacgccatcgtggcgcccgcggatctgtgcatctctccccacctcccccgcccgcgcagcagcagcagccgacgcacgcctccgccgccctgcggctccccgctggcgaggggattagggaagaaggcgccgccgccgccgccgcgcttcgccggcgagggggattagggaagaaggatttggagatggaagaagacagccgcgggtccccggccgg

SEQ ID NO: 30576 - DNA, 386 bp, Oryza sativa
  Clone ID: PAT_MRT4530_34968C.1
actaaagggaatagctcggatacagcacacctaggctcgcgaggagataccaggcaagcccgggcaatcgggcatcggtccagagcagaacgtccgggctggtcgatgatgaacgtgagcggatgatctcgaagacccagcgatacccatcaggcaccgattcgagcggcatcatcgcggacgataggaacagcagcgcaagcgagagcacgcctgtgatctggctgatatcacggaaatagaccccggctgcggccatgagccaagaaatccccaaacccagcaccacgagcggcaacatcaccaaaggaaagaggaatgtggtccacgcaatggcgccgtccatgaccattcgcatgatcagaaacacgataaggttcatcagt

SEQ ID NO: 30577 - DNA, 250 bp, Oryza sativa
  Clone ID: PAT_MRT4530_34969C.1
gggggctaaaaggccctggggggaaagctcccccaggttatcaacaaaaaagggttatgccctttggggggaattttttttttagggaaaatccaaacccgggggctaaaaaggggctcaccctcattcctaaaaaaccccacgcccactttacccttaggaagcccccaataaaaaacattggggacctggggccacaaaaaaaaggcccggggtttgggttcgggaaccggagttttgtcccaaaggg

SEQ ID NO: 30578 - DNA, 178 bp, Oryza sativa
  Clone ID: PAT_MRT4530_3496C.1
taagtcattcaaagaggactatgagcagctgctcaaggatgcccaagacattccccagcgaaccggctgcatagtcaacgcgcttgccatccaccccatcaccggcaagtgccacgaggcgcagcttggtgaggtgactctccagttgctaagtgaggagctcgacgaagtaccatga

SEQ ID NO: 30579 - DNA, 189 bp, Oryza sativa
  Clone ID: PAT_MRT4530_34970C.1
atggctgtggctgtttttcggctgctgccgctgcagccatttttagctcttgcagccacagttgctgcagcagcaagccgtatcgatcacacccttaattccagcaatgctgtgccgtacgacggtacgaggtacgagcagatggggcttgtcaaagattttactgttagtaattcaggcttctcctaa

SEQ ID NO: 30580 - DNA, 199 bp, Oryza sativa
  Clone ID: PAT_MRT4530_34971C.1
agcagttctgttctctctctctctctctctgcccatacactcggcgcatcgactcctcaggcggcaacagcggcgagcggagcaatggaactataccaaaacctattgatccaattgcgaaatgttgctgctgttgataccttaattttcaactaactgctactagatttagcttcttagatgacgcatttacggattg

SEQ ID NO: 30581 - DNA, 255 bp, Oryza sativa
  Clone ID: PAT_MRT4530_34972C.1
atgggtggtggtgagatgaactgggtaggggtcactgagggcgggtttagagggaagacccagaagaccagtggtgggcaccgtagacgagcaaacaacgaggcaatgatagacaggggaggagtggtggagcagggaattccactggacttgacaaagagaggtaatggtagcaagacaagagagtatgatgaggaggaagagagggagggaggagttgcacagagtaggcattgcctcgtcgccaatgagtag

SEQ ID NO: 30582 - DNA, 438 bp, Oryza sativa
  Clone ID: PAT_MRT4530_34973C.1
atggccacaatggcattcccgtcggcagcggacctcttaagtgtccgccagcgaaaacgtggcgtccgcctctctccgtctctcctccctcccttctccatcgtcgccacctccccaccaccgccggctgccgtcgccgcatacgaccgccgctccggcccccttctcttcctcttccaactccctctctccttccacggagtgcgtggcaaaggtggtggcgagctcgggcgcgggtgcggcggcgactctcgggcgcgggcgcggtggcgctcgggagcgggtggcggctcgcgggaagggtggatccgccgccgccgggccgcggggagggtggatccgccgccgccgggccgcggggaggccggatccatcgccgtcggaccacggggagggcggcaccgacctcgacgccgtcgaccgtgctcccgcggctag

SEQ ID NO: 30583 - DNA, 127 bp, Oryza sativa
  Clone ID: PAT_MRT4530_34974C.1
atgggttttacccagtttggagttgagggacaaaaattaaaccatgcaaagtgtagagtgattggagatgttaatcatcaaattgttgcttcggcgggaagcttcaacatgccagtagtggtggctg

SEQ ID NO: 30584 - DNA, 216 bp, Oryza sativa
  Clone ID: PAT_MRT4530_34975C.1
atggtgcaaaagttgccacgccattgttccacctcagcgaaaaggccccgccgcgccaaggcctcgccaccgccggccgcggcgtcgacggagcagcctgaggccaccgagcaggcgacctcgacgtcctacgggttcggcaacaccggtggcaccatgaccagcgccgcgttcgctgctggctccttccttccacattcgctgggcgcagattga

SEQ ID NO: 30585 - DNA, 255 bp, Oryza sativa
  Clone ID: PAT_MRT4530_34976C.1
caaagagaacatcccaattattttccatcaaaaaatttttggtatctgcatagctcagggcgatacgatagttcagatctccgaaccatatcaccttatcatgctcaagaattttctttgggatttttcgcacacctttcctgaagccaaatggctgcagatgaaacaaaagcttgtctggggcagggtcatgctcactgatatgcatcccttgtttccaagacaacccaaaattcctcgccctatgcaagacgt

SEQ ID NO: 30586 - DNA, 2579 bp, Oryza sativa
  Clone ID: PAT_MRT4530_34977C.1
gtatataactatctattcgatgatgaagataccccaccaaacccaaaaaaagagatcgaattaggatcctctgctagcagagcgcgaagagcttcacctgactctcgcttgacgtgctagttagtagtagctctcgatcgaggcgcggtcgtccgtcgagggcgcgtggccatggcgctcctctccgcgaccgcccccgccaagacgcgcttctcgctcttctcccacgaggaggcgcagcacccgcacccgcacgcgctctcggcgtgctgcggcggcggcgccagcggcaagaggcagcgggcgcgggccagggtggcggcggcaatgcggccggcggacgcggccgcctccgtcgcgcaggcggcgtcgccgggcggcggcggcgagggcacgcggaggccgcgggtgctcgtggccggcggcggcatcggggggctggtgctggcgctggcggcgaggcggaaggggtacgaggtgacggtgttcgagcgcgacatgagcgcggtgcgcggcgaggggcagtaccgcgggccgatacagatccagagcaacgcgctcgcggcgctggaggccatcgacatgtccgtcgccgaggaggtcatgcgcgaaggctgcgtcaccggcgaccgcatcaacggcctcgtcgacggcatctccggctcctggtacatcaagtttgatacatttactcctgcagctgagcgaggtctcccagttacaagggttattagccgaatgacgctgcagcagattcttgctcgtgcggttggtgatgatgctatactgaacgatagccatgttgttgatttcatagatgatggcaacaaggtaactgcaattttggaggatggccggaaatttgaaggtgaccttttggttggtgctgatggaatatggtcaaaggtgaggaaggtgcttttcgggcaatcagaagcaacttattcagaatatacttgctacactggcattgcagactttgtgcctcctgacattgacacagttgggtaccgtgtatttcttggtcacaaacaatatttcgtctcctcagatgtcggtgctggaaaaatgcagtggtatgcatttcataaggaacctgctggtggcactgatcctgaaaatggtaaaaataaaagattgctcgagatatttaatggttggtgcgataacgtcgttgatctgataaatgcaactgatgaggaagcaattcttcgccgggatatatatgaccgaccacctacttttaactggggaaaaggtcgtgtcactttgctaggtgactctgtacatgctatgcagccaaatctgggtcaaggtggctgcatggctattgaggatggttaccagctggctgtagaacttgagaagtcctggcaggagagtgcgaagtctggaactcctatggatatagtttcctccttgaggagatatgagaaggagagaatactacgtgtttctgttatacatgggttggcaagaatggcagcaatcatggctaccacttatagaccatacttgggtgtgggtctgggaccattgtcgtttttaacgaagttgaggataccacatcctggaagagttggtgggagattcttcatcaagtatggaatgcctttgatgttgagctgggttctaggaggaaacagcacgaagttagaaggaagaccgttaagctgtaggctttctgacaaggcaaacgaccagcttcgtcgatggtttgaggatgacgatgcattggaacaagccatgggtggagagtggtacctcctccccacaagttctggagactcgcaacccattcgattaatcagggatgaaaaaaagtcactctccattggaagccggtcagatcccagcaattcgactgcttccctggcattgcccttgccacagatatcagaaaaccatgctactatcacatgcaagaataaggccttttatgtgactgataatggaagtgaacatggtacatggattaccgacaacgaaggtagacgctatcgcgtacctccgaacttccctgtccgtttccatccctcggatgccattgagtttggttcagataaaaaggccgtgttccgtgtgaaggtgctgagcacgctcccatatgaatctgcaagaggagggccgcaaatcctgcaggcagcatgaacgagagacttcagtcagccatggctgctgtcatcactcatcagctactgtacagcatccagtaaaacacagtgaattttgcactaaaatgcaggttccacttccagacaggattttgaatagctttctctgacggattgaaattgcagttctccatacagaaactgaggtgtacaatataaaaaaaaagaaactgaggtgtacaatagccaatagggacaggcaattttagctgttgcctgctgtatatacattgttgtgccattacagcaacaaggtggaatgtaattacggcatgaacacaatttaccaaatggaaaaaaatgtagctaaaaaccgctttgtttggtaaaaaaaaaaaaaaactgaatcccacgccccagaccctgcagcccgggggatccactagtttagagcgccgccaccgc

SEQ ID NO: 30587 - DNA, 999 bp, Oryza sativa
  Clone ID: PAT_MRT4530_34978C.1
atgcttcgtcttcccactctcctccccctaaaaccctcgcctcccaccaccggcttaaaccccatccacggccgccgccatggccaccaccccagccgcctcctcgcctcctccgccccgccgccgccaccaccacggcctcccaagcccgagccccgtaccagccacgagaacctaggcgacgacacccccgatttccccacaaccaagccccgcaagccgcgccgcgggcgccggagcgaggcggcggcggtggaggacttcgtgcgtggccgcctcgagcaggtcttcgcttccatccgggagcgcgaccccgaagtcctcgaaggcaagggcgacatcttgaagcgaaaggaggagctctccgacgaggagggaaaagaggggactggtgaggaagagggggagctgaaggctgtggttgaggaggaggatccctcctggcctctggacgccgacatcgggtgggggattcgggcgtcggagtactttgacaagcattccatcaagaatgtgacggtggatggtgtggagatcgattgggagagggaggtcgaggagggatgggtcaaagagatcaactgcttggagtgggagagcttcgccttccaccctagccccctcatcgttcttgtcttcgagcgctacaacagggcagctgacaattggaagtttcttcaagaattggaaaaggcggctaaagtttactggaatagtaaagatcggctacctcctcgggttattgaggtggttggtcatatgctaaatttaattgagttccagacagtgaaggttgatatgaatattgagagagacctggcatttgcacttcaagtaaaagaatgcccacaattattattcctcaggggaaacaagatattatacagggaaaaagaactaagaactgccgacgaactagttcaaatgattgcccatttctactacaatgcaaagagaccatcttgtgttaatcctgaagctattgcacctccgtgctaa

SEQ ID NO: 30588 - DNA, 567 bp, Oryza sativa
  Clone ID: PAT_MRT4530_34979C.1
atggaacacatcggccctttcctcctggcagcaatggcagtggcggcggccgtcgccgcggcatcggagacggctacaactgtgccggtggcggcgctaccgccgctgccagcgctgccggtcacagcggcggcgagcacgctgcagccggggacggcgtcgtgcatggacgacctcatgccatgcgcgaccgtctccgacgaccccaccatgctaacgccatgctgcgaggcggtggcggaggtgttgaagagcgatccggagtgcctctgcaaggtcgccgagatgtccagaaacaacaccaggaagctcgcgagcgtcagcaacaacctcgacagcgatcagcaattgttcgcccagtgcaagatcaccggcgtttcgtccgacgtctgccacaaggacaaggggcatcaaggaggcacgaatcatgccgttagtagtttgaaaaacgtgctaacgaaaaccgagaaaatgcggtcccaattagcaattgacattgctctgcgctccaaaataaccttatcgatgcacaacgggcacttgatcaataataccttcttccagtga

SEQ ID NO: 30589 - DNA, 4713 bp, Oryza sativa
  Clone ID: PAT_MRT4530_3497C.1
atggccggccacccacccaaccaccgcggagaaggcatgatcgactttgtggcagagttggcatgtatgacgctggtggtaggctaccccaacgcgccagagtacacgacgattccaccgctcagtggcgagcttcctcaccgtgttcgtctggaggtccacggctacgtgggtacctgcctagctaacatggtggtggaggcatctggaggcacagcagatcacgcctgtcaggaggcagcatacctgatgatggccagactacgggagcgccacaactacatcttccacgacacggcgtactggtttcaccctcgtcgagccagcagtgatgatgtcagtactttccgtccgacagccggcgagaacgacaccacctttggtcacatgtgtgctgtgatgaggggattggataggatgcactcggacctgcacaaggcgaccaaggccttgaatgatgggaagctcatgaggatcgtcgctctgaagagggagaacgctcagttaaagggtcttcccgcgccaggaggagtccggatccgcaccacgccccgcaagacgacgactgcacccgtgcgcatccagcttgcgcccaggaacccacctccatcagcagctcccgcagcacctccagttccgcccgcagttcctgcaactccagctccagctcccgcgtccgctctctccttcgctccagcatcagccgccaggggcccagccagaggcaacggaggttgcttgtttgggatggtctacaccaggaatggtagccgcgcaacaggcgagggcagcaacagcgaagagcgcactgagggtgtgcatcccaacagcaactccggcaatggtccgccaccacttcccgagaatccgacgctagcccaagtgatggcacatcagacacagatgatggcagccatgatgcagcagatgcagcagcagcaccagcagatgcaccagaggatgctgcagcacgccgaacagcagcaccagcagtttggtccccctccccctcagtccaagttgccagagtttctacgtgtcaggccacccaccttctccagcaccaccaaccctatggaggcgaatgactggctccatgccatagagaagaagctgaatctcctgcagtgcaatgatcaggagaaggttgctttcgccacacaccagcttcaaggtcctgcgtcagcttggtgggacaatcacatggccacccgcccaccaggtactgaagtcacttgggcagagttctgccgtagcttcaggaaggcgcaggtgctagacggggtcgtggcacaaaagaagagggaatttcgggcacttcatcagggcaacaggactgtgacggagtacctccatgagttcaatcgcctcgcgcgatatgcaccagaggatgtccgtaccgacgccgagaagcaggaaaagttcatggcaggtctggatgacgagctaaccaaccagttgatatctggagattacgccgatttcgagaggctggttgacaaggcaatccgtcaggaggatcaacgcaacaagatggacaggaagaggaaggccgctcagttcagggtacctcagggaagtcaccagaggccgcgcttcgctcctgggcagcagggtggacctaccaccatgatcgtccgtcagtaccgcccgttcaaccctagcaactttccccagggcgccggtggcagtcagacccaccatagaggtcagtcaaaccgcggtgcagctccacgcccaccaatggcaccggcacagtcaggcccgcccgcgcaagccaagaaggagactggagcaaaaccagggtcctgcttcaactgtggcgagcttggccacttcgctgacaaatgcccgaagcctaggcgtgccgagccaaggtttatccaggctcgtgtcaaccacgcatctgcggaggaggcacaagcagcaccagaggtcgtactgggtatgttccctgttaactcaatccctgcaacagtactttttgattctggtgcaacgcattctttcatttcaaagaaatttgtcgggatgcatgggttaataagagaggaacttagcacaccaatgcgggttcataccccagggaatagctccacttcggttcaattcagcccttctataacaatagaaattcaaagatcaccatttctagccaacctcattcttctcgaatccaaagacctagatgtcattcttgggatggattggctgaccaagtttaagggggtcatcgattgtgcgaatcgcacagtcaccttgaccaacgagaagggagaaaccgtggtgtacaaatcactagtctcaccaaagcaagaggtctctttgaatcagattgaagcggaaatcccagtggacaccgtggagaagagtttgaggaaattggaagatatacccatagtctgcgagtatccggaagtgttccccgaagacctcactaccatgccacccaagcgagagattgaattccggattgacttggcaccgggaaccgctccaatttacaagagaccgtacagaatggcggccaacgaattagccgaggtcaagaagcaggttgatgagcagctgcagaaagggtacattcgaccaagtacttcaccttggggtgctccggtcatttttgtggagaaaaaggataagacgaagaggatgtgcgttgattatcgcgcactcaacgaggtcacaaccaagaacaaatatcctttgccgcgaatcgatgatttgtttgatcaactgaaaggagctaaagtgttttctaagatagacctgcgatcaggctaccaccagttgagaattcgggaagaggatattccgaagacggccttcaccactcggtacgggctatatgagtgcacggttatgtcgttcggacttaccaacgcacccgcattcttcatgaatctgatgaacaaagtgttcatggaatttttggacaagtttgttgtggtgttcatcgacgacattcttatctattcaaagtccgaagaagaacatgaacaacatctccgtctagtactcgagaagttgaaggagcaccagctatacgccaagttcagcaagtgtgacttctggtcgacggaagtcaaatttctgggccatgtcattacagctcagggtgtggcagttgatccatcgaacgtggagtcggttaccaaatggaccccgccgaagaccgtgtcgcagattcgaagttttcttggacttgcaggttattaccgccgattcatcgaaaacttctccagaatcgcccgacccatgactcagttgcttaagaaagatgagaagtttaaatggacagctgagtgcgataagagttttgaggagctcaaaaagaaattagtatccgcaccagttttgattctacccgaccagatgaaagacttccaagtctattgtgatgcatcccgtcacggacttggatgtgtcctaatgcaagagggcagagtggttgcgtatgcctcgcggcagttgcgtccacacgaagggaattatccaactcatgacctggaattggcagcagtggttcatgctttgaagatctggaggcactatctgattggcaaccgctgcgaagtatatacggaccataagagtctgaaatacatcttcacccaaccggacctaaacctccgacaacgaagatggttggaactaatcaaagactatgacatgggtattcactaccacccgggtaaagccaatgtggtggcagacgctttaagccggaaaagttactgcactgccctgtgcatcgagggtatgtgtgaggaattgcggcaggagtttgagcatctcaacgtgggaattgttgaacacgggtttgtggccgctctgaaggcatggcctacgcttgtggatcaagtcaaagcagctcaagtaaacgattctgaaatagcagagttgaaaaagaacatgagagtcggaaaagcccgggatttccacgaagatgagcatggcacaatctggttgggagaaagattgtgtgtacctgacgacaaggaactgaaggatctgatactcaccgaggctcatcagacccagtactccattcatccaggcagcactaaaatgtatcaagacctcaaagaaaagttttggtgggtcagcatgaggagagaaatagctgaattcgtcgcactctgcgatgtttgccagcgagtgaaggcagagcaccaaagaccagcaggtttactccaacctcttcaaatcccggaatggaaatgggaggagattggaatggactttataacaggactgccccggacatcatcgggtcacgattcaatctgggtagtcgtggatcgactcactaaggttgctcacttcataccagtacataccacatatacgggcaaaaggttggcggagctttacctttcgagaatcatgtgcctacatggagtacccaaaaagattgtatctgaccgagggagtcagttcacctcaaaattctggcagaagctgcaggaagaattggggacccgtttaaatttcagcacggcctatcacccgcaaactgatggtcagaccgagcgagtcaatcaaatcttggaagatatgttgagagcttgcgctcttgattttggtggagcttgggacaaaagcttaccatatgcggaattctcgtacaacaacagctaccaggccagtctacagatggcaccgtttgaagctttatacggccggaagtgccgcacacctctcttctag

SEQ ID NO: 30590 - DNA, 494 bp, Oryza sativa
  Clone ID: PAT_MRT4530_34980C.1
cccacgcgtccggcttctccaatttgttcaacttcattgcagatatcagaaaaccatgctactatcacatgcaagaataaggccttttatgtgactgataatggaagtgaacatggtacatggattaccgagtaagttctgaaaaccgcatgattctttgctcttgccctgaattcgaaatggatgcatcttactaattcagtcccatgtggactctccagcaacgaaggtagacgctatcgcgtacctccgaacttccctgtccgtttccatccctcggatgccattgagtttggttcagataaaaaggccgtgttccgtgtgaaggtgctgagcacgctcccatatgaatctgcaagaggagggccgcaaatcctgcaggcagcatgaacgagagacttcagtcagccatggctgctgtcatcactcatcagctactgtacagcatccagtaaaacacagtgaattttgcactaaaatgcaggttccacttc

SEQ ID NO: 30591 - DNA, 366 bp, Oryza sativa
  Clone ID: PAT_MRT4530_34981C.1
atgacgagcagaggctactgcaagaagagttcgaacaatggtcatgtgagccacaggagcaaaagtctcatgatgaccatgctcttgttgaaaaccacgcgctacaagatgaactttatagcgttcaagagttccatcagagcgagtcttgaccttatagatccatttacaagtgataggacgaacatgagatggcaatggtacaagatcccaagtaccagtacgctcaagtgcagcaagctcttctgccatcacatgttgccattcttgatgaatatcaacatcttgatgagaactaggttcagcgagaatagtagcaacataagcatagcgaccatagcgatcctctggacaaatcgtaactaa

SEQ ID NO: 30592 - DNA, 2498 bp, Oryza sativa
  Clone ID: PAT_MRT4530_34982C.1
atgccgccgccgcccgaagacgacgggtcctcctccgcgcggacgccgctcataccccccacacctcctcctcccggccgagcggtggcgcggctccaccctctcccgctcctcgttgcggcggccttcgccgcatcgtaccacctcctcgtcgcgcccgcgccgtcgtactaccgctcgctcttcctctccctcggatccaacgacaccgcggcagcccacctccacgcgctcaccctccgcccccacctcgcgggcaccgaggccaacgcccgcgccgccgagcacgtcgtctccgcgctctcctccctctccttccccacccgcgtcgtgccctactccgtcctcctcgcctacccggtccaccgctccctctccctctcggcgccaggccacgccaccaccccctttgcgctggtgcaggacacataccccggtgatccctatgccgcggtctccgcggaggccgtccccaccttcctcgcctacgccgcgtccggctcggtcgccgccgaggccgtctacgctaactacggccgcccggaggatttcgcctacctcgccgcccgcggcgtagacgtcaccgggaaggtcgtcctcgcgcgctacggcaaggtgtaccgcggcgacatcgtgataaacgcccggaaagctggcgcggcggcggcggtcatatacaccgatgccaaggactacgcggcgggggaggccttcccggatggtccatggatgccgcccaccggtgtgcaggtcgggagcacgttcaagggggtgggggatcccacgacgccgatgtgggcgtcgtccgaagggtgcgagcgcgtgagcatcccggaggcgatggccaccgacgacatgccggggataccggcgctgcctgtgtcgggaagagatggggaggctatactacagcttatcggcggtgatgtcgcgcccaaggattggcaaggcggagatggctcgccggtttaccggctcgggcccgggccggcggtgctcaatctcacctacattgggaacgagacaatggctactattcagaatgtcatctcagtgatcgaagggaaagaagaacctgaacgctatataatccttggtaatcatcgtgatgcatggacttttggggcagttgatccgaacagtggaacagcagccttgcttgagttagctcaaaggttctctgagctacaaaagaagggttggaggcctcgacggaccatcatcttgtgtaactgggatgccgaagagtatggactggttggatccactgaatgggttgaagagaacagggctatgctaacttcaagaactgttgcttacctgaatgttgattctgcagtgtatggtgcagggttttatgcatcagctactcctcaacttgatgagttgcttaaggaggcgagtaaacaggttcaaaatccagataatgagacacaaagtctgtatgacttatggatggcttctgatagttcttccatgattaagattggaagaataggaggtggaggatcagattattctgcctttgttcaacacattggtatcccttcaattgacatttctatgggatcagaatatgcggtctaccatagcttgtatgatgactttgtgtggatggagaagttcggagatcccttgttccgcaggcacgtcgcagcggcaagcatgtgggggcttgtcgccctgaggctttccgatgaggagatcctacccttcaactacagcacttatgctgtagagcttgagaagggtgcaatcgatataaataagagattgctgggagtgcctgtcagctcatctcccctgcaaaagtcaatcgccgagttcaaaagggcagctctacaaatggattctgaaatgaaggccttacagacaaggaaagtttggaacccctggagaaacaatcccctgaaggtcagagatctcaatgagcggttgatgatgacggagcgagcattcaccgatcgagaaggactatctgggaggccatggtacaaacacctgatttatgcaccatcactgcatgatgattacggagcgcaggtgtatccaggtgttgatgatgccattcagatggcagagaggacgaatacgtccgaatcctggcgatctgtgcagcatgagatttacaggattgctagggtcatcaaccaggcctcgctagtcctaagtggagggttaacataaacaactgttggggaagcggtggaaatggaactatgctttctactcgggggactggtaatcgttgactgcgataaatgaaatgttcatgtcacttatttggaacaaaaaaaaggaagaaaaatagaggaatttgtgggttttaaatccaaagagcgaagggtgaagagcaaagctttggaaagtaaactgtatcaaaataggactcgagggaataaagggtacatgtacctttgatagctacagagtggaaagtaaactgtatcaaataggaacagtaaacaaagataaaacaaaatttcgccaaaaaaaaa

SEQ ID NO: 30593 - DNA, 538 bp, Oryza sativa
  Clone ID: PAT_MRT4530_34983C.1
ttttaagagatagttttcccgctaggcgccacgacggaacgggcgctacacatcaagatcaagatgcccaagtgctggaatctaattcggccacttgctaaactgatgacttcaaacggccgccgaatctgcgtacgacatccgttttcgcggcaattgaagaaacaagatgttgcgtcacctgtaatgggcctatgggcttgtaacttgatctgggaccccggcccaagaataaggttgatatgcactggtaaggtcaacaacccacggagaggtgtatcgatcgctaaggcgcaacacaacaacgtctagtacagttgtagttgggtcgtcaacgtttctcccaaatcatatcgctgcccccaagtctctgttgtgacctacgaaaacggaatcggctcgttgccacggttctatttttgtagttttcagaagtttctgtcgccgtacagcaagtgtttgccaaggtatcgatacatccaaactccattgaggtgcttggttgaggtccgtgtacgtcaccattccgcttgctttg

SEQ ID NO: 30594 - DNA, 384 bp, Oryza sativa
  Clone ID: PAT_MRT4530_34984C.1
acgctgtggagtggagggaggcggagatggcgaaacagtatctactatgagctcctcccactcccatggtaataggggggctgctccggacctaccgacaacgatagcatcatcaactgactcgccagggtgcgcctgatgacctggggccctacgatggggccgagaccatcgtgtacggacgtcccgagcatgctgtctacatctccgtcagccaccatggggtcggccacgtggccttcgtgacgcacacgaaggactcctccggtgcgccctacaagccggtcgagcatgcttgcgcgccaacgaccgacccggcttatacctctaccgctcaatgggcaacgcaagtaacatatacgatgacagcagcggctacctggg

SEQ ID NO: 30595 - DNA, 271 bp, Oryza sativa
  Clone ID: PAT_MRT4530_34985C.1
aaaaaatgcccccccatatatattattatttatttcccctactaagtagaaaagaatgccccaaacccgggttataaaaatggccgtagcatcccttaaaaaataactttaatatacaccttgctatgcacggggccacactttgaaacaaacgcacgcgggaaaataaaagggggaaaaaaaggcacagcaataaaggctatgctcaataacacttttattccaaaaacggggccccagtaaaagaactcggcttggttcctcccctttg

SEQ ID NO: 30596 - DNA, 1060 bp, Oryza sativa
  unsure (1)..(1060): unsure at all n locations
  Clone ID: PAT_MRT4530_34986C.1
atggacgccaacatgctgagcgcgatgatggccgccgtcggcggcgacaagccgcagccggacacgtcggagcagatcaacgtgtcccccctcgccctcctcaagatgctcaagcacgggcgagccggcgtgccgatggaggtgatggggctgatgctgggcgagttcgtcgacgagtacacggtgacggtcgccgacgtgttcgccatgccgcagagcggcaccggcgtgagcgtggaggcggtggaccacgcgttccagagcgagatgctggagatgctccggcagacggggcggccggagatggtggtggggtggtaccactcccaccccggcttcggctgctggctctccggcaccgacatggccacgcagcagagcttcgagcagctgcacccgcgcgccgtcgccgtggtgatcgacccggtgcagagcgtcaaggggaaggtggtcatggacgcgttccgcctcgtcgaccacatggcgatggtgctcggcggcgccgcgggcggcgaggcgcggcagaccacgtcgaacgtcggcgccgtcgcgcggccgtcggcggtggcgctcgtccacggcctcgggcggcactactactcgctcgccatcagctaccggatgaaggagggggaggagcggatgctggcgtgcctcagccggagcgggtggtccgacggtttcgcgctgcggcggttcggcgcgcacgacgccggcaacgaggcggcggtgcgcgggatgcgggacctcgccgtgggctacggggcgcaggtgagggaggaggacgagacgccgccggagaggctcgccgtggtgagggcgggcaaggtggacgccaaggggaagctggaggagaaggccatggacgccatgtccgccaacatcgtgcagacgctcggcatgatgctcgacaccgtcaccttctagatcactactgctgttatcccaacactgtacccaaagctcggttaatttttatttttttatgtttaacgaagcctaccataattcagtgcaaaaaaaaaaaaaaaaaaaaaaaaaaaaannnnnnnnnnnaann

SEQ ID NO: 30597 - DNA, 309 bp, Oryza sativa
  Clone ID: PAT_MRT4530_34987C.1
atgtgggccccacatgtcatccccttcctcctccttcctctcccctcttctctctccttcctcttcctccttcctcctcttgcgccatggcaatgcttgtcgctgcctccagtgtcgggatggcgctccgatatcggtcacacgtcgtctctgccgccgacggagtcaaaccacttgcgcacggcgaagtcgtcccgcgatggcttgaggacgagcgagaaagagacgacgccggctgtgttggccttgatggccatggccatggctgaggcggtggcgagtgagaagctcggcggcggccggctctag

SEQ ID NO: 30598 - DNA, 1308 bp, Oryza sativa
  Clone ID: PAT_MRT4530_34988C.1
atggtgcgcaagctgccagatattgacaacacgcaacagtctatcaaaactttgctgaaagttaaacagacagtgtttgaagagaagtatctgggcctcccaacaccttcgggcagaataaaatctgggaagtttcagtcgttaaaagaaaagtttgagaaaagactatccgactggtgtgagaaaaatctttcaatgggaaggaaggaagtccttatcaaatcagtcctgcaggctctgccgatgtacatgatgagcgtttccaaaattcctgttagcctttgtgaggaatatatgcagctgattagaaaattttggtggggggaagatcgtcataagcggaaggtccattggatctcgtggcatcagcttgttaagccaaagagtcagggaggaattagtttcagatatctgaagctctttaatcaagctctcctagcccggcaggcctggcgcctcattcaatacccggatagtctatgtgctaaggttcttaaagcaaagtattatccaaatggaattatctggcgtattggttcggagtcaaaaatcataatttggagagacaattggattccaagagaacataacttgaaagttctgggcaaaagaagtagagcaagacttaaatgggttgctgacctaatgcttccaaataaacaagagtgggatgaaagattaattcggcaactcttctatccggctgatgctgatattatcctgaacattcagctttctcacagaatgactgaggacttcatcgcctggcactacgaccgtgtgggtatgtttactgtccggagtgcatataagctggccctggatattcagactcggtcccagggaaatgttgtcggctgctcttctgctgctgatggcaggaaagtgtggtctgacttgtggtctactcaggctaaagcgttgcggtctgaaatgcggaagatttggcaattgccaccagaacaagccttcgagaaaacaggtccagattggctgctaatgctgctgcaacaggcggacccatcaattcgtgctgccgctctcttgctgctatggcgcgcctggttcttgagaaatgatatcattcacggcaacggaaaggcacagacctctgcttctgtgatgttcttgcaacattatgcagaaacactgttcatggtccgacaaaaagaagtggatttgaaaggaaagggtatatgtcaacctaacatgcatgtccgcccgtctgttcctgactcgaggactgtttggaagccacctcctcctggttgggttaagcttaatgtggatggagccttttcggcataa

SEQ ID NO: 30599 - DNA, 4083 bp, Oryza sativa
  Clone ID: PAT_MRT4530_34989C.1
ttatttttgttgaatactaatacattgcccatcaatgtaaacaacagcaatctttgcaatattcagattatcaggttcatcatcaagacatcgttgagttaaccgtggactgcatttcgatattgacaatctcttcagcgaagtaggcagaccactcgcaggcaacgcctccaaagctggacagttttctatgcagagttcttccaacacaggcagagtagagatattcgctggaagcattctcaattccttgcagtttctaatgctcagagcctgcagcttctccagccactcaaattcctctaccaaatcatcgaagaatgagcgactcccgtcgatctctaggatctcaagagagcgaagcctgttaaacatgctcagtttcagaagcaatgtgttctccaggtgaagactgcacacattgaacaggcagttcaaccaatccagaggttcgatgctgaagctgctttcctgatcagtgctaacatgaggacaactggtaacctttagtgtccacactgagaacaggaaggggtagtcatccacccatgccccatgtgtgatgaagcattcgctgatctctagctttcgcagcgatgtgtggaacttgtcgactagaagcttcgggcaatcgtatagtgataggtctgtcaatgcagtgaggtcctgaaaaccgtcagagagatcacacgtaacgttgtcgcagttctttattgacaagacctcgagggaccttaggaggtgctgctgctgaagcaggcttgatcctagagatttcagcccgtgacactgatgtatttgtagtgttgtgagccttgatgtccatctgccttctttcgatgttgcaatcgcatctgatgatgatgatggtggtaatgaatgtctgtcctgtatccttggtagtgtttcaagaccaacattctcaatgatcattgttgtcagtgtaagtggaaggtcaggaaagtttctcagctttgggcagttccttatctggatttcacagaggcagggaaatacggtgtttcttgattttgagctgcctgtcgaccattcagtacagttcaacacatcttcgaaaacaaggcgtttgagctttgggaacatgatctgatctgatcgttgaggaacagtgttcaccttgttgacagaatggatttttctcatctcgagaatctcaaggcagggcatgatatggaatggagggagattcttcaggttcacgcaatccgttaagaaaactgaagtagcatttgatagagaacaaggagtctttagcatccatgatgggcatttagtgcttctgtagcctgtaattctcagatctttcaggttctcatgtggttgcaagcactcaagtgtgtcttcatctgtggaagcctctctgctttggctatcagagctgctccatgacaactctaatatgttcagatgttgcatacccttcaagatgcccttccttagctcactaacatcaaccggctggagatctttaagacaaagtgtacctcggagttgtgtcatcccttgtaaggcgtcgatgcgcgaaatactgctaactttgtacacctccaattcttgcaaatgtgagagattctgtatttttggtatgatagaaagaaaaggctcacttgcatgcaaatgcctcagataaatcagattggtgatgccattgggagcacggagataaggagaactgcagcgcacatccagaacctggaggaggtggagatcacaaactgactcaggaagatctgctattctgttcccgagcagattcagataccggaggtgtcggagaaagccaatctcagcaggcaaaaatgctatatttgcatatgtcacaccaagaactctcacatcttttgctaccttgaaaatatcagcgagaaattcgataaattcatctgaattactgaaatctgcaaagaaaataattgtacgaatccgttggaggaagtgttggtcagatccagatgaatgagatatcttcaatgacagatcatttatcagcttggagaggttgtttgtcatgatggtcaggtgacgaacttctagtggcacgtctcctgagctctcggtgaccatgaagaactgatctgttgagactgcctgtgctagttttcgcatcgaattgtgtaccacatatctgctgcttccaattggctgaaagaagcatctttcaaccaaatcttcaaagaacttgcttccaatgtcctcaggcctcgccacggcatcttcagaatatatcagcccctgtgctacccacatctgaaccagttcatcctttgtgaaggcatggctacatggaaacactgcagaatatgcgaagcattgcttgaggcgaggatcgaggtgttggtagctcagccacagcgccggcgagatgccggcgacgtctcgctgctcccagagcttgtcttccagcacgtttttccagtgctccttgtcttcccggcggaaaaacagagcccgtgcaatcgccgtcgctggtaatggtaggccgcccatcttcttggctagctccaatgcaaccttctccatcggtgactgcttctcttcctcgtcttcgtcttcaacgtcgtcccattcgtctcccagtggagtgtaatcttcagactcatcagagctgccaaatgcgaagtgtctgaacatcttctggtaatcctcagattccaatggattcagtattaatggaggcattgttcctatcgcatttgctgcaatttcagattgagttgtcaccatgatcatgctcctcctggctgcaggttgcagaagcctcattagatctttccactggatgtcgccgacatcgctaacatcgtcaagaacaagcaggaacctcttgccggtcaactcctcgtgaaggatctccctgatgtcttcgacttcatgggcatctccggcaacaccatggatcatctggaccacgagttcgtccttgagctggacctcgccggagacgtgcacccacatccgcacggggaactcggccttgacgacctcgtagtggaagatgaactgcgcgagcgccgtcttgcccaccccctcgacgccgacgattgggagaacaccgatccctagccggtaatgcgggtcgtcgctgaacctcaccttctccaagatctgctccacctcagtttccctcccaaatatgtcattctgaaactgatcataatcagctgcttccgctgctgttgcagcctctgcttgtgctgaaaccatcgtggcgtagttcttccctgccacgacgtgctcgtacgccgacgtgcacctgtacgcagcttgtgccatcatctcaaacgcaactcctaagccacgcaggtcaggattactcttgttcccctttgagcttttgccatggctgccgctgctgctgctgctgctgctagcaacggcatttctgggtgggctgaagcagagcaggaacctgagcgggctgcacggcttgggcttcctcgccgcgccggcggcgggcgtcccgcgggcgtcgacaccgtgctccccgcctctcgccatcgcgtcggactggagcagcacgaggtcgtcgagggcgtcgtcagcggcatacgcggcgtcgagaaggtcctgaagagggcgccggtggccgacaacgtcgatggcgccggcgtcggcggcgtcgaggacacgccagacgggggcgaggagggcctcgaggcgccggaggtggcctgccgcggcgtcgtcgagctccgcgagcagcgcgaggcccttgccgatgaggcgggcgagcacggccgcgacgaacgccgacgccgaccatccgaacgtcgatggcatcgccgtcgtcgagagctgatacggcggcaccttcagtgatcgatcgatcgtgtaagagttggtcggtcgacgatatggtggatgatttgattatagtcgatgaaggaaaggagagcgtgacaaggtggcttggccggacgacgtgctagcacgaaccgatatatttggtggacgtgaagctgtcaaaattattatggaaggaagtttcataccgtgtctttgattgaaaatataattgtagttttacattctctaataaaaaaaaaaactcgagacagttct

SEQ ID NO: 30600 - DNA, 5358 bp, Oryza sativa
  Clone ID: PAT_MRT4530_3498C.1
atggccggtcacccacccaaccaccgcggagaaggcatgatcgattttgtggcagagctggcacgcatgacactggtggtgggctaccccaacgcgccggagtacacgaccattccgccgctcagtggcgagcttcctcaccgtgtccgcttggaggtccatggctacgtggggacttgcctcgctaacatggcggttgaggcgtcaggaggcacagcagatcatgcctgtcaggaggcagcctacttgatgatggccaggttacgggagcgccacgactacatcttccacgacacggcgtaccgctaccacccccgtcgagcccatggtgatggcgtcagctccttccgtccgacagctggcgagaacgacaccaccttcggtcacatgtgtgctgtgatgaggggattggaccggatgcactcggacctgcacaaggcgaccaaggccttgaatgatgggaagctcatgaggatcgtcgctctgaaggacgagatagcgcgcctgaagaaggagaatgctcagttgaagggtcttccagtaccaggaggagtccggatccgcactacgccccgtaagaggacgactgcacccgtgcgcatccagcttgcgcccaggaacccacctccaccagcagctcccgcagcacctccagttccgcccgcagctccggcagttcccgcagttcctccagctccagctccagctccagctcccgcgttcactctctccttcgctccagcatcagccgccagaggtccagccagtggtaccggaggttgcttgtttgggatggtctacaccaggactggcaaccgcacgacaggcgagggcagcaacggtgaagaacgcgctgatggtgtgcaccccaacggtgattctggcaatggtccgccaccacttcccgagaatccgacccttgcccaagttatggcacatcagactcagatgatggcagccatgatgcagcagatgcagcagcagcaccagcagatgcaccagaggatgatgcagcacgccgaacagcagcaccagcagtttggtccccctccccctcagtccaagttgccagagtttctacgcgtcaggccacccaccttctccagcaccaccaaccccatggaggcgaacgactggctccatgcaatagagaagaagctgaatctcctgcagtgcaatgatcaggagaaggtcgctttcgccacacaccagcttcagggtcctgcgtcagcttggtgggacaaccacatggccacccgcccaccgggtactgaagtcacatgggcagagttctgccgtagcttcaggaaggcacaggtgccagatggggtcgtggcacaaaagaagagggaattccgtgcgctccatcagggcaacaggactgtgacagagtacctccatgagttcaatcgcctcgcgcgatatgcaccagaggatgtccgcaccgacgccgagaagcaggagaagttcatggcgggtctggatgatgagctgaccaaccaactgatatctggggactacgccgactttgagaggctggttgacaaggcaatccgtcaggaggaccaacgcaacaagatggacaggaaaagaaaggcggcgcagttccggtccaaccaaggtagtcagcaccgaccgcgcttcactcccggacagcagggtggacctaccaccatgatcgtccgccagcaccgcccgttcaaccctagcaacttccatcagggcaccagtggcagccagaaccaccatggaagtcagcccaaccgcggtacagctccacgcccatcagtggcaccggcacaatcaggccagcccgcacaagccaagaaggagacgggagcaaaaccagggtcctgcttcaactgtggcgagcttggccacttcgctgacaaatgcccgaagcccaggcgtgccggaccaaggtttatccaggctcgtgtcaaccacgcgtctgcggaggaggcacaagcagcaccagaggtcgtactgggtacgtttcctgttaactcaatccctgcaacagtactttttgattctggtgcaacgcattctttcatctcaaagaaatttgtcgggatgcatgggttaataagagaggaacttagcacaccgatgcgggttcataccccagggaatagctccacttcggttcaattcagcccttctataacaatagaaattcaaaggtcaccatttctagccaacctcattcttctcgaatccaaagacctagatgtcattcttgggatggattggctgaccaagtttaagggagtcatcgactgtgcgagtcgcacagtcaccttgaccaacgagaagggagaaacagtggtgtacaaatctctagtctcaccaaagaaaggggtctcgttgaatcagattgagacggaaatcccagtggataccgtagagaagaacttgagaaaattggaagatatacccatagtctgcgagtatccagaagtgttccccgaagacctcactaccatgccacccaagagggagattgaattccggattgatttggcaccaggaaccgctccaatctataagagaccgtacagaatggcggccaacgaattagcggaggtcaagaagcaagttgatgaacagctgcagaaagggtacatacgaccaagcacttcaccttggggcgctccggtcatttttgtggagaaaaaggataagacaaagaggatgtgcgtcgattatcgcgcacttaacgaggtcacaatcaagaataaatatcctttaccgcgaatcgacgatttatttgatcaactgaaaggagctaaagtgttttctaagatagacctgcgatcaggctaccaccagttgagaatccgggaagaggatattccgaagacggccttcaccactcggtacgggctatatgagtgcacggttatgtctttcggacttaccaacgcacccgcattcttcatgaatctgatgaacaaagtgttcatggaatttctggacaagtttgttgtggtattcatcgacgacatacttatctactcaaaatccgaggaagaacatgagcaacatctccgtctggtactcgaaaagttgaaggagcaccagctatacgccaagttcagcaagtgtgacttctggttgacggaagtaaaatttctgggtcatgtcattacagctcagggtgtggcagtcgacccatcgaacgtggagtcagttaccaagtggaccccaccgaagacagtgtcgcagattcgaagttttctaggactggctggttattaccgccgattcatcgaaaatttctccagaatcgcccgacccatgactcagttgcttaagaaagacgagaagtttaaatggacagctgagtgcgataagagctttgaggagctcaagaagaaattagtatccgcaccggttttgatcctgcccgaccagatgaaagacttccaagtctattgtgatgcatcccgtcacggacttggatgtgtcctaatgcaagagggcagagtggttgcatatgcctcgcggcagttgcgtccacacgagggaaattatccaactcatgacttggaattggcagcagtggttcatgctttgaagatctggaggcactatctgattggaaaccgctgcgaagtatatacggaccataagagtctgaaatacatcttcacccaaccggacctaaaccttcgacaacgaagatggttggaactaatcaaagactatgacatgagtattcactaccacccgggtaaagccaatgtggtggcagacgcattaagccgaaaaagttactgcactgccctatgcatcgagggcttgtgtgagaaattgcggcaggagtttgagcatctcaacgtgggaattgttgaacacgggttcgtagccgctctggaggcacggcctactctcgtggatcaagtcagagcagctcaagtaaatgattctgagatagcagagctgaaaaagaatatgagagtcggaaaggcccgggatttccacgaagatgagcatggcacaatctggatgggagaaagattgtgtgtacctgacgacaaggaactgaaggatctgatactcaccgaggctcatcagacccagtactccattcacccaggcagcaccaaaatgtaccaagacctcaaggaaaaattttggtgggtcagcatgaggagagaaatagctgaattcgtcgcactctgcgatgtttgccaacgagtgaaagcagagcaccaaagaccagcaggtttactccaacctctccaaatcccggaatggaaatgggaggagattggaatggactttataacaggactgccccggacatcatcgggacatgattcaatctgggtagtcgtggatcgactcactaaggttgctcactttataccagtacataccacctatacgggaaagagattggcagaattgtacctcgcaaggatcatgtgtttgcatggggtacccaagaagatagtatccgaccgaggtagtcagttcacctcaaagttttggcagaaactgcaggaagaaatggggacccgtttaaatttcagcacggcctatcacccgcaaactgatggtcagaccgagcgagtcaatcaaatcttggaggatatgttgagagcttgcgctcttgattttggtggagcttgggacaaaagcttgccatatgcggaattctcgtacaacaacagctaccaggccagtctacagatggcaccgtttgaagctttatacggccggaagtgccgcacacctctcttctgggatcagacaggcgaacgtcaactgttcggaacagaagtattagcggaagcagaagagaaagtcagaatcatcagggaaaggttgaggattgctcagtctcgacagaagagctacgcggataaccgtcgaagggagctcacttttgaggccggagactacgtgtatcttcgtgtcactccgctccggggagtacaccgttttcagacgaaaggcaagttggcaccacgcttcgtgggaccatacaaaatcttggaacgaaggggagaagttgcctatcagctagaacttccatccaatatgatcggcatccatgacgtgttccacgtgtcccaattaaagaagtgtttaagggtacctgaagaacaggctgattcggaacacattgatatccaggaggacctaacctatgtggagaagccggttcgcatacttgatgccagcgaaaggagaaccagaaacaaggttacccggttttgccgagttcagtggagtcatcattcggaagaggaagcaacctgggaaagggaagatgagttgaaagccgcccatccgcacctcttcaccagctcctccgaatctcggggccgagattccgtttaa

SEQ ID NO: 30601 - DNA, 2356 bp, Oryza sativa
  unsure (1)..(2356): unsure at all n locations
  Clone ID: PAT_MRT4530_34990C.1
ccggccgggcttaggagtttgaggggggggaagtccacatatatacagttaatcactcgaccgatcatgaccagcgccatgactgtgccgacgatgttgtggtccaccctagtaccattggtgctgcttgctcctctcttctccatcccccgccattgccgcgctcaggtgctcatgaactactcctgcaacaacggtagctcctacgccgagaactccacctacgactccaacgtccgcgccgtgctcgccacgctgtccgccagcacgcccaacgccaccacaggcttcgccaccgcgtcggcagggcgcggcgcggacacggtctggggccttgcgctctgccggggtgacaccgaccatgccgtgtgcgcgtcctgcgtcgccgccgtgccggctatcgccttccaccagtgccgcggcgtcagggacgtgaccgtcttctacgaccgctgcatcgcgcggttctcgtacggggacttcacggcgaggcccgacaatacggaggtgctcatggtaagccccagcaagtaccaagccaccgtcaacgcaggccacttcgacgcgctcgtgacacgcctcgctggtgcgctggcggactgggcggcgtacaactcgacgttgaggtacgccgcaggggtgatggcctcgagcgacgggttcccgtcaacaacggggtacatggtgcacaacatctatgggctggtgcagtgtgcaccagacctggcgccgccggcgtgccgcgcgtgtctccaggcgctcatcgtcgacatgccccaggcttttggtggaaggattggggggcagttcaatgctgtgtggtgcaaccttaggtatgagacatcggtcttctacgacggtgacccagcggtgaggctcgtcgcgtcgccatcactcgagggtcccaacattaatggttcaacaactctgattataggaaacaggagaaggcgcccaaatgccgcaactgttgttgtatctgtccttgctgctgtaataattgcacttctgtctgtgctctccatttacctctggagaaaattgcaagcaaaacaatgctcgccgctggcggccaccgctcaacagctcatcgtcaagcaagcagcaagcaaacagatcaagcagcaaagcacatacaaatcaaaacaagcaatgctggcggttgcggacggtgacggcgcagccctcggcgaggacgtgggggaggtaggcgttctcgacgagtgcgcggtggcggtggtggaaggtgaggcggtagttgcggcgctcagcgttgcgcggggaccaggtgatgacgttggcactaggagtgccttggtcttgcgccacctcatggtggcgccacggaagtcgtcggcaacagcctcgtggtcgtcgacggcgagggccatgcggtcggcgccctcagcgaggccgccgccgcgcccgaccgccgcctcgcccagccaccgcctcggcccggcggccgcctcgcccgaccgccgccacctcaccccggccgatactgctgaccaagatgtcgaagcaggttcacttctatttgacctggcaacattaaggaaggcaacagctaattttgcagaagttaacaagctcgggcatggtggttttggagctgtatacaagggattcttgcgagatggagaggagatagctgtcaaaaggctcgacaaggcctcgggacaaggcattgagcagctgagaaatgaactcctattggttgccaaactccggcacaacaatcttgcaaaacttctaggtgtttgcatcaagggggaggagaagctgctcgtgtatgagtaccttcctaatcgaagcctcgacacctttctttttgttcttgggctcctatcagtcaagttagatgtctacagcttcggagttttagttctggaggtagtgacaggaaggaggaacaccgatgtgtttggtgcagtggaagaatccaacaatttgctaagctatgtctgggatcactgggtgaaggggacgccactggcgatcgtcgacgcgtcactgctcggcgacggccgtggtccgccggagagcgaaatgctcaagtgcatccagctcggtctcctctgtgtccaggaaaatccggcggaccggccgacgatgctgcacatccttgtaatgctccatgacgttgatgctaccagcttcgctgcgccgtcgaaaccagcgttcaccttcgtgaatggtgggcacacgacaggttctagctcaaacgtggccgcattatctttgaatgaggtgtccatatcggagtttcatcctagatagaagaaaatgtatattngtgccactctaaactctaaagttaccacttcacccccaaaaaaaaaaaaaaaaaaaa

SEQ ID NO: 30602 - DNA, 559 bp, Oryza sativa
  Clone ID: PAT_MRT4530_34991C.1
caaagcacagcacgagcacattcctgtttgcaatacatcttctattttcatcagagaaattcactttgtgctgacaagctagcgatgaagcagtgatgtgtttacaaggaaagctactaaaaataaccctaccttagccctagcagtctagcctttttttttttttgaggggacttaatctctagcttagcagaaccaaacatgcccatgtgatgtcatcccaaataaagctgaccggaatcacattacaacaaggtcttagcataggaacaataagcaaatctgcatgtaaagatgattcagcagagcagttcatgttcaggagttcaatggttgcggtgatgcttcaggcttgatcaagcttctgcaatcgagatttcgccatgtccagttgcttctgctcagacatgaccgcagatttgacgctcttgcggaagaagaggttgcaggtcttctggtacaccgcccgggagggaggcaggttgttgagctcgccgatcgccacctcgtgcgccctaatctctttcatgagctgcaccttcttgtccaccctcgtgcc

SEQ ID NO: 30603 - DNA, 238 bp, Oryza sativa
  Clone ID: PAT_MRT4530_34992C.1
tataaaagagcttcgacgtatgcagcacgcagcacagagcgcggggaccctatagagggcgccccctttttttttttttttttttttttttttttttttttttttgcacagacaaaaatttaatctaaaatcttcattcccagaaccaaattttcggaacataacccaattgtagtgcatttctcagagtcatactaaatacattacactccgctttgacgtgaacaacccatctttc

SEQ ID NO: 30604 - DNA, 984 bp, Oryza sativa
  Clone ID: PAT_MRT4530_34993C.1
atggcttcgaggagtagctggcattgctgcttgctggccttcttcctcctctcgtccgccgccggcgccgcctacgggcagcagctgtcgacgacgttctacgcggcgagctgcccgacgctgcaggtggtggtgcgcgccaccgtgctcggcgcgctcctcgccgagcggcggatgggcgcgtccctcgtcaggctcttcttccacgactgcttcgtccagggctgcgacgcctccatcctcctcgacgacgtgccggcgacgagcttcgtcggcgagaagacggcgttccccaacgtcaactccgtccgcggctacgacgtcatcgaccagatcaagcgcaacgtcgagctcctctgccccggcgtcgtctcctgcgccgacatcgtcgccctcgccgcccgcgacagcaccgccctgctcggcgggccaagctgggcggtgccgctggggcggcgggactcgacgacggcgagcctcagcgcggcgaacagcgacctgccggcgccgtcgagcgacctcgccacgctcatcgcggggttcggcaacaagggcctgagcccgcgcgacatgacggcgctctccggcgcgcacaccatcggcttctcgcagtgcgccaacttccgcgaccgcgtctacaacgacaccaacatcgacccggcgttcgccgcgctccgccgccgcggctgccccgccgcgccgggctccggcgactccagcctggcgccgctcgacgcgcagacgcagaacgtgttcgacaacgcctactaccgcaacctgctcgcccagcgcggcctgctccactccgaccaggagctcttcaacggcggctcgcaggacgcgctggtgcagcagtacagctccaacccggcgctgttcgccgccgacttcgccgccgccatgataaagatggggaacatcaaaccgctcaccggagccgccggccagatcaggcgcagctgcagggccgtcaacagcagctga

SEQ ID NO: 30605 - DNA, 319 bp, Oryza sativa
  unsure (1)..(319): unsure at all n locations
  Clone ID: PAT_MRT4530_34994C.1
cccacgcgtccgcgttggcccatcgatggtagttcgtccccaatcaagtgccattgtggcaacgtctatacaaagcatcatctcgacggtctgcgagctngagctcgagatgcggtgtttccccatctcatgcgaatcatttgggccttgtgaatctcaactcccgaagtgtccagggtgaatgagtgtatncgtctncatcgtcagcctgctgatactcagacaatgctgatctaccatccctctttcaagtcaggtcaacattatgactcgacnacagctgcaccttatagctagcactgggcatacattctaatat

SEQ ID NO: 30606 - DNA, 282 bp, Oryza sativa
  Clone ID: PAT_MRT4530_34995C.1
gcgcccacgcgttcgttcctcaacatcaacaatggccggcggaacctggttcggcacactctccatcgcgcgaccggcggcggagcggtccctactcgcatccaaaacggcatcgccggtcttctctattcggaccggcaccgagaccgcacgcctgcgcttatcggtcgtcactggaggtcgcactcctgcgctttccgctgctcagagccgagcgcgctgggcctcctgcgccacctgtgaccccaggggagcggacccacagtccaaaatcacaaacaa

SEQ ID NO: 30607 - DNA, 167 bp, Oryza sativa
  unsure (1)..(167): unsure at all n locations
  Clone ID: PAT_MRT4530_34996C.1
accctggtactaggcacatccgtcatgtactacgtttgntaccncgtacccatcgaggtgtcggtacaagtacagcgtcggttaccgcgaggacgtcgttacaacgtacgtcgatgttccgtactacgagtccgtgacaccgtggtcaaacgtctactacgtctcgt

SEQ ID NO: 30608 - DNA, 1293 bp, Oryza sativa
  Clone ID: PAT_MRT4530_34997C.1
atgcggagcctccactgcgctctcctcctgctcgccgtcgccgccgccgccgtccaccacctgccaccggccgcgtcgttgccggcaatgccgaacccagcgtcgctcgagccgtcgctgctcttcccgtcgtcgtccggcgcgtcctcccagccggcgcagcccggccccggcgccgcgtcgtccaccatcccggcgttcccggagcagtcggaggccgccgccgccacctccgtctgccagctcgccccgtccccgccccttctccccgccgtcctcgcctcctgcaacgccgggggcggcgcgctcccgccgcggctgcgttgctgccccgcgctcgccgcctggatgtacgccgcgtacgcgcccaccgcgctgctggcagcggcggcaggaggaggcggaggcgtgcccggcgcggcgcactccacggcgtcggcggcggaggcggtggcggcggtggtggacctgccggtgcttcccgacgacgcggaggagtgcgccggcgcggcggagcgcgctctgctcgcggcgggtgcgtcgctgccgccgccgccgccgccgtcgcaggtgggcgccaacgggacgacggcggcggcggcgtgcgacgtgccgttctgctactgccgggtgaggctgaggcggccggcgtgcgcggcgccggcggggagggcggcgaggaggctggagaaggcgtgctcgcggccggggctcgccggctgctccaggtgtctccgggcgctgaaccagaacatgatatcaaagttttgtgtacctaacggtatcaaagtactgcctagtatcaaacagatgtatggaattggggtgacggcctcaacaatggtgatcttcttctgtgccaatgccattgtcatacgacatgcgtcacatgaggttggagagttccgagagatagatctcaacggagggaacgccacgaaagcggccaacgcgagccacggcggcgcgcaggcgcagcagcagcagcagcgccagcgcgactgccagctcatggggctgacgtggctgctccaccggaacgccacgcggcacggcgccgcggccacggcggtgatccaggcgctcatggccgccgacgacgccaccggccggcccgccccttgctcgctcccctccgacgacctgccggtcgccgtcgcctcgtcggagatcaacggcgccgccgcctccaagctcgctggcggtggactgaatatcggccgcctcctccttcgtcacgccgtcgtgctggctgctttcgccatgatcttgtcgtcgcagtactgcttctga

SEQ ID NO: 30609 - DNA, 1332 bp, Oryza sativa
  Clone ID: PAT_MRT4530_34998C.1
gatcccgatggcttcatgatcgagatctgcaactgcgacaacctccccggcgtccccctcggcgccgatcatcgctcatcatcacaatcatcaaacagcgtgttaatttagctagctagcatcgagctcagttttcctaattaattgctagctcgatttgctcggtgatctcttcaattcgccggagcttggaatcaatcgagagattaggtgtacgtgagagctagcaggagatcgtcgccggcgatggtgaacacgcggcggcggcggcggcaaagtgcgccgtgccctcggcgacgagggcgatcacgtcgcgaggaggcacacatctcgtgcgcctaaaggcaggagagattgtgtacatgcttgtgtggctgcaatcaattagggatgcaagtaggctgatgaccaccacctaataggttattactactcccttctctcataaaaaacctatctaggatcggatgtgacacatcttcatactacgaatctagacatatatatgtccagattcacagtactataatatgtcatatctgattctaggtttgttttttatagcaaggatggagtacgtggttggtgggttggtccacttaaatagcatgtatgtgggttagtggtcagctctctttcatcgctaaatgcaatgaacggttgtggtttgctagatcagttgtcaggttatgcgattgggctcactgggagtttgtacatgagtactatggtgttgggcatgtaatcccctttgttataagtaaagaataaattaagcagaagtgccaacgtcgacgaaggcgatccacgtcggcgaggaggcacacatctcgtgcgcctaaaggcaggagagattgtgtacatgcttgtgtggctgcaatgcaattagggatgcaagtaggctgatgtacaaactcaccaaaataggttatttactactcccttctctcgtaaaaaaaccaatctaggatcggatgtgacacaccttcatactacgaatctagacatatatatgtccagattcacagtactataatatgtcatatctgattctaggtttgttttttatagcaaggatggagtacgtggttggtgggttggtccacttaaatagcatgtatgtgggttagtggtcagctctctttcatcgctaaatgcaatgaacggttgtggtttgctagatcagttgtcaggttatgcgattgggctcactgggagtttgtacatgagtactatggtgttgggcaatgtaatcccctttgttataagtaaagaataaattaagcagaatgagtcatgtcttaattttcaatcgatatattttgttagtgt

SEQ ID NO: 30610 - DNA, 902 bp, Oryza sativa
  Clone ID: PAT_MRT4530_34999C.1
cccacgcgtccgcgatcatcgctcatcatcacaatcatcaacagctcagttcatccgtgccgtgttaatttagctagctagcaatcgagctcagttttcctaattaattgctagctcgatttgctcggtgatctcttcaattcgccggagcttggaatcaatcgagagattagagtgtacgtgagagctagcgggagatcgtcggcggcgatggtgaacacggcggcggtggcggcggcgaagggcagcaggggcagcgggctgccgctggcgtcgctgaaccacatcagcatcgtgtgcaggtcgttgcaggagtcgctcaccttctacaccgacgtgctcggcttcttccccgtccgtcgccccggatccttcgacttcgacggcgcatggctgtttaattatgggattggtatccatctgcttcaggctgaagatcctgacagcctgccagggaaaacagagatcaatcctaaagataatcacatctccttccagtgtgagagcatggtggcagtggagcggcggctgaaggagctaggcatcccttacatacaacgatgtgtggaggaaggtggcatctatgtggaccaaatcttcttccacgatcccgatggcttcatgatcgagatctgcaactgcgacaacctccccgtcgtccccctcggcgccgaccagccgctcgtcatggccgcctgcaagagggccgccgtcatcaagcagcagcagcaggcgtcctcttctccggcgacggcggcggcggcggcacagtgcgccgtgccatcgtcgacgaaggcgatccacgtcggcgaggaggcacacatctcgtgcgcctaaaggcaggagagattgtgtacatgcttgtgtgggctgcaatgcaattagggatgcaagtaggctga

SEQ ID NO: 30611 - DNA, 3728 bp, Oryza sativa
  Clone ID: PAT_MRT4530_3499C.1
atggccgaccacccacccaaccaccgtggagaaggcatggatgattttgtggctgaattggcttgcatgaccttggtggtgggctaccccaacgcgccagagtactcaactgttccaccgctcagtggcgagcttcctcaccgtgttcgtctggaggttcatggctatgtggacacctgccttgctaatatggtggttcaggcatctggaggcaccgcagatcacgcctgtcaggaggcagcatatctggtgatggccaggcttcgtgatcgccacaactacactttctgcaacacggcgtaccgcttccaccctcgccgagcaagcggtgatgacgtcagcacctttcgcccgacggccggcgagaacgacaccaccttcggccacatgtgcgccgtgatgaggggaagggacaggatgcactctgacctgcacaaggcgtccaaggccttgaatgatgggaagctcgtgaggatcatagctctgaaggatgagatagcacgcctgaagaaggaaaacgctcagttgaagggtttcccagcgccaggaggagtccggatccgcaccacgcccctcaagttgacgactgtacccatgcgcattcagcttgcgcctaggaacccacctcctcccgcagctcctccagtacctccagcagttcttgcagtgcccgcagctccagctccagccccagctccagtcccagtgtcagctcctgcgtctgctctctcctttgctccagcgtcagccgctaggggtccagccagtggcaacggaggttggttgcctgctactcccagtggcagccgcgaccacagcagcagcagttctagtggcacagagccgggcaccggcgagacgtatctgccagactccaggagccgctcagagggacctggtctcttccttcagatggtcaacaccaggaatggcagccgtgcagcaggtgagggcagcaacggcgaagaacgcaccgacggtgggcatcccaacagcgactccgtcaatggtccgccaccgctccccgagaatccgactctggcccaagtaatggctcatcagactcagatgatggcagccatgatgcagcagatgcagcagcagcaccagcagatgcaccagaggatgtagcagcaaaccaagtagcagcagcagcagtttggtccccctccccctctatccaagttgccggagtttctacgcgtcaggccacccaccttctccagcaccaacaacctcatggaggcaaatgactagctccatgccatagagaagaagctcaaccttctgcagtgcaatgatcaggagaaagtcgccttcgccacacatcagctccagggtcccgcgtcagcttggtgggacaaccacatggctacccgtccgccaggtatggaggtcacttgggcagaattctatcgcagctttaggaaggctcaggtgccagacggggttgtggcatagaagaagagggaattccgagcactccactagggcaacaggacagtgactgagtacctgcatgagttcaatcgcctagcgcggtatgcaccagagaatgttcgcactgacgcagagaagcaggagaagttcctagcaggcctggatgacgaactgaccatccagttgatctccagggattacgcagacttcgagaagctggtagacaacgcaatccgtcaggaggatcaatgtaacaaaatggacaggaagagaaaggtagctcagttccggtccaaccaaggaagccatcagcgaccgcgcttcacacccggacagcagggtggacctaccaccatgattgtccgccagcatcgcccgttaaactcaagcagtttccaccagggcgcaagtggcagccagagccaccagggaggtcagcccaaccgcagtgcagctccgcgcccaccaatggcaccagcacagtcagctccattagcccaagccaagaaggagattggaacaaagccagggtcctattacaactgtggcgagcatggccactttgttgacaagtgtccgaagccaaggcgtgccgggccaaggtttgcttaagcccgtgttaaccacgcgtccacagaagaggcgcaagcagcaccagaggccatactgggtacgtttcctgttaactcaatccctgcaacagtacttttcgattctggtgcaacgcattcgttcatttcaaagaagtttgttgggatgcatgggttaagaaaagaagagcttagtacaccaatgagggttcataccccgggaaatagttcaacctcggtcagttatagcccttcagtgctaataggaatacaccgatcataatttctagccaacctcatccttcttgaatccaaagacctagatgtcattcttgggatggattggctgaccaagttcaagggagtcattgattgtgcgaattgcatagtcaccttgaccaatgagaagggagaaaccgtggtgtacaagtcaccagtctcaccgaagcagggaatctccttaaatcagattgaggtggaaaaccctgtggccaccgaggagaagagttcgaggaaattggaagatatccccatagtctgcgagtatccagaggtgttccccgaagacctcactaccatgccacccaagagagagattgaattccggattgatttggcaccggggactgctccaatttacaagagaccgtacaggatggcagccaaagagctagcagaggtcaagaagcaggttgatgagcaactgcagaaagggtacattcgaccaagtacttcaccttggggtgctccggtcatttttgtggagaagaaggacaagacgaagagaatgtgtgttgattatcgcgcgctcaatgaggtcacaatcaagaacaaataccctttaccgtggattgatgatctgtttgatcagctgaaaggagctaaagtgttttctaagatagacctgcgatcaggctatcaccagttgagaattcgggaagaggatatttccaagacagccttcaccactcggtatgggttgtatgagtgcactgtcatgtcttttggacttaccaatgcacctgcattcttcatgaacctgatgaacaaggtgttcatggaatttctggataagtttgttgtggtataaattgatgacatactcatctattcaaagtctgaagaagaacatgagcaacatcttcgtctggtactcgagaagttgaaggagcaccagttatatgccaagttcagtaaatgcgacttttggttatcggaggtcaaattcttgggtcacgtcattacagctcagggcgtggcagtcgatccgtcgaatgtggagtcagttaccaagtggaccccgcctaaggcaatgtcacagattcggagtttccttggacttgcgggttattaccgtcggttcattgaaaatttctctaggattgccagacctatgactcagttgcttaagaaagaagaaaagttcaagtggacggccgagtgtgacaagagttttgaggagctcaagaagaaattagtgtctgctccagttctgattctgcctgatcagatgaaggacttccaagtcaattgcgacgcgtcccgtcacaggcttggatgtgttctaatgcaagagggcagagtggtcgcttatgcctcgaggcagttgcgcccacatgaaggaaactatccaacacatgacttggaattggtagcggtggttcatgctttgaaaatctggaggcattatctgattgg

SEQ ID NO: 30612 - DNA, 887 bp, Oryza sativa
  Clone ID: PAT_MRT4530_349C.1
gcacgagggagagagagagagagaactagtctcgagttttttttttttttttttttttatggagcacctaattaaacgtccatatatatatgctggcttcggtgctttccctctgtttaattttggccaccatggagcaaattaaattagctcttggtgtagaatgggattacagtgtatatagtctgcatgacagtggcagcgagcaggatgaaagccgcgacgagggagatgaacacccacgggttcctgaagtagctgtgcaccaggctggctcgccacctgttcctcctcttcctgcagtgcgcgatcacctgccgctgcacgccgtagaggctgctgtgcgggctcatcaccgctcccctgctgagattgttgaacagcgccgccacagcctcatcgctgctgaacaggttgctgatgatccctctcgatttcagcagcgccacgtccctggccgtgtcgatgaggttgtccaagaagatgacggccgccatcgcgtcgttgccggcgccggggtgcatccgctcgaacgccatcaggttgaggaacatgctctccgtggaatccatcacatgaagcaacgggatggttagcacgccgcctctgaaggttatcgcccctgcgaatccaccaccagcatcggcggcggccaccttgaaacggattcctgcttcttggagctccgcagcacatggaatcatgaaaaccccgtttgatcgtcctgcactgttttggtggcaggtaccacggatgtttctctgaacaacatccacggggtggagccccagtgggccgtcgatcgccggcgcgtcgtccgacgatgagaaaagaaaagaaagcaccgaatcatcgtttatccttagacgttcttcctcgctatccat

SEQ ID NO: 30613 - DNA, 402 bp, Oryza sativa
  unsure (1)..(402): unsure at all n locations
  Clone ID: PAT_MRT4530_34C.1
ttttgtgtggtttaagaaggaggggtttaaacacccataacacaaatccatccccaacaaacaacaattatttccccccacacatgccggccactccagcggggaatgcacacgtaggcctcaatccgcgaaatcgtccaccaagtggaataggcccccaacacactggaacaactgctacccctaagggccaaaagcacgccaaatcaacaacttggacattgactgccaacagtgctgatccttctggaagagagaacagtgccacccaaagcccttcgggtgagcaatgaccttttcaaggggttccagtgcaccgggaaacggagtcgtcccgagagcccccctttggaccacccaccttccacccccctaccccatttnnncccctccccctccctg

SEQ ID NO: 30614 - DNA, 634 bp, Oryza sativa
  Clone ID: PAT_MRT4530_35000C.1
gagctaaattcccggctcatacaaaggcggtctcatcacttgctgacttgggtaggaggaagagggagtaggtgattgaacgatctaagggagtaggtgattgaacgatctaaggcatctactgcctccaatccgttctaaaatactgtaatttagaatgtgatttaactcatcctaagacaacgaatcgaaatagagattgtctagattcgttatctttaggatcggtcaaatcacattctaggtacaacattttggaacgaagtagtagcagtctggtatgcccgtgcatcacgcacgggatcacatggtgttacaggtgtttgggcatcgcttcctcgctggaatttggtcgagccgtgttgttgggttgacctaggtggtgtgagttcatgagcgtgcctcgtgcgctttgcttgcttaatttccttccctttggccttgttcttttgtttccctttttctcctccaatgcgcaagagggtgtgcccttttcacagtacacaccacgcagatgaagggctaacaaagtagcaattgcttttgtgtaaatattcttttgttaatatcatcattagaagcacgaggactgaaaaaaaaaaaaaaaaaaaaactcgagactagttctctctcc

SEQ ID NO: 30615 - DNA, 375 bp, Oryza sativa
  Clone ID: PAT_MRT4530_35001C.1
aaaaccgaacacatgggatcgcagttcgttgcatgctgtatttttttggaacccccacaacctatgtagccctaggaatagtccaattatatcaacatggttccctgggggatttaatccatggggaaccggccatgggggactacctttacagggcgggggatttgcctgggtggatccgctcaagaggaaggtgaggcacaaaccaggaatttattttagattttgccgggtgaaaaaaaacgtggggggaaactgcggacctttatttatatttagccggtctggccagccgacgcgctaacttaggcccccttttttccggcgaccagcattgggaacttgaacaggagcccctttttgaaaaagggcccc

SEQ ID NO: 30616 - DNA, 1910 bp, Oryza sativa
  Clone ID: PAT_MRT4530_35002C.1
atggctcgcaacaagctagtttataataggagtgatgagatcggtgttgtcctttttggaactaaagaaacaagcaacgaactcgccaaggagcttgggggctataagcatgtggtggttgctcgtgatattaaagttgttgatgaagaaacaacaaatgctctgcaaaaccttccaaggggaacttcccctggaaaacagcgtatgtgtctagtcactgatgcacaacatccattaagagatccaccccaagggacaaaaaaggatcaggtggacactattgcagaccagatgaaaagacacgaaatcaagatggactgcattattttcagagaatctggagttcgtcacaatgctgtaatggatgaaaacgaccaattattataccacttcagagagaggtcagtaacaaaggtagttcatgttgacagcccaacgtcactcttaggtgctctcaggactagaaatgtacttccagttactgtcttcaggggagacttggaagtgtgggtctataagaaaacatctgaggagaaattccccactttgaagaagtattctgataaggctcctgcaagtgataaatttgcatctcatgaagtcaaagtggattatgagtacaaaagtgttctagaaccagacacagtcgttccaccagatcaaagaattaaaggatatctttatggtccacaagttgttcctatatcatccgctgaatgggaagctgtcaagttcaaacctgagaaagttttaagaccagatgttagtaacggtgacacagtccaccttttttactttaacaggcactattttatgaaagatgtgttctcctttgttccggaaccaggaaacacaaaagcagttgctgccgtttctgccttagctagagcaatgagtgaaatgaacaaggttgcaattttacgatgcgtgtggaggcaaggtcaagggaatgttgctttgggtgtattgacaccaaacatatcatcagcaaaaaatgttctggattccttttacttcaatatacttccatttgctgaggacatcagagagtttcagtttcggtccttcagcagcctgccatcatcatctcagcctaccaaggaacagcaggaagctgcagataacctggtaaagatgttagatcttgcaccacctggaagggaagagatccttaagcctgatttcactccgaatcccatgttggagagattctacaggtaccttgatctcaagtcaaagcagccggatgcaaatgtcccacccctcgacaaatgtctaaagaagataactgaacctgatcctgatgtcattgattatcaagcaccgctaataaaaaaattaggcaatgtatttgagctgaaggagaaccccaagaaaaagaaagcacggacacaggacagattgacttatactggcgcagacgatcaggctaaattattagaagaaccttctgcagagaaggttggggtttcggaagctttatatcctccaaaaaagaaggctggggagattggcgatcataatcctgttcaagattttgaagccatgctgacacagagatctagctcaacgtgggttcagacggcaattgaagagatgcagaagtacataaccgctttaatacaggattcctgtgatcgggataatcaccaaaaggcactggagtgccttgttgctttacggaaggcctgcattattgaacaggaaccaaacgaatacaatggattcgtaacaaagctctgtcagaaatttaggccggctggtgataaaatttttttgcagcttctttcgtccaagaaagcttcgcttataagcaaagaagaagcacctgataggtaagtgacggaagagatggcgagaaacttctgtctgaaacccgagccgtcctctcagtagccgagactgcaggc

SEQ ID NO: 30617 - DNA, 437 bp, Oryza sativa
  Clone ID: PAT_MRT4530_35003C.1
cggacgcgtgggtctcaatcaagtatatctaataggcagaatgttggttcaaacaaagaagctgagtcattgtggatggcttgttgctgttggaccaatattttgaagaaactccatcctcagattacttggtagtctgattagtgttggttcccttgcaacaacacaaagggaatatgttgccttgcatgccttctgctgtcgcaatgttcagatgcaaaatgctattgtacagtcatgtcttgatcacttccccaagtatgaaaagcagccacctgttatgcctgattgtttcactccaaattttgctgatcatctgcatcgtactttcgatgggcctcagctatcaacaattcattggtctgcaatgcatttataaatgtgggaaaaacgtaaggtcccccgtcaaggaaaaacgcatacaatgtgggaaaaat

SEQ ID NO: 30618 - DNA, 460 bp, Oryza sativa
  unsure (1)..(460): unsure at all n locations
  Clone ID: PAT_MRT4530_35004C.1
gatcggccgaggtcnntggaacgcctnggggntaattgcactcgtgttagggtctggnntttcgnnctggnnccnnctnnngtcanctncccannnggctggctgctgcagnggnatctggntgctgttgtgccnntnncntanctgtcctgctgctcctcttnnngtnngccnncctnctgtgngtgntgncttcctgnncttggtngcgtccnggntnntgngnngntgctntgccnngntctggtccnnntantgtcntnctngtnacngttgncaagtgngnngcctgnccnnngnangttttnctctcngtagcntgcnannctntntgttcnnnnnaacccanatncanccggctngntgtagncnngtacnttncnttnccnncctcgnaactgtccgnnnnnnacctgctctcggctcgcagntgtgnatgttcccnncnttggnctgttgn

SEQ ID NO: 30619 - DNA, 218 bp, Oryza sativa
  Clone ID: PAT_MRT4530_35005C.1
ggttgggggaacaaattgcgaccggctaaccaatgacaaaaggctgtatatgtgctagaaccagtttacaaatcgaaggggggaacaacagccgatattggtaataggactaggaacaaggtttttctttccaggagcaaaaataaccccctactaagtactcaaaaaatggcaaggcggcttaaatgtattggtcggggtcgacggggacgggcctt

SEQ ID NO: 30620 - DNA, 343 bp, Oryza sativa
  unsure (1)..(343): unsure at all n locations
  Clone ID: PAT_MRT4530_35006C.1
gttngaagtattttattcctgagttcaatggttgtattcattacaaaaacggcactctgcaaaatcaatagcacctacaatatacgcagcatttatgtattctttacagtattaacactttctctaccgttagattcattaatcatctatatacttgtttcgccaaaaattttcaattctaataaaagtattataatcatctttacgtatttttttttttgattcttctcttatttctaatttttaatttcttttttcatatttttttttctttttttttttattttttatttttttcgttttattttttttattattttctatttttttttatttattattt

SEQ ID NO: 30621 - DNA, 441 bp, Oryza sativa
  Clone ID: PAT_MRT4530_35007C.1
aggcataaatttctcacccccaacctgtttaaataccaaagctacttttgtttgcgaataccactggaaatggggtaggaattttaattaccgcccaaaaaaaattttcaagtttaaaatcatgaacctttttcagggaggcatttacttttcgggaagctcctggaagggtcacaaaaataatccccccttgataaaaccaaccaaaaaattggattggggaccccccaatttaaccctctcggggaaaaacccgagccaaatagtagtattaataccccaccccggattttttttaaaaaactaagtttttcaattaaaaggggggttaaccttaaaccccccaaaaaaccccccccccccttacttgggctttcccttgacggggggctcctttcccttggcccctttttcggggggggggaccttgcccttgccctt

SEQ ID NO: 30622 - DNA, 650 bp, Oryza sativa
  Clone ID: PAT_MRT4530_35008C.1
ctttcggatcccccccaaatgtagctgtattttttcaagctacctggaaggagagggcgagatgttggactaagctttttctaccttgtagctggatattattcatttgttagctcaatggctctggctccttatagggcgctctatgcattggcaatcatcggtttcatctgctttgcttccagaattattgaaacaagaagttcggtaaaaggtgatgttatttctagaaaacatcggaagcattcatagggactaacaaatgagaagtgtattttagatatgaagttggatacattagtttataatagcagatcgtgttttggggtttatggttggaaactgcaaagcattgctcttgacactaaggccagttttgcgagggaaatgagggtatatttttcttttcactgttgtgaaggagatttgatgagtcactcagatgatctggatatgttgtatcataggtggggttgatttgggggaattttaagcccattgttatgaaaagacggaaccagtaactgtacattgttgaatgccgacatgatatagtggttttttcatgaatgacaatgggttccttacttccttagggggggaaaagtgtgaaatatatatggcattttcacgtgctacatttagttgtc

SEQ ID NO: 30623 - DNA, 452 bp, Oryza sativa
  Clone ID: PAT_MRT4530_35009C.1
agccaatcacacggtcacaccgtccccaacacagcctcgtcctggaattttttttcgagtaaagtccatcaccggtctctaaacttgtaccgttgtgtcatttcggtccctaaactcgcaaatcgaccgttcaggtcctcaaacttgttcgactgtgtcatcccgatccctaaactttcatatcactcatttaggtcctccaacttgttcagttgtgttaccccggtatctaaacttggatttgaatatcatctgggtcaaataggacgagaccagggtgacacaactggacaagttggaggacttaaacgagtgatttgcaagtttaagaaccgggatgatacagtcgaacaagtttggggacctggtttctaaaagaacggaaatggaaaaatgcggcatctctggtcggccaagtatcctctgccataaagatattgcttaatagtcag

SEQ ID NO: 30624 - DNA, 306 bp, Oryza sativa
  Clone ID: PAT_MRT4530_3500C.1
atgaagccgccgccgctgcatcggccctcggacctcctctccgtcacgctcctccttcgccagccgccggctgcgccggcatcgccacctcaccccgacaacgaccgcagcgctcctccccacgcgacggcagccatcggcggtgccgcccgttccattggccctcctctccgcgtctctccttccctgtcagccgccgaccacgccagccctcctccacgccgcgtcgaagacgctgccgccatccacgcccagaggaaaaaggaaagaggaagagagagaaagggggaaaaagagaaaaggtga

SEQ ID NO: 30625 - DNA, 3437 bp, Oryza sativa
  Clone ID: PAT_MRT4530_35010C.1
aaaggatgatatcatctctttttttttttttggttgggcagagccaatacatgttagtagatatatttggtaggggcaccagtgacaggagaatccaaaaacccattgcagcaattatggaagctctcagcacatcagcccaacaaggcctcacaactttgatcaaccggcgaatatacaagatgggaactaattcacactgcaacaggaaacctggtataaatctcttatcttacatacagacgtacccaagccagtcgcactactaataattaattagcctagagttatgatgttacgagccaatatatttggtgtcaaaatcctcaagatcatggccttgagactttttcagttttgccactagaacccacatgtttgcaagttcactttccaagaaggcttccttttgcttcgactcctcaattctcctttggagttctgcttccttttgttccttctccataagcacagcttctaatgccttttctctctcgtagcctgcgttgttgtctcttcttggagctggctcatgtcgtctactgatgctatccctccgagtacctctcagtccactgttggctctacgcggggttggacttctcaccgatgccaactcagaagcaagcttctcgttttggttcatgagcttggtgacttcttccgacaacgctttcaattcaactcccgcagccgaagccaagcctttcgcgtacgtgctttcctctagtagcttctggttgcgagtctctagttgagcttttacttcaatcagctcacacaccttctgcttcagctcatcaatctcaactgactgtggttcttttggcgacgtttcaccagggacctctctaggaactgatagttcttgatcagcatgattatcagtttcatggttaattcctgcattcttctgcatcataatgctatttgacagtgaatccttagcttgaagagtttggtaaagttgctctttcaggtgagcaacctcctcttgtaattccatgcattcagttgtcttttcattaagttggtcttgtattactctgttatctgctgccttcacctcgagatcaaaggatttctcgttgagttgctcaagcagttcagcataagacggagtaagttctaacttgtcagccatcccttgattatttgagatggaatgaggtatctgcctttctaaagacgctatctgatgcttctttcccttaatttcatcattaaccttcttcatttccatctgaatcttctcattatttgggctccttccagcttcctcggtaaggcgctttaggacacttgtatgaagtgcaacctcccctgacaaaatcttcaattgctctctcagtaagtcaacgtgatctattgtttttctgctggccagaggtgtttcttctccatgaaggctgtcagtagcgaactccccatggccaatgctaaagagatcaaccgatgcactctcaccaaccaaagaatttgatattcttggttcggaaggaaaattaacactctccccaataggtgttgaaggagcagttgatttagtcaaactggacttgtcaccttctgaacttgtcagaatagaagctccaccttcacgtttccgaagtttaaaccaattaagaattcctttccgattctttttctcctccttcgaatcttcaagtgtcatgccaagtccttcaacaggagaaagtaattcattgctttcattatccaacacgatatcacgtcttttgtaaggtaggtacgcaagctcctcttccccaaaagaatgtcttcttcttggtccaggatgtggagaaaatctagaagtttgtgtcgccttagtggagaccaagataagctttgtgagacgctgtatccttgcaagcaaagcagctttagcttcctcctcttgttcgagcctagactgcagcttgacgttaccatcttctagcttttgtttccaaaggatgatattatcttctccggcatccttcactggagtgccagtaataatacccattttcagctgttctagttcttcctttaatctgcgaatctcattctggtatttctttattaaagatttttcatctataattttgttttgtgatgcttggacctcaatgcgttttgcacggtgggcaaatttcagtgtattatgagtctcttctgagttgctcgatgctggagtcactgtacagatcagtgaaacacgtccttgaccactcaaggatgactgaagtagacgtgttagttttgaatcacgaaatggaatatgtgtagcttttccgtcagtaagtttcgatatcacagttccaagtgttagcaagcttttattgatataagatccttctttccggcgtactccagtagtttctgcccttgagctctcggaacctgccagatcgatgaggttcagtgtgaaaattgtatgacttctgctactaagtagattgaagttagtggatccaacatgtctatgctcttctccagcagcaatgagggatagggcatgtgcaggagataatactacttcttctttgataccctcaacaaatgttccctgaggatcctctctaattcgtaagttctgtccagctggattgagcagatcattgacaacctcattgtaaatttccaagtatgatacacggagaagaaactcgcgatttggtgtctcttgtataatgctaaatgcgtctttgacagccaaaggtatgatccctggggatctttgatctccatgcattgtgtgggtcttcccgctgcttgtaacaccatatgcaaatattgtaccatttactccctccatggcaccgctgacaacatgttgagcagcaacatcatataccatgttaacacttgtttttacaaatagcctgtatggagccacagaatacaaatcagcgtacagattatgtgttagtacaggaacagcaggtctgcaaacataatttactcccaagtgtcccagtacaccagttggcaaaactacgtaagcataagcaacgctgggattctgctcgctcctcacgaccgtgtcgccgtccgcataccatgccacctcctccccttgccgaatctcgcgggggctcagcggccggaaacggacggtgacggtgacattctccttgggcgccgggtcctcgtcaagcccggcgaacagcggcgacgcgggcccgtcgagcgagagctccggcgtgagccgcgacgaggacgtggtggtggtcgtcgtcgacgtcggcgaccccgactgcggtatcggcagttgctgctgctgctgctgctgcggctgcggcgaactcctcaccaccgccaccgccgccgccgccgaagacgccctccgctgccgcgaagccggccgcgtcgccattgcctccacagcccgagatctagcagcacgcggcggcaccaccaccaccacccgcaattggatccaatccaag

SEQ ID NO: 30626 - DNA, 333 bp, Oryza sativa
  Clone ID: PAT_MRT4530_35011C.1
atggcggctccccgagctccacccttgacggcggtcgccccctcgctccatcccctctccactgcgccatctcctcctccaacctcccacgtagggctcgtcgtgaaaccagccctcaatactgctataggacctaatttaacccggttttgtaagttaggggttaagatttccaactcaacaaaaagtgagggatataaatggacttattccttaatgggcctcacatacaaaaacaaagggtttgttcagttcattgcaaaaaagaccttaccatttgttgaaaaggcaaaatttggtgatgctaaaattttagcaaagatcaagctgtga

SEQ ID NO: 30627 - DNA, 2089 bp, Oryza sativa
  Clone ID: PAT_MRT4530_35012C.1
tttttttttttttttttttaaataatcagcgataataattcagtaaagtagccgaaaagaacaatataagatcttcaaatgcaaaattcgtagaggttagtaagtactagtaatacgtatgatttatgttgttatatacacatacgcgtcgaagcataaacagagtaatcgccctctagctacttgttcgcccactaaagcctactcgcgccgccatggatggagagatcgatcgaggcctcgaggggcgccttagatgccgccgcggaagaatggcgcgccgaggaagtcgctggagtaggtgccgccgccgttggggaagagcgtgaggaggcagacgacggcgagcacgagcccccacgcgtagcgctcgctccccagcggcgtgatctcgtcctgcgccgggatctcctcgccgccgcggacgaacgtcgcgaacagcccccacgccaggcacagcacgctcccgccgatgatggcgcccgcgccgagcgccaccgacgtcgcgaacgacagcaccgccgccgcgccgcgcccgaacagcgcctgcgcgatccgcccgccctccagcctcccgcacggcagcaggttcagcgacgtcaccacgatcccgagcagccccgcgaacgccagcgggtccaccggcacgccgacgccctccaccgcgttcggcagcacgttcccgagctcgtcggcgtacggcccgatcaccgcctgcacgaacgacagcagcgggttgttgtagaagaactccggccggacgaacagcgcgttcttgccgccgttcaggctgccgtcggagacgaacgcggagacggcgagcgccaccgaggtgaggtacgcgctcgccgcgcgcgccaccgggatgtcgaacagggccttcttgttcggcagcagcgactcgtagttgttcatcacgccgaggcaccccgtccagttggacggcaccaggaaagacgggctcagcttcacgccgtacctcgccgccgtcagcctcgtcgcgatctcggatacgccgaggatggagaggaagccggcgaagagagggagcacgtcggagacgtagtcgtcgaacgtcgcgccgggcttgaggaagaagccgctcatgatggcgatcgtcccgaacgtcgtgacggccagcgccacggcgctcaggtatccccacggcgtgctcagcttggtgatctccagctgcaggtcgatctctgccttcggctggaccatgcagacctgttttgtgatgtcgtcgttcttctcctccatgaaccagagggtgacgtctgtgccggccgcctcggcgatcttcttctccagcttcggcctcacctcctccacgggcttcctcaggttgccgatgaagatgccgccgtcgccgaacctccggacgtccacggcgaagaacgtgtcgtagccgaagcagctcttgagcttgttgaggtcaagcgccttgaaggtgttctcggcgagctcgagcctctccttctcgcgggcgagctggcccctagcgaggccgcggaggaggccggcgagcgggttggcgtcgggctcgcggtcgagctcgcggagcttccggtcggcgcgcttcttctccagcttgatggcggcctcgatggacgggttccccatgaacctcttgaactcctcgtccgacctccagtccacctcctgctgctcctcctcctccaactcctccttgctcttcttcacgccgccgccgtcggcgtctgcgacaccgttctctccttccacggcgtggtgcgacgccgtggcggcgtcgtcctgtccgccgccggcgtggtgcgactccgccgccggcgccgccttctcctcctgctgctgttgcaaggagcacctgacgaggaggcggctactgcttcgcctgagaggcctaggcttgcagtactggttcttggagaaaagactgaagcttcttcttgagcttgtactagttgcagtgttactgctgctgctactgctgaacaagagagaggtgacgagggaggacgacgccattggcgacgatcgagctagctagcttggtgtgtgtatgcttgcaagtgattgttctatgcagcccggggatccacta

SEQ ID NO: 30628 - DNA, 220 bp, Oryza sativa
  Clone ID: PAT_MRT4530_35013C.1
ggcgcaagaattaaaagttgtcaacacagaagaagcacaccagtccaataaacgcgcatgaggtggtggatgcatgaactgctgatggcaaatgtagccttagccgcacattcggactctgccaaggaaatcctacatatatagctcggcacaggccgagtaatggcaactagagttttgtccgtatgagtcgggggctttatcgaagacagaatcttgc

SEQ ID NO: 30629 - DNA, 270 bp, Oryza sativa
  Clone ID: PAT_MRT4530_35014C.1
atgcggtggtgcaccgtgaggctaagcaccgtggacccgcacgagaaccacgtcaccttcacatggccgctcgatcgttattgctcggagaaaaccctcgagaggaaggtgacactgaaattcacggccaagaaactcaactgtttccaggaccagctcaccaagttccaggcggagaatgccatggctcccgggaagatgcacgtctatgacgaagcacagttcttccagaaccatgtggatatgagcgacaagctctcctactcctga

SEQ ID NO: 30630 - DNA, 213 bp, Oryza sativa
  Clone ID: PAT_MRT4530_35015C.1
atggaggccaagttcacgggtactgcaaggttgcacatcacaaaacagaaaagggaggacaaccaaaggaagaagaaccagtccaaatggaatatttggttaatacattcggtccaaagtgaaaagaaacgctcatgcctggtccaagccacaacattggttcctactaacatgatatctgccggaggtgcagaaaagatcccctacgagtaa

SEQ ID NO: 30631 - DNA, 541 bp, Oryza sativa
  Clone ID: PAT_MRT4530_35016C.1
gccaagctgcctttaatacgactgcaacttataggggaataagcctgggtgacagcctcaaggtaccaggtccacaggaatttgccacagggtcagacaccaacagcagtgcacagggacactgtctgaggtcgaaaaggccaacgttcgcaccagcaatagtaggtgatgctgatgtgtgatggtgaatggtggtggtgtgtctgaaaaaagtgcctgaagatgatgcattgtggggtgactaggggtaccaagtgaaccatgcggtggcgaaagctgcaactgtcgcactgcaactgcacaccaaggatggtttttgtacgtctgttgcaaaccactggtgatgggtgtataatgagaagttgaatgacctcgatatgaccctgtgctggatgccacggtggatgtaccggtaattgttttaagttcggaatccgggtgaggttatagcattttcggcctggcagcactgttatagaaatggatgtttctcttaggtgtagaagacaacaaaacaccaggggtaagaaaaaaaaaaaaa

SEQ ID NO: 30632 - DNA, 510 bp, Oryza sativa
  Clone ID: PAT_MRT4530_35017C.1
acccggtgatcgattagcatcgtgcctatccaccaagtcgcagcttccggataattttgcacggcaatgatcgtaccgatgagtcctttctggggatggtggagcccaaaaacgtggagatcctcaggagttttacctgctggaacatcaacaaattcggcttcagcagcggtggatgcaggcggttgccctgtggttaagttgaaaaaatcggtgcagcgttcaaacaaggcttgcaggcaattactgtcctgctttgtcagttgaacaacagtgtaatcaagatgttgccaagggaatggcgcaaagttagaggtcaataggtgcatgacagggacgggtagataaacatcctcaatcgcagcgataaaccatcgaaacacgcaaatcagtccgcagccccagccgttgctcggctttttctagctccccatgctgcggtgacaactgggctgagtccacaatgcgaaagccgcaacgctgatagaaaggcgcgttccagggcacttc

SEQ ID NO: 30633 - DNA, 306 bp, Oryza sativa
  Clone ID: PAT_MRT4530_35018C.1
gtggggccacaaatgctcactatgcaggacattaacaattgttcagcccatagcgcagcaactgacaactgccaccagtttggtgatgctgctactttggatgcggaatgctgggctccaagctcaagctctgttgggcttttaacgtcccattctagatatgggtatgctaccctgaggtactatgggtgccaccccaagtaccaggacccccctggccggtgtcttgtaatgagttttacacagtatagtggttcggaagttaaaaataagctcagatatccccaaaaaaaaaaaaaaaaaaaa

SEQ ID NO: 30634 - DNA, 682 bp, Oryza sativa
  unsure (1)..(682): unsure at all n locations
  Clone ID: PAT_MRT4530_35019C.1
ctgcaggagggaactccttcagttcttggcttcagatcagaagattaattcactggagaatgccccaagtcccatctctgtcctcgacacgtcatattaccatacaagactgtcatattcattcaaaggtgagaagttgatacagtattttttctgcattaagataaccaactgcaagaacagcaacatgatggattctactgtttgctctcattcaatccagaagcccatagtgtcattcaaaggacaagcatagttagctgtaagcgtgccaatgacgctagtgacagataatctgcaataaaagctacaaccaggtagcttgtggtcctgatatggggaggaaccacagcagatggactgttgcagagttgcagctagatgaccagaacattgttaggttatagcaaggcccacatgttgcacttgcttatgcaggacagcaggagcatgatgtgtgtcttctggtgtatatgcattgctagtatagacgtgcccaccaatgtccccctctacaaatacacctagcatgagtatgattcagttgatccgtagacagatagtgatatcagatctcctgtccagtacatgtttttctgcagttgttaggtctgataatgataccgtatttctgtctggcatattactattttctgcagttgtattgacattggttttgnta

SEQ ID NO: 30635 - DNA, 5011 bp, Oryza sativa
  Clone ID: PAT_MRT4530_3501C.1
tgggattaaatacgactgccacgtggctctaaaggcctcgaacaatgggaagctagtgaggatcatagctctgaaggatgagatagcacgcttgaagaaggagaatgctcagttgaagggtctcccagcgccaggaggagtccggatccgcaccacgccccgcaagacggcgactgcacccgtgcgcattcagcttgcgcccaggaacccacctccgcccgcaattctcgcagctccagctccaaccccagctccagttccagtgccagctcccgcgtccgctctctccttcgctccagcgtcagctgccaggggtccagccagtggcaacggaggttggttgtctgctactcccagtggcagccgcgaccacagcagcagcagttccagtggctcagagccgggcagcagggagacgtatctgccagactccaggagccgctaagagggatctggtctcttcctcaagatggtctacaccaggaatggtaaccgtgcaataggcgagggcagcaacggcgaagaacgcactaacggtgtgcatcccaaccgtgattccggcaatggtccgccaccactccccgagaatccgacccttgcccaagtaatggctcatcagacgcagatgatgacagctatgatgcagcagatgcagcagcagcaccagcagatgtaccagaggatgcagcagcaagccgagtagcagtagtttggtccccctccccctcagtccaaactgccggagtttctacgcgttagaccacccaccttctccagcaccaccaaccctatggaggtaaatgactggctccatgccatagagaagaagctcaatctcctgcagtgcaatgatctggagaaggtcgccttcgccacacaccagctccaaggtcccgcgtcagcttggtgggacaatcatatggctacccgcccaccaggcacggaagtcacttgggcggagttctgccgcagcttcaggaaggcgcaagtgccagatggggtcgtggcacaaaagaagagggaattccgggcactccaccagggcaacaggacagtgacggagtatctccatgagttcaatcgcctcgcgcgatatgcaccggaggatgtccgtactgacgccgagaagcaggagaaattcctagcaggtctggatgatgagctaaccaaccagttgatatctggagattacgccgactttgagaggttggttgacaaggcaatccgtcagaggatcagcgcaactaaatggaaaggaagaggaaggcagcgcagttccggtccaaccaagggagccaccagcgaccgcgcttcactcccggacagcaaggtggacctaccaccctaatcgtccgccagcaccgccctttcagtgccagcaacttccatcagggcgccagtggcagccagaaccaccatggcggtcagcccaaccgcagtgcagctccactcccaccaatggctccagcacagtcagctccgtccgcgcaagccaagaaggagactgggacaaagccagggtcttgcttcaactgtggcgagcttggccacttcgctgacaaatgcccaaagcctaggcgtgtcgggccaaggtttgtccaggcccgtgtcaaccacgcgtccgcagaggaggcgcaagcagcaccagaggtcgtactgggtacattccctgtcaactcagttcctgctacagtactttttgattctggtgcaacgcattctttcatttcaaagaaatttgtggggatgtatgggttaagaaaaaaagagcttagtacaccaatgaaggttcataccccaggaaatagttcaacctcggtcagttatagcccttcagtgctaatagaaattcaaagatcaccatttctagccaacctcatccttctcgaatccaaggatctagacgtcattcttgggatggattggctgaccaagtttaagggcgtcattgattgtgcgaatcacacagtcaccttgaccaatgagaagggagaaaccgtggtgtacaagtcaccagtctcaccgaagcaaggaatctccttaaatcagattaaggtggaaaaccctgtgaccaccggggagaagagttcgcggaaattggacgatatccccatagtctgcgagtacccagaagtgttccccaaagacctcactaccatgccacccaagagagaaattgaattccggattgatttggcaccaggaactgcccctatttacaagagaccgtacagaatgacggccaacgagctagcagaggtcaagaagcaagttgatgagtagctgcagaaagggtacattcgaccaagtacttcaccttggggtgctccggtcatttttgtggagaagaaggacaagacgaagagaatgtgtgtcgactatcgcgtactcaatgaggtcacaatcaagaacaaatatcctttaccgcggattgatgatttgtttgatcagctgaaaggagctaaagtgttttctaagatagacctgcgatcaggctaccactagttgagaattcgggaagaggatattccaaagacagccttcaccactcggtatgggttgtatgagtgcacggttatgtctttcggacttaccaacacacccgcattcttcatgaatctgatgaacaaagtgttcatggaatttctggacaagtttgttgtggtcttcatcgacgacatacttatctattcaaagtccgaagaagaacatgagcaacatctccgtctggtactcgagaagttgaaggagcacaggttatacgccaagttcagcaagtgtgacttctggttgtcggaagttaaatttctgggtcacgttattacagctcagggcgtggcagttgatccatcgaacgtggagtcagttaccaaatggaccccaccgaagaccgtgtcgcagattcagagttttcttggacttgcgggttattaccgccgattcatcgaaaacttctcaaggatcgcccgacccatgacttagttgcttaagaaagatgagagtttaaatggacagctgagtgcgacaagagttttgaggagctcaaaaagaaattagtatccgcaccagttttgattctgcccgaccagatgaaagacttccaagtctgttgcgacgcatcccgccacgggcttggatgtgttctaatgcaagagggcagagtggtcgcgtatgccttgcggcagttgcatccacacgaagggaattatccaactcatgacctggaattggcagcagtggttcatgctttaaagatctggagacactatctgattggcaaccactgcgaagtatatacggaccataagagtctgaaatacatcttcacccaaccggacctaaatctctgacaacgaagatggttggaactaatcaaagactatgacatgagcattcactaccacccgggtaaagccaatgtggtggcagatgcgctaagcaggaaaagctactgcaatgccctatgcatcgagggcatgtgcgaagaattgcagcaggagcttgaacatctcaatgtgggagtcgttgaacacggattcgtagccgctctagaagcacggcctacgctcgtcgatcaagttagagcagtgaatgatcttgaaatagcagagctgaaaaagaacatgagagtcggaaaggctcgggatttccttgaagatgaacacggcacaatctggttggcagaaagattgtgtgtacctgacgacaaagaactgaaggatctgatactcaccgaggctcatcagactcactactccattcatccaggcagcatcaaaatgtatcaagacctcaaagaaaagttttggtgggtcagcatgagaagggaaatagctgaattcatcgcactctgcgacgtttgccagtgagtgaaggcagagcaccaaagaccagcaggtttactccaacctcttcaaatcccggaatggaaatgggaggagattggaatggactttataacaggactgccccggacatcatcgggccacgattcaatctgggtagtcgtggatcgactcactaaggttgctcacttcataccagtacataccacgtatacgggcaaaaggttggcagagctctacctctcgagaatcatgtgtctacatggagtacccaaaaagatagtatctgatcgagggagccaattcacttcaaagttctagcagaaattgcaagaggaattgggaacccggttgaatttcagcacagcctaccatccgcagaccgatggtcagaccgagcgagtcaatcaaatattggaggacatgttaagggcctgcgcacttgattttggtggagcttgggacaaaagcttgccgtatgcggagttctcttacaacaacagttaccaggctagtcttcaaatggcaccgttcgaagcattatacggccggaagtgtcgcacccctctcttctgggatcagacaggcgagtgtttggaacagaggtgctaagggaagcagaagagaaagtcagaaccatcagggaaaggttgagaattgcccaatctcgacagaagaactacgcggacaaccgccgaagggagctcacttttgaaacaggggattacgtgtatcttcgtgttactccgctccggggagtgcaccgttttcaaaccaaaggcaagttggcaccacgtttcgtgggaccatacaaaatcttggaacgaaggggagaagttgcttatcagctagagcttccttccaacatgatcggcatccatgacgtgttccatgtatcccaattaaagaagtgcttgagggtacccgaggaacaagccaattcggagcacattgatattcaagaagatctgacgtatgtggagaggccacttcgaattcttaagaccagtgaaagaagaaccagaaacaaggtcactaggttctgcagggttcagtggagtcaccattcagaggaggaagcaacctgggaaagggaagatgagttgaaggccgcccatccgcacctcttcgccagctcctccgaatctcggggtcgagattccgtt

SEQ ID NO: 30636 - DNA, 138 bp, Oryza sativa
  Clone ID: PAT_MRT4530_35020C.1
ctacttggaaaggtcgctgagccgtcgatcggcgccacgcagatcgatgtgaagctgcgacgggagcagataaaaggagagttagtaggccatacgaatttgtggctcgcggattggtgggtctacatcagacagatt

SEQ ID NO: 30637 - DNA, 432 bp, Oryza sativa
  Clone ID: PAT_MRT4530_35021C.1
agggcgacgagatcggtgacgctcgagctcgagctctccggcgcggatccggcatcatgctcgctggatctggcgagctcaagcgccaaaaaggtccacaaatccggcgtcatgctcaccggatctagtcgagccgtagccgtcggcggtgtcttcgcggaggtggcgtcgatatgttcggagccactaccgtcggcacggattgagctggcttccactgccaagctcctctcctccctccctagcggtgcgggccacgacgaggcatgggccaactgtggcggcgatgaccaccagctcggcaactcgtcggcccctctgccaccctgcgagaccactccaaacctccagcgtagcatccgaacctatgaacttgagaccactggtctgaggcaccgcgttgtacataacctcaaagaaacagcaagctag

SEQ ID NO: 30638 - DNA, 652 bp, Oryza sativa
  Clone ID: PAT_MRT4530_35022C.1
acgtttcgttcacgatcgttcacgttcgcgttctcgttaaggtcacgtttcattcacctacgttcgttcgttcacttcacgttcacgttcgttgacgttcgttcacgctcgttcgttcacgttcgttcgttctttcacattcaattctcgttcacgttcgttcgctcgttcatgttctcgttcatgttcgttcgctcgttctcgttcacgttcgttcgctcgttcacgttctcgttcgttcgctcgttcacgttcgttcacgttcacgttcacgttaattcgttcgatcacgtggcggcagcggagcggcggtggggcggcgcggcggtggcatggcggcggcgtgcggcgcgcggcacgcggcccggcggcggcgttgtgcggtggcggtgtggcggcgcggcggtgccgtgccacggcggcgtcgtggcgtcccggcgtgtcgtgccgccgcagcgtcctggcgtggcgtcgtgtcgtgacgacgtcggcgtcggcgtcggcaacgaggcggccggcggcaaccgagagggagagagagatcgagatcggagagagagagctgagagggaggcggcggcgtggctctcaccccagagatgcggcggcggcgccggaggcggaggcggcgacgacgacgagcgcgagacga

SEQ ID NO: 30639 - DNA, 1232 bp, Oryza sativa
  Clone ID: PAT_MRT4530_35023C.1
gagggcaatggcatggatgattcatctgcacacccgtgcggtacatgcgagacgtgcaaaactatttgcaccaatggttttaaaacaacaacaataataaatacaggtacagatggaacttgaaacaaaatgatagcttacaattacatgcagtggatgctatgtttagctaatctggacgtcgccacaaatgctgtgccgtatgcagtatatcaagatgattaatcaacggattatttgctgatcgatatgcttaatccttcgccaatttggtctttcttagggcccatttcccaccgcaagagaagggtggcaaccagagattacaatgctcttgagcgattggggaagcttgggcagtgtcatcatgttgggacactcctggacgatcaattccctgagtgttttcaggcggcacaatttgacaggcaaatagttccagctgcagtctgtaactgacagtgtatgcaggcaggtgaagaattcaccaattgtcaaccagcttgggtatatcacaccaccgtaatccctgatgcaaagtactgtaatccccgacggtggacggagcccctcaagaacctcctcctgaagttctgctttcttcgagcagcgttcgtcagtgccaccccaccgtagcgtcagctcagtgagatataccttgtcagatagcctggctcgaacagcttcctccttgctctgaacattctcgatgcagtcgatgaacagcttgccacgaaggttgttcaggtgctccagctgctgtatctcgtatcctttctccttcctcacgtagaagtgatacagagctcggagagatgtcagcttcccaacatcaggaatgttcaggccataccatgtcagcatgtacctcaggttgatcaggttggcgatcttcagctgggatggacaatgcaagcgagtgttaggattgacagagagctcctgaagatggtaaagcttggaaaattcagccggcagaatcaggctgtggggaggaggtgacatgatgccaagataacgaagatgtttcagtccaccgatgcatggtggcaccctgctcaaatgtctcaaatccaagtgcaccaccctcaactttgttagcttcttcagcacacgctcaaaatcatcttggttcattccctctactgaatagcacatgataagagttctcaagtttttaagctccaaaatcttctctgggaacaatatttcactgtgactcgatgcaaaga

SEQ ID NO: 30640 - DNA, 1275 bp, Oryza sativa
  Clone ID: PAT_MRT4530_35024C.1
atggagatagaaacaacaacaattagctctggtggtgaacacgaccaggtgagtgcaggggaagaggcaaggagggcaagaccggggcgcagtggggagtacggaggaagctggtgcagcgtgggagagagggagctggaaaagaaggaagaaaggggggcagtacaagggggacttgggaggaggaagaagggggaatattttgagtatatgatcaatttcgccgtccaatccagatgtgcgccaaccaattcgctatgctgctatgctatagcaatctccttacttcaggattatcatgttgaggagctggcttcactcatcaaggacaacctctacagcaagcacctcgtcctctctactgaggaaaccctcgtcgggatcctacagaaccagtaccacaactctgacgatgacgaggatgaggacgatatagtggcagcataccgcgggacaaataggaatatcctagagctccaacctgccagctcctatcaacgtcttcttttgcatcgccttgccgacatctacgggtttgttcatgaatctgttggtgaaggtgaagatcgacacttagttctccagcgctgccctgaaactgccatcccacctgtcctcgtaagcgacgtattatgggagtatgacaacaaagatacatcgacatctgttgtagtgaagaggaaagatacagatcttgaagaagcctggaaggaagatgcccaagaaaatatttctgctgaaatctcgcatttgaaaaatgatgcagatttgaaggctttgcaaaagtcagttgcacccccagcaccgtcactcaaggagagggaagctgcttatcgagctgctcgcgagcgtatcttctcagcgcatgatgccaagggaaatgggacagcagtggcaaaacctaggcatgttcctgctgttgctcaacggatgatcgcgcatgcacttggcaaaaaagttgagagcccgacagagacagcagccgtgaagaatggcaaaggaaaggagccagcggaaagtagtaggaacaagttaaacccacgcacagcaggtggcaaggaagatagcaggtatgttgagaatggcagaatgaggttgcacaccgggaatccatgtaagcagagctggcgtacaagtaacagtagagctgctagtagtgttagtcctgatgaactgaagagggagcaggttggagcggcaaagaggatgtttgtgcatgccctgcggctgcctggtgttgaaggaagtgatggtccggtgcggaaaggcaagtaa

SEQ ID NO: 30641 - DNA, 191 bp, Oryza sativa
  Clone ID: PAT_MRT4530_35025C.1
aagcttacgcaacaacagccgcaacgaatgatgtacggacagtatctttaccctgcgcaacaacccgcgtattatatcgccaatccgtacatgatgcaacaacagccacaacaaccgcctaatatcaacctcctcgtaaataatgtagtcatttatataaacggaatttggcctacaaaaaaaaaaagctt

SEQ ID NO: 30642 - DNA, 153 bp, Oryza sativa
  Clone ID: PAT_MRT4530_35026C.1
gctgcagcagcggccaaggcggcggcgtgggcttgccggtgtgggggctcctgcctgctggtcgtgcgtggcagcgtgggcgtcagggcgtggccgcgtggggtagccaggtgccgggtcaagcgttggccggtggcgcggctcgatctgtga

SEQ ID NO: 30643 - DNA, 222 bp, Oryza sativa
  Clone ID: PAT_MRT4530_35027C.1
atggacatcgagggattcaaggacggatttgacattctccgaatccggagaagtattggcaaggaattcaaggacgggattgaattccgtggtgggctcgtgcgggcgcggcagatcctgtgggagcgcgacggcgggtgcagcgacggcaacggcgaatccggcggtatggagggcgacgacggctgccttggcaaggtcgggggatggcgatgccaatga

SEQ ID NO: 30644 - DNA, 203 bp, Oryza sativa
  Clone ID: PAT_MRT4530_35028C.1
aacattacaaatttattattatttgattatgttaatatacaactgtgactttacatacaagccaaagctattaatttttttttattccaacacaccaacaagaatactccttataacactccagattatcggagagcacacgaagggagagagagcttggcacacgaagccgtcattgaccacgatgacatgaccgatcaccc

SEQ ID NO: 30645 - DNA, 270 bp, Oryza sativa
  Clone ID: PAT_MRT4530_35029C.1
atggggcgactgctgttttataggcgcggggtggggcatcgaggagaaggaactgacattggggcggtcaaggggagcgagctggcggtcgtgctcggagctagcggccaaacagcagtggaggtgcggtggctgagtggtgggctcgtgcgggcgcggcagatcctgtgggagcgcgacggcgggtgcagcgacggcaacggcgaatccggcggtatggagggcgacgacggctgccttggcaaggtcgggggatggcgatgccaatga

SEQ ID NO: 30646 - DNA, 3330 bp, Oryza sativa
  Clone ID: PAT_MRT4530_3502C.1
atggaggcgaatgactggctccatgccatagagaagaagctgaatctcctgcagtgcaatgatcaggagaaggttgcttttgccacacaccagcttcaaggtcctgcgtcagcttggtgggacaatcacatggccacccgcccaccagacgatgtccgcaccgacgccgagaagcaggaaaagttcatggcaggtctggatgacgagctgaccaaccaattgatatcaggggactacgctgactttgagaggctggttgacaaggcaatccgtcaggaggatcaacgcaacaagatggacaggaagaggaaggccgctcagttcagggcacatcagggaagtcaccagaggccgcgcttcactcccggacagcagggtggacctaccaccatgatcgtccgccagtaccgcccgttcaaccctagcaacttccaccagggcgccagtggcagtcaggaccaacacggaggtcagctcaaccgcggtgcagctccacgcccaccagtggcaccggcacagtcaggcccgtccgcgcaagccaagaaggagactggaacaaaaccagggtcctgcttcaactgtggcgagcttggccacctcgctgacaaatgcccgaagcctaggcgtgccgggccaaggtttgtccaggctcgtgtcaaccacgcatctgcggaggaggcacaagcagcaccagaggtcgtactgggtacgtttcctgttaactcaatccctgcaacagtactttttgattctggtgcaacgcattcgttcatttcaaagaagtttgtcgggatgcatgggttagtaagagaggaacttagcacaccaatgcgggttcataccccagggaatagttccacttcggttcaattcagcccctctataacaatagaaattcaaagatcaccatttctagccaacctcattcttctcgaatccaaagatctagatgtcattcttgggatggattggctgaccaagttcaagggagtcattaattgtgcgaatcgcacagtcaccttgaccaacgagaagggagaaacagtagtgtacaaatcaccagactcaccaaagcaaggggtccctttgaatcagattgaggtggaaatcccagtggtcaccgaggagaagaattcgaggaaattggaagagattcccatagtctgcgagtacccagaagtgtttcccgaagacctcactaccatgccacccaagagagagattgaattccggattgatttggcaccgggaactgctccaatttacaagagaccgtacataatggcggccaacgaactagcagaggtcaagaagcaggttgatgagcagctacagaaagggtacattcgaccaagtacttcaccttggggtgcttcggtcatttttgtggagaaaaaggataagacgaagaggatgtgcgttgattatcgcgcactcaacgaggtcacaatcaagaataaatatcctttaccgcggatcgatgatttgtttgatcaactgaaaggagctaaagtgttttctaagatagacctgcgatcaggctaccaccagttgagaattcgggaagaggatattccaaagacggccttcaccactcggtacgagctgtatgagtgcacggttatgtccttcggacttaccaacgcacccgcattcttcatgaatctgatgaacaaagtgttcatggaatttctggacaagtttgttgtcgttttcatcgacgacatacttatctattcaaagtctgaagaagaacacgagcagcatctccgtctggtactcgagaagttgaaggagcaccagctatacgccaagttcagcaagtgtgacttctggttgacagaagtcaaatttctgggccatgtcattacagctcagggttattaccgccgattcatcgaaaacttctccaggatcgcccgacccatgactcagttgcttaagaaagatgagaagtttaaatggacagctgagtgcgacaagagttttgaggagctcaaaaagaaattagtatctgcagcagttttgattctgcccgaccagatgaaagacttccaagtctattgcgatgcatcccgccacggacttggatgtgtcctaatgcaagagggcagagtggttgcgtatgcctcgtggctgttgcgtccacacgaagggaattatccaactcatgacctggaattggcagcagtggttcatgctttgaagatctggaggcactatctgattggcaaccgctgcgaagtatatacggaccataagagtctgaaatacatcttcacccaaccggacctaaatcttcgacaacgaagatggttggaattaatcaaagactatgatatgagcattcactaccacccggggaaagccaatgtggtggcagacgcattaagcaggaagagttactgcactgccctatgcatcgagggcatgtgtgaggaattgcagcaggagtttgagcatctcaacgtgggaattgttgaacaggggttcgtagccgctctggaggcacggcctacgctcgtggatcaagtcagagcagctcaagtgaatgatcctgaaatagcagagctgaaaaagaacatgagagtcggaaaggctcgggatttccttgaggatgaacacggcacaatctggttgagagaaagattgtgtgtacctgacgacaaggaactgaaggatctgatactcaccgaggctcatcagacccagtactccattcatctaggcagcaccaaaatgcgagcgtcaactgttcgggatagaggtattagcggaagcagaagagaaagtcagaaccatcaggaaaggttgaggattgcccagtctcgacagaagagctacgcggataactgccgaagggagctcacttttgaagtaggggattacgtgtatcttcgtgtcactccgctctggggagtacaccgttttcagacgaaaggcaagttggcaccacgcttcgtgggaccatacaaaatcttggaacgaaggggggaagttgcttatcagctagaacttccatccaatatgatcgacatccatgatgtgttccacatgtcccaactaaagaagtgcttaagagtacctgaagaacaagctgattcggagcatattgatatccaggaggacctgacatatgtagagaagccggttcgtatacttgataccagcgaaagaagaaccagaaacaaggtcaccaggttttgccgagttcagtggagtcaccattcagaggaagaagcaacctgggaaagggaagatgagttgaaagccgcccatccgcacctcttcgccagctcctccgaatctcggggccgagattccgtttaa

SEQ ID NO: 30647 - DNA, 783 bp, Oryza sativa
  Clone ID: PAT_MRT4530_35030C.1
atgaggattcaattcaaggaggtgggagcatctccggggttcaaggagcccatttccggcgtcggatggggtggaagagcaccgaggagggccagcgacgagcggcggcctccgggagcgggcggcaacggcggcgaggccatgccgggcggcggcggggctaggggcagcgtctacgggcggcaacaatggcgcggtggtggcgacgagggaaaacgaatgagggagatggggcgactgctgttttataggcgcggggtggggcatcgaggagaaggaactgacattggggcggtcaaggggagcgagctggcggtcgtgctcggagctagcggccaaacagcagtggaggtgcggtggctgagggaaggattcaaggacggatttgacattctcggaatccggagaagtattggcaaggaattcaaggacaggattgaattccggcgcggggtggggcgtcgaggagaaggaaccggcattggggcgatcaaggggagcgagctggcggttgtgctcggagctagcggccaaacggcagtggagggcggcatgggcggctgcgcggcgcaggcggccagggcggacgcggcggcgaccgggcagtcgaccgcgcgcgagcgcgcgcgcgaaggcgagttcaaacggcgtggtgggctcgtgcgggcgcggcagatcctgtgggagcgcgacggcgggtgcagcgacggcaacggcgaatccggcggtatggagggcgacgacggctgccttggcaaggtcgggggatggcgatgccaatga

SEQ ID NO: 30648 - DNA, 112 bp, Oryza sativa
  Clone ID: PAT_MRT4530_35031C.1
cccaatcttgtctatcttgttcccaacacatgatgatgagattccaaacaagcgaagacaatacctcccataaaacacccatgggatggttttcccccggttcatgacacaa

SEQ ID NO: 30649 - DNA, 655 bp, Oryza sativa
  Clone ID: PAT_MRT4530_35032C.1
gtatcaggtgattcctaccacgtatcatgtgatacttgcaaagtatcaggtgaaatctgttaggtatcaggcgattcctagcacgtatcagatgatacttgcgaagtatcaggtgaaatctatcaggagccaggcaccaaaagcatcgtcgccggtgatcccaccgttcacgtctcacgtcggagcttgtcaccggcggcggcatcatccacggtccacgccggagatcgtcaccggcacggccacatcctccgccatccatgttccacgtcagagctcgtcgccagcggccgtgtcctcctccgccacgccccacgccgggctcatcgccagcggccgcgtcctccactgtccatgccccacaccggagctcatcgctgaggccgcgtcctccaccgtccacacccccacatcatcaagcgttcgcatcggcgcggtcacaggcggtagcgacgagcaggcaacgaccacgaccatgaagccatcatcatgtcgtcttgccgccgactcgccgtgcacatactcattgtcttgccgtctcgccccgccaggcgtcgtcaacgctcctcatcatcttgccggagcaaagcaacagcagcaacaggagtcatgcatcagcaacagctctcaccggagcagagtaacaacaatatga

SEQ ID NO: 30650 - DNA, 1833 bp, Oryza sativa
  Clone ID: PAT_MRT4530_35033C.1
ctgcaggaatcggcacgaggaggcgccatttttatagtagtagcccacacacacacacacacctcatcacttcaccacgtcgatggcggaggagcagtccaaggcccaggcgggggcgaaggccctgtcggagccggtgcgggtcggggggtccgcggcggaggccacgctctccggcggggagctggcgtggcgccccacgggaggcggcgggggaggaggggaggcggggaggctggagctggagtccgaggtgctcggggtccgggtggacgggagggcgctcagggtcgcgaccttcgcgaggggcgacgacgcggcggcggcggcggcgcggccggcgacgtgcgggggcggggagaggaggagggagagggagagggagagggaggtggtggtggagatggagagcgaggaggccgccgcggcgtggggggacgccatgagagatcgcctcgcctcgcttggtcggccaaagagattgttcatcatagttaacccttatggtggaaagagaggtgggcggaagattttccagactgaggtcctacctctcattgaagctgctggcatcctttacaccatgcaagaaaccaagcatcggcttcacgctcaagaaattgctcattcactggatcttaggaaatatgatggaattgtttgcgtcagtggagatggtgtacttgtagaggtggttaatggtctgctgcaaagagaggactggaacacagcaataaaaataccattaggcatcatcccggcaggtcacaagcgtccccttgatgttacctctgttgtgcagggaaagacaaggttttttagtgtcttgatgcttacttggggtctggtagctgatatcgatattgagtcagagaagtacaggtggatgggcagtgctcgtcttgacttctattcccttctccgtgtggtgagcttgcggcggtacaatgggcgtgttctttttgttccagccccaggatacgaaggacttggtgatcttgtagagcaaattagcagttgcaaatcaaatggggctagcactggtgtacaagaggacagatcaaatgattttaatgacgaaacatgtgcttacgcaggcccttcaattgatgaaactgatcatgagtggagatcactggatggcccatttgtttcggtttgggtcagtggtgttccttttgctagtgaaaatgtcatgacagcaccagaagcaaagtttggagatggctacttggatgtagccataatcaaggactgccctaggtcggctcttgctgggctgatgtttcagatgaaggatggcagctatgtcaaatccccctatgtggagtacttcaaggtgaaggctctcaggattgagccgggaatgcgggtgggcagcaccaccaagggcggcatcatcgactccgatggcgaggtgatcgcgagaggggatggatcacacactggcgacgagatagagcacctgatggcctatggccctcccatccaactgacggtggatcagggcttggccaccattttctcccctagatgatgatgatccttgatcctgccctgaattcttcgcttctttcacagcatatgctacatacttacattacacctgtaattactcacacaccacaaatacaaggagagccacccaaaagcgcaatgtccggcgagatcttcctctctctctttttggcactgatcagtgatagctgctttactcaaaagtgtgacagagatttgtataccacaagattcctgatcaatgctgctactatgcttacaagcctacagctgctactatacttatcaatacaactgaaaatgcagtttgccccc

SEQ ID NO: 30651 - DNA, 422 bp, Oryza sativa
  Clone ID: PAT_MRT4530_35034C.1
tatcggcttcacgctcaagaaattgctcattcactggatcttaggaaatatgatggaattgtttgcgtcagtggagatggtgtacttgtagaggtggttaatggtctgctgcaaagagaagactggaacacagcaataaaaataccattaggcatcatcccggcaggtaccggaaatggaatggtgcaatcacttgtgcattttgctggtgaatccttctttgtttataacgctgtgcttgcaattatcagaggtcacaagcgtccccttgatgttacctctgttgtgcagggaaagacaaggttttttagtgtcttgatgcttacttggggtctggtagctgatatcgatattgagtcagagaagtacaggtggatgggcagtgctcgtcttgacttttattcccttcttcgtgtggtgag

SEQ ID NO: 30652 - DNA, 435 bp, Oryza sativa
  unsure (1)..(435): unsure at all n locations
  Clone ID: PAT_MRT4530_35035C.1
ctcatcacttcaccacgtcgccttcgtcttcctcctccccaacacaaacaaacacaaaaaaaccttcgccgactctcgctcaactcacctcaccaccggaggcagcttagcttccttccttcctcctccatccatggcggaggagcagtccaaggcccaggcgggggcgaaggccctgtcggagccggtgcgggtcggggggtccgcggcggaggccacgctctccggcggggagctggcgtggcgccccacgggaggcggcgggggaggaggggaggcggnngaggttgagctggagtccgaggtgctcggggtccgggtggacgggagggcgctcagggtcgcgaccttcgcgaggggcgacgacgcggcggcggcggcggcgcggccggcgacgtgcgggggcggtgagaggaggagggagagggaaaggga

SEQ ID NO: 30653 - DNA, 555 bp, Oryza sativa
  unsure (1)..(555): unsure at all n locations
  Clone ID: PAT_MRT4530_35036C.1
agctctgctcctcgccgccccgcacgccgccgtggccatcacctgcggccaggtcaactccgccgttgggccctgcctcacctacgcccgcggcggcnccngcccgtcggcggcctgctgcagcgggcgtnaaggagcctcaaggccgcagccancagcaccgctgacaggcgcaccgcgtgcaactgcctcaanaaacgcggcccgcggcatcaaggggctcaacnccggcaacgccgccagcatcccctctaattngcggcntcagcttcccctacaccatcacgcttcnatcaactgctcnagggtaacctaaacctatcaatcgaatgnntcatttatatncatacaaaaaccccaacggtggntcaantntttgaaaccanatcaantnctnttanccanatataattatanancgtttatttatcctgnaaataaaaanataaacctacctaaggtcnatcaatcaccatgccatgcnatttntntncaatcnatggttaatcggcccgggcggttcaggctancaaccttcctctctcctgnttgtgt

SEQ ID NO: 30654 - DNA, 857 bp, Oryza sativa
  Clone ID: PAT_MRT4530_35037C.1
gttgacgtggtggctgagtcagtgtagggccccacgtggaccctacaagccaaccagcaatcttattccacctcactcccctctactcccatctcaacccaaacctccagggcattcgtcgatgggtggggagaagggtgtccgtcggcggggaaaagctcgacggcggaggccgccagctgacgtggctcccaatgaccaggagcgctcacgtcatggacttgcgcacgtgcggggtgtggcacgggtcccaactacaactgcaatgtcgtcttcacgggcacgcgtgagggctggggcttccgccttgtcacgctggccaagctcctatcccccaagctcatagtcgcccccatcgagctgctcaaaagccgatgtgttcacgtgtccccgaggtttagctcttcttcgcagaggcaaacacgcggttccgccgcatggtcttcgatgtcgactccatctactccacgttgcggtagcatggtcctcgatgcatgcgcccttttccccaacgctggccatcgcaaagctttttgttcgttgctagccttctccccacccatcgccaagcgccgtcgtcgggcttttatttatcgccgccgcccaacaaccaccaccattttccctgctggtcaccggccaccacacacctttcccgcgattcagcgtctggcgtccttttcgcttgcatgcacgggcactcatgcagtcagtggtgctcgcgagtatgctcaggcgtcgcaacgtactccatctcccaactcttggagatcctcccgccaatcccgacggtgtggctgatatgcaaccatgagcgggcagcgcgacggcccgagtgggacggtcggtgtcgacgg

SEQ ID NO: 30655 - DNA, 357 bp, Oryza sativa
  Clone ID: PAT_MRT4530_35038C.1
gttgacaaaaaaactgaatagtcatacactctttgctggctactctcaacatgcataatcgaattgatacacacgcacattaattaggagacacatctgcaggtggcatcaaggttgctgtcaattgatcgtattacagaagatttatagccgtgataaagatcagtaggagattaagaactagtcattgacactgggatgactccaaaaaatgggccaactgcagcagaagatgctggcatcagacattgtctggacttattagcaggggagtactccaatggattaagaggagaagatgcatgctagtgccatagtatcgtcacatgcttggctgcacgttgagcggacgcctga

SEQ ID NO: 30656 - DNA, 363 bp, Oryza sativa
  Clone ID: PAT_MRT4530_35039C.1
ttgggagtcgcatcgggccacagagtacttctgccagttctgctccggtgagagagaacacgccgttgaccgcgccgccgccgccgccatgatggttatcgccgtggacgatgagcagctcatcttgcgtgtggtgaacacgaacgtggatcggaagcagatgaacatgaacgagctcacattgataaagggtgaaattcgccacttctacaacatcttgtgcttgatggccaacatccacatgtacaagagcactgtccatcttactcgtgaggagcttgagtgcctcatgactgtagctgcaaaccgttttgagatgaaggggactgactgttttttgaactgtatgaaagactacacgga

SEQ ID NO: 30657 - DNA, 4419 bp, Oryza sativa
  Clone ID: PAT_MRT4530_3503C.1
atggtctacaccaggaatggtagccgcgcgacaggcgagggcagcaacggcgaagagcgcactgatggggcgcatccccacagcgattctggccatggtccgccgccacttcccaagaatccgacgctagcccaagtgatggcacatcagacacagatgatggcagccatgatgcagcagatgcagcagcagcaccagcagatgcaccagcggatgctgcagcacgccgaacagcagcaccagcagtttggtccccctccccctcagtccaagttgccagagtttctacgcgtcaggccacccaccttctccagcaccaccaaccctatggaggcgaatgactggctccatgtcatagagaagaagctgaatctcctgcagtgcaatgatcaggagaaggttgctttcgccacacaccagcttcaaggtcctgcgtcggcttggtgggacaatcacatggccacccgcccaccaggtactgaagtcacttgggcagagttctgccgtagcttcaggaaggcgcagggcaacaggactgtgacagagtacctccatgagttcaatcgcctcgcgcgatatgcaccagaggatgtccgcaccgacgccgagaagcaggaaaagttcatggcgggtctggatgacgagctgaccaaccaactgatatctggggactacgctgacttcgagaggctggttgacaaggcaatccgtcaggaggatcaacgcaacaagatggacaggaagaggaaggccgcacagttcagagcacctcagggaagtcaccagaggccgcgcttcgctcccgggcagcagggtggacctaccaccatgatcgttcatcagcaccgcccgttcaaccctagcaactttccccagggcgccagtggcagtcagaaccaccatggaggtcagtccaatcacggtgcagctccacgcccaccaatggcaccggcacagacaggcccgcccgcgcaatccaagaaggagactggagcaaaaccagggtcctgcttcaactgtggcgagcttggccacttcgctaacaaatgcccgaagcctaggcgtgccgggccaaggtttatccaggctcgtgtcaaccacgcatctgcggaggaggcacaagcagcaccagaggctgtactgggtacgtttcctgttaactcaatccctgcaacaatactttttgattctggtgcaacgcattcgttcatttcaaagaagtttgtcgggatgcatgggttaataagagaggaacttagcacaccaatgcgggttcataccccagggaatagctccacttcagttcaattcagcccttctataacaatagaaatccaaagatcaccatttctagccaacctcattcttctcgaatccaaagacctagatgtcattcatgggatggattggctgaccaagtttaagggggtcatcgattgtgcgaatcgcacagtcaccttgaccaacgagaagggagaaaccgtggtgtataaatcactagtctcaccaaagcgaggggtctctttgaatcagattgagacggaaattccagtggacactgtggagaagaatttggggaaattggaagatatacccatagtctgcgagtatccagaagtgttccccaaagaccttactaccatgccacccaagagagagattgaattccggattgacttggcaccggggaccgctccaatttacaagaggccgtacagaatggcggccaacgaattagcagaggtcaagaagcaggttgatgagcagctgcagaaagggtacattcgaccaagtacttcaccttggggtgctccggtcatttttgtggagaaaaaggataagacgaagaggatgtgcgttgattatcgcgcactcaacgagatagacctgcgatcaggctaccaccagttgagaatctgggaagaggatattccaaagacggagatcaggctatatgagtgcacggttatgtccttcggacttactaacgcacctgcattcttcatgaatctgatgaacaaagtgttcatggaatttctggacaagtttgttgtggtattcatcgacgacatacttatctattcaaagtccgaagaagaacatgagcaacatctccgtctggtactcgagaagttgaaggagcaccagctatacgccaagttcagcaagtgtgacttttggttgacggaagtcaaatttctgggccatgtcattacagctcagggtgtggcagttgatccatcgaacgtggagtcagtcaccaaatggaccccaccgaagaccgtgtcgcagattcgaagttttcttggacttgcaggttattaccgccgattcatcgaaaacttctccagaatcgcccgacccatgactcagttgcttaagaaagatgagaagtttaaatggacagctgagtgcgataagagttttgaggagctcaaaaagaaattagtatccgcaccagttttgattctgcctgaccagatgaaagacttccaagtctattgcgatgcatcccgtcacggacttggatgtgttctaatgcaagagggcagagtggttgcgtatgcctcgcggcagttacgtccacacgaagggaattatccaactcatgacctggaattggcagcagtggttcatgctttgaagatctggagacactatctgattggcaaccgctgcgaagtatatacggaccataagagtctgaaatacatcttcacccaaccggacctaaatctccgacaacgaagatggttggaactaatcaaagactatgacatgagtattcactaccacccgggtaaagccaatgtggtggcagacgctttaagccggaaaagttactgtactgccctgtgcatcgagggcatgtgtgaggaattgcggcaggaatttgagcatctcaacgtgggaattgttgaacacgggtttgtggccgctctggaggcgcggcctacgctcgtggatcaagtcagagctgctcaagtaaacgattctgaaatagcagagctaaaaaagaacatgagagtcggaaaagcccgggatttccacgaagatgaacatggcacaatctggttgggagaaagattgtgtgtgcctgacgacaaggaactgaaggatctgatactcaccgaggctcatcagacccagtactcgattcatccaggcagcactaaaatgtatcaagacctcaaagaaaagttttggtgggtcagcatgaggagagaaatagctgaattcgtcgcactctgtgatgtttgccaacgagtgaaggcagagcaccaaagaccagcaggtttactccaacctcttcaaatcccggaatggaaatgggaggagattggaatggactttataacaggactgccccggacatcatcgggtcacgattcgatctgggtagtcgtggatcgactcactaaggttgctcacttcataccagtacataccacatatacgggcaaaaggttggcggagctttacctttcgagaatcatgtgcctacatggagtacccaaaaagattgtatctgaccgagggagtcagttcacctcaaaattctggcagaagctgcaggaagaattggggacccgtttaaatttcagcacgggctatcacccgcaaactgatggtcagaccgagcgagtcaatcaaatcttggaagatatgttgagagcttgcgctcttgattttggtggagcttgggacaaaagcttgccatatgcggaattctcgtacaacaacagctaccaggccagtctacagatggcaccgtttgaagctttatacggccggaagtgccgcacacctctcttctgggatcagacaggcgagcgtcaactgttcggaacagaggtattagcggaagcagaagagaaagtcagaatcatcagggaaaggttgaggattgcccagtctcgacagaagagctacgcggataaccgccgaagggaactcacttttgaggcaggagattacgtgtatctttgtgtcactccgctccggggagtacaccgttttcagacaaaaggcaagttggcaccacgcttcgtgggaccatacaaaattttggaacgaaggggagaagttgcttatcagttagaacttccatccaatatgatcggcatccatgacgtgttccacgtgtcccaattaaagaagtgcttaagggtacctgaagaacaggctgattcggaacacattgatatccaggaggatctaacatacgtggagaagccggttcgcatacttgataccagtgaaaggaaaaccagaaacaaggtcacccgattttgccgagttcagtggagtcatcattcaaaagaggaagcaacctgggaaagggaagatgagttgaaagccgcccatccgcatctcttcaccagctcctccgaatctcggggccgagattccgtttaa

SEQ ID NO: 30658 - DNA, 1832 bp, Oryza sativa
  Clone ID: PAT_MRT4530_35040C.1
atggagaataatgtcaccatggacgaacatgtgtgtccgcagaagatggtggcattcgtctataacatgacgtcaccctacggcggcgacaacagcaaggagacgtcggtggtggccatctccgccctcaccttcttcctcgccgccgccttcttcgacctcaacctcttcagccgcttgtcccgggtgagcgccgtgctcaaccccaccgtccgcctcctcctcgccgcctccctcaacctcttcctccccgtcatgtcctacctcttctccgaggccaagatgaacggtggcgccaccgccggcagcaacaactgcaagaagacggccaagaaggtcgccgccgacgagctgtcgctgctggcgcgggtgatcctcatatggatgctcctcgtcgagctcctccgcaagaagctggagggcgccctcgtcatcaccagggggacgcagggctactccaacatcgtcacccacgccgccagcgtcgtctggatgggcaacctcgtcttcttcaccgtcaaggcccccggcaagaaggccatgttcggcatcctctgggtgctctgcgccgccaagcttgtccagcgcgtcgtcatcaacgagatggccaggcgttcttccggccacggcaagaacccccgcctcatctcctcctacatggcggccaccacccccatccccaccgacatggccggcgccgccgcgttggagcggtgcaggtacgccgtgatgggagaagagaacatggtcgtcaaggccgggccgcgcggctacgagctcgacctcgacgtcgccgaaaccgacgaggtcctcaccgtcggcaagatctggcggacgcgagagcacccgaagctcaagaggctctgcctctccttcgcgctcttcaagctgctgcgccgccgcctcgaggacgtgccgcccatgaccaagcgagaggcccaagagtgccgcaccatcatcttcgatggcctcggcagcaacgccaccgccgccggcgatctcgcaccggaggtgaccgtgttccaggtgctcaaggacgagctcaacctgttcaccgagtactaccactccgtcctccccgtggtgctcgcgagcccctacttcttcttcgtcaactacgtcctctacccgcccgtcgtgttcgccctctgcctcatgaccatcgtcctctgcggcaatggcggcatcccctacgtcatcaatgccatgctgactgacagctcattcctatccgtcggagtgggcaccatggccaagtgcctgtggagcgccgtcgccaggtcgtccagggccttctacaccttcatcgacgtcttcatctgctacatcctcttcatcgccgtcgcctacgaggaggccaccgagaccctcgtcttcctcatctccgactggttcgccgtctcgctcctccacgcctactacggcaaggccacgccccccgccgccgcccgcttcgtcctcaagctctccagaaacctcaggcactacccgagccgaatcaccatgaagcaattctccgttcttggatgctctagcgacgtctccaccctcccgctgcccaccgccaagctgcccaagcacaccaagcgctccatcctcgaacgcttccgagacgccaggccgccgcaggacggcggcggcggcgccgccgttcctctgagcaagaacagcccggcgggcgttgtcgacggagcccgttctcgcggtttcgcggtgggcgtgccaaggcggaggcgtcgttgcaaacccgtgaacctcctttggtggcgccaggaggttctgccctggaagagggctcccctgggtcgcggaccctttggtacatttggtgg

SEQ ID NO: 30659 - DNA, 595 bp, Oryza sativa
  unsure (1)..(595): unsure at all n locations
  Clone ID: PAT_MRT4530_35041C.1
attcctgccctttacagtacagaccggttaattttgctcactttattaatgccagatttggggaggaagctgcatcattgatacctggttgctgtgttgtaatcttacgtgaaggtaacgttactccatatgaaagtctaaaagagattgtgtgataatgtaaatcttgttaatattgcaggtcatcagaacctagatttaggttctataaccatggatcccaccacaattgccatcgtttgctggagaggcaaggcaacactgaacgccatggtttctccacctgatcggaaggagctgcttgagaggatcacacaacgcttcgggctcaaagcattgagagtggaggaagagaacccccgacggcaaaattaattgatggatgatcaacgttgtcacattgagatggatgatcaagaagtcgtgaggacagcnaaacggagctgacaccgggtgatggtatagtgtggtggtttaactcatactcgctccgtattaggaaagaaagttgttttggacagtgacatggtctccaaactagctatgtgataaaactagcttgtgctatttctgagaaaaaaaaaaaaaaaaaaaa

SEQ ID NO: 30660 - DNA, 101 bp, Oryza sativa
  Clone ID: PAT_MRT4530_35042C.1
cacgcgtccgatctcttcgaacggcacactaatccaaccaccatgactcattgtaaccaaaagccgagtgccctacaacaactcgtatatcgtgttctaca

SEQ ID NO: 30661 - DNA, 363 bp, Oryza sativa
  Clone ID: PAT_MRT4530_35043C.1
atggcgcaggtggaactagaggcgacggccggcagtgcaggcgcggcaggagtgggttgggctgctggtgcttgggatggatggtggtggttttgtggagtcatgggcctccttcacgtcaattttaatgaccgtgtagcagcaaattttaacgacgagctatttagtggtcgtcggattagaaaatcagctcctcaccactcgtattcagaggataacgaggattacaattttctgctggtcattaatgttgggatttctagtagtgaaggccttcttggtcggccttcgtcgcttctgccgccccttcgttttccccttctccaatggttccctgccactggatccgctgccaccgcctaa

SEQ ID NO: 30662 - DNA, 365 bp, Oryza sativa
  Clone ID: PAT_MRT4530_35044C.1
cccacgcgttcgttaatgcgttcgtcgactcttacgaacaatgggtattgataattattcatggtgtgttgtgcccgtgggggagaaaaaaaaaaaaatttttttttaaaaatgtggttcgtgtactacaacattttgtttgggttaaagatcaacttgtttttataacattccaaaaaaaaaaatttaaataaaaacaggggggtcctttttatagtatccaagctttcttacaacgtggttgcaactttatggcctttgtattggacccccaaaattaaatgggggggccgggattttaaaactccagaacgggaaaaacctggtggtaaccaaattatttttttttggggaaaaatcccatt

SEQ ID NO: 30663 - DNA, 1837 bp, Oryza sativa
  Clone ID: PAT_MRT4530_35045C.1
ctccttcattggaggttagcccaagggtcagtgttgcttgagaggtactcaccctgtgcaggtgccagtggactcaggccatttagctagctagccaaagccaattgccatgtggagtgctctcttctcccatctgagagaggttcacaagagaagcggagttaaggaggagaagttgataatgaagtcgccaccagcagcaggtgaggccggctgccacaagccacaggcgactgccaccaacaagatgacggtgctgcagtccccgctggggctcaggaccatcctcacctccctcgtcgccttcttcatcgtcgtcagctccgtctccctcctcttcgaccgcggccaggatgctcaggcgcaactcgccgtcgagcagcatcagcaccaagaagttctgctcaagcagaagccggcatcagcagcagtgggcgagcagaaatcagtggtagtagatcagtcgtcgttgaggagccaggaggcgcaggtgcagtggacatctgagctgcaggacgtggccacggacagcggcgacggcggcttcgacggcgaggaggactgcaactggtcgttgggacggtgggtgtacgacaacgcgtcgcggccactctactccggcttgaagtgctccttcatcttcgacgaggtggcctgcgacaagtatggaaggaatgacaccaagtaccagcactggagatggcagcctcacggttgcaaccttccaagattcaatgccacaaagtttcttgaaaagcttaggaacaagagactggtttttgtgggcgattcagtaaacagaaatcaatgggtgtcgatggtgtgcatggtggagcacttcatccctgatggccgcaagatgcgcgtttacaacggctcccttatctccttcaaagcatttgagtacaatgcgacgatagatttctactggtcaccactgctattggaatcaaacagcgacaaccccataattcacagagtggagtaccggatcataagggcagacaggattgagaaacacgccaatgtctggaaggacgctgatttcatcgtcttcaactcctacctttggtggaggaagcagagggatggtatgatgatgaaagtcatgtatggttcatttgaggacggggatgcaaagttagatgaggtgcaaatggttgatggttatgagatagctctcaagaaactaactgaatatcttggagccaatatcaacaagaacaagactagaatcttctttgcaggctcatcacctgcccattcctgggctagcaactggggaggagatgacaacaacaagtgtctaaacgaaacagaaccaattcagatagaagattataggagtgcaaccacagactacggcatgatggacaaggcgaaggagatatttggaacactggaaccaaagggcatacatgttcagatactgaacatcacccagctttctgagtaccgcaaggacgcccatccaacgatattcaggagacagtacgttcctctgacgaaagagcagattgcaaacccgagcatctacgcagactgcacgcattggtgcctccctggagttcctgatgtttggaacgagttcttgtatgcatacattatgcacaaatgatatatgtataataatgtaatcttaatttggccaaatttcttctttgttaacttgtgggtgtctaagtaggtataagtgcacagtacttggcccccatcaatttttttttcttttttgacatttacatcattacattacatgtaaagagaaagggaagaacataagcgcagaaatgaaaaggaagaagataagttaatttgcctaaaaaaaaaaaaaaaa

SEQ ID NO: 30664 - DNA, 1611 bp, Oryza sativa
  Clone ID: PAT_MRT4530_35046C.1
actcctatgggcgaatgggaccctcgaggccggccgggggagtgctctcttctcccatctgagagaggtcacaagagaagcggagttaaggaggagaagttgataatgaagtcgccagcagcagcaggtgaggccgccggctgccacaagccgcaggcgactgccaccaacaagatgacggtgctgcagtccccgctggggctcaggaccatcctcacctccctcgtcgccttcttcatcgtcgtcagctccgtctccctcctcttcgaccgcagccaggatgctcaggcgcagctcgccgtcgcgcagcatcagcaccaagaagtccagcccaagcagaagccggcatcagcagcagtgggcgagcagaaatcagtattcgtagatcagtcgtcgctgaggagccaggaggcgcaggtgcagtggacatctgagctgcaggacgtggccacggacagcggcgacggcggcgtcgacggcgaggaggagtgcaactggtcgttgggacggtgggtgtacgacaactcgtcgcggccactttactccggcttgaagtgctcctttatcttcgacgaggtagcctgcgacaagtatggaaggaatgacaccaagtaccagcactggagatggcagcctcacggttgcaaccttccaagagtcccaggtgccaactggaaaacatatagagaaaaatcggttggttttgagttctttaaacaacgattcaatgccacaaagtttcttgaaaagcttaggaacaagagactagtttttgtgggcgattcagtaaacagaaatcaatgggtgtcgatggtgtgcatggtggagcacttcatccctgatggccgcaagatgcgcgtttacaacggctcccttatctccttcaaagcatttgagtacaatgcgacgatagatttctactggtcaccactgctattggaatcaaacagcgacaaccccataattcacagagtggagtatcggatcataagggcagacaggattgagaaacacgccaatgtctggaaggacgctgatttcatcgtcttcaactcctacctttggtggaggaagcagagggatggtatgacgatgaaagtcatgtatggttcatttgaggatggggatgcaaagttagatgaggtggaaatggttgatggttatgagatagctctcaagaaactaactgaatatcttggagccaatatcaacaagaacaagactagaatcttctttgcaggctcatcacctgcccattcctgggctagcaactggggaggagatgacaacaacaagtgtctaaacgaaacagaaccaattcagatagaagattataggagtgcaaccacagactacggcatgatggacaaggcgaaggagatctttggaacattggaaccaaagggcatacatgttcagatactgaacatcacccagctttctgagtaccgcaaggacgcccatccaacgatattcaggagacagtacgttcctctgacgaaagagcagattgcaaacccgagcatctacgcagactgcacgcattggtgcctccctggagttcctgatgtctggaacgagttcttgtatgcgtacctcatgcacaaatga

SEQ ID NO: 30665 - DNA, 243 bp, Oryza sativa
  Clone ID: PAT_MRT4530_35047C.1
ggcacgagcatctggtggtagtgcaaccgtgaacacacgcgcgacaggtaaactagtcgagagagcgactgcagatggcggagaagggcgcgtctcccgcgacggcgtcggcgacgagcgggcagccgtgcagcgcgtcgaggacgatgcaaggtggtgtggccgttgacggagcgaaggcagagcctaacggcttcgtgggcgctgcccaacgtcatcgagcgcgagcggcgtttcggatcg

SEQ ID NO: 30666 - DNA, 386 bp, Oryza sativa
  Clone ID: PAT_MRT4530_35048C.1
ggttggggtttttttttttttttttttttttttttttttttttttttttttttttttttttttgcaaaaacatggagtttttttagtagtacattgggttcacaccaaaaattggggtgtttaaaaaatcaaaccaaactgcccccaaatttaaaaattacttttgtttgtaaaaaaaaattggacagggttaatcggaacaaaaccttttttttttatccaattttactaacccttgttaaaatttgtttgaacagccgggaatttgtactttaaatgcacactggtccaccgaaaattggggtttttaatgcctaaaaaaaatgaaaaaaagggtttaatcggggtgggggttatgggaattaaagtttaaaaggggacttttt

SEQ ID NO: 30667 - DNA, 776 bp, Oryza sativa
  unsure (1)..(776): unsure at all n locations
  Clone ID: PAT_MRT4530_35049C.1
gccgtggcggcaaacgagctaaaatagggttgcggaagcagccttgcccgatgccgaaggggtaggcgaatgccaaattgccgcaactgttgttgcagccggcgagcgttggcgccgctagagcaccacccggaatcggaggcagcactagtacaagcagagagtatgctgcaggtaataagaaaatcatcttcctctcagcttcgagggattcacctacctacagagggctgagatttgatgatatggaaaattgatcttggcgtttgaactagcgttctggggaattagcaagtaactgcatgactcatatatagaggctgctgcgaaagagtatgtgtgcttcctggcaatttatgataactctaggtccacctccatctcttctgaagctgcagccaaccaaacggtttcaacttcacccagaaaagtgatggagttgcctagagtgttttcataaaatgaactatagaaataaagccatgtttaggtagcttcacaactcaattccaaacccaactccaatccaaaactaactccttaaatcaagtttaggagttggagctttagcaaatgagcccatctattggttggcaatatatgtggaggggacccaattgtcgttgtgtgttgcaatcataataactgngtgaaaccctgcgcgttgttgcaggagtttagtatgataacactaagtaaaaataatgtataagatagctagataatataaacttctgtaagttgatatggtttacaataatttaaaatttaatagt

SEQ ID NO: 30668 - DNA, 273 bp, Oryza sativa
  Clone ID: PAT_MRT4530_3504C.1
ttttttttttgacatgctaatcatacattatttatttagtaaaatgtatgttacacttacattccagttttaaacagccaaaagtgagagcaacgagcgataaaaaggggaaaaaatggtaagaaaaaaaagagggtgtttcaagattacaattcaggggttccaccacctaagccgggagaaagaaccgggggtcaagggtattcgctagaaaaaaaaaaagggaaaccgttcccacactttaagaaaaaaaaaaaaacccctggcccacct

SEQ ID NO: 30669 - DNA, 1248 bp, Oryza sativa
  Clone ID: PAT_MRT4530_35050C.1
atggaatcgtgtgcacggcggtgcgccgtctccggcctgacggcgctgtccatgcgcctcaccaagcagctctccgccgccgccgccagcaaggccggcgctgccggcaacctcgtcttctcgccgctgtccatctactccgtgctctccgtggtcaccgccggcgcgcgcgggcgcactctgacagagctcctcggcgccctcggcgcagagtcccgcgagaagctcgccgcgaacgccggcgagatggcgcgtgctctccccgcccccggcggcggcgcggcacagccgggcggcggcccgcgcgtcgcgcacgcgtgcggagtctggcacgagcggacgcggacggttaggccggcgttccgcgacgccgccgccgcgtcgttcaacgccgcggccctcgccgtcgacttcctcaacaacccggaggaagcgaggaaggagatcaacagctgggttgcggcggcgacggagaacctcatcgacacgatcctcccgccggggtcggtgagcacggacacgggcctcgtggtcaccagcgccatctacttcaacggccaatggtggactcctttctgtaaggagataaccgagaagcgggcgttccaccgcctcgacggcggcgacgtcgaggcggacttcatgcgcagcggcgaggaccagtacatcgccgtgcacgacgggttcaaggtgctcaagatgccgtacgcggcttgtgtgagcgcgaggacgacgacgacgccgaggtactcgatgtacgtcttcctccccgacgagcgcgacggcctgtggagcctggaggacaggatggcggccggcggcgagggcttcctccgcgagcacacgccggagcggcgcgtcgaggtcggcgagttcaggatccccaggttcaagctctccttcgacgacagcgtcgtgggcgcgctccagcgtctcggggtcagggacgtgttcaagccgttcgtggcggacctggccgacgtgctggaagcggagaactccggcgatgatccgccgctgtttgtgtcggacgtcaagcacaaggccgtcatcgaggtgaacgaggagggcaccgaggcggccgccgccaccgcggtttgtcttaccttcgcatcggcggcgccatcgtcacggcggccggcgagggtggatttcgtcgccgaccatccgttcgcgttcttggttttggaggagtcgtcgggtgcggtgctcttcgccggccacgttgttgacccgacagatgagtaa

SEQ ID NO: 30670 - DNA, 309 bp, Oryza sativa
  Clone ID: PAT_MRT4530_35051C.1
ggatggaaagtaacctcgaatactacttacctcaaaggaacccctaaaaaaggacgcattgtgtaaccgtggcaagtttaaacacaaacccaactttttttttttcctgtcctgttaaaaagggaactccttgtgaacgggaaaaccccatttaaacccaatgtacatgtcacacgcagcaaagggaaggggagggtcccgcctccccccccttgatatttgccaaaaaataaaaatcttttgtctctgaaaaaacacgagaggcgggggcggcaccgcatttcccaatcaacaaggggcaagggggca

SEQ ID NO: 30671 - DNA, 405 bp, Oryza sativa
  Clone ID: PAT_MRT4530_35052C.1
tctataggctaccatgtacaggctcactgatggggtgcatgaaaggtaccatggatgagtcaacgctgatacacagctatttgctttcagcgatattatgtgctcttcacggactatctattgataactacaccatatcctactttcctgggggatgcagagcatcgaaacttatgtgctcgagggtattgtcataactaacactctgttttggacgaatacctgagtaggatgacaactacttgatcatatattcttgattctttttgcagtatttgtgactgtcgcactgaccaactatagagagactgtgacaccaatgctactaatgcttgctgttgattagacttaaaacaatacagctagaaaaggtatggagccctcatggatctataggtcatatat

SEQ ID NO: 30672 - DNA, 336 bp, Oryza sativa
  Clone ID: PAT_MRT4530_35053C.1
atgggaggggatgcgagaaacagcgcatcgacggagagagagatcacgcggggtgggtggcgcgggcgcttacctgctccgccatggctggctggagggtgtacggcggcgaagggggaaggaggctgcagcggcgatgcggcggcgggcggcggaaaccctaacgagaaagaaaacaagggagatgggttgggaacccatgagaaagaacacagcctcaccgactactcctgtcccataatattaatggcatgtttggcaagagaagggaagaggaatgggagtttgaaggaggaagttgatggtggaattggtaagagatcaactgctaaatga

SEQ ID NO: 30673 - DNA, 387 bp, Oryza sativa
  Clone ID: PAT_MRT4530_35054C.1
atgtcgtcgacattggctaaggcgatgtaccacggtaacccaacgttcaatgtcaagaactacggcgccagcgatgacaccaaggtcagtcgaggtgggacgctgatggtgacagctcagtacgggctcaacgagaggctcgtggtggtggatgaggtccatgcgtccctcgcccatgctcgaggtgggtatgaaggccacggcgaggagcggcctcccttctttctctctcctatggtcaaggtggaggggacatcagaggcggaggtggggagggcacggaaggccgcggcgaggagcggcctccctcctttctctcctatggttggcacggcgaggccatcagaggcggggagggagcggaaggcgcaaaaggatgaggcagtg

SEQ ID NO: 30674 - DNA, 1823 bp, Oryza sativa
  unsure (1)..(1823): unsure at all n locations
  Clone ID: PAT_MRT4530_35055C.1
atgggttcgttgccggagcagttcgtcttccgctcgaggctccccgacatcgccatcccggaccacctcccgctgcacgactacgtgttcgagcgcctcgccgaccgccgcgaccgggcatgccttatcgatggcgccacgggggagacgctctcgttcggcgacgtcgacgcgctgtcgcgccgcgtggcggctgggttgagctcgattggtgtttgccatggtagtaccgtgatgctgctgctgccgaactccgtcgagttcgcggtggcgttcctcgcgtcgtcacggctcggggcggtcaccaccacggccaacccgctgcacaccccgccggagatcgccaagcaggtggcggcgtccggcgcgacggtggtggtcaccgagccggcgttcgtcgccaaggtgagcggcctcgcgggcgtgaccgtcgtcgccaccgggggcggcgccgagaggtgcgcgtcgttcgcgggcctcgccgccgccgacggctcggcgctgccggaggtcgccatcgacgtcgccaacgacgccgtggcgctgccctactcgtcgggcacgacggggctccccaagggggtgatgctgtcgcaccgcgggctggtgaccagcgtggcgcagctcgtcgacggcgagaacccgaacctccacctccgggaggacgacgtggtgctctgcgtgctccccatgttccacgtctactccctccactccatcctcctctgcgggatgcgcgccggcgccgccatcgtggtcatgaagcggttcgacaccgtcaagatgctgcagctggtggagcgccacggcgtcaccatcgcgccgctcgtccctcccatcgtcgtcgagatggccaagagcgacgccctcgaccgccacgacctctcctccatccgcatggtcatctccggcgccgcccccatgggcaaggagcttcaggacatcgtccacgccaagctccccaacgccgtcctcggacaggggtacgggatgacggaggcagggccggtgctatcaatgtgcatggcgttcgcgaaggagccgacgccggtgaagtccggcgcgtgcggcacggtggtgcggaacgccgagctgaagatcgtcgacccggacaccggcttgtcactcccgcgcaaccagccgggggagatttgcatcaggggaaaacaaatcatgaaaggatacctgaacaacccggaggcgaccgagaagacgatcgacaaggacgggtggctgcacactggcgacatcggcttcgtcgacgacgacgacgagatcttcatcgtggaccggctcaaggagctcatcaagtacaagggcttccaggtcgcccccgccgagctcgaggccatgctcatcgcccacgccgccgtcgccgacgccgccgtcgtcccaatgaaggacgattcctgcggcgagatcccagtggcgttcgtcgtcgcacgcgacggctcggggatcaccgacgacgagatcaagcagtacgtcgcaaagcaggtggtgttctacaagaggctgcacaagatcttcttcgtggacgcaatcccgaaggcgccgtcgggaaagattttgaggaaggatctgagagcaaagttggctgctggaattccggcgtgctgatgaaactggcactgaactagcttgcctgagatatccagctattgtttggtttttgttttgatcatacttaaaaagatatagtgaaatgtaaaccactgatgtagtcagcnnatgtaaaaggaacacgccctctggatatacatgaaagtttgagaggtgatctcatcggtcatcagtaacaccaaaaaaaaaaaaaaaaaaaa

SEQ ID NO: 30675 - DNA, 981 bp, Oryza sativa
  Clone ID: PAT_MRT4530_35056C.1
atggccgccaccgccgcctcgccggaacgcgcgcgagcggaggtcgacacctccagcgcgttccggtcggtgaaggaggcggtcgccgtgttcggcgagcgcatcctcgtcggcgagaaccggaacggcggtggcgggtatggcggcggtgaccgccgtgctggtagggaggggaggaccaggtcgaacaccttggccattgccgcctcgtttgcgaagctcgagggaggaggaggaggagatggtgtcagggtttctaaccactcgaagccgaacgccattggtgtcaatgccaagcttccagtggcgtcggatgctacgccgccggcgatgtacttggtcccgtcatcctcgccgccgttcttcgcgtcgtcgccgtcgctcgccaacgacgacgacggcgtctccgccgcctccgccagcgacgccatggtgatgggctccatcaggaaggtggaggaggaggccgccagggcgaggcaggaggtggtgcagctgaagcggaggctggccgagacggagctcgccatggccacgctcagcgcgaagctccaccgcgcgctctccaagctcgcgcacatggaggccgacagggcggcggcggagcgcgcgcgcatccagcgcagggacggccgcgacatggcgctggctgtctgggccgcgtccggcggcggcgaccggcgccgcggcgtcgccaccgcggccgcccacgcggcggcgacggcgaggcggcagccgctgggagagcttctcaggctcggcgaggccgacgtcgtcggcgcccggcgccggcgccggcggcgagatggtgatcggtggccagagaagggcggcggcggcggcggcgaggaggaaggtgcagaaggagaagccgatcgtgccactgatcgttcctctcatcaatggcatcctcttctccaggaagaagaggaacaaggacaaggagagcttgtacatgaaggagctttacagcttgcttag

SEQ ID NO: 30676 - DNA, 485 bp, Oryza sativa
  unsure (1)..(485): unsure at all n locations
  Clone ID: PAT_MRT4530_35057C.1
tttcacgcgccggacttcaccggcgtcgggggcttttttgaacgccatgcacattgacagcaccggccctgcctccgtcatcccgtacccctgctcgatcaaattcacatcaaatttccacttggatgttgttgttgtttttattgcttgatttggtccttgtgttcgtctagtttgggttatacctgtccgaggacggcgttggggagcttggcgtggacgatgtcctgaagctccttgcccatgggggcggcgccggagatgaccatgcggatggaggagaggtcgtggcggtcgagggcgtcgctcttggccatctcgacgacgatgggagggacgagcggcgcgatggtgacgccgtggcgctccaccagctgcagcatcttgacggtgtcgaaccgcttcatgaccacgatggcggcgccggcgcgcatcccgcagaggaggatggagtggaaggagtagacntggaacatggggagcac

SEQ ID NO: 30677 - DNA, 996 bp, Oryza sativa
  Clone ID: PAT_MRT4530_35058C.1
atggcatggaatacactttatgaaaatgcagagatgctactgaagtattatgaggtttttgtttgtcagttgggaactatattgcaaggccttcatcacatagatatcgatgttactgatccaactcagggaggatacacgacggcgcttaattccattcgagaacgggatcaagaacgtgctgggcagaatacttttcatggagtagcgatcacttcactgaacaaacaatggcgtcgcatcaacctcgttcatcaggacaggcctaccgtttcactgctgatagatgaatcgaatggatatctggttggatttcgcagaggagatggaacctggatgcattttaacgaccaagagctgccaaatgtgcctggcacagagcagagggtgccaggcataccaatccaattaagctcctcgtatatgaatttgattaaggataatgaaaggccttacttttcagtggggagacagagtttacgccactcttactttgtgctgctcaattatgatgcggaggtggacttgaggagtgcaatgatgaagagacaaaggaaggcgttgacacagttgataatccttttctgtgaggcggcacggataaggccagttctggagttcatttctgaggccatgtcaaccgaggacaccacaccactggacgagacactctggacatggatcaagaactggtccaccctgtcccgtttcgcactccactgcagaagatgtgagcgtgatgctactccacttgaccccaacgaaatcaagcacgtctccccctacggcatcaccagcagggagcaagttctggaggttgttgcaagagggattttgttcatagtatgtgtttgctgcggcttaacgtggaatactttttctatgcttcttttcaactccctgatgatttttgagcgaaagaagtgtgatgataatggatgtgatcgatgtggggaaaatgtggtgttcttgatgatactgaagctgatccattga

SEQ ID NO: 30678 - DNA, 536 bp, Oryza sativa
  unsure (1)..(536): unsure at all n locations
  Clone ID: PAT_MRT4530_35059C.1
tttttgtataaacaaatttagtaattgaattaatgggttgtggtctgtatgaggggtgatatttcctctgcttaatccctttctgcgattaaaatctattcttaattatgtgcagctgggttttaggttattatacataatgaagagactgattccgatatctgcttttctgttggaggtactaattaatcctgaagttattcagttcaactagtattctgctcttttctttttgaatacccggatagaattccaacagaaagatggtgagaactgtagcagccatgatgtacttgtgaagcgtgtcaaagctgcatttgataggtttgctgaatctactgagcaatcatgtcgtgaaagatgtatggaggatttggtgagcaccactcgttatgtcccttggtcccttcacaataagaaccgtgccggattgagacacttttntgattactttgctgcacaagagcaattatccgcgaacacacttactgcccactcgactgggctgcatgagcattcttttggttgcatgacat

SEQ ID NO: 30679 - DNA, 278 bp, Oryza sativa
  Clone ID: PAT_MRT4530_3505C.1
ccggccgggatctcaaactcaatcccgatctcatcacattctctcctcgtcgtcgggttcgtgctcggctccgtcgacgccagccttggcgatgttgatccgcagtacagaacttgcgtggaggagtgtcatactacaggcattattggatagaacatcataagtcactgccagtcccaagctaatgatgacccgtctgcaacaagtccttggacatccaccccttcaaacacatgcacgagaacgcaccaggattcaagaacttgatgtacaacaac

SEQ ID NO: 30680 - DNA, 348 bp, Oryza sativa
  Clone ID: PAT_MRT4530_35060C.1
atgacggcgcgatttgcggaggtgggagaacggagggaggcgcctgcggggaggtcgatggaagaaggcggcggcggcgcgcataggaggaggggggcttcgccggcggcggccgcgacgcgcatcggcggcgcgcggcggaatttcggaagagaggggaagatgagaagaggagtggatggctatttggcgatttttccagggtggtttctgcaaaaaggacggggacgcgagggggcgcgggggtgtgaaatggacggcggggagatggcccgcgtgggatccgcgcgatctgggccgtccgtttccacgtcggccgcctttgtgtcccgcttcggcaatttttga

SEQ ID NO: 30681 - DNA, 201 bp, Oryza sativa
  Clone ID: PAT_MRT4530_35061C.1
atgttgaaaagagaagaggcgagggtggaggaggaagatggagctaacatggtttcctccctcaccgtcgccggcggcgacggccaccagacgcgcgcatccggcgcggccggcgtcaccgcctcccagccccctcgtgttgctcgcgtctccggcgaccgtcgctttgccttgtactccggcgcctgcgtcggctactaa

SEQ ID NO: 30682 - DNA, 438 bp, Oryza sativa
  Clone ID: PAT_MRT4530_35062C.1
atgtggcccgccaccgcgttcctccgcctgcttgtcctcctggttgcaggaggccccgagccggtctggtcctcacatgcggtgaccgcggcctgcctgcccgactcgttgcagccgtgtcggcacgggcaccgacgtcgagtgctacgtcgacagctgcgcggatgggcgacgggagctgacgctggtgggcgcgcggatgggcgatggcggcagactccagcgggcaagtggaaggacgatgaaagcggcggccgagcgggggagcagtggcgacgactgcgcagacgggcgacaggagctgacgccagcgggtgcacggacgggcgaagaaagcggcagccgagcggggaagcagcggcgacgaccgcgcggccgagagaagtcgccagaaatcttgctgaattgctaccagagcaaggagcacatcagccttga

SEQ ID NO: 30683 - DNA, 698 bp, Oryza sativa
  unsure (1)..(698): unsure at all n locations
  Clone ID: PAT_MRT4530_35063C.1
tttttttttttttttttttttttttttttttttttttttttttttttttttttttttttttttttttttttaaaannagcagaaataananatttagggcatanaatanacacatgaaaattaaatgtttttttttttttttttttcagtcataaaccgagcaatgggcctcagttctaacttgtaagcaataaaaggcgcaagttcatttcgagctcatgatcaacaaattaaatctgccatcttcctactgcaaagacaccaatcgttccagtgcgcttccgtttcgattagaagtttagaactcttgacaccatggttacggctagccggcccagagcatgcatgcacacgcacatacatgttactacgtttctctttttggttggatatgatcagtagtagtacgccgggagccactccttgccgttgatgaagtcgatgttgatgaacttgtcggcctcctcctgggtgagctgccgcgaccacggctcgcgcttcgtcgcttcggagcccggcccggtgcagttgaactccccgagcatcacgtggtcggtggatccggtgtagccgtagctggtccagccggccgggttgatggtcttggagaggtaggtgttcggcgaagatgacgcgcgagtaggcctcgtttggcgnggcccaggtacacctgcccgacgccgtacaccttgcccttg

SEQ ID NO: 30684 - DNA, 2116 bp, Oryza sativa
  Clone ID: PAT_MRT4530_35064C.1
atggatcttgagaagtctacctcaaccaccgcgtccttgaggaagctgcaagacgacggtgccctcccttgtcgcgggaccatgcaaagggaggcaggtggtatataacctaaacccatcttaggccgcatggttgtcgttgaagattacatttcttgcggttttcttcctccgccttctcaatttcttcttcttgtcttgaatttctatggcctttctttgcttcacttgaaccccaactccatcgcattccttagcatcttttctcatctttgcgaggcctacattggggtagagcccttccttgatctattccgcttttactatgagctgcgatggatggaacccaacaggatagaaaactcggatcccgtccttgttgtccctaaagaacaaccaaacaaaatccctgagtggaccgccaaacccgccctgactccctccctccaatcttttatcgagatcatcgatgatctccgaaattgggggttgtcggggtacgaagtcgctgccgacttcgtaggtaggcggattcaaccgctgcaggcccgtgcccatccggcctttgattactctgggccagaggacacgacccggatctctcctcgaggtctagacagtgacaccggggggcgccgcgtcagtcaggtgatcatcagcgccccctcagcgacgggcgagatctcgatccccctttgcgagaagggaacggccgaacgcgccgctgcgatcaatgtcagtgtactcgatgattcctttacatctttctcctcgagatcgtgtcgtgacttcacgttgtgcaggctctccctctgacggacgtaatcgggccactcatggaccaccaggcggcagcgtcgttgaaggagagcatcgccaaggaggcctctgacgctgttgctgccaccacgagtggtagcaacgtcccaaagaggggaaggaaattctcctccgtacgagggacccgtcggaaagcgaaaaactctacggtaagcttctttgtggttcccaaaaatcttcacagggcggcgcgggcaaagacgcacaaggtgggactgatgccgctttcagcgtgtcccctgcggcgacctcgctactaaggaccaggaggcggcacggagtggccctgctgtcagcctcatgcctacccgaggcccgtccaccgatgccctcacctgggaggagctccaagcggagatggagcgcatcctctaggccggtgctcgcggcgtaggtcacgagatcgaggaggccagggcggcggcgtcatcggcaaaccaacgtgccgactagctagcgagcgacctggccggaggcccacgaggacctcctaaagatgagggagctagtggccggcaacgagatgcagcggcgcggactcgagcaccggatgtccgagctcgagggccacatgatcgacatctgcggttcgctgcgaacgtcattcaccagcctgcaccaactcgccggggagtgtagtgtcacgactaccatcccggcgcatcccgatgagttctcgctgacgtcatcgcttgtggagctggctacggcgatggaggagatcacatccaagcacgcggctaggatcggggaggagacgtccaacggcatctacaccggggcgtgccatgtccttgcgtgcatgaggctggcatatcccgatctggaccttaagaaggctttggatctgggggccgctgatgacgcacgcaaggatacgatggaagaagtcggtgacttgggggagtccgtcctccccctttttgaagaagatgttgatatcgaggatgtccagcagcgcgggcagcccgacataccggtgattgttcaggcgcttacgctcaagccgttcgtgcagtgggaggaaactagtcaaagcccatccgcggaagtgaacatggcgatgacgtcgctagatttcgagaacatgttggctgaccgagatcgtcgaatccaatattggaggacgaaactcgaggtggccgaactcaaaaaaaccatggtggaggtgaagaaggaccaggccgtggaagctcttcgaggtcgcaaggtgtggttcaactcgtacctcaagagctgctgcgcggtgatggtgagggtttgcaaggagctatga

SEQ ID NO: 30685 - DNA, 434 bp, Oryza sativa
  Clone ID: PAT_MRT4530_35065C.1
tttttgggtttttttttttttttttttttttttttttttttttttttttcaaaaactaggcctcggttttgctaatattcaaaactcacaaccgggggaagaaaccaaactcaagggtaggggaaaaccaggaccacaacggggatagaccactagttccggggggaagaattccaaagaaacccaaagggaaaaggcccaacccaaagggaacagaggatctacatatcctaagctccaaaatccagtctacgacgggattcagcctcaggaggtccagccaaatcatttttttaggctcactgcatttggatcttttccaagattttttaacaaagcatccatcacaggtttaacccgcagggggattgggaagcaacaaaattcccaccagcaatcggatggaccacttgacccgggcaactaggcctcct

SEQ ID NO: 30686 - DNA, 454 bp, Oryza sativa
  unsure (1)..(454): unsure at all n locations
  Clone ID: PAT_MRT4530_35066C.1
gtgtaacattttgtttgattgatacaagcacactaagtctaggngcgcgccgntggcgctttgactggacacaactagtgctacaaagtattataaagtgtcaataacacaacatactcatacccttattgaaattaccacttctattatcacaggacattttttttagatcgtattgcctaacacaaacggatgttacaaaaatctggaacttttgtaacatacagcatctcataaagttttacccctagctgtatttcaaaacaaccagtgcgaccatgtactctgtaaaagtggaaatatgttatcaataaagatagatttcaaagatactcgattcgtttctgattgacttgcattcctacttaactcgtggtgaccactataccctacaaacggagcaatccacttaagtcggcaacgacttagggcggtgcaacatgctcacgcttac

SEQ ID NO: 30687 - DNA, 494 bp, Oryza sativa
  unsure (1)..(494): unsure at all n locations
  Clone ID: PAT_MRT4530_35067C.1
gtgctctttcgcgccccgcgccggcggggcatgaggcgaccgaatccgaagagccatggcgacatccctactggcaggaggccgggctggtgccggcactgctcctgacgcgggccaggagagccccgtcagggggaacaagagccgctcgcctgggagctcgaggacgcgcgcggacgggaccggacggcgacgacgacattcncgtggntttcctccgaggatgcggcgagtcgacgggcgccgcggaggggaggcggcatgccgcacgccgcaggggtacattaactacgagcgcgctgggcgcgacaccacgccgagctccgttcggagcgcctgctactactgctgtcgccctgccggtgaaggcaggcccgactcccgtggctgctccgccgtcagccgctatcatgactatcacactttcgacgacggccctggacacgtcctccatgggataacaaactgcgctgccggctgataaggtacagcct

SEQ ID NO: 30688 - DNA, 1124 bp, Oryza sativa
  Clone ID: PAT_MRT4530_35068C.1
tcaccgaaaccgccatgtaggttcatcgcttcccagccgcagttttgaccgggaggattccatctcattgatctcctgtgcacatcgaaactgtagccacaattgtgtcaactcctttgctgtcttctctatttcgtggctagcataaccgaggcgttgtcggaaatcgcggccacgggagaagccacaggccggctcctccacagggcacctgaacattcccagcgacccagctccgcgctcacgaggatatccaccccaaaaaacgcccaaaaccgcgagccgcgtgtgcgctcgaaaccatctccgccaccgccaccgcgacagaggcacgggtcgccacgtacgttcgcagctcgcgctgccggattcctgccgcgtcatcgtgcagcggctgccacctgagcagtgccaccaccacggccgtttccgtacgcctctgcctctcaccgcgcccgctataagaaaagtgcccaaacacctttccccttcttcatcgattgcttcttgctcgttcacagcaggcacaaacagatcgggcaccggagaggttgggaggagagcttgggttggcctgacgaaatggcggaggagaagagcacgatgcagtcgatgagggagtgggtcgtcgaccacaagctccgggccgtcgggacgctgtggctgactggggtggcgagctcgatcgcgtacaactggtcgaggcccggcatgaagaccagcgtcaagatcatccacgccaggttgcatgctcaggccctcacactggctgcattggctggctctgcactggtggagtactacgaccatcggtcaggttcaggatcaagagttcatcagtatgcgaagcagttcatcacacctgagagcaacccacaaaaagaatagaggacgttgtgtacttaatcaacgccagatgtatcgatatgatttcctacgcacaaattctgtggcgtctgaatctcctacgtactgtctgttttcccttctctgcctgctttctgtataagctaagctgctgaactaacattcagggtttcagacgctgcgatatcgatgatgaatgataatgaactggcatcagctgtgtaatgtaatacagtaatacatttgttgtttcttgt

SEQ ID NO: 30689 - DNA, 121 bp, Oryza sativa
  Clone ID: PAT_MRT4530_35069C.1
tcggcacgaggatctacatagatgcaagtaactctgaccaccttgaccttgcttataggagttgctgagacaaaatgatcaaatgctgcggtacactgaactatggttgctaccctaatga

SEQ ID NO: 30690 - DNA, 1479 bp, Oryza sativa
  Clone ID: PAT_MRT4530_3506C.1
agcatacaacacgatgtaccaacgggtaatatctttcatcatttgttttttcgactgcttcggaaacagataccactactttccaggttataaagatccttgtcatgggtaaaagagagttgcataacaggctaacagcgagcggtaaaagatggggagaccaggggaagagagagagagagagacagaggcaagccgggggaaggtctgttcttcacaggacccttcttcattcatcttctcagtcatctcttcctaccataggcccaaattgctcttgctgcactgctaatgtccagcttctgacggcgcagaccaattgggggcaacagcgccacctctgagctcctccatccactcctggaagaacttcggatcaaaaccaccctcctcatcctcctctcgatcacaattcgcttcaactcctccttcctccatcatagaaatcgatgcctctgcagccgctgtcgccacacccttgttcggctcggcgatcgccggcgtgtggccttcgaagagagcgagatggccgaacagcttgtccttgcgggagaaggtggtgccgcaggagcagcgccactgcgcctcctcgccgcagtggcggaggtggctccggaggtcggcgaggacggcgaagcgcttcttgccgccgcagcgctcgcaggcgtagagcttggggcagtggctccgccggaagtggttgcgcgcgcacacggccgacttgagcggccggaagcggcggtgcgcgcggttccggttgcagccggcgtaggggcacgagaaccgcacctcccggccggcaggcggcttcggctggccgggcctggagagcgcgtccagggtcttgaagcggtcgccgtgggcgcgcatgtgcatccggaggttggcgtcgcggcggaaccccttgccgcagatgtcgcagaagtggacgtgctccgcgagaagctcggaggcgtcgagctcgacgacgtcgtagtcgccgtcgcccttggctgcttcttgcgggggttcctgaggcacggagaccaccacgggggggagctcctggacggtagtagccggaggcggaggtggagccgggagggaggcgacggtggaagagaggagggaggcggcgttgaggacgacgaggtgggcagcggaggagatctcggaggagacggagtggatgtcggaggaagagaggggcccggattctccggatatagatgcggcgatgcggcggcggacggcggccatgcggtcgccgagagcaaccaaccggaggagcgcgtcgcgggcatccccgtctcctcctccggctccggcgccgccggccccgccgacgagggcgccagagggatcccctacttccatggccagcgtcggcgccgtggcagccgttggtggcgcgacggagccgccgccaccgccgccggcgagtaggtgggtggtggacttcatttcccacccccaccttttttcctgcagcccggggat

SEQ ID NO: 30691 - DNA, 516 bp, Oryza sativa
  Clone ID: PAT_MRT4530_35070C.1
atgtctccgctcgccgccatcggccacgtccacgccaacaccatttcctcctccccctctccttcttccgtggcgccactctccctcctccaccggcatcctttccccccaccgcgagcacctctcccctcatctctccctaatggatatggtggtggcgacgaagagaacgagctcgatggcattgggtggcgatggcagcgcgacaaggaatctagtgccgttgatgggtcaaggacggctccaaggtggcttggagcgggagacgacgacgagcggtggcacggatcggggaacaatgatggacttgatggcttagagtggggacaacgacaggctcggcgccgtggaactgggacaacaattaggttagacgtcagatccgccgcctcctcttcctccgccactgcctcgcatggggtgtgggggcattgtacgaggcccatcctcactcaacacgccgttcgacccgtgactcgttccgcgctaacaaaggcctaccaaatcctaatataa

SEQ ID NO: 30692 - DNA, 2200 bp, Oryza sativa
  Clone ID: PAT_MRT4530_35071C.1
ctctagcctgcaggttctccaagttcttaccagccttcaacttttcggccctttcaagaacaagctgatcgctatcacttgcccttctcttactcttccttgatggagagattactgcctcagggatagcagagagctttgccacaagactttcctgaatctgggccttgtcaaccattatagtctcctcatctaaaccatcaaattcttcatcagaaacagtcaagccatcagattcaggtatcagatttagctgagaagagggagcagaaggaccacccctctcactaaattgaccaccagaacccatcttagagttgttacctgaatcaaataaaccagcccccttccccagatcctgattcacattcccctcttttttcttttccaaatccccatcatccaaattctccatctccataggcacaggctccttaggcccattttcaggttctactctaaaagacagctcatacaagtgatcaccaataaccacatccaccacatcaggaatcagagatgggtcaagaaccaaaacttgtaagcgagctatatcataccttctagtaaatatcatatcaacagctttagtaattccaaggatggaaccaacagcccaaatgattaaatactctctcaattcagaaggaagacctttgcactgtacccacacttttggcatcacatatttcacctcattcccaactcccctttccacaatctccatttcagcctcaccaactttagtgtgtacattgccccattcgaccatacgacttaattcagctgcagaaggaaaaatagtatgaaaagtcccatcaccattatcatgcaccacccacttccatctaccaggtattaacctctccaactcagaaataatagaactcacagacatctgtcctttagtgaccttaaccaaagccgctttaggctcatgcttaaccctcattccagctgaaagaggtatatggaagaaacccaaaccatctctagtataaccacgtaactccccttgttgttccaaactatgcaagttaccatgcaaaagagaaagcacattacctcctgtaccagaagcaacaggaccggccgtactatcaccttttccatcggccaaagcaataatagctccactaccagcatcatccttccccttagctgaagcaccaatgggttgccctttcgcatcaacagacacagcactcccaccagtcgcctgtactgaagcacttcctgttgcaccaccgccagaaggcaacaacggtccagctgaagtcccagctgcaggtggccctgctccaccaagcacaggaaaagcggcatcagtcgcaacacccccaccagccaccggaaaggcgccaacaacagcagctccaccagcgggcggaaaggcagtagaagctccaccttgtattgtaggaccgtcagtcacaggaccatgcccaacctgtgcaacaggaccagcggcaacaggagcacccaccggcggaaacccagcaagcggtttgaagatctcctgccctgcaacagcaccatgcccactagcggtaccgaagggttgaaaccctaaattagggttaaagccaacgtgactaccggcaaaattcccaccactaggtcctgcattcaaaccgaacccgttgttccatccatgtccattaccggcacttccaaaccaccttccaccttgaaaaaaatcctggcggccgccgcggccatcgaaccaacctcttccacgtccgcgaccccttccaccctgatgatttccgccgccaaaaccagggtgaaaccctcgagcagaaaattttccatagccccccacagcaggacgaccctgacggttgtttctctccatcggcagacgagcgacggcggcgtacgagaagggtagcgaccttacagattgatcattcaccctaactttgcgccgtatcgtaccagtttttgcgaagagagaaaccaagccagccgtgggcctgtatggtatgttgggctttggaaaagcaaggccctttggacggtttcggcctcgatgccgaagctgccgccacctcgacctcacgagccagccggagccgagcttgcaaatcacgttcttccgtggatccatcagccaaagccggagatgatcgaccggaagatctcttcgaactggctgccgcccaagccggagccaacgtgagccgacggcggccat

SEQ ID NO: 30693 - DNA, 963 bp, Oryza sativa
  Clone ID: PAT_MRT4530_35072C.1
atgggccacccatgccttcggaccggcacggcacggcccgacagctggtgggccgtgcctggacgggaggtgcagcccatcggccggcacggcctggcacgaagtgcctatcggcaaccgccccgagggggggggggtgaggggcaccgggaggagaggaggccggcgagcctaggagggagagggcgagagaagcggccggaggaggtatggacagtgccggacgactgctcgacggactgcaggaacctgagcaccttcttccagctgccgctgcacctctccaggagctccccgcgcgtggcgggccagggcccatggccgcgagtgccgcaccgggcagagcacgagacatgtggcctcaagcctcgcgaggttcccggcggcgaggcggccggaggctatttctcgatggctgggtactccagaggacaccgtcttggggtcacaggtaggcgctcgttgctgcccaactgcagggagccccggctcgccacgctccgaccatgcctccacatcgccaccgcagcgttcgatttcggccgcaccgccctcgacaggaataagttcacctactgtccacggtcggaggagggagccgcgggagcacggtcgacggcgtcgaggtcggagaggagggagacgagcagcatggtcgacggcaccgaggtcggtgctgccctccccgtggtccggcggcggcggatctggcctccccgcggcccggtagtggcggatctggcctccccacggccgggcggcggcggttccggcctccccgaggcccggcggcggtggatccggcctccccgtgcacccgagctcctctcgcggccacgcccgagagccgccgcccactcccgggtgccaccgcccacgcccgagctcgccgccgccttcgccgcgcactccgtggagggagagggagttggaagaggaagagaaggatgtttccttcaacct

SEQ ID NO: 30694 - DNA, 320 bp, Oryza sativa
  Clone ID: PAT_MRT4530_35073C.1
tttactcacggagctatgggaatggacgcggcggtagtaaggcagaactggaggcattaaatccgatcgtcgaagcccgtggtgatggccaaggactgcacatggcctgcatgatttcagggcctgatctaagtgaaggggatgaacactgggatgaacctgactagcggcagcacggacgatcggacgtgcatacaggggaggcttgataccgttcaccgaacctgtctagccacgcggctcgctatagtaacaaacgaactggatcgctacatgcttatgcgcaggatgatacacctgtacgccgatacactatcggg

SEQ ID NO: 30695 - DNA, 389 bp, Oryza sativa
  Clone ID: PAT_MRT4530_35074C.1
gcagttcttaaaattattattgttggtcttgaggccttttaaatttgtacatgatggttgggatcttagctggttcatcatctggtgtagagaaaacaccatctaataatatatactctcgacctgcaggtagtttaccataagtggcttcatatgcgtcttgaagtaatttgttcttgttgccctctactaaggctttgatggtttcgtttggtgcaaagtcgagataaagtactttaaagttatcggtattagcaccggtagaagataaagcttcacatttaacaccgtgatgaaatttagggaagctttgtacgaattgttccactgtgagatcacccacatcgacaactactttgtcccaaatagtataacccagtgggatagga

SEQ ID NO: 30696 - DNA, 348 bp, Oryza sativa
  Clone ID: PAT_MRT4530_35075C.1
atggagtgtaagaggcaacacaatcaacatggtacactcaaaatgtttctcaaggaggagaaccttgatatggaaggattcatatggaagtcaatgctaaggcatgtcacgagggccttcggtcgagcctgtcgaaacacctcgtcaagctcttggcggagcatcaagagggcgaagcacctactagagcgaagaccgaagccttggagcaatattgctaggcgaagcaccaagggtgaagcgaaggatcctcgaccaaagggagatgaagagaaaggcctttgccagcaggcgaggcggaccaagccccaagtgggtcaacccctcaagaaggcccacttggaatag

SEQ ID NO: 30697 - DNA, 253 bp, Oryza sativa
  unsure (1)..(253): unsure at all n locations
  Clone ID: PAT_MRT4530_35076C.1
aggaatccagctatgtattatttcaacagtagtncttatcaaacattgagcaatgacatcatagcaatgtatgctgcacttgcacaagagtaagagacaacaggaggagaggacctaagggccaaggcagcgccgccgggagtgttttgtatgccgatcagacgtcaagggttactgcgatcatatcgaactcgcaggtgatcctcttgatctcattgctaactctaatttctttacggttttaccttattcc

SEQ ID NO: 30698 - DNA, 711 bp, Oryza sativa
  unsure (1)..(711): unsure at all n locations
  Clone ID: PAT_MRT4530_35077C.1
gcgaatccaaaataatggatccaatccccaaaatttccccaattggatttcaccaacaaaaaatccggggatctaactggtcctgggattaactccgccaatttccaaccctatactttgatctaaacaaaccccaatttttcttggcggggggtaaaggtttaaaaaaaaggggaaaaccacccccggggttttggtttcctgccccaaccccaagaacctcttccgaattcctgcaacccgggggatcccctatttctaaaacggcccccaccgcggtgggaacccccccttttgttccccttaatgagggttaatttccaacttggcgttaccatggtccaagctgtttcccgtgttaaattgttacccccnccaattcccccccncctttnaaccggaaccntaaatttttaacccngggtccnnatgnatnaaccaaccccattaaattgctttcccccntgcccctttncnttcgggaanctntcttcccctccttantaaaatcgcccccccccnggaaaaggggtttcttttgggcccctnccnctccccccccntnaacccnnccccgtcttcggtcngggaaagtttntcccccaagggggttnnntttcccaanctggganncccgnaaaantttncnagcncaaggcgaacttaangccttntgntttcntngccccctanaatttaaatncctcttct

SEQ ID NO: 30699 - DNA, 141 bp, Oryza sativa
  Clone ID: PAT_MRT4530_35078C.1
atggatgcaaggggtagcaaggttgcaaattccacacgccgctgctatagtgcgcgatccaattttgaaaacttggatggcatggccagaggggatgaggattcactggtcaaggcaatgaagagggcacaatatggatga

SEQ ID NO: 30700 - DNA, 1071 bp, Oryza sativa
  Clone ID: PAT_MRT4530_35079C.1
ctaagctcgtggacttttccttctctcgtcaacagcagcgcacctcacctccgccgctcgcctcgcctcgcctcgcctcgccttcctcctcccatcctcaccccgttgaatttctcccacctccgatttcttcttcctcgttgaaccattccccacccttcttctcctcctcatcctcctctccgcgccccgcctctgcggcgaggtaggtgttcgatcggtcggatggacgcgtcggatggccgcccgtcgccgcggagccggcagctgcagggcccgcgcccgccgcggctggccgtcagcaaggactcccacaaggtcaggaagccgcccgtcgtgccgcagccgcgcgggggcggcggggtggtggctgggccgtcgcggccgcagcagcagcagcagccgcgggcgccggtcatcatctacgacgcctcgccgaaggttattcacaccaggcccagcgagttcatggcgctcgtccagcgcctcactggccctggctccgccgccgtggcggcggtggctgctcccgtggccgctggcttccacaccgaggcgtcgtcgtcgtcgtccgcctccgcctccgcgctgccgccgcagttccagctgccgcaggagttcatgctctccccgaccgccgcgctctcccccgccgcgaggtacgccgccatcgagaggtccgtacggccgcttccccccaccaccgcgcactactacaccgccgacgccgacgaccccatcctgctcgacgtcgacggcgacgccgccgcctttgcggcggccctcggccccgcccgcccgagcatcctctccccggtgccctccgcgctgccgcccgcggcgtcgtcggggctcttctccccgctcgaccaggcctccctctcctggctcagcgacctcagccccttcctccactccgccggcgccgccgccgcacccccgccgccgttcgcgccgagcccccgcagcctgctgctgtccacgcccaccatgccgtcgccggcgaccttctccgtcatggaattcttcagcagcaacttcccggacccggagcccttcagacttggtcat

SEQ ID NO: 30701 - DNA, 2382 bp, Oryza sativa
  Clone ID: PAT_MRT4530_3507C.1
atggcgtctatttcggatagcgagacgacgaaccatgggagcatatgggatttggatcagaaccttgatcagcccatggatgaggaggctagccggctcaagaacatgtacacagagaagaagttctcgtcgattttgttattacggctcgcgtttcagagccttggtgttgtcttcggtgacttaggtacatctccattatatgtcttctacaatatattccctcatggggtcgatgatgatgaggatgttattggggctctttccttgatcatttacaccctcaccctcattcctctgatgaagtatgtttttgttgtcttgcgggcaaatgataatggccaaggtggcacattcgctctctattctttactttgccggcatgcaaaggtcagcactattcccaaccaacataagacagatgaagaattaacaacatatagtcggcaaacttatgaagagaattcacttgcagcaaaaataaagagatggctagagggacatgtgtataaaaagaactgtcttcttattctagttctcattggtacctgcacagccattggagatgggatccttactcctgctatatcagttctctctgcatcaggtggaataagagttcagaatcagaagatgagtacagatgtggttgtagtcgttgctgtgatcatactaattggcttattcagcatgcaacactatggtacagataaagttggatggctctttgcacctatagtgctcctttggtttatcctaattgggactattggggcactgaacatacacaagtacaacagttcagtcctaaaagcatataatccagtctatatctatcggtatttccgacgagggaagtctgagagctggacctcccttggaggaatcatgcttagcatcacagggactgaagcattatatgctgacttatgtcatttccctgtcttggccattcagattgctttcacgttagtggtgttcccttgccttctcctagcatacaccggacaggctgcgtacattattagcaacaaggaccatgtagttgatgccttttatcgctccattccagataccatatactggccagtattcatcattgcaactcttgcagcaatagttgcaagtcaagccactatatctgctacatactcgataataaagcaagctctcgcactgggctgttttcctcgagtcagtgtcgtccacacctcaaagaaatttctcgggcagatttacatccctgacatcaactgggtacttatgattctttgcattgcagtaacagctggattcaaaaaccaaagtcagataggaaatgcatatggaactgcagtggtgatagttatgctggtcacgacatttctcatggtcccaataatgctgttagtatggaaaagccactggatccttgttgtcatttttatcgtgctctcgttgatggtggagctcccatacttcacagcctgcattaacaaggttgaccaaggtggttgggttccacttgttgttgcaactacctgcttcatcatcatgtatgtgtggcatttctgcaccgtgaagcggtatgaatttgagatgcacagcaaggtttccatggcctggattttaggactcggaccaagcctcggcctcgtcagggtgcctgggataggcttcgtgtacaccgagctggcaagtggagtgcctcatatcttctcccatttcatcaccaacctccctgccatccactcggtcgtcgtcttcgtttgtgtcaagtacctcccagtatatacagtcccaaccgaagaaaggttcatcgtgaagaggatcgggccaaagaacttccacatgttccgttgtgtcgcgaggtacgggtacaaggacatccacaagagagatgacgacttcgagaagatgctccttgacaggctcttgctcttcgtcaggctggagagcatgatggatgactattcggactccgaagacttcaccatgatggaggagaagacccagggatcaagcaatgcgctgctgctaactggaaaggctgggagcaacacaatgtgctccactggtgacctgagctactcatcacaggactccattgttccagccaagtcacccataagagggaacagcctgacaaggtactcgagccagacgttcggcgatgaactggagttcctgaacctggagttcctgaaccggtgcaaggacgctggtgtcgtgcacatcctggggaacactgtggttcacgcgcgccctgattcagggatcatcaagaaggttgctgtgaattatgtgtttgcattcctcaggaagatctgcagggagaacagtgtgatattcaatgttccccatgaaagtcttctcaatgtaggccagatatactatatatga

SEQ ID NO: 30702 - DNA, 153 bp, Oryza sativa
  Clone ID: PAT_MRT4530_35080C.1
atggagggcgtgacagtggcggcctctcgtgggcgctcgcatcgcaaccagacggatgccgcctgctgcctcggagtacgagcggcgcgagcgttttcccagctcagggcgtacaggcatgggcggtatagagaggttcagaacttcagatag

SEQ ID NO: 30703 - DNA, 285 bp, Oryza sativa
  Clone ID: PAT_MRT4530_35081C.1
atgagccgatcggggcagcctccggatctgaagaagtacatggacaagaagctccaaactttgatggtgtactcattcactctcttttcaattttgccagtcaagctgaatgcgaaccgtgttgtcattggcactcttcgaggattcgatcagtttatgaatttggtcgtggacaacacagtggaggtcaatggaaacgagaagaatgacatagggatggtggttatcaggggaaacagtgttgtgatgattgaagccctcgaacctgttcccaagccgcagtga

SEQ ID NO: 30704 - DNA, 818 bp, Oryza sativa
  Clone ID: PAT_MRT4530_35082C.1
tagaaatagtactactacgcaagtaacgtagatcagcacgtagatagcttgcgaagacgttctgaaagagtgcagagagtttttgctagctctcggtggtgatatccatggctaacgcggggctgaagccggtggccggccttctcctggttctcaacttctgcatgtacgtcatcgtggcggcggtcggcggctgggccatcaaccacgccatccacaccggctacttcatcggttccgggatggcgctgccggcgaacttctccccgatctacttcccgatggggaacgcggcgaccgggttcttcgtcatcttcgcggtgatcgccggagtcgtcggcgccgcggcggcgctcgctgggttccaccacgtccgcgcgtggagccacgagagcttgccggcggcggcctcctccgggttcatcgcatggacgctcaccctgctcgccatgggattggccgtcaaggagattgacctgcacggcaggaacgccagattgaaaaccatggagtccttcaccatcatactctcggcaacacagctgttttatctgctcgccattcacggcgggagtccgaatggctatctccgcacgacaatcgtttatcccgtgaataataggggactgctatatgacgggataccgtttggacggaaccaaatgataccttccatatatcgtgatgatacctatgaggtgtcgaggatgatacatgtgaggtatctgtatattgacgataggaacccaaatgatacatggtatcgtgatgatacctatgaggtatcaatgattgatgatgattgtaggtatcagtga

SEQ ID NO: 30705 - DNA, 312 bp, Oryza sativa
  Clone ID: PAT_MRT4530_35083C.1
atggcgagtggtgttgcggcgccggcgccgagcgtgttcgaggcggcgcggccggcgttggaaaacggtggcggcggtggaggcgcgccccccccggcgagggcggacgcgagcttcgacaccaacatggtgatcatcctggcggcgctcttcttcgcgctgctgttcgccatcgggctcaactcgctggcgcggtgcgcgctccggtgcggggccggggcgcggccgccgcaggcggcggcggcggcggaggaggaggaggagcggcggcggccggggtggggtgcggcggcatcaagaagcgcgcgctga

SEQ ID NO: 30706 - DNA, 444 bp, Oryza sativa
  Clone ID: PAT_MRT4530_35084C.1
atggagcggtcgcgcggccggttggcgcgcacggtggcgggcgagcgcgggcggcgggcgcacgaggcggcggtgggcggtcggcacgcgagcggcggcgacggcagcgggcgcgcgagggcgggcgatgagcggtcggggcgggaggtgggctgcggcgcgagcggcggcggcgggcgcggctgggtggcgagtccggcggcggcagcggcggagccgtcgaggggcagggcagacagggaaagcggcgacgacggtggtggcggcggcataagtgacggtggcggccgtcgctcggccagccgcgcccgtagccgacaggaagcacccatccgcgcccgtcaccgctcgtcgctcgccgccgaccagttggccctccctgctgcgcccaccgccgaccggaaccgcgcccgccgccgcttgccccaccgcgcccgttgttga

SEQ ID NO: 30707 - DNA, 359 bp, Oryza sativa
  Clone ID: PAT_MRT4530_35085C.1
ctattataaacttcaaagttctcactgctgcgcggtgtgctttgaagactcgagttgggactaccctacttcgagggtacaccgttcttgagtttgagatgggcaaggaggttgtgaacgtattctgaaccttacctgagatagtgaacggaatattcaggggaaaggtagttttgggctgcatatacagtttgagaatttcctacaggctcttgcgaaaaccacaacattcattagtgaaaaattgattgtagctttttatctatattatagatcgaacaattgattctatggttcatttatacgaatgaatgactatagattttgttaacatgagcattggattagacctttaaagt

SEQ ID NO: 30708 - DNA, 3667 bp, Oryza sativa
  Clone ID: PAT_MRT4530_35086C.1
atgccacgccctctcgcgccggcgccgccgctacagaccatcatgctcgacgagctgaaggtgtttgcatacctccatcaggaggaaaacatggatgcgtgcgtgtggcatctcgacaccgatgcgacgaatcacatgacgggagtgcgctccgcgttcgtggagctcgacctggcggtgcgtggttccgtccgtttcggcgacggctccgttgtcggcatcgaaggcgaagaagctgctcgccaagacacggcctggttgtggcacgctcgtttcggccaccttcattttgatgctctgcgcaagctcgctgacaaggacatggtgcgcgggctgccccgcatcgagcacgttgagcaactgtgcgacggctgcatcatctccaagcaccggcgttcgccgttcccaacgcgcgcggtctaccgtgcgactgatcgacttgatctggtccatggggatctctgcggtccaatctcgccggcgacgcccggcggcaagagttacttcctcctgctggtggatgaccacagccgctacatgtggctggtcctgctcgcgaggaagggggacgcggtgaaggcgatcatgcatttccaggcatcagctgaggcagaatcagaccggaagctgcatcatggtgttggcaggcacttctccgccccgtactcgccccagcaaaacggggtggtggagcgcaggaaccagacgatcctcgccaccgcttgcagccttctcaaggcgaaggggatgccggcgcggttttggggggaggcggtcaccatggccgtatttctcctaaatcgcgccccgacgaaaagcttggagaaccgaactccctacgaagcctggttcggcaagaagccagcggtgggacatctgcgcacattcggctgcctggcgtacgtcaagaacatgcgcccacacctctccaagcttgaagatcgcagcacgcccatggtgttcatagggtatgcagcgggcaccaaggggtacaaggtggtcgagccggtgaccgggcgcgtgcaggtgccgcgccatgttaccttcgccgaaagcgcgacatgggagtatggagctgattcggcagagtccggcattgtacattcggagttttacatcgagtgtgggctgacatagatgcgcggtggtgatatctgcgtgcagggggaaaacctttcgccgatcccgcgacgggttgcatcgaccatgccgctggagccgcgcgcgccgtcaccaaagttggtacaacgaacgtcgttgcatgggacaagtacggtgttatttttgcgtcggtctatgggagaggagcacttagatgctgctcccgaagactgaagagcggaggtatcgccccctaggggatctcttgggcgacgcggcggcgccgggcctcgccgagcgtgcactcgctccagaacagttgtatcttcaggaggctgaggaaccggcttcatttaacgaggccgaacaacaccagcgctggcgtagcaccatgttggaggagatcgcaaccattgaagaaaacaagacgtggcgactggtcgacctccctcgtggacaccatgccattggactgaagtgggtcttcaaggtgaaaaaggatgcccgaggtgaggtgaccaagttcaaggcgcgtttggtggcgaaaggatatgtgcagcagcctggggtggacttcaacgaggtgttcgctccgatggcaaggctggaatcagtccgcatgctgctcgctttagctgcacaggccgggtggtttgtccatcacatggatgtgaagtccgcttttctcaatggggagctcactgaggaggtgtatgttgtgcaaccgcctggcttcgtggtcgaggggcatgaacatcaagtgctgaagctggacaaggcgctctatggacttcgccaagccccccgagtgtggaatgccaagctggacacaagcctaacgtcacttggtttcaggcgctgtgactttgagcacgccgtgtatgctcaaggtcagggaacacaccacttgcttgttggtgtttatgtggatgatctaatcattacaggaagtgatgctgtggagattgatcgattcaaggcggagatgatgtctcttttcaggatgagcgatcttggtctcctctgcttctacctggggattgaggtcaaacaggtggcgggcagcacacggctgactcagtcggccttcgcgcgtcgtattttggagaaggcagggatgcaggactgcaatgcctgtgtgacgccaatggagcagcggctcaagctcagcaaacatagtgatgcaccactggtggattctactggctatcgcagcatcgtcggaagtttgcggtacttggttcacacaagactggacatcgcgttcgcggtgggttatgtcagtcgcttcatggaggcgcccactgccgagcatgaggcagcggtgaagcggatactaagatacattgctggcacaattgattacgggatcatctaccggagatcggagacgccggctactctagttgggttttctgatgcagatatggccggtgatgtggatacacgaaaaagaaccagcggtgtcatgttcttccttggatccagtccgttgctgggagaaattaatcaagctcaaccagatgttttcaagctgatggttgacaacaagtcggcgattgcattgagcaaaaatccgcgcagcgaagccgagccgagccgaggtctacacgctgtcacgcgcacgtgctcatcgcgaggccacccgctccgccgcctccatttcgtcgccgtcgccgttgccgtcgccgccgcggcggcgtctctctcctccgcgtgggctgctctgcttcgtttccgcggcggaggcggggcggggctgggcctgtcggccagggacagggagccagggaggttgccgctcatggagatggaagatagcggtcgcggcgtcgtgggcgccgggaagcgcggcgtcgcggagaccttctccaggctccgggagcagggcaagactgcattcattccattcatcaccgccagtgaccctgacttggcaaccacatcgaaagcgttgaagatccttgattcctgtggttcagatgtgattgagctgggtgtaccttactcggatccgttggctgatgggccggttattcaggctgcagcaacgcgtgctcttaagaaaggcgctacatttgattccgtcatagctatgctcaagggggttatacctgagttgtcttgtccaatagttatcttcacatactacaacccaattttaaagcgcggagtgagtaacttcatggctatcattaaacaagccggcgtacatggtcttgtagtacctgatcttcctttggaagagacagcgctgttgaggaatgaggctgtcatgcatggcatagagctggtaagttctgttggagttacaggtgcacgctcaaatgtaaatttgcgtgttgagtaccttcttcaggagatcaagaaggttacagacaaacctgttgctgttggctttggcatatcgactccagagcatgtaaagcagattgcaggctggggagcagatggtgtgatcatcggcagcgctattgttagacagttaggagaggctgcttcacctgaagaagggttgaaaagagtagaagagtatgccaagaacatgaaggctgctatgccttga

SEQ ID NO: 30709 - DNA, 252 bp, Oryza sativa
  Clone ID: PAT_MRT4530_35087C.1
ctactggcattgcgagggtggcgtggtgagctttgtgtgggcactcgaggaggcacgctggcccggcttcctgactcctgggtgctgcggccattggaggaggacggagtacaccaccacttgcgtggctgcatccgggaggaggaggaggctggaggcgccactcgtcttcctgaccagttcttgggttgagattgaggaggaagagtagaggagaggggtgggtctcactgttcctctttccccggtcat

SEQ ID NO: 30710 - DNA, 2709 bp, Oryza sativa
  Clone ID: PAT_MRT4530_35088C.1
atgggacatctgcgcacattcgtctgcctggcgtacgtcaagaacgtgcgcccacacctctccaagcttgaagatcgcagcacgcccatggtgttcatagggtatgcagcgggcaccaaggcgtacaaggtgttcgaccctgtgaccaggcgcatgcaggtgtcacgcgatgtcatcttcgacgaaggcgcgagctgggactggggcgctaaagtgaccgagtctggccttgaacagacggagttttccgtcgagtatgtgctgacacaggtgagcggtggtggtcgcggcgctcaggaggaaaactcatcgtcaagctcacgacgcgctgcatcgaccatgcctgaggagccgcgcacgccatcgccaagctcgggaccacgagcgtctttgcatgggacaagtccagtgttcgtttcgcctccgtcggggggagacgagcaccttgatgctgatcacgatgactgccccgccaaggaggctgaggaaccagcttcgtttaacgaggccgaacaacaccagcgctggcgtagcgccatgttggaggagattgcagccattgaagaaaacaagacgtggcgactggccgacctccctcgtggacaccatgccattggactaaagtgggtcttcaaggtgaaaaaggatgcccgaggtgaggtgaccaagttcaaggcgcgtttggtggcgaaaggatatgtgcagcagcccggggtggacttcgacgaggtgttcgctccggtggcaaggctggaatcagtccgcatgctgctcgctttagctacacaggccaggtggtctgtccatcacatggacgtgaagtccgcttttctcaatggggagctcactgaggaggtgcgctgtgactttgagcacgccgtgtatgctcgaggtgagggaacacaccgcttgcttgttggtgtttatgtggatgatcttatcattacaggaagtgatgctgtggagattgatcgattcaaggcggagatgaagtcccttttcaggatgagcgatcttggtctcctctgcttctacctggggattgaggtcgaacaggtggcgggcagcacacggatgactcagtcggccttcgcgcgtcgtattttggagaaggcagggatgcaggactgcaatgcctgtgcgacgccaatggagcagcggctcaagctcagcaatcacagtgatgcaccaccagtggattctactggctatcgcagcatcgtcggaagtttgcggtacttggttcacacaagatcggacatcgcgttcgcggtgggttatgtcagtcgcttcatggaggcacccactgccgagcatgaggcagcggtgaagcggatactgagatacattgctggcacaattgattacgggatcatctaccagagatcggagacgccggctactctagttgggttttttgatgcagatatggccggtgacgtggatacgcgcaaaagcacgagcggtgtcatgttcttccttggatccaatccggtgagttggcaatcccagaagcaaaaggttgtcgctctttcatcttgcgaggcagagtatattgcggcgaggacagcagcatgtcagggcgtctggatggcgcagttgctgggagaaattaaccaagctcagccagatgttttcaagttgatggttgacaacaagtcggcgattgcattgagcaaaaatccggtgtttcatgactgcagcaaacacatagctactcggtatcattatatccgggagtgtgtggaagaagggcgagttcagttggaattcactgggactgcagatcaagtcgctgatatactgacgaagtcccttggtcgagtgcggtttgaggagctacgctcgcggatcggggtttcggaagcgccccgcccgctcccggtcgacaggatgatcgtgtctgagagcacccacaatggtaaaactatctccaggcgagcggtgggcggtggctcgtcgtcaagagcggccgcgcggccggtcggcgcgcacggcggcgggcgagcgtgggcggcgggcgcgcgagggcgggcggtgggtggtgggcgcgcgagggtggacgacgcgcgatactatgaggtgggcggccgcggacagtggcgcgcaagactgggaggtgggcggccgtggacggcggcgcgcgagcacgggcggtgggcggcgggcgcgcgaggtcgatcgactattgcggttggttggctccggtcatcaacgggcgcggtggggcaagcggcggcgggcgcggttccggtcggcggtgggcgcagcagggagggccaactggtcggcggcgagcgacgagcggtgacgggcgcggatgggtgcttcctgtcggctacgggcgcggctggccgagcgacggcctgcgcgtctccggccgacggcgggcacaacactggttggcagcgagtggcaacgggtgtggctgggtggccctggtcggcggcgggtggcgctctaggcggcggcggggagggaccgccaccgtcacttatgccgccgccaccaccgtcgtcgccgctttccctgtctgccctgcccctcgacggctccgccgctgccgccgccggacctagagaaagggaaggaaatgggaggagcggctacagcgaggagttggcgtcgccgccagtgactcgccacccagccgcgcccgccgccgccgctcgcgccgcagcccacctcccgcccctgcacgccccgtga

SEQ ID NO: 30711 - DNA, 363 bp, Oryza sativa
  Clone ID: PAT_MRT4530_35089C.1
atgccctcaagaggggagacgctcgaaagcatcgtcgttgctggcccggccaaggccgtgctagtcttagccttaggtagattacgcatgttccctgagttcgatatcctttttggggtcacccaaagggctgccaccgtcgtcgacgtgctggccggccgctgccatgagctgaggaatgggttccggcctccaacgccggataggccagatccagactgggaggcaccagatctggtgaggaggctgtcagatttggcgtcgccgcgagcccgccccgttcccgctgcctgctccgcctcagtcatgtcgtcgccgccaccagtgctgcttctgccctgtccgccccatcactaccgctag

SEQ ID NO: 30712 - DNA, 867 bp, Oryza sativa
  Clone ID: PAT_MRT4530_3508C.1
atgagacctccacccgcgccgctctccggccgtgcctccccgcctccccacctgctcctcctctccaactcctccctcgcgccgtcgctgcccacggtcgctgccgcctgccgcatgcctcccgccgcggcggcggcggctcgctccgtctccgtctccgtctccaccgccgtcgacgcgcccacggcggccgccgcggagcccgcgcgaggggacgcggcccccgcgccggcggcgccgccgcggcgacggctcatcctcctccggcacggggagagcgccgccggagggcgcctcaccagagatcatgacagacctctaagcaaagcagggagagctgctgcaatcagtgtttctaacaagctacaacagatgggatggatacctgagctcgtcctatgcagtgatgcaactcgtacaaaggaaactcttaagatcttgcaagaccatgttaagggattgtctgaagcaatcgttcactttatcccaagtttctattcaattgcagcaatggatggtcaaactgctgaacatttgcaaaaggcaatttgtcaatattcaagtgatgaaatcctaactgtaatgtgtatgggacataataaaggatgggaagaagcagcctctatgttctctggtgattcagtagtgcttaagacatgtaatgctgcattgcttgaggctgaaggaaaatcatgggttgaggaatggcatctagcaagtgcttgcaacaagaatgtcttagttccaccattgcaaaagtcagtattttcaaatgcacacccaagcaagaagctggcctgtggccaaatgctagtagtgccttttcgctggctgggcttgggggatggaagcttcatggcattgtaa

SEQ ID NO: 30713 - DNA, 762 bp, Oryza sativa
  unsure (1)..(762): unsure at all n locations
  Clone ID: PAT_MRT4530_35090C.1
tctctctcttctactcttctctcccccacacgcgatcctccaccaccacgccccatccatccatccactccgcaacaccacccgcgacagccacatagcagcaaaacaatccgcccgcacatcccatcccatcccacgctccatcccccctcatccccgcacagcccgcaccctcaaccagcgcatcccccgcccgcatttatacaacgtcctccgcgtagcctctcgtcatcccgcgcatccggcagctcgaatcgcacccgcaacctccatcctccctcctaatccatcgctctcgcaacccctcctgcagccctcctctcctcctccgcaccatcgccgatcatcgccatccccgctagcacacatccatttcgccgacacgcacccgcacccatcgcaacccctctccccttgccaattgtcgggctttaccaactacccagctccaccgcatccgcgctccctcgaaaattgccaattcgttaaagccacccattccctttcctccttttgggttgccctttccttctgacaaacttggcaattagtggttcgtggggtaattaaataaacgcaaggctggttcccccgggccaaaccccccgcccgttagaaccaaccggtcttacacattgggttggttcgacaaaccttcgaaccccggggcaacgggcctctgaaattaatatacccccaaccccctgtaaacccttgaatnttcccaaaatggttaaacggaattcattcccggtaattaaa

SEQ ID NO: 30714 - DNA, 811 bp, Oryza sativa
  Clone ID: PAT_MRT4530_35091C.1
gggttggttttttttttttttttttttttttttttttttttttttttttacagaaaagacttaattaaacactcgaacaagttttcactgaaagttcagatcctcaaaagtccacgtaaactagtagaacttgttcggccacatttttatacaagcacgccgcttagaacaagtagacacagctcaactgaagactgaagacgacgatcgaagcaggctgcctagtgatggtgtcctccattgccgccgctcccttctctcggattgcccggcggcttcggccttagccgcgctgcccgcacccgagtggtcgcctcactgctcttcatgtcctcttctccttcttgagacgggtcggcagctgcaggttcaggttcagggacaagaacagagcttgcctttgggtcgcagaaagaatcgctgaggccgaggcagcaggcgcagacccgggctatgtactgcagcagcgagcaagggtgcgcgaagaatgacggcgccgccgccgccgccgctgccgctggcgtggcctcctcacagccctccttttcttcttcttcctcctccttgcgctggtccaccgacgatgattcttcagagttgtcctgctccttatcttcgttgtcttcgcaccgatccgatgctggttcttggaatcggttcccctccttttcctcgacccgatccattgccgctctagatgctcgtagcttctggagacagcggcgtcgtctcggcgagagagctactgttcgctttcgtcaactttttttttctctccccccctccttccgtgagtagttatttcaccgga

SEQ ID NO: 30715 - DNA, 436 bp, Oryza sativa
  Clone ID: PAT_MRT4530_35092C.1
caatatagataagcaaatgaaaccctttagggaatgtgcaaatggattgctcactttgtattaagatggagaaagaaaagttacatcatcagcgattgggcatgcaaaaccagcagattgaccgaacaaaaaaccaaatacaaccaggcgactatacttcagaattactgaagacacatttttctaatcaggttgctgtactagctgtgcggttcggataaagtcaggacaaataagacaacctgaagcacttggaatatctgttgaactaaaagataagggctatgcattgttgtgtgttggttttccaacttctgatgttgaagttgaaacacaagatgaagatgaggtctactggctccagtttggaagatatttcgcacgaggacctgttgaaagggatgattatgcactggagcttgcaatgggtgatgag

SEQ ID NO: 30716 - DNA, 540 bp, Oryza sativa
  Clone ID: PAT_MRT4530_35093C.1
ctcgagctcgagctcgaacacttccaccccaagaagaggagaggaggggaggaggagaagaaaaatccttggaaagaagcatgacgacgctggggaagaggcacaggaacaacagctcgatgcggcggacgacgagcatgtcggggttcgcggtggcggaggaggaggagcagcaggggaggcagccgccggcgcgggcggcgaggggcggcggaggtggtggctcggcggcgccctcgcccgggtggggcgccatgcagaggaggcactccggcgacttcgccgtggcggagacggcggcgttcctcaaggcgtgcggcatctgcaaccgccgcctcggccccggccgcgacaccttcatttacatgggtgaagtggccttctgcagccatgagtgcaggcaacagcagatgaacctggatgagctcaacgagaagaaatgcttccagcgggaaggcggcggcggctctgacaagtccggcaacagcggcgccgtagccgccgcctagcatcgccggagtagggaaaaaaaaaaaaaaa

SEQ ID NO: 30717 - DNA, 354 bp, Oryza sativa
  Clone ID: PAT_MRT4530_35094C.1
atcgcctcacacgctactctcctgttgatgtgcgcaccgatgccgtgaggcaagagaagtttatgtttggtcttaatgatgaactaaccaaccaggtcatctatggagattatactgattttgagaagctatttgacaagttgatttgtcaggaggatcagcgcaaccagatggatcgcaaaagaaagggagctagttcagggcgcgtcaggggaacaaccaaaagcctcgcttcacgcttggcttgaggagagtgaagatgctcatatgattccatggagggtctccacactccgaaggcacctccaccaataaataccactcctcatccttcattccaactcacaccaagat

SEQ ID NO: 30718 - DNA, 435 bp, Oryza sativa
  Clone ID: PAT_MRT4530_35095C.1
tttattagatctagagccgtccttttcctcctatttcacatactccggagagagggggtttattgatactagtaggtaaaatttccacaatggatgatgataaagtgactgcacatcctcacaccttttaagatgctttgcagaacattcagcacctggagcgtgtgtcttcatcagaaacacaggctcaggaccatcagaacgtcactcggatcacacatgtgatgcattcacacccaccaatgccattgatgctagttacatcaatcacccaccagggccttcacgtgtcctactttgatttcgatactttagactacggtgagcatgctaactatacttgtcgcgcctactcagtggatgaaaaaacatacattgaccacactgatgcatggaccatggactggtcatgacaagctttttactataaatcat

SEQ ID NO: 30719 - DNA, 288 bp, Oryza sativa
  Clone ID: PAT_MRT4530_35096C.1
atggcgacctcggcgaggtggggagaccgtggctgtcatgagggcgaagtctttgtactatgggcccagccagaccccttccctgagaccatctctatcgcagcgccgtctcactgccatgctcatcatcaagtggtccgcatgtgcttccaggacttcgacggcaagaagatcggcatgccattgtctacaggatggaccacttcaacgagtcgccggcttggcgcacggtgtgcgacatcccacccgaggcagggtgcgctaaggcacaaaaagatggtactatag

SEQ ID NO: 30720 - DNA, 677 bp, Oryza sativa
  Clone ID: PAT_MRT4530_35097C.1
cccagcgtccgcggagacccaactgaagttcataattgaagcttggtcacagattattgaatgcaggcgggtactcaaatggacatatgcttatggctattatctggacgacaaggtcaagagcgaatttttcgagtacctgcaaggtgaagctgagtctggtctggagcgtcttcaccaatgtgctgagaaagacctgcaatcatttttgactgtgagatctgataatactgaacctgcaccatcaattgctgaattcggtgacttccgggtgaagcttgcggggctgacaagtgtgactcggaattattttgagaaccttgttcaagcactggaggctggcttggaggatgtacactctactgcccagggtaccacatcaagcaatgccaccaacatcccctccaagaaagcagtcactaaaggcaaaacaaagaagcagcttcctagaacatcttcggacaactcagatgaaggctggccttgtgagcgctgcacgtttattaacccttcatcggtggatgcatgcagcgtctgcgataagcatagatactagatgaaaaactggctgaaagccagtgccccccataaatctcgaagctgttgagaaggtgggtgcttactcaaagctcatgagaagattgttgattgtagttctgttccttaattatgtggcg

SEQ ID NO: 30721 - DNA, 2449 bp, Oryza sativa
  Clone ID: PAT_MRT4530_35098C.1
atggactacgacgccgagaaccccatgctcaacgacgacgaaatataggataacgaggactatcccgaaggtagcgatgacgtgtgtgcgggtgatgacggcaagggcggctggggcggaggagcccgtgatggggtgtaggatgaggaaggcgaagaggggctggtgggcgtcgactacggaggacgcggggcagaggggtgcgagtaggtgttgtccctccgtgagcagagatacttaggattaactgaagaggagatagaagtaggtgtagggcggggaatacgagggccatgtcgtgtgcgatgacttcgaagagatggggtgtgtacgcttgcacagcaccagtaatgtaacatcagaggatataaataagcgtcaataggaagataaaggcaagttcgctgctgtactatatattcgaagagtggaagtgtgtgttcttcttcttcaaaacaaatggaacataaacaatttaagcgataaatggtttgtggatgaagtaaaagtgcgtgagattgtttgttttgttttaaatgctattgatcttcctaacgcgagaaagtaaactagtggcatagattttgatgagtatgctgctgatgtcaagagttcggctcattgttttcactgtaattgacatgaatgttgggaaggttatattattgctgcaaaaagtcatggtccaggatatttgtaattgcgatgcctagcaagaagtgcacggaggaagctcatcgaccagtgaactgtgagactgtttctaggtggatattaaagaatagcgcagaatctgaaaatatgaactggatactggctaattctaagccgtgcccaaaatgcaaacgaccaatagagaaaaaccagggatgcatgcatatgacttgcactccaccttgcaaatttgagttctgctggttatgtctgggttcatgggctgaacatggggagagaactggtggattttacgcttgtaatcgctatgaatcagcaaagaaggagggagtttatgatgagactgaagcaaggagggaaagagccaaaaattcacttgagagatacatgcattactatgagcgctgggcatctaatcagacgtcgaggcagaaggcacaagcagatctgcaaaaggcagaaaaggaacaacttgcaaaattaacagatgtttttggaataccggagacccaactgaagttcataattgaagcttggtcacagattattgaatgcaggcgggtactcaaatggacatatgcttatggctattatctggacgacaaggtcaagagcgaatttttcgagtacctgcaaggtgaagctgagtctggtctggagcgtcttcaccaatgtgctgagaaagacctgcaatcatttttgactgtgagatctgataatactgaacctgcaccatcaattgctgaattcggtgacttccgggtgaagcttgcggggctgacaagtgtgactcggaattactattatctcgacgacaaggtcaagagcgaatttttcgagtacctacaagctgaagctgagtctggcctagcgcgtcttcaccaatgtgctgagaaagacctgcaatcatttttggctgtgagatctgataatactgatcctgcaccttcggacaactcagatgaaggctggccttgtgagcgctgcacgtttattaacccttcatcggtggatgcttgcagcgttggcgaaacgcatgaggctggcttggaggatgtacactctactgcccagggtaccacatcaagcaatgccaccaacatcccctccaagaaagcagtcactaaaggcaaaacaaagaagcagcttcctagaacatcttcggacaactcagatgaaggctggccttgtgagcgctgcacgtttattaacccttcatcggtggatgcatgcagcgtctgcgataagcatagatactagatgaaaaactggctgaaagccagtgccccccataaatctcgaagctgttgagaaggtgggtgcttactcaaagctcatgagaagattgttgattgtagttctgttcctaaattatgtggcgttgaagaagagcttccaatggcagcaatggcgtacatgtgtgagtgaaggtccctggttgtatctagattgcagcaacaatgcaggaccgactatggagcgaaggtggatggggtacaaacatgtggtagtcttttttttttactttctagcctatattatgtacatattagttatggtctgtagttgtgttaatgtggtgggcaatgttctgtttttgtttaaatgacatgagatgatgtggtgggtaaagttccaccccctgtactgaccaacctgtgaagctggagaatggtagatgtagctcttatctattgagcggtcatgtaaattacccaagctcgtcataatctatggttgataaatcatgtgggaaaaaaaaaaaaaaaaaaaa

SEQ ID NO: 30722 - DNA, 266 bp, Oryza sativa
  Clone ID: PAT_MRT4530_35099C.1
gcactgcacaccgtacgcttagatcgctctacagtagagcggcctgcaaacgagagcggcgacttcgtttagcacaccggagaaaccttaggttccgtctcgaggcggtggttgtgtcgtggcgcgtctgggcgtaggagatggagatgacgtggagtcaaacaacctcataacaatactccaccattttttcttattgctcattaaaaccgaacctacatgctctgtttatttctcactaccaaatcatcttctcatgatgctgt

SEQ ID NO: 30723 - DNA, 167 bp, Oryza sativa
  unsure (1)..(167): unsure at all n locations
  Clone ID: PAT_MRT4530_3509C.1
gccagcaacttgttacagtataaaacatagaaatagttcgctactgagccttacagacaggacctgtatagagactgtaaccgggggtngcgcccgtttattcattcccaagagcagaatattttatctatcggggggcgttcaggacaagaagttttttttcttcg

SEQ ID NO: 30724 - DNA, 274 bp, Oryza sativa
  Clone ID: PAT_MRT4530_350C.1
cttcgcagacacgtgggccgacgcgtggtggacgcgtgggaagaacttcgagctacgttttctggggtgcctggtaatctcgaaaactacttgctctatgttgcagaagaggtactagcgacattggcccaataggctatagactagctggatgatatagttggtcgaacagatctacttacagcaacgcatgtttctttggataaaacgctgcacatcgacctcagataccttttatcaagtgctgtattacccaaatggagtatctctcaga

SEQ ID NO: 30725 - DNA, 498 bp, Oryza sativa
  Clone ID: PAT_MRT4530_35100C.1
atggtcccacgcttttccctctcccgtcctgtactctctctcccccaaatcgacctctccgccggcgccactcctccgcgtcgcccctccgccagcgccgtccctctgccgtcgtcgtcctttgccggcgccacccctccgccgtcgtcctttgccggcgccacccctccgtcgtcgtcgtccttcgccactgcagcccctcggcagcgccgatggagaggtaccctccggcgatgcggcggcgaggggcttggaccggctcagcagcgcgacggcgagggcttgaccgctcgcgtccgatgccgcgtgggcccgcgcgaggttgagctcgagccgccccgatccggtgaggaacaggagctccggcgccgcctgctggatctccccctctacggcaagtgtagcaggagctcggtgaaggccgaggaggacgcggcggaggcgaggcgcgcggctcatgggtcaatggcgcggcacgaccacgtgtcgaagtactag

SEQ ID NO: 30726 - DNA, 334 bp, Oryza sativa
  Clone ID: PAT_MRT4530_35101C.1
ctattctggggtaggggtttttttttttttttttttttttttaaaacccaaaattttgcagaaaccaaatgggttcacaggccacacatacaggtggtatacaaattcttttacacacaaggtttttggagaggcaaaacacggggtttgtttatcaaaccctttaaaaaagattcatgtgttgaaatacctgatgaaccccgtttgctctcaagggaaaattaattaatgccgttttggtttaactttggccatcgatctaaacctgaaactgtgacaacacactggcttcagggccctggaggtactagcagtttagcagtagctgtagtac

SEQ ID NO: 30727 - DNA, 434 bp, Oryza sativa
  Clone ID: PAT_MRT4530_35102C.1
tattttcttctccagtgagactttccccacggggggttttcttgaatatgggtggggatataacacctttctttcgagctttcttgcaattttgggcttcttttcttttaatctgggtactttccctccaatatctgaatacgaggagcaatgtggttcaagggattatcggagggtggcatcccgtccatcatcactgggtgctctacgcacccgctctatttgattaaagtgaggatgcatcttcacggggaggcatcagcagcggcggctgctaccccgccagcgcatgccgctctacctccagcgcttgctttccactctgggcaagccgtggcgatcccgcatgacctgattgcgccagctaggaaacccgggcctatagccgtcggcgcgcagatcctacgggcagacggctcaccagcactcttctc

SEQ ID NO: 30728 - DNA, 209 bp, Oryza sativa
  unsure (1)..(209): unsure at all n locations
  Clone ID: PAT_MRT4530_35103C.1
ggcccccctttgctcggaattttttccccacgtccacggagatagactttgtcttttctggaagatgtttatgcatgatggcttggctgaagaccatcttcccttcatatctatttcactccctgttatgttgtctatggtgatatgagttgatatttatgggagaaagttttatcctgagatgctncccnattcaaaaaaaaaaaaaa

SEQ ID NO: 30729 - DNA, 2196 bp, Oryza sativa
  Clone ID: PAT_MRT4530_35104C.1
atggtgccaccaggcaatggcaacggcgccgccgccgccgccggcaacgacgtcatcctcgagctcagcactcccggcgacgactggagccacgagctgcagggcgacgacgtcgaagcgaacggcggcggcaacggcgacgcgcctccgcgccggacgttcagcttcggccaggcctacaagacgcggcaccgtcagcctcaggtgttcacggtgtggcagacgctgatgctggggtaccagtcgctgggcatcgtgtacggcgacctcgggacgtcgccgctgtacgtgttcccgtccgtcgtcctacccgacgccgacgccaccgacttcctcggcatcctcagcctcatcatctggaccctcaccctcatgagcctcgtcaagtacgccctcatcgtcctcaaagccgacgaccatggcgaaggtggtacatttgcactgtattcgctgctgcgtcagcacgtgaatttcaaggggaacataccggtgccgctcacacggttggagtccgatgtccatctcaagttccacagcaagaggagaagccggccgtcacggctgcagctgttcttggagaacagcccaaaggcgcaactggcgatcaccatcatcgtgctgatcggaacctgcatgctcatcggcgatggtgccctcactccagccatctcagagcacgtcgtggtgctgagcgcggtgatcctggtgctccttttcctcgtccagcgattcggcaccagcagggtcagcttcaccttctccccaatcatgctgctgtggtttgcttcgattgcagggatcggtgtttacaacattgtgatgcactacccacctgttctgaaagccgtctcgcctcactacatatattactacttcgcgaagaacaaacgggttgggtgggagcaactcggcgcggttattctctgcataacaggtgctgaagctatgtttgctgatatgggacacttcaacaagtcatcaattcaggtggcattctcaacggcggtgttcccatccctgatcctggcgtactcaggccaggcggcatacctgatcaagaacccgggtgacctgagcacggcgttctacagcagcgtcccggcgccgctgttctggccgatgttcgtcgtctccaccttggccgccattgttgccagccagtcgctcatctctgcaagctactccatcatcaggcagtccatcgccctgggctgcttcccaagaaccacggtgaagcacacctccgacaagtacgagggacaggtttactgcccggagatcaactacgttttgatggtcgtgtgtgttctcatcaccgttggattccagggtgggcccgagatcggccgcgctttcggtgttgcagtgatctgggtgatgctgctgacgacgacgctgatgacggtggtgatggtggtgatctgggaggtgaacggcgcgctcgccggcggcttcttcgtcttctacctcgcgatcgagggcacgtacatgacgtcgctgatgaccaaggtgccgcagggcgggtgggtgccgttcgccatcaccgtcgccttcctctccgtcacgctctcctggacgtacggccgcaagaagaagcgcgagtacgaggcgcgccacgccgtcggcgacggcgagttcgccggcatcgtgtcccggagcgcccgcgtccccgggatgtgcctcttctgcaccgacctcatggacggcgtcccgcccatcgtccgccactacgccgccaacacgggctccctccgcgagctcctcctgttcgtcacgttccggacgctgccggtgaggacggtgctcgccggcgagcggttcctcgtggcgagggagggggcgcgcgccggcgtgtaccggtgcatcgcccagtacgggtacatggacgagcaggacatggttggggacgacttcgtccgcgctgccgtcgccgcgctggtcgaggtggcggcggcggcggcggaggccgactccggcgaggaggaggcggagatgatcgggcgggctccggcgagcggcgtcagctacgtgatcgggaggacggtgctgaggatgcggagggcgcgcaactggccgaagcgattcgtcatcaacgagctctacaggttcttgcagaagaactttaggtccaacgtctccacgctcaagctcgaccatgccaagaccttgcaggtcgggatgatttatgagatctga

SEQ ID NO: 30730 - DNA, 873 bp, Oryza sativa
  Clone ID: PAT_MRT4530_35105C.1
atggtcaagaccagagcggcggcgactccccgcccctccggcggcggcggcggcgcaggcgcagcggacatcaccgccggtaagatctccttccgctcccgcaagatcgtcaagagcacacccgccaaagggaaatccgtcgccacaacaacaacagccgtactatcgccaccgccgctgtcctcgccgggggagctcgcggcggcgctctcgcacctccgcaccgcggacccgctcctctccgaggtcatctcctccaccggcgccccggccttcatctcgtccccttcccgccccgccttccactccctcgcgcactccatcctccaccagcagctcgctccctccgccgccgccgccatctacgctcgcttcctcgcgctcatccccgccgccgctgatcccgatgccgcggtggtcaaccccgctgcggtgctcgccctctccgccgccgacctccgcgccatcggcgtctccgcccgcaaggcggcctacctccacgacctcgccggcaggttcgcggccggggagctctcggagtccgccgtggccgcaatggacgaggcggcgctcctcgcggagctcaccaaggtgaagggcgtcggcgagtggacggtccacatgttcatgatcttctcgctgcaccgccccgatgtgctgccatccggcgacctcggcgtgcgcaagggcgtgcaggagctgtacgggctgccggcgctgccgaagccggaggagatggcggcgctgtgtgagcggtggaggccgtaccggtcggtgggcgcgtggtacatgtggcgcctcatggagagcaagggcgccgcggccaagaaggcgaagagcaatgccattgccactttgccatcgagttgctag

SEQ ID NO: 30731 - DNA, 372 bp, Oryza sativa
  Clone ID: PAT_MRT4530_35106C.1
atccttaaaaaacaagaaacccaaaaagcagaaaaacaaagagaagatgaagaacaaagaaaaaaaagaagaagaagaagaaaaaagagaagaaaaaggggagaagaaaaacggacgatcatgaggtagtccatgtcatatagaatcacaacaagtaggatcaccaaactttccctgttggaaaatgatatatgcttgggcagcattgacagtggatgtgaaggcaagttggcaaatggcaagcatagtggcgtcttagccctcctcctctggctgtaattattccctaatttttgtatcttctctttttcttccctggatgcataatcattgttgtatactgattttgaaatgcaaaaaaaaaaaaaaaaa

SEQ ID NO: 30732 - DNA, 205 bp, Oryza sativa
  Clone ID: PAT_MRT4530_35107C.1
acctcatgtattccgctgcccgtcaccatgctgtgatgtcagatgagctaatgcgtagtgcgcattctcaagggagcaagccacgatagccctcaaagaacatatcaggggatgaagagcccggtcccgttcactcctagactattctcactagcagataccatacccaggattatcgcaatgcagtccgaatagcgagacttca

SEQ ID NO: 30733 - DNA, 466 bp, Oryza sativa
  Clone ID: PAT_MRT4530_35108C.1
ccgcggctgcgacctgagcggctgcggtggcggtgaccacggtcgccggaggcgccggaggcatgggggcctcggacggctagctaagggggtggtagacggctacatcgggccggcacggcattgtttggaggaggggtcggagaccggcttggcgaagagtggcgcagtcaatgacagtggagccggctcggcgcgagaggcgcgagcggtggagttggaggccgccttggcacgagaggcgcggccgatggagggaggccggattggcgcgagaggcgcgtccggtggaggaggccggcttggcgcgagaggcgcggccggcggtggaggaggcgacctcggtgcaaacctgcaattggggctctgtttaaaggactgcaaatgtgaagggaaggatcatactgcaaaatcattgctatggaagacatacgacagcacaagctacgatgctatgaatgcgtag

SEQ ID NO: 30734 - DNA, 660 bp, Oryza sativa
  Clone ID: PAT_MRT4530_35109C.1
atggcatctcgaggcgccgtgttgctcgccttggtcgcggcggtggccctgatgtccgcgtcggtggcgtcggcgcaggtggacggaggcgtgccgccggcgccggcacggatcacgagcgcggccgcggggggcgcggcgtcggcggcgctggccgtggcgctctcgatttcgaacacaattcgatttcacgtcagtgatgcactgatgcctcgtaacgcggcggatgagttcccattccgtctgtcccgaaggcgctgcgagcgccgagcggtgggtcctgggacgctgcggcgctgccgttcgggtcgtacctcacgccggcgacgacgagaacgacagcggcgggttgtaccgcacaccgggtccggctactcgtcgggatcgccgccgacgccgccgcaccggaataccagcgccgcctccgcctccgccgccgccgccttctcgccgtcgtgtggtggtggtggtgccgattcccccgggccgatgactctccgtcgggcctgcaaagaggaaaggggagatggggagagaggaggaaaaacaagagtgggaatgacatatggggtccacgttgaggtggaagcctgcctgcctaccatcgacattggccatgcatggctgctgcggcaagctcaagtctatgtaaaaacattt

SEQ ID NO: 30735 - DNA, 320 bp, Oryza sativa
  Clone ID: PAT_MRT4530_3510C.1
gttgggttagaacacacagacacagtgccaaaatagacgaaatatgtaacttgtagaattttttaaagctctgtcgaaaagtttctcgcctcgaaaacacaatcttacaagcggaatttggagattataatttcatcgaacacggatgtaactttttctgtagatgtccgtggttatattattttcctgattctgagtatgaaaaaattgcgcctgggggcggcgccaaccacattggcgcgctccccctgccacctcagcgccgccccgccacagtggaaggaggctggcgccagtgactctggcgtcaaaaaatgatt

SEQ ID NO: 30736 - DNA, 1984 bp, Oryza sativa
  Clone ID: PAT_MRT4530_35110C.1
gtggatccccgggctgaggaattcggcacgagggagctctcttcctctctctccagctcggtctcacacacacactctctctctcggcagaaacacaccacgatcgcggccaaaacccacgcgattgtagctcagattgttgtgcgatcgacgcgatatggcgacgatcacgacgccaggatatgctcacatacagcggcagcacggcaggtgctcgacgacggcgggaaggcgtggggcgtccaattcggtgagattctccgcgcgcgcggttagctccgtgccgcacgcggcggcggcgtcatcggcgccggcgttcctgccggtgccgttcgtgcctggggccgacgcaccgtcgccgtcggggaagagtgccattggcgtcccgaaggcgccgaggaagggggaggaggggaagaggctcaacttcttccagcgcgccgcggcgatggcgctcgacgcgttcgaggaggggtttgtggcgaatgtcctcgagcgcccgcacgggctgccgagcacggccgaccccgcggtgcagatcgccggcaacttcgcgccggtcggtgagacgccgcccgcgcgcgcgctgccggtgtcggggcgcatcccgcccttcatcaacggcgtctacgcgcgcaacggcgccaacccgcacttcgaccccgtcgccgggcaccacctgttcgacggcgatggcatggtgcacgccgtcaggatacgcaacggcgccgccgagtcgtacgcgtgccggttcacggagaccgcgcggctgcggcaggagcgcgcgatggggcggcccatgttccccaaggccattggggagctccatggccactccggcatcgcgcgccttgctctgttctacgcgcgcgccgcctgcggcctcctcgacccgtcacacggcaccggcgtcgccaacgccggcctcatctacttcaacggcaggctcctcgccatgtcggaggacgacctcccctaccaggtgcgcgtcaccgccgacggcgacctcgagaccgtcggccgctacgacttcgacgggcagctcggctgcgccatgatcgcgcaccccaagctcgacccggccaccggagagctccacgcgctcagctacgacgtgatcaagaagccgtacctcaagtacttctacttcgcgcccgacggcaccaagtcggccgacgtcgagatcccgctcgaccagcccaccatgatccacgacttcgccatcaccgagaactacgtggtggtacccgaccaccaggtggtgttcaagctccaggagatgctccgcggcggctcgcccgtggtgctcgacaaggagaagacgtcgcggttcggggtgctccccaagcacgccgcggacgcgtcggagatggtgtgggtggacgtcccggactgcttctgcttccacctctggaacgcgtgggaggaggcggacaccgacgaggtggtggtgatcggctcgtgcatgacccccgccgactccatcttcaacgagtccgacgaccgcctcgagagcgtcctcaccgagatccgcctcaacacccgcaccggcgagtcgacgcggcgcgccatcctgccgccgtcgagccaggtcaacctcgaggtgggcatggtcaaccgcaacctcctcggccgcaagacgcggtacgcctacctcgccgtggccgagccgtggcccaaggtgtcgggcttcgccaaggtggacctcgccacgggtgagctcaccaagttcgagtacggcgagggccggttcggcggcgagccctgcttcgtccccatggacgccgccgccgccacgccccgcggcgaggacgacggctacatcctgtccttcgtccacgacgagcgcgccgggacctccgagctcctcgtcgtcaatgccgccgacatgcgccttgaggccaccgtgcagctgccgtcccgcgtgccgtacggcttccacggcacgttcatcaccggcgacgagctcaccacccaggcctga

SEQ ID NO: 30737 - DNA, 506 bp, Oryza sativa
  Clone ID: PAT_MRT4530_35111C.1
ttagtttccttttatctctctagaaaagtgtgtttagtgtccgataaggattttatattttccttttatgattatgaaagtttctttcttgtccaataaggactagtatctatccatgggtataaatatgtacacccgaggtcattgtaaactatcacagagatctatacaattactcttggtgtatcgccaccctctttcccgaggttttatttatcatccggcagaacatggcacctaacacggggctgcattgactttcgatctccggcgaaggggtaagtcctacgtaccgccggcattggcaattgtatcggttacattggtgtgcttcaaagctgcatcgcttcaatctcttggatcgctctggttcggtttatatatttgcctacctatttgtcatatatcttagttaatatagcttagcaccttaatttgatcatatcggctgatattcattttagggtttatgctagtatcagctaaattatctgattagattagct

SEQ ID NO: 30738 - DNA, 1221 bp, Oryza sativa
  Clone ID: PAT_MRT4530_35112C.1
atggcgaggccgaggacgaggtcggtggccaggatggaggccacggcggcggctgcggcggcggcggaggaggaggaggcggggaatcccgacggcgcggagggcgcggccgtcgtcgccgttgctcccgaagccgccgccgaaggtccgaacgagccgaacgcaggtgaagcttcgagggagccggacgcgggtcaagcttcgagggagccggacgtcgctggaccttcgaggcagccgggcgccgctggaccatcgagggagccgggcgccgctggaggtccgaggcagccgggtgcggccggaggtccgtggcagctggtccccaacgcggcagggccggcggttgcgccgtacgttgaggacatcgaccgatacctccggtctctcgagggaagggaaatggcgaaatgtttggatgctgtacaattctgcactgctgaggaatcaaggaggccgatagttaactatgatcaggagatacaaggaggccacatcaatatgaggggaaagcttgtgaactggatggaggaactggtttatgggttcaatctttgggataacatactttaccttgcggtttcatatgttgaccgcttcctttcaagaaatgtcgttaacagggaaaggctgcaacttcttggtacctctgcattgttcgttgcttctaagtatgaagaccgttgccatcctagtgcaagattcttcagttcgattactgctgacacttacaccacacagcaggtggtggcgatggaagcgaacatactgagttttctgaactttcagatggggagtcccactgtaataactttcctacggagattcttattttcttgtcgtggaagcaatagaccaataaacataagactggaattgatgtgtatctatcttgcggaattgagcttgttagacgattacaacataaggtttcttccatcgattgttgctgctgcctgcctgtttgttggcaagttcacactcaacccgaacactcgtccttggaacctgtcggttcaacgcatcacaggctacaaggtctctgatatcgaagattgtattcgttccatacatgatttgcaagcgggcagaaagtggtcgaaccttagagccatcagaagcaagtacgaggacgacgcgttcgagcgcgtgtcgaccattccttcaccaaatacaatcaagccgtctttcctcagggatctcaagtatgtgaacggctga

SEQ ID NO: 30739 - DNA, 1247 bp, Oryza sativa
  Clone ID: PAT_MRT4530_35113C.1
gcacgaggcaggatagagatattgcgagcgatgtcggctgcgagtgcgagtgccactgcctccctctccgcggcggcggcggtggcggtggcggcggccgctctccgccccacgcagctgcgacgcctgcgcgttgtcgcgccaccgcgccccctcaggctcaccagtctcaacccccctcgcgcggcttccgccccctctactcctctgtgggaggccggcgtccgagctgagtcgtccgactcgcccggagccggagccgggggtgacgtcatgggcctcctcctccgggagcgcatcgtcttcctcggcaacgagatagaggacttcctcgccgacgcagtcgtcagccagctcctcctcctcgacgccgtcgaccccaactctgacatccgcctcttcgtcaactcccctgggggatcactcagcgcaacaatggccatctatgatgtaatgcagctcgtgagggcagatgtttccactattggattgggcatagctggttccactgcttctataatccttggtggtggcacaaagggcaagcgattcgccatgcccaacaccaggataatgatccatcagcccgttggaggcgcaagtgggcaggccttggatgtcgaggtccaggccaaggagatattgactaacaagaggaatgtcatccggcttatatcaggtttcacaggacgcactccggagcaggttgagaaagacattgatagagacagatatatgggtcctcttgaggctgttgattacgggctcatcgacagtgtaatcgacggagacagtatcatcccacttgagcctgtcccggagagggtgaagccgaaatacaactacgaggaactgtacaaggatccacagaagttccttacacctgatgtcccagatgatgagatatactaggtaatgagcctgcctgcctgtcgtttgcatttcgcacggcaagggggctgcttgcaatcaaagacgatgctcctagtcctagcactagttgatttttcctgtcacatgttaaccaactagtgccatattacgattgttgagcacgcagttagacttattggttgtgtttgtcgttgaaattgcatgcgtttgatgtgcgaatgtggatgattgatgaggtggtttgtgtactgggcatttgaccaagtgcgtggcagctcatgtaggctgtagctacgcccaagtgcttaattgaccaaataaactctagtactctataaaaaaaaaaaaaaaaa

SEQ ID NO: 30740 - DNA, 405 bp, Oryza sativa
  Clone ID: PAT_MRT4530_35114C.1
atacttgagtagtagagacttaaccactttcatgcgcaaatcacccactcagatatattttggaatctcttttgctgtaccactactcccccggttccatattaattgatcttttggacaaagtttgagtcacaaactttttataactttgaccatccataactttaaaaatatttagtttaaaggaactagaaccacatatagatttgtcttttaaagtactataatacaaagtaaacactcgcatttatttattatatgtattataatagaagaataaggtcaaagatatatcttgtagaccatgtcattatccaaacgtcattacaatgaaaccggagggagtacattttatctattgaaacatgttccgtttatgtattatttaaaaaaaaaaaaaaaaaa

SEQ ID NO: 30741 - DNA, 1020 bp, Oryza sativa
  Clone ID: PAT_MRT4530_35115C.1
atggaacgccacgcgcagatgtgctgcaccctcgtgcggctagggttctgctcgggaagggagtggcggctagggtttctcacagttcagacggcgacggcgaaggcagcgagcgtgggcagcagcgaggtgaggcgaggcggtagccgccagggggctgcgcgccgcggccgcgtcgaccacaggggcctcccggtggatggcggcggcgcgagacaagggagcggcggatgggcggacggcggcgcgcgaggccgggcagtaggcaggcggcggcgcgagatgagtgggtgggcgctggacggcggacggctgcatgcagcggcgcaggcgtcggtgaatggcggcggtgcgagacgtggtctcggcgggccgcgcccatcggcgtccgtcctggcgaacgaatgcgtcgatttcgcccttcatcctaccctccacgcccacatccttacgctgcgcgtgaccgtcacttcgcccggctattttttcgccccccccccctcttgcttggcctccctcttcctcctgccgtttcgttccgccgtcgtccttctgcggcgtcaccccctgccttcccgtctcctcctcatccgttcggagttgctgcgtcttgccctcgatgttccgcccgcctcgccctttcttgtcgtcttttcccgagtcctcgttgcggctttcgtttcccccccgccttccatttcctttcccccccttcctttccttcgtcgattcctttttcccccttccacttttgccgtccctgaccacctttgcgccccgcttgatcggcatattcctttgcggtgccgttggttcgtgcctttgccggccattgtcccggcgttccttgtggcggagtccgacgccctcgcagctgcccacgctcgctgcctccgccgtcgcccctctgccgtcaccaccgctggacctggaggaagaaggggaaaggaaggggaggagcggctgcggcgaggggggagcagaccgcgagccacgggaccccgcctccggtgacgccat

SEQ ID NO: 30742 - DNA, 868 bp, Oryza sativa
  Clone ID: PAT_MRT4530_35116C.1
gcacgaggttcaggaggagcaacatcagaaacgacttaaagaggtaagcttgtaagatggtgtgggtttaattatctagtgctttagagcatttgtgttaagtgccatatcccaaaaaaaacttcacccacaacgcatgccctggaggggaaaaaagaacatcgtcttgtgaaaatcttgtaatcaatcctggatcagccttcatataggaacgtgcagtacagaacacaatactgggtaagtatacactggattattccgtattcgttggatatgatactccaaacaggagatgctttttagccttcccactagcctgcaccaagtggcttggcaaacaaacaataggtgatgctgacacctttcgatggcatcagcacaagtgcacaacacatgttgagttttgagattgtctacctcatccatttctttcttgggagcctgttcaactcattatagatgcattgcatgtatatatgtctgattaaaaaggcctgagcctgcagttccgtgcttttccaccacggcacagcttgccaggttgaagcagtatatagttataaattgtcttcttttgtcactatcagggaggttgggttgagagggagatgctttgtcaatttggttgtataagttgcatcgtaggcacagttgagcccacatcttgcttaggaacagttcgcctccatttggctttgcatactatagttgtcttccatttagttttcagccagcataggatttcagatttcttctaattttgcctttcctgcctggattgtatatattgatttatatatatcttgacgacctgcctctcatcgttggtgcagaggccgaattccattatccaaaaaaaaaaaaaaaa

SEQ ID NO: 30743 - DNA, 508 bp, Oryza sativa
  unsure (1)..(508): unsure at all n locations
  Clone ID: PAT_MRT4530_35117C.1
ggacgtgtgtntngccatcatatatacctggccacgcgtcggcccacgcgtctcagcacgcgttagcccacgcgtccggtttgagtagacatggcctctcggtgtcttgttaccacaggttttgaggatgagtgcagagagatccatgatgcgtgcaaccagccacgccgtttgagcgttctcttggctcatcggagcccatcggagaggcagaaaatcaaggcgacttaccgtacagtgttcggcgaagatctcgccggagaagtgcagaaaatcctcatggtcaaccaggaagatgagctctgcaagctgctctacctgtgggtgctcgacccgtcggagcgcgacgcgatcatggctcgggacgccgtcgagaatggcggcgccacggattaccgggtcctggtggagatcttcacacgcccgaagcagaacccagtttttcttaaccatcagggcataccttgccaggttcaagaagaacctggagcaggacatggtcacagag

SEQ ID NO: 30744 - DNA, 1069 bp, Oryza sativa
  unsure (1)..(1069): unsure at all n locations
  Clone ID: PAT_MRT4530_35118C.1
gctcgagccccgcgccccaggcctcggctccgctctccctaatccaaaaagaggcggctgcttgggtcgctcgcgcgctcgcgcggacgttggaggaggagccgctaccgggaggggcgccatggccgtgctcgcggggccctcccgccccgccccccccctcctccccgccatcccccccgcggtgccccggcgcccggcggctctctccttcgcccccgccgcccccgggggggcacccggccgcgtcgcgctgagcgccgcgtggggcgggagggcggccagggggcgcgtctccgccgccggccgcatcgtcgcgtcgtcggttgagcaatcctatattatgatcaagcctgatggtgttcagcgaggcctggttggcgagattatttcccgtttcgagaagaaaggctttgtgttgaagggcttaaagctttttcagtgccccaaggacttggcacaggagcactacaaggatttgaaggaaaaacctttctttcccggtctgatcgagtacataacttctggccctgttgtttgcatggcttgggaggggaatggtgttgttgcatcagctcgcaagttaataggagctactaatccccttcaagctgaaccagggaccatacggggcgatcttgcagttcaaacaggaaggaatgttgtccatggaagtgacagtcctgataacggcaagcgtgaaatcgctctatggttcaaagaaggcgaactctgcgaatgggaatctgttctgacaccatggcttgtagagtaatgctcccagatcagtgcaagaactggatgcagtgcttgttcttgatttgaggggttctgtatgagttcagatccgcagagtaaagtagcttataccaaagctcggccttctcatggctgtacaccctgacattccccttttttgtaatacccaacattcccttttttgcgtttgaccgattactctctgttgtcaaatntcctggcatgtctgtaattggttcagaacaataccagcaaagctccaacttccaagtcattatgcaaaaaaaaaaaaaaaaaaaaaaaaaaaaaa

SEQ ID NO: 30745 - DNA, 581 bp, Oryza sativa
  Clone ID: PAT_MRT4530_35119C.1
agcaaccagcggaatcaatgtcacggcttgctcggcgatgccggctagtaacgcctttaaccatccccaaaccccatgatgaactagtttgtcgcctcctgcttaatcattgatttgcaaaaattaaattccgaactccaaaggacaccattgatttgcattgccgagctcaggtcaggttctttaacagagaattgctcgattcttctaataggaactgaacaacattcttgggctttagattcggcggcggagaagaggatatgggggagaggttccccatgctggcgctcttgcggatggagccatcggtgtgtcgcctcacccctgaagattttgacccggctgtgtgggcacgccagcgagttgtgcttgttgtggctgcagtgcgagcttcactacatcatccttcccatgcccttcatcctggccccaagagcttcgaagcttcctttccccatctgtggttacgaggaggagatcgagagaagacatggatgaggaggaaggggagtggtcagtggtgggaagaggaggaggtggcggtgatgcagcggcggtaagacgcgcagcacatcgct

SEQ ID NO: 30746 - DNA, 165 bp, Oryza sativa
  Clone ID: PAT_MRT4530_3511C.1
atggcatgcatggctggtgtggacagcaggggaggggaagcgctgtcgctggcagccgtctgctgctctactgttgctgctgctgcttgtgctacagtaccattgaattcatgtatctgcatatggacgttgctagcgagctcattagcgattgatgatgactga

SEQ ID NO: 30747 - DNA, 1610 bp, Oryza sativa
  Clone ID: PAT_MRT4530_35120C.1
atccccggccggccgggaccaaaaacctcgtctttctcctcctctcctcccatggcgtccctccccaacggcgccgcctccgcctccgcctccgccgccggcggaggcccggcggtggtcgacaaggaggtggacttcgccaactacttctgcacctactcctacctctaccaccagaaggagatgctctgcgaccgcgtccggatggacgcctaccactccgccgtcttccgcaacgcccaccacttccgcggcaaggtggttcttgatgtgggtaccgggagtggcatcctcgccatctggagcgcgcaggctggcgccaggaaggtgtacgccgtggaggccaccaatatggcggagcacgcgcgcgagctcgcgcgggctaacgacgtcgccgacatcgtcgaggtgatacaggggtccatggaggacgttgtgttgccagagaaagttgatgtcattatatcggagtggatgggctactttctattgagggaatcgatgtttgattctgtcatttgtgcgcgtgatcgttggttgaagccagacggtgtaatgtatcccagtcatgctcggatgtggctagcaccaataaggagtgatctggctgaaaataagatggaagatcttgagattgctatgcatgactggaatctatttgttgaggataccgagtcttattatggggtcaacatgaatgttttgacaaaggcataccgtgcagaacatgaaaaatactatcttaagtctgccatatggaataatcttcatccaaaccaagttatagggcaagctgctgttattaaggaaattgattgcttgacagcaacggttgatgagattcgagaagttcgagcacaggttacaatgccaatcaagctggatatgacaagattagcagctcttgctggatggtttgatgttcattttcgaggtagtaagcaaaaccctgcaactcaagaagttgagttaagcacagctcctgatgtgaatggtggcactcactggggccagcaggtattcttgctgactccgcctctgaaagtaaacgaaggggacaatgttaaagtttctttcacaatggttcgctcaaaagagaatcatcggctcatggatatggagttcacatatgaattgcatgagtcatctggcaagcagcttcccgcaatcacaaccaagatttacttagaatagagcaagaacgctgactggatctgattcaattgatgaaaagattgtgtactggctaccatgtctgaaccttgcttgatagttggagccaagctgaactcctccctggtgtatttggtttttaatagagggcctaatggccacattgtgtaatactacccagaatatgtacaccgaggctgtgttgtgtgaggcatgataaaagtgccagagattttgttgtatcagtaattcatcgctcgattggttaattggcttcatgattgctgtcctatgcccatgtgtgctcagtctcaaagtcaaacacctttctcaacattttacaggagtagttgatgctcccagtttgagagggctcagtaatgataaatttgctgttttctgaagaagtcaacagcctgaaggatttgatctcgtgc

SEQ ID NO: 30748 - DNA, 1016 bp, Oryza sativa
  Clone ID: PAT_MRT4530_35121C.1
tattcaagacaagccgcgaagaagaaaattaatatgcccagcatatgctctcgtagtccccgcactgcttgccggcggcgcacgccctggcgccggcgtcgtaccaccgccgctcgtccgcccacagccggaccgcgtcctccggcgaggcccggctaccaccgtcgctgaggaagtaggtcacggcgccgccgtgggccggcgccgggtccccgcccttctgcgcctgcaggtcgcacccgccggggccgcggagccaggtggcgcgctccttggagtgccgcgccgccgcgccgctccactccagcggcggcgccccggcctgatgccgcacgtcgttcaccgcgtacaggaacttcatggccgcgatgtggccgcgcgggatcgcagagcggccgaggccggcggcggcggagacggaggcagctggcaggccggtcagaccgatgctatgcgagcggtcagaccggccagcccgtggtctgaccggccgactctgtgtcggtttcggtttcgggttgtttgtttggatatccgtggatgtttcatgtttatggcttctagatagatactatacagttctttgatttgtgtttgctcggtttcggcggtctaaccggcgaaataccatcagtcagaccagcggcatcgtggcggtcagactggtggcgacttcaggcgacgatagctaatctcgccggtcagaccggagatgcaatctcggtcagaccaacaacattcaggcggtcagaccggcgcatctacttcggttagaccgcgatccgacgaattcgagggtaacttagtcgcggccgccggttgtggacctcctaggagcgggcgccggccggccctcgacgcggccgcccgaccgccctcgacgcggcaactgccatcctgggagtgggcgccggcgcacgccctcggccgcctcgctctgtcgcgcactgcgggcccactgccgccaccaaacggctgtcacaagtgattgtagacggctgcttgagattcaaaaa

SEQ ID NO: 30749 - DNA, 273 bp, Oryza sativa
  Clone ID: PAT_MRT4530_35122C.1
gacccgtgagaaaggcaggttgtctttgcattgcatatgcagtgtgattatgtaaacagtaaactcaaccgctccgtttattactcctcagagcatctccaacagtctctctaaatacctatttggctaactctccatctaatttgacaagtcaaacaagttgtttactccatcagcctctccatttatcctctctattttgagcgtatgacagtgggacccacatgtcagtctctgcaaccctttcttcttcctcattcttctccccccttt

SEQ ID NO: 30750 - DNA, 339 bp, Oryza sativa
  Clone ID: PAT_MRT4530_35123C.1
ttcgctcgaaaccgccgcggctctccatcgtccgctgccttgcgccgtctacgcccgtcatcagcctagggctgaggggagccgaaggtcgatcgcgcgggtggcccttcgtacgcgaggggtgatgctgaacaccttgatcttccgtcttcagatggtgatgtgtgaccttgacctgcggcgttccatcgtgacacctccgttgtctatcagactaaggtaacttgaattgtacaacgtgcagtactcctgctgcgacacgggggccaaggtctgcctccacttaaaaaccggccagtgcacctgatgtattgtctgctcagacacgctcgatttgac

SEQ ID NO: 30751 - DNA, 507 bp, Oryza sativa
  Clone ID: PAT_MRT4530_35124C.1
ttttttttttttttttttttaatctgaacttcacgtatgcatttcccaaacatatctgatgaaacagatctggtgacaaacattaagcatgtcctcataataagaaacatcaatcaaagaaagggaccttgtactgttgttctgaaccattctacttggacaaacagggaacaaccattctactgataaatgaacaaacgggggataatggcaagttagcatttcgacaatagatgacaaattatacctccacgagcagattgacgcccgattgccatcatagctagtaattgctaatccaggattcagagcaccagcggctggattcaacgaactcttggccgaatcactcgccggagagagaaccatggctgcatccatgaactgctccatgggggcttcgctgtcggccgctggaacagccatggctacctcgtgtcctcgtgtacagacttgagagcaggggtggagctacatagagctagggggtgaccaggaatccggttc

SEQ ID NO: 30752 - DNA, 353 bp, Oryza sativa
  Clone ID: PAT_MRT4530_35125C.1
tgaggaattcggacgaggctcccctctgccaaaccagtctcccccaaatctcctttgcgtcctctcgattcctcgaggaaccatgtcggcctactgcggcaagtacaagggtacgcttccctccgcccttttctactgtttcgctcatcgcgcgcgcgctctctctcgatctgtgcgcggggcgctgttcttgcgctttttttcttttccgatgatgcatgtttagatctgcttgctgtgggccgttgcgtatcactggatctagtggtactcgcgaacaggcgatagggttcgagaaattcactagatctgttcaggtgattgttggtttgggtgcagtgcagtgcgtctgc

SEQ ID NO: 30753 - DNA, 219 bp, Oryza sativa
  Clone ID: PAT_MRT4530_35126C.1
tctcgatctatatccttactcgtgggtatagatcacgagcggtcgaactctagtcatcctactttcgagcgcatatataggaggcgcccgcactgatcgagagctcatggtaccctgctggagctagcataaggtctacacaaccactttttttggatgggtatgtgaaagcactattgaacgacctggacaagcacttttcctatgtgaggggagcta

SEQ ID NO: 30754 - DNA, 334 bp, Oryza sativa
  Clone ID: PAT_MRT4530_35127C.1
ccccgggctgcaggctcgactctcgtcagccttcacgaacaccacagatcgatctgcggcgttcgttggttggtctgcgatgtgcttcttcgtgttgttttgctgttctctttcgtttttttagctgttaggtttggtttggtttggtgcatctgcaggcatggacgccggcgcatgcaggcaagcaaccatggttcgctcgtctgcaacgtgcaaatctctccgttgggcatcattcagttgcagtgatgcagtcatctctttttttcgcagcagcaggtctcgatctgcttgatgagtctgggaaataatcaccttatttcctcctgagcgg

SEQ ID NO: 30755 - DNA, 164 bp, Oryza sativa
  Clone ID: PAT_MRT4530_35128C.1
cggacgcgcccactcttccgaggacgcgtgggcgtactcttgggcgtgtccaaagcattaggaccacgcgccgccaaaccatgggactgttgcgacaacatcgagatctcccggttaatgatctaccggccactgcaccgctgcaacaacaaggtgaaggagtg

SEQ ID NO: 30756 - DNA, 690 bp, Oryza sativa
  Clone ID: PAT_MRT4530_35129C.1
atgtctgctcctgttttcccggctgctggcggaggtgtgttgccggctggcgctttgctgactggtgttgcgccaggtggtggattgcagatggctggtggtggtgtgctgactggggttttgccggctggcgctgtgccgactagtggtgcgccgggtggtagattgcagatggctgccggtggtttgcagtctggtgctttgctgaccggtggtgtgccaggtggtgggttgcaggctggcttcccgacgaatgatgctactcctggtgccggtggtcctactgctggtggtcctgctgggggttctgtacctagtggaggagcttttggtgcttttgctcttgctccttccgcttcggtatgtggaggtggcaaggagtctcaggttcatggtgagccggttcaacatgagatggcagcttgtttggttgatgttggcaaaggcaagtcaaaggtagaaagtaaaggatcagctggtcacaaaattaaacatgagcctagggcagctttgattaaggtatcaaagggtaagctttctgtaaatgatgttatagttgagttggaaaggttaattcctggtagatggaggtgggttgttcatgacaatggtgatgatactttccgcaccatgtttccgtctgctgctgaattaaggcgaatggtggaatggggtaaggtgcatactaag

SEQ ID NO: 30757 - DNA, 366 bp, Oryza sativa
  Clone ID: PAT_MRT4530_3512C.1
ggaacgggtggaccgctgtgaaaaaatttccttgccttctttcacgaaccaaacatatggatacaaacaatacaccatccaacacgtcacatgaacacacaaatggcaaatttttgcttgtattttctaagttggttcactttcggatctagacaaatttggataaataaacctacactaacaaaaccacacaccaccaactcctgccttcgaggactggcctcacattgtacacagaactcttaatcgataaacctacacttaagcatcaaagctcacccaatggctaatgtggaataggacccaatgtagatatcttaatcatgtatgcgctttatttcctcaaaactttgtccacagcagtcc

SEQ ID NO: 30758 - DNA, 1257 bp, Oryza sativa
  unsure (1)..(1257): unsure at all n locations
  Clone ID: PAT_MRT4530_35130C.1
atggacgggcggcagcggcggcgttgtgctgcgtctctcgccgggctgtccctcggcgttgcaaagaagatgagccgagctagacttgtgtgggcatcgtctaagctatttcctgtactaccggtgaatattgatttcgaaaatccaaaaagtccaacgagtctccctgcctcaaaacgtgttattctgtttcggcccactcctggattggtatccctcttcgctaaaactggtatggcgcggcgcaagggtagggtgacgagtactccgttatcgacttgcccttttcgctcatacgcccttgttgctcgtttggcgatggagcgaaatcatcgtcaaggttttgcaacgggtgacaacgnagnttatgcgccacgcgggtttcatccgggatttggtgttggaaatcaacatggtggtgctccgggtgnaagagggcgtggtcgcggaagaggagggtcggccggtcgccctgggtttcgccatgatctctctcacggtggtagatggaataattttggtggaggtcatgggtggaggggtggctttggtctcaatgctggtccgagtgaaggtggatttaatggcgctgggttccagccttcttttggatctgctgttcgggcagatggaggtggagttggtgctggtaacctggtttttggtgcggtaccagggatgtctgctccagttttcccggctgctggcggaggtgtgttgccggctggcgctttgctgactggtggtgcgccggggggtggattgcagatggctggtggtggtgtgcagactggggttttgccggctggcgctgtgtcgactagtggtgcgccgggtggtagattgcagacggctgctggtggtttgcagtccggcgctttgctgaccggtggtgtgccaggtggtgggttgcaggctggcttcccgacgaatggtgctactcctggtgccgggtcagctggggcaggtgatcttttgctaactggtggtgtgttggctgctacatcggctgttgcatcggagactgtttcgttaatgaaaattgctgattcaagaaaaggaaactcccaacaggataggttaaaggtggatggaggtgggattcagactagaggttcgggggcaatggtctccaatatttctagtggtcctactgctggtggtcctgctgggggttctatacctagtggaggagcttttggtgcttttgctcttgctccttccgcttcggtatatggaggtggtaaggattcttag

SEQ ID NO: 30759 - DNA, 500 bp, Oryza sativa
  unsure (1)..(500): unsure at all n locations
  Clone ID: PAT_MRT4530_35131C.1
atagcactgtttcgggtgcgggctgcgccgaagcggtaccaaatcgangcaaactctgaatactanatatgacccaaaaatnacaggggtcaaggtcngccantgagaccatgggggataagcttcatcctccananggaaacacccggatcaccaactaaagcccctaaatgaccgctcantgataaangaagtgggggtgcnaaaacacccccnaagtttgcctanaaacanccaccctttaaagantgcgtaatanctcactgatcnancccccttgcgctgaanatnaacngggctaanccatctgcccaanctgtgggatgtcnaaatgcatccgtangggaacntcccccttananggaaaccaccncnaaanccggggtccaccaaacngaaacnaaaattccgcttganttacnaaaacttngttaaaatccaatncccccaaacccnnggtttccncccccnaggttcntccnnnngaaggtnaattcngg

SEQ ID NO: 30760 - DNA, 500 bp, Oryza sativa
  Clone ID: PAT_MRT4530_35132C.1
ggcatccataaatcgccccatagttttcttcacagtttgcttgttcctcttgtgcaatggctctctagcccagcagctatcacgccaccaccactacctcaatggcacgacgtcctcgtcgctggaagtccacacgcaccaattcacgggttccgaataaggttggcaaagcaatttgagccaaattcggagtgtgaggtctcaagctggcacaactgagttcttcgatgtctctaatgagcaatttcaatgtaccggacgtatctgttgtccgtccgacgttattgaaccctaccacgccctccctacctacccccaattacacctaaatgggtgcaatctctagctatatatcatccaacgggacgcacggtataacacgggccaactttcccaggctgtcctgagttctaccaacaacagttccaacaatcaggccaagcccaattgaccgaaagtcaaagccaaagtcaaaagttcaaggatgaaccatcaaaaga

SEQ ID NO: 30761 - DNA, 300 bp, Oryza sativa
  Clone ID: PAT_MRT4530_35133C.1
atgccttaccgcaacgtgggtactccattcgtcatctgcaccaagcctcttgttgagaagggctgtcagcttctcgaagccggcagccgctgccatgcctacagtggtagttccgtcttgccgagcatattgaagaacagaatggggattggagaaaagaaagatgctgcatgctttgtaatttgtgctggacaggtgtcgtgcaggaagacaaatcgggaaacctgtcgtgccagctgcattaatgaatcggccaacgcgaaccccttgcggccgcccgggccgtcgaccaattctcat

SEQ ID NO: 30762 - DNA, 780 bp, Oryza sativa
  Clone ID: PAT_MRT4530_35134C.1
aatacgaggtgcttccatcgtccaaaaaaaaccgggtaaaaaaaccgggcagaaaaaaccaggtttgtccaattaaaaaaaccggaacggaaaaaagaagtccgatccagaaaaaaaaaggcgaaaaaaaccaaaaaaaccggaccgaaaaaaccaggtttgtccgataaaaaacaaaaaaaaaaagtccgactcctatatccgtaacagtgaaaaaaaaagtgaaaaaaaaaaaaaaataataaaagagaaagagaacaaagacagaaaggtgcataaaagaaaaagaaaagccgcacaaaaaagaaaataaagaaaaaaataacaacaaaagtttttttttccttactggcgaaaaaaactgtagatccgacggaaaaaagatttgattcatataaaaggcaaaaaaaaaaaagtggtgacaaaaaaaacgctagatccgaatcctttaaaaacagaaaaaaaaaaaaagcaaaaaagaaccatcgaaaaaaacaagcaaaaaaacgtgccagaaaacaagaaaaaaaacacacgagaaaagaaaagcaaaaaaaaaaggagaaaaatatggttttcttcataagtaaaaaaagcaaaaaaaaacatggtaggaaaaaactgtttaaaagaaatgtgccatttctgaaaaatggtttgagaaaatcacgcaagaaaaaacggaaaaaaaacagcaaaagaaatagactaacgaagaaaaggaaacaacggaaaaaaaatgacgcaagaatcagatttcttttttttttgccgttcttt

SEQ ID NO: 30763 - DNA, 117 bp, Oryza sativa
  Clone ID: PAT_MRT4530_35135C.1
attcctgcagccctccatagtttccttggagcggcacggtgatgagatggcactgaacgatctgccatatataacggcgtcgatatcctccattccttgttcacggaaagaggataa

SEQ ID NO: 30764 - DNA, 478 bp, Oryza sativa
  Clone ID: PAT_MRT4530_35136C.1
ctaggattgatccctttttgctgtgccaacatcatcggcgccgtggtccgatatgacggcaccatacccccttgcctcatcatccatcccattgtcggccgtacgattcaaccagatagcaatggacgacgtgaaaggaacacactcggcactcggtacgctgatgttgctgtcattgggcgagcctgccatttttgtgcctgtggctgctgccgagtccattgtttcaccaaagggtgcaactttcgaggtctcctcagaccaaaggtcaattatattctccctggggccaaacgaacactgggcctgcctctaccctaccggccactatactgctacccccggcaacgtatttgaccacgctgcatgccggccggcgagacccaccgtctgccgtggcgccgtggcggggacgacgcgtacgtacgtccaagacgacgagcaagacgacgagaccggtctcgctatcgtcgcgtga

SEQ ID NO: 30765 - DNA, 354 bp, Oryza sativa
  Clone ID: PAT_MRT4530_35137C.1
atggtggatcaagttacctacggagcattgagggagtttgttaaacctggatatatttcaaaacagaagaaacggactatccctgctatctatatactctttgaggaaaaaatatcatttactcatgacgtgtggaaaaaaaaccctgtgatggaaatgagctctcgggaaaacaggaggcgatgcagcagtggctgtgtagcatggcatggtgctggaggtgacggcgacacaatgctctcccctgcgaggcggctatcaccttcggtggccaccttctcactctcgcgggtggcagcggcggcccatggcgagccccaaacggacgaggtagtgagcggaaatgataaggag

SEQ ID NO: 30766 - DNA, 341 bp, Oryza sativa
  Clone ID: PAT_MRT4530_35138C.1
gggaagggagggaatgtccacctggagcctccaccgccagtagtgcccgtccccagcgcatccgcagacgatcctcccttccaggctcaaaaccacaccacccccaccctagagagagaaacaaacagaccaacaatcaaacatactagtacaagtcgaggtagagagagaaagctcgagacaagctaaactagctagagagagatcatgtcggtggcggcggaggggaaggagaagggggttggtggttgggggtggttgtgcggttgcgggggcgtgcgcgctgtgcggtgcggcggcgcgggtgttccgcggggccgtcgcgggcgcgctgtgctggg

SEQ ID NO: 30767 - DNA, 502 bp, Oryza sativa
  unsure (1)..(502): unsure at all n locations
  Clone ID: PAT_MRT4530_35139C.1
tcgacccacgcgtccgcgatcgaccacttacccgnccgtcgtccgttggtgggctgccgcttccggcgcacngtgctgcagcagctgcccggtcgctcggccggggcaccagagatgcacgcacacngcagtggcagtacggctggcattggttggagcttggttgtgtagtgtagaccggaaatgcaaacatgggagttccggccggaaaccgatcaatcaccgggcgggtagactctgcttcagctgcccggtggccggtgggggttccgggcttcttgctcgtgggattctttcacgaattcttgccggttcatgcagcaaaatttgctgcttttagctagctatctagcttagtgtacgtacgcgcgtatgtatataatgcggagaccaattgattgatttgttcctcgaatggttttgatcaaatgaaggagaacaccattgctcacctcaggcgcgcactgcctgatgtgaccttcttgataaaaaaaaaaaaaaa

SEQ ID NO: 30768 - DNA, 3690 bp, Oryza sativa
  Clone ID: PAT_MRT4530_3513C.1
atggccaccgaagagggagcagagccttcggcgcctgtcgctgaagatggaggagcgccatctgcttccgcacctgcgccatcactaccgccttcagcccttgctacctctgtgcaggtgccgaacgcagctgacatggcgaaggcagctgcggcggcgagggcactccagaccagggcggagatcctttcgacaagccaactgctggtgccccaagccactccgtcacagccagcagcggccccaactacgctcgctgctgtgcaagtccaagtcaaccctgaccccgagacacaaaccgaagccgacatggaaggcatacgacagaacatgacacgactccaagacatgcttcgccaaatgcaaggacagcaacaagcgtacgaggcggcaaggcggtccaaggcgcagctccaagctttccttcagcagctcagccaaccccacaacatttcaagtacagccccttcggccctcccggaggggaatacaagtcaagatgcgcctagttggttgccttcaaatcaaccagccaatagcatttactcatgggagcaattgcgcgatgtctttgtccttaactttcgatgtacatatgaggagccgaagatgcagcaacatctgctcggcattcgccagaggctgggggagtcgataagggagtacatgcgtcgcttctcgcaagctcgatgccaagttcaagacataaccgaggcgtctgtcataaacgccgcttcggctagtctgctcgagagcgaactcacaagaaaaatcgccaacaaggagctacagacacttgaacacctacttcacatcattgacgggttcgtaaggggcgaggaggattccaagcgacggcaagctatgcaagctgagtatgataaggcttccgtcgccgctgctcaagcccaagcgcaagttcaaattgccgaaccacctcctctcactgttcgccagccccagccggcgatacaaggacaaccgtcaaggcaaggtcaagcccctatgacctggaggaagttcagaaccgaccgtgcgggcaaggctgtgatgactgtcgaagaagtgcaagccctccgcaaggagttcgacgctcaggaagcaagcaaccatcagcagcctgcccgcaagaaggcccgaaaagacctctactgcgccttccacagacgctcttcgcacaccacggagcaatgccgaaacattcggcaacgtggtaacgagcaagattcaaggccacagcagggagcagcagtcgaagcacctcgcgaagtagctcaagaacaagcacccccggccgaacaacgccaagatgcacaacgcagagtaatccaagtgattacaagggccgacccgccaatccaactgtcgaagcgacaaaagaagatgcagctgcgaacgatccacaatataacttcagcaggcgaagggtctccgcaatatctgaaccagcaaatctcttttgggccagaagacgccgaaggagtaatgttcccgcaccaagatcctctggcttcggcggagaagcagttcaagttaatgatagccttcggctcgggggaaaatagacgcgaagagcaagtattgttcgacgttgtcgacatcccgtacagctataacgccatcttcggccgtgcaaccttgaacaagttcgaagccatttcccatcacaattatctcaagctcaagatgcccggcccgaaaggagtgatcgtggtcaaggggcttcagctttcgcctgcttcaaaatgcgttttggccataatcaagagagcagtacgcaatgttgaggccgaaccgcatgaccgggcgaaacatgcgtcaaagcccgcacctcacggcaagatagtcaagatgcagattgatgatgccgaccccacaaaactcgtatcactagggggcgacatgggcgaagaagaagctaagaacatcctagaggtacttaaaaagaacattgatatcttcgcctggggccccgatgaagtaggaggtgtttcggcagatctcatcatgcatcacctggcagtcaagccggacgccaagccaaggaaacagaagctatgcaagatacttaaacaaagcatgtccgaaggacaatttccccttgccacgaatcgaccagctcgtggatttgatagccggttgcaactcatgagcttcctagatgcatattccggctattaccagattcgcatgaacccggccgacatccccaagacagccatcatcacaccgttcggcaccttttgtcacctcaggatgcctttcggtctgagaaatgccggagcgaccttcgctaggctggtgtacaaggtacttttcaagcagttggggcgaaatgtggaagcttatgtcgacgacatcgtcgtaaaaagccgcaaggctttcgaccatgcgtccgacctacaggaaacctttgacaacttgcgtgcagcgggcatgaaactgaatcctgagaagtgtattttcggcgtccgcacaggcaagctattgggtttccttgtttctgaaagaggcatcgaggcgaatcccgagaaaattgatgccattcagcaaatgaagcctccgtcgagtgtacgcgaagtacaaaagctcgcaggccgaattgtggcactcagtcgattcctctcaaaggcagccaaaagagcagaatacgaagccattcttctgttcctaagaaaggcaaaagcactgagggttcggcgcatgctaatccgaaccgactccaagctggtggaaggccatgttgacaaatccttcgaagcaaaagaagaaggaatgaagaggtatctggaggccgttcgatctttggaaaaatgcttcactggcataacggtcgaacatttacctagaggccagaacgaggaagcagacgccttggcgaaatctgctgcttatggtggcccacattcgcccggcatcttttttgaagccctatatgcaccgagtgtgcccatggacagcttggaggtcatggcaatcgaccaagtgaaactgggcgaagacccatacgtctgggtacttcaacccttgcttcgttgcatctctttcgccgaaggcgaggaaatggcgaaggagatacaccaagggctatgtggcacgcaccaagctgcaagaacagttgcctctaaggtgtttagacaaggagtttactggcccactgtgttgaaagtctgtgttgagcaaatcaagaagtgtgaaagttgccagcgtcatggccgaagccagaccgcgccccagtatgagttgcagcccattgcgccaatctggcccttcgctagatggggactggacatcattaggccgttcccggtggcgcgaaacgggccgaacccccttggaacgatcacttcggcagcagtacagaagttcgtatggaaaaacattgtttgccctttcggagtgccaaaagagttcatcactgacaacggcaagcagttcgactctgataagttcagagaaatgtgcgaagggcttaacctggacatcaggttcgcgtcggtcgcacacccacaatcaaatggggcggccgaacgcacaaatggtaaaatcctagaagcactaaagaaaaggcttgaggggggcaacgaagggcaaatggccagaataaatgctatctgttctctgggcccttcgaatgacccccacaagaccaaccaagttcagcccgttcatgcttctctatggcgatga

SEQ ID NO: 30769 - DNA, 320 bp, Oryza sativa
  Clone ID: PAT_MRT4530_35140C.1
ggaggggtggacgaggtggacctcgaccacacgaacccaacggcgaaaaggaaaagaggggaggaggatgcggggatggattttataggggcggggaggtcgggaacggccgggagtggcccgatttcgccggccaacgtggggaggtggaggtggagagagaggcgggattcgaatttcgaatcccggccgtctcgggcacaggtgcgggcgagcgggagggagagtgggtgcgggaggtgcggcgcatgcgcgggcgtggccgacgtggcccggaggaggcgggagcatgggcgcggcggcagagtggggcggtttcg

SEQ ID NO: 30770 - DNA, 1353 bp, Oryza sativa
  Clone ID: PAT_MRT4530_35141C.1
atggcggcggcggcggaggagggggaggggaagaagggcggcggcacggtgctgcaggggaggtacgagatggggcgggtgctcggccacggcaacttcgggcgggtgcacgtggcgcgggacctgaggaccgggaggagcgtggcggtgaaggtggtggcgaaggagaaggtggtgcgcgccgggatgatggagcagatcaagcgggagatcgccgtcatgaagcgcgtctcccaccccaacatcgtcgagctccacgaggtgatggccacgcgctccaagatctacctcgcgctcgagctcgtccgcggcggggagctcttcggccgcatcgtccgcctcggccgcgtcagggaggacgccgcgcggcactacttccggcagctcgtctccgccgtcgacttctgccactcccgcggcgtctaccaccgcgacctcaagccggagaacctgctgctcgacgaggccgggaacctcaaggtggtcgacttcggcctcagcgcgctcgccgaccacgcccgcgccgacggcctcctccacacgctctgcggcacgccggggtacgccgcgcccgaggtgctccgcgacaagggctacgacggcgccaaggccgacctctggtcctgcggcgtcatcctctacgtgctcctcgccgggtccctcccgttccccgacgacaacatcgtcaccctgtaccggaaggcccagcgcggcgactaccggtgcccggcgtggctgtccaccgacgcgcgccgcctcatccccaggctgctcgaccccaacccgaccacccgcatcagcgtcgcgcagctcgtcgagacgccgtggttcaagaagacgtccatctccaggcctgtgagcatagagcttcctccggcctttgccgatcctgctccggctaaggaggaggccgagaaggacgagccggagacgctgaacgcgttccacctgatatcactctcggaggggttcgacctctcgccgctgttcgagggggactcggccaaggggaggcgggacggtggcatgctgttcgcgacgcgggagccagcgagcggcgtgatctcccgcctcgagggggtggcggcgcgcggcggcggccggatgcgggtgaccaagagcggcgcccgcggcgtgcgcctggagggcgcggagcgcggcggggccaagggccgcctcgccgtggccgccgacatcttcagcgtggcgccctccgtcctcgtcgtcgacgtcaagaaggacggcggcgacacgctcgagtaccgctcattctgcagcgaggagctccggccggcgctccaggacatcgtctggggcgccgccgccgacccaacgccgaccgccgccgtctga

SEQ ID NO: 30771 - DNA, 402 bp, Oryza sativa
  Clone ID: PAT_MRT4530_35142C.1
atcaggttgaccgcccataaccgcgggcacggctattcggatagttttagtctgatcagaggtgtacaactgtacccacaagacacaaccccatgccacgtttccgtgcgctgacatgccaccatgacatcgaaaagaggccgtgacaggaccctttgcataaccccctctaaccaagcacatcacacctcaagtttcacccccacttctcaataggcagcgggcagccccctctcgtgcctaggtgaatcagcaagccgcataggtcatcgtagggcccatccgaactccataacgttcacccttgcctggatgcgtcatctagaggaaagctacactacaagcccaactgttgcccacgctggcttgtggtaagtacgataagttcttctagggcatccc

SEQ ID NO: 30772 - DNA, 444 bp, Oryza sativa
  Clone ID: PAT_MRT4530_35143C.1
atggcgactgggttttctgcgtttctcggttgcaaaaccgcgggcctccgtgtcacgtactcacgttccgcgtctgcgcgcgcgcccgaccgcccgaggtggagtcgggagcggcccacttgtggctacggcctcgttgctgtcatcttcgcgtttcggcggaagcgaaagggcaggccctggtttccgctgcgggcggcgtcaggttggaaatcggtagcggcccaagaggagaatcgcggagctgggctcggggcttgtgggttttcccatgttgataaggccgagtggatctacatcacgatcgttgctgctaagagcagcttcgactcctacaaagggatgctggtcaaggcaagcgtcatcgcgctgctcgtcgacgctaccgccaccgtggtcgtctggtcgctaaggagaggacggcgtaggcgctacgcgagctga

SEQ ID NO: 30773 - DNA, 350 bp, Oryza sativa
  Clone ID: PAT_MRT4530_35144C.1
agaacttccaaaaaaggaagaacaaggacatttatttatttatttcccgtaagggaaatcccccggggactgagctaccttgcaagccatttttaaccataaaacccaacatcgcgaaacaaatttttgactgaaaacgctaagtttgggaaaagccagcctcccccttttgtacctactactactactgggaacctattgggccggacttcaagttacaaatttgacttcaagaggggggtgctaagtgggggcgctaaatggtttaaagccaacttttcctctgttgggcaccctggcacaatgtgtttaacaacccttctcatgctgactttcaagctgcaaccctg

SEQ ID NO: 30774 - DNA, 918 bp, Oryza sativa
  Clone ID: PAT_MRT4530_35145C.1
atggccgtccgtctgcgaagattaatcttcctagacagacgatataaggtgccacctggaaagatacatctttatagacggagctttaagaggtccagcaggggaaagattgaggatatttccagtattacaagcaacctaaaggcagtgtcctttacggatagtacatatgcgaatttcatagggttaatgggaggtataggaccaataaagaggatttgtctacaatcgaacgtcgaactagctttcactacgaaggcattagaaacatacagtgggacctctaccacttcatctaccataattaatcttggtttatcacccaagatttcaaatgtagatgatgtagctctgacggtgatgtggccatctacgttgatgagaattttgtatttaagcccctccactacattatgcctccagatcgactcccatcacgctcgtgaaagagggggcaaagggggtacccggaggacaacaaaagaaggcggcggccggcagagtggcggtggcagtggcccggtggaggcggcagcagcggtgatagcgccctcccgtctgcctgatgtagccagaggggaggcggcggacctcggcggctgccgggcaacggcccggcggaggcggcagaggcgtgggaaggccaccggcaccgtccctcctcctcttcgtcccaccaccttcctatcgatgctcgggcaaccagatccggcatgccccatcgccaccggcgctcagggacggccaaatccggcatcgcccctccccactggcgcttgggggaggccagatccgggggtggtggtcgaggaggctgggcacaggggacgttggctgtggtggaggccgggcgtggccggaggcttccacaaagatgcagtggctgcctccacaacagtgttccttgttggtttttga

SEQ ID NO: 30775 - DNA, 198 bp, Oryza sativa
  Clone ID: PAT_MRT4530_35146C.1
ccaagggaaaaggtttaactaacataggatgcccgcaaaaaataacaataaaaagatagcctggaacttaaagccgctgctccaattcaccatacccagcatttgtttacaggaattccaaaaaactaccaccggtgtcaggtattaatcattaaaaagcacaggttcagaatatacgctcccaaaatttttgacacc

SEQ ID NO: 30776 - DNA, 572 bp, Oryza sativa
  Clone ID: PAT_MRT4530_35147C.1
ggcgggaccttccctttgtcgcgcttgctggtcctccacctctcacctactgtaccaacacttcttccgctctcccccactctatatcgctctcccaatgtctcgaccatcttacctttgaatgctcaagcgaagtgcaaaaacggctcgacgactgggactagataacaaggatgcggtgaatcggggactccccgacgattacctcggccataacaagagaagcccacgtgagggagacatctgattatgcttgggagcgtgtcttcgctgccatagaatgtggagcgaccacaccgattcaagccatggatgatgacatgcaaacaggacaacattattcctttcgaagaacggattaccttcttgacacctccctggaatgaggatatgtcaactgcgccgacaagagacaaccctctgtgacaaccaggaactccttcgtaaatatacctgctgaccacatgaaccccctcctctccttttcctcacatgcatcccgtggactctttttgtcctgtatcctaacgacagcctatgcatgtatgtctatgaaacgtgatgacagaata

SEQ ID NO: 30777 - DNA, 698 bp, Oryza sativa
  Clone ID: PAT_MRT4530_35148C.1
cagagagaggatgtggacaaaagtttcaggttttaaagggcagggtttatcgaatgcaggaaaagatgtgtaaaaaaaatcagtcctattagcagttccaacctactccatgagagattgccaaaaggtttgtgctccaaattattaaccaccattgtcaggaatttctagtgggggcgacagcagggaagaagaagactaaatagatttcttggcaaagattatgtaaatcaaagagtggaggcatagggtttcgggatttcaagatttttaatcaagcaatgcttgctaggcaggggtggaggattttgacatgtccagagtgtctgtgttccaaagtattaaaggctctctattttaaaaattgctcctttctggaagctacatgtccaaggaaggctttgtatatgtggagaagcattatttttggtagagagctgctgagcaagggcctgttatggcatattaccgatggtaaatcaatcaaaattaaaagagataatttgatcccatgggtgggctcctagagaccgctaggttttaaggagccggtgggcgaccagacagtatcaaaactatttatatcaagcacaaaacaatgggacaatgatagagtttctgttttttcgtttgagtgtgacaccaccgatgtgcttaatataccgttacctgaacatgatggagaagattttgttgcc

SEQ ID NO: 30778 - DNA, 506 bp, Oryza sativa
  Clone ID: PAT_MRT4530_35149C.1
atggcggccactcagctctgggctctcgcgccattggcgctcctcctcgtcctgcagctcgccggcgcgtgtcacgccgtcccccagagcctcgaggccgagcaggcgtcggactcccactttcagccgcccatgatgaactggatcaacggaatggtcggattgtgcattgcctccgccgccgtcgccgtcgcggcggagttgtctcgggagcaggcgtgcctgggcctgcttctgtgcctcgccttccatgccggtatcgcgctcgtcatccgcgccgccgccgcccctgacgccggccgcggcggcggcgtgcgggcggccgcggagcgcggggaggacgcgacggcggcgggcggcgccgaggaggggggatgatagatatggagtatataattatggggatgtgtgatgtgtgcttgtcttaactttatcttgttttgttcagctatatattcgccctgaaaagttgctcggaattatcttaaaataaatattttgtttac

SEQ ID NO: 30779 - DNA, 924 bp, Oryza sativa
  Clone ID: PAT_MRT4530_3514C.1
atgcgggcgacggcgcttcgcggcgacgcgcatgcggggagcggcggcgcgcgtgagaggaagagaaggggagggagttctcaccggggttcggccggcgcgggaggatacgacggcaaacggcgacggtcagcaagcatcaccaatcggagccgggcagccgaatgtcatggcccaacctcatgcgcaagccgtgatttctcccttcgccacgccgtacccacagcaaggtgccgtgaacacggcagggggcaaaaaggggctaccgctgagtggggaatcaagacccgtccaatcccaccccaattcaagttcccccccgtcccacgctacttagtcgaaactgacccaaaggaattcctctctatttacaagtccgcgatcgaagcggctcatggtgatgaaaataccaaggccaaggccgggggagtcgataagggagtattgttcgacgttgtcgacatcccatacaactacaatgccatcttcggccgtgcgaccttgaacaagttcgaagctatctcccaccacaattatctcaatctcaagatacccggcccggtgggagtgatcgtggtgaaggggcttcagccttcggccgcttcaaaaggcgatctggccgtaatcaatagagcagtgcataatgttgaggccgaacaacatgaccgggtgaagcacgcgccaaagcctgcccctcacgacaagataatcaagatgcagattgatgacgtcgaccccacaaagctcgtatcgctggggggcgacatgggcgaagaagaggctgcgaacatcctagagtactcaagaaaaacagtgatatcttcgcctgtggccctgatcaggtgggaggtgtttcgacagatctcatcatgcatcacctggtgtaacaccctgaaaattcgaccgacaaaacaaaaactctaa

SEQ ID NO: 30780 - DNA, 1197 bp, Oryza sativa
  Clone ID: PAT_MRT4530_35150C.1
gcgccgccaggcacgcctcctctctcgtcgagagcgcatagataaccctagcctcccccttcctcttcctctcctccttctctcgatctctataaaagacctcggatttcgaattcctccgccccgcgcgcgcgcgccacctcccccacgcccgtcgcgcccttttttttgggggtgggattcgcctggtcaagtgccatcgtcggatcatggcggcggaggcggcggcggcgctggaggggagcgagcccgtggacctggtcaagcacccctccggcatcatccccacgctccaaaacatcgtatcgacggtcaatttggattgcaaattagacctcaaagctatagctttgcaagctcgcaatgcagaatataatccaaagcgttttgctgcggttatcatgagaataagagaaccaaaaactacagctctgatatttgcatcgggtaaaatggtctgtactggggcaaagagtgaacaacaatccaagcttgcagcaagaaagtacgctcgtattatccagaagcttggctttcctgctaaattcaaggatttcaagattcagaacattgttggctcttgtgatgttaaatttccaatcaggctggagggacttgcatattctcatggtgctttctcaagttatgagccagaactctttcctggtctgatatatcggatgaagcaaccaaagattgttcttctgatttttgtttcaggcaagattgttttgaccggagcaaaggtgagggatgagacgtataccgcctttgagaacatataccctgtgctaacggagttcagaaaagtccagcagtgaaaacttatggaatacacaagtacaagcttccttgagattttgctgcctagtgactgctaatcttaactgtacatatggtctggaggagcgtatagcatcttgtaatttatgtgagcccctcgatgcacgagtgttgtagacttgttgtagtaggcttgtagcttgggtgactgagagacttgagtatcgcgttcagtcgaacgaggtggagacgtggagttatcgtactttagcccgtgctgatttttttcccttcacaaatagatctgtagcgaaacattttattacagaaatgggcggctaacttttaacaaacagaacaaaaaaactgtggatgcgttgcgttttacagtagaatgtcatggactgtttggat

SEQ ID NO: 30781 - DNA, 846 bp, Oryza sativa
  Clone ID: PAT_MRT4530_35151C.1
atggcgaaatcttgcaccttggtactactacttgtcgcactggtcgggctctcacttcttcaagccgaaacccaagccgaagccgagcatgagaagccggtggtccgggctcacaacaactacaccggtagcccgtcggtgacggtcaccaccggctgggccgccgccggcgccacgtactacggcgcccccaacggcgacggcagcgacggcggcgcttgcggctaccagaccgccgtcgggcagcggccgttctcgtcgatgatcgccgccgggagcccgtcgctgtacaagggaggcaaggggtgcggcgcgtgctatgaggttaaatgcacgaccaacgcagcttgctccggccagccagccaccgtcgtcatcaccgacgagtgccccgggggcatctgcctcgccggcgccgcgcacttcgacatgagcggcacttccatgggcgccatggccaagcccggcatggccgacaagctccgcgccgccggtatcctccaggtccagtacagaagggtgccatgcaagtacagcggcgtgaacatcgcgttcagggttgaccagggggcaaacccgttctacttcgaggtgctcatcgagttcgaggacggcgacggcgacctcaacgccgtcgacctgatggaggccggctgcggctggacgccgatggtgcagaactggggcgcgctctggcggtacaactccaacaccggcaaggccctgaaggcgccattctcgctccgcctcacctccgactccggcaaggtgctcgtcgcaaacaacgtcatcccggcgagctggaagcccggcgtgacgtaccgctccctggtgaactactcctaa

SEQ ID NO: 30782 - DNA, 154 bp, Oryza sativa
  Clone ID: PAT_MRT4530_35152C.1
tcgttactccatctcactggcagatggggcattcgccctgttgccacaatgcatgcgggggcggccgcggctacactaacacactgtcctcacacattccgccgagcttttgttagctgtgctgggtcatgagtttggacatcagctagcacgc

SEQ ID NO: 30783 - DNA, 1401 bp, Oryza sativa
  Clone ID: PAT_MRT4530_35153C.1
tgacactcgagctgagcacgtctagctagctatatctctcaacatcttccgagctactactagtagctagctagctagaggaagcagcagcaatggcgaaatcttgcaccttggtactactacttgtcgcactggtcgggctctcacttcttgtgagccccattgcttgctcccgcaagctcagcaagccgaaacccaagccgaagccgagcatgaagaagccggtggtccgggctcacaacaactacaccggtagcccgtcggtgacggtcaccaccggctgggccgccgccggcgccacgtactacggcgcccccaacggcgacggcagcgacggcggcgcttgcggctaccagaccgccgtcgggcagcggccgttctcgtcgatgatcgccgccgggagcccgtcgctgtacaagggaggcaaggggtgcggcgcgtgctatgaggttaaatgcacgaccaacgcagcttgctccggccagccagccaccgtcgtcatcaccgacgagtgccccgggggcatctgcctcgccggcgccgcgcacttcgacatgagcggcacttccatgggcgccatggccaagcccggcatggccgacaagctccgcgccgccggtatcctccaggtccagtacagaagggtgccatgcaagtacagcggcgtgaacatcgcgttcagggttgaccagggggcaaacccgttctacttcgaggtgctcatcgagttcgaggacggcgacggcgacctcaacgccgtcgacctgatggaggccggctgcggctggacgccgatggtgcagaactggggcgcgctctggcggtacaactccaacaccggcaaggccctgaaggcgccattctcgctccgcctcacctccgactccggcaaggtgctcgtcgcaaacaacgtcatcccggcgagctggaagcccggcgtgacgtaccgctccctggtgaactactcctaaattaattacagctctctccacatctcctgcaagaagctgcagtgcagagttgcggtaaattggtaattacagatttataattagcctcgggttaattatatggcgggaaatgtgcgtccgggtgttgcgagaggcggtgtcagaagaggaggaaaggaggtttaagaatcgtgttcttccctccacggtctctgcattcccctagtgatgtgactgtgtcgtcgtcgatttgtctgtaaaattttatttttcttagttatatcttcctctgttattgtcatgttgagggagaagcttgagctgcaactaatgttgcatgccgatgtatcaagtttgtgtgtgtgtgtttttttgtaccacgcaaatctttcagataaatggattagtactgtcagaagatttctgtacttcaaaaaaaaaaaaaaaaaaa

SEQ ID NO: 30784 - DNA, 114 bp, Oryza sativa
  Clone ID: PAT_MRT4530_35154C.1
atgaagacaaaggcgcccagcaacggtgacaaagttgtgcagccatggcagcaaaataatcagtcaataacagacgaggcgctcgatgaagaaaatgaagacggccatcagtag

SEQ ID NO: 30785 - DNA, 398 bp, Oryza sativa
  Clone ID: PAT_MRT4530_35155C.1
cacttcaacaacactccctcgctcacgcttcggcagtcaccagcgtcctcgcgacaaccaaccaacgcaatgaccagcttcgtacgcctcgtcggtcttctcgccatggccgcggcactctcgcccagtgccacctcggcggcttctcttcgcagcctcgcggccatggagtaccaggccgtcatgggggtgcccgctgatccactgctatgtcgagaacggctacgactacgtcggcaacgacatcaccaacaagcccggccttgtggatagctgctgctggtcatgctccagcacacctggctgcaaggcctggtcgtggtccaaccacaacggtggcacgttgctggctcaagtcgggtcgcggcgacatcgtcgtcaaccccaacgtcaagtca

SEQ ID NO: 30786 - DNA, 165 bp, Oryza sativa
  Clone ID: PAT_MRT4530_35156C.1
atgcccgtgactgcggcagacgacggagatgacggagatgacgggcatgatctgatgagtttggggttgagcagttttgacatgataaggcaccaggcgaagacctttgccttagcattggtagacggcattggccttattgaaggtgctattataggtgtgtaa

SEQ ID NO: 30787 - DNA, 286 bp, Oryza sativa
  unsure (1)..(286): unsure at all n locations
  Clone ID: PAT_MRT4530_35157C.1
gtcccccctcaccaccgtggtcgcgcccgcccgcgccctcgggcgacctccgcgccgcccccgagcccgccccctccgccccacaccccctccaccgcctcaccaccctcgccgtgttcagacgcccgcggcggcctcgtctccccgcgcggctgcgcggcgcgcttcgccgtcatctcctcctcctcccttccctagccccgcccggcgccgcccgcgctggtctcctcgtcggtgctggcgatcgccaacgcctagttgcgtgaaaaaaaantttttttataaa

SEQ ID NO: 30788 - DNA, 546 bp, Oryza sativa
  Clone ID: PAT_MRT4530_35158C.1
gggcgacgccgcggttgcttgttgcgggaagctgtggatggagcagatcgagggtggcagcggtcgaggaggcgaggtccacggtggtgggcggtcgaggtggcgagctcctgccaaggcgcatatctggatgggcgaggtcgaggtcctcgtcgccgtcattgtcttgatgtctagcttctgttcgggttatgaggagggctgtgacggctcacatctcttccaggatccacctgcagatcacacggttcaccatccacgcgcatgactcgtcccacgatcctcccaccacatctccaccggagtccagcgagaccccatcgccgcccaccatccctcagtcgctgctgcgctcgcatccaccgcgccgcctccccatttacgcctccatcccagcgccccccgcttcccagccgttgcccatcccgtcctcctcctcctcgccatgccgcttccccgtcgccgccaccgctgctcccaggacgaactgacctaggcggcatctaggccataccaaccaatgtcggccatcctccccaaccatga

SEQ ID NO: 30789 - DNA, 327 bp, Oryza sativa
  Clone ID: PAT_MRT4530_35159C.1
atggatgccgacacggtggagaacggaggcgaggcggctccggtgcggtggagggcggaggcgaggtggctccggcgcggtggaggacggaggcggctccggcgcggtggagaacggaggcgaggcggctcttgcgcggtggagggcagaggcggaggcggctctggcgcggtggagggttggaggtggaggccgggcgcggtggatggcagcggcgcgaccgcgctgtcgacgtttgatgtcacgattccggtatttgcatacgcagagccgcagggcgcaggctggattgatgtactggtggaggggatcgatgtactggtggag

SEQ ID NO: 30790 - DNA, 4344 bp, Oryza sativa
  Clone ID: PAT_MRT4530_3515C.1
ctaaccacagccgagttcgcccgcttgctccagcgccatgttgacggccgagtgaaccgtgtctataccggcaaattgccaagccgatcgaacccctctcgggccggcgatgacgaggctggcactttgaaaaaacgcaaacgtgcggtcgcgaaaggcggccaagtccgaactcgccgtagcgcgaaggccgccgtcgaaagtgatggggaggaggaagaggaggatgcggaggccggttctgaggaggatggctctcatggttatacccccagccctacccctgcgaaatccggggcaggctctcatgtttcgcctacgcgactgcaagatatcgtcgtagcgaacaccctcttggcgatctccagcacagccgcgaaaccggtgattaggtttaggtaaaagttcgactgttatgccggtgaagcacttttccatagaccgaacggcctccaaatacctcttcatcccttcttcttttgcctcaaaggacttgtcgatatggcccgccaccagcttagagtcggttcggattagcaggcgccgaatccccattgctttcgcctttcttaggcccagaagaatggcttcgtattctgttgcgttgttggttatgtcgaactgcagccttgtggcatactgaatcggcacaccacttggcgaagtgagtactgccgcaatgcccgcccccttgtgcgaccacgaaccgtcggaatgcatcacccagggctgttcgacgggttcgggctcgggggccagtgccggtgtccattcggccacaaagtcagctagcacttgggacttgacagcagttcgggcaacaaaatgtaagtcgaaaggggatagctctgctgcccacttgctaagccggccagtaacttctttgccccggagtatttcgcccaaagggtactgcgatggcactatgactttgtgggcctgaaagtaatgcttaagcttgcgcgaagccattaccagggcgtaagcgagcttttccatctcaatgtatcttgtcttcgctccttgcaatgcttcggagacgaaatagaccggtttctggcctgaatctgtttcttggacaagggcagcactgactgccactggcgaagctgctaggtatagtagcagttcgcttcctggtgctgggctaatcaaagttggcgggctttgcaggtattgctttagctcgtcgaacgctgcttggcattcaggtgtccagttgaattttcccgcgccccggagggtcttgaagaagggcaaacctctttcggctgcctttgagaggaatcgactgagtgccgcaattcggcctgcgagcttttgtacttcacgtacgctcgacgggggcttcatttgcagaatggcatcgattttctcgggattcgcctcaatgcctctttcagaaacaaggaagcctaacaacttgcctgcgcgaacgccgaaaacgcacttctcaggattcagtttcatacccgctgcgcgcaagttgtcgaaggtctcctgtaggtcggacgcgtggtcgaaagccttgcggctttttacgacgatatcatcgacataagacttatacaccagcctggcgaaggttgctccgacattccttaggccgaaaggcatcctgaggtgacaaaacgtgccgaatggtgtgatgaaggctgtcttggggatgtcggccgggttcatgtggatctggtgatagccggaatatgcatcttgaaagctcatgagttcgcagccagctgttgaatccacgagctggtcgatccgtggcagggggaaatcgtccttcggatatgctttgtttaggtctatgaaatcgatacacatgcgccatttgccgtttgacttccgaaccagcactggattcgccagccactcaggatggtcgatctcttgaatgaccccagccttgagcaatttttggacttcgggttttgctgcttcttggcgatcaacggacatcttgcgcagcttctgtttccttggcttggcatccggcttaactgctaggtgatgcatgatgaggtctgtcgaaacacctcccacctgatcggggccccaggcgaagatatcactatttttcttgagtacttcttggatgcttgccgccacttcttcgcccatgtcgccccccagcgatacgagctttgtgggatcggcgtcatcaatctgcatcttgattatcttgccgtgaggggcaggctttggcgcgtgcttcgcccagccatgtggttcggcctcaacattatgtactgttctgttgattatggcaagatcgccttttgaagcggccgaaggctgaagccccttgaccacgatcactcccaccgagccgggcaccttgagcttaagataattgtggtgggaaatagcttcgaacttgttcagggttgcacggccgaagatggcgttgtagttgtaagggatgttgacaacgtcgaacaatacttgctcttcgcgtctgttttcccctgcgccgaaagttaccaacaactgtgcttggccaagtacttgaactgcttctccgccaaaaccacggagcgaggctagcgccggggtaagggctagggtgggcaaccccatcttggcatatgcttcggcgaagatgacatcggccgaactccctccgtcaaccaggattcgccggacctcgaaaccagctatctcggccgagatcaccaaaggatcttgatgcgggaacattactccttcgacgtctcctggcccaaaagagatttgctgattcagatactgcggggccccttcgcctgccgaagtgatattgtggaccgttcgtagctgcatcttcttttgtcgcttcgacagctggatcggtgggtcggcccttgtaatcacttggattactctgcgctgcgcatcttggcgctgttcggccaggggtgcttgttcttgagctgcttcacgaggtgcttcaacagctgctccctgctgcagccttggatcttgcacgttgccacgttgccgaatgtttcggcattgctccgtggtgtgcgaagagcgtccgtggaaggcgcagtagaggtcttttcggaccttgcggacaggctgctgatggttgcttgcttgctgggcgtcgaactccttgcggagggcttgcacttcttcgacagccatcacagccttgcccgcacggtcggttctgaacttcctccaggtcatgggggcttgaccttgtcttggcggttgtccttggatcgccggctgaggctggcgaacagcgagaggaggtggttcggcaacttgaacttgtgcttgggcttgggcagcggcgacgaaagccttatcatactcagcttgtattgcttgccgtcgcttggaatcctcttcgccccttgcgtacccgtcaatgatgcgaagtaggtgctcaagcgtctgtggttccttgttggcgatttttcttgtgagttcgccctcaagtagaccggccgaagcggcgtttatgacagacgcctcggttatgtcttgaacttggcaccgggcttgcgagaagcgacgcatgtactcccttatcgactcccccggcctctggcgaatgctgagtagatgctgctgcgtcttcggctcctcataggtgcctcgaaagttaaggacaatgctattggctttggtattggctgaaatgttgtggggttggctgagctgctgaaggaaagcttggagctgtgcctgcagagccgaagccccttctgccattgtttgtggcacttggccaggcagttgagggtgtacttgggcagcgaccggttgagcttgcagttgcacgtgaggggccggatgcgctgctgcggtcgatggctgcccagcgaagtacattggcgcttgcacaacttgtggcggaaagggttgggtcggtacttgtggataaacttggggtgggacatagcctgccgaatactggaggattggggccgaagtgaccttggaccgccttgccgcctcgtatgcctgctgctgttcttgcatttggcgaagtatgtcttggagtcgtgtcatgttctgtcgcatggcttccatgtcggcttcggtttgtgtttcgggatcagggttgacttgggcttgcacggcggcgagcgcagttggggccgctgccggctgcgacggagcggcttggggcaccagcagttggcttgtcgaaaggatctccgccctggtctggagtgaccttgccgccgcagccgccttcgccatgtcagccgcattcggcacctgtgcagaggtggcaggggctgaaggcggtagtgatggcgcaggtgcggaagcagatggcgctcctccatcttcggcgacgagcgccgaaggctctgctccctcttcgccggccat

SEQ ID NO: 30791 - DNA, 912 bp, Oryza sativa
  Clone ID: PAT_MRT4530_35160C.1
tcacaacttaaaccttggaaattcagcttctgtcacagatggccgattgacaactttcaagaccatcaggtttaaccaggtctgcagcaaccaccatggtctacctactccaactaccgatccgacagctatcttggccgatgcattgttcaacatttggtataaatagtcgaggaggattttgcccaaaggaaattgtttctttgattctagggcttcggctataaattgccagttggttgtaggaccacaactggatccacagaagaggaacttttctaaccacattagcaagaaagctacatgctctcgaggagtgacaggccctttacccatgtatgcagctacatagccagaccagccacctatgcttttggttctaaaatcaaattgattcttggtattcatgctcatagggttggccgatgaggttacatctagtccagtgatcatggtgatgtcaatcagagtaggagtcatcggccctcggttgaacagaaaggcattgatggtattggaccagaaataagtggcagcggccatcagaggttcatccttagctgaattggctatggtaagggcaagtgcttggccaatcccgatttcatcccagtgaactttcttactagccgatacacgcttgtaccatgtggtccaactcctctcaggggtggttttctcgagagatggccaagacttaaaagttttcttccagtgacctaggttagggttggctaatctaaaggggattctgttgctttcgccgatgatgaaatcagtggggtcaaggttgccgattggaccaagaaagtaatggttttcatgcgacaggctgggaatcgcaactagattggagaggtgctcagcgtactcggctgatggcgcggtagacgggctggcggaggacgacat

SEQ ID NO: 30792 - DNA, 278 bp, Oryza sativa
  Clone ID: PAT_MRT4530_35161C.1
cccgacccataattccctggtccccccccgcctcccattcttgctctctaacacagcttacctggggggccttatttaaaataaccggggggtacaaacccatcgacctcaccatcgtggaagagctggctagcttccgcccgacagcgcacacctgccctcgaaaccagtccgatctaacccgatgccaataggaatggactgacaacgccctctccagaaccaaaatcctctgcgacgtgacgtggcgcgccaacagggaggccctcgccatcatt

SEQ ID NO: 30793 - DNA, 1314 bp, Oryza sativa
  Clone ID: PAT_MRT4530_35162C.1
atggctttagatccaaatattccactagatgagagagatgaggaggttgttcctgatctgaatgaaccaatgggtcaacaagaagaaatgcttgctggtgaagaggatgatcatcttggagcttcaggactcaaaggcaagaaaagccctaatgtccaagagaaccatttgagtttgctatcagcctgtcacacagtagagaacacggtgatgatgccatggaacaagttctggaaattaatggaggtgacaaccaagatgcatttccttttgatctcaaccttgatacctactaggaacacctacaaatgcaagcaggagtacggcgtgtatgccggcgatgtgaacattgtttttgaacaagaggagttggatgattcagatctggaagatgaacattcaaacaaaaatcttactaatatacaaaggcaagcaatatatgatgcattgctaaggggcactttacggtcatttgcatcagccttagatccacatactttgccaaatgaacccaagttcgttgatatgcgcaacattgtgcacatcgatgaaaaatggttcaataccactaaaaagacaagaaatttttacatggtccattgggaggatgatctatacagacctgtgcaaaacaataattccattgataaagttatgttcttggcagcagttgctagacctagatacaatgaagaaggtatatgcactttcaatggcaaggaaccagcacaacggacaagtcaaaacagacctaggggcactcttgtcaccaagacaatcaaggttgatagagataccgtaaggtcatttctgattgctaaagtgttacaagctattatatcatgttggcctagagaacatgcacacaacactatattgattcagcaagacaacgctccttctcacgtgctagtggatgatcctcaatttgcatatgcagtatcacaaacagggtttgacatccgcctaatgaatcaacctcctaattccccagatatgaatgcactagatcttgggttttttgcgtctctacagtcattaacatatagaaggatatctaggaatatggatgagctaatagataatgttgagcaagaatttcatgcctatgatgacagtaagctaaatagggtgtttttaacactacaatcatgcttgttggaggtcatggaagctaatggtggaaatggatataggatccctcatatgggtaaagagaggctacaacgtctacacatgcttcctaaaactcttagttgtggttgtgatttatatgacaaggttagatcagcattagtcaaccaagtgcagtaa

SEQ ID NO: 30794 - DNA, 603 bp, Oryza sativa
  Clone ID: PAT_MRT4530_35163C.1
ctatcctaggaaccacgccgacgaggtgtccttctccacgacgcacgacggggaccggagcagcgacgacgtcgtggcgattgcaccccacgtcctcctcctcctcggcgagggcaccggagctgctgtcgtggtgcatgcggaaccgtgggaggagaagatgtagacgcggaaccgtggcgacgccgacggcgaccgtttctccttggagcagtcgtactcgtcgagcatgtgggtcaggtcctcgtcccaggtgacggagacgagcacgtcgaggtcctcggcgacgaccgccacctccgtcctgaacatctcctccaccttcttcttcaaatctgcacgcggcgagaagggtatcgagcggggcacggcgaggatgcgggtctcgctgtcgatgtacttgagggcgtcgtcggatgggcagggcatgatgcggccgccgaagctgcagagtatcttgatgcggctgccgccatcgacgcaggctccacgtccgccgccgctgcagatgctggtcgggtggcgtacgtgggcggccgtcgccgtacagctcgcgtggcggcggtacaagcaccgcaagacgctcgcgttgctctccttcat

SEQ ID NO: 30795 - DNA, 1154 bp, Oryza sativa
  Clone ID: PAT_MRT4530_35164C.1
caccatggtgggcgggggcgccggccgggaattgcatttcgaattctagggttttgttggcccccattcctcccccaccccggtgtcctcccctccgccgctcgcgtcgccgcctttttcccctatggcgctgccgaatcaggggaccgtggattaccccagcttcaagctggtcatcgtcggcgatggcgggactggtaaaactacatttgtgaagaggcatctcactggagagtttgaaaagaaatatgagccaaccattggtgtcgaagttcaccctctagattttaccaccaactgtggtaagatccgcttctactgctgggacactgctggacaagagaagtttggtggacttagggatggatactatatccatggtcaatgtgcgataattatgtttgatgtcacttcaaggctgacttacaagaatgttccaacatggcatagggacttgtgcagggtgtgtgaaaacatccccattgtcctgtgtggtaacaaggttgatgtgaagaacaggcaggttaaagccaagcaggtcacattccacaggaagaagaatctccagtactatgaaatttctgccaagagcaactacaactttgagaagcccttcctttatcttgcaaggaagcttgctggtgacccgaacctgcatttcgttgaagctgttgctcttaaacctccggaagttcccattgacctggcaatgcagcaacagcatgaggctgagcttgcggctgcagcagcacaacctctcccagatgacgatgacgatctgatcgagtagagaggatcatgagtctatcatgcttcagcctgagtctcttcataagagtctgaattaggccaatgcatgctagtgttagcttgtctgtggaatgtggacgtttcctgcgtgcctgatgggttgaaaacttttgatgtgtggtgttacatgttgctgccatgaatttgttggctcttttttaacactgctgtgttacttctatggttatgcttaaactatttgtatcatcgagctggtatttatttatccggtgttgcacaaaataaaaaaaaaaaaaaaacccgcggccatccataaaaaatttttaaaaaatttaaattattttttaatattttttaattttaattttttatttaatttttat

SEQ ID NO: 30796 - DNA, 1497 bp, Oryza sativa
  Clone ID: PAT_MRT4530_35165C.1
atgtggcttgtgggcgacctcgacggcggcgggacgtggacccggctccagcggcagcgacgccagcggcgtgtagcggcttcacacggggagcctggaatcggagctgttgcacagagaaaaagacaactgaggagcaacataaattatactcgctcacaattcgcagttcaagcaaccaataattcaaagaccctagccccgccacatagaggcaaagctcgctccgtctttactcgccaccaaatcacatcggagcgcaaccgcctccactggtctcaatcagagcggcagtcacgccgggccaatccgggaatgcccgagcgtcgtcgcccctatcgcaagtggccactcgtcacaggactcgcatcgttgagcttcgctccgaccgtcctcctccatcctccgtcgcccctgcgccaaccgccgccacggcgcccgcctccgcgcctaccgccgcggcgcctgcttgctcccggcctgccggcgccgcgtcgctccttctccagcatcgccggccggccgtcggacctcctctccaccaccggacggcctgcccagagagaagagcccatattcctttgtccacttactggaaatttggagctgatgagtaaaactcaatttgtcgctgagttcgaaattcgtccctcgagtgcaaaacggatacaacgcatccttcaacttacaaaaccgtgtaaacaaggtcccttggcagtattagagcaggtggagcacgcacctcaagaagcgggtgttgccggagcagaagaagggtgggggcaagagcaagaagaagacgacctggaccgacgtgctcgtcccgtccccctcgccgttgtcgtcctccaccgcgcgacggccaactgctccaacggcaactcagccggggcgcagagcaacacaagcaaggaggaggaggcggacaagatcgagatccctatgctcgacccctgcagcttctcatcaccgacgcaaccactgctgccgttacggccatggcgccgcctatcagcaccagaacttggtatttccctgaagaatctcgcatattgtttgctgctgctgctaccagggcagcgacgagcagtgccaagcaagacggcagcgaccgaaccacgaaggtgcctgacggtgacgacgtgtcgcctgtgcgtgacattgctggtcgccgataggtacacgccgctattcgccgacgtgctgtggtgggaggcgttctcggtggcggtggcggtcgccgacgtgcccagactgagggagtcgtcggcgccggaggtggagcgcctctgcggcggcgtgcggctgagcagggaccggttgtatctggtttttgagttgaaggacgaaaatcggattcggtgtaaagttaagggacctcgtatgaacttattccgtaaaactttgggggaaaaaagaactacaggctacactactagtactaccgaaaactcaattcatccattatgggatatccccttatttttacatgtcact

SEQ ID NO: 30797 - DNA, 194 bp, Oryza sativa
  Clone ID: PAT_MRT4530_35166C.1
gctgcaggaatcggcacgaggtttttttttaaaggaaggcgagctttgtacagatgatcagagcagaaagacaaactgagatgagataaagaacatacataaacaaagaagctttatcactgctaatactaccctcactgctgctgctggtactatagatactatagataaagaacagctagtgtaatgcccag

SEQ ID NO: 30798 - DNA, 1020 bp, Oryza sativa
  Clone ID: PAT_MRT4530_35167C.1
atggtggggcccacgtgggccccacctgtcaacctcgcctcccttctttcctctccccctctcttcaccagccgcacgccgccgcagaggcgctccacctccggcgccgacgactccctcagtctgggcacgtcggcgaccgccaccgccaccgagaacgcctcccaccacagcacgtcggcgaatagcggcgtgtacctatcggcgaccagcaatgtcacgcacaggcgacacgtcgtcaccgtcaggcaccttcgtggtcttggattgcgaacaggacgaggaagcgcttcgggaggtggagcgcaaccggaaccacaagcggcagtgggctgcccaggggctggcggggcggcgctgggcgctaaagatgaccgagatgaggccgctcacgaggacgacagcccgctagatcttgatactgtaatggttactcggtcgctgccgtcttgcttggcactgctcgtcgctgccctggtagcagcagcagcaaacaatatgcgagattcttcagggaaataccaagttctggtgctgataggcggcgccatggccgtaacggcagcagtggttgcgtcggtgatgagaagctgcagggttggccgtcgcgcggtggaggacgacaacggcgagggggacgggacgagcacgtcggtccaggtcgtcttcttcttgctcttgcccccacccttcttctgctccggcaacacccgcttcttgaggagctcgccgccactctccactgctccgcccgccgcccctctctccgcccgtcacccctcggcgccgcggtgccgtcgccccttgcccctcgcctgtcccggcctgctccagccaccgccgcttagctccgctggcctgctccagccaccgctgacatgccgtccggtggtggagaggaggtccgacggccggccggcgatgctggagaaggagcgacgcggcgccggcaggccgggagcaagcaggcgccgcggcggggcgacgacgctcgggcattcccggattggcccggcgtga

SEQ ID NO: 30799 - DNA, 409 bp, Oryza sativa
  Clone ID: PAT_MRT4530_35168C.1
ctagtgccgtccgtggtcagttaaggacagagccatgaagttaagcatgaaacgacccccgtacaaccgcacttctcgtatgggtatagacctagcggagtagatagctgcgcggaggcagtatccatgcatagtggttttctctaggtgtgtgatgcggcaagcagtctgctggcggatgcccggttcaggtggccaggtagatggcggatgcccgttctggatggagagtgttgaagagaagcccttgtcgatgaaaggtgggccgctgatggtgacagctcagtacgggaccaacgtgccatctccaggagctagcacgctggctccggctagggacgagtgcctagagactctcatcctgacgggacggggcgaggcgtgtgtcagatcgcctgttgccacctaa

SEQ ID NO: 30800 - DNA, 618 bp, Oryza sativa
  Clone ID: PAT_MRT4530_35169C.1
actagtggatcccccgggctgcaggttgtttttcatcccaacaccttgggaacttgaaatttcattcctccaaagtcagggttaagagctaaatgaattataaaattaggaacacaggaattatagaaacacagaatggcatatgtgtaaaattaggatataatggcaaaaaagaggaatagaaaatataggaaacgcatgtttggaacatagaaaagaaaaatcaaggatgggaagtaggcccacctgtcaatcacttgcaaatcttgtcaaccactatataatgaaaatggagaggattgatatttcaactaagcaattggaattttgaaaaattgcacaactacttactttagtgattcccaagtccacaacaatggagattaattttccgaatcttcttattcattgttaaaccttacattcaggcattttgtaaaatttcactatgtcgacctagctatattcaaccatatgtaatgtaggtctgctagagcggagtgaacgttcaaccaattgcttaagatacacttaacacaccatgtaaaatttcactatgtcgacctacattcaaccattgttaaaccttttggatggttcagatagctgcttgattcg

SEQ ID NO: 30801 - DNA, 297 bp, Oryza sativa
  Clone ID: PAT_MRT4530_3516C.1
ggcacttgaaactgtgccatgccatgatggtgggtgatgctgatcctgagactgactgacatttgctgccgaggagcattgcccaccgttggtggtgtgctgggtactggaattgtgaatgagtataatgggttgcaaatggttaaaaatgaaagtgcatgcatgcatgcatggcgtggacaagttgaaactgtgatgtcatataaatctaaataaaatcacctatttaaatagcatttcatgtatgagttcattatcatagctaattaccatcacaaagaactttacaaaaaaaaa

SEQ ID NO: 30802 - DNA, 374 bp, Oryza sativa
  unsure (1)..(374): unsure at all n locations
  Clone ID: PAT_MRT4530_35170C.1
aaagtgtaatcctccctcctctataaaatcaagccccaaattaccaaccccccccttctcttcccagctctagctagctagaaataaataaacacatacatatatatagttacacactagagataaattaattactaatccagaaaatatttatagctggcctctaattgaaatttaagctagccatgcatcctaatngctttactacnttcttatgngcaaggctaaccctagaggnnnagctagnnagctagttggtnagcttagttagcttagatccacccctgagcgcatgcttttgaaacccagcatgtcaaatgggnagtatttatgcatcatgaatcttttgagccctcgttcgtccggcccatggc

SEQ ID NO: 30803 - DNA, 274 bp, Oryza sativa
  Clone ID: PAT_MRT4530_35171C.1
ttttattttttttttttctcctttttttttatttttttttttttgtgggtttttttttaaacaaccggggctagagagggcttttaatttttagccacctggtaaccgaaaccaaactggatttacattggacatgaagcttggaaacctaaaaatattaaggggcacacaaagtcctagtaaatgccgggggaaggacaccaacttttccttatcctggggccacacaacatgggatttgaattatgaactggccaagccatgttttgtttgt

SEQ ID NO: 30804 - DNA, 220 bp, Oryza sativa
  Clone ID: PAT_MRT4530_35172C.1
attgtgcgtagtttaggggcaaaatgctgctgtgcgacgtggatgtttgcaagagaagttttattggcttgccttgcccccatattgtccgggggatatatatgcaccgtgtatggtaacacggaaaagtgctagctcgtggaaatggccttttaattgggaaaaaaaactttgaaggagagggaagaagccctttgttaatttagcgccacatttgggt

SEQ ID NO: 30805 - DNA, 487 bp, Oryza sativa
  unsure (1)..(487): unsure at all n locations
  Clone ID: PAT_MRT4530_35173C.1
aaactagtactactagtagcaccctaaacccaaattgatatacgtctcttttcgaaagaagtgagcttcacttctttaagagtctccggctatcaaaaactcctcaaacaatttagaattttcacnnctaaaatctgaatctaaaagccagaaccagctgttttttagaattttaagtttcacaaacaaacattttaaagccatcagtcgattacaattcagctagccaccatcactccacctgctgaaagcactgcccgagtagcagagcagtaacaactggagtagtaaacaagtaggaatacaaagcaagaagaattaatggccagcgtcgtcaatgccgccggcgacctgcacgtccgggttgtgagccggcgactcgttcaggcctccgacgaatccctcgtgccgcgcgtcctcgccgtctccaaccttgacctcctcccgcaatccatgcaggtctccatgctctgcgtctaccccaagc

SEQ ID NO: 30806 - DNA, 891 bp, Oryza sativa
  Clone ID: PAT_MRT4530_35174C.1
ctcggatgggcggcggccggacggaggaagcgggagaggtggggctcaggatgggggcggtggccagtggcggaggcaaagaggcggcactcgggatcggggcggcggtcggtggcggaggcagagctcgggatgagggtggcggctagtggcagaggcgggcggaggcagctagaggtgggactcgggatgggggtggaggcggggcgacggccggtggtggaggcgggtctcgggatgagagcggcggctggggtgaggctaggaacggggtggcttcgagctcgctatggaggcggcgaggtcaacggcgagctccatgacctaagctccgccgcccctactgtccccgccttcccgagccgagcaacgcgaggcgcgagtaagaagaggagcgagagggagattgaagaagaagaggtgcgaggacctccgccgccggctgcccgagcgagctccgtccacctccgtctgagcttctcgcgaaaggccaaaggggagaagaaggcatcagcgaccggatttgagggaagcggctcgctccgcctccgcctccatcaccggccacccgagctcctctcccctgctctctcatccttctctcctcgaggtatgaagacaccctcccatcatcgacaacagtggagcagcgccctcccagcaactccgccgcctccagcgccattctcggtgcactcctccgccaaccgcagacgccgccgccagtcggccgcccgagctctttcctcctccgcctccaccgccggccacccgagctctctcccgtctccaccgccagctgcccaagcaagctctacctttgctgtgggtctagggagtttttttatcttctttgctgactggattgccacgttggcgccacgggggtaa

SEQ ID NO: 30807 - DNA, 582 bp, Oryza sativa
  Clone ID: PAT_MRT4530_35175C.1
gcacgaggcgcaccgcctccgagaagacgatgccccagccaccaggctcggcgctgacgctctcgacctcggacacctactggcgcatgtcgctccccgccggcgccacacgcgaccacccgtggtgcaaccccgtcaccgggcgtggcgcgccgcggctcgactccctgccgctcccggacttcctcgtgtgcatctccgagcaggacatcctccgcgaccgcaacctggagctctgcagcgcgctgcgcagggccgaccatagcgtggagcaggccacgtacggcggcgtcgggcacgcgttccaggtgctcaacaactaccacctctcgcagccgcggacgcaggagatgctcgcccacatcaaggctttcgtcagagccagatagccccagccagtggctaagcttagctgacactcgccgtgtcacgctaattaatccatcctaatccatccaaccatccaaccagtttctgctgcagcagatgatgagtaggtgtcgtgtaagctgtaaattaattacttttgtagtacgtgtcactcaagacaagcgttgtccatcccaatacccaacttggatc

SEQ ID NO: 30808 - DNA, 1215 bp, Oryza sativa
  Clone ID: PAT_MRT4530_35176C.1
atggtgggaggccctcttcgagctaacggtttgaaaggtcgcgacatgcaagcaaggctcgaggtagggtggcggccactccttcctagagactggatagaggaggctgccccccgatgccacgtggccctcccccgaggggagtcaggcccgaggtggggcgacggccactccctggccgagacaagagggagaaggctgccccaggcgccacgtggcctgaggagcaatgacgacttagatcttaaggaaattgggggacctaggcagttcatataccgagatttgaatgttgcgactaacaagtttttgaatgtgattgggcgtggtgcctttggcgtggtctgccgcgggtccttaggaggctatgaggtggcggttaaaaccctaataaatggaaggaaggacttcatcgccgagctcagctcaattggtggggtgaagcacaagaatcttgtcaggctcattggctggtgcaggcaaaataggttcaacattgttgatttcatattctggtggaggcatgacaaaaagaataagcttttccttgtgtatgagctggatatcgccaatgctcttctatacctccatgaagaatgccacccgtacatcttgcatagagatatcaagccagacaacatactcctggacaacaacttcaatgccaagcttgctgatttcgggctgtcaaggatcgccgaccccgacaacaacatagtgaagacgacagcccatgggactaagggttatattgatccactctgcatgagggacgcgaccattgaattcgatcgtagctctgacatgtacagcttcggcatggtcctgctagtggtggcatgcacacaaggcacctccagggaacaagtctggcagctgtaccaggacaaatctctcctgcaggctgctgatgacaatttgagaggccagtatgacgagacgcagatggaaagagtactcatcctaggactctgttgctcccgccttgatgatgctaccaagcggcctaccatccgtcaagcattggcttttctggagcacggcggcccaatgccaggcctggacttccccttcaggttattctcacaaactagaaagtggctcgcggcggcggcggccgagcaggtcgaggagtaccaccacgccgagcaggtcgacgagcaggaggaccaccaccacgccgcgcagcacgacatgagtagcgacgccgactag

SEQ ID NO: 30809 - DNA, 2250 bp, Oryza sativa
  Clone ID: PAT_MRT4530_35177C.1
atgcaggggacaacgacgaccaaggccgggcgcaacggcgaccgcgccggcaccgaagccccgggcgcgacgagggcgactgacgggaggggcggcgccgccgtggcagcccgcaaggtcggggacatgcgcggcgtgtcgggcgtggaggccaaggactcgctgaccatcgtcgcgctgcagtcgccggtcaccgtcgagcgccccgtccgcggcgacctcgaggaacacgtccccaagccatatcttgcgagagcgctggcggcgccggacatctaccacccagacggaaccacgacggacgatcacgagcaccaccacctcagcgtgctgcagcagcacgtcgccttcttcgaccgcgacgacaacggcatcatctacccatgggaaacctacgaagggtgccgtgcgcttgggttcaacatgatcatgtccttcctcattgctctggtcgtgaacgtgtccatgagctaccccacgctgcctggctggctgccgtccccgttcttcccgatctacatccacaacatccacaggagtaagcacgggagtgactctgggacctacgataacgagggccggttcatgccggtgaacttcgagaacatcttcagcaagtacgcgcgcacgtcccctgacaggctcacctacagggaggtgtggcagatgaccgaggggaaccgcgaagtgctcgatctcttcggatggttcgcggcgaagctggagtggacgatcctgtacgtgctggcgagggacgaggaagggtacctggcgagggaggccatccggcgcatgtacgacgggagcctgttcgaggttggtgagtggacaaatgtcaagcatccatgtagaggtccagttgaatcattctcagcttcccaggaggattgggcccttgtacttcgggggcttttgggccgtttcctgtgggcttctccttgtgcgggtcaccggctctcgccgccgccgtcaacaggacacgcccgcgcaatcaagggggagagcgagcacactatgctgcgggcggcggcgtcgaggtgcgcccgcggcgccatccggcggctctcatcggcggcatccccggctgctgtcgccgcgggcgctcggcgccagcctcctctggacgagggggactggtcctaccaccgggagtggtggggcgaggacgagggccccggcgagggggcgcacaccgtcttccgccgccactccgagcacggcaacggcgtcgtctccgtctccgcgtaccccgcatcccgcccggccagtgacgagtggacagtaacagagagatggcttcaagaaaggaacgcaagaatatacccaaattcatttggtgccaaccagtttaagatactaggttaccagtggcgagtaatgcggttcaatgatcatacgcggcaaagtgttgccaaagtaatggcctgctacaggtcttcgggtgacacggggatgtacttgatgcagcaaccacattgtttggctgttcctttttctggacagaacaatatgaaaattctttgtattggccatggtggtggcagcttaccattggttttggctagcaaattcagaggtgctgttgttcatattgtggaaattgatccagttgttgcttcagcttcaattgattctatgggtttcccctcattacctgtgaaagggttaccaccggagcccacgaagcctgccaatggcaatgagctgttgtggggaggcatccatgaccggcttttcctccatatcgcggacgctgaagatttcgtcgcaaacgacagcaatgtatacgatttggtcttcatcgatgcgtatgacggcgacgacatatttcctcgcaagctctgggacgcagagggaacattcctcaagaaccttgagatgaaagtccaccctgtccatggcaccgtggtggtgaacctacactctgactcggagctatctgttgctggtgtggagaaaacctcctctgtggatagcattcttccgctgggcaaacatgtctcccaggtctgcagggcgtacaagcagcatttcgggctagccttcacagcggccgtcccttggctctgcaacatcaccctcgtcgcctgccgtgacagggccatagcaagcggtgcacggcttgggcttagccgtagggactttgttcttggcaagcttctgtcgaaatcgaacatggtcgagcacgcgctggacctgccgttcccttgtctgcagtacatcaagaatggtttcacgctagtcgattga

SEQ ID NO: 30810 - DNA, 872 bp, Oryza sativa
  Clone ID: PAT_MRT4530_35178C.1
atggacggcgacggatacggcgatggctccggcacaagggacttcatgtcgcagtccgattcacacgccgaccacgacgagctcgacccctacaccgactccctgtactacactggatcccgcagcggcagtgcctccaggataggcatggccgccctcgacctcaactccggcggggatgggtggccggatttggggagctacgagggccccccggcagctcgcgccaattcctcaccgtatggaggtggccgttcggcgcccgcggccggagccaggggccgtggtggtggtcgaggcacgcaggcgaccggagccaggggccgtggtggtcgtcgatccacatccacggctgccaccgtctctgaagtcaacttggacgtcgactccgacaacgtcgaagatgccgccgagctccaagaaattttccaaaatcatgggaaggttaaacctgacagggccaattggacagaggacaataccagcttgctgtgtgaaatttgggttgaccagatcaataagggaaactgcgtgaatggactcatgcagaagactgggatgagggagattatcgctgcttatcatgcagcaaccaacctgcggcatgtaagagatgaatctcttgttttcaacttagcagcagcagcatcatcatttgcactaccctcacggccgcagcgcgcatcagcaatagcggcagcaacgacaagcagcagcagcggcaagcaacaagcagtacaagcatgagtgcactgggacttttaatatgtatgtggacattttaatgtttctatgctatggacttttaataattatttggacatttttttgttgaaaaaaaaaaaaaaaaaaaaaaaaaaaaaaaaaaaaaa

SEQ ID NO: 30811 - DNA, 661 bp, Oryza sativa
  Clone ID: PAT_MRT4530_35179C.1
aaaaatcaagtaaattcatcattgagacgttagcattttttcagaaaaatgtatgaaataggaatcatccaaacagagcattaaaccctaaagtaaatccatcagaggcttatgcgtcacgagtttattttgagttaccaacaggcaaactccttgtatgacataatataagtcgaaagagttacatgaagcatcaagtgcatactcgtaggagcatacttcttcaagcattgatcgctgagaacaaattatgacaaaacaagataaaaacaggagtcctccttgcaagttcagacatccttcaatactctttcttgccaaagtttttgcaccaaagttgagatgggatcggccggaccgggtgatgtgggcgttgctcgagctcggcggacttcatggcgatggggatgcagacgaggaagacgccgaacatggcgatggcggtgttgcggcgccagtgcacgggccggcagtagggcccgcccgtcatgctccataccttctgccggaagtcgccgcctccgtggccgtgcccgccatggtcgccgcccatcgccgccgccgcttgtgctgctcggattcaatcagatcgggatgcgatgcgagtgtggtgttgcccggcggcggggaattgggtcgtgtgttgtggacaccctttttt

SEQ ID NO: 30812 - DNA, 5772 bp, Oryza sativa
  Clone ID: PAT_MRT4530_3517C.1
atggcgaagactatggagcaaggacagcgagaggcagggaatcgcagccaggctagaggcctcctgggcgaagggcgcaaggcgaagagcatatgccgaagggggacgacttagccgtagcaggttcggccccgggagggccgaagaggctatcctggcccatctagcctaggggtcaattgggttgacaataacccgttggcccgctaaaggcccatggaccgcaattacgcaatgtaccgatgtaaatgtcgctttcataagggcaaccatttgtggtttcgacaacagctggcaccaaccgtggggacctccgagcgaaaccactgagagcgaatgccaccaaagaaggttgtgaaggagaaggttacaaggtgaaaggaaagcgacgccggggcggatatggccgccgaagagggagcagagccttcggcgcccgtcgccgaagatggaggagtgccatctgcttccgcacctgcgccatcattaccgccttcggcacctgccacctctatgcaggggccgaacgcggctgacatggctaaggtgacttcggcggcaagggcgctccagaccagggcgaagatcctttcgacaagccaactgctggtgccccaagccgctccgtcgcagtcggcagcggccccaactacactcgctgctgtgcaagcccaagtcaaccctgaccccgaaacacaaaccgaagccaacatggaagccatgcgacaaaacatgacacgactcccagacatgctttgccaaatgcaagaacaacagcaagcatacgaggcagcaaggcggaccaaggtcacttcggccccaatcctccagtattcggcaggctaggtcccaccccaagtctatccacaagtgatgacccagccccttccgccacaagtcgtgcaagcaccaatgtacttcgtcgggcagccatcgaccgcagcagcacatctggcccctcacgtgcaactgcaagctcaaccggtcgctacccaagtacaccctcaaccacctggccaagtgccacaaacaatggcagaaggggcttcggctctgcaggcgcagctccaagctttccttcagcagctcagccaaccccacaacatttcaagtacagccccttcgactggcccggaggggaatacaagtcaaggtgcgcctagttggttgtcgtcgaattagccaggtctgggggcttcgccgtggagtcaaggactacagttcaacttcatcaatgctgcttaggcgctaaccattcgaccgcaagcaccaacgccaggcttcagagcaaacctagcaccaaaccaggtcgccatgacatggtcacagccaactttcgacccatccatggcggctcagcaagcatcaccagtcagagccgggcagccgaatgccatggcccaacctcatgcacaagccgtgatttcgcctttcgccacgctgtacccgcagcaaggtgctgtgaacagggcggggggcgaaaaggggctaccgctgagtgggggaattaagacccgtccaatcccaccctagttcaagttcccacctgtcccacgctactcaggcgaaactgacccaaaggaattcctctccatttatgaatccgcgatcgaagtgactcatggcgacgaaaataccaaggcaaaggtaatacatctcgctctagacggcatcgcccattctttgtatttctatttgctagccaatagcatttactcatgggagcaattgcgcgatgtctttgtccttaactttcgaggtacctatgaggagcggaagacgcagcagcatctactcggcattcgccagagtccgggggagtcaataagggagtacatgcgtcgcttctcgcaaacccggtgccaagttcaagacataaccgaggcgtctgtcataaacgccgcttcggctcgtctactcgagggcgaactcataagaaaaatcgccaacaaggagccatagacacttgagcacctacttcgcatcattgacgggttcgcaaggggcgaggagtattccaagcgacggcaagctatacaagctgagtatgataaggcttccgtcgccgctgcttaagcccaagcacaagttcaagttgccgaaccacctcctctcgcagttcgccagccccagcgggcgatccaaggacaaccgccaaggcaaggtcaagcccccatgacttgtaggaagttccgaaccgaccgtgcgggcaaggctgcgatggctgtcgaagaagtgcaagccctccgcaaggagttcgacgcccagcaggcaagcaaccatcaacagcctgtctgcaagaagtatctaaaccagcaaatctcttttgggccagaagatgccgaaggagtaatgttcccgcatcaagatcctctggtgatctcagccgagatagctggtttcgaggtccagcaaatcctagtcgacggagggagttcggtcgatgtcattttcgcagaagcatatgccaagatggggttgcccaccctagcccttaccccagcgccagcctcgctccgtggtttcggcggagaagcagttcaagttcttggccaagcacagttgttggtagctttcggcacaggtgaaaacaggcacgaagagcaagaacttcggccgtgcaaccttgaacaagttcgaagctatttcccaccacagttatctcaagctcaagatgcccggcccggcgggagtgatagtggtcaaggtgcttcagccttcgtccgcttctaaaggcgatcttgccataatcaacagaacagtacataatgttgaggccgaactgcatgaccgggcgaaacacgcgccaaagcctgcccctcacattaagataatcaagatgcagattgatgaggccgaccccgcaaagctcgtatcgctggggggtgacatgggcgaagaagtggcagcaagcatcctagaagtactcaagaaaaacagtgatatcttcgcctggggccccgattaggtgagaggtgttttgacagatctcatcatgcatcacctggcagttaagccggatgccaagccaaggtaacagaagctgcgcaagatgtccgctgatcgccaagaagcagcaaaagccgaagtccaaaaattgctcaaggctggggtcatccaagagatcgaccatcctgagtggctggtgaatccagtcctagtccggaagtcaaacggcaaatggcgcatgtgtgtcgatttcatagacctaaacaaagcatgtccgaaggatgatttccccttaccacggatcgaccagctcgtggattcaacagctggctgcgaactcatgagcttcctggatgcatattccggctatcaccagatctacatgaacccggccgacatccccaagacagccttcatcacaccatttggtaccttttgccacctcaggatgcctttcggcctgaggaatgccggagcaaccttcgccaggctggtgtacaaggtcctgtacaaacagttggggcgaaacgtggaggcttatgtcgacgacatcctcgtaaaaagccgtaaggctttcgaccacccgtccgacctacaggagaccttcgacaacttgcacgccgcgagtatgaaactgaatcctgagaagtgctttttcgggattcgctcaggcaagttgttgggcttccttacagccgaaaggggtttgcccttcttcaagaccctccggggcgcgggaaaattcaactggacacccgaataccaagcagcgttcgacgagctgaagcaatacctgcaaagcccgccagctttaatcagcccagcaccaggaagcgaactgctactatacctagcagcttcgccagtgctagacagtgctgccctcgtccaagaaacagattcaggccagaaaccggtctatttcgtctccgaagcattggaaggagcgaagacaagatacattgaaatggaaaagctctcttacgccctggtgatggcttcgcgcaagctcaagcattatttccaggcccacaaagtcatagtgccatcgcaataccctttgggcgaaatactccgaggcaaggaagttactggccggctcagcaagtgggcggcagagctatcccctttcgacttgcattttgttgcccgcactgctgtcaagtctcaagtgctagctgactttgtagccgaatggacaccagcattcgcccccgagcccgagcctgtcgaactaccctgggtgatgtactccaatggttcgtggtcgcacaggggggcaggcattgcgacagtactcacttcgccgaatggtgtgccgattcggtatgctgcaaggttgcaattcgacacgaccaacaacgcagcagaatacgaagccattcttttgggcctaagaaaggcgaaagcattggggattcgacgcttgctaatccaaaccaactccaagctggtggcaggccatgttgacaaatccttcgagagaaaagaagaaggaatgaagaggtatttggaggacgttcagtccatggaaaagtgcttcaccggcataacggtcgaacatttatctagaggccagaacgaggaagcagacgccctggcgaaatctgctgcctgtggaggcccacattcgccagacatcttttttgaagtcctatatgcaccaagtgtgcctgtgaagagcctagaggtcatggcaatcgaccaggcgaaactgggcgaagatccatgtgactggcgaacaccgttcgtgaaataccttgaaactggctggcttccggaagatgaagcagaagcaaagcgcttgcaactcagagccacaaggtataagatggtctcaggccagctatatcgctccggggtacttcaacccttgctccgatgcatctctttggccgaaggcaaagaaatagcaaaagagatacaccaggggctctgtggcacgcaccaggccgcgagaatagttgcctccaaagtgtttcgacaaggagtttactggcccactgtgttgaaagtctgtgttgagcaagtcaagaagtgcgaaagctgccagcgccatggccgaagccaaaccgcgccccagtatgagttgcaacccatcacaccaatctggcccttcgccagatggggactggacatcattgggccattcccggtggcgcgaaatgggtacaagttcacaattgtggccgttgaatacttctctcgatggattgaggccgaacccctcggagcgatcacttcggcagcagtacagaagttcgtatggaaaaacattgtttgccgtttcgaagtgccaaaagagttcatcactgacaacggcaagcagttcgactctgacaagtttagggaaatgtgcgaagggcttaacctggaaatcaggttcgcgtcggtcgcacaaccacagtcaaatggggcagccgaacgcacaaatggtaaaatcctagaagcactaaagaaaaggcttgagggggcagcgaagggcaaatggctagaggaaatgctatctgttctctgggcccttcgaacgacccccacaagaccaaccaagttcagcccgttcatgctactttatggtgatgaagcaatgaccttgacagaactaggggctaactcaacaagggtgacgttctctgggggcgaagaggggcgcgaggtgtcgctcaaactcttggaaggggtaagagtcgaagcactcgaacacatgcgcaagtatgccacaggcacttcgacaacttacaacaaaaaagttcgaccaacggagctgttgcctggtcatcttgtcctaaggaagaaggcgaacccgattgatgttagcaagct

SEQ ID NO: 30813 - DNA, 384 bp, Oryza sativa
  Clone ID: PAT_MRT4530_35180C.1
actttgccgcgtatgatcattgaaccgcattactcgccactggtaacctagtatcttaaactggttggcaccaaatgaatttgggtatattcttgcgttcctttcttgaagccatctctctgttactgtccactcgtcactggccgggcgggatgcggggtacgcggagacggagacgacgccgttgccgtgctcggagtggcggcggaagacggtgtgcgccccctcgccggggccctcgtcctcgccccaccactcccggtggtaggaccagtccccctcgtccagaggaggctggcgccgagcgcccgcggcgacagcagccggggatgccgccgatgagagccgccaggatggcgccgcgggcgcacctcgacgccgccc

SEQ ID NO: 30814 - DNA, 1194 bp, Oryza sativa
  Clone ID: PAT_MRT4530_35181C.1
cgcgcatatcgcatcctccacacgttattcttatttctcttgcatcaagatacaaagttaattacaagcagacacgacacgcatctgggtgttcttttgttatcacccagagtccagagagaacaccagacctaagccggcaggcagagcaccgttgcatgtcccctgcgtcacaggctcgatctcacacccacagaccgatccagtagctaactaagctaatctaggacatcttagcgtgctgctcccgctgcatcgccacgtactcgaacaggctcccgtcgtacatgcgccggatggcctccctcgccaggtacccttcctcgtccctcgccagcacgtacaggatcgtccactccagcttcgccgcgaaccatccgaagagatcgagcacttcgcggttcccctcggtcatctgccacacctccctgtaggtgagcctgtcaggggacgtgcgcgcgtacttgctgaagatgttctcgaagttcaccggcatgaaccggccctcgttatcgtaggtcccagagtcactcccgtgcttactcctgtggatgttgtggatgtagatcgggaagaacggggacggcagccagccaggcagcgtggggtagctcatggacacgttcacgaccagagcaatgaggaaggacatgatcatgttgaacccaagcgcacggcacccttcgtaggtttcccatgggtagatgatgccgttgtcgtcgcggtcgaagaaggcgacgtgctgctgcagcacgctgaggtggtggtgctcgtgatcgtccgtcgtggttccgtctgggtggtagatgtccggcgccgccagcgctctcgcaagatatggcttggggacgtgttcctcgaggtcgccgcggacggggcgctcgacggtgaccggcgactgcagcgcgacgatggtcagcgagtccttggcctccacgcccgacacgccgcgcatgtccccgaccttgcgggctgccacggcggcgccgcccctcccgtcagtcgccctcgtcgcgcccggggcttcggtgccggcgcggtcgccgttgcgcccggccttggtcgtcgttgtcccctgcatccctccgcttccgcttggcgcggcccaaacgaccgaaacacactcgattccctgtgaagagctcgtagtcttttgagagatcgatgagatcgactagtcgcagttgcaacgtg

SEQ ID NO: 30815 - DNA, 1086 bp, Oryza sativa
  Clone ID: PAT_MRT4530_35182C.1
gagacatgtttgcccagcggaagaatgctatccacagaggaggttttctccacaccagcaacagatagctccgagtcagagtgtaggttcaccaccacggtgccatggacagggtggactttcatctcaaggttcttgaggaatgttccctctgcgtcccagagcttgcgaggaaatatgtcgtcgccgtcatacgcatcgatgaagaccaaatcgtatacattgctgtcgtttgcgacgaaatcttcagcgtccgcgatatggaggaaaagccggtcatggatgcctccccacaacagctcattgccattggcaggcttcgtgggctccggtggtaaccctttcacaggtaatgaggggaaacccatagaatcaattgaagctgaagcaacaactggatcaatttccacaatatgaacaacagcacctgaaagagtcgatatatgatcaaacatatgtatcaagtgcaaagctacagaatttgaagtttagactccagcaaattaagaaaatctggcaggacaaaaccactgagtatcaacaatctgaattcaagcagttttgtgaaaggaatacgctttttatgaactaatagaagttggcaattttgcagttaaacaagttaggtgtagcttgactacagactgcaggaagcaaagtatcggaaaactgaaatttccatatgtggtgtactagctagggaatgagcattcttgaggctagtgactatatttacctctgaatttgctagccaaaaccaatggtaagctgccaccaccatggccaatacaaagaattttcatattgttctgtccagaaactgcttgatggagatcataagaacaacaaggtagtgctgtcaaccctgctgataccatactcttaacatctgtaaataccttctgtcagatgtgtaatatggtacggaagcaaaagataaaatgcagaagtcaacccaattgctttactttatcattgaagactttgatgcatgtgcaggcaaccatattatgatgataatgacatctaagtaacttgcacttgcaatcttgtagcaaataaataatcaggggaatcattttactg

SEQ ID NO: 30816 - DNA, 385 bp, Oryza sativa
  Clone ID: PAT_MRT4530_35183C.1
atgaatgccaactttacactatgttcatgttatactgaatataccgctagcttatctaggagatgctttggtgcgggtataatgtttgtgtatgcaattactctctcatgatggtgatattagtgtagtatttggtagtttagacgtggtgtctagataacgggatatcattatttgaggttaaatgctgggatgagaggtgggccgctaatggtgacagctcagtacgggtattcctccacacgtgtatatagtactaagttaatttcttggggaggatactcctccgtatttagccccggttgcatggtcatgacgagttgtcgtaaggaactcggcagtcaggggtggcttctcaaagtaccaggagggcatcggatagagg

SEQ ID NO: 30817 - DNA, 293 bp, Oryza sativa
  Clone ID: PAT_MRT4530_35184C.1
tgttattctgctccatcagtgagcgcgagagctcggcctcctcttcctcctcctcgcatgcccacctcagaatcatctctggttgtggtgaaaccgatggtgatgatgatggtacgagcactgtagcttcgatccaggtctagaatcgcatgttcttcccccacgctttcttggattgcggccaagaatcgatgcgagcggcgccaagatttcgttcttggagcgggtcactctagtgcggcgacgaccaggggcaatgggcggcgcggcggcggcggtggtggtgttggtgg

SEQ ID NO: 30818 - DNA, 702 bp, Oryza sativa
  unsure (1)..(702): unsure at all n locations
  Clone ID: PAT_MRT4530_35185C.1
ggcccgtgtcaactttggtccatgctaaattgttggacaaccccaaagtggnaacaagagcttgacgagtttggagtagaaggcattcctcatttngcctttctggacaaggagggaaatgaggaaggcaatgttgttgggagacttccaaaacaatattttcttgataatgtggttgctcttgcttccggtgagcccactgtacctcatgcacgggttgttggccaattctcgagtgcagaatcccgaaaagttcatcaagttgctgatccaagaagccatggctaacaatagcttgtggtgatcaattttagtggtaatgctaagacctattgacaagaggcgatatggtctgcatgctcagtcctggaaccaagcattagcgcgtggacattggtactgagctgttccaactcccttaacgtatatgattttgctggtagaaccaggcattcggctacagcattgatatgttggtgatatttgaatcggtgcatgtctgcatacatatttgcataatgaaaatgcagacatgtgttgcagccgcaagcatgcccatgttagtaaactgtttaccaatcaccactagtttctacttagaattgcaatagaatgtttatatacaggagcttactaaaatttgtgtgatatatatatgcttctgctactcttggggaaagctgcaaaaaaaaaaaaaaaaaa

SEQ ID NO: 30819 - DNA, 144 bp, Oryza sativa
  Clone ID: PAT_MRT4530_35186C.1
aaaaataaatttttatctaattttaatctaaaggatatacaaggcgtcccaataattatcggctgggatataaaataatcgttcaatggcaagagtacgtataaaatccaagccagtccttttagacacagtatatttatttcc

SEQ ID NO: 30820 - DNA, 465 bp, Oryza sativa
  Clone ID: PAT_MRT4530_35187C.1
tcgtccacgcgttcgcccacgcgtgcgcgcacgcgttcgtctacgcgtccgtgtcgccagagtattacggtgtgaaaggagttgattattgagcatgggtactacagcaaggtgtcgttggatgagggctactacggggagcatcatacgtagtctgagatgagccgcgtgaggctgaccatggcgaggcagtacagcagcgcaactgctggggctgagccggttgagcccacagaaggtgggatgtgtactgcctggcagtgctaagcttaactgggttgactcatagctggtgctattacaccgctgatgtgttgtatgcaaacagatagtgatcgaaacaaatattgtataatgaaaagctttgaaaaccaaattacttgggataaagtactatatatgatgatgcgcggtctggaccgtgggcagacgcgtgggcggacgcggggggccgctctagaagtt

SEQ ID NO: 30821 - DNA, 356 bp, Oryza sativa
  Clone ID: PAT_MRT4530_35188C.1
gatttgccctccttcgcggggcccgcagccatgaggcatgccacaaaggcgatttaccggctgatgcgctccgactatgtcaactgcagaaaaggttgtgaggggggtacgctggccggcgagcaagacgttcttcataacatggaataatctgatgtgattgccttacacctgacagtgcatgttaatgacatccgctggtggcgctatactgctggtcaactgctaggcgctctctaggtgatggaggacattgctggagaacgcgtgatatacactggcgactactatcatgaggagaatcgacccctgaaagctgcggaacgccactagccatacaatgatcatgccaacat

SEQ ID NO: 30822 - DNA, 801 bp, Oryza sativa
  Clone ID: PAT_MRT4530_35189C.1
atggtgtctagtggagtccgtttgtcggccactcgcctcggttggcacacgggcatcaagttgacaggtgagatatgggaggtatggatcaactgcaaggggtccaaagagcgctgggtcaaagccaatgttgacaaggatctatacgatgattacagggacgaaaccattaaaacttacactgaatggttaagggatcaagggcttctgaaacaaattatggcttacaaagcttatattaccaataataagaatacatcagatggtgtcgagatcaatggcagcagtgacatgccagaaatagaatggccatctcatgctaggaaaataacaaagcatacacaagatggcaagcaagttggccatggtaccaagaggttgaagtcatcttctcgtaaacttaaagttgaattttcagcaaaactgggtggtccatgtggagacaataggcgtacatttgtggatgaagtggtaatgtacacaaggttaaggactccactaattggtgttagaaagtggaaagatgtgaagcaagatgtcaagaattcaattgcagattgtgtaatgaaggtcagcacccagaactctacgaataggcaacaaatgaaaaccatgcatcttatgggttccaaaccattctctcagtgtagttgggaacagaataatacaacaaggaagttggctatgacagattcagatgaggcgggtgatgaaggatcaagaagtgtcacatttgggggtcaagaagacgatgttttccagaacacatacaaggaaacaacaggaacaaaatcaacatag

SEQ ID NO: 30823 - DNA, 6042 bp, Oryza sativa
  Clone ID: PAT_MRT4530_3518C.1
atggccgagcaagcgaaggcgcacgacctctcaccgagtgtgagcggcgacgacggggagccgaatccacgccgtcgagctcgtactcccccacctcctccgcgccaaagccctaagcagggggaggcgcttgagagggtcgacaaatccgtggcatcaccagtcgcaggtgatgcaggagaacggcgagatggggagcgtcgcctcctcgtctgcggcgacggcagcacgcctcagggtgcgcttcaggctgctggcgcgctcctacgacacccgcctgtcgtccatgacccggagtctccagcccaacgatggctggaagacgtggccaacttggtcatgacggcacagcagcgcctgggtgctggtggacggtccgccaccaccaagacctccggcgccgctaccaccggctccgtgtcgtcaaggcggagggcgcggcgagcggcggctgctgcgcgccattcggccgccactccctcgtcgacacctccaactcgggaggatcagcatggagagccggatgcccgcatcgacatcgagcgccggcgtaataaccggcgtactccccgcgcaacggagggcgcctcttcgtccagagtgtcacctcgacatggacgagaggatcagccctccgtgcccccggccggtggtgttggctgtagagcctttgtggcgagtcttcggaatgtccgttggcccccaaggttccggcccaccatcaccgagaagtacgatgggagcgtcaaccccaccgagtttctccaggtctatacgaccgggatcgaggccgctgggggtgacgacagggtcatggcgaacttctttcccatggccctaaaaggacaggcgcggggttggctaatgaacctgccacccgcgtcggtccactcctgggaagatttgtgccaacagttcaccatgaacttccaaggcacatatccgcgcccaggcgaagaagcggacttgcatgcacggttttgccaagtccgcaatactataccatgcatccctgcacacgcggtgatctacgcgttcagggggggcgtacggcacaaccgcatgctcgaaaagatcgcttccaaagagccccagactaccgcggagctttttcagctcgcggaccgagtggctcgtaaggaggaagcgtggacatggaactcctccggttccggagtggcagcttcggccgcccccggatccgccgctcagacagggcggcgtgacaggaggaggaagaagaggtcggaccgttccggcgacgagggtcatgtcctcgccgtcgagggcgctccgcgggccactcgaaaggggaggcctgcgagcgacaaaaagaaagaggctggtactcccagcagggagcgccccgccggcaggtggtgctccgtccacaacacctccctccacgatctcgcggactgtcgtgcagtcaaaaacctggctgagcgaacgaggaagtgggaggaggacaggaggcaggaacgccgtgagggcaagtccccggcggttccttccggcaaacggcgaagtgaggccaagcagaaggcccccgctgttgacatcgatgatggtgatgatgacctaggtttccaagaacctggggccaccattgccaccgtcgatggaggagcgtgtgctcacgtctctcgccggagcttcaaggctatgaagcgagagcttctggccatggcccctactcatgaggcgatgcgtcgggcgcggtggtcggaggttgctctcaccttcgaccagaccgaccacccaccgtgcattgcccggggagggcaggttgcgatggtagtttcccccaccatctgcaatgtgaagttggggcgtgtcctcatagatggaggagcggctctcaacatcctttcccccgcggcctttgatgctatcaaggccccggggatggtgctccagccgtctcaaccgatcatcggtgtgacgccggggcacacatggccattaggtcacatcgacctaccggtcacctttggtggatcagccaacttccgcacggagcgggtgaacttcgatgtggcggacctcagtctgccctacaacgcggtcctggggaggcccgcgttggtgaagtttatggcggcggtccactacgcctacctccagatgaagatgccgggccccggtggccccatctctgtccgtggcgaccttaaagtcgcgctcgcttgcatggagcagcgcgcggaccacctcgctgctgcgaccaagcccgagggtggtgacgagaggcttggcacctccgcccccaccgccccgaggcagcggattgccacatgtgacgaggtcccggaagacgcgctcgtctccttcctgcgggcaaacgctgacgtcttcgcatggagaccagcggacatgcccggggtccccagggaggtgattgagcaccgtctcgccgtgcggccgggcgcaaggccggtccggcagaaagtgcggcggcaggccccggaacgtcaagccttcatccgcgaggaggtggcgaggcttctcgaggccggattcatccgtgaagtcatccatccggagtggctggcgaacccggtggtcgttcccaaggcgaacggcaagcttcggatgtgcatcgactacaccgaccttaacaaggcatgtcctaaagatccttaccccctgcctcgcatagatcagatcgtcgactccactgcggggtgcgaccttttgcgttttctagatgcatactctggttaccatcagattcgcatggctagggaggatgaggaaaaaactgcgttcattacccccgtaggaacctattgttatacatcaatgcccttcgggttaaagaatgcaggtcctacttttcaacgtactactcgaatttctttgggtagccaaataggacgtaatgttgaggcttatgtcgatgacttggttgtaaaaacgcgcaaccaagaaactttacttttagatctagcggaaacttttgagaacctccgctccgcccgcataaagctgaaccccgataagtgtgtgtttggtgtacctgcgggcaagcttctcgggttcttggtctctgcccgaggcattgaggctaaccccgagaagattcgagctatcgagcggatgcgcccccccagcaaacttagggatgtgcaatgcgtcaccggttgcatggccgccctaagtcgtttcatatcaaggctgggagagaaggcgctacccttgtttaagctcctcaagcgctcggggccgtttacttggacggaggaagctgaacatgccctcactcagttaaaggcatatctcagctctcccccggttctagtcgccccggagccaaatgagcccctgctactttacttagcggcgacccctcaagtagttagtgcagcgttggttgtggagcgcgatgaaaataatcctcatttcgtgcacccccattctgtgctaacttggcccgggagcgagcggggaggagaggcccccgagtcggacggtggcctacggcccctgacgaccggagtcggccctctgcccgcttgtcagacggtgctaagtgcccccgaccctcaggagggccccaaggccactgcgggaaggccgcacttaacgccctttgaccccgaggctaaccctgtgctgactcgacccgggaaagagcagggagaagaggcccccgagccgaacggaggcctgaggcccctgacgaccggagtaggacctttgcccgcttgtccgacgatgccaggagcccccgacccccaggacggccccgaggccactgagggaaggccgcccctttcatcctccgaccccgaggtcatcggcacagaagacaagtgcgccccgaaaggccacttgaatgaagaacgccccggggatacggcccccagcaaagaggatcggccccaccgaagggtgcagcggcctgtctactttgttagtgaggccctccgggatgccaagacccgataccctcaggcccagaaaatgctttacgctattctgatggcctcgaggaaactgcgccattatttccaggcgcatcgggtcactgtggttacgtcttaccccctcgggcaaatcttgcataatcgagagggtacaggacgagtggtaaaatgggcaatcgagctttctgagttcgatctgcactttgaaccacgccacgctatcaagagccaggccctcgccgattttgtggcagagtggaccccggctccagagaccgtctcaatacccgaggccagcacggacccctctcagctgcctcgcaccacccactgggtgatgcagttcgacggttctctgtctctccagggcgctggtgcgggggtcacgttgacctctccaaacggagacgtcctcagatacctggtccgcctcgactttcgagcgaccaataatatggcagagtacgagggactccttgccggactcagagtggcggccgggctggggctccgccgcctcctggtgttaggcgactctcagttggttgttaaccaagtctgtaaggagtaccggtgctctgacccacagatggacgcctacgtacgccaagtacggcgtatggagcgccattttgacgggatagagcttcggcatgtgcccagacgggataacatgatagccgacgaactctcacggctcgcgtcctcgcgagcccagaccccaccgggcgcctttgaagaaaggcttacccagccgtcggcgcgacccgaccccttaggggagacggatgcgcctgaccggcccccgaggcccgtcggagtccaggcctcgggacccgaagggagcgctccaagctcccttagattgattgcttggatctctgagatccaaacatacctcacagataagactctacctgaggaccgcgaagggagtgaacgcgtacaacgcatttccaaacgctacgtgctggtagaagggaccctctatcggcgcgcggctaacggaatcctcctgaagtgcattcctcaggaacaaggcgttgagcttcttgctgacatccatgagggcgagtgcggagcccattccgcctcgcgcaccctggttggcaaggcctttcgtcaaggattttattggccgacagccctcaatgatgcagtcgatctggtccggcgatgcagagcgtgtcagttccacgccaagcaaatccatcagccggcccaggccctgcagatcataccactgtcatggccatttgctgtctgggggtttgatatcctgggaccgttcaaacgggccccgggcgggtttgagtatctgtatgttgcgatcgacaagttcactaagtggcccgaggcttatccggttgtcaagatcgataagcactctgctcttaaattcattaagggcatcacggcccgttttggagtgcctaaccgtattattacggataatggcacccaattcactagtgaactcttcggcgactactgcgaagacatgggcatcaagctctgcttcgcctcacctgcccaccccagaagcaatggccaagtggagcgcgccaatgcagaaatcctcaaatgccttaaaaccaagaccttcaatattctcaagaagcacggcgattcatggatcgaggagttaccagcggtgctctgggcaaaccgaaccacaccaagccgagcgaccggggaaacgcctttcttcctcgtctacggcgcagaagcggttctcccatccgagctcaccctgaggtctcctcgggccaccatgtactgcgaggctgatcaagatcagcttcgtagagatgacctcgactacttggaagagcgaaggcggcgcgcggccctccgagccacgcgctaccagcagagcctgcggcgctaccatcagcgccacgtccgggcccgatcactctgcgtcgacgacctcgtcctacgccgcgtccaaacgcgtgctggactgagcaagctctcaccaatgtgggagggtccgtatcgagtgatcggtgtcccccgggcgggctccgtacggctggccacgggcgacggcactgagctgccaaacccgtggaacatcgaacaccttcgtcgcttctacccctga

SEQ ID NO: 30824 - DNA, 291 bp, Oryza sativa
  Clone ID: PAT_MRT4530_35190C.1
gcccgcgatatggcgattttcaagaaggatggtactgctgttctctttgtcatgtctcttatggtcatagctatggttctctcttcctgccaagcagctatccatttcaacttgcactgcgccgacctgccaaaatgcactgaacatgaatgcatggcggattgccaccgcagaggtttccaggattataagagattactaggtcataccccgcgttttgctgcagtattcatggatgagtatatgttaaatatttttgaaatgatgaaagttgaaatactgagaaaataa

SEQ ID NO: 30825 - DNA, 312 bp, Oryza sativa
  Clone ID: PAT_MRT4530_35191C.1
ctactccttgcatcgcgaggtgattgtgatgggataaccgatcacattcttctgaacatggaagctgcgacgcaacagaaggctgctaaagaggaaggtgcttgtcatcgtcctgcaccctctgcagactcgtcgcccctggagggggtcaccattgaaggcgacacggcactgcatgttttggccacctctggtgatggctggagctacctgaggagtgtggagatcatctgcagcaaggccccgcatctcctgctggtgcagaacaacaaaggcggcacgcctttgcactgcgctgtcagggctggccat

SEQ ID NO: 30826 - DNA, 1107 bp, Oryza sativa
  Clone ID: PAT_MRT4530_35192C.1
atggcatcggcagtcaaatccaaactgacggtggccaaaacaaaggaggacaccgcaaagcctcccatgaatccatggttgctactccttgcatcgcgaggtgattgtgatgggataaccgatcacattcttctgaacatggaagctgcgacgcaacagaaggctgctaaagaggaaggtgcttgtcatcgtcctgcaccctctgcagactcgtcgcccctggaccaagctaaccctgcaattcctaccatggcgacgcagcaagcttctggtgatgatgggcatcagtcatgcctggacctggagggggtcaccattgaaggcgacacggcactgcatgttttggccacctctggtgatggctggagctacctgaggagtgtggagatcatctgcagcaaggccccgcatctcctgctggtgcagaacaacaaaggcggcacgcctttgcactgcgctgtcagggctggccattcccaaatggtttcttttctaattgatctggctaataatccgaggtcaaatctgcaggtagcggctagattgaaggaagttctgagaaaggggacggcctttcttcccttgcatgatgcaatccgcatcggaaacaaggaaatgatcaccaagcttcttgaattcgatccagaattggctagttcccctacggatgaagcaggaatttcaccgttgtacctagctatcgtgctacaacgtagtgacatcgcaaagttattgcatcaaatgagtccagagaatctttcatattcgggcctaagtggacagaacgcattgcatgcagcggttctccaaggcaaagttaccaattctgttatcagtgctagtccactattaataagtggctcctttctaaatgccactgttagatttggtcctatgttttttccatcggagagagaaggtttcctaatattttgccacttccacctaagtggtgtgacaagtaggattgccagcatgggtggtgtgaaaaagtccattttgcctcttgtagaccctacaactcagccacaacctttccccacactgctcacttctgtcttattcaagacggtgcttgacgcttatatggatggcgaaggcacataa

SEQ ID NO: 30827 - DNA, 322 bp, Oryza sativa
  Clone ID: PAT_MRT4530_35193C.1
ttttatttagggtttctagggttttgggttgcggcggcgagtgggcgagggcgaggtctagatggcgtcggtgagggtgaaggggacagtgaagtggttctactccaccaaggggttcggcttcatcaccctcgacgacggtggataggatctcttagtccaccaattctcgctcaagttcgacggctaccgcaacctaaacgaccgatacttgcgcgtgttcttcgcttgatccggtaactacggccgttccaatgccgtggacgtcaccgagcctgtgggcggtgcgctcagcggcagatcccgtgccagctgaggaggt

SEQ ID NO: 30828 - DNA, 1716 bp, Oryza sativa
  Clone ID: PAT_MRT4530_35194C.1
atgggggggcaggtctccggaaccttcgccttcgacgtcctgcactggggtgaaacggtctccggaaccttcgccttcgacgtcatacaatgggagaaggcgggttacgtctacctcgccatggctctcgtggcgctgctcggcgtgctgctcacgaagtgcagccgcacggcgacggctcagcggcggctgcctccggggccatggcagctgccggtcatcggcagtctgcaccacctcatcggcaagctcccgcaccacgcgatgcgcgatcttacgcgccgccacgggccggtcatgatgctccggctcggcgaggtgcccacgctggtggtgtcgtcgccggaggcggcgcaggaggtgatgaggacacacgacgcggtgttcgccacgcgggcgctgagcgccaccgtgcgagcgggcaccatgggaggcagggacatcgccttcgcgccgtacggggactactggcgccagctcaggaagatcgccgccacggagctcctctccgcgccccgcgtcgcctccttccgcgccatccgcgaggaggaggtcgccgccacgctgcgcacggtggccgcggccgccgcggacgggcgcgccgtggagttacgagcggcgctgtgcgctctcgtgaccgactccacgtcgcgcgccgtggtgggagaccggtgcaaggagagcgacgcgctcatccgtgcgttcgaccgttccatggagctcgcgagcgggttcaacccggcggcggacctgtggccgtcgtcgcgtctcgccggccttctcagcggcggcgtgcgcgagattgaggcgaacctccacacggtgtttggcatccttgaccgcctcatcgagaagcgcctgcagcagaagaagactgctccatcgtccgccgccggcgaggacattctggacgcgctgctgaggatacacaaggagggcggcgggctccagttcccgctcgacatggacagcatcaaattaatcatcgctctgtccaaaaagcccgaggctcgtgagctgaagggttcaaactttcggttgaaggcaccggatggggacctcttcagcggcggcggcgaaacggtggcgacgctgctggtctgggcaatggcagaactgatccggaacccaatggccatgcagaaggcgacaacggaggtgcgacgagccttcgcactggctggcgccgtgtcagagggcaagggcgcgctcggcgagctccggtacctgcaccttgtcatcaaggaggcgtctcggctgcacccgccagcgccgctgctgctgccgcgcgagtgctcggagccgtgccaggtgctcggctacgacgtgccgcgcggcacgcaggtgctggtcaacgcctgggcgatcggccgcgacgagcggtgctggaccggcggcagcggcgacggcagctcgccggaggagttccggccggagcggttcgaggatggcgccgaggcggtcgacttgaggggcaacaacttcgagctccttccgttcggcgccgggcggcggatgtgccccgggatggcgtttgcgctcgccaacattgagctcacgctcgccagtctgcttttccacttcgactgggaggtgcccgacatggccgaccctgccaagctggacatgaccgagacgttgggcatcacggcgcgccgcaagggcgacctcctgctacgccccgtcctccgcatgcccgtgcccggcgtctactag

SEQ ID NO: 30829 - DNA, 433 bp, Oryza sativa
  unsure (1)..(433): unsure at all n locations
  Clone ID: PAT_MRT4530_35195C.1
tccccgggctgcaggaatcggcacgaggctggggttcacgagtcacacagactacgctttanaagtagtactatgtattgtgcatggggggcacagttaaatctgcaatttttttccatgctggagtgtttttataggtttgcggaaggaattaagttgaatatatatagctatataattatatatatatttatcttgcgatatcctgagtcttctgacattttccatccaagttgtggggctgatgcatggcttatttcaagatgtagtttctggtttgcttactaataacatctctacaggtattcattaattaggaactactatactttacctactggaaggaggatttgtttaaatctataaatttgtgctggttgcatcctcaacaataagttacactgatctctctgaaccaagtacttcctctagc

SEQ ID NO: 30830 - DNA, 472 bp, Oryza sativa
  Clone ID: PAT_MRT4530_35196C.1
atgtgtgcaccacgtggtgcgccccctcccccggtcccgtggactcggtccaccgtggactggcgcacctgtgccacctccatgtggggcccgcctattggcgccgctctctccgatgacgtcatccgagggattgggggaatcaaatggccggtattaggtttgcaggcctcagagctaggggtgaagaagggcgaggtggcggccgttatccctcggcgtcgagaggcgacgcgcgatggcgacatcgatgacgccggcgctcgtggcggcatgggcggagcggcttccgcggctggggcccacgtgcgagcgcggcatggcgcacggtctcgcggtggagtggcgcacgggggttacaccgtcgcaaggcccatccatactccattacgtccacccttgcccggtcgagctccatggggcgctggtcatggcgtctgggtctagagctccatgcgtgaccctattctag

SEQ ID NO: 30831 - DNA, 545 bp, Oryza sativa
  Clone ID: PAT_MRT4530_35197C.1
cccacgcgtccgctcgaacatagagaagaaggtgaggagcatccatggcgttatgggcggctgcggcggcgagcacttttctggggacgaggctgacggacccggcgccgcataccggcaggatcgaggcgaggttctggttcggcggcagcaagaatgcggtggcgaataaggcggcgaggccgtctgcgccgtctacggacaggtcggtgaggttccccggtgcggagacgccggactacctgaacgggtcgctagtcggctactacgagcttcgatccgttcagactcgggaagccgccggagtacctgcagttcgagctggactcggtgaaccagatcctgtcctagaacaacgccagctatatcatcggcacccggttcgagaccggcaaggtgaaatccaccccgatccagccctacaccgaggcgtttagtcttcagtgcttacgggagtgctagctgatgcacggacgatggaccatgctcgccaccctctgtgccctatgcgtcaagtggctcaccggcatcacctgagctgacgc

SEQ ID NO: 30832 - DNA, 843 bp, Oryza sativa
  Clone ID: PAT_MRT4530_35198C.1
cctgtaacaccattacaatcttttcttccattggaggaagtaaaggttaggtttgtagcatagggagagtctagggcggagagagacagaggaagaagaggaagaagctatcggccacacggtcaataaagagagcggcgagaatggcgagcaggacgcagtacgccttcttgctcctctcggccttcatggcctccctcttcgccggctcggccgccggagtttaccacatcatcggcgccggcaaggggtggcggatggctcccaacaagacctactacgcggactgggctcgcaccaggaacatcagcgtcggcgacaagctcatgttcctgtaccggagcggggtgtacaacatcgtggaggtgccgaccaaggagctgttcgacgcgtgcagcatgaggaacatcacaaaccggtggcagaacgggccgaccatcatcgagctcacccagcccgggccgcgctactacttctgcggcgtcggcaagcactgcgaggaaggcgagaaggtggccatcaacgtctccgtctccgcgcccacgttgcccgactccgacgccgacgccgacgacgacgacgcggacgacagcgacagctcggccgccacgccggccaccgccgccgacctagggcttaataggattaatagaatactcatatcaacaagttgcaacttctttttcggaagccaatctccaaagaactccgaggttaagtgtgcttggcctggagcgattgcctggagcgatttggggatgggtgactgaccgggaaattcttcccgggtgagcacgagtgaggacaaagtgtgcagaaaaatatcaggtgtaagcgggcccg

SEQ ID NO: 30833 - DNA, 533 bp, Oryza sativa
  Clone ID: PAT_MRT4530_35199C.1
tgtgtgtgtatatatatatatatatatatatatatatatatatacatatatatatatatatatatatacatatatatatatacatatatatatatacatatatatatatatacatatatacatacatatatatatatacatacatatatatatatatatatatacatatatatatatatcctacatacatatatatatatacatacatatatatatatatatacatacatatatatatatacatacatatatatatatatacatatatatatatatacatatatatatatacatacatatatatatatacatatatatatacatatacaaagctagctaggtttggctacacatacacattgaatagatgccatctattcgaggacagaaagaaaatgaatcacgatcattcattttttttcttttttcaagtagaggtcttgttcagttttctatttcattctagcattttctacattcatattaatgttaatgaatatatatatatatatatatatatatatagattcatt

SEQ ID NO: 30834 - DNA, 450 bp, Oryza sativa
  Clone ID: PAT_MRT4530_3519C.1
atgtggccgtcacaggtggcctcacctgtgacgggcgccaaccgtggagccgtcacagtgtatgcacacgccggcacgctgctgatcttcatgtgcaagacgaaggaggtcgatgtggcctccatcatgccgtactccagcgttgtgaagagcggcggtgggcaaggggagcggatggaggcaggcggcggcaggcaaggggagcagatggaggcaagcggcggcgggcagatgggcgaggtgcaggtagcggtgggcggacgggcgaggcgtgggcggcggggtcgccgggcagagggcggtggcgggtggacagacgaggcgcgggcggcggggtcacgggcacgggccgcggtgtcgcggcggaggaacgacaggcggcggcgggcgggcctctgcctctactccgaacctccaccgccagatccagaggtgctggggatgctctaa

SEQ ID NO: 30835 - DNA, 612 bp, Oryza sativa
  Clone ID: PAT_MRT4530_351C.1
atggaggaggatgatgggttggccttgatgacgggggcaaaccagagcttatggagttactacaagtgcaccagctcccgatgcagcgccaagaagcacgtcgagaagtccaccgatgacccggagatgctcatcgtcacgtacgaggggtcgcaccatcacggcccgcagccgctcttcccgccgcacatcgcccagccaccgccgccgacgtcggtagtgggcttctccgccgcctccggcgctggcccgccgccgtcgtcgcccgcggcggcggcaaggaagaggaagaactatgtcagggcggccttctcgccgacgacgtccgaggacgacggcgacggcgccggccggctacggccagagtggccacaagacgatgggacgtcgtgtgacgtcgccgagttacgacgacgtggcgacgcggagcacgccgcgccgcgtcgtgtcgcgacggatcgctcgtgcgacgatggcggcggcggcggctcgacctcggcctcgtcgtccgtggcgcgcgctgacgccgctacggcgctgtcctctgactcgccgccgaccatatggtcgtgcctggactggccgtggtcccaggaaacactgtttctgtag

SEQ ID NO: 30836 - DNA, 1640 bp, Oryza sativa
  Clone ID: PAT_MRT4530_35200C.1
ccgagctgcggcccgcgccctaccacgacacctcccccgcaccccacacctcaccaccatcacctcctcctcctcctcctcttcctccgcgcgcgcgagatccagggagagggagagggagagatcatggcggggacggtgacggtgccgtcggcgtcggtgccgtcgacgccgctgctcaaggacgagctggacatcgtgatcccgacgatccgcaacctggacttcctggagatgtggcggcccttcttccagccctaccacctcatcatcgtgcaggacggcgacccgaccaagaccatccgcgtccccgagggcttcgactacgagctctacaaccgcaacgacatcaaccggatcctcggccccaaggcctcctgcatctccttcaaggactccgcatgccgctgcttcggctacatggtctccaagaagaagtacgtcttcaccatcgacgacgactgcttcgttgccaaggacccatctggcaaggacatcaatgctcttgagcagcacatcaagaacctcctcagcccgtccaccccgttcttcttcaacaccttgtatgatccctaccgcgaaggcgctgactttgtccgtggttaccccttcagcctcagggagggagccaagactgctgtctctcacggcctgtggcttaacatccctgactatgatgctcctactcagatggtcaagcctcgtgagaggaactccaggtatgttgatgctgtcatgactgtgcccaagggaaccttgttccccatgtgtggcatgaaccttgcttttgaccgtgatctcatcggtcctgcaatgtactttggtctcatggggtgatgtggatgattatccgtccctattggtcgctacgacgacatgtgggctggatggtgcatgaaggtcatctgtgaccacctgagcctgggagtgaagactggactgccgtacatctggcacagcaaggctagcaaccccttcgtgaacttgaagaaggaatacaagggcatcttctggcaggaggacatcatccccttcttccagaacgccaccatccccaaggagtgcgacaccgtccagaagtgctacctctccctcgccgagcaggtcagggagaagctcggcaagatcgacccctacttcgtcaagcttgccgatgccatggtcacctggatcgaggcctgggatgagctgaacccctcgactgctgctgtcgagaacggcaaggccaagtagattgatcctgggagcttgtgtgtcgcaggatggaaagtaccctttaagtgaaagtgttgctgtggcctaggccccctagatatagctctttttgagatgaagggagagattacttaagcaactttataattctttgttgttatgctggttcttttgtagctggaaaaggatttgttatcatcgtttacataattcaagacaataataattttatcatgtaattttgatagtcgtgctttggttgctaaatggtgttattgtatttaataacctttgcaaatcactatacctgaaggttgttctgagaattgtatgcactaccatattatatttccaaaaaaaacaaaagccatgatggcaaaaacaacgaagacaacccaaaaaaaaaaaaaaaaaaaaaaaaaaaa

SEQ ID NO: 30837 - DNA, 392 bp, Oryza sativa
  Clone ID: PAT_MRT4530_35201C.1
ttttttttttttttttttttttttgaactttaagtcaccaaaaaatactttcagaaccatgatctttacaacgctaagccagccacctgtatttttttttaccagcaaacaaatgctacggtaagtgtcaaccttgtacatctcgtaccaaaacgaatattttctccagaagagacaatgataacggatactcgtttcaaaaggaagcaccataaataaattgatgtggggaagtttcctcaggtctggtgccaaagtgtctcaaggtagggcgtcagcactttcacaagtggggaggcagggtaagtatgcctttgaaactttagccaatggttgtggcccccttttaggcccggatgcggtcctcttcaaaatccattattcctccaggt

SEQ ID NO: 30838 - DNA, 454 bp, Oryza sativa
  Clone ID: PAT_MRT4530_35202C.1
caactcctcctcctcccgtccatggcgcacgacccaaactccccgtcctcctccacctcctcctcctccccatcctccgccgccgccgccgcctcctcttcgccgtcgtcccaccgcccgccgccgccgccgccgtcgtcgtcgtcacaacccgccctcccgccttccccgaggaccgtcgtcccgcgcaccatcgacaccaccccgttccccaccaccttcgtccaggccgacaccgcctccttcaagcaggtcgtccagatgctcaccggctccgacaccacgccgccgtcacagaggccgccggccaagagcaaccaccaccagcaccaccacagcggcgcgccatgccggcccaagaagcaggcgttcaagctgtacgagcgccggagcggcgtccacaagaacttcaagatgatcgcgccgctggcgatggcggcggccgccaccgcgg

SEQ ID NO: 30839 - DNA, 138 bp, Oryza sativa
  Clone ID: PAT_MRT4530_35203C.1
atggggcaatttctcaagaagaggggcgtcctcgatgatgagttcttgggaattgatccgaagataatggaaaccaaggttgcagttaagcagcaagcattccaggacagggcagctggcaatcatgctgtgaagtga

SEQ ID NO: 30840 - DNA, 344 bp, Oryza sativa
  Clone ID: PAT_MRT4530_35204C.1
gagtgatggcaggtcggtggagagcccggcggtcgacggtggctggcggggagagagctagtggcggaggccgcccccatcttcctctctcctccttgccgggctccgcacgtgcctagccggatcggtggagcggaagacgcggtcgggtccgtaccacgggctgccagaggtggatggcttgcgcttcgcggcggacttacggatagtgatgcggacgccgcgtgaccatcactgcgaaggagagcgccatggcgagcgagtgagcgactaacgtgcgtatatgcatttgagccacgatttgtgacttgatccagagtatctcgcatgaaaagtaccgtaat

SEQ ID NO: 30841 - DNA, 367 bp, Oryza sativa
  Clone ID: PAT_MRT4530_35205C.1
ggaagacgactactaggccaccgcgtcgccgtctcgtcagtgagtcgtcacgcgcgctcgcgcgcaggaatctcacatgctgctgctgccgatgctgctgctggtgtggtggtaggttccagccccttgaaccggcaaaaaaaatcctccccgtctcgccgcccgccgcgcccgcgccgctcttgtaacccccacccacccacctaccggccgcgcgcgcgcgcgcgtatgtgctccacctgcatcctttaatccccgcgttgggcggcgccttgtctgatgtggatgccatccacagcacgcggtatctcgcgtgcttcagaggcgggtattgccgggtcgcgtgatttcgaaatggtgcttacag

SEQ ID NO: 30842 - DNA, 1143 bp, Oryza sativa
  Clone ID: PAT_MRT4530_35206C.1
atgagggcatccgatcatcctgcattcagatgcaggccacggcggaatacatcaagagaggtctcgctcaagcacttgtccactactatcctttcgccggccgcatttcctgcgacgacgacggcggcgatttttacatcgactgcaccggcgaggagctcggagcgacgttcgcgtgtcatcgacaaccagcccactgacgccgagacggcggtggtgcagcagctcgccttcaactgcacgcccgacgacgaccacctacctcactgtctgctgtgggtgcaggtcaccacgctgtcctgcggaggcttcgtcgtcggggtgacatggaaccatgccgtggctgatggtttcggcatagcacagttcatacaagccgtcggcgagctcgcccgtggcctgccatcggcgccgtccgtcaccccagtcaggttagatgaccaaaacaacgccgtttctcccttcaccatggccttcatgcagttagcagacaggcacaaggtaccagaccttaccttcaacaacgtgaccgtcccgtcgaggttgatggaccacatcatccgaggacgaacgaccaacgtcaccgtgttcgaggcggtcgccgccgtgctttggcagtgccgaacccgggcggtgatgacaaatccagaggcccccgccgtgctgctcttcgcggtgaatgcgcgaaagtatctcggagccaaggatgggtactacggaaactgcagcacgatgcacgtggccgtggcgaagagcggcgcggtggcgaacgccgacatcaacgacattgtagacatcatacggcgcgccaaggagcggataccggagcagctcaagatgaccggcggcagcgacatgacgatgctacgggagctcgccgatgaccatcgtctggatggatatgagagcctgctctacttgacatcctggcgaaacatcggattcgaggatgttgatttcggcagcggcaagacggcgagggtgatgacctacccgcagagggaggtgttctccaagaaaatgcccatctgcttcatgctcaagaacacaccacaaggggctagggtgatttcaggctgtgttaaagctcaccatgccgacgccttccatcaagaaatagccaagctcaacgccaccacctaa

SEQ ID NO: 30843 - DNA, 192 bp, Oryza sativa
  Clone ID: PAT_MRT4530_35207C.1
gaacataacgctacagatcggttatactcaggcgaccaggtcagttgcacacatgaagacggtacggaagtcgtggacagtcttattgaccaacattgtgtgaagagccaaggagaggtactgattaacactatttgagcaagagaagtcattcgttcatggttcaatgttgttagaaagtaagtactaaag

SEQ ID NO: 30844 - DNA, 1344 bp, Oryza sativa
  Clone ID: PAT_MRT4530_35208C.1
atgagcattgtggtgagcaagtcggcgccggtggtcgtccggccatcgcagccgccggtgaagactacctccggcagcaagatcgttctgtcgcctatggacaagcctagttccatgatgccaaccacagtgctacttgcgttcgaccatcccaccatccaatcagagtgcacggcggagaccatcaagagaggtctcgctcaagcgctcgtcccctactatcctatcgccggccgcctttcctgcgacgacgacggcgatttctacatcgactgcaccggcgaggagctcggagtcacgttcgtggcggcgtccgccaactgcaccatggaggagctcatgtgttgcgtcgacgaccagcctcccgacgccgagacggcggtggtgcagcagctcgccttcaactgcacgcccgacgaccttcatcaccgtctgctgtggatgcaggtcaccacactctcctgtggaggcttcgtagtcggggtgacatggaaccatggcctggctgacggcttcggcatggcacagttcatacaagccgtcggcgagctcacccgtggcctgccatcgccgtccgtcgtcccggtcaggttagacgacgacaacaacgccacccaggccatacctcccttcgccatggccgtttatcagtttatgtccagctccagccacaaggcatccatcgaccacaccttcaacaacatcaccgtcccgtcgagcttgatcgaccacatccgattccgaggacgacgaaccaacgacgacgtcaccgtgttcgaggctgtcgccgccgtgctttggcagtgccgtacccgggcggtgatgaaaaatccggaggcccccgccgtactgctcttcgcggtgaatgcgcgaaagtatctcggagccaaggacgggtactacggaaactgcagcacgatgcacgtggccgtggcgaagagcggcgcggtggcgaacgccgacatcaacgacattgtagacatcatacggcgcgccaaggagcggataccggagcagctcaagatgaccggcggcagcgacatgacgatgctacgggagctcgccgatgaccatcgtctggatggatatgagagcctgctctacttgacatcatggcgaaacatcggattcgaagatgttgacttcggcagcgggaagacggcgagggtgatgacctacccgcagagggtggtgctctccatgtcgatgatggtaaaggctatgccgatctgcgtcatgctcaaggcaacagagcaaggggctagggtgatgtcagcgtgtgttacagctcaccacgtcgatgcattccatgacgaaatcgcaaagctcaacgccaccgcctga

SEQ ID NO: 30845 - DNA, 1725 bp, Oryza sativa
  Clone ID: PAT_MRT4530_35209C.1
atggcttttgacctggatactctttttgacatacatacatatttgagtagtctggttgatctgttttctactcaggaaattgacagtctcatctccattatcccagctcacaaagcacctggaccagatggtttcaatggctatttcatgaaaaagtgttggcacattatagcccaagattattacagactggcagctcattttcatgctggatgtgttgatttggagatcctaaatagctcttttataaccttggttccaaagaaaagctccccagagactgtcaatgacttcaggcctatttccctcatgagaataagcctgaaagttctaacaaagttaatggctaataggcttcaaggggtaatcctcaaactggtgagtgataatcaatatggtttcattaaaggaaaaacaatacaagactttcttgctaggtcttttgaatatattcaccagtgccttaaggtgaactttgataaatcaagcttggaccctctcaatctcaaacaggacaaagctgatttgttagctggcattctaggatgtcaaattggttctctacctttcacttatttgggattgcctttgggcaccactagacctagagtggtggattttgcacctttgttagacagggtagaaagaaggttgacagcaagctccatgtttctgcctcaaggaggaaggttaacattgatcaattcagtcctttcatcaatcccaacctactatatgtcctctttgcagctaccagttacagtcatcaaggccattgacacaactcgaaagaactgtctgtgcagaggaaataacccttcttttacaaggaaatctctagcctcttgggacagggtgtgcacccctaaagagaaaggaggactaggagtgatcaacctgagagttcaaaacacagccttactcctaaaacatatggtcaaattctacaatggtgctgatttaccctgggtaaaactgatctcacaaacatattatgattctaaagttccacacttgatggtgaataagggttcattctggtggagggatatcacatctcttgcagatatctttaggggagtagccaagtgtgaaatcaggataggaacaactgctcttttctggaatgatctatggaatgatgattttaaatgcactagctaccctaatatttttgccgcggccatgtataaaaatgattcagtgaaagccacgtgttcaagacctttagaggattcttttattctacctctctcagatgtggccttttctgaatttctgcagctagaggaagttctaggccatctaaacatacagtcaggaagggggatgcttggagttttatctagggttcagacaaactcaacacaagagaaatgctggatagaaggcactgtgccaaagaagatgatgacctcacatgcgttttatgcaatgctaatcacagagaaacaagctagtaaatcacaagttgggatgcaatataattcatcacttggggctgcaaccaacaattcttcccatggatcagagtcagcttctccaagccttgcaagacagaaggagaaagaagtagttgatcttgaagagggaagtgatagcagtgaagaaggaagaagggggatacacatcaattggaccgaagatgacaacatgcgactgatgagttcttggttgaacaattctgttgatcccataaaaggcaatgacaagaaatcagaatag

SEQ ID NO: 30846 - DNA, 3783 bp, Oryza sativa
  Clone ID: PAT_MRT4530_3520C.1
atgccaccaaagaaggttgtgaaggagaaggttacaaggcgaaaggaaagcgacgccggggcggatatagccgccgaagagggagcagagccttcggcgtccattgccgaagatggaggagcgccatctggttctgcacctgcgccatctctaccgccttcggcccctgccacctctgtgcaggtgccgaacgcggctgacatggcgaaggcggcggcggcggcggcggcaagggcactccagaccagggcggagatcctttcgacaagccaactgctggtgccccaagccgctccgtcgcagccggcagcggccccaactgcgctcactcctgtgcaagcccaagtcaaccctaaccctgaaacacaaaccgaagccgacatggaagccatgcaacaaaacatgacgggactccaagacatgcttcgccaaatggcggggggcgaaaaggggctaccgctgagtgggggaatcaagaaccgtccaatcccactccagttcaagttcccacccgtcccacgctactcaagcgaaactgacccaaaggaattcctctccatttatgagtctgcgatcgaagcggctcatggcgacgaaaataccaaggcaaaggtaatacatctcgctctagacggcatcgcccgttcttggtatttcaatctgccagccaatagcatttactcatgggagcaattgcgcgatgtctttgtccttaactttctaggtacctatgaggagccgaagacgcagcagcatctactcggcatttgccagaggccgggggagtcgataagggagtacatgcgtcgcttctcacaagcccagtgccaagttcaagacataaccgaggcgtctgtcataaacgccgcttcggctggtctactcgagggcgaactcacaagaaaaatcgccaacaaggagccacagacacttgagcacctacttcgcatcattgacgggttcgcaaggggcgaggaggattccaagcgatggcaagctatacaagctgagtatgataaggcttccgtcgccgctgctcaagcccaagcacaagttcaagttgccgaaccaccttctctcactgttcgccatccccagccagcgatccaaggacaaccgccaaagcaaggcgaaggggctccacagtatctgaaccagcaaatctcttttgggccagaagatgccgaaggagtaatgttcccgcatcaagatcctctggtgatctcagccgagatagctggtttcgaggtccggcgaatcctagtcgatggagggagttcggctgatgtcatttttgcagaagcatatgccaagatggggttgcccaccctagcccttaccccagcgccagcctcgctccgtggtttcggcggaaaagcagttcaagttcttggccaagcacagttgttggtagctttcggcacaggtgaaaacaggcgcgaagaacaagtattgttcgacgttgtcgacatcccttacaactacaacgccatcttcggccgtgcaaccttgaacaagttcgaagctatttcccaccacaattatctcaagctcaagatgcccagcccgacgggagtgatagtggtcaaggggcttcagccttcagccgcttctaaaggcgatcttgccataatcaacagaacagtacataatgttgaggctgaactgcatgaccgggtgaaacacgcgccaaagcctgcccctcacggcaagataatcaagatgcagattgatgacgccgaccccgcaaagctcgtatcgctggggggcgacatggacgaagaagtggcggcaagcatcctagaagtactcaagaaaaacagtgatatctttgcctggggccccgatcaggtgggaggtgtttcgacagatcccatcatgcatcacttggcagttaagccggatgccaagccaaggaaacagaagctgcacaagatgtctgctgatcgccaagaagcagcaaaagccaaagtccaaaaattgctcaaggctaggatccacatgaacccgaccgacatccccaagacagcctttatcacaccatttggcaccttttgccacctcaggatgcctttcggcctgaggaatgccggagcaaccttcgccaggctggtgtacaaggtcctgtacaagcagttggagcgaaacgtggaggcttatgtcgacgacatcgtcataaaaagccacaaggcttttgaccacgcgtccgacctgcaggagaccttcgacaacttgcgcgcagcgggtatgaaacttaatcctgagaagtgcgttttcggcgttcgcgcaggcaagttgttgggcttccttgtttctgaaagaggcatcgagttgaatccggagaaaatcgatgccattcagcaaatgaagccttcgtcgagcgcatacaaagtcatggtgccatcgaaatacccttttggcgaaatactccgaggcaaggaagttactggccagctcagcaagtgggcagcagagctatcccctttcgacttgcattttgtcgcccgcactactgtcaagtctcaagtgctagctgacttcgtagccgaatggacaccagcattcgcccttgagcccgagcctgtcgaacagccctgggtgatgtacgctgacggttcgtggtcgcacaggtgggcaggcattgcggcagtgctcacttcgccgaatggtgtgccgattcagtatgctgcaaggctgcagttcgacacaaccaataacgcagcagaatacgaagccattcttcttggcctaagaaaggcgaaagcattaggggttcggcgcttgctaatccgaaccgactccaagctagtggcagggcatgttgacaaatccttcgaggcaaaagaagaaggaatgaagtggtatttggaggccgttcggtccacggaaaagtgcttcaccggcataacggtcgaacatttacctagaggccagaacgaggaagcagacgccctagcgaaatctgctgcctgtggaggcccacattcgccaggcatcttttttgaaatcctatacgcaccaagtgtgcctgtggaaagcctggaggccgaacccctcggagcgatcacttcggcagcagtacagaagtttgtatggaaaaacattgtttgccgtttcggagtaccaaaagagtttatcactgacaatggcaagcagttcgactctaacaagttcagagaaatgtgcgaagggcttaacctggaaatcaggttcgcgtcggtcgcgcacccacagtcaaatggggcggccaaacgtacaaatggtaagatcctaaaagcactaaagaaaaggcttgagggggcagcgaagggcaaatggccagaggaaatgttatctgttctttgggcccttcggatgacccccacaagaccaaccaagttcagcccgttcatgcttctttatggcgatgaggcaatgaccccaacagagctaggggctaactcaccaagggtgacgttctctaggggcgaagaggggcgcgaggtgtcgctcgaactcttggagggggtaagagtcgaagcactcgagcacatgcgcaagtatgccacaggcacttcggcaacttacaacaaaaaagttcgaccgacggagctgttgcctggtcatcctgtcttaaggaaaaaggcgaacccgatagccgttggcaagcttgaatcgaagtgggaaggaccatacctcatcaagcacaagtccaggacggggtcctttcgactggcgacacttaaaggcgaagagttcgaccattcatggaacgctgcctctctcaaacgtttttatgtctag

SEQ ID NO: 30847 - DNA, 250 bp, Oryza sativa
  Clone ID: PAT_MRT4530_35210C.1
aagcacccggccggagctttgatcctctaaaacctcctccctttttttttttcctagaaaataatgaacgatttccatcactacttagtgatttttacacaaatgttcatagaccacaaatttttcacattttcactcttcctctacttcaactaactaaacatattatttgattaattatcacacttttctaattatctttgcaacaaatctctccattttatcatattattcatgtaactacatttac

SEQ ID NO: 30848 - DNA, 336 bp, Oryza sativa
  Clone ID: PAT_MRT4530_35211C.1
atggcggaggtggcggcatcgtggtcggggggaagcatgggtgcggcaactacggcggcgggagagggggaagaggaggccggcgagccagtggccgccgagttgcagtcgcacacgagcgggaagtcggcgccacacccagccgacgacgacacgtccgacggctccgagaacatgtttattttcgtagacctagactaccgcatgggcctgaaacgaggaaatcccgaacgttttcggcccctctcaggtttgagctctggaatgcgtgcaatgcgccaatgcccatgctcatacaggatacacgcccagcgtggctgcttgcaaaatttttag

SEQ ID NO: 30849 - DNA, 129 bp, Oryza sativa
  Clone ID: PAT_MRT4530_35212C.1
atggtgaggaggaggtcacaatggattgcggtgttactgcggggaaccagccatcaggcaaagtcgctggcggagggacctccagagacgccggcgcaagcgtccttttgtattgctgcctcatcttga

SEQ ID NO: 30850 - DNA, 209 bp, Oryza sativa
  Clone ID: PAT_MRT4530_35213C.1
ggcacgagcgtcacacaaagaaactcatgactttagatctaacaagttggttgagcaaaatagatttggtttatacgcctgttgattatgctgtagaagcttcacttgcagtcaatattttcgatgggccatctgatttcaccggtaaagtgattgcttggactagtggaaataaggacaatgagttcgttctacatgatacccaagtg

SEQ ID NO: 30851 - DNA, 1080 bp, Oryza sativa
  Clone ID: PAT_MRT4530_35214C.1
atggtgcaggtgctgcacgccacaaaggatccatggtgtacagattatatttcggacgaaatgatggctactttcatcggatcggaccaagctatctcgcgattcaccgatgaagacagtgtcggtgggatagagtacgccgtggcccctcgtggcatgttcgcgcaaccggcgcggctcacgcgcgagtggttgaacgatgggcacactggtttagcacctagcaagctcgcacccaccacaagggacaacaccgccgccgtacatggcgtacagctagcggtacaggcacaccgcgcgcacacgaaccaccgcgaatacgatattgaggggtgcggcgtgcgccggagcatgcatgtgcttgtcttcgtatcacctgacaagcgatcggaggtcaacttctacgaaccgctactgcacggcgcagggccttgcgacttgccgacagcgttcaagtcaaaggaaacattcagcattcagaatgctgaattcccacccgctcctttggctagaggcctgtgttctgcaaggagcggtggcgagcagtggcgcgcgaagtcgatagggtggcgagcggacggagtggcgacggagagcctgcgggagtcgagatcgtccggggaagcaacgacggcaacgacggcagccttgtatcccgtcggcgaggtcacgctcggccattgcgcacctctcccttcgcccatcgccatcgagcccccacccacggcgcccggccatccccggcgaggagctctgtttttggtgggtgtcggcggagttggaacgaaggagggtcgttctcggcatcgatgtcgccatctccgatcctccaccgccaccgccgccctccccccctccattgccgacccctccccggcgtcgagaaaatcctcgcccgacctcagcaacaagaacgacgagcgaggagcaacgacgggaggagatagcccgcgcagctgtcgtgcttgccggcgacctccttctctgcctcttcctccaccggccacctccactgcccgtggcctgccgccgctccgccggcatgctttgaccgccatcttcgttggaggcgacgaggac

SEQ ID NO: 30852 - DNA, 730 bp, Oryza sativa
  Clone ID: PAT_MRT4530_35215C.1
ttactccctccggagataggatgccagattaaatccatcagcattgctatggtaggatccgtggcccatgccactgccactgcttctgccgccgcagctgccataaattactgtgcgcggcatgtgcaaccctgccaagatgctccttggcctcctcttgccccaatctgtcgtctttctttcctgctgctcattagctgcccccagtggtagggttgtttttggtttcttgccgctcgtccccctggtggtcccgttgttcgcgacactgtctgcattgcacggccgccttgtgcacgggaatctggggcttcgcaatccgcagtgccgcacatggcgatcttgcagttgcagggcaggcaggcagtgtcgtgttgccgtggtcgcatggcgtggcgtacgttccgcgaggacagtgtcgccccagaatgccatgccaagccatatattttttgatcgtgttccagctgcattgcagagcccctcatgattccttgcgtgcaatgatgtccctctggcgattcgtaaaggattgcgtggtgcatgaacgaaccccattctctctgtcacttggccatgggctgcaagcctgcaaggtcttccgaaaactgtaactgccatcactggcgactttaactcgttgcaataggtcacgtgtatttacgctttgcactgtgaaatgatgggtacgtgagcaactgtccatgaacggcttcgccggcgacacggc

SEQ ID NO: 30853 - DNA, 336 bp, Oryza sativa
  Clone ID: PAT_MRT4530_35216C.1
cgtcttcctctccccttcacgccgtgacccagcgatcgaccggccggaatggatgcggcggcggcggcggcggcggcgggaggaggaggagggggaggcggtagcgtcgcggcgcggagcagcccggcgtccgtgcaggccaccaacgacgacgccgcggccagcaagctgtcatgtgttaataaaggatacatgaaggatgattatgtgcacttctttgtcagacgaacaacaaaaagggctccaataataaatcgagggtactatgcacgttggtctgttcttaggaagcttctgcatcagttcctcggtgctggaaatggcagtaatgatcaa

SEQ ID NO: 30854 - DNA, 230 bp, Oryza sativa
  Clone ID: PAT_MRT4530_35217C.1
ccggccggggctaaatccccccaggtagagatttgctctgctcgggtgctccgccgcctccgacgctcgccgataaacattccgatgcgctcattccctcctcgtcagtgagaatcacctgcgaccgcggcttccaacctcctatgctgaacgtttttagtagcacggccacaataacgagaaggcggcaaacacaaatgggagacctagtgataagaacaggggtcgag

SEQ ID NO: 30855 - DNA, 755 bp, Oryza sativa
  Clone ID: PAT_MRT4530_35218C.1
tcctagatttagaccttatgaacaaagccctacttgggaaatggatctggaaactcgaaaatgaggagggttggtggcaagatattttaaaaaacaaatacttaagaaagaaaccaatgtcaattaaaaaaaacaaacctggtgactcacatttttggcaggggctgatggaaataaaagataagttctactctttgtgtactaagaaacttggagatgggaaatctattttgttttgggaagacagttggttagggggcagacccctgaacatccagtaccctgccttgtataatatcactttttctaaacacattaccttagccaagataaaagagaaaggctgggaggtgatcaaattcagaagatccttatatggggataagctacatgactgtaacaagatcaaatcgaaatttggggagttggactttcaggaaggggctaaagataaacttagttggactctgacaaaacatgggaccttttctgtgaaatctttttacagggctctgtgtgttcaacagaaagcggaggccgatcgaagaaggctgctcttgggtgccaagctcttaagacaggtggcaaatgatatcttctgctcaaagtttggatggaggcctggggcaagaagaattggctactgttgacaacacttggatatgcaggaaaacgaaaaaagaatctggggcttggagctcctttaggctcttctttagtctgatagttagcttagtttcacctgggtgaatgtt

SEQ ID NO: 30856 - DNA, 1310 bp, Oryza sativa
  Clone ID: PAT_MRT4530_35219C.1
ttgaaatatatcctttgcctttttgaacagttgtctggacttaaaattaactttaacaaaagtgaggttttctgttttggtgaggcaagaaagaaacaaaatctgtatggtcaactcttcacttgcaacataggtgctttgcctatgagatatttgggagttcccattgataaaaaaaggatattaaaaaaagattggaaggtagctgaaaacaaaatggaacataagttaggctgctggcagggcagattccaatccattggggggagattgatcctgatcaattccagccttagcaatgtacctttatacatgatatcattttacagacttcccactggggtgaaagagagaatggatttctttagaagaaggttgctctggcaggaggattaggggattagaaagtatcaccaaggtcagtggcctgtgatctgttctccaaaggaccagggtggtttgggagtcctagatttagaccttatgaacaaagccctacttgggaaatggatctggaaactcgaaaatgaggagggttggtggcaagatattttaaaaaacaaatactcaaggaagaaaccaatgtcaattacaaaaaacaaacctagtgactcacatttttggcaggggctgatggaaataaaagataagttctactctttgtgtactaagaaacttggagatgggaaatctattttgttttgggaagacagttggttagggggcagacccctgaacatctagtaccctgccctgtataatatcactttttctaaacacattaccttagccaagataaaagagaaaggctgggaggtgatcaaattcagaagatccttatatggggataagctacatgactggaacaagatcaaatcgaaatttggggagttggactttcaggaaggggctaaagataaacatagctggactctgacaaaacatggaaccttttctgtgaaatctttttacagggctctgtgtgttcaacaggccagctcacctctgaaaaaggtttggaattacaaaatccccctgaaaattaaagtttttctctggctcttgctcaggggaagaatcttaactaaagacaatatgttcaagggagggtggaggaagggtagtttaaactgccagttttgtgacaaaagtgagactatccagcacctcttttttgaatgcggaggccgatcgaagaaggctgctcttgggtgccaagctcttaagacaggtggcaaatgatatcttctgctccaagtttggatggaggcctggggcaacagagttgctttgcttgctaaccccctcgc

SEQ ID NO: 30857 - DNA, 6084 bp, Oryza sativa
  Clone ID: PAT_MRT4530_3521C.1
atggccgagcaagcgaaggcgcacgacctctcaccgagtgtgagcggcgacgacggggagccgaatccacgccgtcgagctcgtactcccccacctcctccgcgccaaagccctaagcagggggaggcgcttgagagggtcgacaaatccgtggcatcaccagtcgcaggtgatgcaggagaacggcgagatggggagcgtcgcctcctcgtctgcggcgacggcagcacgcctcagggtgcgcttcaggctgctggcgcgctcctacgacacccgcctgtcgtccatgacccggagtctccagcccaacgatggctggaagacgtggccaacttggtcatgacggcacagcagcgcctgggtgctggtggacggtccgccaccaccaagacctccggcgccgctaccaccggctccgtgtcgtcaaggcggagggcgcggcgagcggcggctgctgcgcgccattcggccgccactccctcgtcgacacctccaactcgggaggatcagcatggagagccggatgcccgcatcgacatcgagcgccggcgtaataaccggcgtactccccgcgcaacggagggcgcctcttcgtccagagtgtcacctcgacatggacgagaggatcagccctccgtgcccccggccggtggtgttggctgtagagcctttgtggcgagtcttcggaatgtccgttggcccccaaggttccggcccaccatcaccgagaagtacgatgggagcgtcaaccccaccgagtttctccaggtctatacgaccgggatcgaggccgctgggggtgacgacagggtcatggcgaacttctttcccatggccctaaaaggacaggcgcggggttggctaatgaacctgccacccgcgtcggtccactcctgggaagatttgtgccaacagttcaccatgaacttccaaggcacatatccgcgcccaggcgaagaagcggacttgcatgcagtacagcgaggcgatgatgagtcgcttcgctcgtacattcagcggttttgccaagtccgcaatactataccatgcatccctgcacacgcggtgatctacgcgttcagggggggcgtacggcacaaccgcatgctcgaaaagatcgcttccaaagagccccagactaccgcggagctttttcagctcgcggaccgagtggctcgtaaggaggaagcgtggacatggaactcctccggttccggagtggcagcttcggccgcccccggatccgccgctcagacagggcggcgtgacaggaggaggaagaagaggtcggaccgttccggcgacgagggtcatgtcctcgccgtcgagggcgctccgcgggccactcgaaaggggaggcctgcgagcgacaaaaagaaagaggctggtactcccagcagggagcgccccgccggcaggtggtgctccgtccacaacacctccctccacgatctcgcggactgtcgtgcagtcaaaaacctggctgagcgaacgaggaagtgggaggaggacaggaggcaggaacgccgtgagggcaagtccccggcggttccttccggcaaacggcgaagtgaggccaagcagaaggcccccgctgttgacatcgatgatggtgatgatgacctaggtttccaagaacctggggccaccattgccaccgtcgatggaggagcgtgtgctcacgtctctcgccggagcttcaaggctatgaagcgagagcttctggccatggcccctactcatgaggcgatgcgtcgggcgcggtggtcggaggttgctctcaccttcgaccagaccgaccacccaccgtgcattgcccggggagggcaggttgcgatggtagtttcccccaccatctgcaatgtgaagttggggcgtgtcctcatagatggaggagcggctctcaacatcctttcccccgcggcctttgatgctatcaaggccccggggatggtgctccagccgtctcaaccgatcatcggtgtgacgccggggcacacatggccattaggtcacatcgacctaccggtcacctttggtggatcagccaacttccgcacggagcgggtgaacttcgatgtggcggacctcagtctgccctacaacgcggtcctggggaggcccgcgttggtgaagtttatggcggcggtccactacgcctacctccagatgaagatgccgggccccggtggccccatctctgtccgtggcgaccttaaagtcgcgctcgcttgcatggagcagcgcgcggaccacctcgctgctgcgaccaagcccgagggtggtgacgagaggcttggcacctccgcccccaccgccccgaggcagcggattgccacatgtgacgaggtcccggaagacgcgctcgtctccttcctgcgggcaaacgctgacgtcttcgcatggagaccagcggacatgcccggggtccccagggaggtgattgagcaccgtctcgccgtgcggccgggcgcaaggccggtccggcagaaagtgcggcggcaggccccggaacgtcaagccttcatccgcgaggaggtggcgaggcttctcgaggccggattcatccgtgaagtcatccatccggagtggctggcgaacccggtggtcgttcccaaggcgaacggcaagcttcggatgtgcatcgactacaccgaccttaacaaggcatgtcctaaagatccttaccccctgcctcgcatagatcagatcgtcgactccactgcggggtgcgaccttttgcgttttctagatgcatactctggttaccatcagattcgcatggctagggaggatgaggaaaaaactgcgttcattacccccgtaggaacctattgttatacatcaatgcccttcgggttaaagaatgcaggtcctacttttcaacgtactactcgaatttctttgggtagccaaataggacgtaatgttgaggcttatgtcgatgacttggttgtaaaaacgcgcaaccaagaaactttacttttagatctagcggaaacttttgagaacctccgctccgcccgcataaagctgaaccccgataagtgtgtgtttggtgtacctgcgggcaagcttctcgggttcttggtctctgcccgaggcattgaggctaaccccgagaagattcgagctatcgagcggatgcgcccccccagcaaacttagggatgtgcaatgcgtcaccggttgcatggccgccctaagtcgtttcatatcaaggctgggagagaaggcgctacccttgtttaagctcctcaagcgctcggggccgtttacttggacggaggaagctgaacatgccctcactcagttaaaggcatatctcagctctcccccggttctagtcgccccggagccaaatgagcccctgctactttacttagcggcgacccctcaagtagttagtgcagcgttggttgtggagcgcgatgaaaataatcctcatttcgtgcacccccattctgtgctaacttggcccgggagcgagcggggaggagaggcccccgagtcggacggtggcctacggcccctgacgaccggagtcggccctctgcccgcttgtcagacggtgctaagtgcccccgaccctcaggagggccccaaggccactgcgggaaggccgcacttaacgccctttgaccccgaggctaaccctgtgctgactcgacccgggaaagagcagggagaagaggcccccgagccgaacggaggcctgaggcccctgacgaccggagtaggacctttgcccgcttgtccgacgatgccaggagcccccgacccccaggacggccccgaggccactgagggaaggccgcccctttcatcctccgaccccgaggtcatcggcacagaagacaagtgcgccccgaaaggccacttgaatgaagaacgccccggggatacggcccccagcaaagaggatcggccccaccgaagggtgcagcggcctgtctactttgttagtgaggccctccgggatgccaagacccgataccctcaggcccagaaaatgctttacgctattctgatggcctcgaggaaactgcgccattatttccaggcgcatcgggtcactgtggttacgtcttaccccctcgggcaaatcttgcataatcgagagggtacaggacgagtggtaaaatgggcaatcgagctttctgagttcgatctgcactttgaaccacgccacgctatcaagagccaggccctcgccgattttgtggcagagtggaccccggctccagagaccgtctcaatacccgaggccagcacggacccctctcagctgcctcgcaccacccactgggtgatgcagttcgacggttctctgtctctccagggcgctggtgcgggggtcacgttgacctctccaaacggagacgtcctcagatacctggtccgcctcgactttcgagcgaccaataatatggcagagtacgagggactccttgccggactcagagtggcggccgggctggggctccgccgcctcctggtgttaggcgactctcagttggttgttaaccaagtctgtaaggagtaccggtgctctgacccacagatggacgcctacgtacgccaagtacggcgtatggagcgccattttgacgggatagagcttcggcatgtgcccagacgggataacatgatagccgacgaactctcacggctcgcgtcctcgcgagcccagaccccaccgggcgcctttgaagaaaggcttacccagccgtcggcgcgacccgaccccttaggggagacggatgcgcctgaccggcccccgaggcccgtcggagtccaggcctcgggacccgaagggagcgctccaagctcccttagattgattgcttggatctctgagatccaaacatacctcacagataagactctacctgaggaccgcgaagggagtgaacgcgtacaacgcatttccaaacgctacgtgctggtagaagggaccctctatcggcgcgcggctaacggaatcctcctgaagtgcattcctcaggaacaaggcgttgagcttcttgctgacatccatgagggcgagtgcggagcccattccgcctcgcgcaccctggttggcaaggcctttcgtcaaggattttattggccgacagccctcaatgatgcagtcgatctggtccggcgatgcagagcgtgtcagttccacgccaagcaaatccatcagccggcccaggccctgcagatcataccactgtcatggccatttgctgtctgggggtttgatatcctgggaccgttcaaacgggccccgggcgggtttgagtatctgtatgttgcgatcgacaagttcactaagtggcccgaggcttatccggttgtcaagatcgataagcactctgctcttaaattcattaagggcatcacggcccgttttggagtgcctaaccgtattattacggataatggcacccaattcactagtgaactcttcggcgactactgcgaagacatgggcatcaagctctgcttcgcctcacctgcccaccccagaagcaatggccaagtggagcgcgccaatgcagaaatcctcaaatgccttaaaaccaagaccttcaatattctcaagaagcacggcgattcatggatcgaggagttaccagcggtgctctgggcaaaccgaaccacaccaagccgagcgaccggggaaacgcctttcttcctcgtctacggcgcagaagcggttctcccatccgagctcaccctgaggtctcctcgggccaccatgtactgcgaggctgatcaagatcagcttcgtagagatgacctcgactacttggaagagcgaaggcggcgcgcggccctccgagccacgcgctaccagcagagcctgcggcgctaccatcagcgccacgtccgggcccgatcactctgcgtcgacgacctcgtcctacgccgcgtccaaacgcgtgctggactgagcaagctctcaccaatgtgggagggtccgtatcgagtgatcggtgtcccccgggcgggctccgtacggctggccacgggcgacggcactgagctgccaaacccgtggaacatcgaacaccttcgtcgcttctacccctga

SEQ ID NO: 30858 - DNA, 365 bp, Oryza sativa
  Clone ID: PAT_MRT4530_35220C.1
gcacgaggctcgtgctcgagctcaccacccacctcgcctcgcccacctctcccatctcggccaccaccaccgatcgcccctcgcgtgcatgtcgcagccggagtagcatcgcatgcgtgcaatgccgtctcctcctcctcatggccccatgtcgctgatggccagccggtgctactgctgttcgtcgccgccttcgccgtcgccgaagcagcggagagacgccgagagcaagcagcagcagcagcagcacatcctgcaggcggagcgcggctggcggtgacgacgaggagggcgctgctggccgccgccatcgtcgtcgtgggctccggcacggcggggcgcgccagggcgacggaggaaggcgg

SEQ ID NO: 30859 - DNA, 235 bp, Oryza sativa
  Clone ID: PAT_MRT4530_35221C.1
cccacacgtacgtaaacgcaaacctgaggctacaaccggatctctgttctgcgccttcgctgtggcgtaagcacgatgtctgctacaatggacattgacggcgccgccgacagcgccgccgcgggcggagggagacatatcgagaatgagctctaaagaacggcggagtccgacgacaccgtagacttgttctatgtatatccaggcgacctgaccggcgcgctcgctctacgtg

SEQ ID NO: 30860 - DNA, 828 bp, Oryza sativa
  Clone ID: PAT_MRT4530_35222C.1
atgtcgctgatggccagccggtgctactgctgttcgtcgccgccttcgccgtcgccgaagcagcggagagacgccgagagcaagcagcagcagcagcagcacatccgtaacttatcgccgccgccttcgattttcgtctctcgcggcggagcgcggctggcggtgacgacgaggagggcgctgctggccgccgccatcgtcgtcgtgggctccggcacggcggggcgcgccagggcgacggaggaaggcggcggcggcgagggggagggggtggtcggggcgatcaaatcgatatttgacccgaacgagaggaccaagtcggggaaggtgttgcccaaggcgtacctgaaggcggcgagggaggtggtgcggacgctccgggagtcgctgggggaggacgacggcggcgacgtggccaagttccggcgaggcgccgacgccgccaaggagtccatccgggagttcctcggcggctggcgaggccagcaagccgtcgctgctgaggagtcatacgttgcgctggagaaggccatcagatcactggcggagttctactccaaggcagggccattcgcctcgctgcccaaagatgtcaaggacaagatcctcgccaacctcaacactgcagacgcctttctgtagagatttattttcttctgtcagaaaaaaaaagtactatctgccaacaatcaacgagtgataattgcattgtagccagccttcactttgcctgcgaaaagatcattggcaaagacagaaaagagcagatagaacatatgattacaagtaaatgctttccagagtgattaaaaaaaaaaaaaaaaaaaa

SEQ ID NO: 30861 - DNA, 528 bp, Oryza sativa
  Clone ID: PAT_MRT4530_35223C.1
atggagttgtcggtggtcggcggcgagccgttgctggcggtggcgatgcagcagctgctggacctggacctccccgatgagctggagcggcagctcaacccgccgacgcgcgcctacgtgcgcgaccgccgcgccatggccaacacccccatggacgtcaaggagctccgggcctccggcgcgctcgtgctcgccgtcgacatgcccggcgtcgcccccgccgacgtccgggtcgaggtcgaggacggcaacgtgctcgccatcagcggcgagcgcaggcgccccgccggcgacggcgacgacggcggcgagggggtgaagtacctgaggatggagcggcggatgggcaagttcatgaggaggttcccgctgccggagagcgccgacctcgacggcgtccgcgccgagtacaaggacggggtgctcaccgtcaccgtcgacaagaagccgccaccggagcccaagaagccgcgcgtcgtcgaggtcaaggtcgccggcgccggcgagcccaagggcaagggcaagtag

SEQ ID NO: 30862 - DNA, 297 bp, Oryza sativa
  Clone ID: PAT_MRT4530_35224C.1
atgtcgggtgatcaagccgacaacgttgggtgcgacaactcaacatttgtcgagaacgttctcgataatgcggtgtactcgaccacatcctactcgagtgctcactcctcaattgtgcctgaagaatattttatagaagacaagatatatagcagagaatatcgaggaatgtactctggtcgggtcaaatttcccaggtccaaagtagttgaagtatccctcgtcgaaaagtccgctgctttgatgaagcttgagatggcgaggatcccggtccgccagataacgcacttcggttag

SEQ ID NO: 30863 - DNA, 1608 bp, Oryza sativa
  Clone ID: PAT_MRT4530_35225C.1
atggcgcccggctcctcctccacctcctccccgggaggaaaagccgccgcggtgggcggcgaggcggggaaggagggcggagccgtgccctcgcccgcggcagctgcctccgaccacgctccggtggcgcccgacggctcgccgggaggtggcgcgctgccggcgggcggcgaagcggggaaggaggacgagggcgtcgcctcgaccggctcccgcactccgctggcccctggctcctcctcgggagaaggcgcgctcggggaatgcggcgaggcgaggaacgacgacgaagcgccagcgccagcgccacggctcatcgcctcgcccaccgccgccgccgccgccgccgccaccactgactacccacatgaaggcggcgaggcggagcaggagggcggcaacgcgtcatcaccatgtgaagagcaggaagaggatgacgacgacgacgaggaggaggaggccccgacgcatctccccttcgcaccctcgtcggaatcggaggttaacaaccttgtacttgaagtacttttggcaaaccttcatgtgagacaatttcttcgagcaaaggaaatctgtattgggatcataggaaacttagcttgtcataaatctctggccaatgcaatcacttctcataatggattaattgctactgtcgtggatcagttatttcttgatgaccctggttgccttactgaaacattcaggttattgagcaccatttttcagagcaacgcatctatgtcatgggctgaagctctcttacctgatgagattctttcacgtattatgtggataattggaaacacagtgcatgctaccttacttcagaagatactggagtttctatcagctcttgttgatgatcaagatgtcattaccattcttatcgagcccttgataaaagtgggtttagttgactgtgctattggtttgctattaaatgagcttgaaaaatcaatggatgggaacaatctagacaggtcagattctcttgattcaatccttcgacttattgaagaactgtccgccatagacaactgttcaaaagtaatgtcatcaaatgaccaattgattaaagcactaagtaatatagtcaagttaccagataaatttgagattagatataattatgttccagatgagcatgctgatcatgttatatattcacaaactatgcttcaggttgagggctattgtgcttctgtggtaatcataatagcaaatgttttgtctgatggagaacatctcacacctattctgtcccatgatttacccttactggagggcctatttgacattcttccattgatctctgatgataatgaagctcgaaatgcattttggtgtatcttgacacgtttactgcaacaagtagaagaaggagaaaccatcacgaactcttcaaaactcgagcagtttgtgtctatcttcttggctaagttcaccctcatgaaagatgacattgaaagacatgggattcaaacagaagctgattcctcagttgagggtgtttctttgaagaatgggctacgcacatctgtatcctttataagaaaattcaatcctgataccatcatgcccttcatggagatacatagatcttag

SEQ ID NO: 30864 - DNA, 1960 bp, Oryza sativa
  Clone ID: PAT_MRT4530_35226C.1
tcggacgcgtgggccggcgtcagctcacgaggcaggaaagaaaccccaaacccgcgtcgccgacgccgtcgccggcacactcgccttcgcctcgcccaccaccaaaccacctccgatggcgcccggctcctcctccacctcctccccgggaggaaaagccgccgcggtgggcggcgaggcggggaaggagggcggagccgtgccctcgcccgcggcagctgcctccgaccacgctccggtggcgcccgacggctcgccgggaggtggcgcgctgccggcgggcggcgaagcggggaaggaggacgagggcgtcgcctcgaccggctcccgcactccgctggcccctggctcctcctcgggagaaggcgcgctcggggaatgcggcgaggcgaggaacgacgacgaagcgccagcgccagcgccacggctcatcgcctcgcccaccgccgccgccgccgccgccgccaccactgactacccacatgaaggcggcgaggcggagcaggagggcggcaacgcgtcatcaccatgtgaagagcaggaagaggatgacgacgacgacgaggaggaggaggccccgacgcatctccccttcgcaccctcgtcggaatcggagttacctgatgataagtcaacagttgatcccagcttcaccatctctctcataaggaagctggtacctcagggaccagatgtggataaagagttaagtgtgaagcagggacgaacagaagaaaaggatgctagttctgatgttggggaaccaaaacagcctcatgacaaagatctgtgggacaatgaaggttgcaaactgtgggacctttcagttattgaacctcaggcagaacttatggttaacaaccttgtacttgaagtacttttggcaaaccttcatgtgagacaatttcttcgagcaaaggaaatctgtattgggatcataggaaacttagcttgtcataaatctctggccaatgcaatcacttctcataatggattaattgctactgtcgtggatcagttatttcttgatgaccctggttgccttactgaaacattcaggttattgagcaccatttttcagagcaacgcatctatgtcatgggctgaagctctcttacctgatgagattctttcacgtattatgtggataattggaaacacagtgcatgctaccttacttcagaagatactggagtttctatcagctcttgttgatgatcaagatgtcattaccattcttatcgagcccttgataaaagtgggtttagttgactgtgctattggtttgctattaaatgagcttgaaaaatcaatggatgggaacaatctagacaggtcagattctcttgattcaatccttcgacttattgaagaactgtccgccatagacaactgttcaaaagtaatgtcatcaaatgaccaattgattaaagcactaagtaatatagtcaagttaccagataaatttgagattagatataattatgttccagatgagcatgctgatcatgttatatattcacaaactatgcttcaggttgagggctattgtgcttctgtggtaatcataatagcaaatgttttgtctgatggagaacatctcacacctattctgtcccatgatttacccttactggagggcctatttgacattcttccattgatctctgatgataatgaagctcgaaatgcattttggtgtatcttgacacgtttactgcaacaagtagaagaaggagaaaccatcacgaactcttcaaaactcgagcagtttgtgtctatcttcttggctaagttcaccctcatgaaagatgacattgaaagacatgggattcaaacagaagctgattcctcagttgagggtgtttctttgaagaatgggctacgcacatctgtatcctttataagaaaattcaatcctgataccatcatgcccttcatggagatacatagatcttag

SEQ ID NO: 30865 - DNA, 656 bp, Oryza sativa
  unsure (1)..(656): unsure at all n locations
  Clone ID: PAT_MRT4530_35227C.1
acctattcgacgccgccgacgtagtcgaggaagacctaacctttcctggtggtaccggcggggggcaccagctcgagtgaccatggacagctatcggcgggggagggctgcgacagggggatctggcaccacgagcccggcgacaaccaatcctaccgtgtcgccgctccgtaggctatggagatgctgcgacaacagaccctgatccgatccaaacgtgtcgtgccagcgtgtgcgggagataggcaagacttgctaccgatctcagtgtccatagcctctgcgccttcagggtgattgatgcgcccggtgactaccctatgattgctgttcaggacaccggcgctgagaacctgcccgctgagcgcgagatcttcttgctggtcgtcatccagatgcgccagattgttggtggctacctgggctccgccgtgatcagtgccagaggctctgatacctgtgctacttctagagtcgcatacggtggccaccctgcacgcgggaatgattgctggggtcactggcatgcggntcgttctcgnaccggctgttgcctatattgcctgtggccttggtaagaaagccaccttactctgagagaatactgtgctgntgtttggccttggaagtggttcatttggtgtctccctccttac

SEQ ID NO: 30866 - DNA, 399 bp, Oryza sativa
  Clone ID: PAT_MRT4530_35228C.1
aaaacacctttttatgttttttaattggggggacacaatgaagagggggccgttattcattatagattttgcatgctgatctaccacaataaaacgtttcacacaccatgaaaccagacattgaggttccacattacacggaaatcgtacacaatgaaacggaacacgatcaaggaccggacctgacaaccatagctccattggggaagacaaataggacaacttgtgaaccctagaacaaaaagaggtccatggttggggacttactggccaccacggaggcggagcaccaagtggagtgcggactccttctggatgacgcaaaccgcaagggtgcggccattcttaagctgcttaccaggaaagctctgacccttatggaccggggagaggccctcc

SEQ ID NO: 30867 - DNA, 261 bp, Oryza sativa
  Clone ID: PAT_MRT4530_35229C.1
acacaaacaaagggacctaataatgacggggtccctcattatacactaagcttgatgtacgtaacagattctgacgttagaaatcagaacaaatgcgctggctaaaacccatggccacattaagaaatttggatacatgagtcgctatggtctgcctgtcgagacctgagccaccctaatgctggcacaatgtcattatccagctatattgcaagacacgttgtgggtaattagccggctggtctgtggaactcaacaaac

SEQ ID NO: 30868 - DNA, 3000 bp, Oryza sativa
  Clone ID: PAT_MRT4530_3522C.1
atggggttgtccactctagcccttaccctagcaccagcctcgctccgtggtttcgacagagaagcagttcaagttcttggcctaacacagttgctggtagctttcggcacaggggaaaacagacgcgaagagcaagtattattcgacgttgtggacatcccgtacaactacaacgccatcttcggccatgcgaccttgaacaagttcgaagctatctcccaccacaattatccgaagctcaagacgctcggcccggcgggagtgatcgtagtcaaggggcttcagtcttcggcctcttcgaaaggcgatctggccataatcaacagagcagtgcataatgttgaggccgaaccacatgaccgggcgaagcacgcgccaaagcctgcccctcacggcaagataatcaagatgcagattgatgacgccaaccccacaaagctcgtatcgctagggggcgacatgggcgaagaagaggctgcgaacatcctagagggccctgatgaggtgggaggtgtttcgacagatctcatcatgcatcacctggcagtcaagccggatgccaagccaaggaaacagaagctgcgcaagatgtccgctgatcgccaagaagcagcaaaagccgaagtccaaaaattgctcaaggctggggtcatccaagagatcgaccatcctgagtggctggcgaatccagtgctggtgcggaaatcaaacggcaaatggcgcatgtgtgtcgatttcacagacctgaacaaggcatgtccgaaggacgattttcctttgccacggatcgaccaactcgtggattcaacagctggctgcgaactcatgagttttttggatgcatattccggctatcaccagatccacatgaacccggccgacatccccaagatagccttcatcacaccgttcggcaccttttgtcatctcaggatgcctttcggcctgaggaatgccggggcaaccttcgccaggctggagaccttcgacaacttgcgcgcagcgggtatgaaactgaatcctgagaagtgtgtttttggcattcgcgcaggcaagttgttggatttccttttttctgaaagaggcatcgaggcgaatcccgagaaaatagatgtcattcagcaaatgaagcccccgtcgagcgtacgtgaagtacaaaagctcgcaggccgaattgcggcactcagtcgattcctctcaaaggcagccgaaagaggtttgcccttcttcaaggccctccggggcgcggaaaaattcaattggacacccaaatgccaagcagcgttcgacgagctgaatcaatatttgcaaagcccgccagctctgatcagtccagcaccaggaagcgaactgctactatacctggcagcttcgctagtggcagtcagtgctgccctcgtccaagaaacagagtcaggccagaaaccggtctatttcgtctccgaagtattgcaaggagtgaagacaagatacattgaaatggaaaagctcgcgtacgcccctggccatgtcgacaaatcctttgaggcaaaagaagatggaatgaaaaggtatttagaggccgttcggtttatggaaaagtatttcaccggcataacagtcgaacatttacctagaggccagaacgaggaagcagacgccttggcaaaatctgctgcttatggtggcccacattcgcctggcatcttttttgaagtcctatacgcaccaagtgtgcccatggacagcctggaggtcatggcaatcgaccaggcgaatctgggcgaagatccatgcgattggcgaactccgttcgtgaaataccttgaaactggctggctaccaaaagatgaagcagaagcaaaacgcctgcaactcagagccgcaaggtataagatggtctcgggccagctatatcgctccgaggtacttcaacccttgcttcgctgcatctcttttgccgaaggcgaggaaatggcgagggagatacaccaggggctctgtggcgcgcatcaggccacaagaatagttgcctccaaagtgtttcgacaaggagtgtactggcccaccgtgttgaaagtctgtgttgagcaagtcaagaagtgcgaaagctaccaacgccatggccgaagtcaaaccgtgccccagtataagttgcggcccatctcacccatctggcccttcgccagatggggattggacatcattgggccgttcccggtggcgcgaaatgggtacaagttcacaatcgtggccgtcgaatacttctcccgatgggttgaggccgaaccccttggagcaatcacttcggcaacaatacagaaatttgtatggaaaaacattatttgccgtttcggagtgccaaaagagttcatcactgacaacggcaagcagtttgactctgacaagttcagagaaatgtgcgaagggcgtaacctggaaatcaggttcacgtcggacgcgcacccgcagtcaaatggggcagccgaacgcataaacggtaagatcctagaagcactaaagaaaaggcttgagggggcggcgaagggcaaatggccagaggaaatgctatctgttctctgggctctccggacgacccccacaagaccaaccaagttcagcccgttcatgctcctttatggcgatgaggcaatgaccccgacagagctagaggctaattcaccaagagtgatgttctctgggggcgaagaggggcgcaaggtgtcgctcgaactcttggagggggtaagagtggaagcactcgaacacatgcgcaagtatgccacaggcacttcggcaacttacaataaaaaagttcgaccgacggagctattgcctggtcatcttgtcctaacgaagaaggcgaacccgatagccattggcaagcttgaatcgaagtgggaaggaccgtacctcatcaagcacaagtccaggacgggatcctttcgactggtgacactggaaggcgaagagttcgaccattcctggaacgctgcctctctcaagcgtttctatgtgtag

SEQ ID NO: 30869 - DNA, 351 bp, Oryza sativa
  Clone ID: PAT_MRT4530_35230C.1
atgttgcagctccaacttcccaaatgccattcttatgtgtcaatgcaaggtaaagctagggactaccacgaatcaaaacacggcaagatggggagacacaaaagatgcctccaagaagggaacgacgcccacaggtgtcgccatctaggctttcaccttggcctccaccgagttaccaatgttaaagcagtcccactgtcagttgtgctcgctcgcatgtgtgtttgcaaccgccctagcccaatgcaacacgtcgaggtgacctactttcgtgcaccattgccaccggcattctctaataaaatggagctgctatcatcactaaccgagccagggagctaccggatctag

SEQ ID NO: 30870 - DNA, 2991 bp, Oryza sativa
  Clone ID: PAT_MRT4530_35231C.1
atgtcggacggcaagcaaggttccaagcccccgtttaccaaacaagcgcctggtcaaccatctgaggttgacgatggaaacatcatcccagtcaccctagacaagctgacaccggaacaaaggcaggaatttgagcagatgctgagcaatgtgaagaacaagtacctggattcattcaaacagacccgctcaggagtagttattcagaagtacaagctgaaggtagtttctgccgatgaaccagaaacaagctcatctaaaggtggcaaagctaaaggagccaaaggtgacaaaggtgatggaggtgatgcaggcgacaaaggggtgcttgtcaatactttgacaaatatgatcaaatctgtggttggtggcataattgctgagcatcaagataaggggccagtttttctgccagaaggtgtattcccaccatacaggaatttggtgaccggaaacaagcagcatgcttctaatgtacctccaggccagccaatggcattggtttcagctccaggaccatgtgcatcatcatcggcacaaaggcagacggttaatccttatttgttgaccagagaacaacctcagcatgctgggcaaaatatcaatcggctaactcaggagcaaattgcagcaatgttcaggctacctcagccggttatcgagccagttcactcaacaccaatcaggcagcaacctcattcgcctcaagttcagtatcaaacaggaggatcacctcaacatcagcttttgcctcagttcaaccagtttgatccagtccaacagcaaatacaaggagtatcacagcaaaagccttgggccgatatgattgcagatgtaatgaaggagcagttcgggcttaagccgaaggatactggaaacttgtattggcaccattaccctgagtggtttgagagagtaccattgccaggccgatacaaggtcccagatttttcaaaattctcagggcaagataatgtctcaacttatgagcatgtcagtcgatttttggctcaatgtggtgaggcgtcggctattgatgcattgagggtcagtttgtttcctttgtccttgtctggatcggcattcacatggttttcttcactaccttacaattccgttcatagctgggccgatctggagaaacagtttcatagctacttttaccgtggaaatcatgagatgaaaatttatgatttgacagcggttagacagaggcatgatgaaactgtacaagattatattcagagattcagatatatgaggaataggtgctacagtttagctttgaccgatcctcagttagccgatcttgcttttcagggtttgatagctccaatcaaggagaagttttcgtatcaagatttcgaaagcttgtctcaccttacacagaaggtaaccctatatgaacaaaggtgggtgaagaattctggaaaagaagaaaaatatgattttgatatcaccaaagctgacaagatttttgatttgctacttctggagaagcatattcaacttcctgtcggtcatgtaattccatcggttgaagagttagggaaaaggaaatattgcaagtggcacaactccagctctcatgctactaatgattgcaaagttttcaggcaacagatccaatttgctattgagggaggaaaaattaagtttgatgactcaaagaacccgatcaaggtggatggccatccttttcctatctacatggtgcatacatctggaagagcagccgatgaaggaaaacatcggggttcacaactgaattcagccaggattatcaacaaatatcagaaaaggcatgataagcagcaggagagatatcttgaagaaaaagatggtggttttgatccacattgggattgtgagtttttcaggttttgctggaatgaagggatgagattgccgtggattgaatattgccccggatgcagtgacaattcagggaactcgagccaatcctacaatcgaggaaatcggctgattcagaaaagagtgcctgttcatcagaggttgggtcctatgcaccaagctcgttctgaggaagagggtgaagacaggaagtcgcaatggtgtccttctggtatttttactaagaatcagaaaagaagggtccaaaggatgaggaacaaggaacgttttcaggagcctgcagagtttgaggccaagcaagccgatgttgataatgtagaggaggcctctgctaggttgattttgtcaccaaaacaagcaatctttgagaagccagaggggacagaaaatcggcatctcaagccattgtacgttaacgggtttgtcaacgggaagccgatgcccaagatgatagttgatggtggggctgctgtaaatctgatgtcgtatgctacattcaggaaattgggcaagaatatagacgatctcatcaagacaaacatgattctcaaagattttggtggcaatccatcggagaccaaagaagttttaaatgtggagttgatagtcggcagcaaaactgttcctaccacgttttttgtcatcgatgggaaggggtcctacagcctgttgtttggaagggattggattcatatggagagcccaaattattactttgagggcgtcgtggagggttcaaatttctacaccaaggacacagtagatgatctcgatggcaagttaggacagtgtttcatatcggccgatgatctggaggaaattgacataagtccaggggataggccaaggccgacattcatcagatgcacagctcctgacgtggaagaggagacattttctgtggtttttagtttctttgtcgacgtcgttgaagatgacaccgcaattaatttgcaagtggtgttccttaggcagagcagggaacttgccgcgagaatgccaagcgcattgtattggttgcaaattaaaactcttgtgattctgaccctccgttcttcactcgactactctaggatgaatgtcctacacgacgtggatgagggcaaatatatataa

SEQ ID NO: 30871 - DNA, 814 bp, Oryza sativa
  Clone ID: PAT_MRT4530_35232C.1
cggacgcgtgggcggacgcgtgggcacacgccaaagcaattttagcccgtacccccctgcatcccaagcgcccgaaaccgcctctcccctacaccaataccaccaccgcttcctttccgatccgatcccttcccctcgatcgacggcggccatggcgagaatcccgctgctgctggccctcctgctcgccgtctccgccgccgccgccgcgcaggtcgggggtaaccgcggccatggcccgctggtgggcgggtggagcccgatcacggacgtgggcgacccccacatccaggagctcggcgggtgggcggtggagcggcacgcctcgctctccagcgacgggctgcggttccgccgcgtgacgagcggcgagcagcaggtggtctccgggatgaactaccgcctcgtcgtctccgcgtcagatcccgcgggggccaccgcgtcctacgtcgccgtcgtgtacgagcagtcgtggaccaacacccgccagctcacctccttcaagcccgccgccgcgcactgatccatccctccctccagatctatcttatctatgtctcttctgctccatctcgatcagctgttaaattttccctgcctaatctctctctgttaatcacacatctcatgtaattctcatgtatgatgagcacaagctaagtacctgtacttgttcggtctgagttgtgtccccgtgtgtgcggttcaatcttttgcatgtaagacagcgagtccacacttgtaatgaattagcgaataaaatggtgggattggaataatggtgcccatcttaattcaaaaaaaaaaaaaaaaa

SEQ ID NO: 30872 - DNA, 1383 bp, Oryza sativa
  Clone ID: PAT_MRT4530_35233C.1
atggggattatctttaagattgattttgagaaggcatatgatagagttaattggaacttcctgtatgaggtgatgagaaagaagaattttagtgatgagtttattggctgggtgaagaagataacaaaaggtggcaggatgagtatcaatataaatggggagcaaggtcctttctttaaggctcatagagggcttaggctgggggaccctttgtcccctctgttattcaatctggtggatgatgctttggcagctgtccttgaaagtgcaaaaacaaatggggtgtcagaaggtttggtgtctaatctagtgcttgggggtttaattcatttgcaatatgctaatgatactgctcattttatcaagaatggggaggacaacattagggtgctgaaatttctgttgttttgttttgaggaaatgtctgggatgcaaattaactatcaaaagagtgaggtctatgttctgggtgttagtaaggaggaggaattgagagttgctaatatgctgaattgtaaagttgaagcgactgtgagtgatttatgggagaatgagacttggaatttggagtttagaaggaatttggatgataacagaggtcaagatttaattaggttgagaggccttttaaatgaatataatttggatgggggagcaaatagagtggtttggccttataccagcaacaagatctttaatgtgagatcgatgtatagattgataacttttggaggtgtgaaagattctgaaatgatgagtatttggaagagtaaaattcctcaaaagatcaagcatttcttgtatatggcaggaataggaagactaccttatgctactcaattggttaaaaggaagtggagagggggagatgagttgtctagttttgcgtgttgtgtcattagggatgctcttggcttggataaaagaccaagtaatatcagtgagggtttggatttggttaaggggaagaaaataaatagggtttgggtggtgcttctggctactaggactacatatatttttgatcctgctagggactctaagattatccatgcttttaacaagactgctttggcagcgaagcttaactggggggatgaaattaggagaatcaaaggttccaaaatgaaaaggaaaaggaaattagaagaatcagacgaagtgaagaggattcgcaaggcgataaatgaaatgttggttgacaaggcaccaggcccagatggcttcactgggaaatacttcaagtcatgttgggacatcatcaaggacaacatcgtggcggccttcaacgccttgcatgacgctaggagcacgcacgtaaacctgctaaactcagcaaacgtgatcctcattctaaaaaaggatggggctgagggaatctag

SEQ ID NO: 30873 - DNA, 176 bp, Oryza sativa
  Clone ID: PAT_MRT4530_35234C.1
ggtgggacattgcgccgcctagccgccgccgcccgcatccttcgtcgccgtcgtcgtggtcttcttcctcggccgatgtggcggttcgccaggttcatcgcagggccgacgcgcctccccctctacctagccgccgtcagcttgctgcccgccgcctgggactttgcgccgcctag

SEQ ID NO: 30874 - DNA, 1252 bp, Oryza sativa
  Clone ID: PAT_MRT4530_35235C.1
ggatctctcagggcagagtgagtatcaatatacctttctttaagacccatagagggcttaggcagggggaccctttgtcccctgtccttgaaagtgcaaaaacaaatggggttttagaaggtttggtgtctaatctagtgcctaggggtttaactcattttcaatatgctgatgatactatttttttttatcaagaatgaggagtacaacattagggtgctgaaatttctattgttttgttttgagaaaatgtttgggatgaaaattaactatcaaaagagtgaggtttatgttctgggagttagtaaggaggaggaattgagagttgctaatatgctgaattataaagtgggtagtttaccttttacttacttggggcttcctatggtggttgagaagatatgaatgaaagatttgtgttacattactcagaaagttgataagaggttgtagtcctggaaaagtggttacctttcttatggaggaagagaaattaaaattaactcttgcctgtcaagtgcccctatgtatgcaatgggtttttaccatctacctgagaagtttcataagataatggactctataagaagtaggttctactagtagggtttggggaaaaaaagaagtaccatatgctgaaatggaaagctctaatcagaccaaaggagtttgggggtttcggttttctagatactagggtgatgaatctgtgtttgctaagcaaatggatcatgagaattgagaatggagatcatgatatgtgtttacaagttctgagaaggaaatacatggtccagcctaggacttggaatttggagtttagaaggaatctagatgataacagtggtcaagatttaattaggttgagaggccttttaaatgaatataatctggatggtagagcagatagagtggtttggcctaacaccagcaacaagatctttaatgtgagatcgatgtatagattgatcacttttgggggtgttaaagattctgaaatgatgagtatttggaagagtaaaattcctcaaaagatcaagcatttcttgtatatggcaggaaaagggagactaccatgttctactcaattggttaaaaggaagtggagaggggttgtttacaaaactctttcttttgttcagaaatggtgtatcatgctaaaaggggaggagcaaggtatcttggaaggatggtgtgatcgtctgctggaaaaaatgggacaactgaagacaaatcgattgcctgaagattt

SEQ ID NO: 30875 - DNA, 406 bp, Oryza sativa
  Clone ID: PAT_MRT4530_35236C.1
caaatacatcctcctacttcgactgggggtatttgtcgaagaaactaagcttttgggttgatattatagccgacggaggccgcgtcagatgcagcatctgctgcgccgcacctgctggactgcggtggcttgcgacagctgcctggtctatcggagtttctgccgggccatcttcgccgacgaccataccgacgatacctcgtcttcggcactataacccaagaacgggcgtctatggaaagcacctgaggcccgatcgtgcacgacacgccctatcacattctatgcaaagctgaatatggtagcaacggagacgtaccagtggacttttaccatcattacaaggaggatccgatcttcgtgacctacatgaacatggacgccttacaataatccattgtttgga

SEQ ID NO: 30876 - DNA, 188 bp, Oryza sativa
  Clone ID: PAT_MRT4530_35237C.1
gcgcgcacgcactttagagcgttttttctacagagtgggccccccttttttttttttttatggggaggtttgagcgggcaggggaaaccacccacgcgcacatgattcagtgacaccatgcatgaagatgctgggcttatgatctttccactccaggctatgccatcaggattcaagtacctgggaca

SEQ ID NO: 30877 - DNA, 233 bp, Oryza sativa
  unsure (1)..(233): unsure at all n locations
  Clone ID: PAT_MRT4530_35238C.1
cggacggagatcctnttncatgccgcttgcaaagtcggcttccgcgtaggtntggtcgtcgtgtcggcggcggcggcggcggcgggaggaggaacgangaggacacatngagcacgggagcatcatcncgtnggccgtggggntnggcgtcgggntgggngtcggcatcggnctngtntcntcgcgnctnaccggnttngcgactggcgacggcgcacggcggaggaggtgga

SEQ ID NO: 30878 - DNA, 108 bp, Oryza sativa
  Clone ID: PAT_MRT4530_35239C.1
ccacgcctacgctttagatcatttgcgagctgtccctagatatgctctgacctatcgtgcgcggtctgtccaaatatccaccgtgagaccttcaagtgtatgtctgat

SEQ ID NO: 30879 - DNA, 6084 bp, Oryza sativa
  Clone ID: PAT_MRT4530_3523C.1
atggccgagcaaggaaaagcgcacgacctctctccgagtgtgagcggcgacgacggggagccgaatccacgccgtcgagctcgtactcccccacctcctccgcgccaaagccctaagcagggggaggcgcttgagagggtcgacaagtccgtggcatcaccagtcgcaggtgatgcaggagaacggcgagatggggagcgtcgcctcctcgtctacggcgacggcagcacgcctcagggtgcgcttcaggctgctggtgcgctcctacgacacccgcctgtcgtccatgacccggagtctccagcccaacgatggctggaagacgtggccaacttggtcatgacggcacagcagcgcctgggtgctggtggacggtccgccaccaccaagacctccggcgccgctaccaccggctccgtgtcgtcaaggcggagggcgcggcgagcggcggctgctgcgcgccattcggccgccactccctcgtcgacacctccaactcgggaggatcagcatggagagccggatgcccgcatcgacatcgagcgccggcgtaataaccggcgtactccccgcgcaacggagggcgcctcttcgtccagagtgtcacctcgacatggacgtgaggatcagccctccgtgcccccggccggtggtgttggctgtagagcctttgtggcgagtcttcggaatgtccgttggcccccaaggttccggcccaccatcaccgagaagtacgatgggagcgtcaaccccaccgagtttctccaggtctatacgaccgggatcgaggccgctgggggtgacgacagggtcatggcgaacttctttcccatggccctaaaaggacaggcgcggggttggctaatgaacctgccacccgcgtcggtccactcctgggaagatttgtgccaacagttcaccatgaacttccaaggcacatatccgcgcccaggcgaagaagcggacttgcacgcagtacagcgaggcgatgatgagtcgcttcgctcgtacattcagcggttttgccaagtccgcaatactataccatgcatccctgcacacgcggtgatctacgcgttcagggggggcgtgcggcacaaccgcatgctcgaaaagatcgcttccaaagagccccagactaccgcggagctttttcagctcgcggaccgagtggctcgtaaggaggaagcgtggacatggaactcctccggttccggagtggcagcttcggccgcccccggatccgccgctcagacagggcggcgtgacaggaggaggaagaagaggtcggaccgttccggcgacgagggtcatgtcctcgccgtcgagggcgctccgcgggccactcgaaaggggaggcctgcgagcgacaaaaagaaagaggctggtactcccagcagggagcgccccgccggcaggtggtgctccgtccacaacacctccctccacgatctcgcggactgtcgtgcagtcaaaaacctggctgagcgaacgaggaagtgggaggaggacaggaggcaggaacgccgtgagggcaagtccccggcggttccttccggcaaacggcgaagtgaggccaagcagaaggcccccgctgttgacatcgatgatggtgatgatgacctaggtttccaagaacctggggccaccattgccaccgtcgatggaggagcgtgtgctcacgtctctcgccggagcttcaaggctatgaagcgagagcttctggccatggcccctactcatgaggcgatgcgtcgggcgcggtggtcggaggttgctctcactttcgaccagaccgaccacccaccgtgcattgcccggggagggcaggttgcgatggtggtttcccccaccatctgcaacgtgaagttgggacgtgtcctcatagatggaggagcggccctcaacatcctttcccccgcggcttttgatgccatcaaggccccggggatggtgctccgaccgtcccagccgattatcggtgtgacgccggggcacacgtggccattaggtcacatcgacctaccggtcaccttcggtggacccgccaacttccgcacggagcgggtgagcttcgatgtggcggacctcagtctgccctacaacgcggtcctagggaggcccgcgttggtgaagttcatggcggcggtccactacgcctacctccagatgaagatgccgggccccggtggccccatctctgtccatggcgatcttaaagtcgcgctcgcttgcatggagcagcgcgccgaccgcctcgctgctgcgtccaagcccgagggtggtgacgagaggcttggcccctctgcccccaccgccccgaggcagcggattgccacatgcgacgaggtcccggaagacgcgctcgtctccttcctgcgggcaaacgctgacgtcttcgcatggagaccagcggacatgcccggggtccccagggaggtgattgagcaccgtctcgccgtgcggccgggcgcaaggccggtccggcagaaagtgcggcggcaggccccggaacgtcaagccttcatccgcgaggaggtggcgaggcttctggaggccggattcatccgtgaagtcatccatccggagtggctggcgaacccggtggtcgttcccaaggcgaacggcaagcttcggatgtgcatcgactacaccgaccttaacaaggcatgtcctaaggatccttaccccctgcctcgcatagatcagatcgtcgactccactgcggggtgcgaccttttgtgttttctagatgcatactctggttaccatcagattcgcatggctagggaggatgaggagaaaactgcgttcattacccccgtaggaacctattgttatacatcaatgcccttcgggttaaagaatgcagttcctacttttcaacgtactactcgaatttctttgggtagccaaataggacgtaatgttgaggcttatgtcgatgacttggttgtaaaaacgcgcaaccaagaaactttactttcagatctagcggaaacttttgagaacctccgctccgcccgcataaagctgaaccccgataagtgtgtgtttggtgtacctgcgggcaagcttctcgggttcttggtctctgcccgaggcattgaggccaaccccgagaagattcgagctatcgagcggatgcgcccccccagcaaacttagggatgtgcaatgcgtcaccggttgcgtggccgccctaagtcgtttcatatcaaggctgggagagaaggcgctacccttgtttaagctcctcaagcgctcggggccgtttacttggacggaggaagctgaacatgcccttactcagttaaaggcatatctcagctctcccccggttctagtcgccccggagccaaatgagcccctgctactttacttagcggcgaccccccaagtagttagtgcagcgttggttgtggagcgcgatgaagacaatcctcattttgtgcacccccattctgtgctaacttggcccgggagcgagcggggaggagaggcccccgagtcggacggtggcctacggcccctgacgaccggagccggccctctgcccgcttgtcagacggtgctaggtgcccccgaccctcaggagggccccgaggccactgcgggaaggccgcacttaacgccttctgaccccgaggctaaccctgtgctgactcgacccgggaaagagcagggagaagaggcccccgagccgaacggaggccagaggcccctgacgaccggagttggccctttgcccgcttgtccgacgatgccaggagcccccgaccctcaggacggccccgaggccactgagggaaggccgcccctttcatcctccgaccccgaggtcatcggcacagaagacaagtgccccccaagaggccacttggacgaagaacgccccggggatacggcccctagcgaaggggatcggccccgccgaaaggtgcagcggcctgtctattttgttagtgaggccctccgggacgccaagacccgataccctcaggcccagaagatgctttacgctattctgatggcctcgaggaaactgcgccattatttccaggcgcatcgggtcactgtggttacgtcttaccccctcgggcaaatcttgcataatcgagagggtacaggacgagtggtaaaatgggcaatcgagctttctgagttcgatctgcactttgaaccacgccacgctatcaagagccaggccctcgccgattttgtggcagagtggaccccggctccagagaccgtctcaatacccgaggccagcacggacccctctcagctgcctcgcaccacccactgggtgatgcagttcgacggttctctgtctctccagggcgccggtgcgggggtcacgttgacctctccaaacggagacgtcctcagatacttggtccgtctcgactttcgagcgactaataatatggcagagtacgagggactccttgccggactcagaatggcggccgggctggggatccgccgcctcctggtgttaggcgactctcagctggttgttaaccaagtctgtaaggagtatcggtgctctgacccgcagatggacgcctacgtgcgccaagtacggcgtatggagcgccattttgacgggatagagcttcggcatgtgcccagacgggataatatggttgccgacgaactctcacggctcgcgtcttcgcgagcccagaccccaccgggcgcctttgaagaaaggcttacccagccgtcggcgcgacccgaccccttaggggagacggatgcgcctgaccggcccccgaggcccgtcggagtccaggccacgggacccgaagggagcgctccaagctcccttagattgattgcttggatctctgagatccaaacatacctcacagataagactctacctgaggaccgcgaagggagtgaacgcgtacaacgcatttccaaacgctacgtgttggtagaagggaccctctatcggcgcgcggctaacggaatcctcctgaagtgcattcctcagggacaaggcgttgagcttcttgctgacatccatgagggcgagtgcggagcccattccgcctcacgtaccctggttggcaaggcctttcgtcaaggattttattggccgacagctctcaatgatgcagtcgatctggtccggcgatgcagagcgtgtcagttccacgccaagcaaatccatcagccggcccaggccctgcagatcataccattgtcatggccatttgctgtctgggggcttgatatcctgggaccattcaaacgggccccgggcgggtttgagtatctgtatgttgcgatcgacaagttcactaaatggcccgaggcttatccggttgtcaagatcgataagcactctgctcttaaattcattaagggcatcacggcccgttttggagtgcctaaccgtattattacggataatggcacccaattcactagtgaactcttcggcgactactgcgaagacatgggcatcaagctctgcttcgcctcacctgcccaccccagaagcaatggccaagtggagcgcgccaatgcagaaatcctcaaaggccttaaaaccaagaccttcaatattctcaagaagcacggcgattcatggatcgaggagttgtcagcggtgctctgggcaaaccgaaccacaccaagccgagcgaccggggaaacgcctttcttcctcgtctacggcgcagaagcggttctcccatctgagctcaccctgaggtctcctcgggccaccatgtactgcgaggctgatcaagatcagcttcgtagagatgacctcgactacttggaagagcgaaggcggcgcgcgacccttcgagccgcgcgctaccagcagagcctgcggcgctaccatcagcgccacgtccgggcccgatcactctgcgtcgacgacctcgtcctacgccgcgtccaaacgcgtgctggactgagcaagctctcaccaatgtgggagggtccgtatcgagtgatcggcgtcccccggccgggctccgtacggctggccacgggcgacggcactgagctgccaaacccgtggaacatcgaacaccttcgtcgcttctacccctga

SEQ ID NO: 30880 - DNA, 1194 bp, Oryza sativa
  Clone ID: PAT_MRT4530_35240C.1
atggaacgaaattggatgtacggtaattcttgtaggaaccaagagtatagggatggggttgttgaattcatgaatatagcggacaatgataaaagaactaggatgagcgaatatatgctatgtccatatgcaaactgcaaaaacgagaagatgttctctcatagttcaggggtgcaatctcacctgatccatagaggatttgtggagcattatagttgttggaccaggcatggagagcaagagacaccggatgttgtgattgatgaagtaccagatataagcaacgagccaaattgagatggtatgtttgtcccttctccattaggtgctgataccatagatttcgaccctatcacaaatgttacatgatattgaagagccaaccataatgagagggattttaagaagtttagcaagttgtggtatattttgagatgcctttgtatctcgagtgcaagccgaagcacaccaagttatcatctatcttagaactcatgaaacttagggtaagtaatagtcggtcagacaagagtcgcaaaacttttcgagtttctgaatgacttgttgccagaggggaacgaaataaaagacaacatatgaaacaaatcaagtattatgcccattggatctggaagtcagaagaattcatgcttatcaaaacaactacatattatgttacaaaaagcacaccaacttggatgctttccctgtttgtggagcttctagatacatgcgagacattagtgaagatgaaggtcgtaagtcaaagaggggtggcctcacaaatgtgatgtggtatgttcctatgctaagcgcatgaagagaatgtttatgaatcctaagcaagcttagtacattgggatgttgaagaatttaaggtcgacggtaaggtaaggcacccaacaaatttagtatagtggtaaggtaagacacaataaatagagaatttacaaaggacccgagaaagctatgtgtatggatgtcattaatccatttgatgatttgagtagttgtcatagcacagggcaaatgcttcttgggaactacaagcttcctccctggtagtgcttcaagaggaagtatattatgcttgtcatgctcgttcaaggatcgaggtagcctggtaacaatatcgatatattcattgaactgataatcaatgagaaagaaccaatagtgaatgtccatactaaa

SEQ ID NO: 30881 - DNA, 248 bp, Oryza sativa
  unsure (1)..(248): unsure at all n locations
  Clone ID: PAT_MRT4530_35241C.1
attaaaataaanataaaattnnccgggggagggttcttggtgtggattgactgaatnncattatcctttcatatcggtaggaatttttagttcactttcctgccatgccaaagagagaaggcactatactcatttatccaaacatgcctagggtacactaaaaatgtgccttgagtagtggtggaaatgtcaaaaaacactcctcgcctatagttattcctttctaaatatactaaaatggctctaat

SEQ ID NO: 30882 - DNA, 450 bp, Oryza sativa
  Clone ID: PAT_MRT4530_35242C.1
atggcgcggcctcctccactcccgccccttgggcctaccagcggcggcagccgcccctctcctcgtcgtccaccgtgcctgcctccggctgcttccactgcaggcgtatctgagcaagaggagtatactagtagcctgctccatagcatatgcggtctcgtaaatcacatgcgggactggattgtcagcgccatggacgctcctgcacatgacggcgtcggcgaggcagctcctaatcttgtcccagttcttgctgctccccacgtggcgctgcagccacgtcgattagtccccgagacggtgctccctgtacccgcggccggagacggcctcgccggcgccacggttgcggttggtgacggcaatgggccagtggcgaaggcggtgaagccgacgagtgtgcagctcatggccgatacctttgcagtcgcgcagcgcgtatgttgctag

SEQ ID NO: 30883 - DNA, 317 bp, Oryza sativa
  Clone ID: PAT_MRT4530_35243C.1
cctattattgtaaagtaatagtccttcatgtttacaagcattgatataggaaagtacaaaagggggagagaaaaacacaacggccccatggggaaaaaagcactacacaacagtgcttggcaaaaggaaaaaagcgggggcaacctgttttgaacaaaaaaaaagctgccacccccatagtaggggaaacaggcctgggatggacattggaacaggcaagggcggaagaaaaaaaaaggccctggggggccaccttggaacaaaataagggccccggataatcaaaccaaggaacaggttttgttatatcccaaaac

SEQ ID NO: 30884 - DNA, 195 bp, Oryza sativa
  Clone ID: PAT_MRT4530_35244C.1
atggctggccaacttggcgatggcaggttcattcttgtagatatcaagaaagagatgcacgaggtacataatgagatggaaaacgatgtgagagggccttacaaggtcaagaaaaaggccttacaagtgctccagaatccaaagccatttgatggcaagcaggtggatgagcacacaatctcaagtattaattga

SEQ ID NO: 30885 - DNA, 1982 bp, Oryza sativa
  Clone ID: PAT_MRT4530_35245C.1
atggacgacgacgagaagccgccggcggcggcggcgggcgccatcggcggcgaggtggcagcgggtgccgtcgccgtggacgcgtgcctggtggcggcggccatggcgggggcgtcgctgctggcgtggtgggccgtggcgttccacccgtccaacagccggctgtggatggtgcccgtcggcctcgtcctcgcctgcactccggccatcgtctacctcgccctctccttgcaaccgccgtctactgtaagtgatcacaaaggatctcacgccgccggccacccgccgccgccgccgccattgtccatggtgcgctgccaaggcaagcggagccgctggtgcggtggctactgcagccggccgacttcctccaccgatggggcggtcgacatccgccgggctccgtggccacaggacgtccccatccgccgggggatgggcccctcgccgccgcccgtctctccacttgccgacccccgagctcctccgcctacgccgttgccggtcgccatcacatcaatactgaattcagatattggacgttttcagtttcttatgaaaacgctcgcaccacagctcatagcccaatgctgttcgctggggcaccgaggacggcgctcgtcaccggcctttgctccgctccacagctggtcgccaccgtcgacctacgcccggccgggcgtggtccactcttgcgtcgtcacggcgggagcgggagtggcggaggacggcgggagcagcaacaagggaaccgtcttaccccgagcggccacggcgggttagggaggtgggtggtgccgccggtcgccgggctgcggcagcggctggggtcatgtcgtcgcctcgtcgggaggagggttcggtgcgcggcgactgcgccggcgccgatgggggagaagacggagtaccgggacgggccggtggagcgcgccttcatggggctgttcgcgcgcaagatggagaagtacgccgtcgtctccagctccggcgggaaggggaaggagaagaagaaggagaagagctcgaggtcggtgtgggagtgggactacgagagcttcgtggacgtgtcgcggcgggtgatggtggggcggacgcgggcgcagcagcaggaggccgtccgcgaggtgctcctctccatgctcccccccggcgcccccgagcagttcaagaagctcttcccgccgacgaggtgggcctgcgagttcaacgctgccctcaccgtccccttcttccactggctcgtcggcccatcagaggttgtggaggttgaggtcaatggggtgaagcagaagagtggagtgctgataaagaaatgcaggtacctggagaacagcggctgcgtcggaatgtgcgtcaacatgtgcaaaattccgacgcaaaacttcttcaccaacgagttcggactccctctcaccatgaatccaagttccatctcaacaccctcagcgccaatttgtcccaaacttcagacttagttggaagaagacccagcatcaaaacagccctgctatgccaatctatgttccatctcaacaccctcagcgccaatttgtcccaaacttcagacttagagcacatcacatcaatgctgaattcagatgttggacgttttcagtttcttatgaaaacgctcgcaccacagctcatagcccatagtagctacgccaatcgacagttcatacgttgtaccactctttatcatttggtatatagatagacagatcacagaaaaccgtcagtgatctccttgcctgggaaaattaaggctttgcctttgagctcgagaaatttccacataaatattttactagttagatagtttccgcaataatcccttatttattcctcatgtaaaaaaatgcagtgcttgtatacagaaattcttgtgcccactacctgtaattaaagatccatcatggtattaatatagtacaaatgcaatacttcaaataaaaaaaaaaaaaaaaaaactcgagggggaa

SEQ ID NO: 30886 - DNA, 1802 bp, Oryza sativa
  Clone ID: PAT_MRT4530_35246C.1
gatacccaatgaaaacattaagaaggaatataatgaatagtggtagaattcaaccaatcaaaactcaggtacatcaaacgacaaccgatcctgcatatatgatgcagagatatgcatagaaacatcactgcatatatgatgcagaaaaatgcatagaaacatcactgctattatctctgaactcactcaaaaaatagctcaaaaaatgttgacaatgattccatgagattatcagttgtatcccggcaaaacccagaaatttggtaggattctggttcaactatcttgtaatatttaactctgaatatgaagcagaaaattgaggagaactagagccctactgctcatataactctgaatctgaagcagctcaacgagatttttatttgagaaatcactggagcggagagcttccccacctgaatttagcgagatggatttgagcctcttcacttagactcatggtttttacattttctctattcaggtaagaactcttgggtatcctttttaactcttgacttaaacagtcaaagcgagctgaacttgagtcatgctggtgcttttcacctccataatgattattgataaatctagctctggaacctgaatgacttaagcatctagatatcttcctactcgttgtcgctcactggtgtagagctcatggaccgattcaactgtatcggcaactgcctcgccgaccctggaactttataatcctgataaaccgaaatgtaagctttggatgcaaactagagatcttgagagaaacttggatgatagaagggaatatccaagagtttggtaagttacagtaatcagatctggtctgttcttccatgctaaaacaagataacaaaacatacctatccaggacacatcaatgattgactttacagtttgtactttggatcaagtgcacacctgaacttttactctaggccaaattctccacaggcaaaagtacttagctggtaaaaaagaatcacaatagtgtactagctagcactttcagaattagtgtactagctagatgcctgtcgatcgatcgtttgaatgaaattatcgcaaaaagtaaatgtcagctaggcaacaatttaactcctgcagacacatgaaagatctgcagatagttgagtagatattaaggtaagagatatataaccatgtgtacactataccaaggtgtactttctgaacaactgctaagcacgatccatcccatgagagaatcacaaatggcacaaaatatggtcttaccaaaggtgcctctttgcaggatggatcggctttattcagatgtctcacccagttgagtgtagcatcgacatagctgacgagagggaagagctggaggtagaaggcgatctcactctgcacttccctgagctcgtcggcgtgccggcctcccatgaagcagcggtacacgtagctccggccctggcatgaccggacgagcaggtacgctcgccggagcgtctcctccagctgctccaccgggttcctcgtctccggctgctgcatcagctgcgcaccgtggagctgcttgagaagatctccgatcatcttgaggcgccgcgcgagctgcaggcacgtcgccctgttgcgccgcaccgtctgcgccgcctcggcgatcatcttgatcaggccgtaggcgtccactccggcgaactgcgcgatggtggaggcctgagcaaccagagccatcttgcgttcgttggatacttggatggcactggacgcggagaagaagaagaatgcaagaagcggctactagatgagctgcttataaaaatgca

SEQ ID NO: 30887 - DNA, 1491 bp, Oryza sativa
  Clone ID: PAT_MRT4530_35247C.1
atggaattatctctactaatgacagtgggtcccacctttaatgtagttggaaatctgattgatcgccaccaacagatcaaatgtaatttacagctggagcgaacgaaccaagacaatagccagaattcaagatggggagagagaataaacgaccaaatccctcagggcagtcaggcaaaaaagaaacaaaccatcaaaggccgaagcacgcagcacgttaatccttgtaattacgctctcgctgttgtgattgatttagaaaaggagcacaatgccaccagttcccagcaaaaccccgtaagatacagcaattcggagagagacctcaacgcggtcgtagacgagtacgctagtcgagcaccactgcaagaagaagccggagaagtgctactttggaaggacgattttgatttttttaaggatgcagaaacgacggttgatttgccagagggtgtgcagccgttaaatactgacgaggcagagaaaacagatgatttcatgagtaaagttgcctcatgtttgaacattaaacggggaagccaacttataagccaggcggaaaaggatttactcacacggagctgtgactggggccgattccgtgttccgacgccatataatcaattatccttaagactcagtaacctgcttcttggctctcaatatcagccaggggatgaacctgaggctggtgtttatgatttgccacgccatattgctactctagcgcaacagtttatcaactcaacgaccaagcgatgggtggaagttcatgggcatgtgcagactctacacaacatatatgctgatgagtgtcccctacaattgaatgagggtcccggactagtaaccatcgcaacatgggtcaatcacttctttggcaacgaccctgtgtctatccaatcgttcttgccagacggctttgttgacccaacaaaacccttatacgaggacaggggtttccacgttgagcttcggaatgaccggccaactgctatcatgtgtgacctcgaaatgtcttacgtatacacctacccgttagtggtgtatcgtgcaacttttattgctgcatggttatgcacctactgtgttccagtagaggaggggaaattcattcgtcctgaggtttttgctatggtagtggaaattgctcagggtagccgtcgagccattggcattaccagcatggcatttttatatcgtgcccttaataatatacaccactacgtggcggcacggaaggccttagccagtgattgttctctatttgtactagaccattttatcatggtacttgatccaccctgtattgtggacttcaggaactataggtccaaggattttaagagtgaacatgaattattttgggatttcaaccaggatggcagtggtctgcgttcgttggatttcttgggacgatccgggatacgcttccagaccgtcaaccaggagtttgagatgtttgataatagagcttttatgtgcaatgga

SEQ ID NO: 30888 - DNA, 336 bp, Oryza sativa
  Clone ID: PAT_MRT4530_35248C.1
atggccgagaccaaggggaagcagccagccggtggcggcgagggagctatgcgcggcgggagcgataacgacggcccggccggacaaccaccagcgatggcggcgcgatactgggcagccagcgaaggggagatagagggagaggatggggtggtcaacgaggggcggcagccaagagggcacgacggcgagcggtcggggggcggcggcgtccgcgggaccacgggacggcgcggcggagctccggcgatgaccggcgaacgcggaggggtggccgggctcgctcgagacttgccaaaagtggaggaggggttaggagggggagatatggcttga

SEQ ID NO: 30889 - DNA, 526 bp, Oryza sativa
  unsure (1)..(526): unsure at all n locations
  Clone ID: PAT_MRT4530_35249C.1
acatttcatttcttttcaggtgcacagcagcagaggattctgcacagggcatgcagcacaaggcaacagcagcacagtgcagagcagtccagcaggcgcaatgctaccaggttcagagctcagtcagcaggcgtgcattctggcagcaagcacagcacagccggcgcttcagggtacagcacacacacaggcagagggagggtcaggcttctcacattcattcagtgaacagcacacagggnccagcagcacagacagtgcacagctccacacaggaggggttctaacagggaacagcagttcggcactactcacagttgcggcgacgaccagccggcgagctctcggcaganagacctcgggtacgcagctggggctggtgaagaagccaagtcgcggtacgtacgagtacctgcagtcggtgcaggacctgatggtgntcaccggcagccgctctagaggatccaagcttacgtacgcgtgcatgcaacgtcatagctcttctatagttcacctaatcattcat

SEQ ID NO: 30890 - DNA, 2358 bp, Oryza sativa
  Clone ID: PAT_MRT4530_3524C.1
ctagacatagaaacgcttgagagaggcagcgttccaggaatggtcgaactcttcgccttccagtgtcgccagtcgaaaggatcccgtcctggatttgtacttgatgaggtacggtccttcccacttcgattcaagcttgccaacggctattgggttcgcttttttccttaggacaagatgaccaggcaacaactccgtcggtcgaacttttttgttgtaagttgccgaagtgcccgtggcatacttttgcatgtgctcgagtgctttgactcttaccccctccaagagttcgagcgacaactcgcgcccctcttcgcccccagagaacgtcacccttggtgagttagcccctagctctgttggggtcattgcctcatcgccatagagaagcatgaacgggctgaacttgattggtcttgtgggggtcgtccgaagggctttcaacacagtgggccagtaaactccttgtctaaatactttggaggcaactgttcttgcggcttggtgcgcgccccatagcccctggtgtatttccttcgccatttcctcgccttcggtgaaagaaatacaacgaagcaacggttgaagtatcccggagcgatagagctggcccgagaccatcttatacttcgtggctctgaattgcaaacgctttgcctctgcttcgtctaccggaagccagccagtttcaaggtgcttcacaaacggggttcgccagtcgtatgggtcttcgcccaatttgacctggtagatttccaggacctccaagctgtccatgggcacgcttggtgcatacaggacctcaaaaaggatgctaggcgaatgtgggccaccacaagcggcagatttcgccagggcgtctacttcctcgttctggcctctaggtaaatgtttgaccgttatgccggtgaagcacttttccatagaccgaacggcatccaaataccttttcatcccttcttttgcctcaaaagacttgtcgacatggcccaccaccagcttggagacggttcggattagcaggcgccgaatccccaatgctttcgcctttcttaggcccaaaagaatggcttcgtattctgccgcattgttggttgtgtcgaactgtagccttgcagcataccgaattggcacaccatttggcaaagtgagtactgccgcaacgcccgcccccttgtgcgaccacgaaccgtcggagtacatcacccagggctgttcgatgggctcgggttcaggggcgaatgctggtgtccattcggccacaaagtcggctagcacttgggacttgacagcagtgcgggcaacaaaatgtaagtcgaaaggggatagctctgcttcccacttgctaagccggccagtaacttctttatcccgtattatttcgcccaaagggtactgtgatggcactatgactttgtgggcgctcgacggaggcttcatttgctgaatggtatcgattttcttgggattcgcctcgatgcctctttcagaaacaaggaaacccaacagcttgcctgcgcgaacgccgaaaacacacttctcgggattcagtttcatacccgctgcgcgcaagttgtcgaaggtctcctgtaggtcggacgcgtggtcgaaagccttgctgctttttaggacgatgtcgtcgacataagcttccacatttcgccccaactgcttgtaaaggaccttgtacaccagcctggcgaaggttgctccggcattcctcagaccgaaaggcatcctgaggtgacaaaaggtgccgaatggtgtgatgaaggctgtcttggggatgtcggccgggttcatgcgaatctgatgatagccggaatatgcatctaggaagctcatgagttcgcagtcggctgtcgaatccacgagctggtcgatccgtggcaagaggaaatcatccttcggacatgctttgtttaagtttccgcaccagcactggattcgccagccactcaggatgatcgatctctcgaatgacgcctgccttgagcaatttttggacttcggcttttgctgcctcctggcgatcagcgggcatcttgcgtagcttctgtttccttggcttggcatctggcttgactgccaggtgatgcatgatgagatctttaggatgttcttagcttcttcttcgcccatgtcgccccccagtgatacgagctttgtggggtcggcatcatcaatctgcatcttgactatcttgccgtgagggacgggctttggcgcgtgcttcgcccggtcatgcggttcggcctcaacattatgcactattctgttgattatggccaaatcaccttttgaagcagccgaaggctgaagccccttgaccacgatcactcctgccgggccgggcat

SEQ ID NO: 30891 - DNA, 249 bp, Oryza sativa
  Clone ID: PAT_MRT4530_35250C.1
atggcgaataataatccatggactagtgacgtcattttggtaatgacggcgtgggttgtcacaacttacaactcgattacctctgccctatccaaggctcgagcaatggacaaggccgctgagatccttgccaggatgcttaagaacggtgttacatatgcggatatgcctgattgcatcactggcaagggaaagaaacaaccctacagagaaattaattctgaatatgttgaaccattgagcatttga

SEQ ID NO: 30892 - DNA, 129 bp, Oryza sativa
  Clone ID: PAT_MRT4530_35251C.1
atgggtgggtggcaaggtagtggggggcaccgtaggtgctgtgaggatgtagaccggggatgggtagggccagcggtgggggcaaatgagaccatcgggttaggagggctgaccggcgccgtcttctag

SEQ ID NO: 30893 - DNA, 525 bp, Oryza sativa
  Clone ID: PAT_MRT4530_35252C.1
atgtgctgcaagctcaggccacaccccgtctggcccggcgagctccacgagaacttcataggcgagctcctgacgagggcagcgacgagctggtcgcggaggatgaaggcgcggcgggcgagcaagatccgaagaaggacgtcgagtcgaggcggcggcgtccggttgcgaatggcgttggctgcgtcgccgccgccggcgaagcggccccgcgcgggcgggcgccgcggctcccgcgccgcatcctccctctctccgcgtgctcgctgtcgacctccccacctcctccctcttcgcacgcgctctccgctggccggcggcgcgagagcaggcgtgccgtccgtgcgcggcgcggtggatgaggatggggaggaccagcgtcgtcgccgcgtcacgtcctcgtcggcctccgtgcccaacgccgcggcggccgcccgcgcgggaccacttcgccgccggcggctgcagtctgcatcgctggcccgcgggctcgtcgagtcgccgtcctgccgctggtcgccctag

SEQ ID NO: 30894 - DNA, 497 bp, Oryza sativa
  Clone ID: PAT_MRT4530_35253C.1
ggcaagggcaccaagaccagctggaacgagcatgagtacctgcctttgctctactgtttcagcaaatgcgcactcacacacatgatcttctcttaacaaaacttacgaagcgttttcataaggcttaacgacctggtgctattaagaacctaccagacgaactgtcacgcgcaacatgagatacaaacgctccctaacttatacgatgccaattagccgggccacatcctgagcatcatctactggagtgagcctcacgcaatcatcattcttagcctcaggcctgatcagagaggaaactttctctgtctgaacgttatacctagcactcactggtgcatagatcttactcctgcgtggcttgaggggcccaataaaaacaagggggccgctgccttcaatcttctctatagcagattctgggcgaaggggacacctgaggatttgagaccgaccaagcttctgcctgcccggtgccctgactcttgggtactcac

SEQ ID NO: 30895 - DNA, 174 bp, Oryza sativa
  unsure (1)..(174): unsure at all n locations
  Clone ID: PAT_MRT4530_35254C.1
cgctcccgcgcctccatccccagcctcgcaagncggcttgcgcgtggtcgcgtcgccntacgccaggaagctatgccaaggacctcaacgtanatctcaaacgccatnaccatgagcgngcccaagntggncggtatagtnntccaantaacgtctaggacggacgtaggncta

SEQ ID NO: 30896 - DNA, 490 bp, Oryza sativa
  Clone ID: PAT_MRT4530_35255C.1
atcgatcgaaagtgagaggaatgaggaagtcgttgggcagccagttcggagcagaaagcacgcttagatgaggtcatgaagcaagctgcgctgtcgttgcagtctgacgaacttcttaacaaggcagcggcaggcaaattacaggccggcaattactatttttacgtacaaggtgatttgtacaattatacaaagggacccctgactactactacggatgtacagcaacaatattcaggatccgttctcattgactataccaaccctcttaagcccagcagcaacaataaggccggcaccggcagttttaccatggcaggcgacggcagtgttgaggcagctgtggtatattttggcaagaacgacaaaggtgatcaggactgtgcatggctcattggtttaacataaacacaacgactaaaccccgaaagttgcaggtttattgttctgcggcccttaaataaattctggataattcatcaacccaact

SEQ ID NO: 30897 - DNA, 164 bp, Oryza sativa
  Clone ID: PAT_MRT4530_35256C.1
cggcacgaggcaagattcgccgcgcttcccaccgagcggcggagcatacaaagcagcagtgagcagttcattggtgtagatcgaagcagcagggtgagtgtatgcctgaaggattccgccatggcagcagcagcagtagcatcagggcagcaggcaggggttca

SEQ ID NO: 30898 - DNA, 1285 bp, Oryza sativa
  Clone ID: PAT_MRT4530_35257C.1
cccacgcgtccggaggaagcgttagcttaactaaaaagctcgcatttattctgggtgctccccaccaccttctcttcgctctcgcgacagggactcggaaaaaagcattcgccgctttgcttcgacccagccaagcctgggcgttgcgtagcgcgcttcaagccagcagctagctagcgcgagagccgtcagttcagtcatgcatcagctcgaccggctttgctacgccgtcgtcgtgctcgtcgtgatcggcgcgacggtcgccgaggcggccaccggcacgttcatctacgccgggtgctcgccgtccaagtaccagccgggcacgccgttcgagggcaacctcaactcgctcctcgcctccatcgccaacgcggcgcccaacggcgggtacaacagcttcacggccgggagcaacggcaccggggacggcgcggcggcgtacgggctgtaccagtgccgcggcgacctgggcaacgccgactgcgcggcgtgcgtgcgggacgccgtggggcagctcaacgaggtgtgcgccgccgcgtacgcggcgtcgctgcagctggaggggtgctacgtgcgctacgacagcagcaacttcgtcggccagcccgacaacgccatggtgtaccgcaagtgcagcaccagcaccagcggcgacggcgacttcctcaagaaccgggacgccgtcctcgccgcgctccagggcggcctcgccaacgggtacaaggtgagcagctccggcaacgtgcagggtgtgtcgcagtgcctcggcgacctcgccgccggcgactgcacgacgtgccttgcgcaggcggtcggccagctcaagggcacctgcggcacgtcgctggccgccgacgtgtacctcgcgcagtgctacgtcaggtactgggccaacggcttctacttccgcccgtcacaaggtacgcccaatagtgcaaattattcgcaagatgacgtcgggcggactgtggcaataatcgtaggcatcttggcagggctggcgatcctcgtggtgttcatctctttccttagaaaatcatgtaagccccttgacttggaaatcaggagtttcagtttcagtcctcgcattctgtgtgacaaactgagaatgacttgtaaagagagcttcgcttgcatgacgttggcaagagcttcatatcgcttgtaatatcatttttccagcgatagatatgtaagcgagatcttggtagggctatcggagcagcactaccttactttgggtcatcgttttttcgtcccctaataattggcctacttgttt

SEQ ID NO: 30899 - DNA, 102 bp, Oryza sativa
  Clone ID: PAT_MRT4530_35258C.1
atggtgccgtttgtgatgtcagggaaccgttcatgccagatctacaccaataatttcctcgaccgttctgccgacaaggcatttacttctacaaaggcctag

SEQ ID NO: 30900 - DNA, 1830 bp, Oryza sativa
  Clone ID: PAT_MRT4530_35259C.1
atgggctccgacgaagacgagctgctcgacgacgaggagtactactactactgcagcgacggggagtgtagcggcggcgggagcgggagcgacgaggatgaggagttcgggggccgcgggagcgacgagggctgtgaggccgacgaggtcgtctccacgcgcgagcagagatatgttgtgttgaccgaagatgatatacgcgagcgacaagaggaaatgataagccgtgtgtctgcaatattttcagttccaagggaatcagcatgcgtcctccttcgtcactacaaatggagtattagcaagctaagtgatgactggttcgcagatgaagaaaatgtccgccgttctgttggcttgccatcaaatgttgttcatgttcctgactgtcctgagctaacttgtggaatatgttttgaaggatgtgctgcaaatgcaatgagctgtgctggttgttcccatttctattgtcatgaatgttgggaagggtatattagtgctgcagtaaatgatggtccagggtgtttggtgttgcagtgccctgaaccatcttgtgatgcaatcgttcttgaagatatgattaatagtctgacgaaagatgaggataaagtaaagtatgcacgatttgtattatggtcatatattggagttaacaacaagtgtgcagaggaagctcatcggccagttagctgtgacacagtctcaaagtggatactaaagaacagcgcagaatctgaaaacatgaattggttatgcctaggtgcatggtcagatcatggagatgggactggtggcttttatgcttgcaatcgttatcaatcagcaaagatgggaggcatgtatgatgaggctgaagcaaggagagagagagctaaaaattcgcttgagagatacatgcattattatgagcgctgggcgtccaatcaaacatcaaggcagaaagcacaagcagatctgcaaaaagttgaaaatgaagatcttacaaagttaagtgatgttgttggtataccagagacccaactaaagttcatacctgaagcttggtcacagatcatagaatgcaggcgagtgctgaaatggacatatgcttatgggtactatctacacaacaaagcgaagagtgatttttttgtgtacctccaaggtgaagctgagtctggtttggagcgtcttcataaatgtgccgagaaggatatgcgtgaatttttacctacagcggattccactcaaccttctctttcattgcaagacttcggtgaatttcgtgtgaagctttctggtctaacaagcgtaacccgcaactacttcgagaaccttgttcaaacactggaagcgggtctgcaggatgtccgcgctacagaccaatcagcttcagtcagtacctccagctccaagaagcctcccaccaacaccaaggggaagtcagggcggaccgtggaaacaaattcttatgagaaagcccattttgccctttgtgcttcagaacatcgagcctacaggacgatgactccacacggatctgacgaccggagctcagatgatgggaggagctggtcaagggcacacttcagcctgcaagtgggttccttctttcggcggcggatggaggcaccggcggacggcggctacctgcttggtggccaaccggcgaggtgctccggaggacactccaccggcagcaacggcgagggtttcggaggacacccggccacatcgccatcttcatctagctgggtttctctccctcgtgagcacaggagagttagcgtgcagattgctttctttgtagcttccttcaagctggcagtggcctcccaccatgtgttttactag

SEQ ID NO: 30901 - DNA, 652 bp, Oryza sativa
  Clone ID: PAT_MRT4530_3525C.1
atggaaggattaggtcgccggggtcgaaacggagaataccttcgtctcctagacacccacgacggcgacggcgcaaacaacgaaagtgttcctacaacaggtagccatccagtaagcagggagaaggagatccttcaaatgaagaaaaaattggccgtatttcacctcgcggtctccatggacggcaacaaagtgaaaacaattgggaagaaaggagagcacggcagcgaagcttccaaggaaagaaaacgaaaccggggaagcagaaatgggagggggcagttgggcggcattgatgaagacacagtgaagcacagctgctcacagaccgttacggggaattgtgggagacactgtcgaaccaccgttggctgtcccgtacgcacggacaagcccagccaagcgtgctcccagcgcatggacgggcttctatttttcccagcccaccacacgctcgtagaatggaccatgtccacaaagccaatggcaatcttcactcgagcagaaggaaatctctcactgcagcaacacatcagtcctagggaagcgtaatgtgcccatggtggtctctctccacggtagaccagcaggagaagaaacaggcaactacctggtccaccatgaacgctgcacatggatcaaaaaaatttaa

SEQ ID NO: 30902 - DNA, 892 bp, Oryza sativa
  unsure (1)..(892): unsure at all n locations
  Clone ID: PAT_MRT4530_35260C.1
cttgtgtgtagatagtaccatagcatatgtccattcagcactcgcctgtgccaagcttcaggtatgaactttagttgggtctctggtataccaacaacatcacttaactttgtaagatcttcattttcaactttttgcagatctgcttgtgctttctgccttgatgtttgattggacgcccagcgctcataataatgcatgtatctctcaagcgaatttttagctctctctctccttgcttcagcctcatcatacatgcctcccatctttgctgattgataacgattgcaagcataaaagccaccagtcccatctccatgatctgaccatgcacctaggcataaccagcaaaactcaaatttacaaggaggagtgcatgtcatatgcatgcatccctgattcttctctataggtcgtttgcatttcggacagggcttagaataagctaatatccaattcatgttttcagattctgcgctgttctttagtatccactttgagactgtgtcacagctaactggccgatgagcttcctctgcacaattccagcaaaaactgaatttgcatttgcatgagacatcatagttaccatcaccaagaaactcaactgcacaggtacaatcaggagctggacaccattttatcttgttgttaactccaatatatgaccataatacaaatcgtgcatactttactttatcctcatctttcgtcagactattaatcatatcttcaagaacgattgcatcacaagatggttcagggcactgcaacaccaaacancctggaccatcatttactgcagcactaatatacccttcccaacattcatgacaatagaaatgggaacaaccagcacagctcattgcatttgcagcacatcctcaaaaca

SEQ ID NO: 30903 - DNA, 833 bp, Oryza sativa
  unsure (1)..(833): unsure at all n locations
  Clone ID: PAT_MRT4530_35261C.1
cgcctctgcctctgcctctggtccggttctttcgcctcacctgcctcggnctcggcgatcgccgccggcggcgccgtctccgcctccggctcggcctcctcggcggctgcaggntctgcctctttggcctctgcctcggnctcagccacagtctccgccggagcagccgcagcctgatcatctgncggntttntctnttnnacctgngcagngnagccgcagcngcggnggnngtggcttcttcttcctcaanngcggcgaagaccggntcctggtnctnganagnntccancaagggngntaanctccataagaaganagactaagngaggnggagnaatgctttnnaacctngaatggttgcaatnggtgatnaactngataatgatnnanaatacaattngagaagtngaaactaaatgctcaaatgagntnaatgtagaatnatanattngtaatnatnnagtngannttngagggggtgagttacaagtanncaaattttaaaactatagttgaaagtngttattaaaanagtganatnaatttgagaannttaaatttnanaaacnnataattanatattgngagaaaaacataggtnnnttaaacaaaattttaaattgnntttaanaataaatatanaananttttnaaaaaattanagtaaaataantantaaaagnnantnaaaanaaaatnaaaaanttntaaaaaagttantnnaanaganaaatagaaanaantaggaaaattaaactnanatnatannngaaattaaanantaaaagnataaaattngatnatnngntaanatattgnttnaaaaattt

SEQ ID NO: 30904 - DNA, 475 bp, Oryza sativa
  Clone ID: PAT_MRT4530_35262C.1
gggaaacaccgaagacccctgggactgcccaatgggttaacgcacaccaatggcccaagggaaaggaaatgtcccaatgctgtgccccggcgagcaactgtttcccctgggaacgaatgtgtgtggtgaacgcaaaaatggcaatatatgcggtgatatgctctccaaagaagaagaaaagcttagggaagggcttccaaaagcaacaaaccagggggaagatggagttaagggtgtggtgtcaactgcctgagtccatgcctaccataggagctgacccaaggccaataatcctggtggagtgcgcaataaccacagaaatgcgtcaaatccataagccttgggattcctaaaggatgggttttcaaaatgaaatcataccataaaagagtccatgttttttccagctatgtaatagtggatgttgggaagaataataataatcttgtgtcctttaagtaaaaaaaaaaaaaaa

SEQ ID NO: 30905 - DNA, 941 bp, Oryza sativa
  Clone ID: PAT_MRT4530_35263C.1
gaacacacaccatgcactcgctccggcgcgccctccgcgtccccacctccgcctctggcctgcgtcgcctctcctctaaccgccgcgcgcctccgccgtcgcgagccgccgccggcgccgccaccgcgaccaccggcgacgacgagtggaacgacgcctgggagacctcatggctcccgggcgactcccccacctcttccccggcgcccgccgcgccgtgggagtcccccacctcgggggccgccaccgtcccggccatctccgcggaggtggaccctgacaccaaggccttcgtggccgacatggacgagcgctgggccgagcgccgcgccgcgtcgaggcggccgcgccccgctcctcgcgcggagggtgcgggcggcgccgcggccaagaaggcgcaggccgacgagtacagggcgaggaagcagcgggtgcacgccgcgctgtgggtgaaggagatcgagaagatggaggaggcgcgcctcggcggcggaggcggcggcgccgacgacatcgaccgactcctcgactcgtgctctgagattttcgattctggaaatacagattttggcgattcaaagattccaagcactgctgagatcaaaaccaagcctgatggttgggaaaccacctctagaggacaggatggtagcatatgggatatctcacagcgggaagatgacattcttctccaagaattcgaaaggcggattgctttcagtaaacagcagattgctagcttcatcaaaacacacatatttagccggaggcgtcctattgacggatggaagtacatgatcgaagaaattggccctaatgctagaaaagggaaggggagcgtacagagactgcccagtgtgactgatcctgctactcagccgtacagggaagagccacctgcaattgcatctggttcgccattcagaggaaaccggccataa

SEQ ID NO: 30906 - DNA, 342 bp, Oryza sativa
  Clone ID: PAT_MRT4530_35264C.1
atgcatggggcgcagctgctagctgggcatggcaaaattcaagtggacttagtgaagctcgattgggttagcttcactctctcgcacccaccaaatgacgagattatgacccttggagctgcacgtgggacctttattcaatggcccaagcatagcattcagatcaacataactcctaggctagcaccaagttctcgtccaccgctgcggcatccccctccaactcttgtatctgcccctcctgtcgttgaggaaggagatgaagatctgcaattgcaatacggtacagattttggtgccgacggtacggaggtcgacagcaggccgcacctccccccttaa

SEQ ID NO: 30907 - DNA, 394 bp, Oryza sativa
  Clone ID: PAT_MRT4530_35265C.1
tttgttttttatttatattatcttttttttttttttacatttttatggaattatcttttttacatattcaagctgaagagtcatccttaagaaaggagagttcacagaactacaaacgcaacctacctgaaataacctaacatcacaacaaaaaaaggagcaggacaccagggatctgcggagaaaccgtgaggactggtaccccgggcctcaaaagatgggcagaacgatagacaaaccgataatccccatcggctggcttcacagaaacggaacaagaccgagcggtgaagcatggccgtaaataacggagagggcgtcaccggactcaacaaaggatccctgcggggctcattaggcggcacgagctaaacccgaatgacaaacccaacat

SEQ ID NO: 30908 - DNA, 129 bp, Oryza sativa
  Clone ID: PAT_MRT4530_35266C.1
atgggccgcgtcaagtcatgccgccaggatttcttcatgccgatgccatacaaccattatacatgccacgttgtcattacccctagggttcgtcccaccgagcagtcccaccccaactacaggggctga

SEQ ID NO: 30909 - DNA, 464 bp, Oryza sativa
  Clone ID: PAT_MRT4530_35267C.1
cccacgcgtccgcccacgcgtccgcccacgcgtccgctgttttttcaaagttttgagactggtatatcattttttctgtaaaaaaggcttttgtttattcacacaagttcattttttatgatattgcattgggtccatataattatttcaatccttctcgacaattctttctttgttttgtggtttcattgcgcatagttttagaaaatgtgcacttcaatgctctctgttagcatttatagtgactgagactctctttgcttgagtagaccgccacacattcctacgtctacttctcagtgttgagtaaaagtcagcaatgtcaaggagaactaccattcaagattttgttagccttttcagggctgcaacataacctaccgaagagagtggtataatacgcgagttttgagtgaaagaggctgccgtgcttttatgggagcttgttgagatacaaatctgca

SEQ ID NO: 30910 - DNA, 186 bp, Oryza sativa
  Clone ID: PAT_MRT4530_35268C.1
cccgtcaacgtggccaacttgcataagctaggacacagttgcaagaggataaaacaactagaaagagcttgcatcagctgccagagggaagttttggcaagggacctagatgatgtctccagcgagatgaacgatgatgagcaccaccgtcgccgtctattgaggtctcaaggaggaccaagataa

SEQ ID NO: 30911 - DNA, 3712 bp, Oryza sativa
  Clone ID: PAT_MRT4530_35269C.1
gggtgcccagcgcaaccgcaccctctcctcgccggccatggtgcggcttctcgggctgcggagcctgagcttcgggccggaggagtcgccgcgggagatcacggtggcggggggcggcggcggcgacgcggcggcgcaccccgtggggagcagcggctggctcgttcgcttcttcgactccgccttcttctgcgagtggatcgccgtcagctacctctacaagcatgaccaccagggggtgcgcgactacctctgcaaccgcatgtacacgctgccgctgccggggctcgaggcctacctcttccaggtctgctacatgatggtgcacaagcccagcccgtcgctcgaccgcttcgtgatcgacacctgctccaagtcgctgcgcatcgccctcaaggtgcactggctgctagccgccgagctcgagctcgaggacaccgacgatttggatgggatcgacagggtgcaggagcagtgccaggctgcggcgaccgttcagggagagtggccacccctcgtccggcctgcgccgccgtcgccaattgccagcccacgcgggaaccccatgcttagcaggatacgctcatcgaagcagcgccttctgtcccttgcatcatcaccctcactcggcttgagtccccccgcaggtgcgagcaatgcagctgctgcagaggatgttgggggcagtggagtgaagcagccagcgacaccctcgtcagaggataacaagctactcaagagactaagcattggacctaaggtgcgtgatgcagcatcgttctttaggcgatccgtggagaaggatgatgagcaggacaaggaagggttctttaaaaggctgcttagagacagcaaggacaaggaggaagaggatggtgataaggaaggatttttcaagaggctgcttagtaaggagaaagagaacgaggaggaagaaggagatagagatggtttcctccgcaggttgcttagggacagcaaggacgaggacatggaattgacaccaagctcagagggtttattgaagcgactgttccgtgataaggaagataggcagggtgatgatgaagaaaaggaaggctttttccgcaggatatttaaggataagaatgaggagaggagagagagcctgcatggaaggcatggggatgaggaaagagtgggcaagagcttagaggatgatgataaagaagggttcttccgcaaaattttcaaagataaaaatgaggagaggaaagacggagggcatagtaagcaacaagatgataaggaaaagactgctgggaacatcgaagatgacaagagggatggttttttccggcaacttttcaaggagaaaaacgaagagaaaaaggaaggcaccacaccaaacaagaaagaggaggacgacaaaggacacaggaccatggatgatgaaaatttctttcgtaggcttttcaaggataagaatgaagagaaaaagggagctgctcatgacaggaatgatgatgataagtgtgaggaaggtgataaggaaaatttcttccgcaaattgtttaaagacaagcatgaggagaggagaagcgatgggctggataaacatgatgatgatggttgtttagagtgcaccctgaagatgctaagagtgggcatattgaaagttgtcagcctaacgaaaaactctgttcccactggaaacggtgataagcaaagtggcaaaccacctttaccaaacaacgcaatagcagagcttcggaaaggatgttactatgcttcattggagcttgtgcaatctttgtgtgatacatcttatggccttgtagacatatttcctatggaagatcgtaagattgcccttcgagagtctcttacagagatcaattcacagattgcttctactgagaaaaatggaggagtatgctttccgatgggaaagggcatatatcgagtggttcatatacctgaagatgaagctgttcttcttaactccagggaaaaagctccttatcttatatgtgttgaagttttgaaagcagaagcaccaagtcactccaaagggtcatcagatgttaacaaattgtcaaaaggtgggatacccttggctaatggagatgtgcagttgccaaagccacctccatgggcatatcctttgtggagtcggcatgaaacacaaaattatgaaacagacagaatgctgaagtctacctctcaggttattgaccaagctatggctcaattgtgggaggccaaagtaaaatttgtaaacgttagtttctcggttgagaaacttggtcgttcaaggagtgttgcaatttctgattcgggacataggtcacgacaatctacagcagattcaaatgagccttcaggagattcccaaccaattgctgatcagcctattgagtgggtaaaggttactttatctgcggttccaggagttaacatggatgatgttgatgacaatgaaccaacgcggaagaaggaccatcgccgcgttccaagtacaattgccatagaggaagtcaaggctgcagcattaaaaggagaagctccacctggtcttccactgaaaggagttggccagaatgctcaaaatatagaatctaaggcaactgatggtggagatcctaaaccaactgatgctttggctggtgaaatctgggctgtcaagagagagagaatacgacggtcttctgttcatggaaaattacctggctgggatctgcgttctgttattgtcaagagtggagatgattgccgacaagaacacctagctgtacagcttgttgcacacttatatgatatatatcaagaagctggtttaccactttggttgcgaccctatgaagttatcgtcacatctgcatatacagcgctaattgagactattcctgatacggcgtcaattcattccatcaagagtcggttccccgatatcacaagtctccgtgactactatgtagccaagtatgaagaaaattctccgaacttcaaacttgcccagagaaactttgtggaaagcatggctggatactcaatcctgtgctacctgctccaggtcaaggatcgtcacaatggaaatctcttgatagatgaggaagggcatataattcatattgattttggctttatgctttccaactctcctggaggggttaattttgaaagtgcaccatttaaactgacaagggagcttcttgaagtgatggattctgatgcagagggaacacccagtgagttctttgactacttcaaggttctatgcattcaagggttccttacttgccggaagcatgcagagcgtattatactactagtagaaatgttgcaggattccggcttcccttgctttaaaggtggtcctcgcactattcagaacttgaggaagaggtttcacttgagtcttactgaagaggagcttctggctccttccaaaaatcaatttgcttatatcatcgtgaaaatctccgggatagcgcaggctattggcgcctgcaatgcaacttgcatagcatttctcccatttgatgaggttgagaattgtatagtcgtcggcagttatctagttgaggtcatactaggaggtttgctactggtgatagcatatgtttgggaattttctcccagctttgtcaacattacaccgcttgaaaactggaaatatttgagagtgcttccatctggtaatgtatctggacatatttctgaatctgtggagattattaactcttga

SEQ ID NO: 30912 - DNA, 393 bp, Oryza sativa
  Clone ID: PAT_MRT4530_3526C.1
ccggccgggatcaccattgaagccgctgactcctcgaactcgatgccgtttgtcgatcacccctccgttcccttccccgtctactagatgactcatgcgcaccaggatacgctggaacttgatgtataaatgcaaataactatgcagtcagatagctctacgccaatcaagaacatgaaaatgtctcatcactccgaggacttcagttaattctgtgcgaagtgtgacgtcacaagctgagacaactgaatccgtcgatgcctctactgagcaaatgcgaaggaccgtggtgtcttacaccatgaacactgatagagcctacactgcctctactacaaccctacactagaggtgcctcactgaaatctgtctgccctacgatagtgacaacag

SEQ ID NO: 30913 - DNA, 338 bp, Oryza sativa
  Clone ID: PAT_MRT4530_35270C.1
agaaaaacacccaacagtatatggtgcaggagcctcaaagggccccaaagggaccactgttaacattactcaaccgagtcaggaggtggcaaagaaaagcccccatcatgcaacactctggagcgaccagctccaatattactgatagcaacaagtatgcttcagaccgttggccagaacactgaataaacaaactggggctgggagaaccatcccagcaatgccttacggaccaacctggggggttccccaaggaataggattatatttttgggaaaggacggggtcaagctgggaaccctgaaattctttaccagagccggcaaaccttaaattga

SEQ ID NO: 30914 - DNA, 736 bp, Oryza sativa
  Clone ID: PAT_MRT4530_35271C.1
gggaggccaaagtataatttgtaaacgttagtttctcggttgagaaacttggtcgttcaaggagtgttgcaatttctgattcgggacataggtcacgacaatctacagcagattcaaatgagccttcaggagattcccaaccaattgctgatcagcctattgagtgggtaaaggttactttatctgcggttccaggagttaacatggatgatgttgatgacaatgaaccaacgcggaagaaggaccatcgccgcgttccaagtacaattgccatagaggaagtcaaggtgcagctgatttatgagttgatttttaagtgaagttaattaggagctgaaaatttttagattccttctccaaggcttttctttttgcaattttcaatcttgctaaagagtattcttttttaaactatcgaatatcctagatgttttagctaaccaacaccaggaattagtagtcatcaaataagacaaggtggtttattgcattatcatccaatttacagttcgatacctcttgtacaactatttgctgaattgttttccttgactaggctgcagcattaaaaggagaagctccacctggtcttccactgaaaggagttggccagaatgctcaaaatatagaatctaaggcaactgatggtggagatcctaaaccaactgatgctttggctggtgaaatctgggctgtcaagagagagagaatacgacggtcttctgttcatggaaaa

SEQ ID NO: 30915 - DNA, 1708 bp, Oryza sativa
  Clone ID: PAT_MRT4530_35272C.1
tataactatctattcgatgatgaagataccccaccaaacccaaaaaaagagggtgggtcgacccacgcgtccgtacgacggtcttctgttcatggaaaattacctggctgggatctgcgttctgttattgtcaagagtggagatgattgccgacaagaacacctagctgtacagcttgttgcacacttatatgatatatatcaagaagctggtttaccactttggttgcgaccctatgaagttatcgtcacatctgcatatacagcgctaattgagactattcctgatacggcgtcaattcattccatcaagagtcggttccccgatatcacaagtctccgtgactactatgtagccaagtatgaagaaaattctccgaacttcaaacttgcccagagaaactttgtggaaagcatggctggatactcaatcctgtgctacctgctccaggtcaaggatcgtcacaatggaaatctcttgatagatgaggaagggcatataattcatattgattttggctttatgctttccaactctcctggaggggttaattttgaaagtgcaccatttaaactgacaagggagcttcttgaagtgatggattctgatgcagagggaacacccagtgagttctttgactacttcaaggttctatgcattcaagggttccttacttgccggaagcatgcagagcgtattatactactagtagaaatgttgcaggattccggcttcccttgctttaaaggtggtcctcgcactattcagaacttgaggaagaggtttcacttgagtcttactgaagagcaatgcgtgtctctggtgctttcacttatcagtagcagcatggatgcatggcgtactcggcagtatgattactaccagagagtattgaatgggattttatgatatacccttcaggagcttctggctccttccaaaaatcaatttgcttatatcatcgtgaaaatctccgggatagcgcaggtcagtctggggctgactagccaggtacagccaccatgatttctacgagcgaaacacgcctttgtgttttgcatttcgcatacctggagtcccctgtgaaacacacaggctattggcgcctgcaatgcaacttgcatagcatttctcccatttgatgaggttgagaattgtatagtcgtcggcagttatctagttgaggtcatactaggaggtttgctactggtgaagcttttcagcccattttactggaattcgggacccccgagctgcattgctgtacagacaattgattgacgtagcttggacaggatctaggagaggatggagccatacaagccgcaaagtaagtgtaaattatagatgtatctgtctatgtgagttggggagtcacctgggacagcaaaaaggctgggtttgcgcgattgttgtcttggtaatcctgtgatatcccaaattagcatcaaaagtagaagatgatgtttgtacattaccattactgtacagtgcccatactataggagcttgttgccctgctgcatttggcccttccgattttgttttgtagtactcctttcatgttggtggtgtcaaaatttgctttacaggtgatagcatatgtttgggaattttctcccagctttgtcaacattacaccgcttgaaaactggaaatatttgagagtgcttccatctggtaatgtatctggacatatttctgaatc

SEQ ID NO: 30916 - DNA, 753 bp, Oryza sativa
  Clone ID: PAT_MRT4530_35273C.1
gatttctctctgggggaacaaatcgaggcaatagagtctgtattttagcatttgaagtcgcaaacacaatagctaaagcttccaatttgtggagatcttgctccgacacgagtataaaggaattgaaggaagaaatattgcgttcagatggagtgcaaatattggtctcctcaaattccagtgaactattgtatattgcttatgttgacaaaagggatgaacttgacatcttttcaagagaagtaattcgatttggtaacctgtgtaaagacccaacatggcataacttaggacgctatttcaacaaattaacgacagattttgcgcctcaggatcattcaaaagagcatatggaaactactatccagcaattgatcaatttggctcaaaatacttctgaactctatcatgaattgcatgcgctggacaggtttgagcaggattttcaaagaaaatttcatgaagaagagtcagtgccagcagccagacgtgagagtgttatgatcttgcatagtgaactaaagcgccagagaaagcttgtgaaaactctcaagaagaagtctttgtgggctcgaactttagagacgattgtggagaagcttgttgatattgtcgtatttttacataagcaaattcgggattcattcagtgaagcttgttctgtaggtgctgaccttttcaattcaaagcaagctcaaaacaaaagactaggtttctgcggtctagccttacattatgcgaacataatcaatc

SEQ ID NO: 30917 - DNA, 165 bp, Oryza sativa
  Clone ID: PAT_MRT4530_35274C.1
atgacgagcgacgaccaagcgagcgtccgcgagctccatgatgtcggcggtggtggaggcccatggggcgccgacctgggatgggcggtagaggaggtcgacgaaggcggagggggtgcgatcgggagcggcgtggtagtgggactcggtggccgacgacagtga

SEQ ID NO: 30918 - DNA, 150 bp, Oryza sativa
  Clone ID: PAT_MRT4530_35275C.1
atgtctccgagtcttacttggagaccagttgacctgtggtacaaaagggaccccccggggaggaccttgggcatcgaatcttaccgccaacacatccaccacagcctacgaagccggagcctacaggagccaagtcgccgggtgatctag

SEQ ID NO: 30919 - DNA, 193 bp, Oryza sativa
  unsure (1)..(193): unsure at all n locations
  Clone ID: PAT_MRT4530_35276C.1
ctgagggctatgctgctccgagcctcgtgtgtgccnggtgtgggaagatgtgatgcatggagggaggagatggactggaagtgcatggtgcccctgtgcccagatgtatcccggctggtggaaagaagaaccaagcctggcctgatgtgtgagcccccgtggtgtggatgcctggcagctggctgatgggtnt

SEQ ID NO: 30920 - DNA, 1620 bp, Oryza sativa
  Clone ID: PAT_MRT4530_35277C.1
atggcggcgcggccgatcgccaaggcggcccacgagcttccgtcgctgtaccgtttggccctgaaaaccccagagatcttggtgggggcggggaaatccgggcaggcggacaacgaggccctcgacctgttcgacggaatgcccccgaagaaccaggtcgcctggaataaggcgctgggcatgctcgtcggcgcagggcgcatagagcgggcgctctcgtttttccacgagatgcccgggaagaacgccgcctcgtacgccaccatgatcgggggcctctcccgcgccggggcggcctccgtggcgcgccgcctcttcgacgacctgccgctgggaaagcacaacgtgttcacctggacggccatggtgtcctgccatgtccggaacggggagccccgcgaggcggtccagctgttcgcggcgctctacggcgagctctacgaacgcggggtgctgcccaacgcgcacacgctcagctcgttgctcaaggcctgcgtggctctccagtcgctcgccatggcaacgcagctccatgccctggcactcaagctcctggaggaggagaatacagataacacctttgtgtggaacggtttgatcgacgtgcacgccaaggtcggcgcgttgtgtgacgccgagaaggtgttcgacgggattcgcttcaaggatgcaagttcttggaccatcatgatggatggatactcgcggcacaagctcatcgacaaggctctatatctcttcagatcgatgaagaacaaggacgccttcacatggaacgtcatcatatcctgtttgtggcagaaccgccgaggagaagacgcgctccgcctcttcatcgatctgctgaggttgggtgatcgcgacaatggcggcgctaagccggacgcatcaatctacacgacggtcctgcacatctgctcggtgctgtccctgctcaccctggggaggcaagtccacgcgcgcgccgtcaagagcggcctctcgcgcagccatgtcttcgtcggcaactccctgatgaacatgtacagctgctccggctcgacagccgatctggagaaggtgttcgacgagatggcggcgcgcgacgtcgtgtcgtggaacaccgcgatacaggggctcggccagaacggccgcgggaggcgagcgctggcgttcgcggagcgcgcgctggcgctggggctctacaacggcagcaccttcgtcgccatcctggcgtcgtgcagccacgccgagctggtcgccgaggggatggcctacttcgacgccatggaggtcgagtacggggtggagcgcgcgttcgagcactacgtcggcgccatcgatctcctcggccgcgcggggcggctgcgggacgcgcacggcctgctcctcggcatgccgttcgcgcccagcgcgctggcgtggacgacgctcctgcactgctgcctggctcacaagaactgctctatcgggagcgtcgcggcgagggagctcagagcgctgcagcccgacggcggcggctggaactacgagagattgctgcgaggctgcggcggcagcggcggcggcggcggaggaggtggggaagccggaggcgggaagagctctgaacacttaccaggatgcagctgggtcgtctga

SEQ ID NO: 30921 - DNA, 210 bp, Oryza sativa
  Clone ID: PAT_MRT4530_35278C.1
atgggtcacccttacctgacgggagtcaatgtccagctctttagctataagctcagccagctcatggagccaggcacggcccaccagccatcgggccggcacggcccgatcggcacttcgtgccgggccggcacggcccatgggatgcgcctcccgcctaggcacggcccaccaaccgtcgggctgtgccggaccggcccgaaggcgcag

SEQ ID NO: 30922 - DNA, 1041 bp, Oryza sativa
  Clone ID: PAT_MRT4530_35279C.1
atggggtcggagccgtgggggaagcggcaccgtaccgagctcaataaggggaggtggcatcggcatggtggagaagaaacaataccagagcagcacatgttcccattccattccacctcgctctccttcctttttctcttcggcggcgctggagacgtgccgctctctgcgctgggtcgggccgtcggggttccattctctgcgctgggtcggggcggacgcaagccgcggacacctgtgcagtgccagctgcagcagctcgacaaggcagggacggcgttcctttccacagctcggaactccacctccaacttcatcttccgaagcattagctactggtgcatgggagaaagtcggggtgctggggtggggcgttctagcccaacctgccctgttgccatccttgactccgacttcataggttgtggtggatgtgttggcggtgagattcgatgtgttggaggtgttgacggcctcccactaaacgtcccatatggtacatttgctatcgatggacgaggtaccaatgcagcgggagtcagcgtcattccaatcgaaggagagcgtgagttggagttgatggctatgacagctacggcggtgttgtttagggacgggatgcgccaaatgcgaaggtggttggcgaagatggcgaacaggtcgagcttccagttcctgatcaacgctagtgtcaacggttccacatccgccgccgctgccgtcgtgaagccctccctctcctctcgcgcgactggatccctcttctctctcgcgcgagcgtcgccacctctgccctgcgacctcgcctgtggtcgccgtcgcgccaccaatgtctccgccgcgcctctgcctcttggggtcgccgccgcgtcgcctggggtcgccgccgcgccgactggagtcgccgcccctctcacaggcgccgccttcctctgctcgcgggcgttgcctgccccagctcgcgggcgccggcgtgggtgccgtgggcgggcgctgcctctgctgccaccgcctgcttctccctcatcttccaccgtctaa

SEQ ID NO: 30923 - DNA, 4104 bp, Oryza sativa
  Clone ID: PAT_MRT4530_3527C.1
ctagacataaaaacgcatgaaagaggcagcgttccaggaatggtcgaactcttcgccttccagtgtcgccagtcgaaaggaccccgtcctggacttgtgcttgatgaggtacggtccttcccacttcaattcaagcttgccaacggctatcgggttcgccttcttccttaggacaagataaccaggcaacagctccgtcggtcgaacttttttgttataagttgccgaagtgcctgtggcatacttgcgcatgtgctcaagtgcttcgactcttaccccctccaagagttcgggcgacacctcgcgcccctcttcgcccccagagaacgtcacccttggtgagttagcccctagctcatttgtatattcggccgccccatttgactgcgggtgcgcaaccgacacgaacatgatttccaagttaagcccttcgcacatttctctgaacttgtcagagtcgaactgcttgccgttgtcagtgatgaaatcttttggcactccgaaacggcaaacaatgtttttccatacaaacttctgtactgctgccgaagtaatcgctccgaggggttcggccccggagcgatagagctggcccgagaccatcttatacctcgtggctctgagttgcaagcgctttgcctctgcttcgtcttccggaagccagccagtttcaaggtgcttcacaaacggggttcgccagttgcatgggtcttcgcccagtttcacctgatcgattgccatgacctccaagctgtccatgggcacacttgatgcatataggacttcaaaaaagatgccaggcgaatgtgggccatcacaagcagcagatttcgccaaggcgtccgcttcctcattctggcctctaggtaaatgttcgaccattatgccgatgaagcacttttccatagaccgaacggcctccaaatacctcttcatcccttcttttgcctcaaaaggacgaatcggcacaccgtttggcgaattgagtactgccgcaatgcccgcccccttgtgcgaccacgaaccgtcggagtacatcacccagagctgttcgacgggctcgggttcaggggcgacaaagtcagctagcacttgggacttgacagtagtgcgggcaacaaaatgtaagtcgaaaggggatagctctgctccccacttgctaagccggctagtaacttctttgccccagagtatttcgcccaaagggtactgcgatggcactatgactttgtgggcctgaaagtaatacttaagcttgcgtgaagccatcaccagggcataagcgagtttttccatttcaatgtatctagtcttcgctccttgcaatgcttcagagacgaaatagaccggcttctggcctgaatccgtttcttggacgagagcagcattgactgccactggcgaagctgccaggtatagcaacagttcgcttccaggtgctgggctgatcagagctggcgggctttgcaagtattgctttagctcgtcgaacgctgcttggcattcgggtgtccagttgaattttcccgcgccctggagggttttgaagaagggcaaacctctttcggctgcctttgagaagaatcgactgagtgccgcaattcggcctgcgagcttttgtacttcacgtacgctcgatggaggcttcatttgctgaatggcatcgattttctcgggattcgcctcgatgcccgctgcacgcaacttgtcgaaggtctcctgtaggtcggacgcggggtcgaaagccttgcggctttttacgacgatgttgtcgacataagcttccacgtttcgccccaactgcttgtaaaggaccttgtacaccagcctggcgaaggttgctccagcattccttaggccgaaaggcatcatgcgccatttgccatttgacttccgcaccagcactggattcgccagccactcaggatggccgatctcttgaatgaccccagccttgagcaatttttggatttcggcttttgctgcctcttggcgatcagcgaacatcttgcgtaacttctgtttccttggcttggcatccggcttgactgctaggtaatgcatgatgagatctgtcgaaacacctcccacttcatcagagccccaggcgaagatatcaatgttcttcttgagtacttctaggatgttctcagcttcttcttcgcccatgtcaccccccagcgatacgagcatgatcactcctatcgggccgggcatcttgagcttgagataattgtggtgggaaatggcttcgaacttgttcaaggttgcacggccgaagatggcgttgtagttgtacgggatgtcgacaacgtcgaacaatacttgctcttcgcgtctgttttcccccgtgccgaaggctaccatcaactgtgcttggccaagaacttgaactgcttctccgccgaaacctcggagcaatgctggtgctggggtaatggcttgggtggtcaaccccatcttggcatatgcttcggcgaagatgacatcggccgaactctctccgtcgaccaggattcgccggacctcgaaaccagctatctcggctgagatcaccagaggatcttgatgcgggaacattactccttcggcatctcctagcccaaaagagatttgctggttcagatactgcggggccccttcgcctgccaaagtgatattgtggaccgttcgtagctgcatcttcttttgtcgcttcgacagctggatcagcgggtcggcccttgtaatcacttggattactctgcgctgcgcatcttggcgctgttcggccgggggtgcttgtttttgagctgcttcacaagatgcttcgacagctgctccctgctgcggccttggatcttgcacgctaccacgttgccgaatgttttggcattgcttcttgcggacaggctgctgatggttgcttgcttgcttggcgtcgaactccttgcggagggcttgcacttcttcgacagccatcacagccttgcccgcccggtcggttctgaacttcctccaggtcatgggggcttgaccttgccttagcggttgtccttggatcgccagctggggctggcgaacagcgagaggaggtggttcggcaacttgaacttgtgcttgggcttgggtagcggcgacggaagccttatcatactcagcttgtattgcttgccgtcgcttggaatcctcttcgcccttcaggtcagtttcgcctgagtagcgtgggacgggtgggaacttgaactggggtgggattggacaggtcttgattcccctacgcagcggtagcaccttttcgccccctgccctgttaacgacaccctgctgcgggtacagcgtggcgaagggcaaaatcatagcttgcgcgtgaggttgggccatggcattcggctgcccggctccgattggtgatgcttgctgagccgccatggatgggtcgaaagttggctgtgaccatgtcatggcgacctggtttggtgcttggtttgctccaaagtctggcgttggtgcttgcggccggacggttggtgcctgagcggcattgatgaagtcgaactgcggtacttgactccacagcaaagcccccagacctggctgattcgacggcaaccaaccaggcgcaccttgacttgtattcccctccgggtgagccgaaggggctgttcctgaaatgttgtggggttggctgagctgctgaaggaaaggttggagctgcgccttggaccgccttgccgcctcgtatgcttgctgctgttcttgcatttggcgaagcatgtcttggagtcgtgtcatgttctgtcgcatggcttccatgttggcttcggtttgtgtttcggggtcagggttgatttgggcttgcacagcggcgagcgcagttggggccgctgccggctgcgacggagcggcttggggcaccagcagttggcttgtcgaaaggatctccgccctggtctggagtgcccttgccgccacagccgccttcgccatgtcagccgcgttcggcacctgcacagaggtggcaggggccgaaggcggtaatgatggcgcaggtgcggaagcatatggcgctcctccatcttcggcgacgggcaccgaaggctctgctccctcctcggcggccat

SEQ ID NO: 30924 - DNA, 228 bp, Oryza sativa
  Clone ID: PAT_MRT4530_35280C.1
atggcagcggtcgggtgtatggtggggagggcgcacgcggggacgggcgagacggatcggtggattgggtgcggatgcggtgcgccggtcgacaaggaggcggtgggcccacgtgcagcctcatggctcaccggggccacgtgggcggcgagaggaggaagaaggggggatgccgagatggacggcggacggtggccgagttcaccggagtttgatgcagaggtctag

SEQ ID NO: 30925 - DNA, 267 bp, Oryza sativa
  Clone ID: PAT_MRT4530_35281C.1
atggaccccaacggcttcgatttcttctcccaagatcccatttcgtccgccgccggcaacatttggtcgtcgcagccgtcggcgtccggcccttcccacggatccgttccccgcgccggcgtggacacgctggacctcaacacccaggcggcgtcgggccaggagttccctcacctccacgagtacgaagatgaacctcttgttgaggatagcaacatgaatttcttccgcgatgacttggcaaatgctttgtttaatggattgtaa

SEQ ID NO: 30926 - DNA, 385 bp, Oryza sativa
  unsure (1)..(385): unsure at all n locations
  Clone ID: PAT_MRT4530_35282C.1
ggcctttgggtngcaggatgcncgcattagcangtgccnaattcggcncgcccgatttgtanagatattttggnntttacttccgatcgcaaaanaacgtctgctgtggtgaacgatgtccagagtgggaagatcctccttcnnnctaaaagaacngatgaagctattcnncctcnttgtcntcangctggtnatggtagtngttgctcnagatcccntngctactngcnntcccnnttttgaggtgcttancctgatntccnggnaaccatctgncacntccatccaatnnctccntncccngtnngctgntcggttgcggnttcccnttngnttnatcagtgctnaccngtnctagccgngnggggnctttttttttttntta

SEQ ID NO: 30927 - DNA, 1704 bp, Oryza sativa
  Clone ID: PAT_MRT4530_35283C.1
atggagcgtcatcagcttcttcttcttcccggatgccttcttctctaccttggcgccatcgctacgcttgccgcggccgacgtcgcaattccggccggtggccagcctccgggctgccggacaaggtgcggcgacgtcgacatcccctaccctttcggcatcatcgacccagacaggccagactgcgcctacagcaggggcttccagctgaactgcacgtccgtgaacggcgccgcgaggcctatgtttcacaatatcgaggtgaccaacatctccgtgcccaacggaaaagcatggatgaagacgaacatatcctcccagtgcttcgacccagaaacaaacagaaccttgtacgatgacatatggaacagtttcagatattcaccttactggctgtcaaacgaggacaacaaacttatcgttgttggttgcaactcactagcttacatgcgcagtacctcgtttataacccgccaatccatgcagtacgtaatcggttgctcatcaacatgcgacaacgtagaccttaagaatggctcatgctctggtgctggctgctgccaggcagatatcccgaaaggcatacggtattaccaaggttatttcaatgcaaactacaacaccactgcaatatggaggagcagcccttgcaactacatggtagtcatggaaacttcagcattcaactttagtaccacttatgtcgactccacagtattcagtgatacgtacaaggggatgattgctcaccagtctgctgaagcattggcctaccttcactcatgggcatcgcctccaatcctccacggggacgtcaagtcatccaacattctccttgatggtgacttcacagcgaaggtctctgactttggagcctccatcttatcgccaaccgatgatgcacagttcgtcacgtttgtgcagggaactcgtgggtaccttgacccagagtacatgcaaacatggaaattaacggataagagtgatgtatacagttttggggttgttgtcctagagctactcacgagaaagaaaccattaaattttgacgggctagaggatgagaaaagcctatctgtgaggttcctttctgctgtcaaggagaacaagcttgaggaaatcttggatgatcaaattaagagcgaggagaatatggagattcttgaagagattgctgagttggccagacgatgcttggaaatgtgtggtgagaataggccatcaatgaaggaagttgcagaaaagcttgatagcttgagaaaggttttgcaccatccttgggcactgcacaatcttgaagaggcggagagcttactaggagagtcatcaattgttagctcggaggttgtcactcaaggttgcatcattgttaagatccaaaggcggtggcggcaggagattaccggaggacgggatctaggcgttcttccgcgcctgcttgatgcggtggtggcggcgccgcccttcctaccgccgaccttcgcgatgctgccctctgcgacgttgccgtcacggaaggcaggcgccggcagcgcagtacctaacagctattctccggcatctccagggccatttgaggtgatgggcatcgtcgacaccctacgtgcacttttcatccacaccacctgtactactgatgaagaaaagtacacacattactttccaatagtagagagctaccgcaaggcccacgagatgaaatga

SEQ ID NO: 30928 - DNA, 237 bp, Oryza sativa
  Clone ID: PAT_MRT4530_35284C.1
atggctgcggccaccggcgacgaagaagatgttgaggaaacacagggctaccggatcggaaggatggcgacgagagaagccaaagatggctatgggcgttgtcgctcccctggtctagccatgggcgacgggcgccgtatcgccttacatttgctcattgattttgttgtagattgccagcacccaaagacagccgaggacttcctcaagcttagccccagccccaaggttgattga

SEQ ID NO: 30929 - DNA, 350 bp, Oryza sativa
  unsure (1)..(350): unsure at all n locations
  Clone ID: PAT_MRT4530_35285C.1
gcgcgccgaagcttctctcctctctctcaactccggcgagaggaggaggcggcggtggggcgttcgtcgggagagagaccagggccggggggctagggttcggccgttcagagaggcggcggctgaggaggaggaggaggaggaggagggggtgaggcanagatgtctactctctcgaggaagctgctgatgcggcacttcatgcggttgtggcctgacccgaccgccggaatcagctgtgctccgcacgacaacaacattatgctgtggaactcccgcttattctgaccggatgacacgcctggtgatggaggcacgttcaagctgacactaccatctacagaagatta

SEQ ID NO: 30930 - DNA, 2570 bp, Oryza sativa
  Clone ID: PAT_MRT4530_35286C.1
atggagcgtcatcagcttcttcttcttcccggatgccttcttctctaccttggcgccatcgctacgcttgccgcggccgacgtcgcaattccggccggtggccagcctccgggctgccggacaaggtgcggcgacgtcgacatcccctaccctttcggcatcatcgacccagacaggccagactgcgcctacagcaggggcttccagctgaactgcacgtccgtgaacggcgccgcgaggcctatgtttcacaatatcgaggtgaccaacatctccgtgcccaacggaaaagcatggatgaagacgaacatatcctcccagtgcttcgacccagaaacaaacagaaccttgtacgatgacatatggaacagtttcagatattcaccttactggctgtcaaacgaggacaacaaacttatcgttgttggttgcaactcactagcttacatgcgcagtacctcgtttataacccgccaatccatgcagtacgtaatcggttgctcatcaacatgcgacaacgtagaccttaagaatggctcatgctctggtgctggctgctgccaggcagatatcccgaaaggcatacggtattaccaaggttatttcaatgcaaactacaacaccactgcaatatggaggagcagcccttgcaactacatggtagtcatggaaacttcagcattcaactttagtaccacttatgtcgactccacagtattcagtgatacgtacaaggggatggttcccactgtcttggattggacagttgaatggaaaaaatgcgaggaagcaaaagagaacagaacttcctacgcttgtgttagtagcaacagttactgtgtcgatgccaccaatggtcgcggttatcgttgcaagtgctctgatggatacaagggcaacccatacatcacggatggatgcgaaggtccctttccggccattttgattcctctacccctgcaaattaagagatgtagaaaaagtattatatttttaagtctttttttggcagatatcgacgagtgccaagatgctcatccatgcacgggaatttgcataaatacgcaggggagctacacatgtacatgtcaacgaggaaaacatctgattgacggtgtttgcaagcagagttcctcttcttggattatacctgtcataggtggaagtattggagttgtcacccttgtgactattgtgacgtgtgcatatctcatccaagaaagaaataagctacacagcataaaacagaagtactttcgacagcatggaggtcgactgctatttgaggagatgaagggtactgcatttaaaatctttacggaagaagaattgcagaaagccactaataatttcgatgaaaagaaaatcctaggtcatggaggacatggcaccgtttacaagggatttctaaacggcaacactgaagtagcaatcaaaagatgcaagacaatcgatgagcaacaaaagaaagaatttggtaaagaaatggtaatcttatcccaagtcaaccacaaaaatattgtcaaactattaggttgttgccttgaagtggaagtcccaatattggtgtatgagtttatcgcaaatggcacactgttccatctcattcatgatggccacggcaggcacatctctatatccacgcgtttacagattgctcaccagtctgctgaagcattggcctaccttcactcatgggcatcgcctccaatcctccacggggacgtcaagtcatccaacattctccttgatggtgacttcacagcgaaggtctctgactttggagcctccatcttatcgccaaccgatgatgcacagttcgtcacgtttgtgcagggaactcgtgggtaccttgacccagagtacatgcaaacatggaaattaacggataagagtgatgtatacagttttggggttgttgtcctagagctactcacgagaaagaaaccattaaattttgacgggctagaggatgagaaaagcctatctgtgaggttcctttctgctgtcaaggagaacaagcttgaggaaatcttggatgatcaaattaagagcgaggagaatatggagattcttgaagagattgctgagttggccagacgatgcttggaaatgtgtggtgagaataggccatcaatgaaggaagttgcagaaaagcttgatagcttgagaaaggttttgcaccatccttgggcactgcacaatcttgaagaggcggagagcttactaggagagtcatcaattgttagctcggaggttgtcagtacgggaaatttcagcattgagaagaaatctttaataggcctagaatcaggaagataatcgctaataaccttgttgtatatcatatcccaggaaattatataggtatactccaaaagtattacatgtataggtaatcgtcatcatatatggaatgattcatacatgttttatatgtgtagctcaaggttgcatcattgttaagatccaaaggtgaggttgttgtttcaattgctattgtagctttacctttcaaaaatctatgtacaatagtaattgatttgatatttgacacacattttcttttt

SEQ ID NO: 30931 - DNA, 398 bp, Oryza sativa
  Clone ID: PAT_MRT4530_35287C.1
ctcttccctctcgtacaagtgttcaacgttgagttcagttgttttccggggccattgctgcacatctccaaccatggataggctgctagcaatatagtagtgttagattgcctggaatggctgttgcagtcagttaaagaagaagagggggaaggactgaacacacgtagtacttggtgcgctgtgagccgggggttaggatcccggacaaggaccttccgaagcaggtccttggcaccttccgacacatttgtccacggatccgcgtcaaattctagcatgccatgcagcaccttgtcaaataccccctgctttgtatctgtgaaaatacggcggtaacaagcaattttgtgtcatagttcaagatacatgctggaaaccaagtgaaaagtggtgtg

SEQ ID NO: 30932 - DNA, 705 bp, Oryza sativa
  Clone ID: PAT_MRT4530_35288C.1
atggatcccaagctgctcagagccgcaggccgcggcgactgcgcggtgcttgaggctctacttctgggcgccgccgccgccgccgccgcgacgccaaaccagcaagttgccatcgacgtcggctccgggcaacaatcgccgctcctcctggacgcggcgacgacaccacagggagactccgcgctacacgtggtggcggcctccggcgacggcgaagggtccctgcgctgcgcgcgcaccatctacagccacgccgcgcgcctcctggaccgccccaacgcgaggggcgacacgacgctgcactgcgccgccagggcgggcaacgcggcgatggtcaggtgcctcctcgacatggccagggaggaggagctcgccggcagcgcgggcagggtggccgaagtgatggagaggcagaacggccggcgggagacggccctgcacgacgcggtcaggctcggcgacaagcagctcgtcgaccatctgatttcggtgcatccccggcttgcccgtcttcccggcggcgacgggatgtcgccgttgtacctggcggtctcactgggccacgaccacatcgcagaggctctgcatcagcaaggggacgagctctcgtatgcaggaccggccggccaaactgccctgcacgctgctgtcctacgcggtgcagaattttcgttcatctatgccatccacgtcactcaagagtag

SEQ ID NO: 30933 - DNA, 396 bp, Oryza sativa
  Clone ID: PAT_MRT4530_35289C.1
accaacaaatttccctttgggaaacgaattttaaagggccccaacccggggtgggttaaccggaaaaaccaaaggagggggaaaaccttggggttggggggtttaaccccacccgggttttaccctaaataaccggcccaacccttttaaaaagggggtaatggaaacggggtctaaaacgggggagggggggggggaaaaaaaggggggcccccccccggggggggggggggcccccccaaaagggttggggggcccccaacccaacccgggtaaggggggggggttacccccccccccccgggattgggggggccaaccggatgcccctggggaagaaggggccccccctggggggggaggggccaaggggggggtcccccaaagggccccccg

SEQ ID NO: 30934 - DNA, 3372 bp, Oryza sativa
  Clone ID: PAT_MRT4530_3528C.1
atgggggagaggttaggagggggagagagggctcccagcggcatgaatcgctggtcggagcaaggtgccgtgaacagggcagggggcgaaaaggggctaccactgagtgggggaatcaagacccgttcaatcccaccccagttcaagttcccacccgtcccgcgctactcgggcgaaactgacccaaaggaattcctctccatttatgagtctgcgatcgaagcggctcatggcgacgaaaataccaaggcaaagaggccgggggagtcgataagggagtacatgcgtcgcttctcgcaagctcggtgccaagtgcaagacataaccgaggcgtctgtcataaacgccacttcggccggtctactcgagggcgaactcacaagaaaaatcgccaacaaagagccacagacgcttgagcacctacttcgcatcatcgacgggtacgcaaggggcgaagaggattccaagcgacggcaagcaatacaagctgagtatgataaggcttctgttgctaccgcccaagcccaagcacaagttcaagttgccgaaccacctcctctcgctgttcgccagccccagccggcgatccagagacaaccgccaagtcaaggccaagcccccatgacctggaggaagttcagaaccgaccgtgcgggcaaggctgtgatggctgtcgaagaagtgcaagccctccgcaaggagttcgacgcccagcaagcaagcaaccatcagcagccggtccgcatgaagatagctggcttcgaggtccggcgaatcctggtcgatggaggtagttcggccgatgtcatcttcgccgaagcatatgccaagatggggttgcccaccctagcccttaccctagcaccagcatcgctccgaggtttcggcagagaagcaattcaagttcatggccaagcacagttgctggtagctttcggcacaggggaaaacatacgcgaagagcaagtattgttcgacgttgtcgacatcccgtacaactacaacgccatcttcggtcgtgcatccttgaacaagttcaaagctatttcccaccacaattatctcaagctcaagatgcccggcctggcgagagtgatcgtggtcaaggggcttcagccttcggccgcttcaaaaggcgatcttgccataatcaacagagcagtacataatgttgaggccgaaccacatgaccgggcgaagcacgcgccaaagcctgcccctcacggcaagataatcaagatgcagattgatgacgctgaccccacaaagctcgtatcgctggggggcaacatgggcgaagaagtggcggcaaccatcctagaagtactcaagaaaaacagtgatatcttcgcctggggccccgatcaggtgggaggtgtttcaacagatctcatcatgcatcacctgccagtcaagccggatgccaagccaagggaacagaagctgcacaagatgttcgctgatcgccaagaagcagcaaaagccgaagtccaaaaattgctcaaggctggggtcatccaagagatcgaccatcctgaatggctggtgaatccagtgatggtgcgaaaatcaaacggcaaatggcgcatgtgtgtagatttcatagacctgaacaaggcatgtccgaaggacgatttccctttgccaaggatcgaccaactcatggattcaacagctggctgcgaactcatgagttttttggatgcatattccggctatcaccagatccacatgaacccggccgacatccccaagacagccttcatcacaccatttggcaccttttgtcacctcaggatgccttttggcctgaggaatgccggagcaaccttcgccaggctggtgtacaaggcttatgtcgacgatatcgacgtaaaaagccgcaaggctttcgaccacgcgtccgacctgcaggagacatacgacaacttgcgcgcagcgggtatgaaactaaatcctgagaagtgcgttttcggcgttcgcgcatgcaagttgttgggtttccttgtttctgaaagaggcatcgaggcgaatcccgtgaaaatcgatgccattcaggaaatgaagcctccgtcgagcgtacgtgaagtacagaagctcgtaggccgaattgcggcactcagtcgattcctctcaaagacagccgaaagaggtttgtccttcttcaagaccctccggggcgcgggaaaattcaactggacacccaaatgccaagcagcgttcgacgagctaaagcaatacctgcaaagcccgccagctctgatcagcccagcaccaggaagcgaactgctactatacctgatagcttcaccagtggcagtcagtggtgccctcgtccaagaaacagattcaggccagaaaccggtctatttcgtctccgaagcattgcaaggagcgaagacaagatacattgaaatggaaaagctcgcttacgccctggcgaaagcattgggggttcggcgcttgctaatccgaaccgactccaagctggtagcaggccatgtcgacaaatcctttgaggcaaaagaagaaggaatgaagaggtatttggaggtcgttcgatctatggagaagtgcttcaccggcataacggtcgaacatttacctagaggccagaacgaggaagcagacgccttggcgaaatctgctgcctgtggaggcccacactcaccaggcatcttttttgaagtcctatacgcaccaagtgtgcctgtggagagcctggagatgaagcagaagcaaagcgcctgcaactctgagccgcaaggtataagatggtctcaggccgaacacctcggagcaatcacttcggcagcagtacagaagtttgtatggaaaaacattgtttgccgtttcggagtgccaaaagagttcatcaccgacaacggcaagcagttcgactctaacaagttcagagaaatgtgcgaagggcttaacttggaaatcaggttcgcatcggtcgcgcacccgcagtcaaatggggcggtcgaaccacaaatggcaatgaccccgacagagctaggggctaactcaccaagggtgacgttctctgggggcgaagaggagcgcgaggtgtcgcacgaactcttggagggggtaagagtcgaagcactcgagcacatgcgcaagtatgccacaggcacttcggcaacttataacaaaaaagttcgactgatggagctgttgcctggtcatcttgtcctaaggaagaaagaggacccgatagccgttggcaagcttgaatcgaagtgggaaggactgtacctcatcaagcacaagtctaggacgggatcctttcgactggcaacactagaaggcgaagagttcgaccattcctggaaccctgcctctctcaagcgtttctatgtctag

SEQ ID NO: 30935 - DNA, 231 bp, Oryza sativa
  unsure (1)..(231): unsure at all n locations
  Clone ID: PAT_MRT4530_35290C.1
ctggtngtagttaactaacttaataggggtanatgttgttctttccattccatagctatcgaacattccatgcaatttgaagttaagtnctcctacttggcatttgctatatntggagttccctaatanattaggaagttccagcctgttgagttttgtctagtgtaattatgccgctacatagtctttgagttccnaatttttggagttcggtncaaaaaaaaaaaaaaa

SEQ ID NO: 30936 - DNA, 300 bp, Oryza sativa
  Clone ID: PAT_MRT4530_35291C.1
gcccgcggtaccggcccggacgtacttgccggacccacgcatccgttttatacttctgcatctgacacattccctccctttgtcgcacgcagctctgctccaagtggaaaggcgaggacagagagacatgacccccagatgaagtgctctggctgtcaaggctctcgaatgtaggggcagggcgtgcccttggggccagcaatgatgcaccacgcggaacatgttgcgcttgctcgcaagggaaccggggaggaccttggcccacccctgctgttcgatcgaggcctcgcactcagctga

SEQ ID NO: 30937 - DNA, 2627 bp, Oryza sativa
  Clone ID: PAT_MRT4530_35292C.1
gcacgaggcacactccaccaacctcacacggcctcaggcctcagcctccaaaggggagacaggagagaaagctaacgcttctctctctctctcggttaattgcctgtctgcgtgggagttacctccacacagcgccgtataagcttcgagcgaaaccccacgcacgtacgcaggcacgcacacgcgcgccggccggccggagaagaccagagtgttcctctgtttcagctatgacgacctgcgcggatgaccagacgggctgcgccttcttcgcccccttgctgtcctccaagggggcggaggtcgtcatcttggtggccggcgatgaggcggaggagcagcagccggcgccggtgctgacgagcaagccgccgggtcggctcgccaaggcggtgaacgaagcctggtccgtttctttgggcgtcgcgttcccggtgacgccgtccatgttcacctgctcggcacggggcgaggcgcggtccattcttggcctcgcattcccgatgatactgacgggtttgctgctctatctccggtcgatgatctcgatgctattccttggtcacctcggcgggctggccctcgccggcgggtccctcgccatcggattcgccaatattaccggctactctgtcctctccggcctcgccatgggcatggagccgatatgcggtcaggccttcggcgcgggcaattacgcgctcctgggcgtcaccatgcagcggacggtgctcctcctcatcgcggccgccatccccataggtggcctgtgggtgcagatgcggcctctcctcctcttctgtggccaggacgccgccatcgcggcggtcgccgagacctacattttcgcgtctctccctgacctcgtgctccaggcattcctccacccggtgaggatatacctcaggacgcaatccatcaacctgcccctcaccgtgtgcgccggcctggccattggtatccacctccccatcaactacgttctcgtagtcgtcctcggcctcggcgtaaaggcggtcgcattggcgtccgtgctggccaacttgaacctcgtgctcttcctcctcgcctacatcttcttgaaaggcgtccacaagcgcaccggcggtttccttctgtccgccgagagcttccgtggctggggcgagctcatcagcctcgcgctgccgagctgcgtgagcgtctgcctcgagtggtggtggtacgagatcatgatcctgctgtgcggcctgctgctgaacccgcaggcgacggtggcgtccatgggcatactgatccagaccacgtcgctcatatacatcttcccttcgtcgctcagcttcggcgtgtccacccgcgtgagcaacgagctaggcgcggggcagcccgaggaggcgagccgcgcagccacggtggggctcgtgctcggcttcgggttcggcgccttcgcctccgcgttcgcgttcctcgtgcgcaacgtgtgggcgagcatgttcacggccgacccggccatcgtcgcgctcaccgcgtccgtgctgcccatcctgggcttgtgcgagctcggcaactgcccgcagacgacggggtgcggggtgctgcgcggcagcgcgcggcccaaggacgccgcgagcatcaacctccgctccttctacctcgtcgggacgcccgtggcgctcgtcatggcattctggttccacttggacttcaggggcctctggttcggtctgctcgctgcgcaggccacctgcacggtgcgcatgctgctggtcatcggccggacggattgggcggccgaggccaagcggtccaagcagctcaccggagcgggcgccgccaacatggagagtgacgacagagttgccgcggacgagaagtcgcgcttacccgtcgatacggacgtggagcgatcgagcgatcacactgatcggtgttgaactgctgacagcaacagcgcgagccgcatgtgtattgtagtaatctagcctctcttttttctttttcttttttaccatttttatttcctccctctttccaaatttcggcgggggaggaatcagatgctgacagagcgacaattttgttctcggatgctaattagcaatgtaaagattatgctgatggtttattagtagcatagagttggagaatatgagataccaaggaaaaagactaattttgcctcttttcaccatggaggacccaactgttcacggcttcgctttctcttgctccgggtcggtgtctggtccagggaggccggccgcgtgacgactcggtcagcggcacgggccaaccagtggtagcaccgggtctcagctgtaaagtcgcgtggcgcgtggctttggaccaaccgtcgggaccccccattttttagcctcgtagccgtcgggccgtcaagttgacactcgcggctttaacttctggtagccggtaccttttcggataccaactgtgctatggaaatcggactatcgcacgtgcttgtaaccaagggccggctgacttgtaaagcacacctaattcctatcgattagaattctagacccaatataaacacaaaaaaaaaaaaaaaaaacacaaaaaaaaaaaaaaaaaaaaaaaaaaactcgagactagttctctctctccctcgtgccgaattcctgcag

SEQ ID NO: 30938 - DNA, 299 bp, Oryza sativa
  Clone ID: PAT_MRT4530_35293C.1
ttgggggtttttaaatttttttttttttggctagcaaaagaaaatccccaaagaagaccccagggggcatcagaggtgagcatcacaaacacgaggaaagggccaaaccaggaaaaagggggccccccccaacgacaaggacgggtccctccgggtggccaccctaacaggttaccaagacactccacatttctgcatgggggatggtaaaagaaggggacgggggcaagggcaggggggaaaccggcaacgggcccaaggaacgagaacgggaggggacccccctaagtatacccccg

SEQ ID NO: 30939 - DNA, 786 bp, Oryza sativa
  Clone ID: PAT_MRT4530_35294C.1
tcagcatgagttggtcgcacgagctcgccaatggagagaggagaggagaggaagagccatgctagcgacaacatcctctttcacatgatggggacggagcggggtgtggggatggaaacggggggagcttgaccacggcgtaggcggtggagcggaggggatggggatgggcagcggcgacggagcggaggggatggaaacaggaagctcgaccgtgttaaaggcagcgaagcagagggaattaggacggacggtagtgggtctccacagcttcctgtgacgccgatggccgcatcccctccacacagcggcgatggagcgaaggggatgaaaatgggggagctcaaccaaggtaggggcggcggagcacaggggacggggatggggatgggcctccatcgacgtcgctctgccgagctcgtccgcttcctcgccgccacctccgccgtgctgatctacccccaacgacaaagtcgggaacctgagaaccccctccgtggccggctggaacccctccgtaccaccgatgaggccaccttcctctgcgcgcctcacgggcttgctccgatggcaggaagcggcggcggcagcgtcgctcaatccgatgactccctagtggcgacgagggtagcgattccgacctctctctccaatgagctttgctactactgctatttctctgccaccatcacctcctttccaagcaccactgcactcctgccttccgtcgacgaggtcgagctcgttgtctaccaccttcgtgaaccagagaaacaagaaatgtag

SEQ ID NO: 30940 - DNA, 450 bp, Oryza sativa
  Clone ID: PAT_MRT4530_35295C.1
atggattttagtacgcctccaccgccggcggcgacggcaacgaggactgggagatctgcaactgcaacggcttcgtctacaagcgccgccgggtcctccacccgcccgacctcgaggacgctgctgccgccgcttcgtctacaagcgctgccaggtcctccactcgctcgacctcgaggacgccgccgccgccgccgccgcttcgtctacaagcgtcgtcgggtcctccacctcgacgacctcacctccacctcgtcaagcatcctggccatcgacatcggcgcgctgggcgtcgtccgcgacggcgtggaggccgtgcgtctcccttcgctgcggcgtcgccatgcccgtgtcgccgtcatcaccgccgccgccatgcgttcgctcaccgcctcctccattttggccacgcagactacctcgccgcactcgtcctctttcctcccatga

SEQ ID NO: 30941 - DNA, 942 bp, Oryza sativa
  Clone ID: PAT_MRT4530_35296C.1
atgaggatcgcggtgacgggcgcgacggggtacctcggcagccgcctgtgcggtgcgctggccgacgccggccacgccgtgcgcgcgttcgcgctccgctcggcgggcggcggcggcggcggcggcgacgtcgaggccggcctgctcccggcgtccgtcgagctggcgtacggcgacgtcgccgacgtggagtccctcgccgccgccttcgacaggtgcgacgccgtcttccacgtcgccgccgccgtcgaggcgtggctgcccgatccctccatcttcatcacggtcaatgtgggagggctcgagaatgttttgaaagctgccaggaggacaccaacagtaaagaaaatagtttatacgtcatcattctttgccattggcccaactgatggatatgttgcagatgagacacagatgcatcaaaggaaaaacattttggcacggaggtatgagaaatcaaaggttctttgcagaccagatcgcattgcaggcagcagcagaggggatgccaatcaccatcgtctatccaggattcatgtatgtcctggaaaacttacagcaggaaatcttgtttctcgcatcttgatcgagaggttcaatgggcgtttacctggttacgtcgggcatggccatgatcgagaatcattctgccatgtcgacgatgttgttgctggacatgtagcagcaatggagaaaggcagagaaggtgaaagatacctcctcaccggagagaacacgtcgctggttcagatcttcgacatggcctccaggatcacgaacacaaaggcgcccagattccacgcagtgcgtgttcttaggcatcaatgggcatactcatgtgagaaggccaagaaggagctagggtacagtcctaggagcttgactgaaggtctatcagagacgctcttatggctcaaggacagcgaaatgatcagattttag

SEQ ID NO: 30942 - DNA, 2239 bp, Oryza sativa
  Clone ID: PAT_MRT4530_35297C.1
ggtcaatgtgagaggactcgagaatgtgttgaaggctgctaagagaacaccgaccgtaaagaagataatttacacatcttcattctttgcaattggcccaactgatggttatgttgcagatgagacacagagacatcaagagaaaacattttgctcagagtacgagaaatccaaggttcttgcaatgaggatcgcggtgacgggcgcgacggggtacctcggcagccgcctgtgcggtgcgctggccgacgccggccacgccgtgcgcgcgttcgcgctccgctcggcgggcggcggcggcggcggcggcgacgtcgaggccggcctgctcccggcgtccgtcgagctggcgtacggcgacgtcgccgacgtggagtccctcgccgccgccttcgacaggtgcgacgccgtcttccacgtcgccgccgccgtcgaggcgtggctgcccgatccctccatcttcatcacggtcaatgtgggagggctcgagaatgttttgaaagctgccaggaggacaccaacagtaaagaaaatagtttatacgtcatcattctttgccattggcccaactgatggatatgttgcagatgagacacagatgcatcaaggaaaaacattttgcacggagtatgagaaatcaaaggttcttgcagaccagatcgcattgcaggcagcagcagaggggatgccaatcaccatcgtctatccaggattcatgtatggtcctggaaaacttacagcaggaaatcttgtttctcgcatcttgatcgagaggttcaatgggcgtttacctggttacgtcgggcatggccatgatcgagaatcattctgccatgtcgacgatgttgttgctggacatgtagcagcaatggagaaaggcagagaaggtgaaagatacctcctcaccggagagaacacgtcgctggttcagatcttcgacatggcctccaggatcacgaacacaaaggcgcccagattccacgtacccctctggttgcttgaaatttacgggtggatttcagttcttgtttcaagaatcaccgggaagctcccgttcatcagctaccctgcagtgcgtgttcttaggcatcaatgggcatactcatgtgagaaggccaagaaggagctagggggtactactggacaggctggtggctggcctcgccggaaggcttggaagcccgcgttgactagtggcggttggattggcggcggcggcggcgactcgacgatgggcggcggcatgagggtggtggtgacgggcgcgacggggtacctcggcggccgcctgtgcgcggcgctggcggccgccggccacgccgtgcgcgcgttcgcccgccgctccagcgacgcctccgggctcccggcatccgtcgagctggcctacggggacgtcaccgacgaggggtccctcgccaccgccttcgacgggtgcgacgcggtcttccacgtcgccgccgccgtcgagccgtggctccccgacccctcggttttcaccaccgtcaatgtgagaggactcgagaatgtgttgaaggctgctaagagaacacctaattgaacggtttaattggcgcctacctggttacataggagatggccatgatagggaatcgttttgccatgttgacgacgttgttaatggacacatagcagcaatggagaagggcagaccgggggaaagatatctccttactggagaaaacttatcactgaaacagatcttcgatatggctgctaacattacaaatacgaaggcacccatattccacgtacctctctggttgattgaaatttatgggtggatttcagtttttgtttctcacatcactgggaagctcccacttatcagttaccctacagtacgtgttcttaggcatcaatgggcatattcatgtgataaggccaagagggagctggggtacagtccaagaaacttaactgaaggtctatcagagatgctcttatggctcaaggatgaaaaattgatcaagttttagcactcaccctttgtgttaacttatgctgcattccacactatgtatgcatagatcttattttaacctataaactgtgagatgtacatgttaggagtgatgttaatgttgtatcatatcagtaataacttgagatgtaacatggtagtactggttccatggaagaaaggaaaaacatgttcttcgattgaagtctatcagagatgctcttatggctcaaggatgaaaaattgatcaagttttag

SEQ ID NO: 30943 - DNA, 417 bp, Oryza sativa
  Clone ID: PAT_MRT4530_35298C.1
atggcaaaccaaaccaatccaatagaccttcctgcccgtgaacctcgagaacacgatcagataggctggttcacaggaaccaaagatcatgcccaggaacaaaacctagccacgtccttcttctcaccttgcagcggcaacaacgagcagcagcaggatgtgagcgccacccttggctcggtagggaaaaccctagacacgaacacccaaacaaaaactaatccccctcctgtaaaccgtgatcgaccaattaaaagtttcttctacatcaagccagatgcagggataattgattttctgtcttcaatttggttgacacaaacttgcaaagaactatcagcaaaagatatatttgccttggccacatcaacgacaacacctaccattgaaatcgaacctaatgtccctttacgctag

SEQ ID NO: 30944 - DNA, 1086 bp, Oryza sativa
  Clone ID: PAT_MRT4530_35299C.1
atggggtcgtcgggataccaaccgtccgaggcatcgtcgtcgtcattgtacgaatcatccggcgcggcgaggtcgccgttgacggacccggtgttccagagggacctgctgcaggcgctggacaaccttcggagggtcatcgctgcagttgagcagtcgtacggcgtcgaggcgcacctgcaacaagccggcatgcttcccaagagcgcgtcctgcaacgacgccgacgccggcggcggcgacgcgcgtgggacgggaggcgattcaccccgtgtttctccgatttatatcctttggtttcgttcgagaaatttggtggtgttcgtggtctctgcgatggcggttgatcgcgcttcggcttcggcgcgtttgtgtttgcgtggtttattgtgttgtttaggccttaacattctacgcaaaattcacgagtacaaactacaaagtcgtaggaaggaaatggataatcggtttttgaattcacaatgtctatggaaatcaaacttcaggagtacaaagaatgtcaggatgggttttctggagaagtggtttgttttcggtgtgcctggttttgcagcctgcctttcttttcttgaaatagttatgcttataaagaacaaaattgaggggaaagatgttgtgaactacgagtcgttcttcaggtcctcccagtttcttgtgtggatggttgtaggtcttgtctcagtccatggaccttggttcgtattctacaacccaatcatgtgtttctgctggattttgaagattcttcttgagatacctcatttgcagtacaagctcacagtattaaaggcagtgttatattttaaggagatcatctcattctctatggcaattgtatttggcctctttgtagttgtgtctactgtagtggaccaaccacacaataaaagagaaatgaactctattgaagatccccttgttccagatgatgaaaaagctgaggctgaagtgaccaacttggcatgtttaactgcaaatgctaagcaccaatttctggaaattacaatcgtaaagctgacaggttacaaatttttgcatagaatgtacatttgtgatggcatggtg

SEQ ID NO: 30945 - DNA, 729 bp, Oryza sativa
  Clone ID: PAT_MRT4530_3529C.1
atggtcatggacgaattgcccaccatttgcatttttgttggattttttgttgagggagggagagggaatgcggcggcgggttgggctgcatggtcgtccaacgtgtcgacgggtggcggccgcgtgtccgcgagtggggtgatgcgtcaacacgtcgtggggcgaggacaggtcaacccagcaatgccgcattgccacctagaccgacgccgtacggccgctcgatccgcctccgctctttgtttaatgcggctctccacgaagacgaggcggcagagggagggcgatgcgcgccgccattgccgccggagaaaggtcgccgccgcctgccgttttatcttctccgagcggctcgccggccatccctggggggagcggatgggaggggacggccgcaatgctggctcggatctccacgcgccgcctataaggacacctgtgcttcctgctcatgcacttccttcctcctgccccctagagccactggagtttgctctgctcctactcccttcaccattttgttttgccaacatctgcaatccaaaacaaggaaaggtctctcctggctccagcgaattgctgatagcgatcataggtaccttcaatgctgaaaaagaaaacaaggcagaaacaaaaagctctaaattagtaatagaacgccttaaatcctttagtgcacttatttttggtgccaaaattcagaaatcaagacaatgcatatttttatga

SEQ ID NO: 30946 - DNA, 2535 bp, Oryza sativa
  Clone ID: PAT_MRT4530_352C.1
atgtcgacctccaccaatctgtccgccgcaccatcggccgagtatgcagagcatctgtccaacctggttgcgattccaagtctgtcacatgagaaccactattttcttggtctagtcggcagtcttgatccaactgaatttatcaatggtgaaaccaataggattcctttcagattggccaacccagatctaggtcactggaaaaatacctttaaatcttggccatctctagagaaaacctcacccgagaagagctggatcacatggttcaaacgcatatcggctagcaaaagagttcactgggatgagattggaatcggccaagcactcgaccttaccatagccaactcagctaaggacgaacccctaatggcagctggcacttatttctggtccaacaccatcaacaccttcctattcaaccaagggccgatgaccccaactctcatagatattatcatgatcacgagtctagatatcacctcatcggctaaccctatgagcctgaacacaaaaaaccaatatgacttcaagacaaaaagcataggcggctggtcaggctatgtagcagcatacatgggccagggtccgccatctataacagaagctgaattcccaagactggagccgattgaagacagtgatggagaagaacgcactcatcggagatgcacatccttcggagaatatgcctccacactaaccgatgcaggagcaaagctatcagccgaactgctcaaagattggttttgcagcttttatgaaggattccaaaaagaagctcgagactggttcctctatgaagattcaacacttctagaaaatcctttggactttagatttgaagacatcaaccatgatagataccagaaaaccagagaaatctactcaactgcaatcagcacatgtgtccttcctatcggcattcatcaaggaagaaacgtccaagtctcctatgaattttatcatccaatgagctccgctaggcagtttggtatgggccaacttccaatcggcttattctttgccgataagatccaatgccgaggggaaatctcatctaccttaatgatgaatcggctgcttaatcttcaaggacctccattgggcagcattgaaaacatagagttggcaagattcaggagtagaaacttcgacagatggtggggtgaatggaagctgcatctattccatcaaccggcttcaatgtacatgacaggcctatttccagatgttgtccctcagacaacagaatcccccccacaccagagcaatagtggcaaagatatcaaatatgccccaggactaattccaaatggaggtggaccatcccctccattcatcggctatgatgcccccaagacttcggctcttctccaaggcttaatcagggaaccagccgatgcaggcaagaaaaggaaaaccagatcatcggctgtggacacattagccccggcccttaataagaaaaccaagtcaaagaaaaccaagccagttgatgatctgcatgccctagatccatctatcgaacaagcgctagatgaggaagagattgaagaagacattgatcaagctgcagccgaaataagcgatatagaaaaaacaccatcggcttcacccaagcagactcctccaactccttttgccccagctcatttttcaagaatgtataattctcagaagaagaaaactgccgtgaggaagaaattggcagcaccaactctcaaaccggctccaccacctcctcctcctccttcaccacctgtgcagctagaatcaggcaaccgtactccatcggctgtagacagtcataatgtcgaggaggaagaacaaccagctgctcctaccattccagtcttagccgatctgttttctttcgacatcaaggattatctcgatgaaacaaaggaagacaccaccagtaaagccatagcccctctgtcggatgatgtgaagaaaacgcttgaggatatctctcatcggctagaagcatcactagacaacttggtgaccaactgtggctcgatccgggcaaggttcacatatatccaagctctactctcggatgaactagccgatgtccttactccagctgtctaccttgagcaacaccaattcaagctggagaaggccaggcagagattagccgatcgccgggaacgcaaagacattgaagctacaatccagcacaatcggcagcttgtgcatgtagagaaatccaagcttgatcagctgtctgagggctcgatcaagtcaaatatcgatcggcttgaagctcgtaagattgacctcatggcacaacttcaagaatgcaacgccgagctggatatggagcacaaaaagttagccgatctcccgaagtctatcgaagatcaaaaagccagactcaaatcggctatcaaaaatgttgcggatttgaccaagtctctgagagtcatccctggaacggatgctcaacatgcccaagctattgaggaagtagaacaaattaggcaaagggctatttcggctatccagcgatacttgtctcaatga

SEQ ID NO: 30947 - DNA, 405 bp, Oryza sativa
  Clone ID: PAT_MRT4530_35300C.1
atggggtcgtcgggataccaaccgtccgaggcatcgtcgtcgtcattgtacgaatcatccggcgcggcgaggtcgccgttgacggacccggtgttccagagggacctgctgcaggcgctggacaaccttcggagggtcatcgctgcagttgagcagtcgtacggcgtcgaggcgcacctgcaacaagccggcatgcttcccaagagcgcgtcctgcaacgacgccgacgccggcggcggcgacgcgtacgcagcagtcacgcggcgcaactcccgcctcatgcgccgcctcgagtcgcagctcgcgtgggacgggaggcgattcaccccgtgtttctccgatttatatcctttggtttcgttcgagaaatttggtggtgttcgtggtctctgcgatggcggttga

SEQ ID NO: 30948 - DNA, 2982 bp, Oryza sativa
  Clone ID: PAT_MRT4530_35301C.1
atggcatccacactaccacagcttctcctcatactgctgctactcacattgtactgctccatccaaactgttgccaacaccaccatcccagttcattgccatcctcaccaagctgaagcgcttctccagctgaagagctccttcattaatccaaacctctcgtcatggaaactgaacaccgactgttgccactgggagggtgtcacctgcgacacatcctctgggcaggtaacagcgttggacctcagttactataatctccagagccccggtggcctagacccagcggtcttcaacctcaccactctgagaaacctcagccttgctggtaacgatttcaaccggaccgttcttcctagtttcgggtttcagcggctcaccaaactcctcaggctcgatttgtcagaagcaggcttctttggtcagatacccattggaattgcacatctcaagaatttgcgtgctcttgatctttccttcaattatctgttttttcaagaaccgagttttcaaaccattgtagcaaacctgagcaatttgagagagctctatcttgatcaagtgcgcattactagtgaaccaacctggtccgttgctttagcacactctctccctctgctgcagaatcttagtttgtcccaatgtgacctaggtggaactattcatcgttcattttcccaactccgctctctagtggtgatcaacctcaactacaatggaatttctggaagggttcctgagttctttgcagacttctttttcttgagtgaccttgctctctcgaacaataattttgaagggcaatttcccacaaagatattccaggtagaaaatttgaggtctcttgatgtatctttcaatcctactctttttgtccaacttccggatttcccacctggaaaatatttggaatcactaaatcttcagaggacaaacttttctggtaacatgccagcctcgtttatccacctcaaatcattgaaatttttgggccttagcaacgtaggatctcccaagcaggttgctactttcatacctagccttccatctctagatacattatggctctctggatcaggcatagagaagccactgttatcttggattggaacaattaaactgagagacttgatgctcgaaggctataatttctccagtccaatacccccttggatcagaaactgtacaagtttggaatctttagtgctctttaattgcagcttctatgggccaataccatcatggattgggaacttgactaagcttatctatttggaactttcacttaacagcctcagcggtagaatcccgaagcttcttttcgctcatcaatcgttggaaatgctagatctgcgatcaaaccaactttctggacatctagaagacatttcagacccgttttcctcgttgttagaattcatcgacttaagctataaccaccttacaggctacatacccaaatcgttctttgatcttagaagactaacaaatctcgtgcttcaatcaaatcaattgaatgatcgagaagatggctatccatttcattacttccctacaatcaaatacctgggactagcatcttgcaaccttacaaaaattccaggcgcattgagagatataaaagatagactcaatcttagttccaacagactgcatggtaacgtacctataccactgacaactactagagatggtggtgttctcttggattactctagcaacagcttctcttcaattactcgtgacttcggcagtggtatggtgccatcctgtttaatacaaaatggtgatgtcaccatattgaagttaagggagaacaacttccatggcgtgctgcctaagaatattagagaaggatgtatgtttcagacaatcgatctgaacagcaaccgaattatagggaaactgcctagatcattgtctaaatgcaagagcttagaggttcttgacatgggtaacaaccagattcttgattctttcccatcttggttagggaacatgtccaatcttcgggttctcatcttgagatccaatcaattctatggttcagtaggactacctacagaaagtgatgcaaccagtaagtatttctcaggtttgcaaattattgatttagcctcaaataacttatcagggagtttgcaatcaaaatggtttgagaaccttgaaacaatgatgataaatagtgatcagggtgatgttttgggcattcaggggatatataagggcttataccaaaacaatatgattgttacatttaaagggtttgatctcatgtttaccaaaatcctgactactttcaagatgatagacttatcaaacaatgatttcaatggtgctatcccagaatcaattgggaagctaattgctctacatggtttgaacatgtcacgcaactccttcactggaagaattccatctaagattggtaaattggttcagctcgagtccttggacctctctttgaatcagctctcagaagcaatcccacaggagttggcatccctaacatctctcgcaatattgaatctctcatacaacaatttgactggacagataccacaagggccacagttcttgtcattcggcaacagatcattcgaaggcaatgcaggactctgtggaaggccgctgtccaaacagtgcaactattcaggcatagaagctgcaagatcaccatcatcctctcgagatagcgcatcccctcgaacacgtaccaggcagaagcagcgccgcactggcgagcagcggagcagcaggattaactcgctcctgcaacgcatccacgatgaccggatgatcactgagacttgccctgacctccaggtcgccaccttgcagttccaacctgtcgcgttttctctccggcgagttgcaagtggcagtggacctcactggaactggggattggggatcggggtgtatggacggctggtggagtggtggtgggaatcgaagtggggtgaggcgtcgacgaggtga

SEQ ID NO: 30949 - DNA, 290 bp, Oryza sativa
  Clone ID: PAT_MRT4530_35302C.1
ggggtgcagagggcaaccggccacatagagcacgatgtgcaaatgtaggacctgtacagcctagcaattcagaccaggtgaacacctcctccttgctggtgaggcgaggctcaaagcaacaccttcgcctcaaccgccgagatgtcatcgtcctcctctccggtgtgcaccgctcgccggcaaccaccttcagccgtcacggtgccgtcgtcctcctccataatggtaggacgtggggtggggtcaaaagcaaggatgacaggacgtcgggtagggtgggcctggcctga

SEQ ID NO: 30950 - DNA, 411 bp, Oryza sativa
  Clone ID: PAT_MRT4530_35303C.1
atgggtctaataatgttccaagtgttcaaccagttatggaactacttatgccgataccttgagagacgttctcttaacacctactccggtaaaaggcacacgggttacaaaggaaatatcactgttaggattgctaatgcaatgccaccttcaacacaaacagcatggcaagtgcaaggtgtagtccatgggatatcttctcttagggcctcaacattatgtccaaacagcacacaagggaagaatgatccagtccagcctaaaaacagagaagtttggaaggaacataatgctcaggtgttcgatggaaaaaccatatcggcggtgcatctctgtgccaccatcactgacgattgggaaacatggaaggccgctggactgctgcgcgtgatcgatggcgggaaagtgtag

SEQ ID NO: 30951 - DNA, 523 bp, Oryza sativa
  Clone ID: PAT_MRT4530_35304C.1
agcatgaattacatattctagcattaatacgttaaattccattaagatggtagcattaacaggtcgaattatccataaaacaacccctagattctagtattcaacagaactgtttcggttaataccaaaaattacacattagctctacatcactattcctgttgcgaattctttcaccctgtcaaaaatttacaccgaaaacttctgcagatttcacgagaattacaccatgggcacatttaggatgtgaatcttattaagctcagtctcacaatgcactcagctctgggttctcctgcactggagtgatttactgctgacaatttgcttctttttggacgacagtgcaccgatgtttcagtcattgccaaagccaaaatgaccgctagtccactggggtgccagggaaatttacgacgattggtctaatccgccttcccgagaccggcactggcatcccctttttttggtgatgggagccatacccacgtttcttgccctgagatgcaacctttggattttt

SEQ ID NO: 30952 - DNA, 118 bp, Oryza sativa
  Clone ID: PAT_MRT4530_35305C.1
acgcctagagcctcctcctcttcctagtgccggcatgggcacctggacctgctgctggtactaacatgcgcaacctctaggggaagactgcatccacatacacgaccgtctactcctt

SEQ ID NO: 30953 - DNA, 1102 bp, Oryza sativa
  Clone ID: PAT_MRT4530_35306C.1
gggataactataggacagatcctattttttttcttttttttttttttttttgtaacagaataaaacaccccttttttcagcttacatatatgagtacaatattctggttttacatgacaaacaccagtgctaaaaagaatcgataaaatgtcaatgtggcaagagaaaaaagaaaaaggagagaatttttttcgttttcacattacaatttatacaacagaaagcatccaatccctgtcttctgcacactcgttacaacattaagatcaccatgacgcatcctccagaaaccttcagttccagctcccaagcatatttgacgggtgttaaagtatgtatatttctaggatttgaatggctctaaaattggatgtcaaaatgaattcacaagagctgcgaacacaggaaagcagatacaaaatcctagagcgagacattgtacatcatcatcaggcaggcggcgtatcacagtatggtacacccacatctgttctgcttgggggaattcgcaagctgcttctcactgtttttgtcgggttgtggagggcgtactaccacatgcattgtaattacacctcctggaacctctcctactggaacacgggactcagcaagtgtccggttattctccaatatccgtccggcattaatgagcttcaggtcattgacagtttttggagttatttccttatcttgcggccaccgagcgaggatgaactccttgagcgcggagacggtggtggaggggtcgtacttgctcgggccgatgtccgtaccatcaaaaagccggaacttgacctcgatcggctccttcccgccggccatctcccggccagatcgccgccccccacctcctactccccaagatccaagaaaccccggatcagaaatccatagcaccaaacagatcgcaagaaatccacggggccacgccaaagatcgggttttgatgaacaattcttgcttccgtgtgggggttgaaagcgagagggcggcgactcggtgggagaagaagaggagaaggggaggaaggaaggaagaaagcagagacgagcctcgcgcgagacgaaagacgaggagggggcacaggcaccccggccgg

SEQ ID NO: 30954 - DNA, 437 bp, Oryza sativa
  Clone ID: PAT_MRT4530_35307C.1
ctagaggcaggaaaaggctgggaaatacattcttctatagatcctcagaaggaatgcagtcctgccaatgtcttgattttaatccagtgagtctcatttagtcagtgagcctacgataataaattgcattgtttaaatttgtggtgagtttttatagcaaccacagaacactactacagaggaaagagtgttaaacttttctgaccaggaaagtttgggtttttttcctccctggctttctgacttatgttcatgctttgagccctagttgaaatgttctaccttttctaagcagagctctctgttctctttctgaagcagccttgcctgatactttctttcacagccctgtgcttttagtagcactttttacaaattacagttgacatcaggttttgttgcaatttgcctacagctaaaacattatatatatctca

SEQ ID NO: 30955 - DNA, 348 bp, Oryza sativa
  Clone ID: PAT_MRT4530_35308C.1
atggcccaccgcaccgcgtccgctctcaccaccggcgcgtccaccccctcggcacgagcccggagttcgcacggggaggaggaggaggaggaggcggcgaggtcgaggtcgatggcgatggagaacgggctcgattgccacgacggcttcggtgggcggcgagccggcgatggcgtcggtgggcggcagcggcaggcggcgagggcggcggatccggcggcggcgccctcgagatccacggccatctgcctcgaggagctgccggcggccatgctcgcgactgatggtgggagctatgggagggggaaacgcaatagacgagtcaacaacgacagcggcaatgcctaa

SEQ ID NO: 30956 - DNA, 231 bp, Oryza sativa
  Clone ID: PAT_MRT4530_35309C.1
ggttgtggatggtggacgaagggaggaggagggacgcgtgggaaggggatccgagcggcggcgaacgcgatgcgagatgaagtgcggagggttagggttcgaatcagggtttcccaaaccgtcggggccaggattaccggttaccccgcggaggttactgcggtacttatattaccgtacccccgcagtaagcccggtaaccgcggtaaccgcgcggttaccggcggtaag

SEQ ID NO: 30957 - DNA, 476 bp, Oryza sativa
  Clone ID: PAT_MRT4530_3530C.1
atgacattctgcgtgcaattggatgttcgggatcgttcccctccaagcgaccaagcccacggcctccatcccccaaaatcacgcccgatcgatggggacgtcatcctctctcctgattccttccccagaatcccgtccgcgcgatctcctcctaccccccgcgattgcggcctccgatccccttcctcacggccttaccctgcgccacccgagaaaacgctgtcacttcctcctcccgcgcctttgccctccccaatcctccggtctggaagcgccgccgcagatcaagcgaccctcgtcgccgtcgggtcaggggcgctgccgcctctccaccgtcatgtcaagggtgcctcctcctcctcgctgtcagaccccctcgagaaccctagaatcctttggacgccatcaaataaggagctgcctcgacaccttcacgccaccagatcgctgtcatgccgctgctcgccatatcacac

SEQ ID NO: 30958 - DNA, 213 bp, Oryza sativa
  Clone ID: PAT_MRT4530_35310C.1
cttatgtagaatggggacggtacaaaaacaaatgaaggaaagaaggatattactctcgacatggggctactagttgttggtaccaaggaccgatgagagatatatgaaagactgaggaagcttatggaggaaaaaaaacaaaatgatgacattattatgttgatagacgaagtgagcatgctaattggagcaagtgctagtgaaagagtaata

SEQ ID NO: 30959 - DNA, 675 bp, Oryza sativa
  Clone ID: PAT_MRT4530_35311C.1
atgacttcactagaagatgaaaatgatggctctgcagatctgccgatccctcgcccagtggcagctgagctgtgcaagtatgatggcggcttgatctggggcactaactggttgcgaatccgtcatgccgcagaaaagtggaataagaaagttggaaggggtaacaattcactcattcgaactaacctggctcgctgtgagatgaacgaagttagtggtaacgtggtaggtgatggcggagttgtgccctggcccctgtgttcccatcctgactacaccattgatcgtgcgagtgcttctttcgtaactcgacgactcaacgattgggattggggacccgtgtccaacgggggcaatcggcgtctggcgactaggatcgagagcagcgttcagcaagcagctatgtcactatatagcaatgctcatgaagaacatgaattgggaaacctgctcttgaccgtgcaggaaaaaacgaagctgctgctgcttttctctcatgatctcatcagagaacaaaacaatcaaaatgtcggaatgggccaaaaacactgcaccggcatctactcctatttcatatttaagaaaaaagggagcaagaatccccactatgacgaggcgatcgatgccctaaccggaattcagcgcacccaggcacggagttaccgcaagcgcgaa

SEQ ID NO: 30960 - DNA, 347 bp, Oryza sativa
  Clone ID: PAT_MRT4530_35312C.1
ggaagcccaagcaaaggacaagccccttttttattaaaccccggccgatttggccaaaagcttaatccttccggggggggataaaccaccgggcttattatcttaccaaaaaaaacaaagggaaaattaggggcctttgatctttttggggaccgggcaaccctggaacccggaaaaaaaaaaaaagcctagaatgactggccgggcttttttttaaaaaaaaacttggattattctttttaccggagaactggaaacccgggaccccccccaggggatcccctggaggggcccctctttccccggtgggggtatatcccaaccccctaagaccccggggggaaaaa

SEQ ID NO: 30961 - DNA, 144 bp, Oryza sativa
  Clone ID: PAT_MRT4530_35313C.1
atggcgtaccttgcaccgaaaggtagcctttgggtaaagcagctgttggaattagcacctccatcggaggaggcagttggaggggcagatgatcaaggccttgttcgaggcagtcctgatggtcctcttcgccggcggtattga

SEQ ID NO: 30962 - DNA, 417 bp, Oryza sativa
  Clone ID: PAT_MRT4530_35314C.1
atgggtggggcacacctgtcaggcccgtcccttcctctcgccggtgaaatcggagggggagaacaacatccgcccgtgcccggcgccccagtaaccccactgtccgcgcctcgcccacgtgtgcgcgccccactccacgcatcccgcgcccgcaacggccgcacgcggccccagttcctcccggcttcacgccccgacatcgcccctcaccgccgccgttgccgcctaccacgggagagagggctgctgcctagccgcgccgtcgccaccgccgcgctcaccgagcccgcctgctcctcgccaccggaacacgtctcgcctcagtcgccggtcccgcagctgcccgtccgcgccctctgccgccaggttgtcgccttcctcaccgccgccgtcgtccccttccgcgccggccggtga

SEQ ID NO: 30963 - DNA, 540 bp, Oryza sativa
  Clone ID: PAT_MRT4530_35315C.1
agtagctacaccagatcaagcacactaagtgcatgatggactgaagaagagcctcgcttctaatgatagtgcacagagttgctgagtgaacatggatcatctatggaggatccgtaactggtaccaactgcatggagctgacagcaaagcctgatgttgatggttttctcgtcggaggtgcttcattgaagcctgaatacatcgacatgatcaactcctccacctgaaagtacgactaagatcttgaccccatacaccgttaacgggccaagatacctgacaaggatcatacctttttctgtgcttatggcatgctattagctattcggctggagcagctactatatatgctccactgtacttccgtgaagctacgctgagcatagagcaacgctcataatgcacaccactgaacatactaccataccaatcatgttgatctcctcatgcctatagctatcatcatgtgagttttagatcagatttcactggttcctatatctattctcgatggcatatcagtgtgataaatcacgcatc

SEQ ID NO: 30964 - DNA, 1148 bp, Oryza sativa
  Clone ID: PAT_MRT4530_35316C.1
cccacgcgtccggtcagaggtcacacagctcatcgtctcgagctacctagctggaagaagaagaggaagaagaggaggaggagctcgtcggagtttagttggtgagttcgccggagagatcgatcatggagaatctgaaggcgacggagctgaggctcgggctgccggggacggaggaggaggcggcgccgccgccgtcgacgcccagggccggaagcaagcgcgccctcgccggcgagcctgatcaggccaagatcaagcccgccgccgccgccaaggcgcaggtggtgggatggccgccggtgaggtcgtacaggaagagctgcctccagccgacgacgacgacgacgaagagcaagccgccgccggctgccgcggcggcggagacgcagcagaaggaggatgtcgccggcgccggtgggctgttcgtgaaggtgagcatggacggagctccatacctgaggaagatagacctcaaggtgtacaagggctaccgggagcttcgcgaggcactggaggccatgttcctctgcttctccggcggcgccgccgccgacgccgccgtcaacccgtccgacttcgccgtcacctacgaggacaaggacggcgacctcatgctcgtcggcgacgtcccattcgagatgttcattagtacgtgcaagaggttgaggatcatgaaggggtctgaagcaagaggcctaggagcaacaaggggttaaaaactgaacaacaacaagaagaaatcatcatcatgtgtgcatgagcaattcttttgttctttttgggttctccaagacatgcaatcatctcatctcctcattgcaaccttcaagaaagagagagagagaaagaaaaggaaagcaaaaaaaaaaaaagatgcagtgaaaaaaatatgtgaagcttaattggagtcatcagattgcaaagcatgcatgcatgtgtggatgtgtggctttaatttgtttttttcctcttaattaggtgttagaaaacacagaaggaatggaggttcgagttgagcctccatgtgtgtttgtacaaagcaaacatcttttttcttttacatgaatggttgattacttttgtaactggagggaagaagaatgcatgtatgcatgggctgtgtgtaaaaaaaaaaaaaaaaaaaa

SEQ ID NO: 30965 - DNA, 186 bp, Oryza sativa
  Clone ID: PAT_MRT4530_35317C.1
atggagcaggagcctgaacagaaggcaacaaagcaggtgtcccaggaagcactggtgcaggattttcaactgcagcttgcgggggagctactggcgccacatgagtgggagcaggaggcgcgcattttgtggtcgagtgggaacagctgggctgacagcgcccttcgccacaggagggcttgctga

SEQ ID NO: 30966 - DNA, 339 bp, Oryza sativa
  Clone ID: PAT_MRT4530_35318C.1
atggcaggtgatcttgcgatggccactgttctctccctgggctgcgccatggtgggcgccccggaggcgctccgcctcttgctggacctcgccgggcagagcagccccatcgccggcgtcgtcgtcatcgtcggcgtcatctgcgccgtcacggccgccaccgtgctcggggctatgctcctggtccgcttcatccgcgtcgcgggcaatgcccctgacccaaccacggagcgcttcgcgcgggtgactctgacggtggccgtcgccgtcgcgctcctcgtcgctgcctgcctcctcgccgtccccaccgttccctccgccacgttcgcccgcgcttga

SEQ ID NO: 30967 - DNA, 1215 bp, Oryza sativa
  Clone ID: PAT_MRT4530_35319C.1
atggaggaggccaagaagggccatctatccgagtatccgctgaaccgagaccggtgcgttggtgtcagcagcaacggccttaggtatgtcaaggtgcgcgcacacaggcaacagcactgcccgagcaaatcgccggtagcacccccgcctctctgcgacgattgtcgggccggccctgtcacgtcctcggtcctgtacgaccacagcggtgcatgggcagaggagcgcatgctcaagcttgcagatgtctggagggacgagagctaccgatccacgggtctaccgaaggaggtggtggagttccctctcattgacccgttcgatggtaacatcgtctacttctgtatcaatgaaggcaaagatggcgacggccgcgagttctgcgtccatctagggaccaagcagatcaaggcctacagcagcagctacaagggcttgaacaacggagccttggagcctgcgacggcgcggccgtgcgccggcggccagggggtggcgcggccaggcggtggtgcggccaggcatcggcgcggccgtgcgccggcggccaggcgaggggggcgactcggccggcggccaggcgaggggggcgactcggccggcggccaggagtcccggcgcggccagccggcggccaggaggggcggcgccgtcggcgcccaacgcaagccggcgcggcggggaagtgcggtccgtgcggtggcggtgcgtggccgtgttgcgtggctcgacgcggtgcggaggccgggatggcacgacggcggatggcggcgggcggtcggcggcgcgcgcctggcggtggcgcaactggcgcggcgagccgaggggtgcacccatgtggcgggccactaccgggctgtggcggagtggaggaggaactcaatcggccgggcagtggctgcagcctgtaggtgcggcaacggcacgacgtctgtgttgtggcggcacgtctgccgtgctgggcgatgcgtcctccaggtgcgggcgcgactgcagttggcacggccggtgtggccgtcgggtgcgcggtcatggtgcggccatgtcgcggccaacagacggagcatggtgcggccgtggtgtcgcatgtgcgggctagcggccatggcgcgggttcgctgccgtggcgtgttgccgtcacgccagtgccgtgtttcgtcgatcgcggtttccaccaatcggcataagccggcgactccaagtcggctgtggtag

SEQ ID NO: 30968 - DNA, 118 bp, Oryza sativa
  Clone ID: PAT_MRT4530_3531C.1
cccacgcttcggcacgcgtccgcggagacatgggaacacataaaatcccctatggtttcttccgacattggcttgctccctctggggtaagggtccgtagcccaaccttcttacccaa

SEQ ID NO: 30969 - DNA, 430 bp, Oryza sativa
  Clone ID: PAT_MRT4530_35320C.1
gccggtcgtgctgtccggctccgtcgcgctccccacatgctcatcatgcccaagttccaaggacccgaggtcagcgccaaacacagactgaattttactcctggtttacagacgatccaagtcaaactgttttaaattttgatcaaagttttataggaaaaaaataataataacattttcaactaagaccaatttgttataaatatatattcaattattggtttgatgaaacttatttagtattataaatattatcatatttgtgtatgaatttagtcaacttaaagcagtttaactttgattaaagtcaagcgtcttataatctgaaacagagtaagtatttgtttattaatttacttattattttccaactacattcctggatcacatgcaagtaaatgttgttctaagatcaaaaaaaaaaaaaaaa

SEQ ID NO: 30970 - DNA, 468 bp, Oryza sativa
  Clone ID: PAT_MRT4530_35321C.1
atggccgctagcccgcacatgcgacaccacggccgcaccctgcaaggcggcgtgccgacgtgccatggatgtactggccagagaggactgaagatgaaggaaagaagcaaaagaagaaatggccgtacatgctccgtctgttggccgcgacatggccgcaccatgaccgcgcacccgacggccacaccggccgtgccaactgcagtcgcgcccgcacctggaggacgcatcgcccagcacggcagacgtgccgccacaacacagacgtcgtgccgttgccgcacctacaggctgcagccactgcccggccgattgagttcctcctccactccgccacagcccggtagtggcccgccacatgggtgcacccctcggctcgccgcgccagttgcgccaccgccaggcgcgctgccggccgacgaccacacatggcaaggcgccatcgggggcacagagaaaggggaatag

SEQ ID NO: 30971 - DNA, 796 bp, Oryza sativa
  unsure (1)..(796): unsure at all n locations
  Clone ID: PAT_MRT4530_35322C.1
gctcgtggtggtgccctcttcctgtccccttcctgttcctgcgggtgctctggcctcccattcaacggcccctttcctggttcttgcggagccgcgctccagctcccctggtgcctccctcgggtgcgtgtggtacctcctcaggatcgggtttgccgcccccgctcccgcacgcgtccgcccacgcgtccgctgaatgttcctcgtcaaatattggttctacagaaccaatgacaggcttcacatcggcgagggatctttgcattgccatactgagggaagatggactcataactgaatctcgaactaaaatcaaggcagaggaattgactggttatgatgccgacttactgttccaatgcaaaacttgtgggaaatcagaccatccattaaagatgcttatatgtgattcttgcgaagcagcgttccatctgtcttgttgcatccctcgtgttcatgaggtaccaactgatgaatggtattgtctgccatgcttcaggaagaaaccaaagagtcagtatggcaagctgtcagagggaaaggtcaaatcttcagggaatatcaaccaaaggcctcatggcatgagtcatatagagtacatgttacaagatacgtgctgatatgttactggggttcgaantggtatagactntcaagcagaagtgccagaatggtcttgtcctacttccagcatgnttgncttgttattccttttcttggagnggggatgtttaattgcgaggagccctctgaatttgattctgctgacctcactaaactgaactggtcaaaaact

SEQ ID NO: 30972 - DNA, 276 bp, Oryza sativa
  Clone ID: PAT_MRT4530_35323C.1
atggagacggcggcagcggcgatgctagagaccagggtggggaggtttcgggggccgagcatggcggcgctactggtggagatgtgggagccactggcgatgactccgactctgacggcaccgacagtgaggaggaggaggagggatccaaggcgagctcctccgttgtacatccagctcctccctcgtaccgtcatacgtgggagagagacagagcaaatgaaaagaaaaatagaaagaagaaaaactgcaactctagggctgtcgttgatttga

SEQ ID NO: 30973 - DNA, 460 bp, Oryza sativa
  Clone ID: PAT_MRT4530_35324C.1
tatttttgcttttgatttgctataggctaatgatgatacagtaaacacctatcaaacaggacaatcttttgaaaagtgaaatcgaggagttacatgtgaagggaagcctaattcaccaggaaaacatcgaactttctagaagcctaaatgtcatgtcgcaacaaaaattggaactgtataacaagcttcaggcctgtgaacagagaggtgccacagatgcaaatgaaagttccagcactccatacagctttcgtatcatacaaaatgctaatatgcctcctagtcttgaattgagccaatcacagcaaagagaaggggagtgcagcaaaacagctgctccagaactgggcagacttcatctgccttaagactatgccgtacaagctggacgataagtgatcaatttcaaacaagcacaaagcctttcagatgcaagtaagtattttgtgatagctgagac

SEQ ID NO: 30974 - DNA, 379 bp, Oryza sativa
  Clone ID: PAT_MRT4530_35325C.1
ccatcaattaaaatttcgtgttatttcttatgagcttccttttgcacatgctttcagtaataggtttcttatgggcgaataactgctacaagttttcaacattttctgatgggtctaacattgatatttctgcctccactattatgatggattttttttggtgggcctggcatgtttacatatgatttttttttcatgttatcacagagaaggttccccttatctttctactcctttttatgtgccatacaagtaaaccaaatatacaattgtgacaaatatatgtagggacaatgataacaacaaatcatataggctaagaaaataaggaaatttcttccacaacaaatagcatattagttgcaaaaaaaaaaaaaaa

SEQ ID NO: 30975 - DNA, 181 bp, Oryza sativa
  unsure (1)..(181): unsure at all n locations
  Clone ID: PAT_MRT4530_35326C.1
ctagggtatgcgcatctctatgtgaccgccccgttctttttttttttttttactgtccatgaccttntttnttggagaactccttcaggaaagaaggtgatggacagaaaataaaaaaaaactccccactttttgttcacttgctgctactatacacaacaaaagttcaacccaaaaataa

SEQ ID NO: 30976 - DNA, 594 bp, Oryza sativa
  Clone ID: PAT_MRT4530_35327C.1
atggcgaaacaagctgcgccgccccccgcccctctcctcccctcccccgcctcgccgctgcccgagccgccaccggcaaagccaggcagctacaagcatggcggcagcggggctctctctccctcgctcgcggtcaaggcggtcggggtgccagcaagacagagctcagggccaggcgccgacgtagaggaagagccgatggcggtgtccagatctggcgccaggatgcatggatcctgttcccccatggccggatctgttgttccgggcggcaaagaaccaggcacggatggccacgggcggctagctggggaggtgtggaagatgaccgtatttggccggcacgacagcggcgagaggagtgctcggaggccagcttggtgcgtagaggcgcggccggtggcagcggaggccgacacggcgcgaggaggcgcagccggcggcggcggaggaggagatgctggtgggtgcggtgcggtctacagtgcacgaaggctggccggcagggggcgccggtgcagtggtcccacatgtcgggagaggttggacggtggtggagcatcggggcatcagacgtggactcgcaggtggtga

SEQ ID NO: 30977 - DNA, 1967 bp, Oryza sativa
  unsure (1)..(1967): unsure at all n locations
  Clone ID: PAT_MRT4530_35328C.1
cccacgcntccgccatcgcattcagttgcgttgatccgatggcgcagtagcaaaaccgagtctcctctcctccctccctccctcccttccctttgccatcaaacgcaagccgggagaagcaccactacctagatagaacaataaaaattgctgcatccgtcagagctggccactacaaaaaccagctgcatcacaggagagagcaggcagagaggcagctctccagctcgcgtttggggttgaccagttactccggcgaaccgacggcaagccggcgccggcggcgagggtcgtcgggagcggaagagagggagaaagaatggccaccaccgcctccgtccgacctcccctgctccgacaagcagcaggttcagaaaaagcctcactcctttgcaaaccaaagcagagagcttctgtcagaagaagaagcttcactgccagggccagctcgaatcctgtgagcatcccgaagcaatggtacaacctcgtcgccgacctgccggtgaagccaccgccgccgctgcacccgcagacgcaccagccactgaaccctagtgacctgtcccctctcttccccgacgagctgatcaggcaggaggtgaccgaggagcggttcatcgacatcccggaggaggtcgccgaggtttacaagctctggcgcccgacgccgctgatcagggcgaggaggctggagaagctgctgggcacgccggcgaagatctactacaagtacgaggggacgagcccggcggggtcgcacaagccgaacacggcggtgccgcaggcgtggtacaacgccgccgccggggtgaggagcgtggtgacggagaccggcgccgggcagtggggcagcgcgctgtcgttcgcgagcagcctgttcgggctcacctgcgaggtgtggcaggtgcgcgcgtcgtacgaccagaagccgtaccggcggctgatgatggagacgtggggcgccacggtgcacccgtcgccgtcggcggcgacggagtcggggaggaggatcctggaacgcgacccggcgagcccgggcagcctcgggatcgccatctcggaggcggtggaggtggcggcgagggacgccgacaccaagtactgcctcggcagcgtgctcaaccacgtgctgctccaccagacggtgattggggaggagtgcctggagcagctggcggccgccggcgacgtccccgacgtcgtcatcggctgcactggcggcgggtccaacttcggcgggctggtgttcccgttcatgcgcgagaagctcgccggcaggatgagcccggcgttcaaggccgtcgagccggcggcgtgcccgacgctcaccaagggcgtctacgcctacgacttcggcgacaccgccggcctcacgccgctcatgaagatgcacaccctcggccatggattcgtccccgaccccatccatgcaggagggcttcgctaccatggaatggcgccactaatctcccatgtgtatgagcttggattcatggaagccattgccatccaacaaactgaatgcttcgatgctgcgttgaaatttgcgcggacggaggggatcatcccggcgccggagccgacgcacgcgatcgcggcggcgatcagggaggcgatggagtgcaagaggacgggggagaagaaggtgatcctgatggccatgtgcgggcacggccacttcgacctggcgtcctacgagaagtacctgaggggcgacatggtcgacctctcccactccgacgagaagctgcaggaagccctcgccgccgtccccaaaatctgatcaatgcgatacaaaaataatcatcagtaaccaagaagaataatctctgttgttgtgttcttggcatgttgttgttttgccttggcgaccgtgttcatctgctgttgatttagggacgcatatggactgaataaatttgatcaataaatgaagtagtttcccctaataggggaatgtttggcac

SEQ ID NO: 30978 - DNA, 1656 bp, Oryza sativa
  Clone ID: PAT_MRT4530_35329C.1
atggcggaggcgagcagtagcacccaccggcgtcgatcgcaagctcagatcagcaagatagcccttcggtcagacgtgtggaatcacttcacccgtttcaccgacggagatgggcgagccaaagcacggtgtaagcactgcccccaggtgctcggcgcagaaaccaagagcggcacgagtaccctttgggcgcactggaatcgccacgagcaacgcgaagaaataccaggcgaagaatcaccacaacagacaccaccaccgctgccgcctgctggccctgaagaggcggccagaggagaccttgctcggatgatcgcgttgcacgggtacaacccgtcagtcgtcaaggacgactatttcagaagcttcttgtgccgtctcaaccccgagtacgaggtgccctcgcgcctcgccatcgaggagatgtgtgatgctatctttgatgaaacaatgaagggcctcttctctaaactacacgatgttcctggaaagactgcttgtatggatccagaattcaaagatgactatattatctctgacttggagaatttacatttgactagacaagagcgccatcagcttctttcacaacttggtctagattatgacctatgggcatatgatgaaaagtggtactcggaatactgttcgatggaagttcttcgcaagaaaggctctgcaataacgaatacagtatttgcagaactattgtgtatgctttggggagaaatataccgttccattcaaaggatttctgcacccgattgtcccacttcatcaaatctttgtctcatagagttgtttaagctgagggaagtttttaagcatcaactagcacaggcaagtggagagaatgcaattgcttacaatgaatttaatggctgttttggcgccgaagatcacaaagatgttgcagacgttcttacagaagcaatggtcgctatagacaaggccatacaagattcctacccggtctggtctataccacttgtactggatccccggtacaaactcgcacgcacaaaatttattttccaaacagcctttagcaccgaggctgcagccgactacatctctgaggtaacacgaaatatcactgagctatactctgactatgttgaagatgatgatagtaccatgaatgcggtggcagttggcagcactgatccactgcaagaagcatgggatgagcaccgccgagcagaagcccaaacagacctcgaccgttatctgaaagatgagctagtccatgatccagcacaaggttttgatattctcagctggtggaaggttcacgggtcagttctctatccaagggtggctcagatggcgagggacgctttggcaatgcccacatgcatacgtgttgtcgacgacgacgacgacgccatgtgcgcggcgctggtggcggagctgcgtgagctgagcgagcgcgtggcggacgagcgggagtacgcgcagacggggcgcgcgtgcgtgctcgccggcatgagctcgcacgggcagcagcgcgcctcgtcggtgcagctcgccaaggggagttccgtgtacgggtgttcgtccgcgttcgcgacaccggagatgcagaggatggagaagctctcggtgattttaccgccgtcttctttcactcagacgctgagcaaaatgccatag

SEQ ID NO: 30979 - DNA, 447 bp, Oryza sativa
  Clone ID: PAT_MRT4530_3532C.1
cccacgcgtccggcatctttgaatttccccagtgaaagtgtgctacaacctttagcatcacaccatttttaatcataaaagtagtgaaatatggtataaatggaagctaaaaagagtttttcagggaaatcattattgacatgacacatggtttggatgttaaatagagaaagagggaactgctaatctggtgcctgactgctggcttagtatcattactttttatcatatggcttagtatcattacttcgtatcatatcctatatgatccccatgtatcaaatatcattatttgtcatcgcattgatgttttcccaagcatataattagtctgttactgtggaaagggacaaggtaaaattctctatatataggtaaatttgcatcttaataaggcgtaatggaacttttaaaactcaagaggaacaggggtacctcacaatttta

SEQ ID NO: 30980 - DNA, 234 bp, Oryza sativa
  Clone ID: PAT_MRT4530_35330C.1
atggcgggtgacaacaccataacaaagcttttggaaatgtgccaagtacttagagcatggtccatggaggttggaggccacatgatcgtagtggtctcatgtgggctatatgggctgaaaccaaatataggccacaccttccacaatggaggtcacactaggggtgaaaatggtaatggccatggctctactggtgaggctccgattgggcatatggtggagcaggcccaatga

SEQ ID NO: 30981 - DNA, 2058 bp, Oryza sativa
  Clone ID: PAT_MRT4530_35331C.1
atggcggaggcgagcagtagcacccaccggcgtcgatcgcaagctcagatcagcaagatagcccttcggtcagacgtgtggaatcacttcacccgtttcaccgacggagatgggcgagccaaagcacggtgtaagcactgcccccaggtgctcggcgcagaaaccaagagcggcacgagtaccctttgggcgcactggaatcgccacgagcaacgcgaagaaataccaggcgaagaatcaccacaacagacaccaccaccgctgccgcctgctggccctgaagaggcggccagaggagaccttgctcggatgatcgcgttgcacgggtacaacccgtcagtcgtcaaggacgactatttcagaagcttcttgtgccgtctcaaccccgagtacgaggtgccctcgcgcctcgccatcgaggagatgtgtgatgctatctttgatgaaacaatgaagggcctcttctctaaactacacgatgttcctggaaaggtcagtatagcagtgggtacagttagaaccatccgagggaatatgttgtatacagcgtgccacttcattgatgatcaatggaatcttcataagataatcatggatgtttacgcggatgtaccttttcttaactaccatggcccattgttgggagttgatgaagtttgtctcgatcgggatctctcccgtgatatttccattgacaaagttatggttcgttttaaagcgcgtgaggttttacataatctgttcatgatgatatgggaaacaaaggggaacgatattaaccttgaatatgaactgaggaatgaaatagaggataacccattcaaaatcaatccaaacaggagacagctattttataccacctacatggacaacgtgattcactcgattgctagactgcttgttatggatccagaattcaaagatgactatattatctctgacttggagaatttacatttgactagacaagagcgccatcagcttctttcacaacttggtctagattatgacctatgggcatatgatgaaaagtggtactcggaatactgttcgatggaagttcttcgcaagaaaggctctgcaataacgaatacagtatttgcagaactattgtgtatgctttggggagaaatataccgttccattcaaaggatttctgcacccgattgtcccacttcatcaaatctttgtctcatagagttgtttaagctgagggaagtttttaagcatcaactagcacaggcaagtggagagaatgcaattgcttacaatgaatttaatggctgttttggcgccgaagatcacaaagatgttgcagacgttcttacagaagcaatggtcgctatagacaaggccatacaagattcctacccggtctggtctataccacttgtactggatccccggtacaaactcgcacgcacaaaatttattttccaaacagcctttagcaccgaggctgcagccgactacatctctgaggtaacacgaaatatcactgagctatactctgactatgttgaagatgatgatagtaccatgaatgcggtggcagttggcagcactgatccactgcaagaagcatgggatgagcaccgccgagcagaagcccaaacagacctcgaccgttatctgaaagatgagctagtccatgatccagcacaaggttttgatattctcagctggtggaaggttcacgggtcagttctctatccaagggtggctcagatggcgagggacgctttggcaatgcccacatgcatacgtgttgtcgacgacgacgacgacgccatgtgcgcggcgctggtggcggagctgcgtgagctgagcgagcgcgtggcggacgagcgggagtacgcgcagacggggcgcgcgtgcgtgctcgccggcatgagctcgcacgggcagcagcgcgcctcgtcggtgcagctcgccaaggggagttccgtgtacgggtgttcgtccgcgttcgcgacaccggagatgcagaggatggagaagctctcggtgattttaccgccgtcttctttcactcagacgctgagcaaaatgccatag

SEQ ID NO: 30982 - DNA, 408 bp, Oryza sativa
  Clone ID: PAT_MRT4530_35332C.1
ttgctgctctcccttctcctctcctcaattaccacgccgcagccgcagccccccaaccctagctagtacggcgggcgacctgagggggtagctgcctacctctatacctgctatctccgttcgatccgggtcgggctcgtgctgctgggggcgggggcaatcaatcggcgagctcggtgatccatggccgtggctgtggggtggctgtgagggtgcccccggcggcgctcccctccgcgcctgccggcgagggggctcggactgaagggatctaggcgagctgaaaattgaagtgcaggcaaggagataagagcagcgtccaaattgtgagtacttcattagcaggaggtagtggttgggcttgctttgcttctttgcaatttggctttggcgaggtaacaatggctg

SEQ ID NO: 30983 - DNA, 207 bp, Oryza sativa
  Clone ID: PAT_MRT4530_35333C.1
atggccgcatggtggtgtaatctagtgtgggatcctagctttggcttggttcagatttacgcacaagattcaagtgcagagaaggtcgtcccgtccggcgatcgtctccactcatcatgcccaaagggacgagcacagtgcgaacaagatcatcccgaccggctgaccacgcatgcagcctccaccatcgtgcggtcagcaaatccg

SEQ ID NO: 30984 - DNA, 1341 bp, Oryza sativa
  Clone ID: PAT_MRT4530_35334C.1
atggacaccatcttttctgctgttcttggtgatctttttagcaggtccatatccttcgtgattgatatataccatcaccatcaccagggcggtgtggaggagaatctacagcagttacaccgcatgctgttgcgaatcaaagccgtcgttgaggaggcagacagtaggtgcatcacaaaccaagcgatgctgctgcaactcaggatgttgagagatgtcatgttcagaggctactatttcgttgataatttcaggtacagaatctttcaagctcaagctaaagacgaggtgggtgatcactctctcgacctgccccctttcaatccattagaacgattttttatcttcactagagcaaaactggaaagggtcatcaagttcttgctagaacaacatcctctttgtggtgcaaaaggtattgatgtgcttccgataattggaccaggcaaagttgggaagagcactcttgttgagcatgtctgccgtgatgaaagagtacgtaaatgcttctctacaattgttttctatggcccggatagcattgataatggagacatggtgcttcttccagacaccagggcaatcaaatatcgaaatcctgcctcaggcgaacagtcattagctatcattgaacttgtcgatgagatggatgatgaaacatggagaagaatattacacagcttgagaggagaccacataacatctgtgagtaagatcataataacgagtcgatcaagaaagatagcaacttttggaacaacaaaagcactccaattagattttctcccaaaagaagccttttggtatctgttcaagacggttgcatttgggagcacaaatcctgaggaggagccgaagctagcatccatttgtatggagatcgcagacttggtgaatggatcattcatggaatcaaatgttgttgggagcatactcagatctaatattactgctcaattctggtacaattttctcaaacgcttgaaatatttcactgacagacatttccgtctgctaggtgaacacccaagagactcatacaagtctaaccgtgggcgtacttacatatggatgcataaaaactactatggtgacggtgacgcagcgacatacaatctttaccatgcaaattctgcaggactaaataatctaccaatgatacgaatgagcgatatgcttatcggaaatgttaagcctcagaagaaatgtgaagccctggaatggcaatccagcatacctccatactatagctatatcgtgcaatacgggatacttgcacggcagccgcttatgctacctaaaaggaagcgatcccgggcgctcttagaggagttagtttga

SEQ ID NO: 30985 - DNA, 422 bp, Oryza sativa
  unsure (1)..(422): unsure at all n locations
  Clone ID: PAT_MRT4530_35335C.1
aaaaaaaaaaaaaaaaaaaaaaaggaagaagggggggggaaaaaaaaaaataaaaaaaaaaaaaataaaatacaaaataccatacaaagaaataaaataattatataagggaaacctacattaaattaacttggccgttggtttccctctaaattgactgaactggccctggctttacccagcttagggggggtgtacctcgtcctcccctcccttgtttgcgttgtggcgaattggccttctccgagcggccttaccatccgttgggccccctctttggcgcctgggccgcgccctgccttgttgcattaagcgtggggggcgccctggccccccccattaagcccggtggggttgccgcccccttgctccccttcctttccctttcttaccttcctttctcccctccctttcnctttttt

SEQ ID NO: 30986 - DNA, 1124 bp, Oryza sativa
  Clone ID: PAT_MRT4530_35336C.1
gccaacacacaaaaccagaagaaggctagcaccagcccgacgctaatcgtgactgaccgccgctaggccaacaaagaaacacagccgagatcagatttcggctaggggatgcgtaaacgatgtcaccaaggagagaagcgacgaaaaaaccgtcgccaccgtctgtcaagatcacagagaggaccgagactaggctttcgcccggcatccacacatgagggatgatgcgccgcagaccacaccgcacccaccggcagttcctccacctcgcaccttgcccgcttccgtcactgccggtcgcgcctcgtcgcgccatgctggcctcctccgccgctgcccgcgcctcctcgcgccaagccggcctctcgccgccggccgcgcctcctcgcgtcgtgccggcctccgctgccaccggccgcgcctctacgcgccgatctggcctacgagcactcctcctgctactcccacgccagccaaatgcggtcgtctgccacacctccccggctatccacccatggccgtcaatgcctcgatctccaccgcccgacgctcccgcctccgcatccgccaccgtcaccagctgccaccgccgccaccaccacggcggctacatcgccatcttccagcagcagcgaaccgccgccgccgtcagccacagcagccgccaccacggctgctgcctcgccgaccgccagcagcatccagccgccgccgtcactgccaccgtcggcagccgccgccagccatgacctccgcgtcgtccagatctgaccagaggcgtcgccaccaccatcaccgccaactactacaccgccagcgccaccaccggctttggcggcaccccactgcctcacatcgtcagccgcacctccagagagagccccgccgctgctgtccttgcagccgcctagctttgccggcggcggctcgggcggcggtgaggctttggaggggagaagaagggcgggggcggtgcagcttgttcgcctcccgcgtcgccccgggacagagtgaccgggcgtgaatgtttttcctcaaatctactaaattctgaagtcacacatttttttctgggaattctgaagtcaactcatttgacgattgtgatcagaatgtacagtaat

SEQ ID NO: 30987 - DNA, 140 bp, Oryza sativa
  unsure (1)..(140): unsure at all n locations
  Clone ID: PAT_MRT4530_35337C.1
ctgcagtagagagaatnatcngagtnttgattgaagaagaagctcgtgcngtcatctaggcttcttttttctttcacggttccaggcttgctctgcctctagagagatcagagagccttaattntcgctttgtttnttnt

SEQ ID NO: 30988 - DNA, 500 bp, Oryza sativa
  Clone ID: PAT_MRT4530_35338C.1
ccggccgggcggccagacccactacccatcagcgttgtgcgcatcggcgaccatctgcggtcccatcaagaagaagatcatagaccacttccacaagaagccggtgccacccaagccagagccaagaccggagccacccaagcccaagcctgagccggagcacccattcctcgaccacatcccccacgcgtccgagcacttcttcgatcacttccacaagaagcccgtgccgcccaagccagagcccaagccggagcccaagccagagcccaagccgcagcctgcgcctgagtaccacaacccgagccctccggcgaagaattgatgaatatgatctgcattggatggacattagcatgtttgatcatgccgcagatgatgatcctgctcagcacaggagtgtaatttgtacttgattatcgggcatcagcagggatgtttgtactatttgcatatttttctctcccaaatgaaattatatatggtaaaataatttattt

SEQ ID NO: 30989 - DNA, 788 bp, Oryza sativa
  Clone ID: PAT_MRT4530_35339C.1
atgaaagtgaaacgcagccgaacattcgccggtggatttgcggtttcagggggccactccgtaggtgtgtgtggtgtggcccagccgagcagttgatggtcaccgctaagattgagcgtggaaacgaactacggcactgctggggtggggggcccaatgcagcagccaaaatgcgtgccatctatgatgcacatgttatacaatgtactccgtaccccacacagttaaagttggacaagtttgactttttttacgagggagggagtacgtatctctactttacaatgacattgattgtcgtacgagtaccgacagctggaatacgtggttcgaaacatacgtgccctggctttcctgggcatcaggccggtcgaggggaattccacaccgagctcgctgcccgcgggatcgcattgtttggcgggcagacgaaaatagcctatgcgaggaaggcgcgcctttttgacagccattgccgttgttaccggtaccggcgcaagtgcagtgccgcacgttggcccacgttgtttggcagctcgtgccgtccccgcgccactgctccaggaatgggcagccttgcgccagcagtttgcaacgcagcgctagctttgaatcgcgcagctgagtgcgtaacgctgaggaaagaaatgaaagcgaaggggattgtgccggtttgtgcagaaaagttagcgcgcacacatgaagaaagcactgtctttaccctgcatgcaactgacaaaatgtggcagaagcattactactgtcccatcgtaccagagaaaaaaaaa

SEQ ID NO: 30990 - DNA, 200 bp, Oryza sativa
  Clone ID: PAT_MRT4530_3533C.1
cgcacgcttacggtgatcctttacaattatcgccgctcactgaatcaagatgggtgtttactattgctccaccgttggagctgagggctcgactcccaccaactacctggggcaggagcttaagaaagacgcggcataccatgcgcacgaccatggcgagagctacaacatcaacaggttcaaggagatcgccaaagagc

SEQ ID NO: 30991 - DNA, 115 bp, Oryza sativa
  Clone ID: PAT_MRT4530_35340C.1
gaaggttcaagacacaaataatgagtaaaggtctgatcacataatagcccatggaggtctaacacatagcggtccaaccataggggcatggcaggcatagaacccacacataagt

SEQ ID NO: 30992 - DNA, 742 bp, Oryza sativa
  Clone ID: PAT_MRT4530_35341C.1
gagctcactatttggaggctgtcctttgtttttttttttttttttcgaggcaagcatacatcaataatgttatttacatacaattattttcagagcattcttacatagcttcctttttttataataaaataagaaaaacgtagattccaactcatactcccttttttcagttaagaaaagtgtaaaaatggtgaggaaatattgatctgaaaataacaccatcctttccctttctccctacgtaaactaagcctcttcattgcaatctgtttagatgataataatgcgatttctatctttcttcagcatccaaaatcatatggaacaagtcctttcagctcgggaccactaaacctgttgtttttaaaactttccattgggaaagattcaaagtttccctcaactggtattgttccacagagatcattattagaaacatcaaagattttgagatcagtgagacgagtgagttctcttgggatggatcctgtcaacttgttgttgtttagccgcaagaatttaagtgacttcaactttccaaatgattttggaattttaccctccaacttgttatcatacaaatccatgctaataagggatttcaagttaccaagttccttaggaatctttcctgttatctcattcctgtagagctccctgtaatcaagaatttcagtatctcttatgcataatccatttttggaaaaactaacttccacccccaaaaataaaaatttaaata

SEQ ID NO: 30993 - DNA, 1035 bp, Oryza sativa
  Clone ID: PAT_MRT4530_35342C.1
cgggctgcaggaattcggcacgagggtactccctccttccattgttacacgcgttcacaaacggccagcgagacgacgtcgtcgatcggcgaagctagggtgggtgcgctgcgcgcgtggcgccgccgcgagagacgatcaggccgggggagcaatgtaccaggcgatcccgtacagcagcacccggccgtggctcaggccggagccggcggcgagcgtggtcgacgtcgtgaaggtggagacgacgacggccgtcgcgggtcggggcggtgaggcggaggtcgtgggggaggaggaggcggcggaggtgcggagggcggtggcggagagcccggtgctggtggtggggaggcgcgggtgctgcctcatccacgtggtgaagcggctgctgcaggggctcggggtcaacccggccgtgcacgaggtcgccggcgaggccgcgctcaagggggttgtgccggccggtggggaggccgcggcgctccccgccgtgttcgtcggggggaagctcctcggcgggctcgaccgcctcatggccgtccacatctccggcgagctcgtgcccatcctcaagaaggccggtgccctctggctttaaatcaccatcatcttccttctctccttccaatttttttcttcctttcttcacaacatcgtgccatcgtggttcaatcctggccgttggattcggttttacatcgcggcggatttcctctaggatatttttcctcctccttttccgtagggtgtgctaagctttgagaaaaggaaccagagagagctaaagctaatgttgctagttaatagtagtaattcatttagcaaaatatatcttcgtgcgtgcgtacgtgatgatgagtattttactccccaccatgtgaatacggagcgagagaggaagagggacagtgacatttgccacatctgtacagttttgcatttctgaattaattaatgagaatgagacgttcattttgcccccaaaaaaaaaaaaaaaaaaaaaaaaaaaaaaaaaaaaaaaaaaaaaaaaaaaaa

SEQ ID NO: 30994 - DNA, 523 bp, Oryza sativa
  Clone ID: PAT_MRT4530_35343C.1
gagtgatcttatgcatgaatagtgaactacttgatgctgaataaaacaactaatcttatccctaggcgagcctgtaggtgttggccagcttctggtggtgttgttatgcacaaagtttcaatgtgacagggttcaatacatggttggaacagattagcacagtataggagacatggtatctgggatgtgttctgagaggaaataaagcgctcttcaaattactattttattgtctcatctaaccccactaccactcaagttgcaattcatatgacaccaacttgcattccatttatggtgcaaaattaggcagaaattctgtactccatggaaaactacacatcctaaagcttgatttccttgttttctaacggattgatgcagatgtgggctttgattctactgacggattggtgcagatcttcccattctctgttgtagttctttttccttgtttaggttactgttagtaacttctgttcttaatatgtgtttgttaggcaaattaacatcatgaaataat

SEQ ID NO: 30995 - DNA, 513 bp, Oryza sativa
  Clone ID: PAT_MRT4530_35344C.1
tcacggtcgacgtgtcctcctcctccaagccgccgcttcccgcgaccgacatcgatcactccgccggagcttgccaccctcttcgccattgcctgcaatttcgccggcccgggcacgtgcatcaccggcgacccacctctacctcccggcatcgacgtctcacatggtgcgttcaacgccccaggcaccaactccgacgccatcaacattggtgtgcctcccgctggccctaccgtgtccgccagcacccgcagcgccacagccggctttctcaacaccctcaatgcagccttcctcggcatgtctcgcgcgccccatgccgcccccgcgacatcaccagcctatctcccgcccaacctcgacgacgaagccaccgcgtctctgcacgcccaagccgtcaccgttctgaacatcaaggcgctgatccctgtcaccctcgacatccacgccagcaactacagtcattggcgccggtctcatcctcgtcacgctcggcaagtacgctctcactga

SEQ ID NO: 30996 - DNA, 693 bp, Oryza sativa
  Clone ID: PAT_MRT4530_35345C.1
gtagcagctcttgttccaaaacctgaactggatggtgagatgggagatgcccatgttgcacttcaagcaaggcttatgagtcaagcacttcgcaagttgagccattctctttctcgctccaggacaatgttggtgtttattaatcaggtaagatcgaaattaagcacatttagtggattcggagcaccagcagaagtaacctgtggagggaatgccttaaagttctatgcttctgtccgcttgaacaccaaaaggattggtcttataaaaaagtcagaagaggttgtaggcacacaaattcaggtcaagattgtcaagaacaagcatgcacccccatttaagactgtacaccttgagcttgagtttggtaagggcctgagtcgtgaattggagattattgaagtaggcttcaaacacaagttcataacaaaatcaggagtattctatcacttgaacgggcaaaatttccatggaaaggatgctcttaaatgttatctcgctgaaaacaagaatgtcctggaatctctgatgtcaatgataaaggaaagcataatgcaacaggagtcccatccagatagaaacatggaggatgccaacccagatacgagcataacagaagagttcgtttcagcaacagatgaacaagtacctgaagaggttgaggcctgaagcaatatagcagtatcctttttc

SEQ ID NO: 30997 - DNA, 437 bp, Oryza sativa
  unsure (1)..(437): unsure at all n locations
  Clone ID: PAT_MRT4530_35346C.1
acaatttagaaagaacaaggaagacagcaggtgacacctttgcggacacaccaaaactgccggccatagcccatattcccacaagaagatggcgatcccggtttacagcatcacaagggcagagatcgaggagttctggaggagaaaggagatggaagaagaggagcagcgcctcaccgccgagaaggaagctgcaagaatcaaagccaagacacttatggtcagttcttcttcttattgatcaatcgtaatttgttgtattaccaatcactatctcgtcctctgatctcctttaccagctcaggttcagtatggttcttagtcaaaaaaaagttcagtatggtatttagcatagcagataaatcgacgcatgtaaggcaataaaaatctgcgatgcagatacaggccaaattatcctaccatgaatttnggagtag

SEQ ID NO: 30998 - DNA, 352 bp, Oryza sativa
  Clone ID: PAT_MRT4530_35347C.1
acagaaaacactacattattacaaaggcaaagtggggggttccaaattcttaggtaggacatagattaagcctctacatcataaactgctacagtagctcacggtaatatgaactaggccatataactacttatatcacatacaaaaactgtataggtaactaaaagtagctcctatgcaccaacaatctaaacggtcaaggcagtaattgcttaatgcctgaagtcaattacaaaggcgtaacacctttttaacttttgttggatgtaaaagccatgtaaaatgcctcggcattgtaacctcacaaatgcagtgttttccttacccgttcatatattagagttttttctga

SEQ ID NO: 30999 - DNA, 590 bp, Oryza sativa
  Clone ID: PAT_MRT4530_35348C.1
atgaagaagtgggagtattcaatttcaggaccaaatccccggtattcatggccggcgatcgcaaaagacagaatagtaaaagatcttgtgaagattaaaataatcattactgtgactcaaatacaactccagtgtacagtacagtctacagtctccaggaacggagagggggcgaccgttacgggcaccgaccgagacgacccggcgaaaggcgacaaaaggtgtgtgggtcccacagactgacaagaccccgcgcacgcacacacgctcaggcgccagctttttccgaccgagctgccacgcacacaccacccccacctaacgccgtcaaccatggcgggaaaggaaaggcgcggacccgtcgcgtcggtgtgtgctgtgcgggggttacgaggccacacgtgtgggggggtggggtggtggggccacgtggacggcccagactggacggggccgacgggacgtggacggccgtgatgcgggcccgtctcgtctctctcggggaggagaggaataaagatcgggtttgcaggattcgatcgggtcgggtcgggtcacctgttgggctgtgggccccacctggcactgac

SEQ ID NO: 31000 - DNA, 159 bp, Oryza sativa
  Clone ID: PAT_MRT4530_35349C.1
ttccccttcggccttctcgtccgccccttctctcctccaccatccgcctcaccggcgtacggctccgacgagatggacgccccgctccgaagagaaagcccctctctcgcacggaaaggacgactcaacagaaatccacggtacaagccaaggcaagga

SEQ ID NO: 31001 - DNA, 132 bp, Oryza sativa
  Clone ID: PAT_MRT4530_3534C.1
atggcgaggcggaggccgtcggcgaacaggtatacggggagccagagccatccatgtcagggctgcaacatacagcttcagattgagttctgcgcagtggtgttttgcgatatatcctacagcttcagatag

SEQ ID NO: 31002 - DNA, 545 bp, Oryza sativa
  Clone ID: PAT_MRT4530_35350C.1
gcacgaggattcggccgcgattccgagtcgtcaggggagctcactcgaaacttgaagaagtacttggccgaggagcagatattcaggattgaccattatttggggaaggagctggttgagaacctctcggtgctccgtttctccaatctcgtcttcgagccactgtggtcgaggaactacatcaggaatgtgcagctcatattttctgaagatttcggcacggagggtcgaggcgggtctgccttatctttgccctttgcttcttgcatccaatgttaccatgaactgaaatattcaagagaaaatcctttctatacccctagaaatttagctaatcccttctatacctctgaattttgcttacttccttatatacatccaaaattcgattttgatcccttccatacccctcccgtcagttgaccgttagttgaccgtctaatttctataaaaataaccattttacccttcggatgaacatataaatttatgaattagattattaaaaatataaaagcttctgatatgagactattatagttaag

SEQ ID NO: 31003 - DNA, 1052 bp, Oryza sativa
  Clone ID: PAT_MRT4530_35351C.1
aaaaaaaaaaaaacttctccggcattcgatcgcttccccaaatcgctctcctctcctctcctctccaccgccgccgatctcctcctcctccggcgccgtcgccgcgtcgcctcccggagctccggtgctgccaccagcctacgcagcgccgcctcctcctcctcctccggcatccgccaatcgccgccgcctggttcgtcggggagccccgcgccctaacgttttctagaggcgccgcggatccagcgcgaatcgatcgagaggtaaaggggaagttgatttgagtcggcggccgaagaaggaagccatgaactcgagaagcaactaccgcagcaccagaacttctctttttgatggcattgaggagggcagaatccgtgcaacatcctattcttcacatgagatagatgagaatgagaatgatcaagctattgatggattgcaggatcgagtcagcattctcaagcggttgtctggtgatatccatgaagaggtggaaactcataaccgtatgctagaccgaatgggcaatgatatggattcgtcaaggggttttctgtctggaacagtggacaagttcaagatggtttttgagaccaaatcaagtcggaggatgggaaccctcgtagcatcattcgttgcgctttttctgctggtatactacttgaccaggtagaagaggaccatgcatcacttgcctactgttgtgaagcgatgtgaactgggttgggtactcaagaacacgctgaaaatgtctgtgtcaatttaccgtggtgtcgtatatacctccaatatctcgctgtcataaagcaaaatatgttgaccagaatgtttctaactctgcactgtgtgaggattacaacatgttcgtcgtttgctctggtgctgtaattacctttacagaaaatgtttcctgctgtgttctgtaacatctgtttctgtatgcggtcatgctatctgtattatattataacttcacaagagattgtactttggagtcttaattgccatatataagacgctattagtatgtggttaatttgctgctacta

SEQ ID NO: 31004 - DNA, 694 bp, Oryza sativa
  unsure (1)..(694): unsure at all n locations
  Clone ID: PAT_MRT4530_35352C.1
tgaaaaaggctcatgaccatgctgttgacaactggactttaggaatcttgtgctatgagttcttatatgggtcaccaccttttgaagcagcagaacaggatgatacattgaggaggatagttaaagtggatttgtcgttcccctcaactccttatgtttctgcagatgctaaggatctcatttgcaagcttttggtgaaggattcaaacaagagactttctcttgatgacataatgaaacatccatggattgtgaagaatgcagacccatcagggagttgtagtgaccaaaaggctcgcacataatacctttaagaaacaaggtacattgggaagcataacgtgctaatgaaatacacaccttaccttcccagtcatcaccctagtatgctgagctaaacattaaactttatacacatttgtcaggctacattaaaatgtttctgctcttccctcattatggactataataattttcttcatctacactggctgctgcatgacgtgaagncctaccatgtttatgtttgctgttgtccgctcctaaaggaagttggctggtgtanccgtaccagtttatgaccctaatcctcatcagtcancggtgatagcatcttcattaccctaagtnccatgttgttgttgtggataaagttacttaacggaaatataagtataccaaaaaaaaaaaaaaa

SEQ ID NO: 31005 - DNA, 532 bp, Oryza sativa
  Clone ID: PAT_MRT4530_35353C.1
tgcaacctccatatcgcacgccgtcggccgccggcgtccactctcatcatagattaccgcctgcgcgagccatggaccatgtcgggaactcgggcatattaacagtgaaatttggtaagcccaaagtcatcatcggcttaaagtcagtgtcggcttcgaagtactaagattagccgatgagagttatcaagtcgtcagttgttagattcttgctatattcgcctgcttattgattgccaataagggtttcatcggggtttcagctgatttcatgacatcggacctccagccgatgtgtgctttaatattcggatcgatgcttatttatcatatcattatttgccgattggtttatattggattatattattattttattacatcatcatcagccaattgcctttatagcattatctacattggacatatagccgattgcttaaaccctatcgctattggctggtatcggcatcggctattatcggttttcggctggaatcactacatcggttgtttagccgatcggctattt

SEQ ID NO: 31006 - DNA, 1294 bp, Oryza sativa
  Clone ID: PAT_MRT4530_35354C.1
actagtgctggatcgcgcgcgggcacacctcgcagttcgtagcagcgaataagcgagctccatttgattctttgattacaatggagtccaccaaggtctcggcgatgctcctgctcgccatgctcgcgctctcctcctccccgctcgccctcgcgtgcggctcgtgcggctccggcggtagcggcagtgcaccgtcgggcggcggcggcagcgcgccctcgggtggtggtggtggtatcggaggagtcgtcggaggaatcgtcgggggtgtcgctcccgtcgtcggaggaatcgtcggcaaagttcctcctgtcgtaggaggagttgtcgggggagtagctccggtcgtcggtggaatcgtcgggaaagttcctccggttgtaggaggagttgtcgggggagtagctccggtcgtcggtggaatcgtcgggaaagtccctcccgtcgtcggcggtgtcgtcggaggtgtcgccccggtcgtcggtggagtcgtcggtggcgtcgccccggtcgtcggaggtgtcgcccccgttgtcggtggcgtcgtcggaggcatcgccccggttgtccggaggaatcatgtggcggcggcagccggcggcggcggctacagcccgagcccgagcccgccgaagcgacacggcgggaggaaggcgtgcccgccatgtgccgacgccgacgccgtccaccccgacgccgtcgtcctcggacacgtgccccatcgacgcgctcaagctcggcgtgtgcgtggacctcctcggcaacgaggtgcacatcggcgacgcccacgtgacgtgctgcccgctggtgaaggacatcgccggcctgtccgccgccgcctgcctctgcaccgccatcaaggccaaggtgctcgacatcagcatctacatccccatcgcgctcaagctcctcgtcaactgcggctgcgacgtcccgcctggctacacctgcgcctaagccatcctcatgcacgtcacgtcccaaaccatgcacgtcacgtcccaagccatgcacgcattcattattctctctcgagtacacagtttagcttcaatcaaattaaggtcggtcgttaatttggtcaaatcggtcgggtgatgaagccactcgcttctgggatgttcaattattcagtgaacttcttttttattggatttgcttttcttgttttgcaatgttaatttgtacatgtagtggctccggaaattgtcatcaattgtactgtatgcatgtattgtaaaactatttaatttaattcccagatgtaactcttgtttgcaaaaaaaaaaaaaaa

SEQ ID NO: 31007 - DNA, 630 bp, Oryza sativa
  Clone ID: PAT_MRT4530_35355C.1
agcaccatcatttctgtgcatatgaggatcatgttcaagccaccgccacacgagatgtcttcggaacaaacgctaccaaatgcacggacgacaagatccatgacaagtactccttccgtcaaaaaaaaaatcaaactatgggttcctgtgccaacgtttgactatccgtcttatataaatcactcggggtactgttaacagtgaaatttggtaatcggcaaagacgtcatcagcttagaatcattatcggctgcagcatctcggaatcagccgatgggagttatcaagtcgccaatagtcggattcctgctatattcgcttgctttttgattgccaataagggttttatcggggtttcagccgatgaaatgacatcggacctccagccgatgtatgctttaaccttcagatcagtgcttattatatattgtttctagccgattggtttctatcggattatattattgttattttattacatcctcatcagccgattgccttcatatcattatctacgttggacatatagccgattgcttaaaccctatcgctatcggctggtatcggcatcggctattatcggctatcggctggaactactccatcggcttgtcagccgatcggctgttt

SEQ ID NO: 31008 - DNA, 222 bp, Oryza sativa
  Clone ID: PAT_MRT4530_35356C.1
atgcttaatttgatctatgtttatgccaaatttgaccagtgcgattcacacttcattgcgtatgttcatgccagtaaagcatatatgcatgcgtacatcaagcgtagcctacaagtctactataccccgaacggcgaacacaacggaaagaatcaaccaatggatgaatttaccgcgaacatggccgatcgaatatgcgtcgtctgtacccgtacacatacc

SEQ ID NO: 31009 - DNA, 1257 bp, Oryza sativa
  Clone ID: PAT_MRT4530_35357C.1
ctactaactgctcgtctactgctccgacgggccctctgcatcgtcaccctcctgctccgggagctgcttgccctggtagtctactccatgcgcggccagaagaatctcaaagacatcagaataaagaagattgggctgatagaattgcaaaattagtagaggagcagtttggacttagacctaaggaacggatccatatgtatcggcaaccatatcctcaatggtttgaaagagttccattaccacaccgatacaaggttccagacttctcccaatttttagggcaagatgatatatctacaatggaacacatcagccgattcttagcgcaatgtggggaagcatcggctaaggaagctctaaaagttagattttttccgttgtctttgactggatcggctttcacatggttttcatcattaccattaaattctatcagaggatggaccgatcttgagaagcaatttcatgattacttctttgctagagtcagtgagttgaaactttcagatttaatatcggttgagtagcaagaaggagaatcggctatggaatatattcagagatttcataatgtccgcagccgatgttatggtttgagcctaagtgatgagcaactagccgatctcgcattccaaggattgtcagcacctatcagagagagattcttttgccacgagtttgacagcctggttcatctaatggaaacagtatcggctcatgaaagccgattgcaagaagcaaaggaagattggttttggagttatcaagacaagaaattatgaagcatgaattctcatactccaaaactggggggcatgtgttaacagtgaaatttggtaagcccggagtagtcattggcttagagtcagcatcggcttcgaagtcctgagattagccgatgagagttgtcaagtcgtcagttgtcggattcttgctatattcgcctgcttcttgattgccaataagggttttttcagggtttcagccgatttcatgacattggacttccagccgatgtgtgctttaacctttagatcagtgcttatttatcatatcattgctagccgattggtttatactggattataatgttattgtattacatcatcatcagccgattgcctttatatcatcatctacattggacatacagccgattgcttaaaccatatcgctatcggctggtatcggcatcggctaatatcgactatcggctggaactactccattggcttgtcagccgatcggctgttt

SEQ ID NO: 31010 - DNA, 690 bp, Oryza sativa
  Clone ID: PAT_MRT4530_35358C.1
tcagcggccgctgacgtccgcgttgtacccgcctcgatccagcctcacgttatccaaagccgccacggccccgccgacgtgcctagcgctcgcctcgccgccgctaccgctcttccacccttcctcgctgccgccgcccatctgcccaatcctggagccgttggatccaggttttggcgtggacgtccaggattgcatcccaatgacggttggaggacacttcggacaattccccttccacaaccgtcaacacctgttgacgatgaaatttggttagcccgaagtcataatcggcttagagtcagtatcggcttccgcatctcggaattagccgatgagaattatcaagtcgctaatagccggattcttgctatattcgccatctttttgactgccaataagggtttcatcggggtttcagccgattttatgacatcggacctccagccgatgtatgctttaaccttcggattgatgcttatttatcatatcattgctagccgattggtttatactagattatattgttattttattacatcatcatcagccgattgcctttatatcattatctacattggacatatagccgattgcttaaaccctatcgctaccggctggtatcggcatcggctatgatcggctatcggctggaactactccatcagtttgtcagccgatcggctgttt

SEQ ID NO: 31011 - DNA, 487 bp, Oryza sativa
  Clone ID: PAT_MRT4530_35359C.1
atagctttccgctggctgatgcatccaggcaaggaaaagggtgactgttaatagtgaaatttggtaagcccggagtagtcatcggcttagagtcagcatcggcttcgaagtcctgagattagccgatgagagttgtcaagtcgtcagttatcggattcttactatattcgcctgcttcttgattgccaataagggtttcatcggggtttcagccgatttcatgacatcggaactccagccgatgtgtgctttaaccttcagatcgatgcttatttatcatatcattatttgccgattggtttatactggattatattgttattttattacatcatcatcaaccgattgtcttcatatcattatctacattagacatacaaccgattgtttaaaccctatcactatcggctggtatcggcatcggcatcggctattatcggctatcgactggaactattccatcggcttgtcagccgatcggctgttt

SEQ ID NO: 31012 - DNA, 1723 bp, Oryza sativa
  Clone ID: PAT_MRT4530_3535C.1
atggagtccggtgggctaatcgcgccatccgagacatgttcgtccgacggtcgtggcggcggcggcggcggctggcgcgccgcgcgcttcctcatcgccgtcgggttcctggagcgcatcgggttcaacggcgtgcagggcaatctggtgatgtacctgaccgggccgatgggcatgtcgacggcggcggcggccgccggcgccaacgcctggggcgggaccgtgctggtgctgacgctcgtcggcgcgctcgccgccgactcgcgcctcgggcggtaccgcgccatcgtggccgccggcgtgctccatctcctgagtttgggaatgctgacgatctcatcagtgatgcaaccaaatcatcctcacccggcgagctgccatgacgcagccgccgcctgctcgccgtcgccgccgccgccgccatctctcgcccgcctcgtcttcttccacgccgcgctctacctgctagcgctggcgcagggcttccacaacccgtgctccgaagccttcggcgccgaccagttcgcggcgagcgaccccggcgcgcgcgcgtcccggagctcctacttcaactggtaccagttcttcaattccttcggctatggcatctccaacaccgcgctcagctacgtcgaggacagcgtcagctgcaccgtcgggttcgccgtgtgcttggccacgacggcggtgtacctccccatcttcttgctcggcacgcgggcgtaccgcgccgagcaacccgtcgacggcgccctgctcgcgcgcctcgccaagacgtcctcctcggcggcgcgtgcgtggacggcgagggtgtttcgccggaaggatacctcttgcacagaacggcttctggcgagggaagaggtaggcgagaaggggttccttgccaagttgcttccgatctgggtgaccagcatagtgttcgccatcgtcagcgcgcaagaggtcaccctgttcatcaagcagggcagcacaatggaccggcgcatcggcgcgcgcgggggcctcgtcgtgccgcccgctgctctgcagtccattgtcagcgtcatcttcctcaccttcgtgccggtctacgaccgcgccctcgtgccgctcgcgaggcgcttcacggggcaccccgcgggcatcaccacgctccagcgcgtcggcgtcggcatggccatgtcctgcctcgccatggccgtggcggcgctcgtcgaggccaaacggctccgcgccgcgagcgacgccggcctgatcgaccggccggacgcgacggtgccgatgggcgtgtggtggctggtgccgcagtacgccctcgtcggcctatcgaaggtgttcggcatcatcgggctcgacgagttcttctacgaccaggtgcccgacgacctgcgcagcgtcgggctcgccatgtccctgagcgtgcgcggcgtcgggagctacgctagcggcgtgctcgtgtcggcgatcgactgcgcgacgaggagcgggggagagagctggttctccgacaacctcaaccgcgcgcacctcgactacttctactggatcctcgccgcgctcgccgctttggaggtcgccgtgttcgtctacatcgcgaagcgatacgtctacaagaacaaaggcgagccatgattcttgcgagttatataaataaactgaaaagtttgctgcataagcggaaaaaacttaaattttggccctctaagtctcgactaatgctcatttcggtccttaatgtttt

SEQ ID NO: 31013 - DNA, 561 bp, Oryza sativa
  Clone ID: PAT_MRT4530_35360C.1
caacctcactataaataaaagaataaaatatctcgatggagccacactgcagatttaccgtcctgccccccacgccacccctcgccaccaggggcacaaccgtcattccgcggccaccagggggtgttaacagtgaaatttggtaatcggcaaagacgtcatcggcttagaatcattatcggctgcagcatctcggaatcagccgatgggagttatcaagtcgccaatagtcggattcctgctatattcgcctgcttcttgattgccaataagggtttcatcggggtttcagccgatttcatgacatcggacctccagccgatgtgtgctttaaccttcggatcgatgcttatttgtcatatcattgctagccgattggtttatacaggattatattgttattgtattacatcatcatcagccgattgcctttatatcattatctacattggacatatagccgattgcttaaaccctatcgctatcggctggtatcagcatcggctattatcggctatcggctggaaatactccatcggcttgtcagccgatcggttgttt

SEQ ID NO: 31014 - DNA, 1582 bp, Oryza sativa
  Clone ID: PAT_MRT4530_35361C.1
tcccccttgtggctccccgggctgcaggataatatcccattccttccttccaatttgagattagattagcggaggaaggaatggccgtgacggcggaggtggagtcgtcgccggcggcgacggggaagctgcggtacaactcgccgctggtgcaggtgtccctgatcgggttggtgtgcttctgctgccctggcatgttcaacgccctgaccgggctcggcggcggcgggcagctggaccactccaccgccgacaacgccaacaccgccctctactcctgcttcgccgtcttcggcgtcctcggcggcgccgcccacaacctcctcggcccgcgcgtcaccctcctcgccggcgccctcacctacccgctctacgccgcctccttcctctactacaaccaccacccctcccgccaggccttccccgtcaccgccggcgccctcctcggcgtcggggccggactcctctgggccgcgcagggcgccatcatgacgtcatacccacccccgtcccgccgcggctcctacatctccctcttctggtgcctcttcaacctcggcggcgtcctcggtggcctcctccccttctccctcaactaccaccgcgccgccgacgccaccagcgtcaacggacgccacctacatcgctttcatggcgttcatgctcctcggcgcgggcctcgccctcctcctcctgccggcctccaggatcttcaacaacgtcaatggccgcctctttcacctgccgcacaagggcctcaacaacgtcttctactggggcgccagatgctcgcgtccgcggccatcggctacttcctcgacttcggattcggatcctccagcagagagaggggcctgtgcggggtcgccgccgtcgccgtgctcggcaccgccatctggccggcggcctcgccaaccacgtcccgtacgccgacggcaattggggggagaggctcatcgatttcaaggatgggcggcgtagtgcccctagccggatatgataattattggtatgttccatttcatctggcatctcaatcatcatgcatttcgaaagggtgtgagcttttcaaatatgttggattctataagggagtgcaaagtgctggagcagctgtggcatggcaaattgatacccacaagacaagcctaatttcgcaattgattgtgaattgggcgcttactaccgtgagctaccccttgcttgcactcttggtgttcttagctgtgaaggaggaggacagttctgtttcttctgttgaggatggcaaagagaaagatagcaaactgtctgcaccaaccagcttccactgaggagatctggagttttttcagtgtgttccttcctctgaaagtacattttagaaatcaaaggagtagagtgatttaggggccatggtatagaaagtaagtttcctcgatgcaattttcttggtgtttacgtatgtgtagcttatggggtgatagtgtttactgtccatgtcgtataattcttgctgagtgacgtatttagagcatttgagtcgagacagttgtacaattgtttctactgctatgaaaggtaggtatggtttcaggctttc

SEQ ID NO: 31015 - DNA, 630 bp, Oryza sativa
  Clone ID: PAT_MRT4530_35362C.1
aggaacaacaatattggctcggggggcaagcgcatcagttttagcatggtggagcgcatcagttttagcatggtggagcacatcagtatcggctcatgaaagccgattgcaagaagcaaaggaagatcggttttggagttatcaagacaagaaattttgaagcatgaattctcatactccaaaactggggggcatgtgttaacagtgaaatttggtaagcccggagtagtcatcggcttatagtcagcatcggcttcgaagtcctgagattagccgatgagagttgtcaagtcgtcagttgccagattcttgctatattcgcctgcttattgattgccaataagagtttcatcggggtttcagccgatttcataacatcggacctccagccgatgtatgctttaaccttcggatcagtgcttattatattttgtttctagccgattggtttctactggattatattgttattttattacatcatcatcagccggttgccttcatatcattatttacattagacatatagccaattgcttaaaccctatcgctatcgactggtatcggcatcggctattatcgactatcggctgtaactactccatcggcttgtcagccgatcggctgttt

SEQ ID NO: 31016 - DNA, 548 bp, Oryza sativa
  Clone ID: PAT_MRT4530_35363C.1
agaggcctaccaatgttggtgcgccaacgtggagatacgctggtgtttgatagcaaaacaggcaaataatgtgtttctaggaatgttgatacccaataggctactacctgacctggaaagggggcgttacgatgtggatgcaacatgctggtgtggcacaattgcacccttgcgctgggctgggcaacccaaggcttggttgcaatggattggccacagtgggagtgttgacaaacatggtgcaccacacggtaattggggaaaaaagagtgagcgcggttcagtatctcaaccttggcatggaagtgggtgaccatcccaggcatacattggtgctttggttcccaaaatgaatactggtcaatctggagcacattttgggttccctttgttgttatttggtttatgtatatgctggatggtcaccaaaattgatggctaaactggtcaccaatgtgagaacatgggcatcgtggcatgcccccatttaatggcatgttccgcctttgtgttttctttggattggtgaaaaaaaaaaaaaaaaaaaa

SEQ ID NO: 31017 - DNA, 610 bp, Oryza sativa
  Clone ID: PAT_MRT4530_35364C.1
caagcaagttccatccaaaggaggtgtgtccttattgtaaagccaagctatggaacttgctgcaggcaaatatgatacccagaagtgcttccataaggttggatgcttatgacgattctgcttgagtattatatatgccttaacggccacacccttggtttatgcactctgatgcctgtctctgattccgaggatgcacaaaggagtagttatcaagacttgagtcaggtggccttattcatgagctggtctgtgaatcttgtacaatgttggatcttgctttctactaagaatcagtagctcgataagaaaatgttgtttttcttggtgcatgtacaatgtgggatctttctttcaactaatagccagcagcgtaacaagaaacgttgccgttgtattatctgcagttgttctttgtaccaatagaacattagaaggctctatgtcaccacttccttttttatgggtacctcattacaggtatcttgtattgtatctacatgttttacattatctgacatggcatgtagcattaagggacattcgagctgtacaaattttgcttgtgtgcaacacagcttctctgataattttcaaaaaaaaaaaaaaa

SEQ ID NO: 31018 - DNA, 445 bp, Oryza sativa
  Clone ID: PAT_MRT4530_35365C.1
gattgttaacagtgaaatttggtaagcccggagtagtcattggcttagagtcagcatcggcttcgaagtcctgagattagccgatgagagttgtcaagtcgtcagttgtcggattcttgctatattcgcctacttcttgattgccaataaaggtttcatcggggtttcagccggtgaattgacatcggacctccagccgatgtgtgctttaaccttcggatcgatgcttatttatcatatattatttgccgattggtttatactggattatattgttattttattatatcatcattagccgattgctttttatatcattatctacatgggacatatagccgattgcttaaatcccatcgctatcggctggtattggtatcggcatcagctattatcggctatcggctggaactactccatcggcttgtcagccgatcggctgttt

SEQ ID NO: 31019 - DNA, 451 bp, Oryza sativa
  Clone ID: PAT_MRT4530_35366C.1
atgaaaacgacaaggactactcagattatatccatattggtttctctagttctacttggataaggggacacctatgggtataaatacaaggccccctaggaggagaggggagagacccaccatagaagacacggcacaatagaagccacaacatacaagccaacataagccaagacaagacgccagatatcgactttagggataagcacggctagtcccttacggtgtctccggatactgtcaggagagacgaaagtgctatctctaatctctggggcacggattcgaggaagaaggctaccctgttgtcgactacgagtcagaccttcagaccgccatattgacaacaattagataggctaccccaaatattttaatgcctcgcgtataacctagtaccaacgatccccatactatgtaaataccggaatcgcggcatcaaacattgaca

SEQ ID NO: 31020 - DNA, 2307 bp, Oryza sativa
  Clone ID: PAT_MRT4530_35367C.1
atggccctgcaacttatgatggacaactacctcttgtgttctgccatgaagggaagattgtctgtttactctgatagtcagctgatactagtgaagatgaaccgggaatcaaatttcatgcctactcctgatcaggatgttctggaagtcaagcccctgaggactttggctccaatgttccctgcaccattggggatcgatgtgcttaaccggttgacagccccaccgttggtatttgtcgcaccagctgggcagtttcctgggggttttggatctttgaacattcctgcggtcagatcgtttgccgctttcggtggtcaggatgctagtggaggcaagactgctggtggtggtgatcaggatgctagtggaggcaagactgccgctggcggtgatcaggatgctggtagaggcgagactgctgcttttggtggtcaggaaactgtcagaggtgaatttgttgcaaatgggactccaaatgtaggtgctagtgcaactgggccaattgacgccactcctatctcagcttgcaaatcaacacaaccaagtgtgatatcactggatgatgatgacaatgatgatgatgagccttacggtggtaaccaaacatcagcatctggacggaagatcaagaggccatcccatctcaaaggatataatgtaagtgatggtttgggcaccgacagctccaacggaacaaagaaacgccctaagacctctaataggaaggctgctactgacaatgagatttccttgatgcctccatccagcgatcccagggaggttgtggaagtgcttctcatgaccttcgaggcactgcggcgtaggcatcttcaattggatgagacacaagagactagcaaacgtgcagacctgaaggctggtgccatcatgttggccagtaatctgagggctaacattgggaagaggattggagctgtccctggagttgaagtaggggatattttctacttcaggatggagctatgcattatcggcttgcatgcacctagcatgggtggaattgattatatgaataagtttggtgatgaggatgactctgtagcaatatgtattgttgctgcaggtgtttatgagaatgatgatgatgatacagatacactggtctacagtggttctggaggtataagcaggaacagtgaggagaagcaggaccagaagcttgagaggggtaaccttgctcttgagaggagcctgtccagaaagaacgtgatccgggttgtacgtggttacaaggatccagcttgcttgactgggaaagtttatatctatgatggtctttataagattcatgagtcctggaaagaaagaacaaagactgggatcaattgtttcaagtacaagttgcagcgagagccaggacagcctgatgcagttgcaatctggaagatgtgccagagatgggtagaaaatccagctgctagaggcaaagttttgcaccctgatctatcatcaggtgctgaaaatctcccagtgtgtcttatcaatgatgttaacagtgagaaaggaccagggcacttcaactatattactcaggtcaagtacttgaagccactccgctctatgaagccatttcagggttgcagatgcactagtgtttgtctgcctggtgataccagttgtgattgtgcacagcataatggaggtgacttaccgtacagttcatccggattgcttgtatgtcgcaagcttatggtatatgaatgtggtgaatcttgccgatgttcaatcaactgtcgtaatagggtagcccaaaagggagtaaggatccaccttgaggtcttcaggacaacaaatcgaggctggggtcttcgttcatgggatcctatacgggctgggtcatttatttgtgagtatgttggtgaggttgttgatgatactaaagttaatttggatggtgaagatgattatctttttcgaactgtctgtcctggcgagaagacattaaaatggaattatgggcctgaattgataggggaacacagcataaatatttcagctgatacttttgagccgctgcccatcaagataagtgcaatgaaaatgggaaatgttgcacgtttcatgaaccatagttgcaaccctaacaccttctggcaaccagttcaatttgaccatggagaggatggttatccacacatcatgttcttcgcactgaagcatattcctcccatgacagaactgacttatgactatggcgacatcggatgtgaatctaggggtgtaggttctagagctaagaactgcctttgtggatcctcaaattgccggggcttttttagctga

SEQ ID NO: 31021 - DNA, 300 bp, Oryza sativa
  Clone ID: PAT_MRT4530_35368C.1
caacaaagattaactgtttaatctaatcttgtggatttcatgacatcggacctccagccgatgtgtgctttaactttcggatcgatgcttatttatcatgtcattgctagccgattggtttatactggattatattgttattttattacatcatcatcagccgattgcctttatatcatcatctacattggacatatagccgattgtttaaaccctatcgctatcggctggtatcggcatcggctattatcggccatcggctggaattactccatcggcttgtcagccgatcggctattt

SEQ ID NO: 31022 - DNA, 609 bp, Oryza sativa
  Clone ID: PAT_MRT4530_35369C.1
atggctaacactaaaattgtggcacttgggatttttctagtcttatgcataaatggactatcccatgctgcaagagtaattagatattctagtgctaaaggtgaaggagaaggtggaggagagggctctggatctgtaagtggtgctgggtcgggttctgggggtggctttggtgctagcaacactagtagttccgggggctattttgggacaagtaatgcacatgctaatgctggaggtggagggagtggtgatggtggtggaccattaggaagtgttgggtctggttctgggtctggttctggctctagctcaagtaacagctcaagcgtaatgagagcatggtatggtggtggagaagctaatgcgggtggtgttggtggtggcaatggtgatggatatggcggtggttactcagggtcctctggttatgggtcagggtttggaaccggtggaggctctagcgcagtggctatggatggcttttacggggcacatgcaaatgccgatggtggtggtgatggtactggagtgggacatggcgaagctggtgggtacggcaatggtggagggagtggatctgggtatggtaatggcaaatacccatag

SEQ ID NO: 31023 - DNA, 1626 bp, Oryza sativa
  Clone ID: PAT_MRT4530_3536C.1
atggagtccggcgggatactcccaccatccgagacatgcgccggctccggttcaccggacggccgcggcggctggcgcgccgcgcgcttcctcatcgccgtcgggttcctggagcgcatcgggttcaacggcgtgcagggcaacctggtgatgtacctgagcgggccgatgggcatgtcgacggcggcggcggccgccggcgccaacgcctggggcgggacggtgctggtgctgacgctcgtcggcgcgctcgccgccgactcgcggctcgggcggtaccgggcaatcgtggccgccggcgtgctccatctgctgagcttgggcatgctgacgatctcatcagtgatgcaaccaacgcaccaacacccggtgagctgccatgacgccgccgccgcctgctcgccgccgccaccgccatcgccatctctcggccgcctcgtcttcttccacgccgcgctctacctgcttgcgctggcgcagggcttccacaacccgtgctcggaagccttcggcgccgaccagttcacgccgccgagcgaccctggcgcgcgcgcgtcccggagctcctacttcaactggtacaacttctccagttcctgcggctacgccatctccaacaccgccatgagctacgtcgaggacaacgtcagctggaccgtcgggttcgccgcgtgcttggccaccacggcggtgtacctccccgtcttcttgctcggcacggcggcgtaccgcgccgagcaacccatcgacggcgcgctgctcgcgctgctcgccaagaagtccttgtcagccacgcgcgtgtggacggcgagggtgtttccccggaaggacgccatttgcacggaacggcttctgctggcgaaagaagaagaggtagaacatggcaagggtttcgtcgtcaagctgcttccgatctgggtgaccagcatagtgttcgccgccgtcatctcgcagcaggtaacgctgttcaccaagcagggcagcacgatggaccgccgcgtcgccgtgggcgggggcgtcttcgtcctgccgcccgccgcgctgcaggacgtcatcagcgccaccatgctcaccgtgctgccggcctacgaccgcgccctcgtgccgctcgcgaggcgcttcacgggccaccccgcgggcatcaccacgctccagcgcgtcggcgccggcatggccacgtgctgcctccacatggtcgtggcggcgctcgtcgaggccaaacggctccgcgccgcgagcgacgccgggctgccggcggacgccaccgtgccgatgagcgtgtggtggctggtgccgcagtacgccctcgtcgggctatcgaaggtgttcggcgtcatcgggctccaggagttcttctacgaccaggtgcccgacgacctccgcagcgtcgggctcgccatgtcgctgagcgcgcagggcgtcgggagctacgccagcagcgcgctcgtgtcggcgatcgactgggcgacgacgaggagaggaggagagagctggttctccgacgacatcaaccgcgcgcacctcgactacttctactggctcctcgccgcactcgccgcattggatgtcgccgttttcgtgtacattgcaaagcgatatgtctacaggaacaaagacgagcaatga

SEQ ID NO: 31024 - DNA, 1056 bp, Oryza sativa
  Clone ID: PAT_MRT4530_35370C.1
gcggcggggatggcaggtgcgcccatggcgtcgcccccgccgtacgacaacccgacggctgggttccccatcgcgatcgtgatcgccatcgggttcatggtcacctcgctcatcctcgccagctactacttcctcgtcgtccgctgctggctccgtggcacgggcggcggaggcgccgccggggccgggctgctgcaccgctcgcgccgcgagagcgcggcggagcgcgtcgccgcggtgttcttcaccgactacgaggccgaggttggaggcgggctcgacccggacgtcgtggcggcgctccccgtcgtcaagtaccgccgcgccgcctccgggaagtcggcgtcgccgcaggagtgcgccgtgtgcctgtcggagttcgtccgggacgagcggctcaagctgctgccgagctgctcccacgcgttccacatcgactgcatcgacacgtggctccaccacaacgtcagctgcccgctctgccgcacggtggtcaccggcggcgcgatcggcctcctcgtccgcgacgaccagtatgacgcgtccagccgggaactggccgccggcgagaggcgcatcgacgccgccgcgaggatgggccacgggatcagctcgtgcaggttccccaagaccggggccgagcaggagccgatccggcgatccttctccatggattgcttcctaggcgatctcggccggaagccaccgccgccgccgccgaaggatcccgcaggctcggaggccgggccgagccaccccgacgcggccggtagcagcagtatcgtcggcaccgccggcgccggcgagaccagcggccggtttcggcggttgctgtcgtcgttcgggctcggccggagctcgcggagcacggtgttgcccatccacctcgacccatgaaccacctcgggttcgtgcaacctaattaactcgctcttaccgcttaattaattgagagttactagccatttgtgccacttgtgtgcgtgcaatgtgtacagcagatagcagaattggggttggaattttgccgttccattgattaaaaaaaaaaaaaaa

SEQ ID NO: 31025 - DNA, 355 bp, Oryza sativa
  Clone ID: PAT_MRT4530_35371C.1
catcgagttatctagcttaaattgatacactgcaagcacgaatgcacaaccagcaatagatgcgcccgaccgtcaagtgattagacaacgaccattaacgtttgtactactccactatgtattcgaggataatcttcatctgtacctatccttgatcaagtagttctaattcctcttgtctacaatgtatactctcgcaatcacatgttgaagtcgtgactacttgagttcttcagcgtgtgaggtcattaatcaacaacatggagctgtgtctgtctcgatggaggaacttataccaaccctgactacgcatagagtgttctcttcatccacaatcatcaccaccactttgata

SEQ ID NO: 31026 - DNA, 626 bp, Oryza sativa
  Clone ID: PAT_MRT4530_35372C.1
tgaacttatcgttggggtcagtctcggtgcgcttgctctttattgcgggcgcgtttattggctccgatgtgatgaaatatagcaaccaatgtggtggctagatctgggtggagcgggcctcgactatgccacgaccaccattgcacccatctcctaaggagtaaggacagtattacctatattcgtcacacattgttaatagtgaaatttggtaagctcaaagttaccatcggtttagagtcagtatcggcttcaaagttctagaatcagccgatgggagtcaagtcgccacgtgtcgtgttccataatctctagcctgcttattgattgccaataagggtttcatcggggtttcagccgatttcatgacatcggacctccagccgatgtgtgctttgatctttggatcgatgcttatttatcatatcattgctagccgattggtttatactggattatattgttatttcattacatggtcatcagccgattgcatttatatcattatctacattggatatatagccgattgtttaaaccctatcgctatcggctggtatcggcattagctattattggctatcgactggaactactccatcggcttgtcagccgatcggctgttt

SEQ ID NO: 31027 - DNA, 184 bp, Oryza sativa
  Clone ID: PAT_MRT4530_35373C.1
tatagtatggaaccggagagcggagtacaacgaggggtctgtttgggcgtctgcccgtaagtttcagagccccctatatacggaacgggaaaacgagaggagtgcagctgctgtcagatgagatgagacaatgggaatgatagatcagtagtaagaacaaaaggcggtagtgccaatgggggca

SEQ ID NO: 31028 - DNA, 1341 bp, Oryza sativa
  Clone ID: PAT_MRT4530_35374C.1
atgaaccagcacggatacgataacgaaaatttatcggaattaaaaaaaaccctcaaaccgagctttaaacttcgatggacaaaaactccaatcagacttcgggggacgaggcaactttccggccgattccgagttccaatggaaactgttcttattatattcgattccgtatctgacaaaatatttctgaattcatttccgtttccgaaaaattccgaccggcttattctgtttccgaaaacatgcccggaatctagaaatattccgtaccgttttcatcccaaccgcccgtgcctctccgctgccggcactcgtcctccaccccatccgcccatccagcccgtgccacccttactgccggcatgcttagctgaggccgggaaggagcatcatcgcccattcccgccgccggtgcctgctctccagaccgcccgagcctctttgccacctccggcgcctgcccttacctccaccctgcgcccaccctccaaccagcctgtgcctccaaccagccgtgctgaggtgaggccgggaaggagcatccaacgcagttgttcgccacccatcctggcatccgacgtagtgggaagagagaggagggtcagcattctaacggatgaggaggatgcagaccactgccgacatggcgaaggggctcgacttcctccattacgctcacacgctggccatctactaacttcaagccatctaacatcctcctcgacttggcaatattatgggcctaaggcctttcacttcttgaatatagattcatgtcaaaaacaaacttcaaggaggagttgtctttgcaataatacaatccactacatggatcagcaattccggtcatttcacattattcgttctagacatgaagcaccattggctataaataaccgatgttggatgaagcctccaagcacaataccgtacatcctcctactatcgtcgacctccaaaattgttctgcatttgtcagctgttcacattcttgcatatatcattgtgttcatacaaatatttgtagaaaccaatcagtttcacgtttcagcaagttcaagatgtcggctgccactgggagtgatgcgaaaagtcagccatgatattggatttcttttgatgcttggtgataaaggagattattaccgagatatgctaatgagagcaaaaatagaaaggtcaatcgtttttgcaagatctgtagagaatgtctgttcagtacgaccaatagaaccattagcgttgcattatgttcagtacgaccaatgtatcttaattggccataacgcaacgctaatggttgtattagtcgtactgaccagactttttgaaaatcaagta

SEQ ID NO: 31029 - DNA, 156 bp, Oryza sativa
  Clone ID: PAT_MRT4530_35375C.1
atggtggcatacagttcgcatcccggccagtacagacgactgcccctcctcacactagctcattgtggtgactacctaacacacgctgtggcgatgcagatgttggcggcaattcaccaaaacgagcaccgctggagttcatcgttggagcggtaa

SEQ ID NO: 31030 - DNA, 508 bp, Oryza sativa
  Clone ID: PAT_MRT4530_35376C.1
aatattttacatggagtcgatatatatgtacatgatacttggaagaagctggtgggcttgccgttaccagatggatcatatggagttagaactacggttaccgataaagaaccaaccttgtattagctccgagttcttcacaaatgcattgcaagagtcacagaggaaattcaagaaataagatttaacattgcaatttcagcaatgatggaatttgtgaatgctgcatacaagtgggacacccaaccaaagtcagtttattgaatcctttgttctgttgctttcttcttttgcaccacacatggctaaggagctttggtttcaccttgggcactcaagatcattggcccacgagcaattttcagaggccatcttctccagtagcagctacgtcagcttctcctgcagatcattccctggtagcaatgaggtctccttctccagtacctcagtctccgacaacggcaaatacatctaccattgttgttttgtctttacctgcaggtga

SEQ ID NO: 31031 - DNA, 1746 bp, Oryza sativa
  Clone ID: PAT_MRT4530_35377C.1
atggccgtcgggatggcgcctcctcctcccacggccgccgcgctgccgtcccgccgccgcctcagggagcggatccagtcggagcgccaggtggtcggcggcctcctcaagaaggcggaggccttggtggcccgcgccaaggaggacgtccatggcgggcgcgccgcggcggcgcactccgaggcctgcgctctccctcgccgcggccgtttcttgcgtcgtccggaggcccgaccggaggcggaggccaccgccgcgatggacggggctgcctctccccgcaagaagaggcggaaggcggcgacctccgcgagctcgatcgtggaggtggaggtgatcgagccgaccatgcccaaggcgcagagggaccgcctctacggcctcctctcctcgctgtcggcggagatgccattgccgccgcacatcgtggccttgatgcagagccagtgctgctgcgtcgtggaccctaatggcgaagagatggatgtggaccttggctccgcgaaggatgctgccttgttccagttgctgaacctgctcgaggaattcgctcaacagcagaccaccaagattcagccacggctggcggaggagcaagaaccgcccaagatcgaggcacccgacgccaccagccgctcgtcgtcgatctgccaactgatggaggacggcgaggtcgccgatgagggcgcggacatggacatggacatctgcggcggcgtctctcccctggtagtggacaaggttcagttctcgccgcttccgaagcaagaagaggatgatgagttgatcaacaccagcggcggcggcggcttctctctccaatcgccgcctgccaagcaacaagaggaagaattcgtccgcgatgcctcccctgttgcagttgacaagttccctcaaactgaatctcctagctcgagcactggctcctcttctggatcgtcatcatcttcatcttcgagcggtggctcatctggatcatcctgcagcggttgctcctcttcaggcagcgactctaacgatgacggagacagtgcgagcagccgccctgataactctgaacttcccactgaagctgcagcgaagccattggagcagcagcaggtcacagtctgcggcggcgtctctcccctgatcgatgagttctcgccgcttccgaagcaacaagaggatgacgagttgatcgacgtcactggcggcgtctcccctgtatcagtcaacaagttcccagattctcctcgctcgagcagcagtggctcttcctcctcttccagcagcggttcgtcctcctcctcgtcggaaagtgactcagacgacgacggcgacagtgcgagcagcaagccagacaccgcagatcatcccactgaagctgaggcgccgaagcttcagccattggagcaacatgaggtcgcggagcaagacaagaagctgatcgccgagagagcagcatctccgaacaccgagatgcaggagctgatcgccagggcccaggagaggcagaaactccggcttgagctcgagaggaagacggcgcgcgagctcgagaggaagatggcgcgcgagcagctgcaggagatggagaggacggcacggccggtctacgacagcatcgaccccagtgtcatgaagcagctcgggatctccggcgatgcgcagtacatcgtcagcccggtgaaatctcggcacagcctgcatcggcgcggcggcggcggcctgctacagaagctcggcttcttcctcaaagaatag

SEQ ID NO: 31032 - DNA, 3009 bp, Oryza sativa
  Clone ID: PAT_MRT4530_35378C.1
atggcggtagcgatgatgcagacgccgctccagctccggctgcagccgcggcccccggccgttgttgctgcccgccaccgccgccgcctgcaaagcgggttcccgccgccgaatccgcggcgaggtggtgggtggtgccgctgctgcgcgaacgccgacgccgggaaggcgcaggcgcaggcgaggagggcgtacccgtacgacgagatcgagccgaggtggcagaggcactgggaggagcaccgcacgttccgcaccccggacatcggccacggcctcgacacctccaagcccaagtgctacatcctcgacatgttcccctaccccagtggagctgggctgcatgttgggcatccccttgggtacacggcaactgacatcctgtcgaggttcaagcgcatgcaaggcttcaatgtgttgcatccgatgggatgggatgcatttggtcttcctgcggagcaacgggaacccaccctaagattaccactgaacggaacatcaatcgattccgctcacaggctggcattgctatcttacaatcaggctgaggtaccggttaattggtgccctgctcttggaactgttctggcgaatgaagaagtaatagatggtgtcagtgaacgtggtggtcatcctgttatacgaaagccaatgcgccagtggatgctgaggattacatcttatgctgatcgacttcttgaagatttggatgaacttgattggcctgagagcatcaaagaaatgcaaagaaactggatagggagatcagaaggcgctgagcttgaattctcagctgtggacaaggaagggcacgatctaggtgctaatttgttagtttacacaacaagacctgacacaatttttggtgcaacatatgttgttctggcacccgagcattctctattgtcatctctaatttctgaggaacaacgtgtacatgtagaggaatacatagaactcacagcaagaaagagtgaactggaaagaactgatcttcagaaggaaaaaactggagtttttagtggttcttatgctaagaacccagcaactggggagatagttccaatatgggtggcagattatgttttaggaagctatggcactggggctatcatggctgtgcctgcacatgactcacgtgaccatgaatttgccttgaaatataaacttccaatcattaaggttgtaagtccactcaatggcaattgtgactctgaggaggcatatgcagatgatggtatcatgataaactcatccagttcttcatctggattaaatattgatggtatgctttccaaggatgctgctttgaaagttactgaatgggtagaggctaatggctttggaaagaaaaaggtgaactacaagcttcgagattggctctttgctagacagcgttattggggtgaacctttccctgtgatttaccgtgatgataccaatgaaatgctgccccttcaagaaaaccagttgcctttaactcttcctgaattggatgatttcactccaactggtactggagagcctcctctgaccaaggcaacagattgggttaaaaccgtagaacctttgtctgggaagcctgctagaagggaaacaagcaccatgccacaatgggctggatcatgctggtattatttgagatttatggatcctcaaaatgccagtatgttggttgacaaggcaaaagagagttattggggcccagttgacatctatgttggtggtgctgaacattctgtcttgcatttgctttatgcaagattttggcataaggttctttatgatattggcgtagtttccactaaagagcccttcaagtgcctgataaatcaaggattgattctaggagaagttgaatatactgcatatagagacaataaagggagatgggtttctgcagattccaactcaagtttgattgattgctaccaagaaaaagtacctgcagataaggtcacaaaagttggagatcattatgtactgaaggatgatgcaaacatacgtctaaacgctcgtgcttataaaatgagtaaaagtcgaggaaatgtcatcaacccagatgacgtggtttcagaatatggtgctgattctctccgcttatatgaaatgttcatgggaccactgagagattcaaaaacatggagcactggtggaattgaaggtgtgcatagatttctaggaaggacatggagactcgtagttggtacaccattaccagatggatcatatggagttggaactacggttactgatgaggaaccaaccttggatcagctccgagttcttcacaaatgcattgcaagagtcacagaggaaattcaagaaacaagatttaacactgcaatttctgcaatgatggaatttgtgaatgctgcatacaagtgggacacccaaccaaagtcagttattgaatcctttattctgttgctttcgccttttgcaccacacatggctgaggagctttggtttcgccttgggaactcaagatcattggcccacgagcaatttccagagggaaaaagtgagtacttgaaagaatcaaagctcgtgcttccagtgcaaatcaatgggaagaccaggggtacaattcttgtcgacaaagagtgctctgaggatgatgcattccaaatagcagcctccgacgagaaactctccaaatatttgactgggaagggcatcaggaagagaatttatgtgcctggaaggattcttaatgttatacctagataaacagaaggcaaggacctgattatcgatccagcgttgccatcgatcttcgttgaaggcctggctgagtagttgtaggtattattgagacattagaaatgtgtaaatttccattcttttgtagcatttgtagttgttggcatgcaacttttgtgatactactgcatgtgatcatagttttcattttacaatgattttgttctctcagaatacaattttcacgggatgagaagctttttttgaacgattagaatgcaaggttactctagtttgcaccac

SEQ ID NO: 31033 - DNA, 934 bp, Oryza sativa
  Clone ID: PAT_MRT4530_35379C.1
ctaactttccaaatgaggaaatcattaactggtacttgaatgatgacaatttggataatgaaaatggtgttccattgcttacatggaataaacctgatatggagattttggttgacttcttatctttaaagcagaactgggagccagcgtatattcgtcagcggatgcttcctatgctatcaaccatatatttacgcgaaatggcttcatctcaatctaaatcatttcttctttatgatcaatataaatttcattcaatccaacggattaagataagatatggtcacccatattacttggtcaagtggaagagagtcactcgtagtatgatatccaatgatccacctagcaagcagacagaattggaggggaagaatgataaggtggaggtattggatggagatgatgaggtagtagatgaagaggaggaggagcctacaatgatttccgaaactactgaactgctagatgagccagatgttccacaagtactggatgatgataaagattgctttttattaactgatgaagacattgagctagtgaatgctgcatttcctgatgaagcacaaagatttcaggaagaacagaggctgaaagaagcaaagtcaatagcacggaaatccaagctcaacgtggcaggtttcgaaacaccaaaaggtccaaggcctagtggagttcagcttagcatcaaggagttctaccgctccaagaaagggctgagtggcgactcagggaaggacggctcaagaaaatcctccgatgtggacctcagcaagaacttgcccaagtctgtccgacgacgcctcctcttcgactgactgacaattggtctcccttctgtcttcccagtagtcctgctgctactgttgtacatgttccaataacatttctttcggccaatggatgtacattgcgtggcccggtttttgta

SEQ ID NO: 31034 - DNA, 273 bp, Oryza sativa
  Clone ID: PAT_MRT4530_3537C.1
atacttgattaccgaattacatttccttttctctctcctgcggaaagatccgcgtgaactaacatgcgtaatcgggtaaggagaacctggagcagggggagggcacaccagcggctgcaacaggcggaccgagaggcgctgcataacaccccctgcaacccgggagccaagaccgcggacctctggctcttgaagcacccgcacaatatggctgcaagatggtgggaccaaagccatctgaggatctcagaaggccccatattctgaaaaccc

SEQ ID NO: 31035 - DNA, 384 bp, Oryza sativa
  Clone ID: PAT_MRT4530_35380C.1
atgcggggagagggcgatactgcacaacgggcatgtaggagcgcagagcagtggaaccgcctcgatgtctcgcaacggggacgcaggactgcatcgctgccgcccttcaatgctgcgggaccgtatcggtgcggcgcgatcgcgctcgccaccacgcggccgctctcccaagacgctagagcgaagcggtggcgcacttccgctcgtgggaccgaagcgatacggccagaggaacctaagcacggctatgttgatgttcagcaactcttcttggaaccatttgacagggacggcagccacctggcccagcccttgttcgagaaaagtcctaaaattgccaaaggcaagcatgtaactgcgagctgctccagtcatagaaagtaa

SEQ ID NO: 31036 - DNA, 266 bp, Oryza sativa
  unsure (1)..(266): unsure at all n locations
  Clone ID: PAT_MRT4530_35381C.1
ggccgggnagnagggttccagccgnatgttccnngccgcccgggcgcccgctcggcctgcggnatgcnnagtgctgccagcagctgcaggnacnngtgagccgcgnnagtgtcgcttgnncgccgccatnnccgccggnatnnggtgaggnnagctacgnaggnagaaacnnatgccgatnngcccctggnnagcaaggncnntggtcgtccgnntcgtccgtcgggaagtacttacgggcngnngcgaaggggggtcgtccgtcc

SEQ ID NO: 31037 - DNA, 2457 bp, Oryza sativa
  Clone ID: PAT_MRT4530_35382C.1
atggaggcgccgcctgtcaagagtgggtggcgggtcatggccccggcgcacgccggcggcagggaggaccggctcagcgacctccccgagggtgtcctccaccgcgtcatgtcgttcctggactcgcgccaggccgtgcggacgtgcgtgctgtcgcggcggtggcgcgacgtctggcgcaccgttccccgcgtccacgccgatttctgcgacttcactctgaactggaccagcgacgacgacgaggtggacgaagcggccgtagcggaggacgaggtggtgttcaacaggttcgtcaaccggctgctggagctccgtgatcccaatgcctcgattcgatcgttcttcctcagattctgcagatcggatggaggcgatgatggctcagcagaagggaacagatggatcagctacgctctgcagaagaatgtccggattctggaggtttccgtgctgtcctacgcattggagctcgatcactcggtgttttcatcgcgctacctgaggacaatggacttcagcaatgtcgtgatgaaccaaggtttcttcaagcaactcgagatggggtgtccagaattggaagagctcttcttggatgaatgtttcattgtggatgatgagatctcctcccagacactgaaggttttgaccctcgatgccactcatttctgctgtggcttcaagacttccatttcaagtccgagtattacttctctggccttgcactatcctatgagtggcaaacctgtactgaatgacatggaagcactagtgagcacgtcgatgctgctttgtcatgtgaaagacgacgattttgctgctaatgatctccgcgactatctctggagcctttataatgttgaaattttggatttcagttatcacgggaagaagggccaccgccaattcatcggatcggattgcctccgcgcctacatcgccttctcctcgctctccgtcctcctcctcctcggcggccacgtcgccctcctcctcctctcacggtgcctccgcctcccgctcgacgccgtctccttcgcgctgctcctccccaacaccgccgccgcgctggcgctcgtcgcgctcgtcgccatcgccgccttctggttcacgctgctcccagagtggatcaccgggcgctactcgtcgccatggcgttggtcctcgacgtcgccgttggtcctcgctgaacgaggagatcccagcgctgctcgtcgccatggcgttgcgggcttccacgcgcgccacctgttcgacgaaaggcgtctgagcgggtgctcggcggccatggaagagccgcctggcaagaaaggtccggccatggaccccgcgcaagactcgggcagggactggctcagcggcctccccgagggggtcctccaccgcatcatgtcgttcctggactcgcgccaggccgtgcggacgtgcgtgctctcgcggcgctggcgcgacctctggcgctccataccccgcgtccacgccgacatctacgacttcaccccggacgggaccatcgacggcgagggagaggaggacgtagaggaggccgaggtggtggtggtgttcaacaggttcgtcaaccggctgctggagcgacgcgatcccaccgcctcaatagagacgttcttcttcagatgctgcataccagacgaagacgacgatggatccgcagacgcgaacaggtggatttcctacggtttgcagaagaacgcctggtttctggaggttgtcgtgcagctcaactcattggagctcgatcgctcggtgttcaattcaatctacctgagaagaattgccttcggcaatgttttcatggaccaaggtttcttcaagcaactccagattggctgtccagcattggaacgtctctacttagatgattgcatcgttgcggatgacgagatctcctccaacacactgaaggttttgaccttcgatactactgaattctgctatgagcacaggatttctatttctattccgaccgttactactttagccctgcgcaatactatttgcggcaagcctgtactaaaggacgtggcatcactagtgagcgcatcagtggtactttattgtgtggaaagcggcaatttcgatgcttatgatctccgccactatctctggagcttttctcacgttaaagatttgattttcagttatcaggggagaaaggataattgtaaaacatcagaagtattcatcggtgagcttgaggaaaaatcatttacatgtgagcaccttacgagtgttgaaatgaaatgctgggaggatgatcccctggtgatcaacgtggttgacttctttgttggtagtggaatgtcttcttctcagattcatatcgaatacgaagacgacgatgaggatcaatttcatatcgaatctgatgacatgtttgggtttgagttcgagtatgaggacgaggacgaggatgaggatgaggatgaggatgagtaa

SEQ ID NO: 31038 - DNA, 170 bp, Oryza sativa
  unsure (1)..(170): unsure at all n locations
  Clone ID: PAT_MRT4530_35383C.1
aaccaagggcaacaccatttttatttccgcagggcacaggcacgccaggcactgnaaggaaactttaacacatgtgtgtcccccttggatgtgtgtgtgttccatccatcccggtatctgtggtccactcccaccacaatgtgtgcactccgagaggagatcaccaggga

SEQ ID NO: 31039 - DNA, 1824 bp, Oryza sativa
  Clone ID: PAT_MRT4530_35384C.1
atggagcagggccaccgccaattcatcggatcggattgcctccgcgcctacatcgccttctcctcgctctccgtcctcctcctcctcggcggccacgtcgccctcctcctcctctcacggtgcctccgcctcccgctcgacgccgtctccttcgcgctgctcctccccaacaccgccgccgcgctggcgctcgtcgcgctcgtcgccatcgccgccttctggttcacgctgctcccagagtggatcaccgggcgctactcgtcgccatggcgttggtcctcgacgtcgccgttggtcctcgctgaacgaggagatcccagcgctgctcgtcgccatggcgttgcgggcttccacgcgcgccacctgttcgacgaaaggcgtctgagcgggtgctcggcggccatggaagagccgcctggcaagaaaggtccggccatggaccccgcgcaagactcgggcagggactggctcagcggcctccccgagggggtcctccaccgcatcatgtcgttcctggactcgcgccaggccgtgcggacgtgcgtgctctcgcggcgctggcgcgacctctggcgctccataccccgcgtccacgccgacatctacgacttcaccccggacgggaccatcgacggcgagggagaggaggacgtagaggaggccgaggtggtggtggtgttcaacaggttcgtcaaccggctgctggagcgacgcgatcccaccgcctcaatagagacgttcttcttcagatgctgcataccagacgaagacgacgatggatccgcagacgcgaacaggtggatttcctacggtttgcagaagaacgcctggtttctggaggttgtcgtgcagctcaactcattggagctcgatcgctcggtgttcaattcaatctacctgagaagaattgccttcggcaatgttttcatggaccaaggtttcttcaagcaactccagattggctgtccagcattggaacgtctctacttagatgattgcatcgttgcggatgacgagatctcctccaacacactgaaggttttgaccttcgatactactgaattctgctatgagcacaggatttctatttctattccgaccgttactactttagccctgcgcaatactatttgcggcaagcctgtactaaaggacgtggcatcactagtgagcgcatcagtggtactttattgtgtggaaagcggcaatttcgatgcttatgatctccgccactatctctggagcttttctcacgttaaagatttgattttcagttatcaggggagaaagccacataatcactccagtcttgtgcagttgacaattgaaaacaatttgcaatggtgtccaaaattcttcaatcttgtcggcttgactctgggtaaatggtgtctgaatgcaaacttctatgcactaattgtcttccttcaaaactcaccaagattggagaaactgactctgatactcgctgaggataattgtaaaacatcagaagtattcatcggtgagcttgaggaaaaatcatttacatgtgagcaccttacgagtgttgaaatgaaatgctgggaggatgatcccctggtgatcaacgtggttgacttctttgttggtagtggaatgtcttcttctcagattcatatcgaatacgaagacgacgatgaggatcaatttcatatcgaatctgatgacatgtttgggtttgagttcgagtatgaggacgaggacgaggatgaggatgaggatgaggatgaggacgaggatgatgaggacgaggacggggatgaggatgagcaacgttcactttttcaatctaaggacgtatga

SEQ ID NO: 31040 - DNA, 202 bp, Oryza sativa
  Clone ID: PAT_MRT4530_35385C.1
ttcgttcgcttttgtttactttctctaatcccaagatcaatctgagtatgctcgataggcgaccatggctaagaacatacaaaataatcacgcagtgttattatggattacatagatgtaatgaacgcatgtaagagctaaattgactacttgactggagtttattatcgtagagcttcaatatagctgaaaaacgaggtgc

SEQ ID NO: 31041 - DNA, 183 bp, Oryza sativa
  Clone ID: PAT_MRT4530_35386C.1
atggatgtcgaaggcgaggaggcggccgaggtgctgcacagcgcggcaaagccgttggcggtggaagcacgaccggacgagccttgcctcgccgtcggggagcagctagagacagtggaagagacggcgattgaatttcgcggtggaggaaaatcggtgggattttatccttatcctaactaa

SEQ ID NO: 31042 - DNA, 656 bp, Oryza sativa
  Clone ID: PAT_MRT4530_35387C.1
gaagaaatcatcgatccagcagaaataataatggagctcgcaagcaggagggcagcctccctcctggccgtcgcggccattgctgccgtcttcctcgccggcccggccacggccgtggggaagaccggccaggtgaccgtcttctggggccggaacaaggacgagggcaccctccgcgaggcctgcgactccgggctctacaccatggtcatcatgtccttcctcaacgtgtacggacacggcaagtacaacctcgacctctcgggacaccccatagcccgcatcggcgacgacatcaagcactgccagttcatcggcgtcccggtgtcgctctccatcggcggcttcggcaacggctactcgctgccgtccaaccgatcggcgctcgagctcttcgactacctctggaacgcctacttcggcgcgtccaaggcgggcgtgtaccgccccttcggcgacgcgtggctcgacggcgtcgacctgttcctggagcacggcacgcccgcggacaggtacgacgtgctggcgctggagctcgccaagcacaacatccgcggcgcgcccgggaagccgctgcacctgacagcgacgccgcggtgcacgttcccgcccagcagctacctcggccgcgctgtggcgacggggatcttcgagcg

SEQ ID NO: 31043 - DNA, 1953 bp, Oryza sativa
  Clone ID: PAT_MRT4530_35388C.1
atggcgtggaggaatgatcgcagcaggcaaggtggagggggtactagcagggaggaggtgtttcgcgatgaagatgaggctttctttagcggaagccttgaggtcggccagatgggttttcagcccgggtatggctacggtcagcaaggaggccataggagggagtggcagcggagcggctttagaccgagaggaccgcgaagcttcggtcgcaatggggcggctatgcagggcggccgggtagagagggaccagcctggggcatccaaagaccgtggcagcagcgtcctgcaaaccgaccgatgcaagaaggtaatgagggaaggtggcagcaggggatttccaaagagaaagcaacaaccatccggaaagcaaaggaggcaatgggggcgagttcgattggaggcagcaagcaagattattccgaaaaatctggacgtagtgattggagatcattattttgagttgaaatttgaagtggagaaattgggggttgacgagaatggtgacgaggtggagatagaacaggaggaggatggggatcgagatgaggaggctgagaaggaggaggaacacgggaaaggaacgggagtggcagcaaatgatgatctcggcaactgcactttagagaaggacagagctgagatggcagcagaggaggttgttgaggcggcaatggaaaatgtgcttaataaggtttatgatgaggtgatggaagaagaagtcgttggacagggagtgggtatggaagagaacaacctttctgctgcaattgaaagaggagagaaagcaaaggaggaggagcaaatcttgatggctgcaaatgttagcgaggttgtgactactccgacgtgggctagctccagattggccggcatggatgaggcacacgccgtggagaaggctgggaaaagaaaggcgtggaaaaaccttgaatcacgtaataatgcgagtaattcgtttctttctttttcaaatgcttctatcgtttcagacttgctcaacatagggttagatcttgggggttcatgcagtaaaatttcagattctattttgagccttagagaagtagaagaagatagaatttctaagagtttacccttgtcgaattgtttgtgtaatgaggttaacaataagggatttagttcagaaggagaagaagagttagataaccttgttcttggtcacttatgtggtgatttagtagaagaagtcatggatgaggagaaagaccacctaagttgtggtgttcaaaaattctccaataaatctaataggaaaaatgctgaaataaggaggggaaagaggaagacatgtaaaaatattttctccaacgctagtcttaagagtttttgtgaaggccaagatttcttttggcattggacaagacctaggggaagatcaggaggtattttgttaggaattaatgaggcggtctttgacatttcaagcgttgatgaaggtgagttttatattaagttccacattaaaaataaggatgatggctttcaatggatcctcatggcaatctatggggcggcccaagaggaatacaaagaagctttccttgttgagttggttaattcttgcagtaaggagtcactacctgttttgtttggtggagatttcaccattattagaaatccttctgaaaagaccaatgataatttcaatgagaagtgccctttcctctttaacgcggtcattgatagcttggacttaagagagttggaactttctaggtgtaaattcacttgggctaactccttgtcaaaaccaacgtttgagaagctagatagaattttgatgagtaccgaatgggaacataagtatcctctagcttcgaatcgagctttgagtacggaacgttccgaccatacaccactattgttggacacgggtgttaatactcctaaacaaccaatattcaggtttgagcttggatggttgtga

SEQ ID NO: 31044 - DNA, 2862 bp, Oryza sativa
  Clone ID: PAT_MRT4530_35389C.1
atggcgtggaggaatgatcgcagcaggcaaggtggagggggtactagcagggaggaggtgtttcgcgatgaagatgaggctttctttagcggaagccttgaggtcggccagatgggttttcagcccgggtatggctacggtcagcaaggaggccataggagggagtggcagcggagcggctttagaccgagaggaccgcgaagcttcgggtcgcaatggggcggctatgcagggcggccgggtagagagggaccagcctggggcatccaaagaccgtggcagcagcgtcctgcaaaccgaccgatgcaagaaggtaatgagggaaggtggcagcaggggatttccaaagagaaagcaacaaccatccggaaagcaaaggaggcaatgggggcgagttcgattggaggcagcaagcaagtaaagataggagatagggaggtgttggctgatcaagtagagaagaaggagctcgaaggaattgttctcgggctggaagaggagaaaatgtcgatggatggggccacccaaacagttgatatgaaaacaacaaggaaaagtgagtttggaagggtgtttattgctgttttaaatccaaggattattccgaaaaatctggacgtagtgattggagatcattattttgagttgaaatttgaagtggagaaattgggggttgacgagaatggtgacgaggtggagatagaacaggaggaggatggggatcgagatgaggaggctgagaaggaggaggaacacgggaaaggaacgggagtggcagcaaatgatgatctcggcaactgcactttagagaaggacagagctgagatggcagcagaggaggttgttgaggcggcaatggaaaatgtgcttaataaggtttatgatgaggtgatggaagaagaagtcgttggacagggagtgggtatggaagagaacaacctttctgctgcaattgaaagaggagagaaagcaaaggaggaggagcaaatcttgatggctgcaaatgttagcgaggttgtgactactccgacgtgggctagctccagattggccggcatggatgaggcacacgccgtggagaaggctgggaaaagaaaggcgtggaaaaaccttgaatcacgtaataatgcgagtaattcgtttctttctttttcaaatgcttctatcgtttcagacttgctcaacatagggttagatcttgggggttcatgcagtaaaatttcagattctattttgagccttagagaagtagaagaagatagaatttctaagagtttacccttgtcgaattgtttgtgtaatgaggttaacaataagggatttagttcagaaggagaagaagagttagataaccttgttcttggtcacttatgtggtgatttagtagaagaagtcatggatgaggagaaagaccacctaagttgtggtgttcaaaaattctccaataaatctaataggaaaaatgctgagataaggaggggaaagaggaagacatgtaaaaatgatttctccaacgctagtcttaagagtttttgtggaggccaagatttcttttggcattggacaagacctaggggaagatcaggaggtattttgttaggaattaatgaggcggtctttgacatttcaagcgttgatgaaggtgagttttatattaagttccacattaaaaataaggatgatggctttcaatggatcctcatggcaatctatggggcggcccaagaggaatacaaagaagctttccttgttgagttggttaattcttgcagtaaggagtcactacctgttttgtttggtggagatttcaacattattagaaatccttctgaaaagaacaatgataatttcaatgagaagtggcctttcctctttaacgcggtcattgatagcttggacttaagagagttggaactttctaggtgtaaattcacttgggctaactccttgtcaaaaccaacgtttgagaagctagatagaattttgatgagtaccgaatgggaacataagtatcctctagcttcgaatcgagctttgagtacggaacgttccgaccatacaccactattgttggacacgggtgttaatactcctaaacaaccaatattcagggcaaatgaacaaggtagctttcatggggtagttccacacctaatagataatggtctatctatcctccaatatgcggatgatacgatcctttttatggaacatgatatagaagaggccaagaatctcaaacttgtactaagtacattcgagagattatcgggtctaaagatcaactttcataaaagggaattgttttgttatggtaaggctaaggaggtggagaaagattatatcttaatgtttgggtgtaattccggggattctcactttttgtccggtctaatgacagttaaaaataccttcctttcatgtggatctttaagggtctacaacgggactcaggttagattttgggaagaccgatggagtgggattagtccttttgctacacgttttcctgagttgtatagcatagtgaggaacaagaatgagtcagtagcaggtgttatgagtacaagacctttaaatgtttcctttcggagggctatagtgggaaagtatctaaaagattggttaaaggtagttgcagaggttattttactcatgtacagggacgtcattccaaaaaatgacatgatctggaaactcaaggtgatttttagggggactttttgggcaaaacaatggtcttcgctgcttaaggaggaagatggccaaagagtaaaagatggttggatgatattggagaagagagtttctagtttctttgcaatgagagggtggaacttaagaagaagattggaagtttaa

SEQ ID NO: 31045 - DNA, 206 bp, Oryza sativa
  Clone ID: PAT_MRT4530_3538C.1
atggcccccgctggagacgcacgcgtgacgcaagcggcgtgcacgcaagaaattttatgggaggagagtggtacggatgctgaagggaaaaatttctcatacgaattggcacgcttctcgaggctgccgctctgcgtgacgccatcctcccgtcgtggaacacggtttcgacagggcatggccgtcctttcgacagtgcagagcat

SEQ ID NO: 31046 - DNA, 1219 bp, Oryza sativa
  Clone ID: PAT_MRT4530_35390C.1
atgtcggtggcggcggaggggaaggagaagggggttggtggtgggggtggtggtgcgggtgcgggggcgtgcgagctgtgcggggcggcggcgagggtgtactgcggggcggacgaggcgacgctgtgctgggggtgcgacgcgcaggtgcacggggccaacttcctggtggcgcggcacgcgcgggcgctgctgtgccgcgggtgcgcgaggcccacgccgtggcgcgccgcggggcccaggctgggccccaccgcgtcgctctgcgagcgctgcgtccgccgcggcggtggtggccgtggtggtggaggaggtggaggcgctgctggtggtggaggccgtggtggtgggggagacgaggagatgggcggcgagggcgatgaggaggaggaggacgaggacgaggaggtggtcgtcgtggaggaggaggacgaggatgatgaagacgaggagggggagggggagggggagaaccaggtggtgccgtgggcggaggaggcggaggccacgccgccgcccgtcgcgagctccacgtcgagcagcagccgggaggccgccgccaacggcgcgaacgccgccgaccgcgtcaaggaggaccagccgtgctcgacgtcgcagccgagcttgtgccggtacgcgtcctcggctcaccatggcggtggtggccggagcgacgaggccacctcctcccggaacggcggtggcgtcggcggccgattccttgcctcccggcataggaagagatcgccctcggatttccgccggtcggggttggcgcagtcggtgagcggtgtgcagggaagtaataggctccaaggcggtcgttggtcgaaatgacttttcctgaggcaactgaaacaatgatgtagatgctgatgctaactacattagaaggtcacttttggtgtatccaggcatttggggggagatgtggatcactgcaaagatcaaacctccaccgagcacacacatcttcacatcttttccgtcgacaacttgcagagtcgacttatcacgcggccatcccagaactcggtagtattcataatcgcgacggcttgctggagcttgtatatgtgcccccactactttcatgtgtttaaatccctttttgtccttttggatgaggcgttctggctaacttaagaaatgatataggtttgcatttgcagggccattcttccatggtttccctgtttgaatgcttccattgtgccct

SEQ ID NO: 31047 - DNA, 327 bp, Oryza sativa
  Clone ID: PAT_MRT4530_35391C.1
gcacgaggcgcagatgctcaggttcaatgtccaagaatggtagttccaacaagcaatcatgagtgccgccgtaactttttggaattggaattggatttcttgacagatcgagatgattatgaggcggactttccatctgttgttaacgtgtccatactagaaccggaaccattaaaacatgctgtggagccagtggagcactcactactgtgcacactttcttatagacatgctgagaacagattcaggatggtatcagaaacttgttttgaaggggaaggttctcactgggcctcatctgctttccacacatacgatgccggtcgg

SEQ ID NO: 31048 - DNA, 619 bp, Oryza sativa
  Clone ID: PAT_MRT4530_35392C.1
atgacgaataaatcatcgacttgtaaaatgtaactgttctggaacagagagcagcacatggcagtcaggcagtgccacaaaaattcacacttacgcgtgcatatctcggcagttgcacgtcgcaacaaccaaaatcatacagtaattttggatgttcatgccgcgcgcgtgctcgcagacagctgttaacagtgaaatttggtaagcccaaagttaccatcggtttagagtcagtatcggcttcaaagttctagaatcagccgatgggagtctaactactaagtcgtgcttagaaccataatctctagcctgcttattgattgccaataagggtttcatcggggtttcagccgatttcatgacatcggacctccagccgatgtgtgctttaaacttcggatcgatgcttatttatcatatcattgctagctgattggtttatactggattatattattgctatattctatcatcatcagccgatcgcctttatatcattatctacattggatatatagccgattgcttaaaccctatcgctatcggctggtatcggcatcggctattatcggctatcggctggaaccactccattggcttgttagccgatcggctgttt

SEQ ID NO: 31049 - DNA, 516 bp, Oryza sativa
  Clone ID: PAT_MRT4530_35393C.1
aacgcacgcgcactcacccctatgaacacacgcacgcaaaccctacccctataccaccgaaggaatgaagcggtacgcacgtgttaacagtgaaatttggtaagcccagagtagtcatcggcttagagtcaacatcggctttgaagtcctgagattagccgatgagagttgtcaagtcgtcagttgtcggattcgtgctatattcgcctacatcttgattgccaataagggtttcattagggtttcagccgatttcatgacatcggacctccagccgatgtgtgctttaaccttcggatcgatgcttatttatcacatcattgctagtcgattggtttatactagattatattgttattttattacatcatcatcaaccgattgcctttatattattatctacattggacatatagccgattgcttaaaccctatcgatatcggctggtatcggcatcggctattatcgctatcatctggaactactccatcggcttgtcagccgattggctgttt

SEQ ID NO: 31050 - DNA, 142 bp, Oryza sativa
  Clone ID: PAT_MRT4530_35394C.1
atgacaatttcccccgtggggccggggatctgcccctacgggggcaggggcgggtgtggatttcaacccgcggggagttggggccgggccccgatcatgagccagggcaaaggggcgggcgacacgcgggtctccggaggat

SEQ ID NO: 31051 - DNA, 617 bp, Oryza sativa
  Clone ID: PAT_MRT4530_35395C.1
ccaggccgcctgctcggcgccgcccggcacggccaccgtctgtctgctcaccgccgtcgggcacgcccccccccgccgcgcgggcctacagagccgcctgctcggcgccgcctggcacgaccaccgcccgcctgcccgccgccaccgggcccgcccccccggccacagggagaggggcgattgataacagtaaaatttggtaatcggcaaagacgtcatcggcttagaatcattatcggctgcagcatctcgaaatcagccaatgggagttatcaagtcgccaatagtcgggttcctactatattcgcctgcttcttgattgccaataagggtttcatcggggttttagccgatttcatgacatcagacctccagccgatgtgtgctttgaccttcggatcgatgcttatttatcatatcattatttgctgattggtttatactggaatatattgttatttcattacatggtcatcagccgattgcctttatatcattatctacattggacatatagccgattgcttaaccctatcgctatcggctggtattagcatcggctattatcggctatcggctggaactacaccatcggcttgtcagccgatttgctgttt

SEQ ID NO: 31052 - DNA, 606 bp, Oryza sativa
  Clone ID: PAT_MRT4530_35396C.1
atccgttcatctctcacgcgctcctcaccgatatcgtcacacgccaacgacaggaccacagatcacatacgaccactgcagtcgtctaccactcaaccatcaaaccacagagcgtcacaagacactcaaatgtggggtgcgcccaacccgcaagcagacaccacactgacataggttacacactgtgaaaaacatcaaatcgccaaccggctaacgcccacaacccattgttccgccacccccaaatacgtcggaacccacgctccggcttcgtgcttagaaccataatctctagcctgcttattgatcgtcaataagggtttcatcggggtttcagccgttttcatgacatcggacctccagccgatgtgtgctttaaccttcggatcgatgtttatttatcatatcattatttgccgattggtttatactggattatattgttattttattacatcattatcagccgattgcctttatatcattatctatattggacatatagccgattgcttaaaccctatcgctatcggctggtatcggcatcggctattatcgactatcggctagaactactccatcggcttgtcagccgatcggctgttt

SEQ ID NO: 31053 - DNA, 626 bp, Oryza sativa
  Clone ID: PAT_MRT4530_35397C.1
gcgggggcgaccggtggacggcggcgtgcggctgtgggtgatgagcggcggcgcgccggcagaggacgagcggcgccgtcgaggacgtgcggtgggcagtggcacagggggatgcgtggtgacactggagctccaccccgtcgctcgtcccctccagggactcctccatcgatctggcagactaccgccttgttgacagtgaaatttggtaaggccaaagtcatcatcggcttagagtcactatcggctatggcatctcggaatcagccgatgggagttatcaagtcgccaatagtcggattcctgctatattcgcctgcttcttgattgtcaataagggtttcatcggggtttcaaccgatttcatgacatcggacctccagccgatgtgtgctttgaccttcggatcgatgcttatttatcatatcattatttgctgattggtttatactggattatattgttattttattacatcgtcgtcagccgattgcctttatatcagtatctacattggacatatagccgattgcttaaaccctatcgctatcggctggtatcggcatcggctattatcggctatcggctggaactactccatcggcttgtcagtcgatcgtctgttt

SEQ ID NO: 31054 - DNA, 384 bp, Oryza sativa
  Clone ID: PAT_MRT4530_35398C.1
accacaccactccctccgcccctccggatgggtttctccgccgccacccccatggccaccaccaccaccacttcctgctcctcctacaattcccaaaaccctaaccccttcaacctaccgccatggctccgcagcctccgctgccccttcaccttcctctgcccgacctcaccggaggggcgcacccattctactacagggtgacccgcgcctcccccgctggacggggggtccacgatcactcggcggatgccaccggcgctgaggcggacccccgtcatccacagctatgacgtctcaacttcgcacagggggataggcgcctaccatggcggtgacggcagactgagaatgagggtccgatcccccagagggagcctgaga

SEQ ID NO: 31055 - DNA, 631 bp, Oryza sativa
  Clone ID: PAT_MRT4530_35399C.1
accacctcacttcacttggggggcaagttgcaagtctcaagtttacaaatccacccctttcacaaacaaaccgaagcttcttctccacttcgtcccacacttcaacgcctcgcgatcgatcgccccaaatccccgccgccgccgccgccgccgcgaatcgccggatgcccgccgcccggggcggccggcgcacgcctattaacagtgaaatttggtaatcggcaaagacgtcatcggcttagaatcattatctgctgcagcatctcggaatcagccgatgggagttatcaagtcgccaatagtcggattcctgctatattcgcctgcttcttgattgccaataagggtatcatcggggttttagccgatttcatgacatcggacctccagccgatgtgtgctttaaacctcggatcgatgcttatttatcatatcattgctagccgattggtttataccggattatattgcaatattatattatcatcagccgattgcctttatatcatcatctacattggacatatagccgatttatcaaaaccctatcgctatcggctggtatcggcatcggctattatcgactatcggctggaactactctatcggcttgtcagccgatcggttgttt

SEQ ID NO: 31056 - DNA, 344 bp, Oryza sativa
  unsure (1)..(344): unsure at all n locations
  Clone ID: PAT_MRT4530_3539C.1
aaattccgaattttagttaattttaaattgtattcctacttgaactcttcttttctttttgctaatttctgattttatttttatttttatttcaaatattaattaatctcgtattaggttattatatggactcttctatcaatattccttatttttaattccgaatttcagctatttcaaagtatattcctacttgggctcttcttttcttttctaattttggattttattttattttgattaatctcgtattcggttcttatatggactcttctctcaatattccttatttntaattccgaatttcagctattttaaaattgtattgctacttggactctcct

SEQ ID NO: 31057 - DNA, 2274 bp, Oryza sativa
  Clone ID: PAT_MRT4530_353C.1
tcaaatccgcaacattcttatagccgatttgagtttggctttttgatcttcaatagacttcgggagatcggctaactttttgtgctccatatccagctcggcgttgcattcttgaagttgtgccaagaggtcaatcttacgagcttcaagccgatcgatatttgacttgatcgggccctcagacagctgatcaagcttggatttctctacatgcacaagttgctgattgtgctgaattgtaacttcaatgtctttgcgctcccggcgatcggctaatttctgcctggccttctctagcttgaattggtgttgctcaaggtaaacggctggagtaagggcatcggttagttcatccgggagtagagcttggatatctgtgaacctggcctggatcgagccacagttggtcactaagttgtctaatgatgcttctagccgatgagagatatcctcgagcattctcttcacatcatcagacagaggagctacagctttactggtggtgtcttcctctatttcatcgagataatccttgatgtcgaaagaaaacatatcggctaagactggaataacaggagcagctggttgttcttcctcttcgacgttatgactgtctgcaaccgatggagtacggttgcttgattctcgtctcgaaaaatgagctggggcagaaggagttggaggagtctgcttgggtgaagccgatggtgttctctctgtatcgctcatttcggctgcagcctgatcaatgtcctcttcaatctcttcttcatctagcgcttgttcgatagatggatctagggcagacagatcatcaactggcttggttttctttgatttgattttcttcttgagagctggagctgatgtgtccatagtcgatgatctggtttttcttttcttgcctgcatcagctggttccctgattaagccttggagaagagccgaagtcttgggggcatcatagccgatgaatggaggagatggtccacctccatttggaattattccccaccatctgtcgaagtttctactcctgaatcttgccaactctatattttcaatgctgcccaatggaggtccttgaagattaagcagccgattcatcattaaggtagatgagattttccctcggcattggatcttatcggcaaaaaataagccaattggaagttggcccattccaaactgcctagcagagctcattggatgataaaattcatatgagacgtaagtgtttcttccttgataaatgccaacaggaaggatacatgggctgattgcagttgagaaaatttctctgggtttctgatatctgtcatggttgatgtcttcgaatctaaagtccaaaggattttccagaagcgttgaatcttcatagaggaaccagactcgagcttctttctggaatccttcataaaagctgcaaaaccaatctttgagcagttcggctgatagctttgctcctgcatcgattggtgtggaggcatattctccgaaggaggtgcatctccgatgagtgcgttcttctctgtcactgtctttaatcggctccagtcttgggaattcagcttctgttacaaatggccgattgacaaacttcatgactactaaattcaaccaggattgcagtagccaccatggtccacccgctccgactactgagccgacagctaacttagccgatgcattatttagcatttggtacaagtagccgaggaggattttgcctaaagggaattgtctctttgtttctaaggcttcggctacagattgccaattggttgtagggccacagcttgatccaaagaagaagaatttctctagccacatcagcaagaaagccacatgttctcggggggtgaccggaccctggcccatgtatgctgcaatatagcccgaccagccgcctatgctcttagtcttgaagtcatattggttttttgtgttcaggctcatagggttagccgatgaggtgatatctagacctgtgatcatgatgatatctatgagagttggggtcatcggcccttggttgaataggaaggcgttgatggtgttgaaccagaaataagtggcagctgccattaggggttcgtccttagctgagttggctatggtaaggtcgagtgcttggccgattccaatttcatcccaatgaactcttttactggccgataagcgtttgaaccatgtgatccagctcttctcgggtgaggttttctttgcatactcagccgatggtgcggaggacggattggcggaggttgacat

SEQ ID NO: 31058 - DNA, 2645 bp, Oryza sativa
  Clone ID: PAT_MRT4530_35400C.1
ttttttttttttttgaaaaaccttttttttttttttttttttagaacggggaaaatcatacaaaatattttattgaaatggatttattgcgtccatcaaatacattcatggagcaagtcatctcaatgtgtaacacaagtatacagaagtccaacaccacactctcagatcattccatatcgtgtttcagttccctagaccaggagcaacttccaccgaataaacgaaagactatggacactaaaatgtaggaagagaaagtgcatctccatcatataggaagagaaatggaacgcacaagcatcagtggaagtgcatctgtcatctaatttttacaatctagcaatctttgagcgcaatcagctggtcaacgacgccaggatcagcaagggtgcttgtgtcaccaagttcatccagctgttttgaggcaattttgcgcagaatcctgcgcattatcttaccgcttctcgttttaggaagtcctggtgcccagtggatcttgtcaggagctgcaaatgccccaatctggttgcggactgtcaatatgaggcttttccgtagttcttcactataaggaacaccatccaccaaagttacaaaagcatatattccttgacctttcacttcatgctcaacagcaacaacagcagcctctgcacactttgggtgtgaaaccaacgcagactcaacctctgctgtaccaatccggtgtccactgacattgatgacatcatctactcttccagtcagccagtggtaaccgtctttgtccctgctgcaaccatccccagtaaaatagtagccagcaaatggcttgaagtaagtggtctcatatctatcatgatctccatagagagtccggaaagccccaggccatgatttctttatgcaaagatatccactgcattctccttcaatctccttccctttctcatcaacaatgacaggctgaacaccaaagaaaggaaaggttgcagaacctggtttttgaggccaggcgccaggtaaaggagtgatcatgaagccaccagtttcagtctgccaccaggtgtcggagatagggcatcgagagtccccgacaatattgtagaaccatctccatgcgctaggattaattggctcaccaacacttcccaagactcgaagagattttcgagagtgccgtgtaacatactcggtgccatcacgcatgagtgatcgaacgagtgttggtgcagtgtaaaatattgtcaccttgtacttgtccacaatgtcccagcaccgaccagaatcagggtaatttggagtcccttcaaaaacgagaactgttgctccattcaggagtggaccatacgtcacatagctgtgtccagtaatccagccacagtctgcagtgcaccagtatatgtccgacggcttgtaatcaaatgcatacttaaatgttgttgcactgtaaaccatgtagcccccagtagtatgcaacacaccctttggctttcctgtactgccacttgtgtacagaaggaacaatgggtcctctgcatccacccattctacatcgcacttggttgggaaactggtcacaacatcctgccaccaaacatcccttcctgcttgccattttgtgtcttctctcttcattgctgactgattttcatatgtcaaacatagacctacagcgactccttgtttctcactttcagccagaccagcatccactatatctttcagaaggatgggcttcacccctcttttgactgcattgcaagtgatcacaagcttaggcttgcaatcaacgatcctttgggccagggaatccgcagaaaagccagcaaatacaaccgagtgaacagcaccaatgcgggcacaagcaagcatggcaatgggaagctccagcaacattggtaagtagatgatcacagcatcacccttgccgacaccaacactcttcaagtaattggcaagctggcaaaccctgtccaagagctctgaataggtgagcttcccatcctgaccaggctcattgccctcccaatacatcgcgatcttgtctccgttcccagcctcgacgttgcgatcaacagcattgtaacatatgtttgttttgccacctttgaaccaactgatctggacaggccccttggtgacgtcgaggttctcggagcagacctcactggggttccacttctccttccagtagaaggcgtcggcgatctccgaccagaacccggccgggtcgttgattgacctctcatacatcttttggtacttcttgggggaggggacgagggcgtcggcggagaactcggcggaggggtagacgaggtcgtgctcctcggcggcgagtgactcgccgaggacgacggcgttgatcccggagatcctgccggcgccggagggcagctccgacatggactccacgtgccgcagcttgtccgacgacgcccccgccggctggtccccgctcgccgtccccatggcggtcgtcttcctcttcgtcgtcgtcggcggcagatgatgcggcgagatccaagccgaggaggaggcgaggtgtgggggcgcggctgctgctgctttttctgcttgatctgtgatgtggaacttgtagaataagcgcaggaagacgaaatcacgacgaggggttgagggaacaaggaaggaaagca

SEQ ID NO: 31059 - DNA, 618 bp, Oryza sativa
  Clone ID: PAT_MRT4530_35401C.1
gaaagctcgttttcttttcgtggaaagttatatctcggtcggaaaaggagagcgcaggtaacgaaacgagaggatcgatgttacgtaggccgtcgtggagttgtggtttggatgatcgatcgacgaggaggccgatgatgacacgtacgttccccctgccgtgacgggcaaaatccacgggctaaaaaacattcgaacgatgaaatttggtaatcggcaaagacgtcatcggcttagagtcattatcggctgcagcatctcgggatcagccgatgggagttatcaagtcgccaatagtcggattcctgttatattcgcctgcttattgattgccaataagggtttcatcggggtttcagccgatttcatgacatcggacctccagctgatgggtgctttaaccttcggatcaatacttgttctactatatcatattgttagccgattggtttctactggattatattactatattacatcatcatcagccgattgcctttatatcattatctacatttgacatatagccgattgcttaaaccctatcgctatcggctagtatcggcatcgggtatcggctggaactactccatcggcttgtcagccgattggctattt

SEQ ID NO: 31060 - DNA, 953 bp, Oryza sativa
  Clone ID: PAT_MRT4530_35402C.1
gaccatatctgatgggagatgtgctgcgagctcaggccaccgcgtcggcggaggaggtggccggcggcgtctggccctgcgagctcgacgaccacctcataggcgagctcctcggtgacgacggcctgttcgtcccggccgccgaacaccccaccctctactactcgttcggcgcggggtcatcagcagccgccgccgccgcgccgtgcaacgggggcggcagcgctgatcacgagcggcggccgcggccggcaccggcggtgagcagggatctgtgctcggtgtactcaggcccgacgatccgcgacatcgagaaggcgctgtcgtcgtcggcgtcgccccggccgccgtacccctccggccgccgctacagctctctgtatttggtggaagcggagagcaagtacacgagcaaggtgaggagctgcggcggcaagatgccggccgacgggtacaagtggaggaagtacgggcagaagtcgatcaagaacaacccacatcccagaagtaacttactgttaacagtgaaatttggtaagcccggagtagtcatcggcttagagtcagcatcggcttcgaagtcctgagattagccgatgagagttgtcaagtcgtcagttgtcggattcttgctatattcgcctgcttcttgattgccaattagggtttcatcggggtttcagccgatttcatgaaatcggacctccagccgatgtgtgctttaaccttcggatcgatgcttatttatcatatcattatttgccgattggtttatactggattatattgttattttattacatcatcatcagccggttgcctttatatcattatctacattggacatatagctgatagcacaaaaccctatcgctatcggctggtatcggcattggctattatcggctatcggctggaactactccatcggcttgtcagccgatcggctgttt

SEQ ID NO: 31061 - DNA, 963 bp, Oryza sativa
  Clone ID: PAT_MRT4530_35403C.1
atggcggctgctgtagctcagcgtagggaggaggtgcagctgctcgacgtgtcgaggaggcgatggggaggaggacaacaggtcaacggcggtggtggtggctcgatgagaggaggcgacaacggcagcttagcgcggggaggtgatggtggcggctcgacgtggggaggaggcggcggcggctcagacgttggcggcaaggaaagagtcggcgtcgaatccatcctcatcttcgaagtcaagctccccgaggtacgcggcgctgccgttcttgaggacggggaacggcagaggagatcggaacaggaggaatcgttggcgagcttcttggcgaggccgaggagccgcgggcgacgacgacaagagcatgggggaggagcagcggcagcagccctcgtcggcgatgccggcggcaccgaatctggaggaggagacggggatcttgaggttctcaccagagatggccgcggtgggcgacgacgacaagagcttggggaggagcggcggcaacggccctcatcggcggtgcccgcggcgtcggatctagaggagacggggatccccgcaacgctgctcgccggctggttgctctgcggagcgggagtagcagcggcggcacggtgcgcgcgacgagaggacagggaggagcagcggcggtggacctcgtcggcggtcctggcggcgccggatctggagctctcctccggctggttgctctctggagcaggagtagcagcagcggcatggtacgtgcggggagaggacagggaggagcagcggcggcggccctcgccggcggggagaaggcgaggccgacgtggtgcggtggcgttggggacaaagaagatgtggtgtggtgtcgacaacgggaagggaaacagcgtgagggaggaggacgtaaaaagcgacgggagtggcatggttccaattttagaattttttagtggcatgaaaccgatatga

SEQ ID NO: 31062 - DNA, 507 bp, Oryza sativa
  Clone ID: PAT_MRT4530_35404C.1
cgtccttcgtgctcgcggcggcggcgctactcctccaggccgtgacggcggcggcggaggcggcggggggctgttaacagtgaaatttgataatcggtaaagacgccatccgcttagaatcattatcggctgcagcatctcggaatcagccgatgggagttatcaagtcgccaatagtcggattcctgctatattcgcctgcttcttgattgccaataagtgtttcatcggggtttcagccgatttcatgacatcggacctccagccgatgtgtgctttgaccttcggatcgatgcttatttatcatatcattatttgctgattggtttatacttgattacattgttattttattacatcatcgtcagccgattgcctttatatcattatctacattggacatatagtcgattgcttaaaccctatcgctatcggctggtatcggcatcggctattatcggcatcggctggaactactccatcggcttgtcggccgatcggctgttt

SEQ ID NO: 31063 - DNA, 325 bp, Oryza sativa
  Clone ID: PAT_MRT4530_35405C.1
accataatctctagcctgctttttatttgccaataagggtttcatcggggtttcagccgatttcatgacatcggacctccagccgatgtgtgttttaaccttcggatcgatgcttatttatcatatcattatttgccgattggtttatactggattatattgttattttattacatcatcatcacccgattgcctttatatcatcatctacattagacatatagccgattgcttaaaccctatcgctatcggctggtatcggcatcggctattatcggctattggttggaactactctgtcggcttgtcagctgatcggctgttt

SEQ ID NO: 31064 - DNA, 318 bp, Oryza sativa
  Clone ID: PAT_MRT4530_35406C.1
atggtgccaaggctctcatgcccccgccgccgccacaatgctccgcttctgcctccgccctacgcccctacgccctcgtccgcctccacccctacgcccctcctcccctacgcccttgtccgcctccgccttttgtttcatttggaagcagctgtcgacgagcttagccatcctccaagcgccgccgcccgaaggtgctccccgtcctacctcgccaccccctccgtctccccctccgcctccacctcggccctcgccgccgccgccaccaccacctcctccaagcgccgcagtgctccccgtccttccccgtcctag

SEQ ID NO: 31065 - DNA, 422 bp, Oryza sativa
  Clone ID: PAT_MRT4530_35407C.1
catcctcttcttttttttttctatcgtgtataaaggacatatattgcaaaaaatggctaaatacggtcccggagcaatttttgggaggggcacaagtttgccttatggtggcatcggcctatttccacaaaataaccaaaaataggaagtatttggccactgaaaccgggcccgatcttttttaagaggggactatttagaggttcatatatcggaggggacccaacaggggaacccatgggtggtacttagaggggggagccacccttgtacccaaagccagctggaaaggttttagggatgaaaaggtccaccacccgggagccggtatttctggcaaggaaggggaccaagaaggggcccttggggggcgaacacttttgagggtccaggtgttagacccccaatccctgggggccacc

SEQ ID NO: 31066 - DNA, 231 bp, Oryza sativa
  Clone ID: PAT_MRT4530_35408C.1
atgaaaagaactgtaaagccatgcgagaccttctggaaggagagaacactaagacaaagaagttcagtggttgtgcaaactgaaatctttgactttgttgcatgtactatattgctctgtgagaatcacagcatgagttctctggcatggaggctgatggctctaggaggatctgccagcaatgctatggctatccctggcagacgtgaactgcactgctatttggaataa

SEQ ID NO: 31067 - DNA, 832 bp, Oryza sativa
  Clone ID: PAT_MRT4530_35409C.1
ttatggttcgtcactccgaaacacatcgatgtcctttgatggtgtgcaggctggtatacatagctcaagggttggatagcacagctggtccagttcacagcaatagaacccaccgcgggttcgaacacaatgatcaggtttataataaagttctccaaagctgatcttgttttttactccgatcagcatatcccttcttatcttgtatgtggtttgacttttcttactgtgactaattagttgaatgatgatgagtttgcacttcaggagctcaatgaccatagttttgctgctcgccgccctcacatgcgctagccggctgctgcccggtgagcactcattgccttccactctgtccccctcattgacacctttcattgatgccgcagccgccatgattgaagtgctcaaagtgaggaacaaactcaccaagtttggtgccaatccaaccacgtttgagcctccaaacgctggcttgatgaagatcggatgggaggatgatctcgggccgctgctgtcctttctcccgccggatttggcggaggaagagcgcctccggaggctgctgcttctcccgccaaacgccgccgctgccccacgccgctacagcggaagggactgcgctgtcgggccgccgccctccttcctcccaccggatctagtggaggggatggcgctgtccggccacacgccgacgacgccgacgccggcaccgacgcacgctgctaacgacgccgacaccgatgcctccgctcctcccaccgctcttcctgccgccaggagaggagaagagaaaggaagagaagagaagaggagtagtgccccaagctga

SEQ ID NO: 31068 - DNA, 317 bp, Oryza sativa
  Clone ID: PAT_MRT4530_3540C.1
atggagctgggcgatacctgggtaggagggctctggaaggggcctcggccccgctggggcctggaaggacgggccacgcgggggccgtgggggcttcatagaagaggagccgaaagggacccttttagggttccgacgcgggaggcgatccctcgccaccgcttccgccgcagcctcggtcggtgcgcgccaaaacccgagaaaaagccttcgccctttggcaattttctccggtcagatcaaaggtgcgcggtccagggcggacgaccggagacagaattagcttgtcgggtgccagggcccagggatttcacaac

SEQ ID NO: 31069 - DNA, 225 bp, Oryza sativa
  Clone ID: PAT_MRT4530_35410C.1
gaaaaggaaaaaaagaaaagaaaaacaaacattagccgcacccggatcgaagcagtgaagccgcgacggctatcgtgaggcgatcgtcggtgacacgatcgccgcgcgcgcaccgatcagtgaaaccctgcactgtcgctcgttcggttggagagatagggcggcgggggcaatcgatccgcccctggggcgccggcgaagtcgcggctgaagaggctgttcgag

SEQ ID NO: 31070 - DNA, 998 bp, Oryza sativa
  Clone ID: PAT_MRT4530_35411C.1
cgagcacgattccaacctcccaagcaagggggagaaacaatggcgccacacctgaaggaggtgtgcagcagcctggccgcgtccaaggagctcgtcaaggctctcgccggcatctggggccccggcgacggcgccctgaacccgtcgacggcgtcgtcgctgctctccgcgctgcgcgccgagctcgacctggcgcgcgcccacgcgcggcggctcgccaaggaggaccggcggcgcggcgacgaggcggcgcgggcgagggcgcggctcgccgaggacgcgcgggagtgggggcgccggcagagggagaaggccgcggcggcggtgcgcgtggcggcggcggagctcgacggcgagcggaggtcgcggcggcgcgccgagagggtgaacgccaagctcgggagggcgctggccgacgcggagagggagctggcggcgtcccggagggagctggagagggagaggcggtcgagggagcggctggagaaggtgtgcgacgagctcgtccggggcggcctcgtcgccgccggcggcggcggcaggggaggcgaggaggaggtggaggagatgaggcgggaggcggagagggcgcaggaggagctggagaaggagcgggagatgctgcgtctcgccgacgagctccgcgaggagagggtccagatgaagctgctcgaggcgcggctccagttcgaggagaagaacgccgtcgtcgagcagctgcgcgacgagctcgaggccttcctcgggagcaagaaggatcggcagcagcaagaagaaccaccgccgcctgacgcagacgaccaccgccgccgccgacccgacggccatcacgacaacgacggcgacgaagaagacgacggcggtggccgcggcgagtgcgtcgccgaagattcagacggcagcgagatgcactccatcgagctgaacgtggacgggaacagcaaggactacagctggagctacaccacggcttccaaggacatgacgacgacggcgag

SEQ ID NO: 31071 - DNA, 2120 bp, Oryza sativa
  Clone ID: PAT_MRT4530_35412C.1
actgctgccattcccgtgactgtaccacatgatcctccaaggagcgcgagtatccccagtgcagctcctatggctcatgccaccggccgttgctggtactctgcaaggatgaacctccggcgtcttgttgcaggaattgggtccaacaggggcatccgcagttggatcccaactgtcccccgtacatctgcactggtggcgaagtggaagatgtctcttgtagtgcttctctcgccgcgttatcctgcgtgggacatcatgaggcaactccacttggagtggaatggttagttctcagcagcattgcttgatcatgggttgaatgggtgaaactttgatttttctatccatggtattcaaaaggataagttcgtactattcggatatcagctctaggaaacaacacgaaaccaagcaacctatgcaacaaccccaaggtaggataatggatgtcactagttctagtatttttacaggatgagagacccgaaatactttgccaaaacatacgcttgttaaaaatcaggaaatgcgttcctgaaattaactttgcatgttttgtcaaagcctagatgcaagctaaggtctttccaagaaaagtgatattccttgcggaatgtatggaaagtaacaccatcgcctacctctagcaaggtacataaaaactacatggtaagcaaacgggaacccggctcgtctacacatgcaaatttatcccaacctatagcacgccaaatagtatgaaaattagcatccatacctatccttttcagaaggtcgagtcgtatgctcaggtctgagcacacgttcggtctttcagcatatgataggcttgcatttcccggtcgcccacgaggtcaagatcggagttgtcgtacaacctcggtggaacgtacgcctcctccatggatgcatctgcggaagaaggtgtactccgcttatcgtgtcggcttgtccgtgtgcttgatcccttctttgtcttaagtgcgggcggcggcctcttcgtaactgggaacacaggttgaccggcctgtattctcggcttcttggatgccggcttaaggtactgacggtttctcatttcttcctgctccaagaatctcatcatgaaaacgatgaggctatccgtccttcggggtttttccttgacctctttgtgggttcggttcgttcttgatccaccccatggagcaaagctccatcctcggcctccttgtggacgatacccgtttttgttgttcatgaccatgacgtcctcacgggtttccggacaatccatcctagaatgaccagtactgccatagacctcacatgtcgggtgagagcctagagccttaacggtaccctgattggcatccttctcattgttgtctaatctcttcaaaaggagatcgaactgagtggctagcattttcgtccacttgacggtgtacatgccacattgacgggtttggagtcattcctcattccaccccatatttgagagcatcttctcaatcggttggcatctgactgttcttgagaaggatgtccctccagcagcagcatccaggtgatcccaggacgagggggtgtattcctgcagcctttcccaggcttcaagaatggtttcatccctcgtccgctgcaaactggatattcttccacgaagagcattggtcttacccatcgggaagaatcttgagaggaatgtcgttgcacggttggcgtagaaccattgtttcgctctcccgaggaggaagaacgggaacagtcagagcctgatagtatctagagtgactccgtgctaccgattctaggaatttgtgcagatgagcacttgcatcctcattaggcttgccacagaacgggcaagcttgcgccatcttgattaggctggttttcatatcaaagtcaccatctcccatgccaactcaaagtccaacgggcacgttgtcagcggagggagcagcgaactcgtgaagggtcttctcagccatatcgttaagtgttgatgacgttggtatgatttatctggttagtgataaagtcacttgaggagagatgactctgggtctggttcttctcaggtgtgattctggattctctttgaaactgatcagcaaatccaaaccagtcat

SEQ ID NO: 31072 - DNA, 570 bp, Oryza sativa
  Clone ID: PAT_MRT4530_35413C.1
actagtggatcccccgggctgcaggataagtactactcctaacctgtagaattatcaatctatggcaatcaacctcaatgaattatcatctgacctgcaagcagaatgagaaaccaatataatatcatatagctgtaagacatgatcttttgaacaagagacttgcattatgtagtgttttatttatccatcacttgagcagttttcacaattcctatatatcgaatggtaaactctacttcaacgtactttcagaaaatatgaaatatataaatgttaacagtaagatgaaatcaaaagtactaatctccaatagtccacatatatctggatcatatccacctgaaataaaagattaccacttttttatgtactgcaatttgtaattagcaattaaacatgtgcatgctgcaaaaatattctacaaaaacaggactagccatctttccttttccttttaacaaacagtaatagcaaactatcagtaaacagagaacatctacatcaaggtatatccaccctactcgcttccctaatcttccttccccctcgtgattgttgctgttcttg

SEQ ID NO: 31073 - DNA, 2604 bp, Oryza sativa
  Clone ID: PAT_MRT4530_35414C.1
gcacgaggacgccaccgccgccgccgccgcgaacgccatggccacgggcatgctgctccgcggcctccgctcggcggcgagccggacgagccctgtcttcccgacctccgcctcgtccccggcgccctacgtctcgccgctcctccgccgcctctactcggccgccgccgcgtcggcagccgcctccccggccctggggcccggaggcgccctcgacccgtcccgcatccgcaacgtggcggtgatagcccacgtcgaccacgggaagacgacgctgatggaccggctcctgcggcagtgcggcgccgacatcccacacgagcgcgccatggactccatcagcctcgagcgcgagcgcggcatcaccattgcctccaaggtcacttctgtctcttggaaggagaacgaactcaacatggttgatacacctggtcacgctgattttggtggcgaagtcgagagagttgttggaatggttgaaggggcggtcttggttgttgatgctggggagggacctttagcgcagaccaagtttgtactttcaaaggctttgaagtatggcttgcgcccaattctccttctcaacaaggttgacaggccatcagtttcggaagagacctgcaatgaagtagagagcttggtgtttgatctatttgcaaatcttggtgctacagaagaacagttagacttcccagttctttatgcatcggctaaagaaggctgggcttctctagaattcaccaagagccctcctgataatgcgaaaaatatgtctgcattgcttgattccattttacagcatgtgccttctccaaaagctgaccttgaggctccattccaaatgttggtttccatgatggaacgcgatttttatctaggacgaatactgactggacgagtaagatctggggttgtccgtgttggtgacaaagtgcatggtcttcgtagcacagatgatggtgttcagaagatcgaagatggaaaggttgtcaagctcatgaaaaagaaaggaacaagtatggtaatagtagaggctgcaggagctggcgacataatttcaatggctggattggctgctccagcaattgggcatactgtgtcaaattcagatattttgactgcccttcctacaattgagttggaccctcccacaatatctatgacttttggtgtgaatgattcaccactgtctggccgcgatggcactcatctaactggagcgaaaataggcaaccgcctaatggcagaagcagaaacgaacctggcaattaatgttcttcctggaccattatcagaatcttatgaagttcaaggaaggggagaacttcagttaggaatcttgattgagaatatgcgccgcgaaggatttgagctttcagtttcacccccaaaagtgatgtatagaacagaccgtggagaaaggttagagcctattgaagaagtaactgttgaggtagacgaggagcatgttggatttgtcatggaaaccctgacacacaggaagggtgaagtaatggacatgggccctgttccagggacaactgggagaactcggatctttttgacctgcccatctaggggtttggtgggattcaaaggaatattcagcagctttacacgtggaactgggtttatgcatcgcgctttccaggcatatgctaaatacagaggtcagctgggcaatgttagaaaaggagttctggtatctgtcggcaagggacttatcacttcacatgcacttatgagtttagaagctcgtggtattctgtttgtttctcctgggatggaggcgtacgaaggcatgattgttggagagcactcacgtgacagtgatcttgatatcaatcctgtgagaactaaagaacttacaaacattcgagctccaggaaaggatgaaaatgtcaggctttctccaccacgattgatgagtttggaagaggcaattggatatgttgctgcagatgagcttattgaggttactcccaaggtcattcggcttcggaagaaatatctggatgccacgaaacgtaagatgatgaaaaacaaaccaatggattgaagcttcagtgacactaaacgaagttttgtgagtgctgctacattagtctataataatccaaaaggcgcagatgcatcctatttatgtataggttggcggatagctttttcaagtgctgccagcgttcctcaccatgacccagcatgaaaattttattcagccgtgggatgataatgattcacggcatgctaagaacgaataagcccgtgattggagctactgctataacagaaatacagaacagggtgggtgggctggtaacatggattacctctggaaggcgattataccttttgatagcctttttacagtaattgttggaacgaccatagatattgcccttgaaggtcatagtattcttttctagttgagtgctgaaaaaatgacagctatagtctctcttgatgctggttgtttttgttcacatttgtatgggcatgtgttactgagagatgaaaggaaatcatttgaaacgctaaaaaaaaaaaaaaaaaaaaaaaactcaaaaagcgcggcccccggccgaatcctgcagcccggggatc

SEQ ID NO: 31074 - DNA, 252 bp, Oryza sativa
  Clone ID: PAT_MRT4530_35415C.1
atgtctttcgtgattagtctcacacctctcatcataataaaagatgcttaaactagtaataatttgattagctcctggtttggaatggtatattcctggtttggagatagaactgtgcagccggggtggttgttcagaatggttgggcctatacaacagggtatgttgtatagcgttggattaatattgcttaattaatacctaactgttttattaaattctgaaatgtttgctaaatgctgcttttgcaaa

SEQ ID NO: 31075 - DNA, 407 bp, Oryza sativa
  Clone ID: PAT_MRT4530_35416C.1
tttttgtttttttaaaaaagatgggtttttgtttttcttttttggcaccgaatgaaaccctttatcctagacctgcccattcgcataggtcggtgcctgatgaacagattgacttgggttgcgcacatgctacctaagatacattggcccaattgagtagaaacaaatgccttctgttgcgcacatcctacctaaaagaccatggcccaatccttttttaccaaatgaacgctcgttcgttcttcagagggcccctggggatgcagcactggggatcacaaaaccctgggggtgtaatattgctggcaacaagagcccataggggtggatggataacaggtgccctttggcatacacctccaccttgcaccccccaacctggggaccgttacagaaccagaatccct

SEQ ID NO: 31076 - DNA, 404 bp, Oryza sativa
  Clone ID: PAT_MRT4530_35417C.1
gtaatccacaaactatgcaacagcgccccaaatatgatgatgtgctagcagaagtcagcgattttttaaatcaacgcatttttgaatgcattacatcaggcattgccaaacagcatattatacttgaccccggatttggctttggtaaaactgttcaacacaattatattctgctaaaacacctaaaagccttcgccgattcaggctttcctgtgcttgctggtttatcgcgtaaatcaatgatcggcgccgtaacaggcaaaagcgttgaacaacgcacagcaggatcaataaccgcagcattattagccgtacaacatggtgcacggattattcgtgtacacgatgtagcagaaacagcagacgcattaaaagtttggcaagcaatgcaagattgtgaataa

SEQ ID NO: 31077 - DNA, 204 bp, Oryza sativa
  Clone ID: PAT_MRT4530_35418C.1
atggacgacgaccaccacagcggcggcgaggtctctctcgaggccatggtaaagatcgtctcccaagctacagcgtcagataaaatcatttcagcatttctgactgaagtgaacgatggccccgccggacgacctgtttgttgctaccactccgcgatgacaagaccaaatgcctcagaaattggtctgcatactttgatctga

SEQ ID NO: 31078 - DNA, 1951 bp, Oryza sativa
  Clone ID: PAT_MRT4530_35419C.1
atggagcgcctccgcgtcgccatctcccaccaccgggcggcgcttccacttccgacccaccacaaccacttccgccgccgccatctccagctacagcccttccccagctccctctccctctcgctccccatctcgccccagctctcgcccgcccctcctcgccgccacctcctccccccgctcctcgcctccgcgtccgccgcccaggccgcgggccctgcccccgcgcgggcggcgggcggcggcggcggcggcgcgaagccggttcccctactcgtctccctcgccgtcggcctcgccgtccgcttcctcgcgccgcggccggccgaggtgaccccgcaggcgtggcagctcctctccatcttcctgaccaccatcgccgggctcgtcctcggcccgctccccgtcggcgcctgggcattcctcgggctcactgccaccgtcgccacgcggacgctcccgttcaccgcggcgttcggggcgttcaccaacgaggtcatctggctcatcgtcatatccttcttcttcgcccgggggttcgtgaagaccggactcggcgatcgtgtggccacctatttcgtcaagtggttggggcgcagcacgctgggcttgtcgtacgggctcgccatcagcgaggcatgcatcgcgccggcgatgcccagcaccacggcgagggccggtggggtgttccttccaatagtcaagtcgctatctctttcggctggcagcaagccgaacgacccatcggcgaggaagctgggctcctaccttgtgcagtctcagttacaggcatctggtaactcaagtgctctcttcctgactgctgcagcacaaaatctcttgtgtctgaagttagctgaggagattggtgttaagattgcaaacccatggatatcttggtttaaggttgctagtttgcctgccatcatttctctcttagcgacaccttatttgttatacaaaatattcccacctgaaataaaggacactcctgaggcccctgcaatagctgcacaaaaactgaagaacatgggaccagtaacaagaaatgaatggatcatggttgctacaatgattcttgctgtttcactgtggatttttggggatactatcggtgtgtcaagtgttgttgctgcgatgattggtctttcaattcttcttctgcttggggttctgaactgggaagattgcctgaatgaaaaatctgcatgggacacattagcttggtttgctattctagttggaatggcagggcagctcacgaaccttggaattgtatcatggatgtcaaattgtgttgcaaaagttctccagtctttctcattgagttggcctgcagcatttggtgttcttcaggcctcctatttctttattcactatctctttgcaagccaaacagcacatgttggagctttgtattcagcatttcttgcgatgcatttagcagctggcgttccagctatactgtcggcacttgctttgacatacaattcaaatctctttggtgcactgacacattatagtagtgggcagtctgcagtatactatggagcggggtatgttgatcttcctgatgtattcaaactgggttttacaacagcagcaatcaatgctgtgatatggggagtcgtcggtacattttggtggaagtttttagggctttattgagtcattgcaagtgttaagttgaccaaaagtgttccttactacacctgtaattcatggctccctttctggagtggtagtcattttttcttcagaggagtttgatgagtgcataataatggaacgatgttcctcattagaagtcttgaacatgatacacttgtacaacccagaagggttctcataggcgttttgtacaactcccatgcatttctcatgaacgaaattaactgcaggaatgagtcttgattccttgagcatattgttcatgtactctcggaactgt

SEQ ID NO: 31079 - DNA, 382 bp, Oryza sativa
  Clone ID: PAT_MRT4530_3541C.1
tttttttttttttttttttttttttttttttttttttttttttttttttttttttttttttttttttttttttgggggaaaaggggaacccaaaaccccattttatacccacccatttagaaagggggttaagggggtgcaacattggaggggggcaaaaaaaccccccgggacattggcaacgtaccgggggggggcataggccgaacaaattttattacaggggggacctaaaaggggaggctggggggtaaaaccgggccttgccttggtggaaaaaaaggggcccccgggccaaggtctaaccggtggggacctgaaaccttttaaggcttagggaacccccatttggaaagcttggggggggcctccctgggagctt

SEQ ID NO: 31080 - DNA, 1323 bp, Oryza sativa
  Clone ID: PAT_MRT4530_35420C.1
atggctgacaagactctccgtgaattcgctactccctctgctgacaatgtggccattgggccacagatcaacatgggagacgtggatttcgatctgaaatccagcctcatcaagatggcgcaggctagcccattctgcgacaagcctaatgaggatgccaatgctcctctacagcagttcctggagatttgcaacacgtacgccataaagggtgtcagtccagacgccatcaagttgcggctgttcccgttttccctcatcgggaaagcgaagcggtggttttatgccaaccgtgctatgatcaacacctgggacaaatgctccacggcattcccctcaaagttcttcccgatgggcaaaactaacgctcttcggggaagaatttcgagtttccagcagacaagggacgagtccattcctgaagcatgggaacgacttcaggaatacgtggccgtctgtcctcatcatgggatggacgactggctgatcctgcagaacttttataatgggctcactctcatgtcccgtgaccacctagacgcggcagctggaggagctttcttctctaagacggttcgaggagccattgatttaatagagaagatggtctccaatatgggttggagcgaggaacgactccaaacccatcagcaaggtatgcacactgtcaaggagacggaaatgctcgctgccaagctagacctcctcatgaagcgattggacgaccacgacaaacggccacaaggcaccgtcaaggccttggactcacacgtcacgtgtgaagtctgcggcagcacgggtcattctgggaatgacttcctggagacccgtgaggaggcgatgtacatgggcagcaacaataatgggtaccgtccacaaggagtaatccagaagattcacatcaacgtgccattgttggatgctatgcaagtgccaacatatgcccgctatctcaaggatatcctcaacaacaagagaccactcccaacaatggaggtggacaaactgactgagcaatgcagcaatgtaatactccacaagctcccggaaaagaagaaggatcccgggtgtcccatgatcacctgctcgatcggggcacagcaattcgatcacctgctcgatcggcggaagatgtgccgaataaagtacgggccaaacccgcataacattcaagtggtcgaagtggagccacccaagacgtatagcctggtgaagttcatgcagaatttcctggagaaggaaacaacgatgcccaagaaccgttattggaaaacgccggcaaaatcaaatgtaccggccaagaagctagagcagccggcttag

SEQ ID NO: 31081 - DNA, 447 bp, Oryza sativa
  Clone ID: PAT_MRT4530_35421C.1
atgcctcacgccgccgcctccgccttcctctcgtacgttttcatcaccctaccctaccaaacaaaaggccgtattgccttcattcaaccgatccgctatgagtttaatatcttctctctccccctctcgccctccccgcataaccctgccaccgagctctacctcaccgatggcgtctccgtcaactacaatggcaacttcgcccccacctcccactccgactccatcctcttcatctccgagcgcaacggctccctcaacctctacctctctcccgtaccctcctcctgccacgaggcgctcgaggcggcggctctctcgccgctgctccctgggaacccatcgcgctctaggaccggctatcgctcacacccgacggctcccaccttgtctatgtctccaccgccatccccgctgtggaaccgcgcagcagctgggtcgctgtga

SEQ ID NO: 31082 - DNA, 346 bp, Oryza sativa
  unsure (1)..(346): unsure at all n locations
  Clone ID: PAT_MRT4530_35422C.1
gatcgatcgatcgatctccataggtaggggaagggaagctttggaaggtngagggacggagggggggatgacgaggcggtnctcgcacngcagccacaacnggcacaactcgcggacntaccccaaccncngggtcaagatcttcggggtncgcctcaccgatngctccatcncaagagcgccanatnagggaacctctccctcctctcctccgccnccggatccaccaacagcgngcctcccccgccgacngcccgacnacgcccccaccnccgccgacgttacgctccgacgacttcgtccagggcttctccttcgncacccgcgaccgaagaagggtgttctt

SEQ ID NO: 31083 - DNA, 406 bp, Oryza sativa
  Clone ID: PAT_MRT4530_35423C.1
attacatgatcagggataaaaggcttagtgcaactaatgggaagttagcattgcacgggcgcacaacagatgtgattttacatgtctatgagcccgtacaaacttttacatgtatatgaacactatatataggacactctttacaagtatgcataactttgaccgttaatacacctcacttgctcatgaaaaagatgccctcatgaatgcactccatcagctatatatttgccattgacaagccagctgtatcaaaagcattcagcgggcccagagggagaacctcttcggcttcaggaggacctaacctcagttgtgttgcaaagaacggaaactcggtcacggaagatgcaacatgtgaacattccacaacgccagcatcatcacgcattgttcgcaagcatgc

SEQ ID NO: 31084 - DNA, 1364 bp, Oryza sativa
  Clone ID: PAT_MRT4530_35424C.1
ttagctggaaggaactggggcggcagtattgcagcttccatccgcgccgtgagaaacaagctgttgtataaactcgtcaatgtacctctcatggagttccttgtcagctacaagctcttgcagcctgatggcgtttgctacaaacaccctcctggtttcttcctcaaccatgacggcccggaccgcggcggcgacgccatggcggtcgaatgacccgtccatgtcatcccgcctcacctgcgatcctaccttgttaccctccatgagccgcgcgttcggcccttggtccccgaagatgggcaacatgatgagagggttcccaaacagaagcccctcgacgagcgagttgcggccacagtgcgtcaagaaggcgcccaccgcggcgtgcgccagtatggtgatctgcggaacccaccccatggcaacatgtccatggctcttcgtccgttcttggtaacccggaggaaggacatctgaaagatcgacgccatggggctttctcagcgcccacagaaatcgtgtcccggcgagctccagcccgagagccagctcgtgcacctgctccaatggtagaggcacctcgctccccagcgccacgtacaccaccgacttcgccggctgcacgtccagccaccgcatcgtcgagttgtccgtcatgccggcgcggcggcggcctccgtcgggcgacggtggcacgaggccgagggggatgagcggcttgttcttcaggcccgccgccacctgctggaaggcgtcgggctcccactccgggcagctccgcatggccgccagcgtgcacctctccatcgccaaggagcagcgcttcgcgacggacatgcccgacgcgccatggtcgacgaagaagcttgccttctgcgcccactcttaacatggcacgccctcccggcgttcttctaccacgcgtacttgttgacagtgaaatttggtaagcccaaagtcatcatcggcttagagtcaatatcggcttcagagtcctgaaatcagccgatgggagtcgacaaatcgccaacaaccgtgttccataatccctagcctgcttcttgattgccaataagggtttcatcggggtttcagccgatttcatggcatcggaccgctagccgatgtgtgctttaaccttcggatcagtgcttgttctactatatcatattgttagccgattggtttctactggatattattgttatattttattaccatcagccgattgcctttatatcattatctacattggacatatagccgattgcttaaaccctatcgctatcggctggtaccggcatcggctattatcggctatcggctggaactgctccatcggcttgtcagccgatcggttgttt

SEQ ID NO: 31085 - DNA, 501 bp, Oryza sativa
  Clone ID: PAT_MRT4530_35425C.1
ttccgggctcctcgcccagcatcgacgggcggtcgagccggatctacacagcgtcgtggaagaagcggctgtaggccaccatggtgtagttgcgcgggttgcgaatccggtgcacgagagatgatatatgtctctgccgcggtgcataccgaggtacccctgcgggaagctgtgcacgccggcgttctagatgaatttgatgacctcgtaattggacagattgcggatcagcggcagtgttcttctgctacccaccacggcttgtacttggtgatgatgatctggacctccaccttgaggtgcgcacgcgtaaggaataatggaatcatggcttgcggcatgtggtggaagaagtagtaccagtacccggtcacggtgatcacctccgtggcgtcagcatgctgcttcatgcacttgagggccgccgcctctgaaggcacggacttgatagtgatcttcaccacgcccaggaggaggtaatcgtacttgctggcgtagggc

SEQ ID NO: 31086 - DNA, 737 bp, Oryza sativa
  Clone ID: PAT_MRT4530_35426C.1
atgctactattcatatgctgaatttgtcttttttatatctcgacgtttgactctgtcatcgggcgaccgtgaccgcccaatctgtgcgtgtcatagagaatatagagagctcggactctagtgacaaattggtatggggtttgacagttaacaaaaaatatacaactagatctctctacagagccttaattaacctttagagggattagggaggttaacattgagttgtgaacttgtccttgtccatgaatattaaacattttttatggttggcttttagagataggatttcaggctgctgaacaactgaagaaaaaaggttgggagggttcaaaattctgtcaactgtgtggagctctggaatcaactaatcatatcctttttacctgtgacatggtgaggctgatttggtgtatttgtaggccgatgctcttaattggattaccttgcccggaaacttcaaagatttcttcttgttgtgcaaagggatttctgaccatacttcttttagagtcactttgagtcttttagctgcaatctattggaatctttggctcactcacaataatatggtgcttagagcgaatctggtttattctccactaactattccttttcaaatcatttccaatcttttacagtggaggaaactgtttcgacctgaggaagaacacaagctggaagcgttggtagagaagttgaggatgctggtgacaagtttgacacctccaagggct

SEQ ID NO: 31087 - DNA, 579 bp, Oryza sativa
  Clone ID: PAT_MRT4530_35427C.1
ataaataaaattgatgataagaacttaaatgttatcacattcactaaatgagaaaaaaaaattcaatcaaacataaaaaaaaataaatctaattcaaacatttgggcctgggtgaacatcaccgacagcgccgccaccgcccgcttcaccgccgccgtcccctcctcggcgtcggggtcatgtaagtctgttaacagtgaaatttggtaatcagcaaagacgtcatcggcttagagtcattatcggctgcagcatctcgggatcagccgatgggagttatcaagtcgccaatagtcaaattcctgctatattcgcctgcctcttgattgccaataagggtttcatcgaggtttcagccgatttcatgatatcagacctctagccgatgtgtgctttaaccctcggatcgatgcttatttatcatatcattgctagccgattggtttatacaggactatattgttattttattatatcatcatcaaccgattgcttaaaccctatcgctatcggctgatatcggcatcagctgttatcggctggaattactccatcggcttgtcagccgatcggctgttt

SEQ ID NO: 31088 - DNA, 513 bp, Oryza sativa
  Clone ID: PAT_MRT4530_35428C.1
ctagatattttccttgtaaaccctccccctcatcctatataagagggggtaggggggtgttaacagtgaaatttggtaatcggcaaagacgtcatcggcttagaatcattatcggctgcagcatctcggaatcagccgatgggagttatcaagtcgccaatagtcggattcctgctatattcgcctgctttttgactgccaataagggtttcatcggggtttgagccgatttcatgacatcggacctccagccgatatatgctttaaccttcggatcgatgcttatttatcatatcaatgctagccgattggtttatactggactatattattgttatattttattatcagtagccgattgcctatataacattatttactaaagtgttagaatctacattggacatatagccgattgctctaaaccctatcgctatcggctggtatcagcatcggctattattggcgattagctataactactccatcggcttgttagccgatcggctgttt

SEQ ID NO: 31089 - DNA, 511 bp, Oryza sativa
  Clone ID: PAT_MRT4530_35429C.1
ttcccagagccatagctcctccgcgcgacgggccgccaaagctttcgcagcgagggtggtccggtcacgcttctctgttaacagtgaaatttggtaagcccggagtaatcatcggcttagagtcagcatcggcttcgaagtcctgagattagccgatgagagttatcaagtcgtcaattgtcggattcttgctatattcacctgcttcttgattgccaataagggtttcatcggggtttcagccgatttcatgacatcggacctccagccgatatgtgctttaaccttcggatcgatgcttatttaccatatcattgctagccgattggtttatacgggattatattgctattttattatatcatcatcaaccgattgcctttatatcatcatatacattggacatatagccgattgcttaaaccctatcactatcggctggtatcggcatcggctattatcggctatcggccggaactactccatcggcttgtcagccgatcggctgttt

SEQ ID NO: 31090 - DNA, 147 bp, Oryza sativa
  Clone ID: PAT_MRT4530_3542C.1
tgataagaatgcacacaaaactcgctaatctgatagggttagtttaacctggtcgaagggttcagcccgcagaaaggtggtagaacacagtgttcgaatttgacgattctgcttgatttaagtattctagcaaaccgacaaggtaaa

SEQ ID NO: 31091 - DNA, 1312 bp, Oryza sativa
  Clone ID: PAT_MRT4530_35430C.1
ccgggctgcaggaatccgcacgtggatctcgccgccggtcgccgttgcggccgctcctcccctcccctctctctcttgttcccccatggcgatcgccaccgagtcgcgctgcgaggaggagaaggcttcgccgcattcgcaggaggtgaagcggtgggtgttgtctgattttgacatcgggaagcccctcgggaggggcaagttcggccatgtttacttagcaagagaaaagagaagtaaccatattgtggctttgaaagtacttttcaagagccaactaaagcagtcccaggtggagcatcagctacgtcgggaagttgagattcagagtcatcttcgtcatcccaacattctacggctgtatgggtatttctatgatcagacccgtgtgtacttgatcttggagtatgccttaaaaggtgaactttataaggagttgcagaggtgcaagcatttctctgaaagacgttcagcgacttacattgcatcactggcgcgtgcgctcatctaccttcacggaaagcatgtgatccatagagacattaaacctgaaaatcttttaattgggtcccagggcgaactgaaaattgcagactttggttggtctgtgcacaccttcaacagaagaaggacaatgtgtggaacattagattacctgccccctgaaatggtggagaagactgaacatgactaccatgttgacatttggagcttggggatcctgtgctatgagttcctttatggagtcccacctttcgaagcaaaagaacactccgaaacatatcgcaggattgtgaaagttgacttgaagttcccactgaaaccattcgtgtccccggctgcgaaagacctaatttcacagatgctcgtgaagaattcggcgcatcgtctgcccctccacaagctcctcgagcacccttggatagttcaaaacgctgatccctccggcgtgtacagaggctagaacaatctcttccactctcctcaattcgaggagagacctgattctttttcatcactgttgttatggcaaaacaagaaaaaagcagtagccgtactactctacctgttgtttccgatcccagtgcgcctgtgtagttacgtgacaacgtgtatgctcaagcttcagatttcctcgatgaagatttgaagctgtgtgtgtgggtttaacgcgtatgtgttttagcgtgtgttcacagcatggggttgtgatatgttttctgtgcaacgccctgtacttaatgtactaatcgtatttcttattggacatcactcgattagtctacaagataaaaaaaaaaaaaaaaaaaaa

SEQ ID NO: 31092 - DNA, 303 bp, Oryza sativa
  Clone ID: PAT_MRT4530_35431C.1
atgctggacaatcatatgggcaagatctcgccgactgagttcttggtcaaaatgcgtgccatcgttgtcatggtcctctcccgaagcatgtccgtcaccagactgtccatcagtggaggttttgttgtggagaatacggcgcacaataagcttccggcgcttaccagcacgacgcgtggagacagcaacacagcttccatcagcacgccgttccttagtgaagtcctgccaaactgcagaccgcaatttccgtgcccgtggattgtgcaccacaggcacaggcaccactgcagtgttcactga

SEQ ID NO: 31093 - DNA, 460 bp, Oryza sativa
  Clone ID: PAT_MRT4530_35432C.1
ttcaatgcataccaacatgttgtcaacagtgaaatttggtaatcagcaaagacgtcatcggcttaaaatcattatcggctgcagcatctcggaatcagccgatgtgacttatcaagtcgccaatagtcggatttctgctatattcgcctgtttcttgattgccaataagagtttcatcggggtttcagccgattttatgacatcggacctccagccgatgtatgctttaaccgtcggatcaatgcttgttctattatatcatattatttgccgattggtttatactagattatattgctatattattacatcatcatcagccgattgcctttatatcattatctacattggacatatagccgattgcttaaaccttatcgctatcggctggtatcggcataggctattatcggctatcggctggaactactccatcggcttgtcagccgatcggctgttt

SEQ ID NO: 31094 - DNA, 2516 bp, Oryza sativa
  Clone ID: PAT_MRT4530_35433C.1
ggatcgggttgcgggtcccctcctcccccccgacccaccaccgctcgccgccggccgcctccgacgagtgggcgatcatatttagatacaagatagcatgctggagccaacagctatggaagtgccgattactagctcagtgaacactgcagtggtgcctgtgcctgtggtgcacaatccacgggcacggaaattgcggtctgcagtttggcaggacttcactaaggaacggcgtgctgatggaagctgtgttgctgtctgtaaccactgtaagaagcagctcacagctactagccggtcaggcaccacacacctacgcaaccacctcgcaatctgcaccaccacctccacgcgtcgtgctggtaagcgccggaagcttattgtgcgccgtattctccacaacaaaacctccactgatggacagtctggtgacggacatgcttcgggagaggaccatgacaacgatggcacgcattttgaccaagaactcagtcggcgagatcttgcccatatgattgtccagcatgggtaccggttttcaatagtggatgatgtgggcttccaaaagtttgtcaagaacctccagccacggtttaggatggtgtcatatgaaacagtgagggctgatagcatgacaatttatgaaagcgagaagctgaagctgcaggatgctctgctcaagatcccttgccgacttagtatctcagttgatatgtggcgatcgaatacacagatggacttcttgtgtttgacctgtcactatattgaccatgccaatgatgagtggaaagttaggaaaaaaattctgaactttgtgcatgtggaggcaccttttacagatgatcagattgctagtctcattctagagaagttgcgtgagtggggtattgacaggaagctagctgccattgtactggacaactgcgcctctggtgagattgttgctagagagcttctcgtagttctgcagcctaggagactcctcctattaaatgggaatttgttccaggtgcgctcttgtgcgcacattcttaacctcacagtccaagaaagcttagaacagacatctgatataattactagagtccgtgagatgattcagaatgtcaagttctcacaagaaaggttcgaaaagtttcaggatactgcaaaactgttgcagatggaccaaaaactgctagttcttgattctcctaataactggccgtctacatacttaatgtttgattctgcatgttactatcatgatgttctcatgcgccttgcagaacaggaagcacattatggtgcttttctcactgcgaaggagtgggccgatgtgaaagccctcactgaaatacttgatgcgctctatcataagatggagaagtttcctgtggaaaatccgactgcaaatctctattttaatgacatgtgtgaggtgcatgttcttttgaatacctggcgtaatagtccatctcctgttgttgcacaagtggctgaccgaatgctgacaaaatttgaggggtactgggatcttactagaccagtaatggcattcgcatctattctggatcctcgatataagatgaagtctgttgagtacttctgtagactcatttatgctgctgatcaatttagagcaaagacaacaatagatgacattcggcagagttttaccaatttgtgcagtgaatatgaacagtcaggaaattcattcaagaatccatctgctctcttctactctgcaaccagtaattcttgcatgagttcggtatacagcaatggtgatgattttaagaccttctcccgtatcacattatctgatgctcgaaggggacttgatcaatatatacaggagacgtcatcaggccaatcctttaagtctgacttagacatgtaccttgaggaaccggtctatcgccaaaaggaagggcatttagataattttgacatcctgggatggtggaagtcctttgcagcaaagtatcctgtcctttctcaaatggctcgtgatattttagctgtccctgtatctatcatcccattggacagtgatgctcggacattaaatgagtatctcagtaccatggacccttcaacagtgcagggattggtatgtgcgcaagattggttgcgggaagatacagaagttgctagttcagacggtcatgcagatgacaaagcggcacgtggtgatgaacttatcgtgttaccaaaatagttgagacttctgattgatggctcctgagtcctgaggagaccaaggaggcgaggacgcaagtaactgcattatttatgttcaacagtccaatttccaggcttccagctacaccgcctgtaaatgtatcgttctagttctagatctgtttgtacaatgaagtcgtaggtacctccaagaaggtagtatcaatttaggcaattgacttctgcattaatgacttaatgtgtattatgctgctaagctatgttatctccatcgtagctaagttatcgccgggggcctcgtgccgatcctgcagcccggggatccacta

SEQ ID NO: 31095 - DNA, 630 bp, Oryza sativa
  Clone ID: PAT_MRT4530_35434C.1
atgacaacaaaaacaggaacacgtgtgttgatcaagagagtaaatagaagggaaaatttgccaaaacctactcagtgtgatctggaaaactcaaggttgaatgtcttcaatctatatgaggacatcgcaacattatcaccgcatagctcagagctgatgagagacatgcacacacgacacaaggagccctatgtgttaacagtaaaatttggtaatcggcaaagacgtcatcggcttagaatcattatcggttgcagcatctcggaatcagctgatgggagttatcaagtcgccaatagtcgaattcctgctatattcgcctgcctcttgattgccaataagggtttcatcggggtttcagctgatttcatgatatcggacctccagccgatgtgtgctttaaccctcggatcgatgcttatttatcatatcattgctaaccgattggtttatacatgactatattgttattttattatagcatcatcagccgattgcctttatatcattatctacattggacatatagccgattgcttaaaccctatctctatcggctggtatcggcatcggctgttatcggctatcggctggaactactccatcggcttgtcagttgatcggctgttt

SEQ ID NO: 31096 - DNA, 254 bp, Oryza sativa
  Clone ID: PAT_MRT4530_35435C.1
ctggtacgcctgctggtaccgctgcggacagtgtattgccgggatcgaccacgcgtttgtgatctcgcatcagaaagtggctgttgcaggctcatcagggagcgacgacagccgtgtgacggacacgacccctcgacgactgcggatatgggcgctgaaggacgactacgctaagttggagcttcgtgacaccgactccagcatgggcaacgccctttcgcgcgtcatgatcgccgaggtttccaccgtcgtca

SEQ ID NO: 31097 - DNA, 437 bp, Oryza sativa
  Clone ID: PAT_MRT4530_35436C.1
ttgttaacagtgaaatttggtaagcccggagtagtcatcggcttagagtcagcatcggttttgaagtcctgagattagccgatgagagttgtcaagccgtcagttatcagattcttgctatattcgtttgcttcttgattgccaataagggtttcatcggggtttcagccgatttcataacatcggacctccagccgatgtgtgctttaaccttcggatcgatgcttatttatcatatcattatttgccgattggtttctactcggttatattgttattttattacatcattaacagccgattgtctttatatcatcatctacattggacatatagctggttgcttataccctattgctatcggctggtatcggcatcggctattatcggctatcggctggaactactccatcggcttgtcagccgatcggctgttt

SEQ ID NO: 31098 - DNA, 249 bp, Oryza sativa
  unsure (1)..(249): unsure at all n locations
  Clone ID: PAT_MRT4530_35437C.1
cgttntggactaatgtcttntgagaaccnncttggatntaaacggttttcttaactgtgatttttcaaccgtttnagtgcttgcnttatgggntaatntcaaanattggtttggcaggcaatcncaagagtattgctatttctgtgctagtctatntnnaaacccngatttaantcnncgaaacatnttngttttcaaaaaaaaaaaaaaaaaaaaaaaaaaaaaaaaaaaaaaaaaaaaaaaaaaaaa

SEQ ID NO: 31099 - DNA, 2001 bp, Oryza sativa
  Clone ID: PAT_MRT4530_35438C.1
atgggggagggggtgaaggcgatgctggcgcggccgatccagctggccgacgaggtcgccaagcagtgcggcgcggcgcggtgcttccgcgcggagtgcggcgagctcaaggcgcgggcggacaagctcgcggcgttgctccgacaggcggcgcgcgccgacctgtacgaccgccccgccgcgcgcatcatggccggggcgcagcaggcgctcctcaaggcctcctccctcgccgcgcgctgcgccagcggccacccgcgcctcaggcggctcttcacgctcagccccgccgcggggttcccccgcaccgtcgccctcctcgacaccgcgctcgaggacgtcgcgtggctgctgcgcatctcctcgcctcgctccggtggtggtggtggtggtggtggtggcggcggcgacgacgacggggacggcgacgacggcgacctgagggggctccccaacatcgcgcagaacgagcccatactgttcctcatctgggaccacgtcgcgcgcctccacaccggcgggctcgccgcgcgcgccgactccgccgccaacctcgcctccctcgcccgcgacagccagcacttcgccaagctcatcatcgaggaggacggcgtgccgccgctgcttaggctgctcaaggaaggcaccgacgacggccaggaggccgccgcccgcgcgctcggcttgctcggctgcgacgacgagagcatcgataagctcgtccaggccggggtgtgctccgtcttcgccgcggcgctcaaggatccacccatgcgcgtgcaggctgccgttgccgatgccattggtactctcgctgaccggagcgctacgtgccaggagctctttgcgcagaacaacgccgtccgctatctcgtcggtcacctcgcctcagggaccatccaggagcacagcaggtactccgtcggctccagcagctccaagaacagcgctgctgcacctcagcacatgacgtcgctgcactctgtcgtgcttgccaagacgctcagcatgcgccacggtggtgaccgtggcacctcctcctccaccgatgagcccccaagggtgtccaatgagcaagacacgaaaaggaatcagatgcagtcggtcgtgcaatccgcgatggctgctaagactaagacgaatgggtcgttggttccacccttcaggccacagctgggcacgagtggttctagtggccgtggtgctgtccgggaggtggaggatccggagaccaaggcacggctaaaggccatggcagcgagagctctgtggaagcttgcccgcggtcatctaggtgtctgcaagagcattactgattcgcgtgcactgctctgcttcgcggtgcttcttgagaagggtgatggtggcatgggtactagcgtacagtacttctcagcaatggcaatcatggaaatttcccgtgtcgctgagcacagccttgccctgcgacagtcggctttcaagcctagctctccagcagccaaggctgtcgtcgaccagctgcttcacattgtcagcaagggagactacgatgatctcttgctcccttgcattactgctcttggctgccttgcacgcactttcacagcgagtgagaaccgcgtcatcgctccccttgtggagctgctcgatgagcgtgagccaccagtcattaaggaggccgtgcttgcgctcaccaagttcgcatgcaatgaaaaccacctgcatgtaaaccactgcaaggccatcgtggacagcggtggtgctcgccaccttgtccagctggtgtatctcggtgatgaggtgcagatagaggcactgatactgctctgtttcattgcattgcacgtgccagaaagtgaggagctggctcaagctggtgtgcttgctgtgcttctctgggcatcaaaacaggctcacatgatacaggacatgcgtgtcgatgcactacttccagatgccaagggaaggctggaactcttccagtccagagcctccagatgcagattgctgaatatgtga

SEQ ID NO: 31100 - DNA, 481 bp, Oryza sativa
  Clone ID: PAT_MRT4530_35439C.1
cccaagaaccaccttggcagtatgaacagcctccactagttcattgtcattatctttgtgaagtttggtaatcggcaaagacgtcatcggcttaaaatcattatcggctgcagtatcttggaatcagccgatgggagttatcaagtctccaatagtcggattcctgctatattcacctgctttttgactgcaaataagggtttcatcggggtttcagccgatgaaatgacatcggacctccagccaatgtatgctttaaccttcatatcagtgtttattatatattgtttctagccgattggtttctactggattaaattgctatattatattatcatcagccgattgccttcatatcattatatacattggacatatagccgattgcttgaaccctatcgctatcggctggtatcggcatcggctattatcggctatcggctggaactactccatcggcttgtcagccgatcggctgttt

SEQ ID NO: 31101 - DNA, 363 bp, Oryza sativa
  Clone ID: PAT_MRT4530_3543C.1
atgggggatcaggtgatctcgccacaaccggcgtggccgtggctgctggaagaagtggaggacatcctgcactacaccttcaaccgcaacggactagagtatgaagctttccttgtcctcaccacggaggaagacgtccgtgtgtgcgacccactaacatgcgggtgtcgcggcggcgggcggcggaggcacgggtgtggcgcggcggcctgcgagtggcgtggcggagacgcgggagtggcggcggcgcccgggctaagctccaccgccgcgaagacgaaggagaccacaccacctcccgatgacatgaaatcggtggcggcggccgcacggactcccgacaccaaaatactaggggggtag

SEQ ID NO: 31102 - DNA, 174 bp, Oryza sativa
  Clone ID: PAT_MRT4530_35440C.1
tacacggtctaaattcaaaacatgtcgtccattctacaccggctagatccatatcatctgggctataaaatccaagggagtgagcgacatgccgaactataaaatccacggacgggatcgcgatgcggtaatactgaattgcctaatcactcgccgcgctgatggcgctgcata

SEQ ID NO: 31103 - DNA, 2733 bp, Oryza sativa
  Clone ID: PAT_MRT4530_35441C.1
atggaggtgagcaaggaggagttcttgaggcagttcggtggcgactatggctacccgggcgcgcccaagggcgtcgacgagatgcgcgccgccgagttcaagcggcttgaaggagcagggatggcttacctggaccatgccggtgcgacgctgtattcagaggcgcagatggcggatgtcttgaaagaccttgcatccaatgtatatgggaacccacgaagttgcatgaattgttttgattccaaggtactacaacagggtgcctgcacagctacatctttactatatccagttatgcgcatgcaaatttctagatatgctctgagtaaaggagctactgtgttggccgttgatgttgaggagggtgctgatctggcaaaagacaatggaagttatagtttgtataagatttcaagacgcacaaaccaaagaagaagcaaagatgtgctttcacacaattgtcagaacggaagtctttcagatatttcagggaacaattggaatatatttgcattcccgtcagaatgcaatttttcaggacaaaagttcagtctgagcttggttaagctcatcaaggaaggaaaaatcccattgcagcagcagggtaaatggatggttctgatagatgctgcaaaaggatgtgccactgaaccaccgaatttaactgtgtatcctgctgattttgttgtatgttccttctacaagatatttggctatccaactggccttggtgctctaattgtaaaaaatgaggctgctaatctgttgaacaagacatattttagtggaggaaccgtagctgcttcaattgctgacatcgactttgttcaaaaaagaaagaatatcgaacaggttctagaggatggaacaatctcgttcttgaacatagcttctctccgacatgggtttaagatcattgaaatgctcactacctctgcaattgaacggcatactacatcccttgctacttatgtgagaaacaaaatgctggacctgaagcacagtaatgagataaatgtttgcacaatatatggacaacagtattccaaggtggaaggtctgaaaatgggccctacaatcacattcaatttgaaaagagaagatggctcttggtttggataccgtgaggtggagaagcttgcttccttgtttggaatacatttgcgtactggctgcttctgtaaccctggcgcttgtgctaagtatcttggactgtcccattcagatttagtttctaattttgaggctgggcatgtttgctgggatgataatgacataataaatggaaagccaactggtgctgtcaggatatcatttgggtacatgtccacatttgaagatgcagagaaattcctgaagttcctgcagtcctcttttgtatccctaccagtacaattcaacaacgggtacatgttgaatctgaacagtcttaacttaatagataattcgagtcaaaaggctgtttcagatattcacttaaaatccataattatttatcctgtgaaatcatgccaaggatttagtgtaaagagttggccactaaccactggtggcctaatgtatgatagagaatggcttctccaagggtcaggaggtgaaattttgacacagaaaaaggtgccagagttgggctcaatccgcacattgatagacctggaacttgggaaactcttcatagagtctcccacacgcagggataaattgcaactctctcttcttgagagtttggctgatctaagtgaagaagtagatgtatttggtcagaggtatgaggtgcaaagttacgatgatagggtaaacacatggttcagtgaagctattggacgtccttgtaccttggtgagatgctcaagctccaagtaccgttcctgcacatatactggcttgagagatcgtccatgtagagatactcaaagcaaacttaattttgttaatgaaggacaactactactaatatcagaagaaagcatctctgacctcaatagtcggctaaattcaggcaaaggggactgtaagcaaaagttgcctgttgatgcaatgagattccgtcccaaccttgttatctctgggtcgagtccatacagtgaggataactggaaaaaacttcgtatcggagaggcctgttttacgtccatgggaggatgcaatcgctgtcagatgatcaatctacaccaggactccgggcaggtgctcaaatcaaaggaaccattggccactttagcgtcatacagacgaaaaaagggcaagattttgttcggcatcctattaaactatgaagacattatggaaggggaaaatgagaccattgcagggagatggctccaagtggggcaacaagtgtacccttccacagaatgacttgatgatgaagtagctgtggacatatcacttgagtacatatatggaattgcaagttgcatcagcagcgaccttggtgatgatgaagtgatgattgttacgtatacaaaacacgtcggcatacaaagcattttcgtaattttccaatacgcataagatgaaacaagtttagttaggtgaaaacagaatataccttcacatgtatcacatatatactatagttctcaaaatgcttttatataacacacaaggggctctaagcctaagccctagctcaaacaaaacgaaatgattgtgaagaaaaatgtacagacggaaatggttcatatttcagagttctcatgattacggtttctgtgaaaaaaaaaaaaaaaa

SEQ ID NO: 31104 - DNA, 630 bp, Oryza sativa
  Clone ID: PAT_MRT4530_35442C.1
gggatctataacaaattatcaagtaaatgaagggtgtttttgcaaaatcaccaacgacgacacggacgtgcgggagctcacgaaaaccacccgccatccagcgcctcgctgacgcgtcggcacgcgcaggtggccacgccagctcaaaaatctccaggagccgcaaatctcggcagatcaaaggcttgacgcctgttaacaatgaaatttggtaatcggcaaagacgtcatcggcttagaatcattattggctgcagcatctcggaatcagccgatgggagttatcaagtcgccaatagtcggattcctgctatatttgcctacttcttgattgccaataagggtttcatcggggtttcagccgatttcatgacatcagacctccagccgatgtgtgctttaaccttcggatcgatgcttatttatcatattattgctagccaattagtttatacaggactatattgttattttattatatcatcatcagccgattgcctttatatcattatctacattagacatatagccgattgcttaaaccatatcgctatcggctggtatcggcatcggctattatcggctatcggctgacattgctccatcggctgtctagccgatcggctgttt

SEQ ID NO: 31105 - DNA, 628 bp, Oryza sativa
  Clone ID: PAT_MRT4530_35443C.1
gttcagagacaccagctcgggggcagattgaagagcaataacaatatcggctcggggggggggcaagcacatcagtatcggctcatgaaagccgattgcaagaagcaacagaggatcaattttggagtaatcaacgcgagacagaagataattttgaagcatgagtcctcatactccaaaattggggggcatgtgtgaacagtgaaatttggtaagcccagagtagtcatcggcttagagtcagcatcggctttgaagtcctgagattagccgatgagagttgtcaagtcgtcagttgtcggattcgtgctatattcgcatgcttcttgattgccaataagggttttatcggggtttcagccgatttcatgacatcggacctctagtcgatgtgtgctttaaccttcgaatcggtgcttatttatcacatcattgctagccgattggtttatactggattatattgttattttattacatcatcatcagccgatttcctttatattattatctacattggacatatagccgattgcttaaaccctatcgatatcagctggtatcggcatctgctattatcgctatcggctggaactactccatcgacttgtcagtcgatcggctgttt

SEQ ID NO: 31106 - DNA, 760 bp, Oryza sativa
  Clone ID: PAT_MRT4530_35444C.1
acccgtagactggatatagagggcattaggggttctcaagggccgcgccatatgcagctttacttttatgatacagaagatgctgatgcactagcccatagggttcgcaggtctcctgaccttgatatcaaccttgttcgggtcattgtacgtattttggcgcaaaagccgtacgtacagaccttcagcagagttggatccatgcccaatatagatgactacatgattgagctcaacactaatgtaacgcctgaccaacgaagatggggatgatccaatgagaacttttgatagacaagtcttggtacatgcaaaaggtgataagccctgttacatcaaagcataccatgtgatgtggaaatggatgaacagtgtgacatcatctttaggtgatgtacgtaccaacgaagaaagcacttttgatgatcttccagagaacgaggttgtcgacaattatctagacaatgaagatgataatgatgatagtagtaaatccggcaaaagggaaaaaggacaagtttgtcacagcgagggagtactattgcttcaggctgcaggttagaaggggacttctaaacatcattttgttcggaggatgacttttccaacaatgggctattgatatgtacatcaaaatcgagtctatgaggcttgattggtactcaaaacctgagaagcaaaaaaagattcaggctgagctataccagggcgtggttgatgtgctttcttctggagagaagcggttccgcagttggtaaga

SEQ ID NO: 31107 - DNA, 6130 bp, Oryza sativa
  Clone ID: PAT_MRT4530_35445C.1
agggcactcaataatagcataatttactgactaggtatggatgcaaatggatcacctgtcgaaggccgctttgtattcggagatataactaacagattaaatgtaaggcaaacaacaccttgtaatgaggtagaaaacaagaagggagaaactagcagcaaaaaacgtgaataccgtgcaaggaaaaaggtagaagcaaataatccatatcatggtacattgaactatctgccaactgcttgtgtttctgtaaatcatgaaactggcaattcccagccaactaaaatgtcaaatgaacaacgagaagaaaggaacagaaaacaacatgaatatcgcaaatggaagagggatgagatgaacaatgttgacataagtgtattatcaaacatcccaatgcaaccggtaacagaagatagaaaccggaagcaacgtgaatatcgcgcaaggaagaaggctgagtcaaacaatgctatcttagcaaattttgatgcaaccacccctattattgcatcatttgggactacgtattctaccattttgcaagcatcgagtgttactgataataaaaatggcaacatagatgatccaacggactggcttcatagaaatgttacctacaaacgacaatgcaagaggaaaccagtgatcattgaagaagataaagactcccctaccatagatggagttacgcaagaagaaactatccatgtgcaagatgcaaaagtgcatatcccagatgacacttacgttgaattcgatagtggattatttgaacctccactaattgattttgtcgatgaaggtgagttagaaatccatgacatcgcagataatgttgatgagttagatatgcaattccagcaaagtaatgatgggtacgagtcatatcgtgtggatgttaagggtgttaatagtattgaagccaatgatccacacgaccgtgtatacaaaaaactgcccaagacacaccacattttaaagaaagtacctgattgtcagttttgcgacgcgataaggtttcagtatgagtctcctggattctgttgcaggcaagagaaaataaatgtacatgttccaaaaatccttgccgagttaatacggttgtttaccagccaagtgcataatgatgcaaaatatttcagaaagcacatacggtatttcaactcccatttctcattcacgagccttggagttacccttgaccaacaagtcagcactgcagcaggaactggtgtgtatacatttcgtgtgcatggtgcgttgtaccatcgcctggataatttggttccaggttctcaagggccgcgccatatgcagctttacttttattatacaaaagatgctgatgcactagcccatagggttcgcaggtctcctgaccttgatatcaaccttgttcgggtcattctatgtattttggcgcaaaacccgtacgtacaaaccttcagcagagttggatccatgcccaatatagatgactacatgattgagctcaacactaatgtaacacctgaccaacgaagatataatgcacccaccgcatcccaagttgctgcaatttggttagagggggataatccaatgagaacttttgatagacatgtcttggtacatgcaaaaggtgataagccctgttacatccaagtataccatggttgttatgaccctttagcgtatcctttatttaaccctaatgggagactgagtggaacctgaaaatgccatacaacgatcccaaccagattccgtgtgatgtggaaatggatgaacattgtgagacatcaactttaggtgatgtacgtaccaacgaagaaagcacttttgatgatcttccggagaacgaggttgttgacaattatctagacaatgaagatgataatgacgatagtagtaaatctggcaaagggaaaaaggacaagtttgtcacagcgagggagtactattgcttcaggctgcagggtgtggttgacgtgctttcttctggagagacaagcggtttggcagttggtaagagggttgtgctacctcgatcttttccgggtggtgatagcgacatgcaatgaaggtttctcaatgcgatggctcttgtccagtgttttgggaggccagattacttcatcacaatgacgtgcaacccatactgggatgagataattaaaaattattggccgagaatattttgtaatattctttgtgccctaatgtactctccgaaattttccgtgaattttcggagctcgagaaatagttttaatagcacaaagatcattgcatcaattaaaataaaaagaaaaacaattaaaatcccccgtcgtgggaccccgtcgccccacgtcctccacccttttccccactctccccacgaaaattcgccgccggttaacctctccaccacccccacgatgccccgcccatctcgccggccggttgccacctctctcgagcacgatcccgtcattccaagcccataaaaagcatccccggcctcccctttccatttcccccaatttttctgagcttctcgcgccctgtactgctctcccctcgctgctcccatcgccgccgctcaccggcgactctccatccgctcgccaccgctgctacagccgtcgccgtgctgttccgccgccacctgcggcttcgccgtgccttgccgcacctcggccccgctccgttttccccattccatcctctacatgtttgtttagtttttatgtactgtttccttggtttttattagagtttttcctcattttgcgtgccagcgtgtagaatccgtcgtttcggaagtccgcggtcgcgaggaaaagagttcggaagatcaaagtgaagaagcaaggcaagtcacacattccccttgagcatgttgatcccaatttataaatgttttaccgtttacaaataaatatgcatgttttgctaattacatgggatctgggtattacctatctgctcgcttgtgccatgtttacttgatatctgttctttgtcaaccttgggtaataaatcgcctagctggtgttacttatgtgacctagctagaactatatgataaaatgttttacaactgcctttatgcaaatagcctcaaacccctccttgtatccccttgcacgtctgcatcgttggtgtggcttgctgagtacggtggttgtactcagtcttgctattattcccccttttcagaggtgtagtgcttctgagctgaagatggagttagaggaccaaggctcagaccccagttgagttttgcctgtggagtggagctgaagccccgctaggatcacctttttccgctgctgtcgttctgtttcggtgtgaggactaagtgcctcttccgtaagtattttacgctttatttacgtttggaactgtatattacttatcgttttgtgtaccctggctggtgacagataacagaacatctcgaacccggccagcaacctcaagatcgaccagaccttgtcacaagagttttcaaggctaagctgcgagatgtgctggatcttattgtgaagaaaaaatattttggggaggttcagacttacacgcacgtcactgagtttcagaagaggggactaccacatgaacacatcctgttgatcatgaagtcaggcagtaaattgacaaccccagatgagtacgataaagttatttgcacggagatagcagacaaggtcaaataccctgagctacatcgccttgtcatcaagcatatgctgcacagaccatgcgttgatccatctggggaaataaatgagatacaacagtatagaaatgccaaatacgtgccaccaccagaggctatatataggatgcttggtttcccactattcggtatctatccagctgttctgcagctccaactttatcttcctaacatgcagtatgtcacgtataatgaggatggtaatcttgagaatgttgtaaattgtccatcttctaccaggacaactcttacggagtatttcaaaatgaatcaagtagacccggaagcaaggaaactgctatacaaggagttccctgaacactaccgttggataaccggacagaatgtgtgacagaaaaggaaaacggagagacgccaagttggacggattgtgtacactcaccctgcagaggaggagagatactacttgagagtgcttctcaaccacatgcgaggtgcaacctgaagatttgaggacagtgtcaggtacaacgtactttacctttagagaggcatgcgagaagagagggcttgtggagacggataagtcacatgacgattgtttgaatgaggcatccactttccaaatgccatctgctctgcatcgattatttgcaaccatattggtattttgcgaagtcactgatatccgtgcactatgggacaatcacaaggctgcaatgtctgaagattacagccgagggaacactaaccctgcagcagtagagcagatggtgctacgagacatacgtgatttgctttattccatggggaaggatatcacggagtatggtcttcccgaggtcattgatataggtttttttagcaatgacgtaatgacagagattatagaggaacttaacgtgctagtggaccaagaccatttagacatatacacaacccttaatgatgagcagcgtgcaggatttgatgagatcattgatcatgtaactaataagaagagccaggtattttttatcgacggcccaggtggcactggcaaaatatttatgtaaaaggcacttcttgctagagtgcggtctgagggattaatagccattgcaactgcgacgtcaggtatagcagcgtcgattttgcccggaggacgtaccgcacactcgagattcaaaatccctattaatattgctcacaacagtatgtgcaacttcacgaagcaaagtggcaccatggaattgcttcgcatggcatccttaattatttgggatgaagctgcaatgatgaagcgtcaagccgtagagacacttgataggtatcttcaagatattatgggttgttcattgccatttggaggaaaggttattgtttttggcggtgatttcagacaggtacttcccatggttacacgtgggacaagggcccagataactgatgcaacattgcagaggtcgtatttatgggaaaaatattaggaagatcagattgtcgcgtaacatgagggctcaatctgatccatggttttcggaatatctccttagaattggaaatggcactgaaaatactattagagatgattacgttcgcttgcctgatgaaattgtgattgcttatggggatagcgaggattcagtacacaaattgattaatcatgtgtttccctcgcttgatgatgaaaagaatgcaagctctgcatcttatatgagcacacgtgccattctatccactaaaaatgattatgtggacaagctgaatgcaaatatgattgatagatttccagggcaggccaaggtttatcacagttttgactctgttgatgatgaccctcacaacagttatcctctagactacctgaactctatcactccaaatggtctcccaccacacgagctaatagtaaaaatcaattgtcccgtgattcttcttcgcaaccttgacccaaataatggattgtgcaatgggactagactaatggttagagcttttcaagataatgcaattgatgctaagattgttggtagacaacatgccagcaaaagggtgttcatcccatggatccctttgtctccctccgatgatatatctctacctttcaaattcaagaggaagcaatttccaatacgtctcagtttcgcaatgactattaacaaatcacaaggacaaaccatcccaaatgttgggatctatcttccatagcccgtgttttcacatggtcagctatatgtcgcattgtcaaggggtgtgtcaagtctaacaacaaggattttggcaaagccaaagaaagaagttgattcaacagggaagagcactagaaatatcgtgtataaagacgttcttgactggtgagcaaaggtaggttcgcattatctaaattaattcaaaaaatattgaatatagtaaatttctcatcgaatgttactcacatcgaccttggggtgatcgctcccccgtccgcctagcgatcac

SEQ ID NO: 31108 - DNA, 1248 bp, Oryza sativa
  Clone ID: PAT_MRT4530_35446C.1
atggagatgtggagagttatagcattacctagaagggagctcagatggaatcgaggagcttgccgcttgcgccatgatctcttgaaccgtgaccccctgtcccatctctatcttcaaaaccctaggtccccgagggaccggaggccggccggcggcggggcaaggaggcctgccgacggcgagccaagtaggctggccggcggcggtgggtggctgggcgatctggaggctggtggcggcgcccgtcctggccgatcccctccgtcgtcgtcgcgtgaagtcctggccgatcccctccgtcgtcgtcgcgtgaactcctcgccgatccccttcctccgtcgcgccgtcacgccgccgattcccccctcctcgtcgggcgcgccgcggggttcagtcggcgccgatccccatcccccaggtcgccgtcgccgatcctgcatctcctctgtcccgtcctcgccgatcccccgcctccctcgcgccgtcacgccgccgattctcgcctctccaagaccggggtcttggggtcttggggagatcgacggccccggtgtcttggggtcttgggactctaaaagctcccaagctttaagatttgagaaccccgtgcagaggcagtggagactgaggaggtcgccatccacaaccgacaacgacaacgcgacgccgctgccgcctcaagagccaccgctgcctatccatactcacgccaccgttcctcctgcgccgaaagaagacgctgaagcactggcccatagggttcagaggtctcctgaccttgatatcaaccttgttcgggttgctgccatctggttagagggggatgatccgatgaaaacttttgatagacatgtcttggtacatgcaaaaagtgataagccctgttatatcaaagcataccatggttgttatgatcctttggcgtatcctttatttaaccctaatagggagactgggtggaacctgaaaatgccgtacgacgatcccaaccagattccgtgtgatgtggaaatggatgaaacatgtgaagcatcaacttttggtgatgtacatactaacgaagaaagcacttttgatgatcttctggaggatgaggttgttgacaattatctagataatgaagatgataatgacgatagtagtaaatctagcaaagggaaaaaggacaagtttgtcacagcgagggagtactattgcttcaggctgcagaacatctcgaacccggccaacaacctcaagatcgactag

SEQ ID NO: 31109 - DNA, 1886 bp, Oryza sativa
  unsure (1)..(1886): unsure at all n locations
  Clone ID: PAT_MRT4530_35447C.1
gacacgactgtgcatctttctcggttgatccaactggggaaataaacgagatacaacagtacagaaatgccagatacgtgacaccaccagaggctatatataggatgcttggtttcccactgttcggtatctatccagctgttctgcagctccaacttcatcttcctaacatgcagtatgtcacgtataatgaggatggtaatcttgaggatgttgtaaatcgtccatcttctaccaggacaactcttacggagtatttcaaaatgaatcaagtagacccggaagcaaggaagctgctatacaaggagttccctgaactctaccgttggataaccggacagaatgtgtggcagaaaaggaaaatgaagagaggccaagttggacgggttgtgtacgctcaccctgcagaggtggagagatactacttgagagtgctcctcaaccacgtgcgaggtgcaacctcatttgaagatttgaggacagtgtcaggtacttcatactctacctttagagaggcatgcgagaagagagggcttgtggagacggataagtcacatgatgattgtttgaatgaggcatccactttccaaatgccatttgctttgcatcgattatttgcaaccatattggtattttgcgaagtcactgatatccgtgcactatgggacaatcacaaggatgcaatgtctgaagattatagccgagggaacactaaccctgcagtagtagagaagatggtgctacgagacatacatgatttgcttcattccatgggaaaggatatcacggagtatggtcttcccgaggtcattgatataggtgaacgttgcaacgacgtaatgacagagattatagaggaacttaacgtgctagtggatcaagaccatttagacatatacacatcccttaatgatgagcagcgtgcaagatttgatgagatcattgatcatgtaactaataaaaagagccaggtattttttatcgacggcccaggtggcactggcaaaacatttatgtacaaggcgtttcttgctagagtgcggtccaagggattaatagccattgcaactacgacgtcagaatnaggaaatggcactgaanacactatcagagatgattatgttcgcttgcctgatgaaattgtgattgcttatggggatagtgaggattcagtacacgaattgattaatcatgtgtttccctcgcttgaagatgaaaagaatgcaagctctgcatcttatatgagcacacgtgctattctatccactaaaaatgattatgtggacaagctgaatgcggatatgattgacagatttccagggcaggccaaggtttatcacagctttgactctgttgatgatgaccctcacaacagttatcctctggactaccttaactctatcactccaaatggtctcccaccacacgagctaatagtaaaaatcaattgtcccgtgattcttcttcgcaaccttgatccaaataatggattgtgcaacgggactagactaatggttagagcttttcaagataatgcaattgatgctgagattgttggtggacaacatgccagcaaaagggtgttcatcccacggatccctttgtctccctccgacgatatatctctacctttcaaattcaagaggaagcaattcccaatacgtctcaatttcgcaatgaccattaacaaatctcaaggacaaaccatcctaaatgttgggatctatcttccagagcccgtgttttcacatggtcagctatatgtcgcattgttaaggggtatgtcaaggctaacaacaaagattttggctaagccaaagaaagaagttgattcaacagggaagagcactagaaatatcgtgaataaaaacgttcttgactggtga

SEQ ID NO: 31110 - DNA, 3258 bp, Oryza sativa
  unsure (1)..(3258): unsure at all n locations
  Clone ID: PAT_MRT4530_35448C.1
atgagaacttttgatagacaagtcttggtacatgcaaaaggtgataagccctgttacatcaaagcataccatggttgttatgaccctttagcgtatcctttatttaaccctaatggggagactgggtggaacctgaaaatgccgtacaacgatcccaaccagattctgcgtgatgtggaaatggatgaacagtgtgacatcatctttagtttggacgcagagaacgaggttgtcgacaattatctagacaatgaagatgataatgatgatagtagtaaatccggcaaaagggaaaaaggacaagtttgtcacagcgagggagtactattgcttcaggctgcaggaacaatggaggggacaaggagacacttggggaaggacttagagccatggatgatcatcgaggacgtccaagtcaagtctatgaggcttgattggtactcaaaacctgagaagcaaaaaaagattcaggctgagctataccagggcgtggttgatgtgctttcttctggagagaagcggttccgcagttggtttctcaatgcgatggcgcttgtccagcgttttgggaggccagattacttcatcacaatgacgtgcaacccatactgggatgagataacagaacatctcgaacccgaccagcaacctcaagatcgaccagaccttgtcgcaagagtttttagggctaagctgcgagatgtgctggatcttattgtgaagaaaaaatattttggggagttcaaccaagcaacncaacaagggaaggactcgtaccctttgtataggaggagagatgacggatggcgtgtcaagattagaggtgcagtgttagacaacaggtgggtggtcccatataatcctggactgcttatgcggtataactgtcacatcaatgttgaggcttgtgcaagcatcaaatctgtgaagtacctctataagtatgtgtataaaggacacgactgtgcatctttctcggttgatccaactggggaaataaacgagatacaacagtacagaaatgccagatacgtgacaccaccagaggctatatataggatgcttggtttcccactgttcggtatctatccagctgttctgcagctccaacttcatcttcctaacatgcagtatgtcacgtataatgaggatggtaatcttgaggatgttgtaaatcgtccatcttctaccaggacaactcttacggagtatttcaaaatgaatcaagtagacccggaagcaaggaagctgctatacaaggagttccctgaactctaccgttggataaccggacagaatgtgtggcagaaaaggaaaatgaagagaggccaagttggacgggttgtgtacgctcaccctgcagaggtggagagatactacttgagagtgctcctcaaccacgtgcgaggtgcaacctcatttgaagatttgaggacagtgtcaggtacttcatactctacctttagagaggcatgcgagaagagagggcttgtggagacggataagtcacatgatgattgtttgaatgaggcatccactttccaaatgccatttgctttgcatcgattatttgcaaccatattggtattttgcgaagtcactgatatccgtgcactatgggacaatcacaaggatgcaatgtctgaagattatagccgagggaacactaaccctgcagtagtagagaagatggtgctacgagacatacatgatttgcttcattccatgggaaaggatatcacggagtatggtcttcccgaggtcattgatataggtgaacgttgcaacgacgtaatgacagagattatagaggaacttaacgtgctagtggatcaagaccatttagacatatacacatcccttaatgatgagcagcgtgcaagatttgatgagatcattgatcatgtaactaataaaaagagccaggtattttttatcgacggcccaggtggcactggcaaaacatttatgtacaaggcgtttcttgctagagtgcggtccaagggattaatagccattgcaactacgacgtcaggtatagcagcgtcgattatgcctggaggatgtaccgcacactcgagattcaaaatccctattaagattgctcacaatagcatgtgcaacttcacgaagcaaagtggcaccgcggaattgcttcacatgtcgtccttaattatttgggatgaagctgcaatgacgaagcgtcaagccgtagagacccttgataggtctcttcaagacattatgggttgttcattgccatttggaggaaagtttattgttttttgcagtgattttagacaggtacatcccgtggttacacgtgggacaagggcccagataactgatgcaacattacagagattgtatttatgggataatattaggaagatcagattgtcacgtaacatgagggctcaatctgatctatggttttcggaatatctccttagaattagaaatggcactgaaaacactatcagagatgattatgttcgcttgcctgatgaaattgtgattgcttatggggatagtgaggattcagtacacgaattgattaatcatgtgtttccctcgcttgaagatgaaaagaatgcaagctctgcatcttatatgagcacacgtgctattctatccactaaaaatgattatgtggacaagctgaatgcggatatgattgacagatttccagggcaggccaaggtttatcacagctttgactctgttgatgatgaccctcacaacagttatcctctggactaccttaactctatcactccaaatggtctcccaccacacgagctaatagtaaaaatcaattgtcccgtgattcttcttcgcaaccttgatccaaataatggattgtgcaacgggactagactaatggttagagcttttcaagataatgcaattgatgctgagattgttggtggacaacatgccagcaaaagggtgttcatcccacggatccctttgtctccctccgacgatatatctctacctttcaaattcaagaggaagcaattcccaatacgtctcaatttcgcaatgaccattaacaaatctcaaggacaaaccatcctaaatgttgggatctatcttccagagcccgtgttttcacatggtcagctatatgtcgcattgttaaggggtatgtcaaggctaacaacaaagattttggctaagccaaagaaagaagttgattcaacagggaagagcactagaaatatcgtgaataaaaacgttcttgactggtga

SEQ ID NO: 31111 - DNA, 355 bp, Oryza sativa
  Clone ID: PAT_MRT4530_35449C.1
agccttgacacttttgttaccggcggactaattaatcctctgcaacactgcccatattacacacacactatactcggcggccaacccatgctatatcataacgggtcaggccagaaacaatgccgaagaacgcacattacgattggccctgagggactccatgtgattatccatgcttcgctgacgtgattaacacgatgatcttgcctgcgttcacactacaacgacatgaggccggagtactgcaaggtgcctctcacaatcatcctcttcaccttgctgaactaacaaagcgcctccataagccctgtccgtgacaagcccgatcctccggtagcgctgacagcctgtgaca

SEQ ID NO: 31112 - DNA, 162 bp, Oryza sativa
  Clone ID: PAT_MRT4530_3544C.1
gttaaaaatggttggagtaggatgaacccgggaatcaaaaatctaaaccccatgaataaacaaaggttatcttggacataatttaataacattttacaaataaagggaaaccttctgcaaaaaggggggagcctgagagcaaacctggaagggttattgaca

SEQ ID NO: 31113 - DNA, 4931 bp, Oryza sativa
  Clone ID: PAT_MRT4530_35450C.1
gatagccgttgtataagtagtaactccttgtataagggcctgtttagttcaggaaatgaaaatttttgggtgtcacgtcggatgtttaaccagatatcggaaggggttttcggacacgaatgaaaaaactaatttcataactcgtatgaaaaccgcaaaatgaatcttttgagcctaattaatccatcattagcacagtcaagaacgtcatttctagtgctcttccatgttgagtcaatttttttatttggctttgccaaaatccttgttgttagccttaacacaccccttgacaatacgacatatagttgaccatgtgaaaacacgggctctggaagatagatcccaacatttggtattgtttgtccttatgatttgttaatggtcattacgaaactgagacgtattgggaattgcttcctcttgaatttgaaaggtagagatatatcgtcggagcaagacaaagggattcgtgggatgaacacccttttgctggcatgttgtccaccaacaatctcagcatcaattgcattatcttgaaaagctctaaccattagtctagtaccattacacaatccattatttggatcaaggttgcgaagaagaatcacgggataattgatttttactattagctcgtgtggtggcagaccatttggagtaatagagttaaggtagtccagaggataactgttgtgagggtcatcatcaacagagtcaaagctgtgataaaccttggcctgccctggaaatctgttaatcatattcgcattcagcttgtccacgtaatcatttttagtggatagaatagcacgtgtgctcatataagatgcagagcttgcattcttttcatcatcaagtgagtgaaacacatgattaatcaattcgtgtactgaatcctcgctattcccgtaagcaatcacaatttcatcaggtaagtgaacgtaatcatctctgatagtgttttcagtgccatttccaattctaaggagatatttcgaaaaccatggatcagattgagccctcatgttacgcgacaatctgatcttcctaatattttcccataaatatgatctctgcaatgttgcatcagttatctgggcccttatcccacgtgtaaccacgggaagtaactgtctgaaatcatcgccaaaaacaataacctttcctccaaatggcaatgaacaacccataatgtcttgaagagacctatcaagtgtctctacggcttgacgcttcgtcattgtagcttcatcccaaataattaaggacgccatgtgaagcaattccgcggtgccactttgcttcatgaagttgcacatgctattgtgagaaatcttaatagggattttgaatctcgagtgcgcggtacgtcctccaggcaaaatcgacgctgctgtacgagacgtcgcagttgcaatggctattaatccctcggaccacactctagcaagaagcgccttgtacagaaatgttttgccagtgccacctgggccgtcgataaaaaatacctggctcttcttattagttacatgatcaatgatctcattaaatcctgcacgctgctcatcattaagggatgtgtatatgtctaaatggtcttggtccactggcacgttaagttcgtctataatctctatatcaatgacctcgggaagaccatactccgtgatatccttccccatggaatgaagcaaatcacgtatgtctcgtagcaccatctgctctactgctgcagggttagtgttccctcggctgtaatcttcagacattgcagccttgtgattgtcccatagtgcacggatatcagtgacttcgcaaaataccagtatggttgcaaataaccgacgcagagcagatggcatttggaaagtgaatgcctcgttcaaacaatcgtcatgtgacttatccgtctccacaagccctctcttctcgcatgcctctctaaaggtagagtacgttgtacctgacactgtcctcaaatcttcaaatgaggttgcacctcgcacgtggttgagaagcactctcaagtagtatctctccccctcaccctcattatacgtgacatactgcatgttaggaatatgaagttggagctgcagaacagctggatagataccgaacagtggaaaaccaagcatcctatgtatagcctctggtggtgtcacgtatctagcatttctgtactgttgtatctcatttatttccccagatggatcaaccgagaaagatgcacagtcgtgtcctttatacacatacttatagaggtacttcacagatttgatgcttgcacaagcctcaacattgatgtgacaattataccgcataagcagtcctggattatatgggaccacccacctattgtctaacactgcacctctaatcttgacacgccatccatcatctcttctcctgtacaaagggtacgagtccttcccttgttgtgttgcttgattgaacatacaagcacaattcctattcagtgtgccacatggtccatgcagcatatgcttgatgacaagacgatgtagctcagggtatttggccttgtctggtatctccgtgcaaatcactttatcgtactcatctggggttgtcaatttactgcttgacttcatgatcaacaggatgtgttcatgtggtagtccccttttctgaaactcagtgacgtgcgcgtaagcctgaacctccccaaaatattttttcttcacaataagatccaacacatctcgcagcttagccctgaaaactcttgcgacaaggtctggtcgatcttgaggttgctggccgggttcaagatgttctgttatctcatcccagtatgggttgcacgtcattgtgatgaagtaatctggcctcccaaaacattggacaagagccatcgcattgagaaaccttcgttgcatgtcgcgatcacctcccggaaaagatcgaggtagcacaatcctcttaccaactgccgaaccgcttgtctctccagaagaaagcacgtcaaccacgccctgcagcctgaagcaatagtactccctcgctgtgacaaacttgtcctttttccctttgccagatttactactatcgtcattatcatcttcattgtccggaagatcattaaaagtgctttcttcgttggtatgtacatcaccaaaagttgatgcttcacatgtttcatccatttccacatcacacggaatctggttgggatcgtcgtacggcatttttaggttccacccagtctccccattagggttaaataaaggatacgccaaaggatcataacaaccatggtatgctttgatataacaaggcttatcaccttttgcatgtaccaagacatgtctatcaaaagttttcatcggatcatccccctctaaccagatagtggcaacctgcgaggcggtgggtgcattatatcttcgttggtcaggtgttacattcgtgttgagctcaatcatgtagtcatctagattggacatggatccaactctactgaaggtctgcacatatgggttctgcaccaaaatacgtaaaatgacccgaacaaggttgatatcaaggtcaggagacctgcgaaccctatgggccagtgcattagcatcttctgtatcataaaagtagagctgcatatggcacggcccttgagaacctggaaccaaattatccaagcgatggtacaacgcaccgtgcacacgaaatgtatacacaccagttcctgctgcagtgctgactcgttggtcaagggtcactccaaggctcgtaaatgagaaatgggagttgaaataccgtatgtgctttctgaaatactttgcatcattatgcacttggctggtaaacaaccgtattaattcatcaggcaccgttggaatcttaacatttatctttccctccctacaacaaaacccaggagactcaaattgaaaccttatcgcctgacagtgtttgcaatctggcactttttttaaaacatggtgtgtctttggtagcttatggtacacacgatcgtgtgggtcatcagtactaatcccaatcacaccagtaacatcaacacgatatgactcgtatccatcatcctccagaacttgactgacaccttcaaaatcattgtccacacattttgcgtcctcaacccccttgtatctaatgttctcacctatgactaaaccggctcctgtctgttcaaggtttgaagcttttcttacattgaatcgaggtttgtagacatcatttctgtgtaaccaatcatttggatcatctggatcatgattctccttgtcggccactgttccataaagcgatccttcattaatggtggagaaagcaccaatagcaggggtgcttgatgtagcactccagccgtcaacattgttcaacttagccttctttcgtgcacgccattcacgctgatatttcgtcttctgttccctcctcttgtctatactcgacatctcattttcactctttttgtctatgctcaacattttagaatgattgaccttttgactttcagtcacttgcgagtggcaagaggtcggtgtatgaattgttttgtatgatgttacttcatctggaacattgtttgactctgccttcctctttgcgcttttctcgtgccattcacattgctttctgctcttctctctcttttctttagctaacaactgagcatgcgtcaaattctgcatgacagtggctgatgctcctccaccatcaacagaattagactgagccttcctctttgctcgccattcacgcagttttctattcttttcatctttcttctctttcactaacaattcagtctgtgtcaaattttgcattatagcatcatttgtcacaccttcttcaccaaattttgactcggccttctgtgcgctccttgcacgccattcacatagctttatgttcttttcttctttcttttgtttgtctaacat

SEQ ID NO: 31114 - DNA, 1227 bp, Oryza sativa
  Clone ID: PAT_MRT4530_35451C.1
tcaaattgaaaaagatataacatcatagtgacttgtgctccttcctgtggggtgcacttcttttttaggctttgccaaaatccttgttgttagccttgacacaccccttgacaatgcgacatataggtgaccatgtgaaaacacgggctctggaagatagatcccaacatttgggatggtttgtccttgtgatttgttaatggtcattacgaaactaaaacgtattgggaattgcttcctcttgaatttgaaaggtagagatatatcgtcggagggagacaaagggatccgtgggataaacacccttttgctggcatgttgtccaccaacaatctcagcatcaattgcattatcttgaaaagctctaaccattagtctagtcccgttgcacaatccattatttggattaaggttgcgaagaagaatcacgggacaattgatttttattattagctcgtgtggtgggagaccatttagagtaatagagttaaggtagtctagaggatagctattgtgagggtcatcatcaacagagtcaaagctgtgattaaccttggcctgccctggaaatctgtcaatcatattaacattcagcttgtccacataatcattttttgtggatacaatggcacgtgtgctcatataagatgcagagcttgcattctttttatcatcaaacgagggaaacacatgattaatcaattcgtgtactaaatcctcgctatccccataagcaatcacaatttcatcaggcaaacgaacattatcatttctgatagtgttttcagtgccatttccaattcttctctgtcgtgcagtggagagggttccggagatcactttgtggtgtcgcagtagagaagggggcacaggggcaaggagtcctggtagttggcatcggcgatctggaggcgaaaatcggcgccaacatatgtttagtcgacacaccagtacacgaccaaccagcccaacactgtcatgcttgtggcactccacgccggcgagacgccgccgccgtgtcacctgctttgacggctccgcttctttacgatggcctctatcgacgacgcagcttctccgcacgccgctgacatccacggcgagagtccgtcgccgacaccaagtctcctttgtcggatcgtctccccataaccgcgagtccgtctcctgcagccgcacctgccgtcgactgtgtggggatcgattttggagatgaacagtgggcat

SEQ ID NO: 31115 - DNA, 567 bp, Oryza sativa
  Clone ID: PAT_MRT4530_35452C.1
gcacgaggatttctctcctctcccgcgccgcccctccgtcgtcgtcgcgtgaagtcctggccgatcccctccgtcgtcgtcgcgtgaagtcctggccgatcccctccgtcgtcgtcgcgtgaactcctcgccgatcccccgcctccgtcgcgccgtcacgccgccgattcccccctcctcgtctggcgcgccgcggggttcagtcggcgccgatccccatcccccaggtggccgtcgccgatcctgcatctcctctgtcccgtcctcgccgatcccccgcctccgtcgcgccgtcacgccgccgattctcgcctctccaagaccggctcagttttggcaagttttgaattcgagctcgatggccgggtccctgttgaaggctttcagttttggcaagttctgaattcgagcgagctttcatttttgcatcttccccagatcactgctggtcaacaggtcaacaaaaggtaacgccagttgtaaatcctgccatgactctgaatctaggactctaaaagctcccaagctttaagatttgagaaccccgtgcagaggcagtggagactg

SEQ ID NO: 31116 - DNA, 1851 bp, Oryza sativa
  Clone ID: PAT_MRT4530_35453C.1
tggatccccgggctgaggaattcggacgcggggccctaaccctattccccccaccgagcacgcggcagctacacgcccccacgtcgccgtcgtcctcctccctccgccgcgccgtcgatctccctcccctcccgggccgccgccgccgcggcgtcctccacgccgcctgttgttcttgcctccttccccgaccgccactcttcttcaagaggtggccgtccgtcggcggagcagcacgggaagtcgacgccgctagctccgcctcccgtcgatcagtcggagatggagcaggttcgtggtgttgtgcttcaaagaaacacgctggtgatgtctgctgcatagacaacacatggaaccatccgatctagttgatggatacaagttcggtgatcaaactacaagcgatgttcgtgtttgctttaaacgggccgatgaccaggcagaatggttttgctgccattcatctgtgctttccggaaatagcaagtattttgcagactggcttagcagaaatgacattggttcaaacaactgcattggggttgactgtataagtgctgactatgaacattatgtcaaggtgttgaagttaatatatcttcctgcagaatcaattatagattcttttgaatctgttaggtcagcggttggcgtgcttcgagcgtcaacacttctcaaatgtgagttaattaccagaagctgcattgaataccttgaagcagcttcatgggatgaaaaagaggaggaagagattttggaagtagctcagagccttggctcagaggaagcagtagctctgttagcccgtcttcaagccccaaatgtttctgctgtgaagaatgtcttcatctctgccattcgttttgctacgtccatggaaagtccatctcctcctttcttggatgatctcaagacttctgctcaggagcaaattgacttcatgctccatgaggacgatgacactgctttggttacaatggatgaggatgtgaggtctgtggtgcgagaaggattgaaaaaactgttctccacgcttaagattggactagatctgttgacctcggagtatgagcaattgcctgaacaggcagaacaaagggttctctgtagtttagctgacattgactggatggctaatgtcttgacaaagattgagatgatgaacgagtttgtctctggttggtcagaaatctctggctatgttctttcagttgttcaggataagaagtatagctcaggattgtggcttgtaaaagcaaaacttattgaagtgactggaaaggcctttgatgctgttggctatggctctgtggttttcccagcatcatccagagttcattttctgcggatgtggcttccattcatgcaaacaacgaagcgcttgcttgatgaaaagtcgaaggatgatgcgattccacagatggatgcagacttgtttcagaacattgagggtgcaatagtctcattggtgttagcattgccatcaggtgatcaggcagacattcttggagagtggatgaagaatgcagagcagttcagatatcctgatctcactgaggcatttgaggtgtggtgttaccgtagtaaaacggcaaagaggaggctagtaggagggctaaacgggagtggcaaccccacagtcagcttgtaactttgtaaggctaccattaattttaatcttttgttgtagcctatacaagtcagtgaaatcaggtggttggtaccaagcaatataccaactagattttcattgttgtatgttgtaaaacaactgctcatgtgtaatacacttgagctttcttgcagtatgttcattacccttgtccaagttcactaaaaaaaaaaaaaaaa

SEQ ID NO: 31117 - DNA, 154 bp, Oryza sativa
  Clone ID: PAT_MRT4530_35454C.1
atggcgcgagaccgggtatttgtggatgacaccagaccgggtgaaaggatacctcctagcgcgtactatgaggccctcaaggacaaagttgcagcctctacttgtgttgatgatgctcccatcgaggcctccgagattgatgcacaacttgccg

SEQ ID NO: 31118 - DNA, 716 bp, Oryza sativa
  Clone ID: PAT_MRT4530_35455C.1
tcagataccttggcattcctatgcattttacaaagctttgtaacaaagattggcaaactattaaataaagaattgaaaaaaaacttagtagttggaaaggaaaacatatatcagttgataaatacccatctttatatgctatagttcgaaggagaaactcttctattgctactgttgtgagaactgttccactgaatgtttcttttaggagagctttagttggttagaatatagtaaattggcatgaattgtgtgctttaattgtgcatcagttgacacaatagagtgattgttttagatggaattttcatcagaacggtcagttttttgttcgatatttaataaacaatggttatattgacaaaaacaagattatttgcaagcttaagttacctctgaagattaagatctttttgtggtacttgcataaatggcctttataagtttcactggtattcactcgtgttgagtgtttcattgtaataattggttgtagctctcggagtaaaggctgggtctatatgttttctgaaaaaaaaaagaacagtcatatttacctacgttgaaaaacttagaacctaaaatgttgtcctctattctctccaacccaaaagtctgccgggagggcagaggcctgcgcgcggcggccagcgaggccggcggtggggcgcggcggcggactgcgctcgcgggcagaggaggcccgcgcgcgcgga

SEQ ID NO: 31119 - DNA, 393 bp, Oryza sativa
  Clone ID: PAT_MRT4530_35456C.1
ggcgggatactagacctccgaaccaaacctgacgtctacagcatcctgtagtcgacgccgccttcgtcttcctcgcagagatggcggacgcggaggagcacctttgcttgattgcgaatctggcatggtccacaactgatgaaagcctcaaggatgcctttgtgaaatttgccaacctcactgaagcagaggtgcgggttgacaagatattctggccattctcctgattctggctttgggacctttgatgagaagtagagccatgcaagatgctattgaacgaatgatcggcttggatctgtacggccgagagatcactgtcgacaaagctgccgctaccaggagctgccagagatcgtagtgcaagaccgttgttatgctcgtgaccgtgga

SEQ ID NO: 31120 - DNA, 390 bp, Oryza sativa
  Clone ID: PAT_MRT4530_35457C.1
atgaaaaacctgcagtgcctcaactcaagcgcgctcgccttcgacggcacactcgcggccctgccgccggccgccgcagcgtcgacggagcagcccgaggtcaccgagcaggcgacctcgacatcctacaggctcggcaacaccggcggcgccatgaccagtgccgcgtctgctgctggctccttccttccacattcgctgggcgcagatcgagtctccgacagcatcaagtccatgttcccctcctcatccacagccagcggcgccgcctcggccggacacgacgagtataggggatccccgccggacctcctgtcgcgacgacaagcaaccagcaggcgcagtcacgcaggagctatgcctcaatctggtgagcaattttgggactga

SEQ ID NO: 31121 - DNA, 261 bp, Oryza sativa
  Clone ID: PAT_MRT4530_35458C.1
atggggctcctcaccgggagaccgcgctggcccccctttgccgattcggccggggaccctgggcgcgacgcgggatcatggctgcctgctgacgacatgaccggagtcagaccagtcacgtcggtcattcttgtccaccacgtgactaacgtgccatctctgggaggtaacacgctagctccagctggggacgagcgcctagaagccctcgtcctgacgggatggggcgaggcgtgcgtcagaccgcctgtcgccacctaa

SEQ ID NO: 31122 - DNA, 288 bp, Oryza sativa
  Clone ID: PAT_MRT4530_35459C.1
atgcacaattgtaattttattcttattttttattccccacaattagagtttgtcttcatatctatcaaggggagggatttcttcagcgagacccttacgttttctgatttgcaagcacaatacgttaggcttagatccagtttcaagaggatttccagccaatggttgccagtggtcaaatacgcattgagggaaggcttgaccagaagtgttagaacgtaagtactgagtgaaacccaatgactccatgacaggccaactggcctttaccatgtaaataggagtacc

SEQ ID NO: 31123 - DNA, 328 bp, Oryza sativa
  Clone ID: PAT_MRT4530_3545C.1
cgtagcgttgtcctctccggccatattcccactacagttctcctacccgtctgctatggtccacgcctgttctcatatcatacctccgtacgcaacggctgtgtgccactcctccttcaccctgcacgtccgctggggccacctgccgcgcggaagttcaccccatccccgtttaacaggcgataacgagaacgatcgacccaagacaagtgagaacgagggaacgaacgtgtatgagaacaagcgaccgagaacgagcgaccgagaacgaggacgaacaaaagacgtgttgtcggagtcgtccgtcaagcctgagtggaagagctag

SEQ ID NO: 31124 - DNA, 324 bp, Oryza sativa
  Clone ID: PAT_MRT4530_35460C.1
atgacaatgctctcactcctcggatctggtgcactatcttactcgtcgccatatgcaattggacttggtgcactatcttactatctggaaacgccgcaacaacaagggttacgggtcaggcataccctctacccctcgatatacactacgtatcgacatggcatacccacgcgcacacggatattcccttatgatctaaggaaacctttcacgaattcaatagatgagaagagtccttctcgaacaagaactgggttgccaacgtatcgtgccgggtttgatatgttcgagtcctactcggagagtaccaaacccgtggtataa

SEQ ID NO: 31125 - DNA, 1185 bp, Oryza sativa
  Clone ID: PAT_MRT4530_35461C.1
atggcgcttgggatgctgaaaagagatgaggaggatttcattgcttggcatcctgataaatttgggaggttttctgttagaagcgcatacaagttagcacagtcgttggagcaaatggaggagagagctagttcaagtgctgcatccacaactatcccctggaacctaatttggaaatgtaatatccctcagaaggttaaaatctttgcatggaaggcaactactaactgtttagcaactatggagaataaaaagaaaaggaagatggaatcttcagatatctgtgttatatgtggcagggagaaggaggatacaagacatgcgctcaccaggtgcccacttgctcgggctcttttgcaggctttgcaggaggatcactgtttcatttccaacaatttagcttctactgattatggccattggttgtttgattgcctggagaacctggcggattcagggcgttctttgctcctgatggtgctgtggcggaactggtttagtcgtaatgaaatcatgcatgggaagcctgcacccacgattgaagcgtctaagaatttcctgctgagttatgtcaatacactcttggaaatcaaacagcatccccaggctaatcagacgaagggcaaacatgtgatcaattattggggtttcaagaaggatagtcagcaaagactgaacaatggatgcactaccgactgggagaagccgcagcagggttggatgaaggttaatgctgatgggtcatatgatgcacaaacggggactggaggtatcggagtggtgcttagggactcggaaggaaacgtgattgctgcctcctgtaagcagctggccagttgccggaatgcacttgaggcggaactccttgcttgcaaagaaggagttgtccttgcgttacaatggaccctcctgccgtttgtgctcgaaacggattgtttggtggcaatacaaatgatccagtccaagaagaaggatatgtctgaattagcgtatcttataagagaggtgaaagagcttcttggcagtaatagagaggtcaagatttgtaaggctatacgtagccaaaaccaggttggtcatagtttagcgaataaagcccggtgtgattctttgtccggtctgtggactgggaatggctgtaatttcatttcgcggttggtctttgaagacgccgtgtctaagtaa

SEQ ID NO: 31126 - DNA, 135 bp, Oryza sativa
  Clone ID: PAT_MRT4530_35462C.1
attccggggtgccagattgagaagcgccaaaaagtctgtgaaggtcattggggagtccatgctctgggttgtaaagagggtgattttgatccagaggaggagtacttcagtgaaggtgatgatcaggaggattag

SEQ ID NO: 31127 - DNA, 1753 bp, Oryza sativa
  Clone ID: PAT_MRT4530_35463C.1
ccggccggggaggagtcgagtagatagatagatagatcggcgtgggagaagacgacatcgccggcgacgagaccagatcgatcgccgaggtatcgcctccctccccgaccgagcagggtcgccgccgttcgttcctcttgctgcttccgccgcatccatcctgcggggactaaaccttgaagcatctgggctgttgtttcaccattgtagtggattccacttcggaactgaacttttctagttgtttccgtgacaatgaaaactcacgagagagctgctaatttggcccttgcaggtttgagcttggcaccccttgtggttaaagtagagccaaatgtgaacgtcatattgacagcatgtcttgctgtctatgtgggctgttaccgttctgtcaagccgactccaccctctgagacaatgtccaaggagcatgctatgcggtttcctttggtgggaagtgctatgcttctctctctgttccttctattcaagtttctctcgaaagacttggtcaatgctgttctcactgcctactttttcatccttggcattgccgctctctgtgcaacattgctgccttccataaaacgattccttccaaaagaatggaatgataatgccatcgtttggtgtgctccatttttccactcgctctcagtggagtttaccaagtctcaagttgttgcatcaatcccaggatttttcttttgcatatggtatgctgcgaagaagcattggctagcaaacaatgttttggggatttctttctgcattcagggaattgagatgctatcacttggatcattcaaaactggtgctattctcttggctggcctctttttctatgatattttctgggttttcttcactcctgttatggtcagtgttgcaaaatcatttgatgcaccgataaagcttctatttccaacaggagatgctgcacgcccattctctatgcttgggcttggtgacattgtgatacctggtatatttgttgcgctagcactgcggtttgatgtctcaagaggaattaagaaccgctacttcaatagtgcatttttgggttatacggtgggtttgaccgtgacgataattgtgatgaactggtttcaagccgcacagcctgccctcttgtacattgttcctggtgtgattggttttgttgctgttcactgtttatggaatggagaagtcaagccactcctggagtacaacgagtcaaaggctgaagaggaagatgctgttgaagaagatactgatagcaaacagaacaaaaaggaggagtagcactctaacagcagggcaagaaaaggcagaaatttcatgtaaggtcgtcggcagctaagtaggctggatgacctctcggataccagctcacttaagaacttagaaatgattcgcatgatagaaacccttttttgatttaagaattgtttggtctggtgattagaagagaagagagtagattcttaagaggcctgccaatatggtccagtggcttgactttacccggtaccccttttgctttagtactgacttataatggtggtacaaaggatttacctgaatttttggtctggcaaatagcggtttgtgatatctttcttggtaccttctcttgtttgattgacaaaccatgcagatgcatcccatcttccgtttggaactatggaagtttcttttatgaggaattgcactctttctcgcaaaggcttgaaagaccaattatttgcaaaaaaaaaaaaaaaaaaaa

SEQ ID NO: 31128 - DNA, 337 bp, Oryza sativa
  Clone ID: PAT_MRT4530_35464C.1
aaatggaaccgcaagcctcttcgcctgctgcttgactgccaataaggatttcatcggggtttcagctgatttaatgacatcgaaccaccagccgatatgtgctttaacctttagatcaatacttgttctactatatcatattgttagccgattgatttctactgaattatattgttattttattacatcatcatcagccgattgcctttatatcattatctatattggacatatagccgattgcttaaaccctatcgctatcggctggtattggcatcggctattatcggccatcggctggaactactccatcggcttgtcagccgatcgggtgttt

SEQ ID NO: 31129 - DNA, 1548 bp, Oryza sativa
  Clone ID: PAT_MRT4530_35465C.1
atggagacgcgacgagcaacctacagatccgccgcgctcctactcctcgccgccatcctcgcctccgccgcctccgcctcctccatcggcgacaagtgcgccgcctgcaaggccgttgccgcagagctagagattggaatttcaagtgagaaaccaagaaatcacttggacttgcgcaaccgcttaaattcaaaaggtcagcgtgaagggaaggtcattgattacagagtaagtgagcttcgagttgttgagcttctggatggcctatgtgataagatgcaagattataccctgcagaagttggaatcaggagaaaaaggatgggtgaaagtagcagattggaacagttttaaaactgaaaagaaggccgcagcacgagcacactccaaaaatttatcctcattctgtggaaggttactggaggaaactgaggatgagaatcaggaaatgtcagcagagcactttgtgaagatattagcaaacactgtcagtctacaaggtttgagcttggcaccccttgtggttaaagtagagccaaatgtgaacgtcatattgacagcatgtcttgctgtctatgtgggctgttaccgttctgtcaagccgactccaccctctgagacaatgtccaaggagcatgctatgcggtttcctttggtgggaagtgctatgcttctctctctgttccttctattcaagtttctctcgaaagacttggtcaatgctgttctcactgcctactttttcatccttggcattgccgctctctgtgcaacattgctgccttccataaaacgattccttccaaaagaatggaatgataatgccatcgtttggtgtgctccatttttccactcgctctcagtggagtttaccaagtctcaagttgttgcatcaatcccaggatttttcttttgcatatggtatgctgcgaagaagcattggctagcaaacaatgttttggggatttctttctgcattcagggaattgagatgctatcacttggatcattcaaaactggtgctattctcttggctggcctctttttctatgatattttctgggttttcttcactcctgttatggtcagtgttgcaaaatcatttgatgcaccgataaagcttctatttccaacaggagatgctgcacgcccattctctatgcttgggcttggtgacattgtgatacctgatgagtgcaacaagattagcttcaaagttcgaactacttggttgttgtataatgagggtatatttgttgcgctagcactgcggtttgatgtctcaagaggaattaagaaccgctacttcaatagtgcatttttgggttatacggtgggtttgaccgtgacgataattgtgatgaactggtttcaagccgcacagcctgccctcttgtacattgttcctggtgtgattggttttgttgctgttcactgtttatggaatggagaagtcaagccactcctggagtacaacgagtcaaaggctgaagaggaagatgctgttgaagaagatactgatagcaaacagaacaaaaaggaggagtag

SEQ ID NO: 31130 - DNA, 891 bp, Oryza sativa
  Clone ID: PAT_MRT4530_35466C.1
caagatacagttgatgaagcagttcatcgcgcattgtttaatcaatctggagttttggcggatacgttacaaaatttgatcaaggtatcagttgacgatttaattatccagaaaagccagctcggggggcagattgatgaacaacaacagtatcggcttgggggcaagcatatcagtatcaacatgatgggctatatcaatatcggccagacgaacttcatcaatatgggcatggtgaagaatgccaatataacaatgattgggccgatagaattgcaaagatgatagaagagcagtttggaattaaacctaaggaacatatttctgtatatcgactgtcatatcataagtgatttgatagggttctattgccacaccaatacaaggttctagacttctcccaattttcagggcaagatgatatatctacaatggaacacatcagttgattcttagcgcaatgtggggaagcatcggctgaggaagctctgaaagttagattttttccgttgtctttgactgaatcggctttcacatggttttcatcgctatcatcaaattctatcagagggtgggccgatcttgagaagcaatttaatgactacttctttgctggaatcaatgagttgaagctttcatacttaatatcggttgagcagcaagaaggagaatcggctatggaatatattcagagatttcgtaatgtccgcagccgatgttatggtttgagcctaaatgatgagcaactagcagatctcgcattccaaggattgtcaacacctatcagagagagattcttttgccatgagtttgacaacctggctcatctaatgcaaacagtataggctcatgaaagctgattacaataagcaaaggaagatcagttttgta

SEQ ID NO: 31131 - DNA, 708 bp, Oryza sativa
  Clone ID: PAT_MRT4530_35467C.1
atggacgctaatccaaacgacgtccagaccgaggaggctgccattggcggctttcaattggggaggccgaaggttgttgtcctccccggaggctgctgctgctatctgctcgactcctgggagaccgttgaattccatcatgtcttgcagttcacctgttgccggcgagcagccaacgaacttgccgctcaagacgccgtggctggattgatggcgctgagtaatggacaaatccaaggcgccggcgtcaacaaggacagtaacagtggcgacgtggtttgcagggtgaagcgtacggaatacggccccccgatcgaaggcgaatacgacgacaccgtatataagaaagaaaaagaaaaaggacatagaggggatatgtacgtacatcggacatacggacgtacaggtccaggggacacggccgacggacgccacgcatggagagagtccgcgagtaggaggccatgcgtggcagaggacgcgtggacgctccgcgatgatgaccctgaggcacccgagctgtacagtgcaggtggcaagcatgcaccttccttacctcgcatgcacgtacgaccaatttccgtttcatcatcatgtcgggcagtaaaagaaggaggcggccgctctggcaaagagacgagccacgtttattttggttgtattgaccgacacgagccttttgttgactccgtaattgaattcgtcatc

SEQ ID NO: 31132 - DNA, 478 bp, Oryza sativa
  Clone ID: PAT_MRT4530_35468C.1
tacaccgtttagtatttcgggaagcgtgcgcgcggaaaacgaagtgttaacagtgaaatttggtaagcccggactagtcattggcttagagccagcatcggctttgaagtcctgagattagccgatgagagttatcaagtcgtcagttgtcggattcttgctatattcggtctgcttttgactgccaataagggtttcatcggggtttcagccgatgaaatggcatcggacctccagccgatgtatgctttaaccttcggatcagtgcttattatatcttgtttctagccgattggtttctactcggttatattgttatgttattacatcatcaatagccgattgcctttatatcattatctatattggacatatagccgattgcttaaaccctatcgctatcggctggtatcggcatcggctattatcggctatcggctggaactactccatcggcttgtcagccgatcggctgcat

SEQ ID NO: 31133 - DNA, 922 bp, Oryza sativa
  unsure (1)..(922): unsure at all n locations
  Clone ID: PAT_MRT4530_35469C.1
cggatacgggcctctcccaaacaaaggatgaagctaggttntcctcaagatngtgtggcctttctacgggcacgtaggttantaacggtcggctcccgcccgcgccncaaacccgcccccaacccatcgcccccgcgcaacctcaccaccacccccacccccacacgcaaaccccacccgctcgcggctccctcaaccaccccccaccggcggggcacccgggcttccctcgctcccacgcccccacccgcacatcgcgcgcctcaccccccgcatcctcagccccgcnctccccggcggntttggccccgcggccngntccgcgtcccacacgccgccccacgctcgcccgcttcggggcccgggtgggggcaaacnggggccccgccccagcccccgcccccgcacgcccacgcgctcccccgcgccccaaaccaacctcgcccccgccccgcgccaaaggctttcggcccccgcccccgccccccaaaccgaaaccacgccctcggngctcgcccacgcgctccgccccaacgcgcccgcaactcccacgcccccacccactcgcccctcgcgcgcacgcgcccactccctcacccangccgcgcaacgcccctccgccgcccgcccccccccccgcaaatcgctcccgcgcggcaaaacccccccaatcgntcccccgcanccgntcgntttcccccgcccgccccnccgcccccgccgcacgcaacgcgcgcgcaaacactcctgcccgcacncccccgccccgcccnccgccccgccgccccgcaacgccccccccccccccgccggcacgctcttccttgggcaaaaaccgcgtgggggaaacaagtcnnccccaaaaaccgggccccgcgngaaanncagcttcggggctttgggtttcctttgggcccttaaa

SEQ ID NO: 31134 - DNA, 177 bp, Oryza sativa
  Clone ID: PAT_MRT4530_3546C.1
aggggcgaggtaagcgacatccggaacaaacctaaaaggaagaagcacagcttcgatagaaaacctggaaggaccaagagaccaaagaaccaacacaaacggcacgctgccacgcgagccctgggcctacggacaacaatccaagcagctatgagccaaaaaataaaaaacgggcgg

SEQ ID NO: 31135 - DNA, 401 bp, Oryza sativa
  Clone ID: PAT_MRT4530_35470C.1
catcggcttagagacagcattggcttcgaagtccagagattagccgatgagagttgtcaagtcgtcagttgtcggattcttgctatattcgcctactttttgattgccaataagggtttcatcggggtttcagccgatttcatgacatcagacctccagccgatgtgtactttaaccttcggatcgatgcttatttatcatattattactagccgattggtttatactggattatattgttattttattacatcatcatcagccgattgcctttatatcattatctacattggacatataaccgattgcttaaaccctatcgctatctgctggcatcggcatcagctattatcactatcggctggaactactacatcggcttgtcagccgatcggctgttt

SEQ ID NO: 31136 - DNA, 742 bp, Oryza sativa
  Clone ID: PAT_MRT4530_35471C.1
cacgcgccggccgggaaaaaatagtaaattcccccaacaaaggtaaacgcgcggatttccccaacaattttaaccgcgcggggctcgtcgtcgccatggacggcggccccggtggccggggccggggagacccgcccttcgccggccccggccgtcggcgttcccctcgccctggtcctggtcgtgccccttcttccctggaaggaggagaagggttgggagaaaaagggcgtagcgaggaagatcgacctcgtcggaggatcatccacctcgtccgtccaggtctagaagcttggatccctggatgtccatcagctgatcgtaggcctcgtgttcggcaaagtgtactttattcagaccgccccaggcggtcccaaggaagacgaggacaagtacaatcaaaaaccaaatcactggatgagaagaatgtaagcgaggtgagtagtgagcttagcactacaacagcagacattccaaaattcaaggcactgacgataaatgactcactctctaggtttgactcaactgagaggtccaatgagtctacttatgatgctggcactcctggcagcaaccaaaggagctcaaaatttgttaaggacaagcccaaagatgattcagatgatgtggaggagtgtctgcgccaactacaggaatactactctaaagggcatgtccataccagcatcgaggatgcttggaatgaagttgtagcttacgagcatgttgctttaaccgccct

SEQ ID NO: 31137 - DNA, 324 bp, Oryza sativa
  Clone ID: PAT_MRT4530_35472C.1
accataatctctacctgcttcttgattgccaataagggtttcatcggggtttcagccgatttcatgacatcgggcctccagccgatgtatgctttaaccttcagatcagtgcttattctatcatatcaatgctagctgattggtttatactggattatattgttattttattacatcatcatcagccgattgcctttatattattatctacattggacatatagccgattgcttaaaccctatcgctatcggctggtatcggcatcggctattatcgctatcggctggaactactctatcggcttgtcagccgatcagctgttt

SEQ ID NO: 31138 - DNA, 445 bp, Oryza sativa
  Clone ID: PAT_MRT4530_35473C.1
tcaataattattaacagtgaaatttggtaatcggcaaagacatcatcggcttagaatcattatcggctgcagcatctcggaatcagccgatgggagttatcaagtcgccaatagtcggattcctgctatattcgcctgcttcttgattgccaataagggtttcatcgggatttcagccgatttcatgacatcggacctccagccgatgtgtgctttaaccttcggatcgatgcttatttatcatatcattgctagccgattggtttatactggattatattgttattttattgcatcatcatcagctgattgcctttatatcgttatctacattggacatatagccgattgcttaaaccctatcgctatcggctggtatcagcatcggctattattggctaccggctggaactactccatcggcttgtcaaccgatcggctgttt

SEQ ID NO: 31139 - DNA, 633 bp, Oryza sativa
  unsure (1)..(633): unsure at all n locations
  Clone ID: PAT_MRT4530_35474C.1
cggaggcggcgccgtggtgctcgacggttgcgagcacctcggcgacggcgtcctcgcagcgcgcgttggagtagcagtcgatggcgcggcgcagcctcgccttggccatctccaccctctcccccctcgtcagccccgcgctccggccgtagccgcccaggcggtgcgccgccgggtcnggccggatatctctttctgttaacagtgaaatttggtaatcggcaaagacgtcatcggcttataatcattatcggctgcaacatctcggaatcagccgatgggagttatcaagtcgccaatagtaagattcctgctatattcgcctacttcttgattgccaataagggtttcatcggggtttcagccgatttcatgacatcggacctccagccgatgtgtgatttaaccttcggatcgatgcttatttatcatatcattgctagccgattggtttatattggattatattgttattttattacatcatcatcagccgattgcctttatatcattatccacattgtacatatagccgattgcctaaaccctatcgctatcggctggtatcggcatcagctattatcggctatcggctggaactactccatcggcttgtcagccgattggctgctt

SEQ ID NO: 31140 - DNA, 771 bp, Oryza sativa
  Clone ID: PAT_MRT4530_35475C.1
atggggaagaaagcgaaggcggccgccggctccggcgccggcaccagcgccgggcgtgaagaaccgatcgttgtcgcgattaaaatggacaagacgacgatcatcgtgtcgtcggtggttggttccctgggcgtgctcagcgccatcctggggttcgctgccgaggcggcaaagttcactgattgtgcatcgtcgctcgggttggcgatcgcagcgaccatcttcctgatgatggcgcaggtcaccgttgcggccgtcggcggctgctgcgggtgctgcaagtcccgtgccgtcccgtccgagaccaagcggatcgtcggcgtcgtgtgcgcctcgatctcatgggtggcggcggtgatcgcgtttgcgttgttcgtggacggatcaatcggcgcggcggtggcgtgcgtcggcctggtcggcgagttcgcgggcgcgggcgtgctggtcctcgtcgccacgggcctcgggatcacctcgtttatcatgctccgtatgcatccgcaggccggcgaggcggcggcagaccgggcggccccgcgggattacgacgacgacgaacccacgccgatcgggacgccgatagacatccacggattccggccgccgatgcctcctaaccctcaggtgcctgagccgttgccgaactatccaccgccaccgtactcccctgctcctgctcctgctccggctccggctgagggaaacggcaaccaattagcacccgaccagcagctcgcgcctcatccacaaggtcatgcgcaggtgtag

SEQ ID NO: 31141 - DNA, 624 bp, Oryza sativa
  Clone ID: PAT_MRT4530_35476C.1
tttagcataaagacattacaaagtcagattcattcatgcatgaggcataaacacaagtcacaacttcagcaaatttcattgattcatacacgcaaagtcttccctccttacatcaacacaagtcacaattcacagccaacacatttcacccaaggtacttcttccctccagccatggacacacagacatgttaacagtgaaatttggtaagcccagagtagtcatcggtttagagtcagcttcggcttcaaagtcctgagattagccgatgagagttgtcaagtcgtcagttgtcggattcttgctatattcgcctgcttcttgattgccaataagggtttcattggggtttcagccgatttcatgacatcggacctccagccgatgtgtgttttaaccttcggatcgatgcttatttatcatatcattatttgccgattggtttatactggattatattgttattttattacatcatcatcagccgattgcctttatatcattatctacattggacatatagccgattgcttaaaccctatcgctatcagctggtatcggcatcggctattatcggctatcggctggaactactccatcgacttgtcagccgatcggctgttt

SEQ ID NO: 31142 - DNA, 492 bp, Oryza sativa
  Clone ID: PAT_MRT4530_35477C.1
tcctcctctctccccatctccctctcttcatctccctatctctgctctctccaggggctgttaacagtaaaatttggtaagcccggagtagtcattggcttagagtcaatatcggtttggaagtcctgagattagccgatgagagttgtcaagtcgtcagttgtcggattcttgctatattcgcctgcttcttgattgccaataagggtatcatcggggtttcagccgatttcatgacatcggacctccagccgatgtgtgctttaaacctcggatcgatgcttatttatcatatcattgctagccgattggtttatactggattatattgcaatattatattatcatcagccgattgccttttatatcatcatctacattggacatatagccgatttatcaaaatcctatcgctatcggctggtattggcatcggctattatcgatatcggctgagattgctccatcggcttgtcagccgatcgactgttt

SEQ ID NO: 31143 - DNA, 1722 bp, Oryza sativa
  Clone ID: PAT_MRT4530_35478C.1
atggtgaaaggagctcacaaaatgggagaaatgtctgacctttggagagaggctcagtgtttggagactgtcatttgcactgttttatccaatttggagatagtgctaatcgaaatcgacaatggtgtgcaacctagtgcctaccattacatagtctcaaagaaagttacacaaggagaagaaggagaagacgacgcagctgccatgggagaagagaagcagaatgacgagaggaagaacaagtacgccgtcgggtgctccatcatcggctccatcatctcggtcctcatgggctatgacactggtgtgatgagtggggcgatgctgttcatcaaggaggacctgaagacgaacgacacgcaggtgcaggtcctcgccgggatcctcaacgtgtgcgcgctcgtcggctccctcaccgccggccgcgtctccgactgcgtcggccgccgcctcaccatctccctcgccgcctgcatcttcctcgtgggctccgtcctcatgggcctcgcgcccaacttcgccacgctcctcgccggccgctgcgtcgccggcgtcggcgtcggctacgcgctcatgattgcgccggtgtacgccgccgagatcgcctccgccgacatccgcggctcgctcacctcgctcccggagatctgcatcagcttcgggatactcatcggctacgtggccaactacctgctcgccaagctgccgctggtgtacgggtggcgcgccatgctcggcctcggcgcgctcccgagcgccgcgctcgcgctcggcgtgctcgccatgcccgagtccccgcggtggctcgtcgtccagggccgcgccgaggaggcgctctccgtgctccgccgcgtgtgcgacaggcccagcgaggccgacgcgcggctcgcggagatcaaggccgcggcggggctcgccgacgacgacggcgccgccgccaacgcgggcagcggcggcaagggcgtgtggagggagctgttcctgcacccgacgccgccggtgcggcgcatcgtcatcgccgccctggggatccacttcttccagcacctcaccggcatcgaggccgtggtgctctacagcccgcgcatcttcaaggcggccggcatcgccagccgcaactcggtgctcgctgcgaccatcggcgtgggcgtcaccaagacggcgttcatcctcaccgccatcctcctcgtcgaccgcataggccggcggccgctctacctgtcaagcctcgccggcatcatcgcctcgctcgcctgcctcggcatgggcctcaccgtcatcgagcggtcgccgccgcaccactcgccggcgtgggccgtcgtgctcgccatcgccaccgtgttcaccttcgtcgcctccttctccatcggcgtcgggccgatcacctgggcctacagctcggaggtgtacccgctccgcctccgcgcgcagggcgccagcgtcggcgtcgccatcaaccgcgtgatgaacgccggcgtgtccatgacgttcgtgtcgctctacaaggccatcaccatcggcggcgccttcttcctcttcgccgggctcgccgtcgccgccgccacgttcttctacctcctgtgcccggagacgcagggcaagccgctggaggagatcgaggaggtgttcagccaggggtggcgcgcgcggcgccgggcgtcggcggcggccgtcgagatgccggcctccggcggcggcggcggcggcggcgccccgatggcg

SEQ ID NO: 31144 - DNA, 474 bp, Oryza sativa
  Clone ID: PAT_MRT4530_35479C.1
acctaatacaatgtttgcctatatgggccctatgtatctgttaacagtaaaatttggtaatcggcaaagacgtcatcggcttagaatcattatcggctgcagcatctcggaatcagccgatgggagttatcaagtcgtcaatagtcgggttcctgctatatttgcctgcttcttgattgctaataagggtttcatcggggtttcagctgatttcatgacatcggacctccatccgatgtgtgctttgaccttcggatcgatgcttatttatcatatcattatttgctgattggtttatactggattatattgttattttattacatcgtcgtcagccgattgcctttatatcattatctacattggacatatagccgattgcttaaaccctatcggcatcggctgctatcagcatcggctattatcggcatcggctggaactactccatcggcttgtcagccgatcggttgttt

SEQ ID NO: 31145 - DNA, 391 bp, Oryza sativa
  unsure (1)..(391): unsure at all n locations
  Clone ID: PAT_MRT4530_3547C.1
gcgaagcaagctgcactcaatggcagcccttaccggagtgaacatggtgctcacggacatcggctacccggtgaacttcggataccgactgccgtcagccggggcatacctggaaactcaaccaccgatcatccggaccaggatctgaaccacaacggacgagggtgggaaagcacttatcagcacagagggttctgactgctattgggtataacggggcatctgcaaataaagcctaatgcatatactctggactctgcatgtaaaggcaaaggattatacgctccatcgatcagctctgtcctaaggattaacgtgtataatcttgagaccgtactgatgcttttgctgaattaatcttgaacctcgatgtatacaacagtgncgaaaa

SEQ ID NO: 31146 - DNA, 369 bp, Oryza sativa
  Clone ID: PAT_MRT4530_35480C.1
cagaagaaacttctttcctacaaagggcaacgcacctgacatgctcatttaacacttttaccctgggggccacagaaggagagcggcccactgttccaacaccacagggaaaaaacgctctcaggaaaatggtaaaaacagtttaaactcaaaagcctacccagatcttaaaaacaatgccccaggctactaaaactactcccccaaagaccagggggggccccccgctaaaattatggcacatgccttcagatttacataaccaaacggggaaaaggatacggcccaaaacggcaattacaaggatggcctgataggctaagttgggcagtaagggatgttttcacccaatgggggcccacgtgcccc

SEQ ID NO: 31147 - DNA, 3747 bp, Oryza sativa
  Clone ID: PAT_MRT4530_35481C.1
atgacgatgatttattttcagggttggtatggttttgggaggaccggggtccttagatccatagcagaagttcttccatccatgaaaccttatcccccagaattacgcttcgacaggactatatacatagattgctcaaggtggaaaagcaaaagggtgatgcaaagaaaaatagcagaggagctaaaacttgacaatgagaccatggcatcgtttgataagcaggatgaggaggatgacttcagtggagtggacatttgctctagggatgccatactaaatgtttcagcagcgattagcaggatactgagccagagcagatttctgatggtttttcttaacgggagtgatgatgagatccccctaagcacatttggtattgcagactattttgactgcgtagtaatatggacttggagtagaatgttccttaccgtgatggatgtttcctatttacatagtatttacaggaaaataaaggaaggcagatacacagatcttttcatatatggctaccaggatgctgataaattctcaagttcagagttcggtgcactgtttcgtgaagaggctgctaccataggtcgctgcccatgtctgcagaacatcgacctggaaatagttgcagattgttgtctctatgggtttctcatgtattatcacaataaacaaaacaccaatgaatttgtttggccagctcatgcgtccaactattggacgtgcgatgggatcatccaaggggctagagcattggaggtcagtaatgcattgcatccagaagtaagtttcgagtgtcgttcttatgagttgaaaagggtggttgaaatgttgaagatggatccgaaggcccctttcctattactggaagacgacaataagtttgtctattcaaattcaaacaggccttaccgttgggtttttgccatctcaaatgataccatagaggaggctatgcaaactaaaatggcaagtgcatcatcaatcttcttagcaactcaaatgtacagtggtggcctccttggaataccagatggtttttttgaacagtgcagtagcctctgcgtgctggttctctcctgttgtgccttcaactttgtatcgcctcctttcctccattgccaaacgttaaaattcattggattagatcgctgtaagagcaacagtacagttgaacttcaaggaaagtgggcatgtctgcaaaacttgagggtgattgacctacgctacacggactgggttgagattttccacgaggaaaagatggagctcatgactaaccagctgatggaggtaaacatagagggagttaggtgctcgcagctaacaagtcagttaaagaaaagattaccatgccttgagaggctccggataatcaaccctcagaatgaggctgagacatcatcatcatcaactgacatcaacgacatattcgtagacaaaacggatctgcaattgcttgatttgtctggcaacaaagagatgaaaaatctgccaacaagcatatccaatgcaggccaacttaaggttcttattcttgacggttgtgacgcgctggaggatgttgttgtgcctaataggcttccatcatcgctaaggtcattcagctttgatggctatggatctgcagcgcccagtcgggcatcaactattgagctacctctacagagctgccgtcctgttcggcgtggtatgattcgtatgaaggatgtgaaaacatccgtgatatccctagaaggctgcacgcagctggacaatctgttcttgcgtggcctgcccaacttggtggagcgggacctttcaggctgtgcaatcaaggtgctcgactttggaactatggtgacggatgtcccatgtctcaagcggctatttctgctaggctgtgagcaccttcgtgcaataagatggggacggtcaaggttgctggagttgctctgtatagacacacgtcctgcccggaaggtacttggatgtgctcggccatcccttgccgtcgaccataaatacttccggttacaggtgcatgcttgtattgtggatgctaggctcgctcggtccttactggctacgatcaattactattattatttcaacatcagtatcacctcttcaatggcatccagtagcggagttgtgcaaccagaagaaacaagcaagaagatgactgaacccagtggtcagaaacactgcggtgtagcaggcatctatggtgatgtatttagcaaggtcggcgatgccgtaaccacaatggaggccttcccgcagcctccgacccaacagctggatcgccacatggagattggtgatggaagccacagcgtggagagtgaagtgaagcaagcctatgatgaaagcaacaagtggtgccgcgtggagaggtcctccaacctagacgtcgtctttcctcagggtgcagatgaggacggtcgcctggagatcatctgggcatcggacctcctcaaggcccactgcatatggagcagaggcatcaagtcctcagatggttacttgcaaagtctacagcacttgcacctgcgctcctgcccaagcctccggtttgcgcttccaatggcgctcccctccttccccagcttggaaaccctccacatcatccactgcggcgacctcaggcacatctttgtaccggacacggagttccagtcgacaagtatcgagttcccaaaactgaccaccatccacctacacgacttgccgtcactgcggcagatatgcgaggccgtcgagatggtggcgcccgcgctggagaccatcaggatcagaggatgctggagcctccgccgtctgccccgcagtcagggcaagcagaagccggccatcgaggtggagaaggatgtgtgggacgcgctggagtgggacggggtggacgccggccaccacccttccctctaccagccgccccagcattcgcgctactacaagaacaagcgcatgcccaggggcaccctcctcggtttgttctgcgagccaggatatggggcttcaggtgtgcccactccgttttccgtgtgtgctcggccgagtgatgagtgtgtgtggctttcgcttgagtacgaaactaagcaacttaaaaagatattccaagtcacacttgttctagctaagagtttatcgtctccccaggcagttccacccgaagggaacactattgctcatcttgaaatattgctcatcttgaaaataatggagcaaaaacccatatatgttgtttttgacggaaagcttcctggagtgtacatatcttttgaagagatagtagcccaaaaaatagatgcaaaattaatgggtggattgtcatggaaaaaatatatagattttgatgaagctttaactcaggccagaaaaatattaggaataaactactacttggaaccagcagcaaaagaatatatacaaaaatgcaaaaaagccaaaaataagaaagctccagagaacccatattgttcaaatattaagaatgaaggatcatcccaaaaacctacgtataaggaatgcttgactaagggagtagatcctttggatggcgaatatatcgattggaaaataattgaaaaatttgaagaagcatccccccaaattaaaaaagaattgaaagaagaaatacttaatgaattaaaaaaagaaatgaatgataaatttgaagaaatgaaaaaagcatatgatgaaaaatttgaagtctccttttctgatgtagatactatggatttaggtggtcatgggcagcctgaccaa

SEQ ID NO: 31148 - DNA, 246 bp, Oryza sativa
  Clone ID: PAT_MRT4530_35482C.1
atggatccgctggccgccgatgccgtcgcacctccagatccgacgcgggccacctctgtcccgccaccgcacgccacctcccgctgccaaggggcgcggactgcctccgtcccgttgccgcacgccgccgcacttcgcctaccaccgccgagtggcgcggaccacctccgtcccgccgccgcatgccgcctccgctgctgggaccccgtgaactccggtggtggtggaacctccctggcttcttag

SEQ ID NO: 31149 - DNA, 1542 bp, Oryza sativa
  Clone ID: PAT_MRT4530_35483C.1
atgaggaaaggcaatgcaagattcccaaagtcatcgtcatggccgaggacgaaaacggtggtgaagaaatggctcaacctgaagaatgaggagtttcattcagactgcatcaacgagagctttgcgcaagggaggcaagagaggaggaagagctgctcggacaaagatggcagccttctgacgggaagagatttgtcaggtggttggctggtggagagctctgaaaatctgagacctcctgcccggatgttcgtggggacgtggaacgtgggaggaagagcaccggatcaagggctggacatctcaagctggctcctggaccagcaacctgcatcctcccctgctcacatctatgttcttgggttccaggaaatagtgccgttgaatgcgggaaatgtccttggggctgaggataaggggcccacatacaagtggctcgatctcattcgccgagctctaaacccttcctcctctgaaagaagccatagttttcctagcaattacccatatgccactgaagcaagtcctgagcgacccaaaaacgatagggtcagcttctcggacttgctagcgatggaggacagactcagcatggtatcagagctagacgacgacagcgagccgtcgacctcgaacccagaatcgagcagcgaggaggaaacgacggatgtcgcgacgcgatacctgaggtcggcggggcaagggtaccggctagctgccagcaagcagatggtggggatcttcctctgcgtgtgggtcctggctgacctgatgccatgtatcacaagtctcagggtgtcttgtgttggcaggggcatcatgggttacatgggtaataaggggtcgatatcgataagcctgacggtgcaagggagcacgacgatgtgcttcgtgtgcacgcacctggcgtccggcgagaaggacggcgacgaggtgcgtaggaacagcgacgtcgtcgagatcctcaagaggacgcgcttcacgcggcggcgccggctgtccgcgccggcggcggcggtgccgtcgccggagaccatcttggagcatgacaagatcatatggctcggtgatctgaattaccggctgacgggcagcggcagcggcgacacgcaggagctgctcgacaagaacgactggcaagcattgctgcagaaggatcagttgcgagtggagcagagagccgggcgggtgttcgggggatgggaggaagggcagataagcttcccgccgacgtacaaatacctcgccgactccgacacctacgccgccgccgccgccttcacctcctccgccagcaagaagcgcaccccggcatggtgtgaccgcatcctgtggcgcggttcggggatggagcaggtgcggtacgcgcgcggggagtcgcggttctccgaccaccgccccgtcaactccctcttctccgtgcagctcgccgccggcggtaacaacgccaagtccgaccacctccacctcctgctcctccgcccacgggccgccggacctgaagcagcagctggcatcggcctccgctcatccagattctga

SEQ ID NO: 31150 - DNA, 710 bp, Oryza sativa
  unsure (1)..(710): unsure at all n locations
  Clone ID: PAT_MRT4530_35484C.1
ccggccggggactcttcccctctgcatctattgttgacgtgacgatttacgacttgatcacgattaaatcctttcttctacgggcctcttttatttctacgagaatagaagtctaacaacagttttccggccattttcaaagatcgactttccgtgcgcgcgacagcactcgaaatcgaaaacacccccacctcttcttcttgacccccgaccgaatacctcactcagttaagcactcgacaataccgccaatatgtcgttaacaaactgccgtttttacgaggagaagtatccggagattgacagcttcgtcatggtcaatgtcaagcagatcgccgagatgggtgcctatgttaagcttctagagtacgatgacatcgacggcatgattctgctttctgagctctcccgaagacgtattcgatctatccagaagctcatccgagttggtcgcaacgaggttgtcgtggtgctccgtgtggacaaagagaagggttacatcgatctttccaagcgacgagtctctcccgaggatatcgtcaagtgtgaggagcgatacaacaagagcaagatggtccactcagtcatgatccatcttgcncaggccaccgagatccccctcgagaccctataccaggncattgcttggnccctgaaacaganattcggncatgctctcgatgctttcaagctctccatcaccaaccctg

SEQ ID NO: 31151 - DNA, 161 bp, Oryza sativa
  Clone ID: PAT_MRT4530_35485C.1
tggcgttcgaccatggctacggcggcggtgctcgaatcccacgacgccctcgacaaccggatgcatctgggggccttcgacgagtccacggcgtcgaagccaaggcggtggcggcacaacaaggcggcgtctccgtccctcaaggtggcggcagtgagctc

SEQ ID NO: 31152 - DNA, 344 bp, Oryza sativa
  Clone ID: PAT_MRT4530_35486C.1
gcttaagggaaaaacttgcggccgctacactaaggccgaatccttactacttaagacccaaattcctggagctcgaaggcgccattatagacctgatagtggatgtgcactgatgcagattcagcagtacatgatcatcagactagggagccgtgccgatgatacatctgcatgctgccagcgtacaccagagttggccacatcagagccttaccgatgcctcgaaagccatcatagaagacataagcctgtggggcgcctaaaacagcgaccggagctgacatcgatcagcgctgaggctgacaagctgactggccaaccgggaaaacgggaaacccatccga

SEQ ID NO: 31153 - DNA, 291 bp, Oryza sativa
  Clone ID: PAT_MRT4530_35487C.1
atgcagaggaagccagagcagttgcgtcgagacgctcccaaaaaaccttatcgcctgcctacccgtgcaggcactgaagcggacgggttccggaggctctactcgtcccgtacacctatgcgcacagaggcgcgctcgcacagggcagcgtcggtcgcggcggagatggcgaggacggcgaccggcggagtggagcggggcggcggcggcggtggacgacgagcacgcggccggcagagcggcagcgtcggccgagcggactggcggcggcggcgagcgagcgcgcggtag

SEQ ID NO: 31154 - DNA, 834 bp, Oryza sativa
  Clone ID: PAT_MRT4530_35488C.1
atgtcgctcgccgcgccaccgccgccgccgtccctcgacaccacggtggagcccccgctcgctgagatggagctcgtctgcctcgtcgacagcggcgaggccggcgaggtgtggctggtgcgtcaccgtggcacgcggcgggagtacgcgctcaaggtgctctacgagcgctgggccgccgccgccggcggcgacgccgacgacgacgaccactcgtccctggtgcggtgccacggcgccacgcgccggaacggcggcggcggcgaggagcaccggatcgtcctgctcgagcacatgcgcggcgggtctctctccggccgccgcgtcgcggacgagcgcgccctcgccggcgtcgcgcgccaggcgctctccgggatcgcgcacctccaccgccgcggcgtcgtccacggggacatcaggccgtccaacctgttcgtcgactcgtcggggcgcgtcaagatcgccgggttcggcgccgaccgcgccatcgaccggacggccaacggcgggccctgcagggcgtcgctcagccccgccgcgtacatgagccccgaccacgcctgcggcggcggcggcggctacgccggcgacatatggagcttcggcctcaccatcctcgagctctacacgggcagcttccccttggtcgagcaggggcaatcgatcccgctgacgtgttactccgacggaccaccggaggcgccggccaccgcctcgccggagttccgaagcttcgtcgggtgttgcctgcagatgaatccggcgaagcggccgtccgccgtgcagctcatggatcacccgttcgtcacgtcctccgtattttctcaagaataa

SEQ ID NO: 31155 - DNA, 244 bp, Oryza sativa
  unsure (1)..(244): unsure at all n locations
  Clone ID: PAT_MRT4530_35489C.1
ccacgnntccggntcccccgcgggccgccgccgccgcccgcccgcnggtcgatacccctccgnggaannatggctgannagactagaaggcattcctgaagcagccaaaggttttcctcagctcaaagaagtctggcaagggtaaaagccaggtaagggtggaaccgttttgaagacattggcttggttaagctccagggaggaattaagggcatcattgtagaagtccatcactggactgttn

SEQ ID NO: 31156 - DNA, 628 bp, Oryza sativa
  Clone ID: PAT_MRT4530_3548C.1
cagttattccgttcaaccgccagtttggtccgaatttcttactatatatgcttataacacaaggagagttagattatttcactcttgtgcttggttaattaattcattcacggattaaggtggccaaaatgcctaacctgagttttggatattcacatgcatgaaaaatgatcacaattgatgtgtgcattagcacatattattggaactagtctatataaaatcactacaaatttatatcttactaacgtatactgcttaatttggattgcagggattgttgcaatcggttgtgactatgcatttgctagagactttgccgcccctgtgcatgctggtcttggtcctaaaacaagccccaaggacgcaccattacctcacttgtcgatatacataaagaacatctataaaggaatgcacgggagtgacacaggtgcactagatgctaaaggaagggaacaccaaccacatgcctatatatacatatcttacataagtgttagaagatatcacatgatatcatataatgaatggtcaagcatattaacagtaatatgtgatgcatatgcatctaaatagcaggatagttacatattattagtttaaatgctttaggagtacatacaaa

SEQ ID NO: 31157 - DNA, 1572 bp, Oryza sativa
  Clone ID: PAT_MRT4530_35490C.1
atgcacccgatcaaactctgtgcccgctcgccccggccgtcgtccaagaagcggaagcgccccgccgccgccgccgctactccgccggaatctgaaccggagccggtacacaacaccgccgcctgcaattcggagggagagaacaacgcgacggggaagaggagggagcacaacaacaagaagatgaaggaggagaagagcaagaggaagaagaagcagggggaggggaagaagggatcagggattctgacggacaagctcttctcggatctccccatctccgacctcaccgccaatgccatcagagacatgaactacacccacctcaccgagattcaggctagatcgataccgcctctgatgttgggaagcgatgtgatggcgtcagccaagaccggctcagggaagacgcttgcgttcctcatcccggcgatcgagctgctctgcaggctgcgcttctcgccgaggaacgggaccggagttatcgtgctttgcccaacaagggagctcgctatccagacacacaatgttgccaaggaattaatgaggtatcattcacaaactcttggatatgtaattggtggtattgacttgaggggcgaggctgagcagctcgcgaaagggatcaatgtattagttgcaacgccaggaaggcttctggaccatatgcaaaaaaccaaaagtttcaaatatgaatgcctaaagtgccttataattgatgaagctgatcgtatacttgagcaaaattttgaggaacaaatgaaacaaatatttaaactccttcctcggcagggtaggcagactgttcttttttctgctacacagactgaaaaggttgaagattttgcgaagttaacatttgggagcaaagaagaaaggcagcgaacacttgtttatgttggagttgatgatcatgaatcaaaggctactgttgaaggattgaagcagggctattgtgtcattcctagtgagagaaggtttctggttctgtatgctttcctaaaaaaggcactttctgagaagacgaaggactatattgtgcaatatgatcctccagatgaaacaaaggattacattcacagagttggtcgtactgcccgtggcgataatggcaaaggaagtgcaatactgttcttactaccgaaagaattacagttgctcattcacctgaaagcagctaatatttctgtatctgaatatgtgttcagacaagagcttgtgccaaaattgcaaccttaccttcattatgactcaagttttgagcaggagaaaattgttggtgggaattacatcctaaacagatcggcgaaagaagcctacaaatcctatcttttggcatacaaatcacactctatgaaagacatttttgctatccatcaacttgatttgacgagcgtagcggcttcgttctgttttagtgagcctccaaaggtgaatctggacctggagagcagtgcgtcaaaacatcgaaagaagaggaatgtaaacactggcaggaggcatggtatcggcccttcaaacccatacggaaggaaaggcagtgatgatcgtaggcagtttgcaagattctag

SEQ ID NO: 31158 - DNA, 396 bp, Oryza sativa
  Clone ID: PAT_MRT4530_35491C.1
atggagaggttggccatgaagcaacacaagatgaacaactacgtcaatgtatggaaacctgctatgcttgtagaaaacgagttgcaggaacatcaacgaaagaaccagagaaattttggcacatcctgcatgccaagaaagattaacattactggactagctaagccttcattttcatactacaccaccgccaaaagtttaattgagcaagcgccaacaatttctgaagatgagaacaatggtgatgataatggtgcgacatttactcaagcaacaatggagaggacaaggagacacttggagaaggacttagagccatggagaatcatcaaggacatgcaagtcaaggtggaggcccaaaccaagccgacttcgagtgcaattcagagtccatga

SEQ ID NO: 31159 - DNA, 426 bp, Oryza sativa
  Clone ID: PAT_MRT4530_35492C.1
ggggagagtattttcactggattgacccgaaaatgatttagcaaaatttactggtttacagttacccacatactagtacgaggcctaactacagattccattattatggggaaatctcacttgggcacccatgctagtatgctactggatcattgacccggaatatgattcatgattgattggcccatctacaaaaatttttgggtaatttcaactcatctgaagctgattttctaatggaaaaaccacaagctttggaaaccaccgatcgatgaaatacggttgagatcgagccacgacgatgaattattcgggtttgaacacccttgatctgagccgttgattctttgatcggatgaccaacaagggcccacgttgttcactcccccttatgggccaaatgcctcctagtcctaggggaacacc

SEQ ID NO: 31160 - DNA, 2031 bp, Oryza sativa
  Clone ID: PAT_MRT4530_35493C.1
atggaggccagcaagaaaggtttgggcaatataacagctcgatcaccggctgattgtttcggcgaagaaggtaacgtatggctagatttctcagatctccacgccatatatcgtcgggataagatggacgtcaactacgtcggtgtttggtgcatgactaacgcggagaatgcggacggccgccccgcctgcgaagatcggcgatctttacagtcgttggcttacaggcggacggccgccccgcctgtgaagacccttttcggccgcttcgtctccgctgacgatcttctgccatctccgaccggcttctgcagggcagctctgctcaccagcaatgttctgccgccgtgcaacatctgcttctgctctctccatcagcaagccggagtcgacgatgagatcgacgacaactcggcgtcaacggaggcgaagagttcaacgtccacggcgaagctgcgatccgtcgcgacagcccatcggcaagccggaggcgacggcgccatctccatccgcacgaagaaagcgaatcccctccaaccgaagatcagggcagcctgcctacccaacgaatgccaggagttgcctgtggactggccgatagtaggattgctccctaccctcgtcgccaacctgcaccgcttgcacgactacctcaccgacgtcctcgccgcctccggccatagcttcacggcgcacggcccggcggcgaccaacatgcggctgttcgtcacatgtgagcctgacaatgtccggcacatcttcaccaccaaccatgataactaccccaagggccagcacttcgccgagatcttcgacatcctggccggcatccccttcaccatggacggcgagctctgccgccggcagcgtgccaagacccatagcatcctcagcgacccgaggatggttgcctcgatgcaatcgagctgcgtcgacaaggttcgtgatggtctcatcccgtttttgacatccgtggcgagcacccagactccgatcgagttgcaggatctggccacgaggctcatgttcgacgtgacggccatgccggtgttcggcgtggatcctggctgcctgtccccggacatgccgtcgaagcatgtctcggctgcgatggacacgatcatggaggtggcactgttccggcacaccgtgccgccgttctgctggaaggcgatgagacggctcaagattggacccgagaggaagctcgccgcggcgcacgcggcgctgcacgtcttcgtctccgagatggtggagaaggcgaggacgaagcaagaggaggcagcgcccacctccatgtccatggacgttatctcctcctacatcaacgacccggactacaacgacctcctgcattcgaaactcatctcctacatggtcgccgggcgtgacacggtgggcaccaccttgccgtggttcttctacaacctcgccatgaacccgcgcgtcgtgtccggcatccgcgacgaactggcacccattgcaacaagcacctgcaatggcgatggcgcgccggttatgttctcgccggacgacacgaaacccctcgtctacctgcaggccgcgctgttcgagacgctcaggctgtacccgccgggggcgatcgagcggaagacggtggccgccgacgacgtgatgccgagcgggcacgagatgaagaccatcgcggccgcggtggtgtggaacttcgacgtggaggtggtggacgggcagaccgtggagccgaagctgtcgtgccttctgcagatgaagaatggggtcatggttaagatgaagaccatcgcggccgcggtggtgtggaacttcgacgtggaggtggtggacgggcagaccgtggagccgaagctgtcgtgccttctgcagatgaagaatggggtcatggttaagcgccatcccccgttcaatgagaagctcaccgaacttgtccaccgtctcttctcgatagcctcgccatcccggcatcgcctccacctgcgtgagcgcgccgctacatgctccaatagtcaatactcaagctccgacttgttgtag

SEQ ID NO: 31161 - DNA, 434 bp, Oryza sativa
  Clone ID: PAT_MRT4530_35494C.1
cagttagatttcttattacatttactatatataatatatacttccttttatcgttgtagaatggagattcaaagggcccgacggcagggggttttcgatactggattcatcgaccctcggaaagtaaacgtcgcaatactcgaccagtatccgcaagctacagaggaaaatctcgtccatctcctgaaggcgcagcattacaagacattcatactattgtcgtacaacacagtgttagtttttactgtcttcctataccaaatttcattcccgtacgaacatgctaagtgtttcatatgtaatgcatccgacgcacaatgcagattccactgggtccttttactcttcgacttggaggcctccaccgtcaacgtatatgactcaatggataaaaaagagtctacgtttgacaaggctttcgaacttatagacag

SEQ ID NO: 31162 - DNA, 1693 bp, Oryza sativa
  Clone ID: PAT_MRT4530_35495C.1
agcatacacacatataccataatggcactgtcactgacgccctccctgcaagatctcgtatcatcactgatgatactccttgttctcttgtacatatcgtactggagatcaaagtatcagtccttgttcccagtggactggccgatagtaggattgctccctaccctcgtcgccaacctgcaccgcttgcatgacaaaatcaccgaatacctcgccgcctccggccatagcttcacggggaacggcccggcggcgagcaacatgcgactgttcgtcacatgtgaccctgacaatgtccggcacatcttcaccaccaaccatgacaactaccccaagggccacgagttcgccgagatcttcgacatcatggccggcgccttcttcaccatggacggcgatctctaccgccggcagcgtgccaagacccatagcatcctcagcgacccgaggatggttgcctcgatggcgtcgagctgtgtcgacaaggttcgggatggtctcctcccgttattgacatccatggcgagcacccggacaccgttcgagttgcaggatctggccacgaggctcatgttcgacgtgacggccatgacggtgttcggcgtggaccctggccgcctgtccccggacatgccgtcgatgcatgtctcggctgcgatggacacgatcatggaggtggggctgttccggcacaccgtgccgccgtcctgctggaaggcgatgagacggctcaagattggacccgagaggaagctcgccgcggcgcacgcggcgctgcacgtcttcgtctccgagatgatggagaaggcgaggaagcaagaggcagcgccatcctccatgtccatggacgttctctcctcctacatcaacgacccggactacgtcggcctcctgcactccatcctcatcacctacatggtcgccgggcgcgacacggtgggcaccaccttgccgtggttcttctataacctcgccatgaacccgcgcgtcgtgtccggcatccgcgaagaactggcacacaatattgcaacaagcacctgcaatggcgatggcgtgccggtgatgttctcaccggaggacacgaaatccctcgtctacctgcacgccgcgctgttcgagacgctcaggctgtacccgccggggtggatcgagcggaagacggtggtcgccgacgacgtgatgccgagcgggcacgaggtacgtgccggcgacgccgtgctcatctcgatctactccatgggcaggatggagagcctgtggggggaggactgccgggtgtaccggccggagaggtggctgtacgactcccgcggcggccggaaaatgcgacacgtgccgtcgcacaagttcctgtcgttcaactccgggccgaggatgtgccccggcaagaacatcgccgtgatgcagatgaagatcatcgccgccgccgtggtgtggaacttcgacttggaggtggtggaagggcaggccgtggtgccgaagctgtcgtgccttctgcagatgaagaacggggtcatggtgaaggtgaagaagcgtgctgtgtaaccgagttattactacgttctcaggaaggcatgcgtgcgagtgcgacaggctcagtgtcttttatcatccgacagtatatatatgtatgcaaagatttcctacttgaataaaggatgtgttcaaatatatattaaaaaaaaaaaaaaaa

SEQ ID NO: 31163 - DNA, 288 bp, Oryza sativa
  Clone ID: PAT_MRT4530_35496C.1
aattattccaaattaaccagcggaaaggacggtggataatttgccactgatgaccccctatccgaatgctctcaggcgcaaaaattgtcacccggaagaggtccacgcaccctaagccagacaaacaagaggaaaacacgcgttctttcccatttacccctggaaacacacgtagagcccaccattgcagcaaaatccacgctgaattataccacaaagaaaattttcaacccaggaacgcactctccagcgcagaaagatttgcaaacactgcaaggccagaaggag

SEQ ID NO: 31164 - DNA, 891 bp, Oryza sativa
  Clone ID: PAT_MRT4530_35497C.1
cgccaccgtatcgcgtttccgcccccgacgcacaggccaaaaccaaccagtccaccacacgcaccaccgcaccgcgcgtcgcgcgagaccaaaaaaaggaaaaaaaaaccccaccaccacgccatccacgccgccaccatcaccacggctactactagcaattagcaaagcaccgtgcgcggccgcggcgtccactcctccatctggctagacacaccgtgtctccggccggctgcctccctggatctggtcgtggggagggagctaagctggtggtgattttggtcttggaggtgtggcgatgctgcagctgctgatggcgctggccttctcggcggcgccgctgacgctgtacctgccgccggtgcggagcctcagcctcttcgtcgaggcgatcgaggccgtcttccgcgactgcgcgccgtactcccagggcgccatcttccgcttccgcctcggcctctcccgcatcctctccggcctcgcccgcgccctccgctagacgcccggcccggtgacacctctcttcttcctattgatcggatacatgtatgtcggctacaatcgcccgcggcccgcacgtcatcagcttgtgcgattgtgaatctctcttgcatcttgttttctcctcaatttgcccccttcacttgtagtttttgcctagtttcttttccctttttttttgggttggggattggatgtagcatgtagagaagggaataatcaagcttagtaatctgttcagaggggatcgagattttgtgagaaaattagcgtgtttgtgtgcgtgtatggggatgtgctgtgtataattgggaaagtttgcgttcttgatcagaagctgtagttgagaactgaaatgaatagaagcatttgactctttggtctgat

SEQ ID NO: 31165 - DNA, 234 bp, Oryza sativa
  Clone ID: PAT_MRT4530_35498C.1
atggcggttgaaggggagtgctgcctccaccatcaatccctactcgagaagagctcaaccacacggcgaaaggggagggcggcatcgagagctctagttccagtggtgctggtctttgggatctctgaatctgctggtggctacagcggtgatctcggcggctcccgaaagggcgtcttccacccatttggcgacaccgccatcgacgacgtcgactttttcatcgaccaagac

SEQ ID NO: 31166 - DNA, 627 bp, Oryza sativa
  Clone ID: PAT_MRT4530_35499C.1
atgactcaaaatacaggaagaggaaaacttaggattgaaatgtcacgacatgaaaaatcctccaagcaatcaaactacaggaatcattcaaacacaagtgtttggatatatcgaacggatttaccgtcctgccccccacgccacccctcgccaccaggggcacaaccgtcattccgcggccaccagggggtgttaacagtgaaatttggtaatcggcaaagacgtcatcggcttagaatcattatcggctgcagcatctcggaatcagccgatgggagttatcaagtcgccaatagtcggattcctgctatattcgcctgcttcttgattgccaataagggtttcatcggggtttcagccgatttcatgacatcggacctccagccgatgtgtgctttaaccttcggatcgatgcttatttatcatatcattgctagccgattggtttatactggattatattattattttattgcatcatcatcagccgattgcctttatatcattatctacattggacatatagccgattgcttaaaccctatcgctatcggctggtatcggcatcggctattattggctaccggctggaactactccatcggcttgtcagccgatcggctgttt

SEQ ID NO: 31167 - DNA, 1402 bp, Oryza sativa
  Clone ID: PAT_MRT4530_3549C.1
ttttttttttttttttttttttccagcgaaattaagctcaagaagggaagtcatggtacaatctgaacttgtgatatttgtgaagcaaacgaaagctgcaaattaagaagaaacttttgtttttttggtttcgttttcatcttgagtagctgccttcctcctgctcgccgaagcagtacatgtcctgcagcgacgtcgacccgtcggagcgcggcgcgctgtagcagccggagctctgcgtcgaggtcatcgtcgactcgtgctcaatctgtttgcgtatgttctataggatctcagggcatcggctcatgttcggtccggtcatcttggtggtagctacgaactgcagagccagctcgtacgttttctcgacggccaggttgatcgcatcagttgcttctagatttggatccagcgtttgtattgcatttccctcaacaaatttttccattgcccattttgcagtaacacgctcgacgatagctctccttggttctatcgggcgcctccctgttatcaactccaccagaagaactccaaaggagtagacatcactcttctcattgagctggtatgttctgagatattcaggatcaagatagcctgctgttccttttacttgggttgagacatggctagcatcagttggagctagtttggcaaatccaaagtcagcaacctttgccctacagttgtttgtgagaagaatgtttgacgatttgatgtccctgtggatgactgggtgatctgagtaggtgtgaagatatgtaacagcgtgagccacatcgattgaaatatccaatcttagagaaaattcaagaatttttccattgacacaatcaaggtgttcacgaagatttccattgggaacatactcaacaatgattaactgctcaccaccaaactccaggtacccatgaaaccttaccaaattaaggtgctcgatacattgcaacgtctcaatctcgttccggaactcacgacccatatgcttgtcgtacacattcttcttggcccgtttgacggcgataagagtgccgtcattaagctgacctttgtatactgtcccggaaccgccctgcccaatcttcaggtttggcgagaaatttttggttgctttctggatctgtggtaaggagaactgtgtgcttccaggccacgcctgctgctgctccccacggacctctcggagttgtacgactccgtgctgatgctggcggagagggttcccagccgtcagcccgggtcgctccgccgccagcgtcggcgccacctgcgccaccgccacctcctctgctcccaatcatctctgtccctctccggatcagaagccctcggaggaagggaagaaggaaagagaagggcacgttgatggtttggaaagcctgcagcccggggatcc

SEQ ID NO: 31168 - DNA, 2283 bp, Oryza sativa
  Clone ID: PAT_MRT4530_354C.1
atgtcatcctccgccaatccatccgccgcgccatcggccgaatacgcagagcatctgtccaatctggttgcgattccaagtatgtcgcatgagaaccactatgttcttggcccagttgataatcccgatcctaccgaattcattatcagtgaaacaaatagggttcctttcagattagccaacccagatctaggtcattggaagaacaccttcaaatcttggccatctcttgagaaaacctcacccgagaagagctggattacatggaccaaaagcatagggggttggtctggctatgtagcagcatatatgggtaaagggcctgtcactcctcgagagcatgtagcctttcttctgatgtggctggagaaatttctcttctgtggatcaagttgcggccctacaaccaactggcagtttgtagccgaagccctagaaacaaaaaagcaatttcccttaggcaagatcctcctcggctacttgtatcaaacactgaacaacgcgtcagccaagattgctgtcagctcaattgtcagtgcaggcgggccatggtggttgttgcaaacttggctaaatctagtagtcatgaaagctgtcaatcggccatccgtgacggaagctgaatttccaagattagagccgattacagatgatgatggagaagagcgcacccaccgcaggtgtatgtcctatggggaatatgcatccacaccagccgatgcaggagcaaagttatcggctgagctgctcaaggactggttctgcagcttttatgaaggcttccagaaagatgcccatgtttggttcttctatgaagattcatcacttctggaaaatccatcggacttcagatttgaagacattaaccatgaaagataccaaaagtccagggaagttttctcaactgcaatcagcccatgcatcttacccgtcggcatccaccaagggagaaacatccaagtctcctatgaattctaccacccaatgagtttagctagacaacttggaatgggccaactcccaatcggcttattctttgccaacaagatccagtgccgaggagaaatctcatcaactctgatgatggagcggctactcaacatcccaagacctcccttgggcagtattgagaacatagagctggcaaggttcaggagcaagaactttgacagatggtgggcttctatgtacatgacagatctgttccccgatgttatacctcagacaacagaatcttcccctccacatcaaagcaatagtggcagagatatcaaatatgccccaggcttaattccaaatggaggtggaccatctcctcctgtcatcggctataatgccctcaagacttcaactcttcttcaaaggctcattagagaaccagccgatgctggcaagaaaagaaaaccagatcgtcggctgtggaaacatcagctccggctcccaagaagaaaaccaaatcaaagaaaaccaagccaattgcagaagaagaaaactgctgtgaagaagaaatcggcagcaccaactctcaaaccggccccaccacctcctcctcctccttcacctcctatgcaactagaatcaagcaaccgtaccccatcggctgcagacagtcacaatgtcgaagaggaagaacaaccagctgctcctactattccagtcttcgccgatctgttttccttcgacatcaaggattgtctcgatgaaacagaggaagacaccactagtaaagccatagctcctctgtccgatgatgtgaagagaacgcttaaggatatctctcatcggctagaagcatcactagacaacttggtgaccaactgtggctcgatccgagcaaggttcacagatatccaagctctactcccagatgaactagccgatgcccttactccagccgtctaccttgagcaacaccaattcaagctggagaaggccaggcagagattacttgtgcatgaagagaagtccaagcttgatcagctgtctgagggcccgatcaagtccaatatcgatcggcttgaagctcgtaagattgatctcatggcacaccttcaagaatgcaacgtcgagctggatatggagcacaagaagctagccgatctcccgcaagctgtcgaagaacagaaggcaaggctgaaatcggctattaagaatgtcgctgatatgaccaagtccttgaaagtcatccctggaaccgatgctcaagatgcccaagccatagaagaagtagaacaaattaggcagagagctatatcggctattcagcgatatttgtctcagtga

SEQ ID NO: 31169 - DNA, 424 bp, Oryza sativa
  Clone ID: PAT_MRT4530_35500C.1
ttgttgacggtcattagcgatcactttcgaccgttaatattacgaaaatagggggaactagttatgcttgcaatacatatatatgttagaataatatattccactagtattaggttcactaaccttttgcagagaataaacataaaagtggagcagaatcgacatcaactcagacgataaatcaatcggacgatgtcgaaaatcatacttatgcatgaatgggccaagaactcagaattgacacgatgaattgggccaaaattcacaagtctgcataaaggagcaacagaggaggccacctgtcgagtttgggccaggtgggcccagcccatggttcagccaaaacccgccgaacttcccgtggcgcctatgaatgcagtgtttggatggacggctgggactgttccccaatgacggttggagg

SEQ ID NO: 31170 - DNA, 447 bp, Oryza sativa
  Clone ID: PAT_MRT4530_35501C.1
atggcgaacggcatcggcgctacccaatcccctaaggccgttagcaacctcgcccccgaccgctcccctgacctggacattgagttgcagggctacgaagggaatcaagtcccaaccagatctgggccaaggcaagggacagcgcaggcagtcaggggcatagagcggcgctcgggcacggctaggctgcgggcaaggggcgcgcgcgtggcgtcccccagggcggctgctcggtccagggacggcggtggtgcaagaaagggttgcgcccggcggcgacgggccctagggcggttgctgctcgtcatttgggcggcgactgctcgatccagggatgacgatggtgcgggcaaggggtgcgagaggcggctgagagtggatatggctcaacgcgataatcatgttgatacacgaagagtattacatataggcgccaaccttccatag

SEQ ID NO: 31171 - DNA, 456 bp, Oryza sativa
  unsure (1)..(456): unsure at all n locations
  Clone ID: PAT_MRT4530_35502C.1
ctctttttttagtccggaaccctagatcgagatttagggcgacgttgggggcgagcttggtgcggcggtggggttggtcgaggcggccgagggctcgtccgggtgcgcgttggtggtgaggaggtgcacaagctggcggtgaggaggtgcagggatggcgagctcaaggagtgactgttcatcgggggcgttcctgacttttggctggctttcccgntccatatcgggtaggtccaatggactatcaaccaccggtgttctgcccccgcaaggcgaaagcggcgaggtggatttcgtggagcgtcgatgaccctggtcgcaggtatttcaagtgttgggacgcccgggtaagcatttgagttgtgttgattttgaatttgtggttcgatttttgttggatttggctggcttagttctaggggttactgatgcaagctgcgggaagtggactttttt

SEQ ID NO: 31172 - DNA, 371 bp, Oryza sativa
  Clone ID: PAT_MRT4530_35503C.1
gcagcaaaagaaattcctcatctttgtttctttctcttctcaaaaacgaattccttgtgtacatctaacaaaagaataaaatgaaaatacgaacaaatctgacaaattgtacaatctgaatcatctacaacaactgaagaaccaaaaaaaaaaaaaatcaactaatctgaattctccctagcagcaaagaatcactgtccttccctcacaaaatttctggaccagctgttattactctaaacctgttcatcatcagctaaactaaactactaaaaaaaattaaccaaaaaatttcgtttcagtgtcactgcaatctgctcctcttgaagtccggcagcgtgagcgccaccaccggcgggccggaagcccac

SEQ ID NO: 31173 - DNA, 639 bp, Oryza sativa
  Clone ID: PAT_MRT4530_35504C.1
atggtcaacgggcgacagcgcgcacgacgcaatgcggagaggggcggtgggcagcgccggtggccagcggcgcgcgggagcgggccggccgtcgcgcgcacggcggcgcgcgggacgggcggtgggcagcggcgcacgcgggcaggccggccgtcgacgcacccggcggcgcgcggggaggttgagaggatgggggaggggggagcggaggtggatggggaaggggaggaaatggaggtggaaagggaggtcgaggggagcgagctccgcacacggcggcggccatggcggaggcagagccgatggaggaagcggccaagtcctgacggcagcgatgagcaccctagccaggcgccggtgccggctcatcgcagaggacactgtggctcaggccggtcgacggcggtggcggaccaacgaacgccagcgagggagagccggttgacggcgtggtccaggagaacgcgacgacaggagaaggaggaggtcggggctggaggccccaaggtcgaccgcggtcgcggcgaagatggccgatgcacagggggcggagcagattccgtcgacgatgacctagcaagcaaggtgctgttgctgctgcttgacagcgacaaaaccaaggagatcgatctctcctga

SEQ ID NO: 31174 - DNA, 156 bp, Oryza sativa
  unsure (1)..(156): unsure at all n locations
  Clone ID: PAT_MRT4530_35505C.1
agcatacacatnttcacatacagtaaaacacatcaaaattcaaccatgcgagcacaactnaaaatagcagtacatccatcatactacaggagagcacatcaagattcattacagtacaatgtattcattacgaccaagagcatgacanaacagcgg

SEQ ID NO: 31175 - DNA, 813 bp, Oryza sativa
  Clone ID: PAT_MRT4530_35506C.1
atgggcggcagcggtttgtcaggcgtggccgcacgggcggtcggcacgcgagggcaacggtgggcggcagcgcgtcgtcaggcgtggccgtgcgggcgatcagcgcgcacggcggcacgcgagggcgggcggtgggccgagaagatcgatcccgatcccctccagcggccccatctttttcgttcttggtcatcaggagagatcgatctccttggttttgtcgctgtcaagcagcagcaacagcaccttgcttgctaggtcatcgtcgacggaatctgctccgccccctgtgcatcggccatcttcgccgcgaccgcggtcgaccttggggcctccagccccgacctcctccttctcctgtcgtcgcgttctcctggaccacgccgtcaaccggctctccctcgctggcgttcgttggtccgccaccgccgtcgaccggcctgagccacagtgtcctctgcgatgagccggcaccggcgcctggctagggtgctcatcgctgccgtcaggacttggccgcttcctccatcggctctgcctcctggattttcaaccagagccgcccgccgcgctcgcgtcgtgtacctagtcgcgctcgctgtctggagcccattgccgcgcatgccttgcccaccgcccgtcccgcgcgccgccgtgcgcgcgacggccggcccgctcccgcgcgccgctggccaccggcgctgcccaccgcccctctccgcattgcgtcgtgcgcgctgtcgcccgttgaccatgtatgaacagacgaagagaggaagaggggggtatgacacgtgggtcccaccatttttt

SEQ ID NO: 31176 - DNA, 257 bp, Oryza sativa
  Clone ID: PAT_MRT4530_35507C.1
cttcaatctgttggagatcatgatcaaaataatagagcactacatagtttttgctggatcagatctcttgcaaagccatgccacaagtttagaaagcatcgttgatactattgtgggcaatgctgatgataagggccttctcacaacacttcctatcattgatcttcttgttctgatgtttcctcaggaagttccacctctgatatcaagtgctcttcagaaacttgttttcatatcattgagtggtggtgatgagc

SEQ ID NO: 31177 - DNA, 383 bp, Oryza sativa
  unsure (1)..(383): unsure at all n locations
  Clone ID: PAT_MRT4530_35508C.1
gggaangaacggaactatcaatcaaagaagctacaggctcagtgatgaaagatcaaggaaacctcacatctttatgctctaataaaaatccgttcaggagcgttgctccactctacaacgggcaaataaccaactcccttgcgcaaacctgtacatcaggattaaccggatcaaagaaaaacctcaaaccggtggatgaaagcacgagaaatggctaattacatccagtgaggcacctcacaggctaatgcgaccacggactcaacaggtaccgctcgacactgcaacttgagttcatgcagaaatatgtggaaaacaaagcgctcatactctgttacgaaggctgacacgctgcaacctaactgggagaatggcactctccc

SEQ ID NO: 31178 - DNA, 373 bp, Oryza sativa
  unsure (1)..(373): unsure at all n locations
  Clone ID: PAT_MRT4530_35509C.1
cccacgcgtccgcccacgcgtccgcccacgcgtccgggttgcctcaactggaccagggattcggnncttccagatttatgtgtgcaaagacagggngnnnnaggagcagcttgttaggagagctgaaagggctggattcaaggcgattgcgcnnacggtggatactccgcgacttggccgtagggaggctgacatcaagaacaggtttgttctgccaccatttttgacactgaagaactttgaaggcctggagctggggaaaatggaccaggctagcgattcaggactggcttnnnnnnnngccnggcaaatcgatcgcaccctggactggaaggatgtgaagtggctgcagaccatcaccacgctgccgatc

SEQ ID NO: 31179 - DNA, 2054 bp, Oryza sativa
  Clone ID: PAT_MRT4530_3550C.1
atggcgcagaagtttctcctcgggggcgtgggcgcgatcctcgtcgtcgcggtcgtcgtcggcgtggtcgccaccgtcacccgctccggcaacaaggccggggacaacttcaccgtcccgggggaggccaacctcgccacctccggcaagtccgtcgagtccctgtgcgcgcccacgctgtacaaggagtcgtgcgagaagacgctcaccacggccaccagtggcaccgagaaccccaaggaggtgttctctaccgtcgccaagtcggcgctcgagtcgatcaagtcggcggtggagaagtcgaaggcgatcggcgaagccaagacgagcgacagcatgacggagagcgcgcgcgaggactgcaaggccctcctggaggactccgtggacgacctcaggggcatggtcgagatggccggcggcgacgtcaaggtgctgttcagccgctccgacgacctcgagcactggctcaccggcgtcatgacattcatggacacctgcgccgacgggttcgccgacgagaagctcaaggccgacatgcacagtgtgctgcgcaacgccagcgagctcagcagcaacgcgctcgccatcaccaacaccctcggcgccatcttcaagaagctcgacctcgacatgttcaagggtgagaatcccattcaccggagcctcatcgcggagcaggaaacggtgggcggcttcccgtcgtggatgaaggcgcccgacaggaagctgctcgcctccggcgaccgcaaccggccgcagcccaacgcggtggtggcccaggacggcagcggccagttcaagaccatccaggaggccgtgaacagcatgcccaagggccaccagggccggtacgtcatctacgtgaaggccggcctgtacgacgagatcgtcatggtccccaaggacaaggtgaacatcttcatgtacggcgacgggcccaagcgcagccgcgtcaccggccgcaagagcttcgccgacggcatcaccaccatgaagaccgccaccttctccgtcgaggcggccgggttcatctgcaagaacatggggttccacaacaccgccggcgcggagcggcaccaggcggtggcgctgcgcatcaacggcgacctcggggccttctacaactgccggttcgacgcgttccaggacaccctgtacgtgcacgcccggcgccagttcttccgcaactgcgtcatctccggcaccatcgacttcatcttcggcaactccgccgccgtcttccagaactgcctcatcatcacccgccgccccatggacaaccagcagaactcggtgacggcgcacggccgcaccgaccccaacatgaagtccggcctcgtcatccagaactgccgcctcgtgcccgaccagaagctcttcccggacaggttcaagatcccctcctacctcggccgcccatggaaggagtactcccgcctcgtcatcatggagagcaccatcgccgacttcatcaagccggagggctacatgccatggaacggcgaattcgcgctcaacacgctctactacgccgagttcaacaaccgcggccccggcgccggcaccagcaagcgcgtcaactggaaggggttccgcgtcatcggccagaaggaggccgagcagttcaccgccgggccgttcgtcgacggcgggacctggctcaagttcaccggcacgccgcacttcctcggcttcaaggtctaaagaccctagccccctacatggcgtgaagggtgggatcgatgcatggacgtgtgcatgggagatttgcacgagaggatccgaggtgacattcatgcatgcgtacgttcgtgtgtgtaccaaatatgtgtgatggctgagacgtgcaggacacctgatcagggtgggcgtgctgcatgcgctggggggcagggctaacatttgtgcttttaactctttccggtttcttttttctcgaacagattttcttggagaatttcttctgtataagtatatgttgcaaaacgattgttgtacaatggcttggttggaaaagcgctgttcaaaaaaaaaaaaagttgcaagccaag

SEQ ID NO: 31180 - DNA, 230 bp, Oryza sativa
  Clone ID: PAT_MRT4530_35510C.1
tcgtcgtcccgtccccaagagagattcgtctcgtcgccgtctagggttttagccgccgccgccgccgccgcgaaaccctcggcggctgggctcgcctcgcagcggagtcaggatgttcctcggcgcgatccctctgttgtctatcaaggaggtggtcttcattctgctgcgcttctaccttatcatcatggtcttcttctttgactacttccatatcgtcctttttattc

SEQ ID NO: 31181 - DNA, 2901 bp, Oryza sativa
  Clone ID: PAT_MRT4530_35511C.1
atggcagtgaactggagcggcatcgtctccctggtgatcgtctcctccttagcgcgcttcctcagcacacgtgcctcctcgccggacgccgaggtacggcagccgatgtcgccggccgcagaacacgcacgttcccgccgaggcactcagcgcagcgcagcgcctgaaggccgcgacggcagtggcgacgcggtgtcactctcgcgctgcctgccgcgagcgctgctccaccctgccatgcttgctccggcccgtgctcctaggcctcctcgtcgtgctccctcgctgtcaatcgtggcggtcctcggaagcggcgatgaaggacaacgccgacgggacgccgttgctgctctgccgactgccgtcccacccgccgcctaccccctctaccgcccgctgccgcgcttgtccaggaggctcaccaagttattggaagggatcgtcgaggcttggacaacagcagcttcggttggaacggctcgactgcgaagaagaactctaggttcacgacaacggcttgatctactcgaagagctgccaagtatgcacacggatggtgttatggacatcctagggagcttctatgcgcgatggattgaatggtggctcaccggagcgggtggaatcaaagatgagctcgctggccggagttggagaagacgatgccgatcgataagctcgccacgccattggctaggtttctttggggcttccgaagaggaggtcgtcgtgatgaagatggtgcggtggcttggccttagcttcacccgatcgacgggaacggcaatgatgtcgcggcgcgatgctcaaagtgcgctccagggcagcgagggcgtggttaaccttggtccagctgatcgtgttccctacctttattatgaggcagctaagaccacagtagctgaagctgagcaaactacttcactcatggctatacacgccttagcggcagagcgccaggatgtcaattaccctcagatggagcaaaacaacaacagcaatggtactagtcagtatggaaataatactagtaatggtgccactggaataattatacctagtgcaagcaatcaagacccttgggctatggagcttttagaatgtattactaaaagtgatgctaaccggaatggacttggggaatttcagaaattgaagccaccaacattttcaggaactgccaatccacccaaagcggaagattggattgtagccatggaaaaggcatttgaagctatgggttgtacagataaagaaaagattatatatgctacctatatgcttcaatctagtgcttttgaatggtgggatgctcacaaaaagtcatattccgaacaaagtgtgaagagaatgaaggagaaggaatttctagagcttaagcaatgtaataaatctgtagcagaatatgaaatagaattttcaagacttgcaagattggctcctgaatttgtacagacggatggctctaaagctcgacgatttgaaagtggattacgtcaaccgctcaaaaggcgtgtcgaagcctttgaattaaccatattcagggaggtacaaataatcatgggccaaatcaaggaaagccacttgcaaatactaatactacatgaggaatacggtcgaataattcacaaggtgggaatcgtgctcagatctttagtggcagaaatcatgagaaaggaagcaagttgggaaggaatgccaattgtgaatgagtttccatatgtttttccagctgaattaccaggattatcaccagatcgagagattgaatttggtattgaaatagtaccaggaactactccgatttacaaggcaccctacagaatggcccctgttgagctaaaggaactaaaggtacaactaaaagaattagaagataaaggattcattcgtcccagtgtctccccgtggggtgctcctgttctatttgtcaagaaaaaggatggaagtctgagattatgcacggattaccgagaactgaataaggtgactatcaaaaacaaatatcccttaccaaggatagatgatctatttgatcaactacaaggagagcgggttttctcaaaaattgatcttcaatcaggctaccatcaactaaagattaaacctagtgatatacccaagactgctttccatgcacgctatggacactatgaatatctagtaatgccatttggtttgattaatgcaccggcagcttttatggatttaatgaatcgtatattcaaaccttatcttgatcaatttgtactgaaatgtgatttttggatggataaagtatctttccttggtcatgttatttcgggtgaagaatgtgatatttgccagcgcatcaaagctgaacatcaaaggctggcaggactgttacaacccttaagtattccactatggaaatgggaagaaattagtatgatctttgttcaaggattacctaccacacctaccggtgactgggtatatttaaaagtatcgcctatgaagggaattaagcaattcggacttggaaaaaaattaagtcccagatatgttggaccatttataattgtcaagcaaataggagaagtggcttacaagctaaagctacccgatgctttcactggggtacatgatgtattccacatctccatgcttcgtaaatgccttcggaggccaagtgatcaggttgaaattcatatggctgagttgcagaacgacttgacatatctggaatatcctgtttgtatcttggacattaaagatcgaaaaacaaggaaccaaacaattagatttttaaaggtacaatggagtcatcgcaccaaggatgaggccacatgggagaaggaagatgatctccagaaaaactatcctcagtttttccatcaccaaggtataataatttcgaggacggaatttctgaagtag

SEQ ID NO: 31182 - DNA, 3693 bp, Oryza sativa
  Clone ID: PAT_MRT4530_35512C.1
atggagcaaaacaacaacaacaacaatggtactagtcaggatggaaataatactagtcatggtgccactggattaataatacctagtgcaagtaatcaagacccttgggctaacttactcgcaaatatactgggcaagcaacaggaaacccagcaacgacagatggaaattttagaacgtattactaaaagtgatgctaaccggaatggacttggggaatttcagaaattaaagccaccaacattttcaggaactgccaatccactcgaagcggaagaatggattgtagccatggaaaagtcatttgaagctatgggttgtacagataaagaaaagattatatatgctacctatatgcttcagtctagtgcttttgaatggtgggatgctcacaaaaagtcatattccgaacgtatctttattacatgggaattattcaaggaagctttttacaagaaatattttccagaaagtgttaagagaatgaaggagaaggaatttctagagcttaagcaaggtaataaatccgtagcagaatatgaaatagaattttcgagactggcaagatttgctcctgaatttgtacagacggatggctctaaagctcgacgatttgaaagtggattacgtcaaccgctcaaaaggcgcgtcgaagcctttgaattaaccatattcagggaggtagtaagtaaagcacaacttcttgagaaggggtatcatgaacaaagaatagaacacggacaacctcaaaagaagtttaagactaataatccacaaaatcagggaagattccgtggaaactactctggacaaatgcagagaaaatcttcagaaaatcaaggcagaaaatgtcccatatgccaaggtagccatgttccatcaatttgtcctaattgctggggaaggtgctttgagtgtggagaagcaggacatactaggtaccaatgtccactgttacagaagggtaaaaatcgagttagttcaactactcagccaaatactaaagtattgactccagtaccctcgctttatttacctggaccgtcttcagcaaataatcatgggccaaatcaaggaaagccacttgcaaatactaataccacacgaggaatgcggtcgaataattcacaaggtgggaatcatgctcgggtatacaacttaactaagagcacagctgaagaatccaacaccgtggttacaggtaatgtcttaatctgctcttatcctggtaaagttttatttgattctggtgccacacattcgtttatctccaccaactttgtgagaaaatacaccatccctactagtcagctaaaagaaagaatttgcatagaaactcctttggatagccaaacaactaatctaatttgcaaattgtgtccaattactattgatggatgggaattaactgctgacctcatacccttggacatgcatgattttgatattatacttggtatggattggttattaccaggaacttctccgatttataaggcaccctacagaatggcccctgttgagctaaaggaactaaagttacaactaaaagaattagaagataaaggattcattcatcccagtgtctccccgtggggtgctcctgttctatttgtcaagaaaaaggatggaagtttgagattatgcacggattaccgagaactgaataaggtgactatcaaaaacaaatatcctttaccaaggatagatgatttatttgatcaactacaaggagctcgtgttttctcaaaaattgatcttcaatcaggctaccatcaactaaagattaaacctagtgatatacccaagactgcttttcgtgcacgctatggacactatgaatatctagtaatgccatttggtttgactaatgcaccggcagcttttatggacttaatgaatcgtatattcaagccttatcttgatcaatttgtagtggtattcatagatgatattttgatatattccaagactaaggaagatcatgcaaatcatttgagaatagtactacagacattgcgagatcataaactatttgccaaattaaagaaatgtgatttttggatggataaagtatcattccttggtcatgttatttcgggtgaagctcctctaacccggttgacacagaagggagtaagatatgagtggactcagacttgcgaagaaagtttccaagaattgaagaatcggttaaccacagcacctattcttgccttacctattatgggagaagaatttaccatttactgcgatgcttcaaaaattggattgggttgtgttcttatgcaaaaagatgctttaagtcgaaaggctctctgtaatatggctattcagatcacacaggatcaacatatacttagagacttggaaagattggatgtggaattaaagatccatgaacccggagtattattagcagtgctccaaataaagcctactttagaagaaaatattctagagaaacaaagagacgacagtgaattacaaaaggcaaagaaaaatattgaagaagggaagcgcgtcaaagctgaacatcaaaggccagcaggactgttacaacccttaagtattccactatggaaatgggaagaaattagtatggactttgttcaaggattacctaccacacctgccggaaatgacagtatttgggtaatagtagatcggctaacaaaatctacccatttcttaccggtaaaaagaaatttttctttgaaaaagttagctaaactatatgtcaaagaaatagtatctttacatggggttccagtaaggattgtgtcagacagagatacccggtttctgtccaaattttggaaaagcttacatagggccccgggaacaaaactagatttcagcacagcgtatcaccctcaaaccgatggacaaactgaaagggtgaatcaaataattgaagatatgttacgatcttgcatcctagaatttaaaggatcatgggaagaatttatgccattagcagaatttgcatataacaatagttatcaatctagtatacgaatggccccgtatgaagccttatatggaaggaaatgcagaacacctgtttgctggaacgaagtaggagaaagaaaattgctaggaccagatataatacaacagacaaaagaaacaatacgactgatacggaaacgactgcaaactgctcaaaatagacagaaaagttatgtagataataggagaagggatcttcgttttgatataggtgactgggtatatttaaaagtatcacctatgaagggagttaagcgatttggacttgggaaaaaattaagtcccagatatgttggaccatttgccatcgtcaagcgaattggagaggttgcttacaaggtgaaactaccagatgctttgatcggagtacatgatgtatttcacatctccatgattcgtaaatgccttcggaggccaagtgatcaagttgaaattcctatggctgagttgcgtaacgatttaacatatcaagaatatcctgtttgcattctggatactaaagatggaaaaacaagaaaccgaaacattcgatttttaaaggtacaatggagtcatcacactcaagatgaggccacatgggagaaggaagatgatttgcaaaagaactatcctcagtttttccatcaccaaggtacaacaatttcgaggacgaaattcctcaaggaggggagcctgtag

SEQ ID NO: 31183 - DNA, 528 bp, Oryza sativa
  Clone ID: PAT_MRT4530_35513C.1
atggcaagacgatcggcccccaatgaccaattgcccacctcacgcctccttgcacgcgcggacgcgtccgctcttctgcttcgtgtcgttgctatagcattcggttttttgcccgccaactacgtcgtccagtgctgcaacagaccctccctcttctccggctgcggcaatgccagtgcaaggccaacgagcgccctagcaccgtgtgccctagcgccaccgttgccgccgccgctccagccgtgcgccgccaccgtttcagccgtcgccgttgctcgggaagaccgccgtcgtggtcgccaagtcgccgccgtcctcgtccgccccttcgccaccgtcggagaccgccggagcatcgtcgccgtcgtcaagccgaagagcgccgccgcttcttcttcgtcgtcatcgccgttcgttcctcttccgccgtcgctttggtcgccgcatggttcagtgcggggcaccagactgagaagtggcggagataagcccacgggggtcgctggggagtccatgccttgtttataa

SEQ ID NO: 31184 - DNA, 405 bp, Oryza sativa
  Clone ID: PAT_MRT4530_35514C.1
atgccgcctgacatcccctatcacgtcgagatgatgagaggctgtttggctgctcatcgcagtcggaggctgttcgccggcgctaagatgggcctagacgcgagccgcgccctgggtaggggtgggcattcggccccggggtacggcgaactctgggggctcgctcggaaagacctagaacgggtcgtccccgacccctggtcgcccacaccctcggcattcacaagtggtgaaatgcacataaggacatcggaaaggcattattcacgcaaggctggcacaagggatttaagaggcaccgacaactttgtcggccttaagataatcggggaagggctcacgatcgcctatggggcggcctcccccgcacccaggctaccggtcgcgctactgccgaggaagtga

SEQ ID NO: 31185 - DNA, 179 bp, Oryza sativa
  Clone ID: PAT_MRT4530_35515C.1
caaaagaacatcaaagttcatcattgattcaccatataaatatatgcttcctaacaaatcaaagcactacatatttatcaaccccacaaactcatacacacagctagcttaaatatcctagtgaccagctctcggcctcctatgataacctaaccatacccagacaccacctgtcccat

SEQ ID NO: 31186 - DNA, 2340 bp, Oryza sativa
  Clone ID: PAT_MRT4530_35516C.1
atggaagacaatgatgacagggcgtcagctgagattaccactgaccaagagaatcatctcaaggacgccttaatccaggtgtttgctgctacttctgaacaccaagaaggtgaaggtgaagctgcagaggttgtgcaggatgaagagattggtgaaggtgtggagggtgtgcgggatgaggagattggagatatcaattcgaagcccgacaaaccatatgttggcatggagtttcgtgacaaggacgaggcaaagaactattatgatgactacgcgaggaaatggggtttcataacaaagatttcaagctgtagaagaagccagatcacaaagcaatacaatcggtatgagttcgcttgccactccgagcggagctcgagggaatctggtgctagtgctggcagcaggtcaaggaggtccagtagagttctgaagacaggttgtaaggcaagaatggtggttgtgaagagggatgagaagtgggtggtcaccatagtagatctggatcacaaccatccacctttgaacccttctgcacttatgtccttaaagcctcatcgcctcataaaagatgaagatcatgatctcttagagtttctgcgcacaaacaagatacccacgcagaggatcatgtctgttctctgtgatttgtatggaagcatgcaaaacatccctcttgcaaggaaagatgtgagcaacctgagggcgaccatgaggccagaggctgagggcacctgcactgatatggcagctacaatcaaatacttccaagaatcgcaagcagatgacccatcattcttttacagtatggaattggacagcgaaagcaaaattaccagcgtcttttgggtggatggagtatcaagggaagcatatagagaatttggtgattgcgtgttttttaacacaaaatacatcacaacaaagtactgtcttccatttgcgcccattattggtatgaacaatcatgggcagactgtgcttttcgggtgtgtgttgctgaaggctgaaattgaggagacatttgaatgggtgtttcagacttttcttaaggccatggatgggaaagtgccaaagagtatcatgaccgatcaagatgaagcaatggagaacgcaatcgcaaatgttttgccaaacacatctcataggcgttgctcatggtacatatggagaaatgctaagttcaagcttggtgtgctgccgtctcggttggaagggtttgaagatgacctaagacattgcattgacgagtcatttaatgttgaagagtttgaaagaagatgggctgctgtgcttgaccgatacaatttggcaagcaacaagtatatgcaggacctctacgaaatcagagaaaaatgggttccatgctatttcatggactgcttcttcccatttatgagcattacccaacagagtgaggtgatggaagcattgttcaaggattttgtccaccctggggacatcatccagaacttcatcgtgcaatatgagaagctcgttcaatcttgtctggacagggatgataaacagctctttcttactgtcaaaacagatgcaaatttgtggtccaaatttccaatggaggagcaagcatcaaaattctacactcgtgcaatatttgagaggtttcaggagcacctcaagaacactactatgtacaatgtagtatgcgaggcaaccccttattcctatttggtccaaaatgtgtttggtgaccaaagccagaacagaagatatgttgttcattgcaaattggaggatgagaccttcacatgtgtttgcaagcagtatgagagggaaggattactctgtgagcatatcctaaaggtgatgacacataggaatgtcaatctgataccagataaatacttgttccgtaggtggactctgaagggatcagacagtgctgctacacgaagtcatgtacctttgaacatggctgaagcgtccactaggaaaatgaggtattcaacaatttgcaagaaatcagtgtgcatggcaagtgaggcatgtagaacacaggaaggatacaatctagccctccgttcaattgaagaactgactgacaagcttgccgctattaacttgacccgacaagatcaacaccttcctcggcccaacatttgtgataagaatgggaaagggatcaccatgggtgagagtaatacgatagctgagaaggtgctttcagaaagctgtctaaaagatccaacaaaaatcaggcctgctgcgtttgacaataatagtgagtcagcaagaaagagaaacaaagtgatgaaagcggtgcaagatctcaggagtccatttcagcaatgccctgctggagttaatgtgctataa

SEQ ID NO: 31187 - DNA, 496 bp, Oryza sativa
  unsure (1)..(496): unsure at all n locations
  Clone ID: PAT_MRT4530_35517C.1
gcgcgcccccgtgggatacatcnnnnnnnnnnnnnnnnnnnnnnnnnnnnnnnnnnnnnnnnnnnnnnnnnnnnnnnnnnnnnncaaaaatagaccataccgccctaatggagggcggcaagctgacgtggtagacggtggatcgaccgtgccgctcgccgccgtctgcactcttggattatatgagcttgttgagaagatatatgctagcctgcaggaagctgtatttgaaggattagaattatatgctaaacaggatggtttagaggctgcttgcaggattttgaagattttaaggtctgatggcaccaagatgtatgaagttggttggcttcttagggacaagactatcatcagtacgtcagtgatcaaaggtttgcaaaagaaagggaggaaaagacgtgaggatggacctatggaagatcccaaaaaaaagatgaagaccgatgaggaacacataaatgttccaattaagtacccaatagatgatctctta

SEQ ID NO: 31188 - DNA, 2266 bp, Oryza sativa
  Clone ID: PAT_MRT4530_35518C.1
atggctataggagatggttttacaatgattatttttaaggtggaccccaccttaatttgcagaataggcatagcacattatcttaagcatgaggtcacccgcgaggccgcgacgtgggtgtcgcacgaccacgaacgtacaggttggatcggaggtccaatgcctcttttcaagaggaaacctttctccttacttgagccccccaaggacttggattctaaggagaagatatccggaaaatcaaacttgacttttgaagaagctttggtctccgagcatcatgcagtgtcaaaggctcagaaattacccacagaactgatggctcctgttcttcggatgattcaatacagcactcttggattatatgagcttgttgagaagatatatgctagcctgcaggaagctgtatttgaaggattagaattatatgctaaacaggatggtttagaggctgcttgcaggattttgaagattttagggtctgatggcaccaagatgtatgaagttggttggcttcttagggacaagactatcatcagtacgtcagtgatcaaaggtgaagacttgattcaccggaggccacctgttagtaggaatacgctgaagatttttattagagatgcaacttctcaaaatgccccatgggttatacatgaaaatcttgccaaaagatatggcatacccattgagcccccgaatgacatgatgtttggtgaaggtttgcaaaagaaagggaggaaaagacgtgaggatggacctatgggagatcccaaaaaaaagatgaagaacgatgaggaacacataaatgttccaattaagtacccaatagatgatctcttagtacaaccttctgcagatgatcatgctttattgaagagacctcctctggctacagattttagagtaccaaaatattctgtgggcgatctccttatggtatgggacttctgcttgtccttcgggagggttctgaatctatccccattttcactggtagatttggagaatgcaatttgccacaaagaaagcaatgcacttcttgtggaaatacatacagctatattccacttgcttattaaggatgaaggtgactatttcactattctgcggaccaagaaacggaagctaaaggtgactttagtaacatgggctgaatatctctgtgatttcttggaaatgacaaaaactgaagaactcaccagaaacattgcaacagtaagaaagggttattatagtcttattgatactgatatcaaacttaagattctccgggaactagtagaagaagctattacaacttctcctgtaagagagaaactaagtgaacgggtggaccagcggcaagcgctcgctgcgactaaaagagagagtactagaaaggcaaaggatgagcagaactcaagcattgatggattgcaagatgacaatgagagtgttgatgagcagggtaaggggaaagaagaaaaggataagaacaatatctctcgaagcaagacagaagggaaacgccatggggtacagcacctcgaaacagagattgaaaaattatccatccgttccagcccccttggaaaagacagacactataacaggtattggtttttcaggcgtgaaggaaggctttttgttgaaagtgcagattcaaaagaatggggatactacagcactaaggaagagctcgatgtgttaatgagctcactgaacgtaaaaggtttaagggagagagctctcaaacggcagctggacaagttgtacagtaagataagtaatgctctggagaaacgatcaaaagaaatcacacacaaattgttgcttgaagaggctgtattgcgccgttccacacgtgtccgggctcaaccaagggataacccatccatgtcattcctgaagtatgtcaacaaatggaaggataactaagtagccaagaggacagcttgtccgcaggtgggggaactgagctagctactcgatgacagggttttgttttcagaggaacatatatgaaggtctgatgaggtggtatgttatttgttagccaatcctcatggctgttcgttgagcaatcatcactaggtagcaaaaccgattaacctgttggtttacagccttacactggactgatagagcgctaccagagctagtttttggagctatatacccagtgtaacttatcttacatgtaaacatggtattagcctcaggaaccatgagttgctaaactgatatgctgctgatgttatgccggttttggatttaaacctcgtgc

SEQ ID NO: 31189 - DNA, 639 bp, Oryza sativa
  unsure (1)..(639): unsure at all n locations
  Clone ID: PAT_MRT4530_35519C.1
ccccgcgtccgaaggttgggatcttgccagatgtaaactaaaaacagacaattttgcacaagtgaaaatgagctgctactaatttgctatacatggaccagtggtttttcacctttttcactaaagttatcatttgcagagtattatgatgtcacaacttttagtttcataaaatgtcctctacgtataactttgttctaacatgtaaggttgtttggctcattccattacatggatatacagtagcttataatgctgtgctatgtagatttggaagctatatgttatgatagtgtcgtagtgtacacatacagttgcctactctttcaagggggtagactgatttttcagtgattattacagggacgagtttgatgaagaaaaagagcctgatggaatggttctatctggatggtctgctccagtggagaagcaagttacgagtaatgggggaaaccagtcggttgcttcttcatctggtgcagattatgctgacggtattgttgaggacatatccactaaacctggaatgaagcgcaagctggatgaggttttagagttgaaggagaattgcgatgcatccagtagtgctcaagttgtcgaagatgacgatgacgacgatcttgntatgcttgatga

SEQ ID NO: 31190 - DNA, 237 bp, Oryza sativa
  Clone ID: PAT_MRT4530_3551C.1
atggccgggaggggaggcggcaggccctgccgtgggtggtgggcgcggcggtgtcctcccatccgccagatccggcaggaggggaggcgccaagaaggcaagaactcatcagtcgtcgcctccaccgccgacgcgacattccccaccgcgacatcaccgccaccattcgtcctaactagctgccagctggctgggtttgcaagaagatcaactcatccctccgtctccccaagctag

SEQ ID NO: 31191 - DNA, 816 bp, Oryza sativa
  unsure (1)..(816): unsure at all n locations
  Clone ID: PAT_MRT4530_35520C.1
atcaggtagcacagtccttcngttatggaacaaagcattcatttccatagaatgattgtatttgccacaaagaaagcaatgcacttcttgtggaaatacatacagctatattccacttgcttattaaggatgaaggtgactatttcactattctgcggaccaagaaacggaagctaaaggtgactttagtaacatgggctgaatatctctgtgatttcttggaaatgacaaaaactgaagaactcaccagaaacattgcaacagtaagaaagggttattatagtcttattgatactgatatcaaacttaagattctccgggaactagtagaagaagctattacaacttctcctgtaagagagaaactaagtgaacgggtggaccagcggcaagcgctcgctgcgactaaaagagagagtactagaaaggcaaaggatgagcagaactcaagcattgatggattgcaagatgacaatgagagtgttgatgagcagggtaaggggaaagaagaaaaggataagaacaatatctctcgaagcaagacagaagggaaacgccatggggtgagcatctgttctcaatccatgtacttgcatgtgatggacctttctctgtatttaacccatgttctgttattgtttaccacaattggtagtgagcctgattattatgcttactccctactttttgtaggtacagcacctcgaaacagagattgaaaaattatccatccgttccagcccccttggaaaagacagacactataacaggtattggtttttcaggcgtgaaggaaggctttttgttgaaagtgca

SEQ ID NO: 31192 - DNA, 568 bp, Oryza sativa
  Clone ID: PAT_MRT4530_35521C.1
cccacgcgtacgtttatttttgggcggacgcgtggacagtactgcctgtcaacggggatgttgttacttatattaacatcttgttcggggacaggggtctcttgaaggagacacaagtcaaactgatggcccaaattcttgacgaacagaggctcgggacgaccagccacattgtacggtatgtcgactgagcattggtcagatttgcgtctgctgaggttcttgagggagggaacctctccctcctatcaagcgggaagccgagggagtctctcccgtggcacctacaagtggagggatactatcgactgatgctgggacgtagccccggatggtcgccgactgctgaattactgcttaagggtgcctgggaatctttaagctcctcaatgtgaggttgctgcagtcagtggttatctgagctgttgctatcaccccagccttcatagcgtagaattggcttctactgatggcatcaacctgtttcatgatgattttagaactgtctttgcccgaagggacaacagaatgtactcatcttaatcgattggattcgcctgtatatcga

SEQ ID NO: 31193 - DNA, 1754 bp, Oryza sativa
  Clone ID: PAT_MRT4530_35522C.1
atcacctcccctccccttcccaccgcctccgcccttcgtcgtcgtcgtcgtcgcgcatggagtcacccgccgcgggcggcgcgtctccggcgccggaggctcctccgcccccgccgagggggtggatctccggcctcgtctccggagccggccggatcctcgcctccgtgctaggtcccgactcgcctgccgccgcctccggctccgccacgacgacctcagccacgtcgccgtccgcgtcctcctccccggcgtcgtccaggcatcccggtatgaaggcatatcatggtaattccccactattttttccgaaagctaataagttaaacaagagtgaaaatgaagcaattatgaaagattattctgaggcatcactagcaattatctcagagattgagccgaaggatgccataatgcagttacttaagcaggagacttattcaaggtctgaatgcaatgcactagtaaagataattcaagagcgggttgtggactcaaatttaaatggagttgatgctggtgggcttgctcttccaatcaattggaagactggcagacaagcaaatattggatattcttcattgagtccaaaaggattgttgcctgcaacttcaattcctccagtccaggaccatgtttttgataatagtgctggtgccggtgcatctacaacaatagctcatgataggggtcctttcgcccacgctactgataagattcaatccgtactcaaaagaagttgctctgttgcaacggatacccctgaccctgaggactcccgaagagtcaggccaaaaattaatggaaattcattagaaatttcaaattttaagcaagtcgatgttattcgaactcattcaggagatgacaataaattatcagatgttcccctttttgggaccaacaatttaatatattctaatattgtttcaattgttgggagtgccgatgaaaaaataggcatacctaacaaaccttcagctggtgatggcaataaaaactatgattctgaatttttaaatccatgtaccaataaggatctgaagaacagctttccattgaaggtggaacctttggatgtttgtattcctttcgagcagcagatgatggatctctcacaccagaagcatgagcatgctgcatgtgatgattattgttctgtctcaaaattaatgtttaaggaggatattgagactgcactcagcatgccagtgggcgtgccgctagaaaatggttctaagaaccggagacgaagggcacccaacacgcagaggattaccccggcaaggtctcctgccaagggttcacgtcgcaagagtaatgatgtcacagtaaaatcagagaccgacttgctagagcaaagcaagggttcacatgatgtcacagtaaagtcagagatcgacttgctagagcaaagagtggatgtacaccgaatcgggtcacctgaaggccggaacagaatgctggccgtctgcaagaagcggggtatggaggatatgtcacccagcttaatggacatgtatgccaagtccaacgagtcctgggaagctgagaatatactgaaacagctggaaagttctcaggtgaagcctgacgttgcatcgtataacactgtcgtcgtaaacggattctgcttgcgaggtctgatcaaagatgctcagaggatcctatccgagatgatcgcagatggcattggctccatgtgctgtaactttatgtatgacgcatcacacgctcgtgggaggatatgctag

SEQ ID NO: 31194 - DNA, 374 bp, Oryza sativa
  Clone ID: PAT_MRT4530_35523C.1
atgtgaggtggagagaatagggagaacatgcgcacgctcgctcgcctggcctggcgtgatggcacgctctactccatcccgctcgtcggcgtgcaccggcgatcgggagagctggtctccggaaccttcgccttcgacgtcctgcaccaggagaaggcggcaataaggtttttaggaagtgcgatgcacgactgctccctgttcatccataatggctcatcttgctcttcgctcccatgctgcgcgtcgtcatcaacgtccacaaccgtaagttattcccgctgagcagccggtttttttacctttttttcttgatgagctcgactaacacactgtataagtaggatcagcaggcaaaacgacattaactgcat

SEQ ID NO: 31195 - DNA, 345 bp, Oryza sativa
  Clone ID: PAT_MRT4530_35524C.1
tttatgtgtattttttctccgaaacaccaggggggtcttttatgagctatgggcggcgacgtcgggaggatcctcgcgatccgtttgatgccgacgttcacggttcccaattacggtgacttctactttggttgcagttagcgcgtatacgcggagctgttcacgctaactgtatggagccatcagtgtaggtatcttgatacgtattcggtggagtactttgatgtcatcatgcttgttgatcagatggtctacatctattgtaactccgatgggtgatgtggtactggccatattaaacgtctctaggcgcgatgactttaaggagactgccaccggtaatgc

SEQ ID NO: 31196 - DNA, 927 bp, Oryza sativa
  Clone ID: PAT_MRT4530_35525C.1
ccggccgggacccgacccacgccgacgccgacgccgacgaccatggccgccgccacctccaccgccgcctactggctcgccgagcacccggcaatcgtgtccttcaggtggagccccacggggctgtggttctccacctgggccttcctcctcggcttcctcgcctcctacgtcgcgctctgcctcgccctcgacgccatcctcgccgcccttttgcgccgccggaggccgctcccgctggggcccttgcccgcggcccacgcgctcctgatggccgccgtctccgccgccatcttcgccggcacgctgctctccgcgctcgccgagatacgcgacacgcggtggtcgtggcgcggacggagccgcaccaccccgttccgctggctcctctgcttcccgccggggacgcgctcctccggccgcgtcttcttctggtcctacgcatactacctctcccgctacctccacgccgcgcgggggctcttcgccgtgctgcaacgccgtcgcggcgccgcggcgagggtgttcgcgcacgcggcatccgtcgccatggccttcctctggctcgagttctcgcagtcgttccaggtgctcgccatcctcgcctccacgctcgcccacgccgtcgccttcgggttccgcttctgggtcggcgccggcctccccgccgcccgtggcgcccccgtcgcgctcgcctgccagtgcgcgctcctcgggtgcaacctcctctgccacgtcggcgtcgtgtggatgcacttcggcggcgtcgccggcggcgggtgcagcggcatcggcgcctgggtcttcaacaccctcctcaacgccgcgctcctctgggtcttcttgcattgctacggcaagcgcggcgtctgcgacgacgacggcggcgccaccgccgccagcgcgcgccacgacaaggacctatga

SEQ ID NO: 31197 - DNA, 261 bp, Oryza sativa
  Clone ID: PAT_MRT4530_35526C.1
aacagtttgtcctacgatggctacagctggaggaagtatgggcagaagcaagtgaaagggagcgagttcccacggagctactacaagtgcactcacccaacatgccctgtcaagagaaaggtggagatgacaccagatggccggattgctgaaattgtatacaacggtgagcacaaccaccccaaacctcatcctccaagaaagccaacattatcaacaagttataatttacctgacatctgtgacgatggcattggcctg

SEQ ID NO: 31198 - DNA, 195 bp, Oryza sativa
  Clone ID: PAT_MRT4530_35527C.1
atggcggtggtgcagtggatattttcaagtcgtatttcaaatattcccaaggtgtcactgagctcgagcggcggcacgaacatcaacgaggatggtgacgccgcttgcaacagctataacccgccgtccattggaatattgcagatgcgccatttgatcctgaaagggtcaattaggcctagagggggtgaatag

SEQ ID NO: 31199 - DNA, 471 bp, Oryza sativa
  Clone ID: PAT_MRT4530_35528C.1
atgggcctcgtcccctccctcctcgtagcacacccgcccgtctcgcgcgccgccagcgtcgccgtcgtgcgtggcgtgacccgtcggccggcctgcccaagtcacagagaggagaagaagagtgatagagatgaggaagcagagaagaggctccacatgtcattccctctccccactcggctctccctcttcttcctcatcgcgccgcggcgccgcttcatagccattgccgttgctgttgttgtcgtcccagtccctgacgcctccaacgatgatggtggccgaagcatgccggcagagtggcggggcagagcggagtggaggggagcggagtggcggcggcggaggtggctggaggaggaggaggtagaagaggaggtcgccgccgagttctgccgcctagacggagaggacgctgacggcgaaggcattgaagaggagcacgagtgcgggctccgcaccgggacctag

SEQ ID NO: 31200 - DNA, 161 bp, Oryza sativa
  Clone ID: PAT_MRT4530_35529C.1
tcacaggtgaggtcacgtgggacggccttacagttagagcccgtcacaggtggtggcactccattcaggaccctgttctcctgtcggagaactgcaaggtgttcgtcaacgtacggcaccacctcagtcatatgctgcagtaccgtgaaatgagctttatc

SEQ ID NO: 31201 - DNA, 3045 bp, Oryza sativa
  Clone ID: PAT_MRT4530_3552C.1
atgaagtttattgaacccgggaaatttctcttggtgttcttggtttgcagtgcacatgttgtcatctgctcctctaatggaaatgaaacagatcggttatcactgcttgaattcaagaatgctatcactcttgatccacagcaagccctgatgtcctggaatgacagcaaccatgtctgcagttgggaaggtgtcaagtgcagggtgaaggctccacatcgtgtcatttatctcaaccttagtggtcaaggcttagtagggacaatatctccttctcttggaaacctaacattcctaagatatataagtctccaagaaaatttactagctggacaaatccccctgtcacttggtcatatgcatcacctcaaagttctctacttgagtaataatacactccaaggagagatacctgactttgcaaattgttctaatctctgggcgttattgctgaatggaaatcacctagtggggaaagtacctacagatgcccgtttgccgcctaacctttattttctctggattgtacataataatctgactggaaccattcccacctctctatttaacattacgacattaactaaactttctataggatttaatcaaatcaatggtgaggttcccaaagaaattggaaaatcacgcgttctgcaactatttgctgcttctggaaataagcttttaggaagatttcaacaaaccatccttaatatctcttcccttgctgatctagatcttgggtccaattatctacatggagagttgccatccagtcttggtagttcactgtccaatctacaggggttggctttgggcaacaacttcttcggtgggcatatcccaagttccttggcaaatgcttctaagctatccatgattcatctgtcaagaaataatttcatagggatggtgcctagttccattggcaaacttcaggaactctccgtgttgaaccttgaatttaatcaactacaatcaagtgataagcaaggcttggagttcatgaatagtctcagcaattgcaccaaactacgagcattatcacttgcaaaaaatcaactagaaggagagataccaagttcattcggcaacctttctatgaagcttgaactcttataccttggaggcaataaactatcagggcgttttcctgcaggcattgcaaatcttcacagcctgtcaggtctagcactgaattcaaatcgttttacaggtccagttccagattggctaggaaatcttaaaaatttgcaaataatattcctagcggcaaacatgtttacaggatttattccatcatccctctcaaatttatctctactagaaaatgttgtcttggactctaaccagttctatggccatataccccgaggtttggaaagcctcaaagtactacaagtactgagcattccaaacaacaatcttcatggtagcatcccaagagagctcttcagcattcctacaataagggagatttggctatattccaatagattggatggacctcttcctattgaaataggaaatgctaaacaattagaacatcttgtgctttcatcaaataacctatccggtgttattcctgacacacttggtaattgtgagagtattgaagagatcgagttggatcagaattttctcagtgggagcattcctacatcatttggcaacatggaaagcttgcaagtgctcaatatgtctcataacctcttgtcaggatcaataccaaagtctattggtagcttgaagtatcttgaacaactagatctgtcattcaacaatctcgagggtgaagtaccagaaataggtatattcaacaacacaacggccatatggattgctggaaataggggtctttgtggtggggcaacaaagctacacctacctgtgtgcacttatagacctccaagttcaactaaacacttgcgatccgtagtactgaaagttgtgatccccttagcttgcatagtgtcacttgctacgggaatatctgtcttgttgttttggaggaaaaaacatgagagaaaatctatgtctctcccttcattcggtagaaattttcctaaagtttcattcgacgatctttccagagcgacggatgggttctccatatccaatttaattgccaggggaagatacagttctgtgtacaaagggagattgttgcaatatggagatatggttgctgtgaaagttttcagcctacaaactagaggggcacaaaaaagcttcattgcagaatgcaaaactttaagaaatgtgcgacaccgaaatcttgttcccatcctaactgcatgctcaagtattgattctcaagggaatgatttcaaagctctagtatatcaattcatgtcacaaggtgacttgcatatgatgctatactcaaatcaggatgatgaaaacggttcagcttccatccatattgcatttgctcaaaggttaagcattgtagtggatgttgcagatgcaatggagtacgtccaccataacaaccaaggaactattgttcattgtgatctcaagcctagcaacattcttttagatgacagcctaacagcacatgttggagactttggccttgcaaggtttaaagttgattgcactatatcatcttccggtgactcaattatttcaagtgcaattaatggaactattggatatgttgctccagagtatgcaacaggtggtgaagtttcaaccttcggagatgtttatagctttggaatagttctcttcgaaatatttttacgaaagagaccaacacacgatatgttcaaggatggtctgaacattgcaacatttgtcgatatgaactttcctgacaggatatcagaagttgttgaccaagaattgttagaataccagaatggtctatcccatgacactcttgtggacatgaaggaaaaagaaatggagtgtctacgttctgtgttaaacattggactttgctgcacaaagccatccccctatgagcgcatggacatgcgagaagtggctgcaaggctgcgtaaaattaaggaggcctacctcagcagcaactaa

SEQ ID NO: 31202 - DNA, 351 bp, Oryza sativa
  Clone ID: PAT_MRT4530_35530C.1
atgttgaaggcgaggcagagcccgtcggaacgacagtgcagaggcggtgtcgaccagggcgatgatggcaaggcagcgccatcggatctagcgtcccctggccatatccggccacctcacgtctggatccagcctccccgacgtgggtggcaggccctcgagctagctgcgggacgaggcaacggcgtgcggttgcgatgtggtagggcgaggaaggaagggcgcggcggtgcagcgggacggtgggcatgctcgcgtggtgtcgacggcgttgaggaaggtggaggcgacgatggggataggagctgggaatatggcatcgatgtttctaccgactgggctgcttgctga

SEQ ID NO: 31203 - DNA, 318 bp, Oryza sativa
  Clone ID: PAT_MRT4530_35531C.1
tttttttttttttttttttttttttttttttttttttttttttttttttttttttttttttttttttttttttttttttttttttttttttttttttgggggaaaacaaaatttttttttttttttgggggcgggaaacctttccaggatttccacaccttttgggggggttctacggggatctgtgggttcatgcttttaccagcgggaccccccaatatatccccgacccctggaaggaaaaagataggatttttgggcctttagggaaccatttccccggggggtgttctgaatggaaaaaaatccccgggttat

SEQ ID NO: 31204 - DNA, 672 bp, Oryza sativa
  Clone ID: PAT_MRT4530_35532C.1
ctctatcagcttctcaaatgcttttgtgtttctgggaaaattcagaggcccattgaagattttcagctttggtagccaatgctctaacagcagcaagaaggcggtcttcctcacgtgtgcctatactatcaacaacttgctccaggtaggaaaatatgaaactcctatagaaacattcctcatctctatgtactggcctaaattctgaatagtgatggctgagatactttaaacgcaaaccaacttccggttgctggaaagaattatcaatgttcctgaaataatgatttgcagcttctcccatgggaattttcttgtgatacacatgagcaggcagttttgatgtgcttgccccgcaattatgaaacgggtagttcactggttctccttttctatctgaaagcttctcctcggcgtcgccatgatacgcacgaatgctactcctgagaagcttcactttgggggaatcagatgtcctctcctccttccttcgtgcctgttcccgatcatcagagactgtaaaagatccttctccgatctttctctttcctttgcggtccaccaatgcagcggcggcgctcaaaccgtcgatgccgcggcctccgcctccgggctgctcacgggcccgcccctgggtgaagcgctcggtgggcgagcgaggaggcgagcgcg

SEQ ID NO: 31205 - DNA, 910 bp, Oryza sativa
  Clone ID: PAT_MRT4530_35533C.1
agcgccgtaatcgactagtatagggcaattggccggcgggccaaaaaaaaaaaaagcgcaactcgcaaccctaatcatccaattcccacacggactctgctaccatcggagtcagatccattcctcctcccattctcgatcgcgaggaggaggagaccccgcccgccagccaccccggatccgtcgatcgccatggcggatgaagaacctgttgatccaaagaagtaccttgaggagcgctgcaagccccagtgcgtaaagccactctatgagtatgagaagtgcgtcaagagagtggagaaggatgatactgggcataaacactgcactgggcaatatttcgactattggtcatgcattgacaaatgtgtagcaccgaaactccttgagaagctcaaatgatgaccggctgctacttttggatcagtgacttgttctatttgcgtaaccttgttcgcacttgaaactgaatgagttaattgtgtctattgtgactgtttgggtttcatgacttgtaataaaagccaccatttcccatatcaaagcatgtggatttattcggtctgagcattgtgaacatggatcgtcatttctgttttggcatgtaatcgaccagcatcgaaaaaaaaaaaaaaactgttccaagcatttttaaaaaaaaaaaaaaaaaaaaaaaaaagtggaaaattattggcaactgcgcatttggtcatttaacaaatgtcctccttgagaagtcacatgacatcaggacatggtttggttggtgcagtggatggttgtcaaatggtgaccttgttcgcccttgaaacttaataagttaattgtgtttaatgggactgtttgggcttcatgacttgtaataaaaacccccatttcccatatcaaagcatgtggattttttcctaat

SEQ ID NO: 31206 - DNA, 413 bp, Oryza sativa
  Clone ID: PAT_MRT4530_35534C.1
acgccgccagctatcgatgtcagagataagcctagacataccccatccggtacctacagaggctggtaagagggatctagcgtcatctctgatctcgacaagttcgtgcttgaggaggaaaactacgctgtcgtcgactacgggttgatgaataagagcaacaccggctttggccaacaggagtagggctattacctgtcagataaggggcccgaacctgtataaaaatccttgtctgcatctcttttacttcaatcttgcatataccatggtaccaacgatccccatactatgcaaataccgtagtcgcgatctcaaacgtcgacaaccccccaattcatcaaattcaaagtggtcagaagaaccggagccgacgttgtagatatcaaactcgaccccagctcattctttgg

SEQ ID NO: 31207 - DNA, 231 bp, Oryza sativa
  Clone ID: PAT_MRT4530_35535C.1
cccccacacgcccccgcccccgcccccacccccgcccccacccccgccatgtatggtcttcatcttcggcgtccgtacctcctcatcggtgcatcggctagtcacgccaccacctcagctggctccacaataccgagctccactttggcctcacctggacataactcaagagaggatgaagagggaagagaggaaagagagataggaggggcaaggaagaagatgagatga

SEQ ID NO: 31208 - DNA, 348 bp, Oryza sativa
  Clone ID: PAT_MRT4530_35536C.1
attccctgttccacccacgcctcccaattattaggtagctcaccaataccacgccactgggttgggctcctttgaactcctcctgggggtcataacaaccacccccacaccagaccaatcaatctcctgctccaccttctcctcacaatgatcttgcaagtaggctcgccacttttaccaacaacttgtcatgtgtcacctccacattcatatcccaactatctttcctccctttgctgacgccaatgctacctacacttgaacagattgagcatcaaagaactaccttcatgcacgcatgcaccaacggactgcccgctacagcctacccactgtccagacattgaa

SEQ ID NO: 31209 - DNA, 358 bp, Oryza sativa
  Clone ID: PAT_MRT4530_35537C.1
cagggttaattagttttaacttccaaaaattcatcaattaattagggagagaacggagggagaggtaaaaatattataagtaaataagttgaaaaaaatcgaccagctagaagttctttttggcctggtaggggttggcgtaggtccagtcccgaggggcaaccccccaggaggtggccttgcgggggtcgccggtcatgacccggaaggggagcgactccccggcgaggatggcctccgtcttccagagctggccccaactgcgttggagcggggatccacttcacccgtttgccgcccttcaccgtcagattcaccatgttcccctggccgccacgtttttaaccataaccatgtt

SEQ ID NO: 31210 - DNA, 637 bp, Oryza sativa
  Clone ID: PAT_MRT4530_35538C.1
atggtgaacacaaggaatggcgaccatgcaacaggtgatggtagcagcagtgaggaatagactggaggagccaataccagtggtgcaactagcaatggtccacctccaccgctagagaattcaacaatcgctcaggtgttggccaattagacgcatatcatacaatgatatgcagcagatgcaaaaacaacaccaatatatgcaatagcagatgatgcaccatcaggcactgcagcagctgaatcagcagtttggtccaccaccaccacattagtccaaactactttagtttctccatgtcaggccacccactttctccagcaccatcaacccaatggaagccaatgactggcttcatgccattgagaagaagatgaacctcctccggtggaacgactaggagaaggttgtctttgccacgtacaaacttcaaggtcccgcttctgcttggtgggacaactacatggtcacccgctcagctgtgacatatgtcacttgggcggaattttgccgtagcttcaggaaggcataggttcccgatgggactgtagcacaaaataagagggagttccatgcgcttcattagggaaacaagatagctatagagtacctacacgagttcaaccgcctattatta

SEQ ID NO: 31211 - DNA, 534 bp, Oryza sativa
  unsure (1)..(534): unsure at all n locations
  Clone ID: PAT_MRT4530_35539C.1
nnanaacgccaannccggncntnanaaggnggggggnagaagaangnnaacangcaaacccactcggnaatccccaanaacccggcccccggcgggccggntntggcgggcccnngggggnnatnngcntcncnggcccaacccaangcggcaaacctncnngggccctnntcnngganaaggaccccngcncccccccaaagnggggntgnacngtcccccgngccnaanaanggccgggaaaaangnttnnncnccaaacaaanggncccnggnctggcnnccaaccccntnnacagnaccggggggncaataacccccccccntgggccancnccaanncgggggaantggggnaacctncccaacaatnaaaaanggcccangnnccangggggcggggncccccaactgggggccaaggccgagaacnnaacccccgnggcnccaagagcnacacaaccctttttntntnttntntatttccaanaagnccaacacccnacgggggaaaggggggccnggnaancngcn

SEQ ID NO: 31212 - DNA, 938 bp, Oryza sativa
  Clone ID: PAT_MRT4530_35540C.1
caaactttgagttacagcaaccaatttattttcatattcgttgcacgtgaccaaacaaaaataagaaacaaaaggtacatataatttttataaaaaaggtaaaaacaaacacaaaattatatccgaggagaacatcactgtatacatttataacagcaagctaaagtacgcatttccttttttttttccgataacggaattcagtccactgaagctgcgaacttgcgtttgcagcaagacgatctacttgtccttcttgcgcttctcgacgacgaagaagaaggcgagcgcggcgatggagaaggtggagaagacgccggcggcgaccttgagggaggcgtggatgccggtgatcccggcgacgtcgaaggcggcgtccggcgagctctgcccgtaggccacctccgtgccggacgcgtccaccgcgtaggcgcgcacgaagtaggacgccgtcgggatgtcgcgcgccaccacgtagtcgaacctgccggcgccggcggcgtacggctgcacggtgaccttgaactggcacgccttgtccttgtgcaggtcgtcggaggccttgcgccacccgcggtccgtccggctcgccggcgcgtagcacagcttcaccttcacgctcttgaacgccgcgtcggcgcccgccggctccgacgtgttcagcgaccacgtcaccgtcaccgtgttctcgccggcgtgcacgacttcaccgtgcttgggcgagacgccgacgacgagcgctttgggcagcttggagaggaacacctgcgtcttcgccgcggcggcggccgccggccggggcacgccggcgccgagcaagacgagcaccaacgagagagcagcaacgccggctagcctcgccattgctgacaaaccaaaccgactgattctggatatcaacccaaggacggagacggagacgaagaccaagaaatgaa

SEQ ID NO: 31213 - DNA, 961 bp, Oryza sativa
  unsure (1)..(961): unsure at all n locations
  Clone ID: PAT_MRT4530_35541C.1
ttgttggttttaagaaaaaaaatctttgtttctcctgtgtgttgttgatttctgtgtgtataagaatgttcaattacagtgtcaaaaaaaattccctgtgtcctaaaactaccatgcctgtatgttttatccacacatctaactctcaaaaagaaaaatctacaaaaatcaactttgatcagaaattcagaatggcctcttgagacccttgaaatccactgtctcgatgcattcgacgctgcctcgcgacccgttgagcatcttgagcagctcgctggcgcgctccttggtgacgccggcgcagcccacctggagcagcagcagcagcttctggaacgcgccgacgcggagcgcctcggcgcggcacggcgcggcgccggcgccggcgcggcagaggcgccagagcgcggacacggcgaagtccgtcgccatgtcggacacccggaacatcttcttgacgagcaccgggacggtcagcgcgtgcgcgcgcgcggactcgacgccggcgtcggcgcacagggcggcgtcgagcacggccagggccttctcgctcgtccccttgtcggcgtccacgaggagctccacggcggcggggaccacgccgagctccgcgaagcgcgcggcggcgcggtcgccggaggagacgaggtagtaggccgtgacgagggcggccttggtggcctgcgaggagacggggctcgtgacgaggccgacgagcgcgtcgcacatgccgtgggccctcgcgatggcctccagggcgtggcggtcgccggaggaggcgagctcgcggagcacgacggcggcgctgacccgcgcggcgagctcgccgccgtgggagagcancgaggcgagcgacttgagcgacggcggcgaggcaatgcaactgcggcactcctcgtcgagcgggaagaacaccgtgagcgcggggaggatctccccgagcgcgccggcgacggggccc

SEQ ID NO: 31214 - DNA, 488 bp, Oryza sativa
  unsure (1)..(488): unsure at all n locations
  Clone ID: PAT_MRT4530_35542C.1
ggttgggcaccaaggtgcaagcttgggcaagccaatgttgatgcacaccactggctgtaaatgtgatgagcaatgtgggatgtggtgggatnggtgggctgggctggctgagcatggtgcagaggtggtgcaccactgactgggcgtgtgcagctgcgatcaatgccaacattggagcgcaagggcaagggcaggattgcacttgaattgcaccccaacctgcagtgctgcattgggtgtgtgngtggcccgaatgcacctgctggtacaagatccctgatgatgagtggacttggaaatgatgctgactgaagcactttgggccagggcaaaagcacacaaggtgtttgagnaaccaatgcttgcttaaagctttgattatgccagaggagtggtcatgcactgctctaattaacttaccttgctaacttgatcaggcatgacatcagctctcagcacatttgagctgctctcaaaaaaaaaaaaaa

SEQ ID NO: 31215 - DNA, 483 bp, Oryza sativa
  Clone ID: PAT_MRT4530_35543C.1
atgacgctagactggagccgacgcctcaaggagctggctactggtggcgaagaggagagtggtagcaaggaccgtgccaacgtcaggaggaacgtggaagtggcgacaggcatgagaggaagcgtgtggcgctacctgggagcagaaggcgtcctctctccattcctcatgcttgctgtcgtgcgggatggctactcccagtggaatgctggcgaagcacagaggcacgcgaccaacggtggtaggccgacgtggcgtgaggtggcacgcccggaggcgacgggaccgtggaagtccgaagcgacatcaggacatgagacagaaatcaaagcaatatgcacatgtgagacgatggagcatcaaggtgtagcctcacttttcgtacagattgcaccagcaatgcagctgtacaagtttcagggcggtagtgggtgcagccagaatgttgttgcatgtgacgttccatccaacatgcaaacgtga

SEQ ID NO: 31216 - DNA, 488 bp, Oryza sativa
  Clone ID: PAT_MRT4530_35544C.1
gttgtcatggaaagggatacgagatattgaattaagacggatacaatgagggaattccatggaaaatttaaatgaactttcaacataaaatgtgaactgtactttttattatggtgtttggtctggaacttgattttgggatttgggtttatttttgtattttgtaacttggattagagggaggtaatatttaaattaatttagaagggatttgaatatttgggtttttgaaacatggattggactcgagtttatggagtttgcttttttggagggatgaactgcataacatgagattatttgacacagcttatgagatgacagtggaaaagcaaaaaaaaagtaattaatcttttactaaacaagagttttaacgcctcgtaaaatcaggggcgttactagccagcaatatgtcatgacgtccattactccctaccaatatgatcaatatagtcgttcgactaaaattagagttagcacaattctag

SEQ ID NO: 31217 - DNA, 1646 bp, Oryza sativa
  Clone ID: PAT_MRT4530_35545C.1
ttttttttttttttttttttttttttaagtaaatacttgtctgtttattgcacccgcatactaaaactatacatcaaacagcaagcccacccgtatcatctactagcaggctggcgatgctggcaacaccatccaaataacaaagaaccaaattgcgtgcatacaaatatgtaagatagtaagacaccatacagtatagcatctgcatggagcctagctagattctagagcataagcaaccaactcgatcaggcgccaagattggcagccgatcatcagctagccgctgcgtgtccagacgacgtggtcctgcggcaggaagtggcagaccggcaccgtgcctggcttcaccttgagcacctggaacgcgacgtgcttcgggttccacccggccgtgtcggcgtggcacaccgcgacggcctccacgcccgtgccgtccctgccggccatcgacaccgcgtacgcccgcgtcgcccgcgtcaggtggcacgcgaacacggcgtacgcgtacggctccgcgtggcaggcgacgagctggtcctggtcgccgccggccgccgcgcgcttcaccgccgtcacggtgtactcctgctccggcgacccttccttcccgaccacggtcgacgcggccctcacgtggctggtcccgaggctcgacgtggcgaagtcgaccatggactcgagcgacgtggcgcacgccttcctctcgccctgcgccggcggcgcctcgcagtcgcgcagcgtctgcgccatctccgccgcctcgacggagcccggcttcacggagaagcggctgaggatctccgggaccttctcggaggagaacggcatggcgtcggcctcgctcctggggaggaacttctctccggcggtggtggccgtgaaatgtacggccatcgtcttcccggggtggaggtccttctccaagaagaagagcgccacgttggggtcgtcgtgcagctgcgtctccgttgcggcgtagttgtagatgaaaggtgcgacgttgacgtggacaggcttgccccggggcttcacgttgacgccgacgccgcccttcccgacgccgacggtggtgcccccgggcttgccgtagcctggctgcacgttcacgccgacgccgcccttaccgacgccgacggtggtgccgccgggcttgccgtacccaggctgcacgttcacgcccacgcctcctttcccgacgccgacgctggtgcctccgggcttgccatagccaggcttgacgttgactcccacgccgcccttcccgacgccgaccgtggtgccgccgggcttgccgtaaccaggcttcacgttcacgccgacgccacccttgcctacatcaacggttgtgccgccgggcttgccgtgccccgcgtcgacatggacgccgcccccgccgacgttcaccgacgtgcctccgcctgcagtgctgagaagctgagagagcgagctcgggatgggagagttgggaagagctgatttccagtattgctccggagtccgagcggcatggcttcctactgaagcgatcaacaggaagccaaggaggcaggcgaggagcctatccatggagacgccaatgagcaaaacctgacgaggcaaagattgagctgcgcgtggaacgatgcaggattcctgcagcccgg

SEQ ID NO: 31218 - DNA, 540 bp, Oryza sativa
  Clone ID: PAT_MRT4530_35546C.1
atggcggaggtcggcggtggcggcctcccgccgtcgcgcgccgtgctcgcctcgcggttccgttccaactccgaccacctcatgcggctccactccacctggatcaacagcgccgccacgcccgccgctgcgccgtatagccgcgagtcgctcgcgatgctcgccgcgcggctgctctccgtctccgacgaccatctccagcgccagcagcagcaacatgtctccatgattatctccacctccctgcccggctgcaccaccggcggcgtggcgcccgcattcaaggaggcgatcgaggcgctcagggacgtcgtcgtcgaccagctggcgccggccgcggagtgcgcgatctgcctccacggccaggacgcggcgacggcggcggcgggacggtggaaggagatgccgtgcgggcaccggttccacggcgtgtgcctggtgaagtggctgcgcgtgcacggcacgtgccccatgtgccgccaccagatgcctgcaaaggaggcggcggcggctgctgctgctgagggacgccggagctga

SEQ ID NO: 31219 - DNA, 375 bp, Oryza sativa
  Clone ID: PAT_MRT4530_35547C.1
gggacgaaaaagcacattcatcatcatcatcatcatccatgtatgtaccaagaatcgagaacaaatttctcacaacctcatcaccatgcacccaataacagcacggagagaccgaaattacaaaatcaaaaatcaacaaggaaggaagctagagagagcacaccgtggtgaatcctcccgccatcgagcacaccagcccgatctggccgcccgccgcaaagcagaggccacccgctgcgcccctccatggtcacgccgccgggagaggccacccactgcaccgtccgtcacgccgccggggaggcctcccgccgagcccacaccgtggggaggccccccgaagctccctccccatgtgaggccgccggaggagtg

SEQ ID NO: 31220 - DNA, 1760 bp, Oryza sativa
  Clone ID: PAT_MRT4530_35548C.1
tttttttttttttttggaaacatatcgaaatcgtgctctcatgataggagagccgatccattttcctcgtatattatgtttcaagcttccacttatatggctacagtgctacagtctggtgataattgcaatcagtaatactaatgcacagattttgctgcaacccgtaactaagaacactagagctgcagagtgggggtgatcctgaggaataccgatccatagattcagatcctaattttgatccacgctacacaaaacttggacaatgaaaaagaatgcaatgaccaaagtgtacaaaaatttccatgtggaacaccacgcctgtggcgaaaatcagccttatctccagttctccaccttgtgaatgctaacagttgctattttgttctagtgatgactctctctgtgatgtcaataagagcacgccttgatgtcagaacatcttcatcatcgctgtctgggagagcttctatggctttgattgcacggttagcatgttctcttgcaagctctttcgtcttttcaatcccgcggctcttctgtaggtagtcaagagcaagctcaacatttgcaggattgtcaaaacccctgtcaacaacttcatgtagttgtgggaattcttccatcgcataaagcataggtgcggtaatgattccatgacggatatcagttaatgaacccttcccaagggatgcagaagtgcctgtgaaatcaagaacatcgtcgatcaactggaaggctaaacccaggtttcgaccatattcatatgcgagcattgacacatcagcagtgtgccctgcaagaatagcgacagccttgcagctatttgatatcaatgatgctgttttgtagtacgtcttctgcaagtagtaatccatacttcgcctttgctctctacttgtggagatttgcatggtttcaccagtaactagatgttctacagcagtagccattagagataccacctctgtgttcccaagcgctgcaagtgccacacatgctctagacaggaggaagtcaccagccagaacagaaagcttgttccccataatgcaattcaacgaactgacgccacgcctagtgtcagcatcatccagtacatcatcatgtagaaggcttgcaacatgaatcatttcagttatctcggcaatattttgctgtctcgtgcggagcttatttgccagtatagttaaaactcccacttctgttgaatctgataaggggaatttcagagctgatgccatcaacaataataccgtgggtctgaatcttttaccctcagctcccaccttaaaaaaatactcagcagctgatgccagtttggggacctcagcagctaccatggatcgtagcctatttgcaagaagtgacaactcatcagcaaccaactcaaatggatcctgctgttcctcagaccttgataacccatcctggcgaacctggtactgagcatcatgtaaccatcgcgagctcacgaaagtagctcctctgcaacccaccaccttgctccgaatctggtagtgcggcggcgacggcggtggagggtgcctcccgaggagggcagccgccgaggagaagagccgctgcgcctgggcggtggcgccgtccccaccgccgctcgtcgcgcccagcgcggcgacgcgccgcgcgagagcccaccgccacgacatggctcccgagatcggggggagggaggagggaggaggcggagttgaacttggagaaaaagtctgggaagagagaaaaaaaccctcgtg

SEQ ID NO: 31221 - DNA, 424 bp, Oryza sativa
  Clone ID: PAT_MRT4530_35549C.1
atgagattggtggccaacccacctctcttcctcgaagatgactaccctcctatcgtagaaaatggtctttggtactgtcgcatgctagcccgtctcctccaccatggcagtcttccttcgctcctcgtcgacgacctccatgtcaagttagagctcgagctccacctctggcattttcatgatgttgccatcaacaacgactacgggcaacatggtttgtgtagcgaggatgtcagccccctaattcctccccctcctactaagggtgacgcatgcaatgcttcgctccgcccatgtgcgtcggcctttgcatgcatgcagctctcgcaacgcaagaaagaagagctaactccacacattgagagccttttgcatgaatgccgcttcgcgtgcaagtgcatgtgcaaggacaccctatattctg

SEQ ID NO: 31222 - DNA, 646 bp, Oryza sativa
  Clone ID: PAT_MRT4530_35550C.1
cgggctgcagagatcatatacaagtatattagcgggtagtagtaggtggcattgcatattgacaatagagttgagtgctgatcattagtgcttaaggtgcaaagctaattagcatagcataacggtggtagaggaggcttgcagttttgctgcactaaaatgaatgggataatttagtgctaacaaaaggacgatttcactatagcataggcgatatacatggcatttagcagacatctattgtcgtttggagttgaggtgccttgtggaagtgaaagatgtaaacggaccgaagatgtatgccattgttcgctgcaaaagttgcccatccttttttttaagttgcaacgaccatgtgttgaaacatgtagagtcagggtgactgaaattctgtctgctgcttcaacttgaatgtccatggtttttcgacctcccatgagtggctgaatgtaggtctttgatattccttagcaaagtatattttatcttgcttcatgaatgtattgttcatagtcacaatgtagaacttgtttgaaggaggaactgtccaataatgtcggtgtagttcttgatgtcaggtgtcacttttgtatccttcagcaaaagcagacattgttgaatttgcgtgtgctattgccggcctgtg

SEQ ID NO: 31223 - DNA, 257 bp, Oryza sativa
  unsure (1)..(257): unsure at all n locations
  Clone ID: PAT_MRT4530_35551C.1
cccaacaattttttgatccttccccgccgngcaancgccncgagaaagggttccccccacgggcagtgggangaaggaanacgaancgggcccgggtttggtgtttggggaanaggaaggggattggngtttngnacaaatncaccctgntgaccaaaaaaaagnagaaaagccanctgccacgntccccgcccccccgggactntctcngggcatnttcacccccacctcncncnatcnncccccggnccacctct

SEQ ID NO: 31224 - DNA, 1081 bp, Oryza sativa
  Clone ID: PAT_MRT4530_35552C.1
ttcagttcagacgagcaccagccgccgccgccgtgatgatgaagaagacatccaaggagctggactacgtgctggtgccgatggggatggcggtgatggtggcgtaccacgcgtggctcctcctccgcatccggcggcgcccggcgaccaccgtgatcggcatcaacgccatcaaccgccgcatatgggtgcgccacgtcatggaggaggcgtccgggaagcacgccgtgctggcggtgcagaccatgcgcaacagcatcatggcctccaccgtcctcgcctccgtcgccatcaccctcagctccctcgtcgccgcgctcatggccagcggcgtcgcccacggcatcttctcccccggcgccggcgacggccagggcgagatcgtcgtcggcgccggcggcgagacggcgctgtcgatcaagttcttcgccatcctcgtctgcttcctcgtcgccttcctcctcaacgtccagtccatccgctactacagccacaccggcatcctcgtcaacgtgccgctccacgcgcaccgccaccgccgccgccgaccggggctcgccgtcgactacgtgacggcgacgctcaaccgcggcagctacttctggtccctcggcgtccgcgccttctacttctcgtgccccgtcttcctctggctcttcggccccatccccatgttcgcctcctgcctcgccatggtctgcgcgctctacttcctcgacgtgtacaccgagtgggacgagaagccggaggaggaagaggagctcaacggcaatggcgatggcgacgacggcggcgccgccgcgtgccatgaacaacccaagatggccgccggcaacagggtgacgcctcagcaagacgtcgtctgaaaactgaaactctgaaggtgtttgttgcctgtgcctgcatgcaggtgatctggattcagcagctcgttgaatcaagattaataattagtttatgtactttggtataaataaaatcgccgtgcctaggattcaatatctcgttgaatcctagatttgtcgcgacaaattcgcataaaaaatgctttgaattgatgttaaaaaaaaaaaaaaaaaaa

SEQ ID NO: 31225 - DNA, 362 bp, Oryza sativa
  Clone ID: PAT_MRT4530_35553C.1
agcgaatccagcagctgatagcagcagcagcagctcagccatccgcatggtcgtaagatcagggctggagaacgagaggaaccgccagatactggggctacatagcaacaccgtcagatcgtaaagagtttgtccgccgccgtcgctggaatcatttgggtgatgcctaagctgccaagatgtctttgatgatgagcttactcttgtagtacatgttcgtagttagtgtgatggatgaacatcaccattatagcctggtactgtgtactgactttccaaagatagttagatgttatagtgaaggctatatgttcattatctttagttttaaatgttctttgcccttatatcactaaataaat

SEQ ID NO: 31226 - DNA, 324 bp, Oryza sativa
  Clone ID: PAT_MRT4530_35554C.1
atgaagttaagcatgaaacaacccctgtacaaccgtacttctcgtgtgggtatagacctagcgggagcgccagaactcctctcactgctagaaaccttggacgcctggagtgcatgaggactaaagttcatggagcgggtactgccaaagtgaggttgttgaaaggctttgccgtagcaagtctcattcgttgggacataggcttatgtgatgggcaagtcgcggagtacgagtacgggtaaagtgtacatccactgcagtcagagtgttgaagagaagcccttgttagtatgcttgcgtacctaacaagatgatcggagtgcg

SEQ ID NO: 31227 - DNA, 324 bp, Oryza sativa
  Clone ID: PAT_MRT4530_35555C.1
atgctcttctcgggtgaggttttctctagagatggccaagatttaaaggatcaagactaccgattggaccaagaaaatagtggttctcgtgtgacagacttggaattgcaaccagattggacagatgctacagatgcaaccgatggtgcggaggacggattggcggaggttgacatcgccgagggcggaaatctggtcggggatgaagtcacctggggatcgccttatgcgtcggaggaatcgccggagagagagagcataaagtttcgcttgagcggtgaaggcggaaataacggtgtgagatttctcaaggacaacagttag

SEQ ID NO: 31228 - DNA, 204 bp, Oryza sativa
  Clone ID: PAT_MRT4530_35556C.1
gaaacaataagcaataagatggggatatatttaacaatataatacacattaacattattattccttaatttccataaaatgaaaccatgattcggtagaaggataaacacaatttggactcctatcacactaacccaaacctgaatgaacctacttactgaaataaactttgaaaactctattgccaccattaatagacattaa

SEQ ID NO: 31229 - DNA, 338 bp, Oryza sativa
  Clone ID: PAT_MRT4530_35557C.1
tactggttttttttttttaggaaacccacaagtactccatacttgggatgcatgatatattttttttggatcgtttcaacaaaactgggtgacaaaatttcagtaaggggtgtacacacatcatccaggatccaacaaggaaaagtacaccaggcaacaaggaaaattttcatggtcgacgagagggtccatcttttgggcaaaaaaagcaacacactgcctgacgaagcctcaggtcgactcgcttttcggccgacgagttgtggcgaggactgcagcgcggaaaatcgcgtccagtacagatggccagtactcagctggtgcctgatgatgtgctg

SEQ ID NO: 31230 - DNA, 195 bp, Oryza sativa
  Clone ID: PAT_MRT4530_35558C.1
atggccggtctcaggatgaaggcgctcgcggtcgccgccatcgccgcgtccctcgtcgcgtcagcggcagccgaccacgcgccggcaccggcgcccgtctccgacgccgcccccgcgtttaaagaacatgagtatcgcgtactacatggtgacacttgtatgatgttgattgtcatctattggcctatcgtttaa

SEQ ID NO: 31231 - DNA, 222 bp, Oryza sativa
  Clone ID: PAT_MRT4530_35559C.1
aaaacaaaaaatgggggggcaaaaaaaaagccaggggcaaaaggagaccacaaaatcctttcggagggaaaaacagtctcaacccccacaggaaggccccaacaaataggaccattcccccccaaaactttgctaagcagggggctcattgcccaaggcataaaaaaacgggaacattcccgctcaaaactttgctcagcaaggggctcattcacttccccg

SEQ ID NO: 31232 - DNA, 1264 bp, Oryza sativa
  Clone ID: PAT_MRT4530_3555C.1
gcgaaaacagcattactggcctctcatttttttttttactggtgcacgtaacacaatgcggctgtgcgcacacacaatgctcatttggtgctccttaattatacaaatttctacaaagtataactaatacacaaatagcattcagctagctgagtttctacgtcaaccatataagcagttatacacaagttaaaaatattagactggctaaccacacacatgaagactccaaacaaagtggattcatgcttctctatacttcgtcaggtcgaaggttagggttctcgagcaacatcgttctgagtccctataaacaccaaccagcgcttcagctttgtcatagaaactgtccttcagcgatataacgatgctctgaaatccacatcctccattatcttgttcatcaacgcgctggcatgactttgatctgataaacccagcaaccttggcaacatttaaattatccagagcagcatcaacttcatccaatatgaagaatggggatggcctgaaactgtgaatggcaaaaagcaatgccagggcagcgacagtcttctcaccaccagataactgtcccatatctctaaagcgctttgtcggaggcatagctgtgtacttgattccatgtaaaaatggctcatcttcattttctagatttaaatatgctgttcctccaagtagatgtgtttgactttttgttaactccttatagatttggtctatgccttttgatatgtgatcaaaggcttccatgaacagctcataccttcgttgcttgacagaattgtacttgtcagctatctccagctcttcttttcttgctgcttcaaacttttccataacatccttttccttcctttgcaatgtttcatattggtcgagcgctttcaggtttggagcagtgtgctcaatctgagcaactagatcccctattttttttttgaactctgcctcaagtttgtcacgttcagaaagccgcatatcttgtaggtagttttcgctaagctgactgtagtcaaggattggtatttgtgaagatgatccagtatccattgcccacgcgtccgtaggaagcttcagttgctccagttcacacttctcatgaatctcccgttcctgtgatctaagttgcacaagcttcccttcctttgacttcacttggcgatccagctttgccaaagctgcagcaacactaccattcttctccttcagttcatcaatacccgtttcacattcatcagacttggatttccagtcttcagcc

SEQ ID NO: 31233 - DNA, 2955 bp, Oryza sativa
  Clone ID: PAT_MRT4530_35560C.1
atgtccagcaatagcgggggtagcgcgaaggagaaagatcctgaaaatgctccggagcttgtggcactgccgttggtccggaccctgaggcctgttcatgcagtgattgatcctgccgctgacccgagatcagcacagctgtcttggccgggccatgtagtcctcctgcctccatatgcaacatggcctcatcatgtgccgaccctgccaccagcggtgaatcctgcaaatccacaacaaaacgtggatgtggcggcggctgatgttagtcctgacgttggttgttgtgatgagaagatgttgccaaaggtagatatgctgtttgatggcgaaaaagaggcatacgatttctacaatgcgtatgcagagatggtgggcttctttgtccggagatcaacactctggacaacgtcaaagaacataatcactaggagaacttttgtctgctcgagagaaggttttcgggagaagaagaggggcaccaaagaagcaaagtgcccgcggcctgaaacaagaattgggtgccctgcgagcatgaccattagacttaataccaacggcaagtaccgtttgacagagtttgtaccaaaccataaccatcaacttgcaacagcatctacaatgcgtatgctgaaggctaagaaaatcaggcttaaagcacgggctgcgagagaaaatctggttgatgatactgtgaggacgccagaatttgggagtgaagatgaggcatatgaattttacagcatgtatgctgggaaaattggtttcaatgtgagaagggcaagcatgactatgaatgctgaaaatgtcatcacaagaaggatgtttgtttgttcaaaagaaggtttccgtgagaagaaaagaggggcaaaaagagtaaagaagcctcgcccagagacccgaactggttgtccagcgtgtatggtcattagacttacatctaatggcaaatatcatgtaacagaatttgttaccttccataatcaccagcttggtgcaacagtaccttctgatcttgtggcaacatcacaaagtacagaaactggtcaagatgatggactggatttggttgatggttcagctgatgctaatatccacaggcaaaatcttataattggaaatatcatggcaacatctctagaagtaaaatctgatgatgatgggaacttgacaaactttctatggtcagattcaaagtctatcatggattttgtccactttggtgatgtgggctatggtaggccacttgctttatttacgggtgtgaatcatcacaagcaaactgttatctttgctgctgcattgctttatgacgaaagtgtggaggctttcagatggttgtttgatacttttaagatggcaatgaatggaactcagcccaaaacattgttaactgatagatctgatgcaataagtgaaggtgttgcagcaagttggcctgcgacagcccatcgttattgtgtctggcaaatttaccaaaacgctcttcagcagttgagtcaagcatttcatgggtcaaaaaccttagattactgcttccagaaatgcctatttgactctgaagatgagcctgagtttttgacagcatggagagaaatgttggaaaagtatgacctagaagataatcaatggctagcagatttgttctctcttaaggagaaatgggcactaccatatggccgcgaggcattttgtgctgatatgaaaagtgtccagcagaaggagagcttgggcactgagcttaagaaacacttatccctagaatttgaccttttgagtttcttcaagcagtttgaaagagtattgtgtgaccgccgatcaacagaattgcaggctgatgtggatgctagtcagagtacaaagaagccaccacctatgcgagtgttaaggcaagcttccaatatatatacacctgctgcctttaaaatgttcgagagggagtttgagttatacatggattgcatgttatacaactgtggtgagatgggcacaatttctgagtatagggtagtcattgaggacaatccaaaagatcattttgttaaatttgattcgcttaattccatggtaaactgtagctgtaaagggtttgaattcgtaggcattccatgccgccatatgctaaaggtacttgacaccaggaatatcaaggaccttcctcctcaatacttcttgaaaaggtggagaaaggatgctaaatcaggatctccaaactgtagttattcattcccacttgatggtgatcctcagttggttcaaacaaaacgttataacttgctgtgtcggatgttcagcatagcagcagctagggctgcaacctctatagaaacttttgcatatatggaaaaccaatcaagcatatttatggaccaagtagaacaagctcttcaaacaaggcccccagacatcgctgccatgattggggctcattgtgatcaaacacaaaatccaattgacaatatcgtcgcaggaggtctacacagccatactaatttcatcaatggccctgctgatggttccctaacctttccatttacattgggtgctggtgtgttggattaccgctagatagtgactaatttcttacaagtactagccacaaggagctgcgaattctgtacagtgatcttttcgtggaaatgcattttatatatcaccagaaaattccaggttatgtccctctgctgacccacttcctcatccaggtgattacatggtaatattgtgcatcttgctggctggcaatttgacaatgcttacacattataccgtagagctgagaatagtgatggctagcccatccattgtacatgtaattttcagataaagtttagagaatgatgaaaagtttccatcggtgtatttactgaaacaatattagaaaatccatttggtcacttattagttgttattactaactaatagtcatttcaactcaataaaaaaaaaaaaaaa

SEQ ID NO: 31234 - DNA, 406 bp, Oryza sativa
  Clone ID: PAT_MRT4530_35561C.1
atgcagatgaagaagagtgagaccttctatggttttagctcgttcttttctctgaggctagctgccacggggacaaatggcacattgacccagacgccatcggcgtactggaagtctggaacttgggcactcgggtgcgtcctctttgcctctggggacgggtattacgcggcggcgctccggcgaggcctggcgcctcattcttgccacccgaatacagggccacgggggttcgttgtttccaactccgagctccctggaatacccgacgaccgttcgatcaagcccatgcggccgagccgcgtactgcggcggcgccatcaccggcggcccattgtagtacccttttcggattgttcctgcccttaacttcaaggcacgcaatgccagattgatcgaccgccat

SEQ ID NO: 31235 - DNA, 496 bp, Oryza sativa
  Clone ID: PAT_MRT4530_35562C.1
tttattcagtgaatgaagggcatgcttaaaactgggaatggtccaaccacaaagtatgtaaagaaatgcaggtttcctaaagatggttctttcgctaagtctctgagatatgtgggaagtatggtagccgatgttcatcgcacactgctttatggaggaatcttcttgtacccggctgacaagaaaagccccaatgggaaactgcgtgttctgtatgaagtcttcccgatgtccttcttgatggagcaagccggaggacaggccttcactggcaagaaaagggcgctagaccttgtgccggagaagatccatgagcgttctccaatatttcttggtagctacgaagatgtagaggagattaaggctctgtatgctgcagaggaatagaagaaataagattctcattctttttatttcatcaactcttctctcttatatctatggcttcttctgttgagacaaacaaatgacttatttatacaagggagactttttt

SEQ ID NO: 31236 - DNA, 578 bp, Oryza sativa
  unsure (1)..(578): unsure at all n locations
  Clone ID: PAT_MRT4530_35563C.1
aaatattttgcccggtacgatttattcattatttcataaggatctgttcgtcaatgcgaactcaaagaagtaaaccatctttgttggtaagtaagtatactgggtatgcattggataatggggaaaacctttgacgcacaacattttttgtgttgcacttgnccttccgaagccgtgaatgactgtccaatggttggtggattgctgactgctgtgcaattctccacgtgaggaccgatggaccacagcccacgaggaggtgttgtctaaggagccacatggtggtggaaacatgcaagtggcttgcaagtgtttgaaagctggcagcaggctgtgttggcacccacctgcacccaacctgttgtgtgagcatgttgaggacatgcactgtgcttgggatggccatgcctgcacactggtgtggtgatgataatncaggattgatgttgttgatgaaaacccattgaaattgccatgttgacctgtgctgttggtactttaagatttgngaatatgttttctcctatatttctgaggctgngcaaactcattttagataaaaaaaaaaaaaaaaaaaa

SEQ ID NO: 31237 - DNA, 334 bp, Oryza sativa
  Clone ID: PAT_MRT4530_35564C.1
caccattggggggggaacaaaggatttctttaaccttaactccgaaccccacatcacggctgttcagagctctaccaaattcctcatcaacaccagacttgagtttaaaactccccgagctacaatgtaggtaacacactttctcgaaagcttttctaacctccatgcccagagttaaacactccacctaacactagatgcccaagaccccccccccccaaaaattgcccaactcttaaacattgacgatgaccccccccttgaccccctgcaaacaaaaacctcttcgctggttgcacccgctctaccctgaccaaaaggagggttcttaaaa

SEQ ID NO: 31238 - DNA, 509 bp, Oryza sativa
  Clone ID: PAT_MRT4530_35565C.1
cacacgcgaggggggctgccatcaacctacagctagatcactgcatgaggcgctgtggaagctctccagtagcagcgagtgagatcaggacgcgcagccccgacgactacgcaggagccatccatctaatgggaacaccggtaagaaaagggctgcggcgaggggactcgtcggagacgaactgacaagagggagagaagggtcacacatgcggcgctgaccacaatcatacgacggcacgcatagctgtagcaccaggaggtctttcttgtgtacctctggcatcctatgcaaggcgtccgtgaacactcgacacactgaagcacaaaatgtgaaccgatctagaattgcctgaacatgctatggaagagacccatgtgatgagccttgattaagggcatccaaatgtggtacactagtcggccatgacgtcaacgagaatcgccaggataatgaagcaccccttgaaagggtactccgacagaggtccttgcctagcgcacagtaaa

SEQ ID NO: 31239 - DNA, 697 bp, Oryza sativa
  Clone ID: PAT_MRT4530_35566C.1
gcgtcaaacattagtaccgccaattatcacgactcccctttatttcttgatttttggtcaattaattggcagtcgttttggcgaaatgaatggggtcagttatatacaattttttgcacctggcttagtgatgatgacagccattacagcgtcttatgtaaatacggcctcatccttttttctaagcaaatttacccataattttgaagaactattagtttcttctctttcaacccataacattatttggggttatgttgtcggcagtatcgtgcgtggtgggctttcaggtattttagtcacgctgatttcattgctattcgtttcttaccaaattcattcttggagcattattctgttaactttattaatgaccacaattgccttttcgttaggtggcttaattaatgcggtatatgctaaatcttttgatgatattggtagcattcctacatttgttttaacgccattaacgtatttaggcggtgtattttattcaattacattattaccagaattttggcaaacactctcaaaatttaatcctattgtttatatgattaatgcctttcgctatggttttttaggtattagtgatgtatccatcgcttatagtttctcggtattaatcatttttattctaatactatactattttgctttttcattaattgaaaagggcgtgggattacgcacc

SEQ ID NO: 31240 - DNA, 653 bp, Oryza sativa
  Clone ID: PAT_MRT4530_35567C.1
atgtttattgcgtcagccgaggggcgggcgcgcggaccgggtccacgggaagtggggcccacgcgtcagccgctcggtccacggtggaccgggcgcacgcggctggcggcggtcggcgccccgcgagggcgcgcccgagggcggcctcgccggcgcggccgacgggagcggcgcgcaccagcgccccgatggtcgccgccggcgaccaacggcgcggcggagtggcacccgagagagaggagggaagggggaaggcgaacggcggtcttcggctcaccccgagacaacggcgacgacgagaacggcggacggagaggaagaaggtggcggcgcggctcgggatgacgacgacgacggtgctccggcggtcggcggacgaagcggagcggcggacggggtcggcggcgatgcggcgatgccgaaggaggggtcgccgagccgggaggaagagcggagcgacggcggcggcgaaccgacggtcgacggcgacggcggagagagaggagcacggcgctagcacgattccgacggcgagagcgagcggcgaacggcggaaacggaggaggagagcacgggcaacgtttttatagcgacgagagagggagagcgcggccggggagagaggaaacggcgcgcggaaatctcggccgcca

SEQ ID NO: 31241 - DNA, 963 bp, Oryza sativa
  Clone ID: PAT_MRT4530_35568C.1
atgatgtgtcttgccttgctcgttttcccactcgacggcttcgacttcaacgaagagcggccgaggggcgggcgcgcggaccgggtccacgggaagtggggcccacgcgtcagccgctcggtccacggtggaccgggcgcacgcggctggcggcggtcggcgccgtgggtcccgcgcgtcagcctcacccgcgggcgcgggcggctgacggccgggcccacttggcagccgcgagggcgcgcccgagggcggcctcgccggcgcggccgacgggaaaagcgcgcacccgcgccccgatggtcgccgccggcgaccaacggcgcggcggagtggcacccgagagagaggaggaaagggggaaacgaacgggacggtcttcggctcaccccgagacaacggcgacgacgagaacggcggacggagaggaagaaggcggcggcgcggttcgggatgacgatgacgacggtgctccggcggtcgacgggcgaagcggagcggcggacggggtcggcgacgatgcggcgaagccgacggagggccgggagggcgcgcccgaggggcggcctcggccgggccgcggccgacgggaaaagcgcgcacccgcgcccccgatggtcgccgccggcgaccaacggcgcggcggagtggcacccgagagagaggaggaaagggggaaacgaacgggacggtcttcggctcaccccgagacaacggcgacgacgagaacggcggacggagaggaagaaggcggcggcgcggttcgggatgacgatgacgacggtgctccggcggtcgacgggcgaagcggagcggcggacggggtcggcgacgatgcggcgaagccgacggaggggtcgccgagtcgggaggaagagcggagcgacggcggcggctaaccgaagcacggcggcgacggcggggagaaggagcacggcgcgagcacgatttcgacggcgagagtga

SEQ ID NO: 31242 - DNA, 1103 bp, Oryza sativa
  Clone ID: PAT_MRT4530_35569C.1
ggattgaaacactttgcatcacagaggcttgggttccccatccttgtgctctccttggtttgtcccctcgctaccatcgacctgcaggcgattgggctaaaacaagtagacttgtcgggcttggaaggtgatgtgggggaagaggaaatgtggcgaacaataaaagagttgccgggggattgagctcttgcacccgatggttacactggtctcttctttcaaacctgatggggtataatcaaacaagacttgatgagggctttggacaagtttttccaaggaaactttcaaaatttggacatgcttaattcgacaatgattattcttctttctaagaaggaggcgcccggcccttttgaaggactaccacccgatcagtctaattcacagcttctccaagttggctacaaaggttatggtgactagactggcaggctaaatgggagagctcattccttacactcagtccgccttcataagaggacgttcaattcacgagaatttcatgtttgtgaagggcatggcgttgctctgtcacagggggcacaaaccgatggtgttgctcaagcttgacatctccagggcgttcgactcggtatcctggccgtttttgctgaggttgctacagtacaagggtttcggggtgcggtggaggaggtgggtgtgctcgcttctcctgacggccatttcgttgtatgccgatgatgcggtgatcttcctccaaccaacggaacaagacacataggcaatcaaagcgattttggacctgtttagggctgcgacaggtctcaaagtgaacttcaccaagagcactatcaccacgatcagatgctcacaggagcatccgcgctcgtccagtccatcccgtgttgtcagctcgatcagttcccgatcacctacctcggcctcctgctctccctccgacagctaacaaagcaggatgttcagcctttgttagaccgtttgccaagaagttcgtgggctggaaaccaaatttcctctcgacgggtgatcgacttgtcctgattaagttagttctgttagctttactggtgcatcaactgcaacaactataagctccccaaacaagtttcaagattatt

SEQ ID NO: 31243 - DNA, 452 bp, Oryza sativa
  Clone ID: PAT_MRT4530_3556C.1
gccgagggtttttaatctctctcttttttttgggcgggctggccgaaggaggccgagtaattgcattaagatttggaagagtacaagttacagaaaaacagcaacagaacgctgttgaaaatagtaaatttttaatctcagtgtcagtttatcaacagaaagcgatgctgcattcacaagtatgatattttagggaatttgagaaggcatttcttagtggagtgtttgcaggtcgctttaaacaccattttgaataattcataccctgggaagcttactggattactaggagtcatgattgtttttatttgtcattttacctaaatgtgcataattgatctttttgactggatgcccatcatgggtatgtgctatcgaacttttataacctagttaggaaaagcagctataattcaaccgtttcaaacttgtattcattttgaatatgcgat

SEQ ID NO: 31244 - DNA, 2065 bp, Oryza sativa
  Clone ID: PAT_MRT4530_35570C.1
atggccgccaccaccaccatcctctcctccgccgcgcccacgccgctgaccgccccgcctcgcgcccgcgcgcgcgctcccgccgcccggaggcggcggctaagagcccgtgacatcctcggcgccgcgctcggcctcgccaatggcggcgccagcgccgcgctcgccgcgccgctgtcctacgaggagacgctgcgtctctcgacggactccggcggcggcggaggcggaggcggaggcggggagttcgcgctcccggacctcggcctcggcggggtgctcgacttcgtggcgcagaacccgctggcggcggcggcgggggtcgccgcggtggcgctgccgctggtgctcgcgcaggtgctgggcggggcgtcgaagccgtacggcgtggtgtcggcggccgccgcgtaccgggcgctggtggaggagcccggcgcgcagctggtggacatcaggccgcccggcgacgcccggcagagcggcgcgcccgacctccgcgaggccaagaagaaggcggccgccgtgccctacgacggggaggacaagaacggattcctcaagaagctgtcgctgaggttcaaggaccccgagaacaccacattggtcatccttgacaagtttgatgggaactccgagctggttgctgagcttgtaacagcgaatggttacaaagctgcttttgcagtgaaggatggtgcagagggacgccgaggatggctgagcagtagtcttccctggacagctcccaagaagggattcagcttgagcgatctaatcggggatggcacagatggtttgcctgtcacacttgggcttgctgcagctactggtttgggaatacttgcctacacagagatagagactgtgcttcagtttttggggtcagctgccattgtccagctagttgcaagcaaactcatatatgctgaggaccgaaagagaacccttaaacagatcgatgatttcttcaacaaaaaggttgctccaaaggagcttgttgatgaaataaaggaaatcggtcaggctctgctgccttctactggtaccaagagccaaccagcaatcacagaagctgctccagcaacagcagaagctgctccagctgccgccacagctaccgctgcaccaccggcagcaccggtagaagagaccagtacagaggcagctcctgcagagccgacacctctttcaccatatacaaattatccggatctcaaaccaccatcctccccttcgccactggcaccggctgaggcgactaaaaatgagtcggaatccgagagcgcagcgaccgaatctgcacctgcaggttaactcagcaccagtagcagaagccgccccagaggcggcgccacctgcagctccgagacctctttcgccttacccgaaattatccagacctcaaaccaccatcgtcgccttcaccatcggcaccataggcataagttgctgaagaccgagttcatcgttgatctcgacggcatatctgtacaagatatatattaccaggcctagaggagatggaatcgagctgtttatatgatatcaaaaggaagagtgttttgttgtatcaatatctagtccgatccttatattatctcattggggggcaagttttttttaagtacatctttgggtatggtgtatccagttgatgcgttctgatttttcgttttgtttttcatctttttgcacctgtaaatgtgggatttgatctcgacggcatatctgtacaagatatatattaccaggcctagaggagatggaatcgagctgtttatatgatatcaaaaggaagagtgttttgttgtatcaatatttagtccgatccttatattatctcattggggggcaagttttttttaagtacatctttgggtatggtgtatccagttgatgcgttctgatttttcgttttgtttttcatctttttgcacctgtaaatgtgggatcactagcactaaaaagagttcatgtcctgtactatacttgacatgcttgacgtgtaaatcatcagctcaaatggatgacaaaacatcctctgcatagagtccagttgtgaagc

SEQ ID NO: 31245 - DNA, 1254 bp, Oryza sativa
  Clone ID: PAT_MRT4530_35571C.1
atgaatactcgctatggctttgagaagaaagttagcagcctcaccagcactccaacagttgtaaggagatgggttcccaaacacccacctccaaacacagccataagcacggaccaaaataagcgaaagcacatatatgatggtgtgaatgggcacttgcatccctccttgataacggaaacatcaaaacggttggtattcggtactcccaacccaccacccttaatctccataaatacggtgttactcgagagttggcatgagctggcccatagatgccaccgcaaccggtatgaacagtggcagtgtgcaaacaccataaaacctcagcttggcctaccggccgccgcccgccccatggacagggcctacgacaagcacaaattgattactctatccgacttgtttggcgagcccacacgagcatcacgccgcggtgcgctgcaagcctgcaacggaataatgcaaagcgaagggaagcggacgcgcgccgcgtacgggccgcggggcgtggcacggcacgatttctcgaaagaggcgtgcgaggcagcgaggcgcgacgttgcgggcgaagtttacagcaggctgcagcgacacgagccggcccggcgccgcggtgcattggcacgcgggcacatgacgtgccggtatcttgtgcgggggagatcaatggatcatcaactggatccaaatgccaaactccagtctcagaaagacaaggggaacatgtccaatctcgatttctcgaaagaacacaggccgaatctaactcatattcctaaaccacaataccggatatctcgaccccaactattaaaactggtacaatttaactttctgattggttttgaagagcggtttcgctggcgtgacgcctacggtggcggtattgacccaatcttactttcaccgcactcttccccctcggccattgaagggcggcgtcaggtgagaggacaggcgatggcgccctgtgtcaacaagcagtggcgcgtcgtcgtgcaggcggagccacgcccctaccacttggatgtcgctgccatcgctccggccgtcgcggagtttcggtgcaccagcttctaccgcctcagagcatgtgaccaggtcaacactgccatgtggacgccacgtcaacgaaaccaccatccaaaaccaccgagggagtcaaattacaccggttttatgggccgcgatatccggtattgcagttcaaggatacaaatcagattcggacgccagttaagggagtcaaag

SEQ ID NO: 31246 - DNA, 774 bp, Oryza sativa
  Clone ID: PAT_MRT4530_35572C.1
atgaagcagtggatggtcgctcgtcgcgctgcactcctcggcgccgtcctcctgcttcccgcagccgcccgcgccgtcgccgtgcccctccccgccgcgggaggaggaggaggaggaggaggaggagaagcgggagtgcggcggcgcacccgcggcacctggtgtgccgctccggacgcagttgctcatcggggagaagatcccggcgttggcgcccggcgaggtgctcgagccgggccacgcctacttcctcctccccgcccacctgttccactccgtcctctccttcgtctccctcgcacatcctccctcctcctcctcctctccgcctcctccgcctccgccgccaagaagcagcagcagcggccgttcgagctcctccgcaccgcgtccggcacgctccagatcaagttctccgacgacttcctcctcgccgccgacgacaaggtcgccgacctcgccgccgccgccaccaacccccccgtgctgcgcggggacaagaagctggagaaggagtacgaggagctcgtcggctacagcaaggcgcggcggtggtcgcccaagctggacaccatccaagaagtcgtcgccgccgccgccggtgacaccgccaccgccgccgccaccgccaccaccaccagaagatcctccaaaggtcgaggcctccccttcctcggcaggctcggcagccgccgccggcgagaggccgccgccgccaccaccaccaccaccctcgtctgcggcaatggcggcgcggtggcgtgctccggctag

SEQ ID NO: 31247 - DNA, 1478 bp, Oryza sativa
  Clone ID: PAT_MRT4530_35573C.1
atgaaggtgctgtgctccgcgtgcgaggcggcggaggcgcgggtgctctgctgcgccgacgacgccgccctctgcgcgcgctgcgacctccacgtccacgccgccaaccgcctcgccggcaagcaccaccgcctccccctcctctcctcctcctcttcttcctcctctccctcccccccgacctgcgacatctgccaggacgcccacgcctacttcttctgcgtcgaggaccgcgccctcctctgccgcgcctgcgacgtcgccgtccacaccgccaacgccctcgtctccgcccaccgccgcttcctcctcaccggcgtccacgtcggccttgacgccgccgccgacgacgacgacaaacaccccccacaccccttgtcgtcgtcgctgccgcgcaacacggcaccgcccccgcagccgccgccgaagcgcagcccctcgccgatctacagcgatgacgacgtcatcgactgggccaccggtggccacgacatcggcatcaccggcaacctgcccgactggtcgctcgtcgacgagcagttcaacacccctgcgctgccgccggtggtgaccaagaccccgccgaagcgggcctcccgtggccccgtcacggccggcaccgccgcggcggtgttcggcaacctcgccggcggatcgccggactggccgctcaacgagttcttcggcttcgccgacttcagctccggcttcggcttcgccgagaacggcacgtccaaggcggacagcggcaagatcgggagcatggacggctcgccgaacggcggcaggtcgtcgtcgtcgtcctcctcctcctccgccgccgccgccggcggcggcggcggcggccaggacttcttcggccaggtgccggaagttcactgggccgtgccggagctcccctcgccgcccacggcgtcagggctccactggcaacgggacccgcgctacggtggcggcgccaccgacgccagcgcggtgttcgtgccggacatctcctcgccggagaaccccttccgttgcttcgccgccgccgccgccggtgaccataccatgaaacgccggaggagatgctaattaagaagcgcggcaacaaaatgagagaaaaaaaatgaaagagagagaaaatgttcgagttggtacatgtagtaggagtatttgagtgtgagattaattagtggtaatccgttgaagtaaattgatgtacttggctagctagcctgctactaggtgatcgcttactctgtattagtggatataatagctttggatctgattaattaggggctgcaatgctgcatttgtgtaacgttttgtgttagttactactctcccccgtccctaaatataagtgattttggctgtctaattaaaatcccttatatttagagacggagggaatagaaattaaggacagtgaaaagaaaacgaaataaagtggagaaaattgcaagtcaatttgtttcaaaaaaaaaaaaaaa

SEQ ID NO: 31248 - DNA, 564 bp, Oryza sativa
  Clone ID: PAT_MRT4530_35574C.1
gcacgaggccactccaagcaccaagcagcgcctcatggcggcggccgccggggacggtgaggacgcgaaggcgacgcggcagccgcagcagccgccgctgtctgggcccggcaagccaacctccggcccgtgacaaagtaagcccccgcagcttgaaaagaaaggtttacatgttacaaaacaattactgcatcatttgagctcgatgcaatgtttggttccttgcttagtagtaggtgatcctagattgggaggagataggtgaaatggagaatgctaagtggcctttggaaattcagtgctcgtactcgaaaccattctgccaaaggtttagatttttgcgatcaatgtatgatgatcattcccacgagcgatttgggtttttttgttgtcaccaaaacccatctttgagacatttgcatcatctctgtatttctcacattttagaggaaagacggtcacccacccagctttaattgaaagcataagagttcatgtatttctcacattttgcagtgctgagctactgatatgcacttttgccctccagattactgtgatcac

SEQ ID NO: 31249 - DNA, 198 bp, Oryza sativa
  Clone ID: PAT_MRT4530_35575C.1
tttttgaccttgagatgcgagtgccgaaagagcttctatcggaatgtgaagctcttagaagcttcaaatagaaatcttcttgcaacataactgatgctcgaccgggacagaccggcaacgtttaaagctttgtttcgaggcatgcctagggacttggacacttggtcatgacaaaaggggggaagctccggcgttggg

SEQ ID NO: 31250 - DNA, 441 bp, Oryza sativa
  Clone ID: PAT_MRT4530_35576C.1
atggcaccagccgacggagtagtgccgggtgaggaggcaccgaccaagggcgcaccagccgagcaggcgccgcttgccgccgtgacggtgttgttcggcaaatgtcggccgaagaggggaacatacggttgctcaacctccatggagggagccaccgtgagaggtcgcggtttctcaacctccgaggagggagccaccgtgagagatacccaagaaaaacgcaagctgtcgagcgagggacaagcttatgtggagtcgtggcactcatgtttgggtaacaaagacagcaaaaaacccgacggtggcggtggcgagagcctcagcccagtaggacggaggcatagaggcttgtataagaagggaaatggaggacatagtccgaagactctggatggcggctggaccaatatgaccgagacgacggtgccaaagcatggatga

SEQ ID NO: 31251 - DNA, 423 bp, Oryza sativa
  Clone ID: PAT_MRT4530_35577C.1
atgagctcgcctgacaaggagtatgcacaagaggcctgggtgttccgggtggacatcggcataaccccaatcccgaaacatctaggcctcgctttgcaacgggctagacaaactattggccattttatgggtccatgcaaccatgagataactgccatcatcactatcttgctgcagccggccggtgatatctgcaccgaagtgaagaacacagtgaacggtggtggaagccaaactgaagcctcagctttgctgctcacctcgctggtttccggcatcggaggatttccaacgccggcgtacgtccgtgggaggagaccatccaacggcaatgagatggtcgtcggccatggcggtcggtggcggtggggggctaaaggaaagaggggtccatttgtcaaaatacatggtcactaccaatga

SEQ ID NO: 31252 - DNA, 345 bp, Oryza sativa
  Clone ID: PAT_MRT4530_35578C.1
ccggccggtacatcaattaaactgaatattccattaaacaactgctaataaaatatgaaaaggccagtgagttgggaggaggaccaatgagtaaccagtcccccgtccccaatgggggcaatagccgaagtattaaatttgcccaccgactgcctgcttttgcccacctctcctccaattaaacccctcgcctcctcttcataccacttctccgcctcctcttcctcccatcgacgacccaacctactcgtaccgacgactttgaattgagagtaaacatagggggggataaccacgttggacatccaacataacgatgagaatattgggcaggtgacacatcga

SEQ ID NO: 31253 - DNA, 501 bp, Oryza sativa
  Clone ID: PAT_MRT4530_35579C.1
ttttctttggggcattcgtgaggaaacctcttctgcaaagtgcatccgattggaaagtgccaactactttcatatatggccaacaagattggatgaattaccaaggtgcacagcaagcacggaaagaaatgaaagtcccctgtgagatcatcagagttccacagggaggacattttgtgttcatagataatccttcggggttccactccgcggtcttccacgcatgccgcaagtttctatctggagatggagaggaaggcctctctcttcctgaaggcctaacatcggcctgagatggcgtctcgtacgacaatctcatcatagcaacccagcacgattgatggaaaatactgtgaccgttgtcgccgtcttgtttgtgtttacacgagttgcgtcaacatgtatcatgtagatatatatacacatgtgtacaattgtacaagtagtgagaaacacacgcattgctatgaaatacgaaagtcaatttccatgttacattag

SEQ ID NO: 31254 - DNA, 684 bp, Oryza sativa
  Clone ID: PAT_MRT4530_3557C.1
atgaagcggcacgggtggtgggcggacgacaagggcgcacggcggcgggcggtggacggagcgattgcgggcggtgggtggagcgatggcgggtggcgggtggtgggcggtgggagcggcggcaggcggtgggcggcgggagcggcggtgggcggaggggtggcgggcggtgggcggagcgacgctgacaacgccggctcccctcccctctccctctctactcttggctcttcctcttcttcctctcggctctcccttgtccttgcgcggaacggcagcagcggcaggccacgggcagagcggaggggcgagcggagcagcggcgacctcgccaaggacgtcgcgcgcacctccgacacgagaggagcggcagtgcgcttggtgcgcgactgctggcgggagagggttggcggcgcacaccagtcgacgggtgggagggagaggagcggcggcgggagggtggaagaggagcggcggctcacgggcctctccgcccaccgcccgctgccgctcaatttcgccccgccgccgctcggctccgcttcctcccaccgcccgccgccagccgctcaccgtccaccgccgcccgccgctccatctaccaccggctgccgtgctgcttcgctccgtcgctgctccgtccgtcgcccctcagcgccgccactcgccttctctccgtactaa

SEQ ID NO: 31255 - DNA, 309 bp, Oryza sativa
  Clone ID: PAT_MRT4530_35580C.1
atggcactggaccacgactccgccgacgatagagagctcgggcggctaaaccgaaggcacctacacgaagaggacaacgacgcgaactcaccggtgcaaagaaatacgacgaacgacgaccggcgacgagctccgacagcggcacggctcggcttgatgtcggcggcggcgctcacgcgagatgcagcagcggcgaaggggcggacgggatgctcctccacctggcgaacccgacggtggcgacggaaggcggcagcggcgaccacagctgcggcgcggctgaagcagcgacggcggcagcgacgctag

SEQ ID NO: 31256 - DNA, 302 bp, Oryza sativa
  Clone ID: PAT_MRT4530_35581C.1
catccaatatttggtttaggaaacattaaacccatcagagtatcaacttaaaccttggtcgataaactccttacaaacattgggggaggcaaaattttgaaaggtttttttatggggggagaaaaaatttgggaagagttatttaagggtcggatagcatcccaaacaacattaagtcccgaaggttgggaattaaacaaaaattgtcgggggggccgcaggcccagggtcaacaacaggagctgatccggctgccaaaaaggtctccttttcgggggttgaaccggccgttggataggggt

SEQ ID NO: 31257 - DNA, 210 bp, Oryza sativa
  Clone ID: PAT_MRT4530_35582C.1
atgggtgatggcggaagtcaagctgggggcgcccctcttccgtgcaagcaccatagaggtcgtgaggaagtggttgaggttgggctgacgaccgcgtgctgcccaccaccggcccggatccgctaccttctcctttcacatcatcgcgaaggcgagcacgcagagaaggggccagaggagcaggtggtcgctttctcccgtagccagtga

SEQ ID NO: 31258 - DNA, 273 bp, Oryza sativa
  Clone ID: PAT_MRT4530_35583C.1
atggccgcaccctcgacctccacccccgcgccggcctcctccgccttccccctcgccgccgccgccgccgcgtgcttcccccgcgcctcctccagcacgcgcgctctcgctctcgctctcgccctcgccgagcggcaccggctgtccgaggtgggtggcggcgaccgctcggtagccgctggccgccgctccttccaaggcctcattcccgcccacgttctctccgccggcgatgatgcagaaggagccgtatgtgcactcttcttctcttga

SEQ ID NO: 31259 - DNA, 139 bp, Oryza sativa
  Clone ID: PAT_MRT4530_35584C.1
tcctggtcgaccagcgtccgccattatgcgcgaggtacgcggggctcgccggaaaacacagcaaaatagaaagatctagtgtccccatcaatgaaaatcattctcgactttgctctcctttctattgctgcatgcaggg

SEQ ID NO: 31260 - DNA, 321 bp, Oryza sativa
  Clone ID: PAT_MRT4530_35585C.1
atggtgctcaccgatacgacaaacgacgtcggacgacggacggcgacgagcttgtgcggcggcggtggctcggtcgacggcggcgacgggtctccggcgaccggcgacagcggggagaggtcgcccaggcttctactccaccgtgcgcacctacggcggcaacgggaggcggcggcgacgacgcacgcggtggcgcgaggcggctgctcgtcggccggcgacggcggccgcttggacggcgtggcggcggcgctacggagcactagagaacacgggagatggggcaaacgaaagaggacgccaaggggatgctttatatag

SEQ ID NO: 31261 - DNA, 249 bp, Oryza sativa
  Clone ID: PAT_MRT4530_35586C.1
atgcggggcgagaaaaatctcactggctcgggagagccgattcggctagccttcaacggtaaaactctgcccgtgcactatgaagcaaaccaaccaaacacaatatgtacggcaaggctagcaagctgtttcataaaaccacattatcaacaaaatgggtgcatcgacgagatagctgttccatgtatgaggcagacttgggagcttcatcctaggtgggacaaccatgatgccacatccatatcttaa

SEQ ID NO: 31262 - DNA, 1020 bp, Oryza sativa
  Clone ID: PAT_MRT4530_35587C.1
atggaggagaaagacaataatgaatgtccgtcgtcgttggatcccaagcttgctcctctgctgctgttcggcggcgacgacgacgacgacgccaccttcatgtacagcgtgcggacgagagccctgctgccgaggaggtcgacgacgacgacaacatggacgccacgacgagagcccaccggcggtggaccacggcacagggctggttgctcatggcgccgcgccgcggttcgccctcaccgtgcgcgacgactttcctatgggaccctttcaccggccgccggatcgccctgcctcccgaccacgacgcacggcacccttctcacccacagctgcgaccggatgtgcctcctgtcacgccgccggcccacggaccccggctgcgtcgtcgtcgtcgtcgacttcgacgacacggtgctctggtattgccgccccggagacctccatggggtggtgcatcactacctgcagcccgggacgcctcaccacgagcaccgtgactgcgtcggctgggcgataggaaatcttacggcgatcgatggcaagttctacaccgacttcaccgaccacgtcgccgtcctcgagttctcgccggagcccgtgttcaccgtgaccgccgtcgacggcgaccacggatgcccagcagggtacacgcggctcaccggtaacttggtagaatcaaacggggacctgcaccacgttttcttctctcaccccatcggttgcagccggatcgttgcgcgcgtgagcgtttacaaacttagcgtggcgacgcagaagcagagatcggcgtgggtgaaggtggattcactggatggcagagtattcttcgttgggatagacagcttgggagttggagcgtcacttgatgcaaaagaaaccggcttgaaagggaattgcatctattactggggtatcaatggcaaagtgttgaatgtatacgacatgaaacgaggaactacggttgtgatcaatcccggtgagaatcttccgccgcaagtcttgatgcctacccgatga

SEQ ID NO: 31263 - DNA, 320 bp, Oryza sativa
  Clone ID: PAT_MRT4530_35588C.1
gcgtattatttaaaggcgagagtgagagagatggtggagagcccggcgatcgactctgcggctggccggaggacgctgacgcacagaggagactgataggctgcgcgactcgtgcgcgcgggtgtgctgcatttcagtgtatgatgcacggcgtgccgttcgagctacaggccgagatgaaggccatggtgcgcgcgctcttagacctgcccgacgacaccaagagcacgaacgccgacatcatcacgggcagcgactacaggctcgccgggacaggcaaccacggttacgagggctttggcctatgacgacgaccgcgc

SEQ ID NO: 31264 - DNA, 363 bp, Oryza sativa
  Clone ID: PAT_MRT4530_35589C.1
atgccgatgcggtggtcaacagcgagatgtggccagatctggtcttcttctctccctctcactgccgtcatttgcctctccctatccctctccctctctcccatcgaggtggtcaacggcgagccaccggtggcgacagcggcggcagatgaggacgaggaggtcgccggccgccggctgtggatgagggcgagggcaaggcgcggagggagccgcgtcccctgcgaggcgccgcgctcccctgctagggaacagatcagcctcaaaaagcgacgggaggcggacggccgtgaggagagacacgggttgaggagggcactatttggggagtgcagcgcaggccggtgggagaaatgtgggtag

SEQ ID NO: 31265 - DNA, 245 bp, Oryza sativa
  unsure (1)..(245): unsure at all n locations
  Clone ID: PAT_MRT4530_3558C.1
aaaaaaccaacccaaccgncgccgcatcgccctcgttagaacgatgaccgcgtcggcgctgcaccagaccaccagcttcctcggcaccgnccctcgccgggatgagctcgtccgncgngtcgggactccggtggncgcatcancatgcgncgcaccgtnaagagcgcgccccagagcatctggtatngacctnaccgtnccaagtacctnggnccgttntnggagcagaacggcatngtacctga

SEQ ID NO: 31266 - DNA, 744 bp, Oryza sativa
  Clone ID: PAT_MRT4530_35590C.1
atggcggagagagccggcaaacaagaggaaggacgaccgacgcggggcgccgcgccgccgccaaagcctagggtgaaccctagttttttcgcgagagggaggagtgaggaggggagggagcgattctggggaagcagtggtgaccccatcccccgcaactccgcgagttgcacgcgcgggtgcaggcgcgggtgcagcgagcggcgggggcggcgtctcggcgacgagaggagcggcggcggtggctccgaggaggagccgcgcgaccagcggcggctgcgaggaggtgcggcggggaaggtggctccgagtcggaggagcaacgggggcggcgtctcgacgatgaggttgaggtgcggtggcggcttcaaggaggtgcggcggggaggtggctccgagtcagaggagcggcccaggtgcgcggccgtcgagctcgagtcgccgccgcttccgcccgctaccgccgatcacgcccgcatctgtcgggccttgggacggcggaggcccgcagtgctcggcgacggcgacctcccctcaaggacggcgacatcccctcccctcggcgacctcgacctcaaggacggcgacctcccctccccttggcgacggggacctccggtttggaggaggccggcagcagcaccagcagtaggcagtagcagagggcagcgccccatggcgcccagcgtggtcgcaccgagctgcccgtgtggctacgccaagcccatgcccatgctggcctag

SEQ ID NO: 31267 - DNA, 189 bp, Oryza sativa
  unsure (1)..(189): unsure at all n locations
  Clone ID: PAT_MRT4530_35591C.1
ctggcggcgaagcagcgctcgttctatcggtgagcctcctggtggtggccgtggcgagcgcctgcacctactgcccggagccgccgacgccgaagccgaagccgccggcgccgaggccgccgacgcccggcggtggcnccttggcctgcccgatcgatcgcttaactgaacggtgcccaactgctcggc

SEQ ID NO: 31268 - DNA, 698 bp, Oryza sativa
  Clone ID: PAT_MRT4530_35592C.1
atgtacaaaatgagcaacgaaagacttcccccaagtgataaccgcaggggcgaagctagggaacgagaggaggcctggctcccccaacagttgccggagctggagctggtccagctgatgcggcggtgctacgcactcgtcacggcatgcctgtggacgcttgtggcatctaacgtggtgttctggtggcgcagtccgcgctcggagtcggaggtgggaggcctatggcacaagcaggagctcgtggcgccactgcggttaaactccggcgcatgctattctgctccccctccgcagcccatcttgtttctctcctcacgggagtgccacagatctatctatactggccgccgcctcgcgattgtcttctccatctcgctcaagagcctgaccaagaagggcttgtcgatgtcgtcggtgctagtggcggcggtgatggctggggtgttcttctcggcgctggtgtcgacggacacggcgcagcagatcacaaacgtggcagcggcggcgggcgccgatgacaaccgtgggctggtgctgccgccgcccttctcaccctcctccttcgtatgccaccttgcgtccaatcttgtcacccaacatccttgaccgaactgaatctcaactcctcccttgtcatatggcatcccgatcgcgctagacctctgtttctccctgagcatcctagtcctcgccat

SEQ ID NO: 31269 - DNA, 369 bp, Oryza sativa
  Clone ID: PAT_MRT4530_35593C.1
atgacgtgtgccattcctctcctcttctccaccgccacagcgtgtgcgcctctcctcctcttagccgcggccctgtgcgcccctactcttctccgctgcatccaacgcctccatctccaggatggcggattcattgccacgagctggggagcagctcgatttggcttccacgagcttggaggcggccagctcgaccacgaacttgagggtgccctcctccactttcctcttcgacatcgtagcctctccatcgctcccttggcctccacctcgccatggatcactggctacggcaaactcggggcaggatcaggccgtgaggtcgagggcgacccgatttatgcggctgctgggggaccaccacgatga

SEQ ID NO: 31270 - DNA, 420 bp, Oryza sativa
  unsure (1)..(420): unsure at all n locations
  Clone ID: PAT_MRT4530_35594C.1
ccggttttcgcttgcccngtaccccgggcgggtggtcctcctgctcagtcctggacgagcgccctctgctcctcgccggcggcgtatcgcgccggcggtgtatccggtccggtcgtctggtggtgtgtcctgcggggtgctgctgctttcgctggttctcgggatcgctcggtggtttttggggggtgtgtcggtggcgtcggcggtgctggttgggcggggggctattccgcgcgttgtggtggctgtggtggtggtggtggtgcgggcggagtgcgcttgctgcgggctgngggtggagtgctctcttgcgttcgctgccttcgttcgggcgcgttgcggntggcggtggctgtgctgtctgtgcggcttggcggtgccggaggtgctcggcgttgcctgcggcggtgccgtgggcga

SEQ ID NO: 31271 - DNA, 319 bp, Oryza sativa
  Clone ID: PAT_MRT4530_35595C.1
aggggctcgccgccgcggcgtcgctcggcaccgccgcgtgggcggccaccgcgctggcgttcggggtggcgtgcagggagatccacgacgccgccgcggcggggcccggcggcgccgcgcgcgggtggcggatgcgcgcgctggaggggctcatcgtgacgctggcagtcacgcagcttctctacgaagctgctgctgcacgccgccgacaccggctagcgctgctgactcgtctgcgtccgcgacccatgatcatctcctatcggagttctctggatcaatttgatttatttacaaatattaataacggtgacttgtt

SEQ ID NO: 31272 - DNA, 657 bp, Oryza sativa
  Clone ID: PAT_MRT4530_35596C.1
atggcgtgctacttgatagggcagacaaataagaaaataagaaaacaaaaggtgctctccggcggaaggagaggggcctctcttggagctcttcgtgttgagctcgtcgtgctcggtggagtcggcggagacttggaggccgatgcggcgcagtggggacggcggcggcgcggtggagaggcgaggggcgccggcgcggtgtggggacggcggcgacgatttgtcagggacggctgctggtggaggggcggcggcgcggtggagaggcggctaatcgtggacggcggcggcgcggtgtggggacggcggcgaatcgtgggcggcggcgcagaggagatcggcgaggcggcgctgatgacggcggtgacgatttgtgagggacggctgctggtggaggggcggcgcggtggagaggcgaggggcggcggcgtggtgcggggacggtggcgaatcgtgggcggcagcgatgatggcgcggcgcggggagagcgagggagcggcgagccggcaatgatagcgccatgcggttttcgtgggtgggagcggtgtgcggtgggaggcgcggagcagagcctcctgctccacccactctccctgccacgtggtggctgggtgagggcctcagggcagcgcgcgccgagggcccaagggccgtga

SEQ ID NO: 31273 - DNA, 1775 bp, Oryza sativa
  unsure (1)..(1775): unsure at all n locations
  Clone ID: PAT_MRT4530_35597C.1
atgtggaaagggttcctcagcaagctgccccggaagacctcggcctctgggaggggcgccgacctcgactccggccagtgcagcaatggcgctgggaatgggaacccgatacagcgcaccagcagctgcggcagcatcccatctggccgctccacttccaccatcaagcgcatgtcatccgccatcttcccgtccagcgtcgtggctggtattgagccacttgtctcgttcaaggatgtccccaactcggagaagcagaatctgttcgtcagcaagctgaatctgtgctgtgctgtctttgacttctcggatccgaacaagagctcggcggagaaggatatcaagaggcagacgttgttggatctcatagattacgtggattccagcagttcccgtttctccgaggcggtgattgctgctagctctaggatgtttgctgtcaacttgttccgggtgtttcctccaaattacaggtccagttcatctggcggcggcgagggtgaagaggaggagccaatgtttgagcctgcatggtgccatctgcagcttgtttatgagctgctactgaaatttattggatcctcgtccctcgatgcaaaggtagggaaaaagtactttgatcactccttcattgtgaaactgctgaatcttcttgattcagaggatccaagggaaagggattgtttgaaaactattctgcacaggatttatgggaagttcatggttcaccgtccttttatccggaaagcagtaagcaatatattctaccactttgtgtttgagactgaccggcataacggaattgctgagctgctggaggtatttggcagtgttattagtggctttgcgttgcctctgaaggaagaacacaaaatctttctttggagagttttggttcctttacacaaaccaaaatcagttggtgtgtatctccagcagttgacatattgtgtgacacagttcatagaaaaggatcccaagcttgctagctcagtaattattggtttgctaagatattggccaataacaaatagtcagaaggaggtgatgtttctgagtgagattgaagagatcttggagacaatcagcacggcggaattccagaaatgtatggtacctttgtttaggcggattgctcaatgcatcaagagctctcacttccaggttgctgaacgggcgcttttcatatggaacaacgataacgttattagcttgattgcacaaaaccgccaaatgatcatgcctatcattgttccagcattggaacataatagccagaatcattggaaccaagctgtcctgaatctcacagataatgtaaagaagatgttttctgagatggatgacgtgctcttttcggcgtgcctggtcaagtacaaggaggacgaagaaaggcaagcttcactggaatcaaagaggaggttaacatgggagaagctagaatcagctgcttctttccagccagtgacgggccatacagccgtcctggtaggccgccaaccctcagcaaatttgattgccacccttatttagcatgtgttcagtggaggtgaaaaattagcatgtgttcagtgaaggtgaaaatggggttcttcactttctggtggatgctcaccaactgaacgacttcagacttcactatttttcccttatttcttttttatgtctgtattaagtaaaggcagtgctggtaaggttgtaacctatttttcgtatgttttatggctctggaanggcaaagcatggtatccgagggtgctttaaaactcctttac

SEQ ID NO: 31274 - DNA, 191 bp, Oryza sativa
  Clone ID: PAT_MRT4530_35598C.1
cttccggcttttatacatttaattacatgttgggagaacttaatggtatggccttggatattggcaccaaaattgaaaggcaaaataaatcacttggatgcttttcgggtgatgaatgtagatgaactcgaacttttagagttaaacggggcataaccaaacggggcacgcgcggttatatgggcaaaatg

SEQ ID NO: 31275 - DNA, 495 bp, Oryza sativa
  Clone ID: PAT_MRT4530_35599C.1
atggcgaaggagcgcttctcacttgaaagagtaatccatgatatggaacataaacttctttcaaagattctcactatacaacaggaattaactgagattaaaatgcatgacaccctaccaacaagggtctacaatctagaagtagactatacagatgattatattctaacaaaagaggacgaagaggtcctacattttgtgaggaatagctacatttgggccacaattgctttaatagctgatattccactcgcaattaatttcctactccccaatgtgaatggaggatggttatatgacacggtgatcgatgcgtatggttacaccgccaacatagcaaatcataatgcaggagtcatcacaaccttccaaagtaacttattatttgatgattttgaagacttcgattcaagatttgatcatcattgggtttcacaagttggcaagatttgtgttgtgcgacacatggtacattacacacaccttatgaattaa

SEQ ID NO: 31276 - DNA, 551 bp, Oryza sativa
  unsure (1)..(551): unsure at all n locations
  Clone ID: PAT_MRT4530_3559C.1
cggacgcgtgggtgcagaatacgtaatgagaacggtttaatcattcggtggacgtctacccattcaactaaataattatgaaaaaaattaaaaagaatgataagatagatacaccactctcaaatttaaattcaacttctataaattataatagaaaataataaatttgttattaagttgtagttatatacagaaaacaaatataaaccttcatgcctgtgagatgatatatctcatattaatttatctcattatcttttaaaatttttataaatatatttagtcgacatgcaatgaacgggtgaacattcacccgggttattaaaagagttttcgtatacgtatacggtgaggtacgtatacgtatgtatgtacgtaggtacccggaggaggtcgcggacgaggaagtcggnngatgtacttggngcgggcggtggacgcagagcgccatcagccgccggaacgccttcccgtccgccggcgccatcagctccgtcacctccgccacgccgnccttcgccgccaggccgnngtngtnctccgcccccttc

SEQ ID NO: 31277 - DNA, 432 bp, Oryza sativa
  Clone ID: PAT_MRT4530_355C.1
ttattgagacaagtattgctggatagccgatatagccttctgcctaatctgttccacttcttctatggcttgggcatcttgagcgtcagttccagggataactttcaaggacttggtcatatcagcgacattcttgatagccgattttagctttgccttttgttcttcaacagcttgcgggagatcggctagctttttgtgctccatatccagctcggcgttgcattcttgaagttgtgccatgagatcaatcttacgagcttcaagccgatcgatatttgacttgattatgccttcagacagctgatcaagcttggacttctctacatgcacaagatcatcggaaaggggagctaatgctttgcttgaagtatcttcttctgcttcatcaaggtaatctctgatgtcaaaagagaagagatcggctagaac

SEQ ID NO: 31278 - DNA, 1442 bp, Oryza sativa
  unsure (1)..(1442): unsure at all n locations
  Clone ID: PAT_MRT4530_35600C.1
ccggccggngaaannnnnnnnnnnnnaaaaaaaaaaaaaaaaaaaaaaaaaagagttcagtcccacaaaaacatggcaaccatcaaattccctatagttttctccgtcgtttgcttgttcctcttgtgtaatggttcgttagcccaacttcttagccaaagtactagtcaatggcaaagttctcgccgtggaagtccaagagagtgcagatttgatcggttgcaagcatttgagccgattcgcactgtaaggtcccaagctggtacaactgtgttttttgatgtctctaatgagttgtttcaatgtactggagtatttgttgtccgtcgagttatcgaacctagaggtcttctgttacctcactactccaatggagcaactttggtatatgtcatccaaggcagaggtataacaggaccaacttttcccaggatgtcctgagacctatcaacaacagtttcagcaatccgagcaagaccaacaattggaaggccaaagccaaagccataaatttagagatgaacatcaaaagatccaccgttttcaaacagggggatgtggaatcctggatttgtagctcattggtgctacaatgatggtgatgtaccaattgttgccatatacgtcactgatatatatataacagtgctaaccagcttgatcctagaaaaaagatccaaggcaagggagagttcgaagaacatctttgatggatttagtgttgaactgcttagtgaggctcttggcattagcagtggagtagcaaggcaactccaatgtcaaaatgaccaacgcggagaaattgttcttgtcgagcatgggcttgcatttctaaaaccatatgcatcagtgcaagagcaacaacaagaacaggtgcaaccaagtgagtatagacaaacacaatatcaacaaaaacaatttcaaggtggtcactctaatggtttggatgagaccttttgtaccatgaggaacgcgctcctttcacctttttggaacatcaatgctcatagcattgtctatattactcaaggtcatgccgggttcaagttgtcaacaacaatggaaagacagtgtttgatggagagccaaatcgtgggaaagaattccatcttccgtgcacttcctaacaatgttttggcaaatgcatatcgtatctcaagagaagaagctaggaggctcaagcacaacaggagagtggagttaggtgtgttcactcctagtcatgcctacagtaactaccaagacatatctgtgagtgcataaccaagaaatgtcaatcataggcttggattgctaaggatggttttcaaataaatcataagcaataaaagagtgcatgttggggcagttatgtaatagtggatggttggaagaataataataaatttgtgttcctttaagtaactatattaaatatgagagaaaaattaagaaatgccatc

SEQ ID NO: 31279 - DNA, 2233 bp, Oryza sativa
  unsure (1)..(2233): unsure at all n locations
  Clone ID: PAT_MRT4530_35601C.1
accttcgagtgagatcccggaaaaaacaaccggcgatttggcccctcgaggccggccgggaaaaagcattgagttcagtcccacaaaaacatggcaaccatcaaattccctatagttttctccgtcgtttgcttgttcctcttgtgtaatggttcgttagcccaacttcttagccaaagtactagtcaatggcaaagttctcgccgtggaagtccaagagagtgcagatttgatcggttgcaagcatttgagccgattcgcactgtaaggtcccaagctggtacaactgagttttttgatgtctctaatgagttgtttcaatgtactggagtatttgttgtccgtcgagttatcgaacctagaggtcttctgttacctcactactccaatggagcaactttggtatatgtcatccaaggcagaggtataacaggaccaactttcccaggatgtcctgagacctatcaacaacagtttcagcaatccgagcaagaccaacaattggaaggccaaagccaaagccataaatttagagatgaacatcaaaagatccaccgttttcaacagggggatgtagttgcattgcctgctggtgttgctcattggtgctacaatgatggtgatgcaccaattgttgccatatatgtcactgatatatacaatagtgctaaccaacttgatcctagacacagggatttctttttagctggcaacaataagataggtcaacaattgtatagatatgaggcaagggacaattcgaagaacgtctttggtggatttagtgttgaactacttagcgaggctcttggcataagcagtggagtagcaagacaactccagtgccaaaatgaccaaagaggagaaatagttcgtgttgagcatgggctttccttgctccaaccatatgcatcgttgcaagagcaacaacaagaacaggtgcaatcgagagactatggccaaacacaatatcaacaaaaacaacttcaaggtagttgctctaatggtttggatgagaccttttgtaccatgagggtaaggcaaaatatcgacaacccaaacctcgcagatacatacaaccccagagcaggaaggatcacatatctaaatggccaaaagttccccattcttaatcttgtacagatgagtgccgttaaagtaaatttatatcagaacgcactcctttcacctttttggaacatcaacgctcatagtgtcgtgtatattactcaaggtcgtgcccgagttcaagtcgtcaacaacaatggaaagacagtgttcgatggagagctccgtcgtgggcagcttctaattataccacaacaccatgtagtcattaaaaaggcacaaagggaaggatgctcatatattgcattgaaaaccaaccctgactccatggttagccacatggcaggaaagaattccatcttccgcgcacttcctgacgatgttgtagcaaatgcatatcgtatctcaagagaagaagctaggaggctcaagcacaacaggggagatgagttaggtgtgttcactcctagtcatgcctacaagagctaccaagacatatctgtgagtgcataaccaagaaatgtcaatcataggcttggattgctaaggatggttttcaaataaatcataagcaataaaagagtgcatgttgttgcagctatgtaatagtggatggttggaagaataataataaatttgtgttcctttaagtaactataaaaaaaaaaaaaaaaaaaaaaaaaaaaaaaaaaaaaaaataaaaatttagtgttcctttaagtaactatataaaatatgagagaaaaaacaagaaaaccaataaacaaaataacgaaaatgcccgctccgacgcccctgcccttcagttgcgcagcctgaatggcgaatggcaaattgtaagcttaatattttgttaaaattcncgttaaatttttgttaaatcagctcatttttttaaccaatangccgaaatcggcaaaaatcccttattaatcnnaagaataaaccgaaaataagggtgaantgttgttccnnttttggaacaanaatcccctattaaaanaacntggaacnccaacctccaaagggngaaaaaaccntcttttcagggggaaaggcccnttacttaaaccacccccctaaccaanttttttnggggtcaaggtaccaaatttccttcccctggcttgccacccatatacttttctaatagggacccaaaaac

SEQ ID NO: 31280 - DNA, 2977 bp, Oryza sativa
  Clone ID: PAT_MRT4530_35602C.1
gcacgagggggcaagcgagaccacgaggtcgccggaggaaccgtctcgctgcgcggtggttcccacctccgcccctccccatcgcatctcgcgccctataagcgagctcagctgcccgctccctctccgttctgagctcgcagttctactaatttagtttttgcgaagtgttcttctccaaatcacctgagaaataggtgtcgatcttcagaactagcgtgctagccactagtgtggccatggaagtggtttcttccagccactcctgcttggcatttaaccgaacacctagcagtgcttggaggtttccggggaatggtcttggtccagggcatgcaaagctcactcggccaagaagtgcaattctttgtgtgcggtcagggacagcttcgaatcctgctgattctgggaaagttcatgcgagccatgggttctatgtaagtgatgtcgatgcagctctccaagggatcccgaagaaagtcggtgagatcgagaagatgatcattccgagcttgccagaaggacctgaaagctctctaattagtactggtttctgggaatggaagccgaagctgagtgtatattatgaaaagtctggcatagacaatagcaaggcaccgtctgtgctctttctaccaggttttggagtgggaacgttccattttgagaagcaattgaaggatcttggccgtgattacaaagtatggacaatggattttctagggcagggcatgtcgttgccatgtgaagatcctgctcctaagagcacatcaggagagctagatgaggacacatattggggttttggacaagaattacaaccatgggcggaggagttggtgtattcgatagatttgtggcgtgaccaagttcagcattttattgaagaggttattggtgaaccagtatatattgtggggactctctgggaggttttgtttctctatatcttgctgcatcctgtccacaccttgtaaagggtgtcacattacttaatggagccccattttggggattccttcccaaccctgctacatctcctcgcttgtcgaagatttttccatgggctgggacatttccacttccatcgtttgtgaggaaacttactgaaacagtgtggcagaaaataagtgatccaagaagtatacagggcatactcaagcaagtatatgctgaccactcaacgaatgtggacatggtgttctcgcgtattatagagacaacacaacatccagcagctgctgcatcatttgcatccattatgtgtgctccaaagggacaaatatccttcgaagaagctctatctaggtgccaaaggcagggtattcccatatctcttatgtatgggagagaagatccttgggttagacctatttggggtattaaagtgaaacagcaggtgccagaatcaccgtattacgaaatcagtcctgctggtcactgccctcatgatgaggttcctgaggttataaactacttactcagaggatggctaaagaatgtcgaatctgagggttcagttggagttccatttcttgaagaacccagctatgctgaaaatggtgtatcaagggagctggaatttgttaggggaggatcaaaaaaatctgtccatgtgcgactctttggttctaaaatttccttatggagccaacttcgttcgcttttgaagtccaacacacgggtaatatctagataagatagattgtccatacaagtatgatgttagaagcttcagtcaaatattgtattcattattctttatttaaagtagtcagtttgatgtctagaactctagatatacccagtagacaggattttgaacatttctagtggatgtaaaaatagcaagcttcaaaattcttgtgccagaacaaagggagtagccaagtttagtccttgtttgtataggctatcaatctttatcaagttcaaattgtgatttctgtataagcagaaaaattggtatcatatgcccttgttatagggtccacacttcactgtccttagaaatgttggatcatttggtgtcagctacgtaactgtttttttccccttcatcattgcaacttggaaggccctccaggcgctgcttgttggggtggaacggcattccctgaccaagaaccgccattgctccatcaggctaagaacctacaagagaatgaggatttttgtcatggaatggatggaggtctactttttatgtaattcaagtcgcttcctcacgttcgccgacaccaacctttctgggcccgccaccatcgccgagagaagaacgcgcctcatgctcaccattgccgacccggccatcactggattcgctgccgtcaccgacggcgcccatggccaggagacagggagggttttggagatggcgatggactcagagatggcggcagcttcggaggaggcgccagactcgcaggtcgacggcgcgccggactctgtcgacgtcgtgccggactccgtcgaggtggcactggagtccgtcgagacactggactcggggatggcgttgaactccgtcgaggtcgacggcgcgtcggactccgtcgacgtcgtgccggactccgtcaaggcgctggactcggagatggcgttgaactccgtcgaggtcgacggcgcgtcggactccgtcgacgtcgtgccggactccatcaacgtcgtgccggactccgtcgagtttctgtgtgctcgctgcggcacgttccacgctagtggcatcttcggagaagcctacttccaagctcaccgtcacgctcgcagctgtgcccgttgtggccttttacatgaagactacgatatgccagcaaggtggttgcatgacatggaaaagtttgattgtgagatttacattcctgatgtggagaatcttcaaatggatggtaacaccatcattctgcccgagcaagttataaagaagttggaagagcacattgagaagaagcaaacaaagaccaataagggagattag

SEQ ID NO: 31281 - DNA, 382 bp, Oryza sativa
  unsure (1)..(382): unsure at all n locations
  Clone ID: PAT_MRT4530_35603C.1
gcacatgtcatacatctagacaaggacactagcttagctatagctagctactagcctactactagtagtagcctagctaggaggaggaggagctaggatggcgcagttcccgccgagggcgccgagcgcggcggcggcggcggggcaggagtggtcggcgatggcggcggcgggggagtttcttgggttcgcggcggcgaggaggggggcgcacaggaggtcggcgagcnactcggcggcgttcctgatggaggcggcggtgcgatggacgacgtcatcgtcggcgtcggcggcggcggcgagttcgaccggctcgacgacgaacagctcatgtccatgttctncgacgtcgaggcgccggcggtttncgacggggcggcga

SEQ ID NO: 31282 - DNA, 1566 bp, Oryza sativa
  Clone ID: PAT_MRT4530_35604C.1
ttttgaaagaaaaaaaaagaaaaaacaaaggagagggcgtgggcgaggaggagggaggagagagagccgcttccgcttgattcgattcgaagcaaaaccaacccaacccaacccaactcaaccgaatcgatggccggcgacgagcccctccccggcgacgggcagcggcggcgctacctcatcggctacgccctggcgccgaagaagcagcagagcttcatccagccgtcgctggtgtcgcgcgcggcggggcgcggcatggacctcgtccccgtcgacccctcgcggcccctccccgagcaggggcccttccacctcctcatccacaagctctacggcgaggagtggcgcggtcagctggacgccttctccgccgcgcacccagccgtccccgtcgtcgacccgccccacgccatcgaccgcctccacaaccgcatctccatgctccaggtcgtctccgagctcgacgtcccgctccacgcccaccaccaccacaccttcggcatcccctcccaggtcgtcgtctacgacgccgccgccctctccgactccggcctcctcgccgccctccgcttccccctcatcgccaagcccctcgtcgccgacggcaccgccaagtcccacaagatgtccctcgtctaccaccgcgagggcctccgcaagctccgccccccgctcgtcctccaggagttcgtcaaccacggcggcgtcatcttcaaggtctacgtcgtcggcgcccacgtcacctgcgtcaagcgccgcagcctccccgacgtctccagcgacgtcctccaggacgcctccgccgagggctccctctccttctcccaggtctccaacctccccaacgagcgcaccgcccaggagtactacgacgacatgcgcctcgaggacgccatcatgccacccaccgccttcatcaacgacatcgccgccgccctccgccgcgccctcggcctccacctcttcaacttcgacatgatccgggacgcccgcgctggggatcgctacctcgtcattgacatcaactacttccccggctatgccaagatgcccggatacgagactgtgctcaccgatttcttctgggagatggttcacaaggacgacgacacgcccaacctcaaccccaaccccaatgacgaggatgtcaaatgagccacatcaatttcgactgccatgctcgcaaacgtgcaatgcctggatgtcagcgcgaggtaccaggtatgctggttgcagaaaatctgatgaggggaataacgagcaagcaattaggatggggagatcgggattaacggattcctgaccatgtcggggtttcaccggtgccatgcacagaccctacctgcggtgtaaatcctttctcctaactcctttcatactggttgttttaggtatccttctgttcttcgtaatttgcttcatctagtttagttagagcagccaagagagagagaaaagaaatgaagaacgaagttctcaaagaaaatttgctcggtgcacaaaacttttgttcctgagtactggatgaatttttgttcttgagtcgccaaaaaaaaaaaaaaa

SEQ ID NO: 31283 - DNA, 271 bp, Oryza sativa
  unsure (1)..(271): unsure at all n locations
  Clone ID: PAT_MRT4530_35605C.1
actcgcacgggctgcacggctgtcggcgcggcacccgttgcngccatcnattagctcanagcttttcggtgcccggntacctctctacctagctagacctatacatatagcggaggagcagaggcgggagagagtatagtggagaggagagtnaganctggtggtaggggagatcccgaattctcgatcgatatggcggaggggaagaaggcgaggagggaggaggagctcgtggnggnggcgctggccnggcggcgcgagcgctgttcgt

SEQ ID NO: 31284 - DNA, 150 bp, Oryza sativa
  Clone ID: PAT_MRT4530_35606C.1
atgccgccgtcaagattgaagggagagggcactcactgggcacatggagggaggtgggccaaggtggcgtggatggagaggagcgatagcagcggtggcgaggggcgtgaagaggcggcggcgtcggaggactcggagcgcacaggctga

SEQ ID NO: 31285 - DNA, 156 bp, Oryza sativa
  Clone ID: PAT_MRT4530_35607C.1
cccacgcatccgggatgagctccgcggccatgaagctcgtcgaggtggacgagctcatctaggccagcagcatggacgcccgctcctgactctactgtctggtaataatacacgacgtgcccgacagctgatacgctcatacagaacgactgtcat

SEQ ID NO: 31286 - DNA, 250 bp, Oryza sativa
  Clone ID: PAT_MRT4530_35608C.1
tttaatttcgtgaccagtgcgagctttgcggggagggggtacattgtggagacggcaccaacacataacctgatgacccagatgttggccattaagttcaacgttcaggtgccttggacgtctccacctgaagggcaagaaggaggcatcggtgctccgatcagggtagaaaaatgccaacgaggctggcgacctggacggcgcgcggatctacgccgtagcacttgtccgcaagcgcaccgagcacatg

SEQ ID NO: 31287 - DNA, 240 bp, Oryza sativa
  unsure (1)..(240): unsure at all n locations
  Clone ID: PAT_MRT4530_35609C.1
acggcgacacggtaaggctaaggcattcctactagcagtcggaccgcacnnctttcccttttttttttttggaatgctaaataagcactggtcaatgactaactacattgtcagaaaattgaaacagaccttctaaatgactaacaaaccggaagactggatcacaatgggatggctatggtcctaacctcaaatcaaaaaccggggctggccggcacttgaacccaaaagcaccgggag

SEQ ID NO: 31288 - DNA, 169 bp, Oryza sativa
  Clone ID: PAT_MRT4530_3560C.1
atgtcaaacaaggtggcgtatttttaaaagttaattaccacacataaaactaatcggcaatattccaaaacataacacaaccttgacacctcatcccacacaatacaatcaaactttcttgaaaatgcaccctttcccaccctctctgtgtctataccaaccacaccac

SEQ ID NO: 31289 - DNA, 1083 bp, Oryza sativa
  Clone ID: PAT_MRT4530_35610C.1
atggagcacgagcagctactgcaagccagcacggagctcatgaaccacagcctgggctacatcaggtccatggccctgggctgtgctgccaagctcggcgtcgccgacgccatccaccacgccggcggccgcgccaccatggacgacctgcgcgccgcgctgtccctccacccgagcaagctcccgtacttcctgcgccgcgtcatgcgcgtgctggtcgcctcgggcgtcttcgcgcatgacgaggaggaggacgacgatgatatctaccgcgtcacgcccgtgtcgtccctgctcgtcaccgccaccggcggcaacggcgggaggagcctgctgccgttcgtgctcctccagctctcgccgccgatctacgtgacgccggccacgagcatggccgagtggctcacgagcggcgaggaggagacgccgttcgagatgacgcacggcgcggggctgtggaccgtctgcagccgagacccggagctcggcgagctgttcaacgacgccatggcggccgactcggccttcatcatggacgtggccatccgtggcgcgggccgccaggtgttcgacaagatcacctctcttgtggacgtcgcaggtggcaccggcacggcggcgagggtggtggccgccgcgttcccgcatatcaagtgcaccgtgctggaccttcctcacgtgatcgattccattccggcggaccatcgcggccgcgatgttgttaagtttgttgcaggagatatgatggatttcatcccccgagctgatgcactcctgctcaagtttgtcctacacgattggagtgatgaggactgcatgaagatactaaaacgatgcaaggaggcaattccttccagagaagcaggagggaaggtcattgtcatagatgttgtggttggatcctccacccaagcaatgtgccatggaacccaactgttgtttgatctgcttatttcgactacattaccaggcatgcagagaggtgagaaagaatggtgcaaggtattcaaggaggcaggattcactgactacaagataagccctgtgttaggtattcgatccattatcgaagtctttccatag

SEQ ID NO: 31290 - DNA, 1419 bp, Oryza sativa
  Clone ID: PAT_MRT4530_35611C.1
ttttttttcagtgggaaaaacacagtaacttgtttcaaacaagttctctacagaatacaaacaagttctctacagaaagatcacattattgtacaaaatgcaacagcatacagaaaacggcatcgtgtggagagctacagcaaacacactgaaaaacatcactgaaaagtgctatgttgacatgggctaatcggtgtccgtacgccggcggctagctcagagctcgtcgaccgtgcggggcttttgcttgccgtcgacgtggcggtggtgatgcttcttctccttgccgtgatcggcggcgtcgtcggcgccggtgacgcgctccttcacctcctccaccttctccttcgccttctccttcaccttctcgtacccctcgttcgccttctccctcgccgcctccgccgtctcccacgcggcgtccttcgccgcctccgccttctcccacgccgcgtccttcgccgcgccggccttccccttcgccgcctccttggactgcctcgccttctcgccggccgcctccgccttctcccgcgccgcgtccttcgccgccccggccttctccgccgcggcgtccttcgccgagcttgtcttctcccacgccgcgtccttcgccgacccggccttctccgccgcggcgtccttcgccgagctggtcctctcccacgcgctgtccttcgccgccccggccttctccgcggcggcgtcggtggattgccggagcgtctcctgcgccttgccggccttgtccctggcggcgtcggtggattgccggagagtctcctgcgccttgccggccttgtccttggcggcgtcggtggattgccggagagtctcctgcgccttgccggccttgtccttggcggcgtcgtacccctcgccggccttctccttggccgtctcttcgaccttggccttgccctgcttcgactgctcgtgcacctcggcgcccctctcgccggccgcctcggcggcctccttggtcttgtgcttggcctgctccgctctcctggtcgcctcgccggcggcgcccttcgccgcctccttcgtcttctcctttgcctgctcagccttgctcgacgcgcccgacgccgtcgcctccgccgcctccttcgcgtccccggccttcttgctcgtctgcctccctgcctcggaggcggtgtgctgggcggacttggcggcgtggccggccttgcgcgcggcgtcctcctcctcgtcgacgtcggcgacgtggtgcttcagcccgagcccctcggtgatcttctccttggcccagcccgtccacgactcgtcctccttgctcgccgcgtcctccgtgccagcctccgccttcgtcgccacggcggccgccgccaccacagcaaacagcagcagcagcagcgtcaccgccagcctcctcgaccgcgacacgatcgccat

SEQ ID NO: 31291 - DNA, 627 bp, Oryza sativa
  Clone ID: PAT_MRT4530_35612C.1
atggcgtgtgagtcagcatgggacccatgtgggccccacatgtcaggacgccacgtcatcaggcgggagcacgggggagatcaaagacaacgagctcgagcactacggcaagtggagtggggcaacagcgaggcggagcggcggcgtgcgaagccagcgaggcggcggcaggtggagaaggccggcgaggcggtggcgcgcgaagccggcgacacggtggcggacaacaacgacgatggcgacggcgacgaggtcgggcccaaggtgacggcgtcgaatccaatggaggcgacgatgaatcttggcatcaacgggaatgctggtgaggctcgggcggatgcggctggagtagcaacggtggcgaagaggatgttggtgagcacgcggggagaggaaggaggcgacacgattgcaggccagggcttcaagtctgccaagtccacatccgcgcccaccgagtctactgtagccgcgtggccccttctcccgtgccgcagcgccaccgtgtcgccccttctcccgtgccacagcgccaccgtgtcgccccttctctcgcatcccatgtcacctgttgccggtgccgctcagctcattccccaccgccgccgcccagttcttccgcgctag

SEQ ID NO: 31292 - DNA, 106 bp, Oryza sativa
  Clone ID: PAT_MRT4530_35613C.1
acacatttagttctttgcaacgctttctgtttcattgttaagtatcccaaataaaagatgggttccatccctacttctagagaaactccaaccttcttaatggctg

SEQ ID NO: 31293 - DNA, 462 bp, Oryza sativa
  Clone ID: PAT_MRT4530_35614C.1
ttgatgtgaccatggctactaggatacaactgttgctcacatcatggatcaacaagaatacataaatatcaagtactccaagtgttggaatccaattcggccacctgctacattgctgacttcaaacggccgctaaatctgcatacgagctctattttcaacccgagtgtacttgatgaaaagctctcggagtcatctttccaacgtatccagcctcattgctaaattccttctaagtcatctgcaattgaataaacaaggtgttgtgtcgcctacagtaggcctatgggcttgtaactttattagggaccccgtcccaagtggggtccaagtggggtgcaccccaacctagtggagcacgatcctagggaccccttggtcatcctccaatctccaattgcgtcagccgaggggaggggcgcgcggaccgggtccacgggagtggggcccacgcggcagcct

SEQ ID NO: 31294 - DNA, 464 bp, Oryza sativa
  Clone ID: PAT_MRT4530_35615C.1
tacatatatatatatatatatatatacatatatatatatatatatacatatatatatacatatatatacagctcgaggtatacatatatatacatacatagatatatatatatgcgctaaataaccagttgctcccgcggccaacgtgtgatgggagcaacgggggcaccaccacgccaccagcaagttactgctagggttgctgtatgtgtataatatagtaagctggtgtccgtaaagtggtgccatggttttctttttctttctctctctccttggcttgtaataattcaattaattatttattattttttgtatttcttttctttctatctcaacacttttgtaagatggaatatatagattggtgtggtagtactactgtactagtactaattataagcaattaaggacatggacatggagccggtgatgattggtgataaaaaaaaaaaaaaaaaaaa

SEQ ID NO: 31295 - DNA, 1092 bp, Oryza sativa
  Clone ID: PAT_MRT4530_35616C.1
cccacgcgtccggcgcgatgtcgtcgctgtacccgtctctcctctcgctgagcgagagccccgccgagtaccggcaggtcggcggtggccgctacgcgggggaggacgtcgtcgacgacgacgacgacatggctgccgtcgccgacgctgtgtccagctacctctccttcgacatggacgacgtcgagtattacacgccggaggtgggcttccactcaaagcagcacaacccgccgccagttgctgcggcgccactggaagccggaggaggcagggagcaaagccggcgggaagccgccgtcaatcttggcaagatggacaggggaccggcgccggtgagcggcggcgcggcgactggcggcgtgccgaggagcaagaacggcagcaagatcgcgttcaagacgaggtcggaggtggacgtgctggacgacggctaccggtggaggaagtacggcaagaagatggtcaagaacagccccaacccaaggaactactaccggtgctcgagcgaggggtgccgcgtgaagaagcgggtggagcgcgcccgggacgacgcgcgcttcgtcgtcaccacctacgacggcgtccacaaccacccggcgccgctgcacctcaggccgcagctgccgccgcccggcggctactcgatcgccggggcaccggccgtggtggcgccgcacggccgcctcgggctggaggaggccgaggtgatcgctctcttcaggggcaccaccgccacctcgctgctgcttccttgacggattcttgatcgagatagcagcctcttgattgagatgcccagatgggtcattttggatgtgagctggatctttgttttccccttttcttctctcgatctctgtcccgtccttgtttgcctgtttcgatcattggaaggccgggccaggcctggctggtttgcagcgatagtgatcaaatgctgtgctgctgtgtttctgtgctcttgaggatcctcccaactatcccccttgagcctaggtaatatagccatgggaaatgtaacatatatatactgtttaaccgtccaaataaaaatgtacagagcttgaaaaaaaaaaaaaaaaaaaaaaa

SEQ ID NO: 31296 - DNA, 585 bp, Oryza sativa
  Clone ID: PAT_MRT4530_35617C.1
ggcgcaagcccgcggaccgaagcctgggacccccagagggggcggcccttttttttttttggttttttttttttttttcgtttttccttttttttgttttttgtctcgtgtctttaattaatacaagaggaacacagcctgcccgcaactaaagggttacccgggaaaaaaagcgccaccgggcccaagggccggaaaaaaaacccgggaccccggacccggggggggccccccccccccccaaggggccccccccgggggggggggggcagaaaaaaaaaggccccccagggggaccccgggccccccccggggagcccttaccggggggggggggggaacccgggggaaaaaaaaacccccccccggggggaaaaaaacaaaaattccccccccccaaatggcccccccgggggggggggacaacgggggggggggcccccccccccgggaaagggggggggggggcccccccccccgggggggggggccttctcccggggggggcccccccgggcgccggggggcccccttttcccccgggggggccggggggggggaacccccggggccccccccggcggg

SEQ ID NO: 31297 - DNA, 695 bp, Oryza sativa
  Clone ID: PAT_MRT4530_35618C.1
tgcacctcccgcttccacgacgccatgcggaccatccacgccgtcgtggcggtggctggcgatgaaggggtggcgcagcgaggcgaggatggtgctcgaccggacgtcggacaccgccggccgaggctgagcagcggctgcaggagatcgaggacgtcgtcgccgccagctccgtcggcggcaacggcggcggtgcgcggaaggaggtggcgaccaagcccggcatgcagcgggtgctcaccatcgtgctgatgctgcagttcttccagcaagcctccgacatcgactccgtggtactgtacggcccgggcgtgctcgccgccgccggcgtgacgcccaacaccctcctcctgggcctcaacgtggtgttcggcgtcgccaaggcgagctccatcctcatcgccatggcgctcaccgcccgcgtgcggcgccgtcctctgcttctcgccagcacgggcggcatgaccgcctctctcctcgtgctcggctcggtgttcgccgcgttcggcggcgcgagggacgacgcggcggtggccgccgtcgccgtcgctgtggtggtggcgttcgcgtgcgcgttctccgtcgggatcgggccgttggcgtgggtgtacagctcggagatcctgccgctgcggcagcgcgggcagggcgccagcgtcggcaccgccatgaaccgcgtcacgtggtcaccatga

SEQ ID NO: 31298 - DNA, 398 bp, Oryza sativa
  Clone ID: PAT_MRT4530_35619C.1
ttttttttttttttttttttttacacaagtgggggtgtatatttggatgcgggtgacgaaccaccaaagcatgagctgaattacaagaggctctagtgtactttattgtatattagaatagggagagagtaaggtagaaggaatcggagaaatcccggagttgtcggtaatctcctcctacttttgtatcttgttaattactctgctttaatagaaatatcattatgagtaattaagatttgcttagtgagaattacttcttgaaaagtttctaattagcatacatgatcattattcactatagtctatttgtttatagtgattgctttagtgtttgatcgccagtagttataagccaggtacaatagcagactataagccagctataaacatttttt

SEQ ID NO: 31299 - DNA, 786 bp, Oryza sativa
  Clone ID: PAT_MRT4530_3561C.1
atggcggcggcggtgagggagatggttcgctcgatgggagccgaacagctcgacgaggccatcgccttcgccaccatggagctcgcgggccgcgacattccgttcgaggacgtgtttcggctctgcgacgagcaggagctccgacgcgccaagaaatcttccatggccgaggaggtcgagaggatcaagggcaagctcgtcggcggggaagacggcggcaggccgagctccgactcgtcggaggagaccgtggtcgagttgctccgcgcgctgcggtcgacgccgatgacgttcgagacgctggaggcgagcaggatcggcaagaccatcagcggcctgaggaggaagcactcctccgagaaggtgcgcggcctcgccgccgcgctctacaagaactggaaggctatcgtcgacgagcacttgaccaggagcagctccaagccgccggcgccggcaccgaccaagaccgcctccgcgtctgatcacgccaagaagacggacatggcggccgctcacaagccggcgccagcgccgtcgccgaggaagacagcatcgaacaagcacgaggcggcgccggcacgcgcggacgacgcgaagcttgcggcagcgaggcgcaagctccaggacggctacaaggaggccgcgtccgccaagaagcagagggtgatccaggtgatcgacacgccgaagaaggtgaatcggcgtcccgtcgccgtcgtcgagcggcggcgcatcatgccgggtgtcgccacggtggctccactgcggatgtgtagagctgtatga

SEQ ID NO: 31300 - DNA, 600 bp, Oryza sativa
  unsure (1)..(600): unsure at all n locations
  Clone ID: PAT_MRT4530_35620C.1
cggcacgagggcgagtcgcgtattagggagaaacgcaacaaaagggaagcgcggcgaggaggaggaggcggaggcgggagggggcgatggtgaggcagggcgtcgtcgtcggcggcggcggcgagattacgcaggccggcagcggcagcggcagcattgccgggtcggcgaccgcgccggcggcgagcccccaccaggtggcagttgaaatagatgagcaaatttactccccagcatttggcaatattgttgtccctgatagtcgtggttgctgcagtggtttcacatccagtgtcacaagagtggtgtttatcttacacctccttgctttcattgccctcacaatcttccttggtgtccaggcctcttcccgacagaatcctacctacaagcctttcgccaactttgttcctcttgcctcctctgtcatagtatccataattgcaggttgcttttgggtcatccttgcagtcattaaccctccaaaagccatcaagacctcactctgggcagcccctgttcttgcactggcctgcgatgtagtcatactccttgttggcaatggngctgcacttggtatggnagtgctcatagttgtag

SEQ ID NO: 31301 - DNA, 234 bp, Oryza sativa
  Clone ID: PAT_MRT4530_35621C.1
atgcctgagtgcctacccagcttcctcctcctcctcctcctcctcctcttcgtcgtcgtcttcttcttcttcttcttcttcttcttcttcttctcctctctctctctctctgggttgtcaagagagtgtagtttgggctaccgtttgttggaaggccctagcggtttagctctttttaaaaagttctaccctacatttcgccaaagagcagatgctgttgttgacgatgagtga

SEQ ID NO: 31302 - DNA, 449 bp, Oryza sativa
  Clone ID: PAT_MRT4530_35622C.1
actaaaacgaaaagaaaagtgtggatattatgccttttgtcataggcagataagcattgcagtttgccatgaagcgactctacgaattggaatttagttaggtcaatatgccaatagctacatattggtcctgtgttgtgtgagagtgcttcttttgattactggaacaagctagaacaacttaaaattgttcattgaattagaatagttttcttctgaaatggcaactagtgaggtcaatgatgtttacatttacatgctttataatactatctagcaagtagcaaataactttggttagctgcacttactgaatgcaatttactactccctccatttcatattataagacttcctagcatggtccatattcatatagatgttaatgaatctaaacacatatatatgtctagattcattaacatatatatgaatgtgggcaatgctag

SEQ ID NO: 31303 - DNA, 102 bp, Oryza sativa
  Clone ID: PAT_MRT4530_35623C.1
attttatcctccttccgcggctacttatacacagagagtgacgcgagctctctggtttacatcacctagcttcccatcgtattgtctggccgagtactaatg

SEQ ID NO: 31304 - DNA, 237 bp, Oryza sativa
  Clone ID: PAT_MRT4530_35624C.1
atgacgaagggggtggtggcggctctcaaaggcaacgacgcaagagaggaggcggcaaggagcggattcggcggctcctccctccccaccgacggcggcgacggcaaatgggtggaaggtggcggtgaggtgatggcggtgcttgggaggacggaggcagatccggcgggagagtggatccagcagctctcgggagcaaatccccaccggcggtgctcggcggcagcagcgcgttag

SEQ ID NO: 31305 - DNA, 249 bp, Oryza sativa
  Clone ID: PAT_MRT4530_35625C.1
gggccggaaaaatttaaatgttgcatttttgttctttttcacaaacagtacaaacgggggtttgtaacaaaattttaaatgcccagcacaagattcagccccggagggctccataatccttttcaatttcaataaagtttagaactgtccagtgttcaaggcacaccttttaaaccaacaaatttccaaacctttgggcgggtttacctttttttttagcaaattttacagcacctgcccttctaagtt

SEQ ID NO: 31306 - DNA, 1365 bp, Oryza sativa
  Clone ID: PAT_MRT4530_35626C.1
atggcgcacgtcgccgtggtcaccttccccttcagctcccacgccgccgtgctcctctccttcgcgcgggcgctcgcggccgcctcgcccgcgtccaccttctccttcctctccaccgccgcctccttcgcgcacctgcggaagaccgccgcggcgggggacctcctcccggggaacatgaggttcgtggaggtcgccgacggggcgccgccgcccgacgcgccgccgccgcggcggatggcggtgttcatggaggccgcggaggccggcggggtcgtggaggccgggctcgaggcggcgcgcgccgcggcggggggtgtcgcggtgagctgcgtggtcggggacgcgttcgtgtggatggcggcggacgcggcggcgaaggttggggccaggtgggtgccggtgtggacgggcgcgtccagcgcgctcgtcgcgcacctccgcaccgacgcgctccgcgacgacgtcggcgacgaggccgcgagccgcgccgtcgagctgctcacctcgcatcccggcctcgagagctaccggatccgcgacctccccgacggcgtcgtctcgggcgacctcaactacgtcatcaacctcctgctacaccgcatggcgcagcgcttgccgcgcgccgccacggccgtcgcgctcaacaccttcccgggactcgacccacccaccgtcaccgccgccctcaccgccgtcctcccgacctgcctcccgctcggcccctaccacctcctcgccaccgcgccagccaacgacgacgaccccaacggctgcctcgcctggctcgaccgccacgcgccgcgcaccgtcgcgtacgtcagcttcggcaccgtcgcgtcgccgcgcccggacgagctgcgcgagctcgccgcggggctcgaggccagcggcgcgccgttcctctggtccctgagggaggactcatggccgctgctcccgcctggcttcctggagcgcaccaagcagcacgccgcggcggggctcgtcgtcccgtgggcgccgcaggtgggcgtgctgcgccacgcgtcggtgggcgcgttcgtgacgcacgccgggtgggcgtcggtgatggagggcgcgtcgagcggcgtgcccatggcgtgccgccccttcttcggcgaccagaggacgaacgcgcggtcggtgtcccacgtgtgggggttcgggacggcgttcgacggggcgatgacgcgcggcggcgtggccacggcggtggcgtcgctcgtcggcggggaggacgggcgccggatgagggcgcgggcgcaggagttgcaggcgaaggtggcgtcggcgttcgtcgagcccgacggaagctgcaggaagaacttcgccaagttcgtcgagataatctgtgcatcctga

SEQ ID NO: 31307 - DNA, 393 bp, Oryza sativa
  Clone ID: PAT_MRT4530_35627C.1
gggcaccatggatccgtgtagcagtacatgattgcaaacggttggcatgggtagctccacagccatgttcatgtcgcaatgccaatggcgctcctgcaagcagcaaatgttgcatggctagctacaaggcatgatgcactcagtggcacaatgtgggcacccaggttcgccaagatgatgcagagcatggcaatacaagttatttggttgcctgggactgcgggcaagcagcaagatggatggaagatggcgatgctagatcgcacataacatggtggcaaacatggcccctgggtgcaaactgtgcacaagactgctgctgtgcactggtgggttggttggttggatgcaataccgttgggttaacaatgtactctagtaataaggtgttgc

SEQ ID NO: 31308 - DNA, 1050 bp, Oryza sativa
  Clone ID: PAT_MRT4530_35628C.1
atgtcctcgcatgacctatgttggatcaatactctcaccgcctcaacatcatcaaaaccggaaggagtcgtggctcatttcagcacgggaatcccagatcaggcaggtactgaactgaacccgaaaacaaaccgtcccaatgcgtcgtttgagcctgtgacgagaccaactgctgctactcgtgtacgagtagtactggagcggcggcaccggagacacggcgacgtggcgttgttagccgaaacagctggccttttggttgggccggtgcaaacgggaccacatgcctgcgacttcgacgactctcagtatccgctctccggccacggccagtgcatcggccgggtgaaacgggcaaaagaggtgggcaaaaacgtttcccccggggagcggtgtggggccggcgggcaaacgttgcgccaccaaccctcgccggcgacgcgcgcacatggcagcacggctcgcgtgcggggcatgatgggggggacgatgcgtgccgtaggcctcagatccggcatcatgttgtctttttccatcgatcctctccgacgatgggcgatggcgatgataacgcgacaaagtggtagagatggggttacaccgatgggcagtgtcgcacatgcatgggggaaggcgggggccgcacggcggattcggcaagggagatccgcttccgttggtttgcttgtgcgcgagatgggcgtgcactgctgccggttctgggcaaggacgcccatgcagggcacacgcattctccccgcgcgttccggtctgatggatcaaattggcacattaacaaaccgaaaggcgatcgacttggccagactgaaagccgaggaaagggagccaagcactgagggcatacctgtgactctcaacgccagcggagacgcggagtggcgtccccgcggcgcgccccgaaggcccaaacgttacagccggaccaacctgcggtacgcgcgtcgtgggccgtgtcctgcgactttggagtttggattcgatgcggtgcctgtgttgggcttggatttggatacctgctgctgtacccgt

SEQ ID NO: 31309 - DNA, 1200 bp, Oryza sativa
  Clone ID: PAT_MRT4530_35629C.1
atgtccgaagcgccgccaatggagaaggtggatacggcggtgaaggacaagcgctggcagaagaaggacgggcggaaatgggtgctcctggcttgcgtgccgcacgtcgtccgcggcgactacttcgaggctggcatggacaacgtgatcaaggccgcattagctccgcgcgccacccgcctcgtcgtgcaccggagcatcgcgccgcgccgcaagaccatcgacgaccaccccttcgtcgccggcgccgactgccatggccgcctcctcctctacgccagccaggggcccgaaccggagccgcccgtcctcgacggcttctaccgtgggccactcggcgagcaccacggcttccccaaggcgtacttcatctgcgacacgctcaaacacaagtccacccgcctccccgaccacggcttccccatccttcaccccgggaacgctggtctcgtcgccatcacgaaaaccatcttccacgtcgccgatctccaccccatagtcggctcagacaaggccgccctgctcatctacttctcggttcccgaaatctgggcgacgcatgtggtcgactacccgccgcgcgaccgtccctggggcggcaacggcgtcgtcgtgcacaagacgatagtctggtgggtggatctctcctacggtctcctctcctgcgacatcagcgcgagacgtcagaatctgcgcttcgtcccgctccctccggattgcgagctgccgccgggcacgcctgacctcgataagcgccggtgcgttgggtttagaggcgacgatctccggtacatggggatccacgagcgcgagtacgacggcaaaccggtggtcagcatgtggacgctggtcgatcaggatgccgggacttggcgtctcgactgtcagccgctcgtcaaggatatctggaacgacgagggctacaaggcgaccaagctgccgcgggagatccccacggtggcgttcatacacccggagctccccggcaacgtggcctacttcttcatgcgctcgcggctgttcggcgtcaacctgtacacgcgcaaggtcctggagtggcagttcttcgcgatgctgaacccgccgatgcgttaccactcgtcccgattcgttcgtgcttgggcttgcccaaattctgtaggcagtacattctacatgccgcacatggaacatgacgtattctcattcgtgtaccagtag

SEQ ID NO: 31310 - DNA, 474 bp, Oryza sativa
  Clone ID: PAT_MRT4530_3562C.1
ggttttttttttttttttttttttttttttttttttttttttttttttttttttttttttttttttttttttttttttttttttttttttttttttttgaggggacacctattcattaaaggttttcccagggggcccacccaaaaaaaacgtttgaaacccccctaaacccaacttaaggggccccctttccgggaaaaaggccccaaagaaagggggccccaccaagggcccaacccaaaaacctttttttttttggggaaaaaaaaaaggggaacttgggaaccccaaaaaaaaaacagctccctggggggggacctaccggcccccccggggggggggcccccggggggggggggcccccctttgggggggggaaaccccaagggggggggcctccctaaagtggttaccaaaaaaaaaaaaacccctttgggccggggggaacccccccttggcccggaattttcccct

SEQ ID NO: 31311 - DNA, 246 bp, Oryza sativa
  Clone ID: PAT_MRT4530_35630C.1
atggcagtgggaagcggcggcctgacggtagggagctataggaatggatgtgagcggtggacaagcgttggtggtggggacaaagcgaggaagtggttaggaggagggggctggcggcggagaaccaccgaagacagggaagatggcgttgatggggccccctgtttggcaccccttgaggaggagagagggaggggaaggagaatggcaggggtgtcgccggtatcgtggagatcgagagagtga

SEQ ID NO: 31312 - DNA, 316 bp, Oryza sativa
  Clone ID: PAT_MRT4530_35631C.1
aaaacaagacttgaaaagaaaaaaatcctgaagtctgtcccaaagttcagttttacacctcacagaaaatggcccgggtttgcagctgggttttttctttgacaggtatgcgtccctttgtcgaaggggaacaacgtacgggcagccaatccgggcacagtttttttaggttggcagttctgcccggggaccgaaaatgggggggcttcgtttccttttaggggtgtatttttttggaccttcccgaggccgttttttggccaggggtttttgttttcgcacactttgcactcgtcggtcttcgggttgtccttgc

SEQ ID NO: 31313 - DNA, 776 bp, Oryza sativa
  unsure (1)..(776): unsure at all n locations
  Clone ID: PAT_MRT4530_35632C.1
ccacgcgtccgcgccgctgcgcgtcaggcgggcgcgcctcggcaccgacgtgctcaagtgcgagatatggatgcggagctgcgccaggcggctgctcgacgaccagctcctcggcttcgcgcggctcgcgcaggacttctcgctgtcgtccaccgacctctcccactcgccggcggggaccatacggctctcgctcgccctccactccggaccacccggcgacgcgtgcccgccgccggagcgcgccgccgccgagccgtcgatcacgtcggaggtggtgatcctcgagccagcgccaccggtggactacgcgaggatcgagttccctgaccttaacgcggtgaaagaaaacgacgacatggccgtgcagtacctgccgttcttgcacctcgccgacgcgcaggccatggacgacgacgactgcgagatggccacgagcccgcgcgaggagaagccggcgtcctcggacgacgggagcaagaacgcctcgacgtcgacgaccaccgccgtcagcgacgacaacaggggcggtgacgcgcaaggcgcggcccgacgccgacgacgccgccaccggnccgatgtcgtgccgctcgccggacacgccgacgtccaacggcggcnnagccgtcgtcgtcggacaaggagaagggcgccgcggaagacgtgttcgactcgccgcccctgcgcgatatcgacatggaggcggagcagagcgcgatgcagcggcagatatgggagatgtacatgaagagcatgcagcagttcaccgaatcgct

SEQ ID NO: 31314 - DNA, 276 bp, Oryza sativa
  Clone ID: PAT_MRT4530_35633C.1
atggcgctcgtaggacgagcggcgatgacagaggcggcggtcccaacaccgagcatggcgacgtgcgtgaaagcattcgatgatagcagcggccctcgcgagcggatccggcggtggagacggcccttgaggttggattcgacggtggtggcggtcctcgcggctggattcagtggtggcgtgggaggagtaacgacgacagcgacgcgtggggatgattcggcgatggtggcggtgctcctgaatgcaggaagtctttatgcattcaagacttaa

SEQ ID NO: 31315 - DNA, 1857 bp, Oryza sativa
  Clone ID: PAT_MRT4530_35634C.1
tttttttttttttttgttagcatcatctcccattgactttgacttgtctgaagttttcgtcttctttaataaatctcatactaataagtcattgttcatacagagtactacacaagtaccaaatttcttgtgacgactgaagactgtctcccagcttcttcaggaactgaagtgtacgaccggccttaatgttttactttttaacaagaaatcttgcctgataccaaaacacaactccattccatctgttactctctctcggaaatagatttagtttacacttttgatgaacgaattaagttaacaattaacaagcaaaacctaattctcaaactgcacactgaattttgtgccaaagatttaaactcatttaccttttgcaattgcaagaagagatcatcttaatttgtttctctctgcaatttttttttgtttgctttttgttcagaagaaagctctgcttccgtagaacacccttgcaccatccttcttgggctgcagcttcacctctgcctccggcttctcctccttctggacgacgacgccattgtcgccgtcgagctccatcggcagcttcatcttggacagcgattcggtgaactgctgcatgctcttcatgtacatctccatgatctgccgctgcatcgcgctctgctccgcctccatgtcgatatcgcgcaggggcggcgagtcgaacacgtcttccgcggcgcccttctccttgtccgacgacgacggcttgccgccgttggacgtcggcgtgtccggcgagcggcacgacatcggcgcggtggcggcgtcgtcggcgtcgggccgcgccttgcgcgtcaccgccctgttgtcgtcgctgacggcggtggtcgtcgacgtcgaggcgttcttgctcccgtcgtccgaggacgccggcttctcctcgcgcgggctcgtggccatctcgcagtcgtcgtcgtccatggcctgcgcgtcggcgaggtgcaagaacggcaggtactgcacggccatgtcgtcgttttctttcaccgcgttaaggtcagggaactcgatcctcgcgtagtccaccggtggcgctggctcgaggatcaccacctccgacgtgatcgacggctcggcggcggcgcgctccggcggcgggcacgcgtcgccgggtggtccggagtggagggcgagcgagagccgtatggtccccgccggcgagtggaagaggtcggtggacgacagcgagaagtcctgcgcgagccgcgcgccgtcggcggccgcgacggcggcgagcggcacgagcgcgaagccgaggagctggtcgtcgagcagccgcctggcgcagctccgcatccatatctcgcacttgagcacgtcggtgccgaggcgcgcccgcctgacgcgcagcggcgggaggcgctcgtcgaagcgcgggttggcgccgccgcccgccgcgacgcgcgtgtcgagcgccggcgcgtcgtccgggctggacgtgagcgcgagcctggcgtacacgtcctgcgccgcgtagatgcagatgttgtggatgccgcgcgcgccgtgcacgtagatgtccaagaagcaggcgtcctcctcttcctcctcctcgccttctcccccatgatccagctcgtacacaaacctcgccgactccatcatcgatcaccactaccttccaacaaaatccaacagtttcagactcttcacgtacaaatcagttagttacaacatgagaacatgaacagcagcagtaacctcgagaagacgcgagatggagacatttgtagctacgcacgcgagaagggcatggttggttacacttgcaagagggaaagttaagctatgcgtcagaagtttttcccaaaccccacgcgtccg

SEQ ID NO: 31316 - DNA, 192 bp, Oryza sativa
  Clone ID: PAT_MRT4530_35635C.1
tttttgtgtgattctgattattctcagactatgtacagtgtcccgagcgtggtatcgacccggagtacgctgtggatggatcgctgattccaggctatttcctgacaagggcgatgagagcagggtatagggctgggacacatgaacatgcactagaagttatactcatgcctggacgttgatggtccatgt

SEQ ID NO: 31317 - DNA, 279 bp, Oryza sativa
  Clone ID: PAT_MRT4530_35636C.1
ctattcctggtggctccctgcatgcaagttcaggccaagatgaagaccatgaacaatcttctgacttaggttctgctcatccttttgctgctcttgctgctgtagaccaaggacatatgagtggtggttcgcagctatacgtgggtcattctgaccagggtgcttcaaatccatctcatctgatttgcagtcattctctgacacgctgagatctcgcctacagtcagcttcgatgaagtaatatctcaaactcgctgggattgctgcggtatctcgcat

SEQ ID NO: 31318 - DNA, 2270 bp, Oryza sativa
  Clone ID: PAT_MRT4530_35637C.1
tctgcgttttctttctttgcttttttttttcttttttttgttcctttttctttttttttttttttttggaacaaaacagatcatttcatgatcatgaacacttctcatccaatggcaaatatcctggtggtttggtttcaaaaatagaaataataaatcctggggttgcaggacaattcgcccccaaattattcagagtccatcactgacagggtaagatcatgaacggagtaaccagtcatcaacccgttccaaatagatgcagcagaatcagtgcagatggccatagccggagctgctgccattgccaggatgcatgaacgcctgagcctgcgaggcatgatcgagcggaggcgggtcgtcgccgtcttgccagaatcctcctcctccggtggacgggtgcagagcatgcatcacactgacagggttcgtcggggcggtgacggtggcggcggcaacggcgaggggcggcatcactccaccgggatgcacctgggagccggcctgaacgtcggccgggccccaggaatcgcttgacagaagagagagagcacgccgaagatccggggctccattcgagttggaggacacgacggcacaggctggatccacaccaaggcaggaagtccaaaaagcttgtaacagataattggtggatctagcctctctgtttttgtttttgtttttttgagaaacaatttgtggttctagcttgtccataaagcaagcttggttgaggaccttcggggtgtttcccttgaatggtatgagcccatcaaaatcatgatgatgcaccgtatgcgacacaacattgcctggcatctgcagggtagagaaattcagatcctcaaggcctatagttttcattggcttcatccaggggagttttgcttctgtaaatttgaagcctcccaggttgtcacatgaagaaattgcattgcttctcacttggccaaaaggagattggccaaagtaaatatctgtctgctgccttgcatcgtaaaacatcgtggcgagccttgatgaaccaaatgaaattgcctcttgttgcggtttccttcttcgtgcattatgatcagatagacgcctgcggcaacttttctttttctggtcaaattcagctaaaccatgaaaccgactacactgttggcaaaaacggcgctccagaccagaaacaataacctttggtgccttagaatgagcttcacaaactttgtgcttgcgatggtattctcttgcggaggacagatcgactttgcagccttcaacttggcagtatgagctttgtgtgctctgctgagacaccttcatcttcttgaccacagtagatggacaagtcacacctgaagctgcagaggagctcttgacattctgccctccacaaacattttcaaagtaagttctcttccctaacttgagtcctattaccggctcaccatggctaactgccacagctggagaagtgcccgagtcttcaactctaccggcctcgccatccttgcacatgttcttgccatgccctttgacagaagcaaacctgaactctaagctgttccccagcttggatgaggaatcgaacgacgctgacaaggagctcttcgatgaaccattggctagctccgagctagaagtgaacgtgccaccggatgaattggtggatccatgatttgcggccgcgacaactacacctcttggttcagggtgaggtatgctcttgggattttccattgtattcggaccgaaaggcgctggattttcccagtcccaaaacacagggctcttctgattccagttcatcccaaaagaagccatggctgaattaaggatctcaactgctgctgctcacacttgtatatattgcaaatctcaactttcctttctcccagaaaagaaacacagtggatccttcctctccctgcaaatcttgccctcaatcagcatgaccatgcatagcacaaccttgagcataaatcaaaccgatccgaggaggtgatgaataacaagtagcagcgttgaaagttgaaaccaattggctggcagaactaaagcaacagagactccattgttgttcttggctgagttctcacccacctcgacttgagagagatcctatcccacttgtttccccgacctaaaagacgacagcatcaaccccatcaaggctggcccccattcatcaccacaaccacccgctatttaaaccctttccaatctatcccccctgccgcttccccgcggcaatcagagctgcattatttgttccctcgtgc

SEQ ID NO: 31319 - DNA, 975 bp, Oryza sativa
  Clone ID: PAT_MRT4530_35638C.1
atggccgggctgagggagatggagtcgacgctgccgccggggttcagattctgccccagcgacgaggagctcatctgcttctacctccgcaacaaggtcgccaaccaccgcgtcgcctccggcaccctcgtcgacgtcgaccttcacgcccgcgagccatgggagcttcccgaggtggctaagctcactgcagaggagtggtacttcttcagcttcagagaccggaaatatgcgacagggtcacggacgaaccgtgcgaccaagacaggttactggaaggccacggggaaggaccggattgtccatgagggtacaacacgagcggtggtcgggatgaggaagacgctggttttttacctcggccgtgcccctaatgggcaaaagacgacatgggtcatgcatgagttccgccttgaaacacctaactcccaacctaaggaggattgggtgctatgtagggtgtttgacaagaagaagccatcgacaatagaagccgagggtggcggaagcagtggcagcgaccttttcattcccggtgccaccgatggctctactgacccctcctcgccgacgacgatggcacctctccttggctcatcgcccgatccgacagtggtggacaggttcgaccaccggtcagcggcggtgccaccattaatggtactcatgcaaggtggtggggaccaaatgatcagtggtagcggtgtccactgcagcaacaacgacaactccggtagtagcagcgcactgcttaacctgacgatgctgcaatacagcttcctagaacatcggccaactggtgacgacatggcggtgggggcccactttggaacatgccagggtggcaacaacgatgccacgatggcacttgggatggggtttgaggagcatggcatgggagagatcatagagatggaaccagcatggcgccaaggtggtagcaactgcgtgtacagggacgagctctacttctag

SEQ ID NO: 31320 - DNA, 343 bp, Oryza sativa
  unsure (1)..(343): unsure at all n locations
  Clone ID: PAT_MRT4530_35639C.1
ngntttttngnaangnnnnnaattctttttttttttttttttttttttttccagaacgcacaaaatcatatatggtcctttatcaccagctattttgttttcaaaacattccattattcattattggtttggaccactatctcgtggcatgcaacacagcaccggggggatcctactagctatggggcaggccagttaagcctagtcctggccgggggaaaaaatgcttgactgttggggctcacccgggcacatcgacggcagttgccccgggtactgccttgcccgggtcagcctaacgcgggtcatccccggctgttgttgttgttcgccgaagtagcct

SEQ ID NO: 31321 - DNA, 673 bp, Oryza sativa
  Clone ID: PAT_MRT4530_3563C.1
gtcaaccgtctccgcgaggcacgcatcgtcatccccttctcctctcctcttctccgcccgaggatctgctgtctcgggctcttttttttagggtttagggtacagtgctcgatcctgtaataattctgaaaaaaggcagtgcttttcgtgtctctgaatgccacatcacaatgcccaaatgcccacggttgcaccgattttattccgtttctcactgtccaaatgccgcatcacgatcgcgccatgattattttttttttagccctcctcaccagctaacttttattcagataaaagggaatgattttttacagggatgggttattggggggaactacaaatacaaccatcactggtggaaactggaaaacaaccaagagacaaggctaactaaaacatgttcaggaacatcatcaagctaaaccggatttttattcaggcaagagggggtttggtttctgatttgagattgcagccacatcaacatcaaagataggagatatttcagagcacacaatcttttcgttgaagactgggccacatgatgttggcaagagcaaccacactgttagttagggagaaagtgagcaattaatttaaatatataaattgcccctctgaatcttctagccgattttgtaaataaacgcacttctgtaaaaaaaaaaaaaaa

SEQ ID NO: 31322 - DNA, 577 bp, Oryza sativa
  Clone ID: PAT_MRT4530_35640C.1
gcctatgagctcgaagctgatgcgcgtgggcgacggcgaaggggccggcggcggcctcccgcgctcgcacccgtcgaacctgccgctgccggcgccgcactccgacccaaacctccagttctccgggacggacgatgacttctccaaccgtcacagcagctcgtcggcgacgggcggcgcgagccccgggtactactccgactacccgtccagcttcagcggcgagtgctcgccgtacaacatgtcgccctggaaccagaccatggcgtcgccgtggtcgcaccacagcgacgcgtccatggccgggctcggcggcgcgcccgccatggcgcccgggaccagcctcatcggctcgctggtgagggaggaagggcacatctactcgctcgccgccaagaccgacaccctgtacaccggctccgacaggaagaacatccgcgtgtggcgcaagcagaaggattcccgcgggttcatgtcgtctagcggccttgtcaaggccatcgtcatctccggcaagcgcatcttcaccgggcaccaggaccgcaagatcagggtgtggcaggcgtctgccaagaac

SEQ ID NO: 31323 - DNA, 795 bp, Oryza sativa
  Clone ID: PAT_MRT4530_35641C.1
atggcacctctcctcctcatcctcctggttttcatgccctgccaaacaatgctttttacttttgaccgcgtgacctcatcacctcccctcttctccatcatatcttcgtggtggatgaatccccttcctcagcacagcagctgctcgactcgatcaacgccacaagattctatggtacgcttggactgtgcacagcagttccgcgggaatggttttgttgtcttcggcagtggcaacacaggcctcatactgacctgtgaacataatttgcccaagaccgagagcaatggtaccgtggccgtggtggtggtgggttttcacactggtgtaaggtttgatgctcgagtcgtctatgtcgacgcaggcagagatctagccttgctccgcgctgatacttttagtgttccttgtactcctttgagattctgggaagatggagatgttgtttctgggattgatgttgttttactcgcattcttcacaatgaagtatggccaagttcttgtagagccaggaacatttcccggaaagatactctccgaaccagtttgggatgaagaaactgacagtggagaaattagatcggactatacatccgagagtggcacatcaggggcacctgttttcttacaaagagtaaacaaggtggttggagtgaacagtggagcacttggtgggactgtcaagactgctatttctgtccgaaccatacatgcggctttaagacagtggcttcaacctggagatgaaaacataacaatcgaggaaatgctaaagaggattgctgaacaatga

SEQ ID NO: 31324 - DNA, 180 bp, Oryza sativa
  unsure (1)..(180): unsure at all n locations
  Clone ID: PAT_MRT4530_35642C.1
atgtaactacgtgttgatattatgtcctgctggcaagttgttcacaatgctgaagcagatgctgacagttgaacacatgaaanatattacaagagatctcagccctttgtgtctcagctttaaggccaatctgcccatctggcaggtgtcagcaggtcaaatcaatttccctccttccaa

SEQ ID NO: 31325 - DNA, 654 bp, Oryza sativa
  Clone ID: PAT_MRT4530_35643C.1
atgtggcggtgcatgtctctcctcgttgcccatgtcgccccggagaaaaagcccaatgactgctggggtgatggcttgggtgactctgctccacgcatcaaccaggacagtctggatgagctcatgaatgacgaattaccaacagtggccaacaagctgagcattgctgaagatatccccagccccttgtgcaacctagcccaagttgattgggacaagatcatgaatgaacgatccctcatcaattttgtcgagccccttgtcaatcaccaggaagctcctggcaacagcggcagcgccttgctgctaatcggtggcggtagcattttgctgctcctcgaggtcagcatggtccagttatatggaaatattgaacacacaattgacccactttggaccgctcaaaccggcggccatgtcatccatgaaacgtgccacctcaccgccagccctaacggcatcattgttgccaatggcccactcaagtgtctcctcggttactatatttcccatgccgacaagagccaggaaggatggggaggctggcccgggaagcgcggctcggtcgacgccgcctcgacggcggagaccgccgacgaccagactggaaaagcgagcgagccaacttcttctctgatttctcagctcatctga

SEQ ID NO: 31326 - DNA, 957 bp, Oryza sativa
  Clone ID: PAT_MRT4530_35644C.1
ccggggtgggggagcgaaggacaggaggccgtgagcgatcgacaggaggacatggcggaggaagcggcggcggcgtcgtcggcggcggaggggaggatgacgatggtggtaggggtggacgagagcgagcacagctactacgcgctgcagtggacgctgcgccacttcttcgccgccgccgccggccagccgccgcagtaccgcctcgtcgtcgtcaacgccaagcccaccgccgcctccgccgtcggcctcgccggcccaggcgccgcggatgtgctgccgttcgtggaggcggacctgaagaagagctccatgcgcgtcatcgagaaggccagggagctctgcgcccaggtgagtgatgctctgtttgaagtgctggaaggggatgccaggaatgttctttgtgagtctgttgagaggcatcaggcggagatgttggttgtcggaagccatggctatggagcaattaaacgagctgttcttggaagcgtgagtgactactgttctcatcatgcgcactgcaccgtgatgatagtaaaaaagccgaagcacaagcactgagtccatgagcggcggccccagcctggactgaacagtatcattcatgtatatatctaccaccaaattgtgaacgtatctgtgtgaataaattgtcattgtattgacacttctagtcagcttcagcatgaaggcatgtaccatatagcatgcactgtatatccttctacctcttggatcctggatcgagaaggtaaataatttatgtttgatatcttaaaacagtgcgtgttaatattcatgcgaaaaatatttcatgtctattacacatatgcatcgtcaagatattgcaagttctattgatctggaattgtgattttattagtgagaaatatttccctttatctgtgtatgtgattcaacaagttgttgccccggcaggcctgagaacagagacag

SEQ ID NO: 31327 - DNA, 722 bp, Oryza sativa
  Clone ID: PAT_MRT4530_35645C.1
aactagtctcgagtttttttttttttttttttttttttttggaggaattcctggatcacttctttatttcattcaacgtaatgcggagttacaaaatttggtaacacccacaggggacaaaaaacagacgctaacaaaaagtacatcaaccctacacctacagtaaaaaaatactgtgtgacctctttctttcaagctgcattatgtataccaaactctatgattctatgagaaaaaaaaaagagagaccagtctgtcgaacaaaaaaacggcctactggtccatgggggagaagggaccgttctcacaaactgctaactaatcatattcacactgcacgaagtcgcctccatttaaacagaaatgtcaaaacagcactgatttcgggattcccttatttacactggaatggatctgcactctgcatcaagcatacgtgtttgatctgaccctgcggaataattcgttcaccatgaaaaattattccagggcgtacaactgctgtttgtcttcatgccacttcttcacaatgtcatccaactctggaaatgcagctagtacaaggagctctaggacttcaaatgctagctgcttcaaacaaactggagactgaagaaagaagtagacgtcctgagcacatctttcgtactcctttcgaccaaccagactcactaacgcagatggtgctttctctatcattagttcatggacaaaattagcaa

SEQ ID NO: 31328 - DNA, 1412 bp, Oryza sativa
  Clone ID: PAT_MRT4530_35646C.1
catcagcatacacacgatggcgtcccaacgccggcgatcatctgccaccgccgtcctcctctccttgctactgctcctccagttggccgccgcctatcctcaaggaaagaggcagaacgtcgccgtcttctggggccgcaacaaggccgagggctcgctccggcaaacctgcgacaccggcgactacaacatcgtcatcatctccttcctcagcgtcttcggccacggcaaatactggctcgacctctccggccacgaccttcgcgacgtcggcgccgacatccgccactgccagtccaagggcgtctacatgctcctctccatcggcggcgacggctaccaatactccctcccttcctccaagtccgccgccgacgtcgccgaaaacctctactactccgtcctcggcggcgaccgccccggcgccttccaccccttcggcgacgacaccatcgtcaacggcgtcgacttcttcatcgacaacggcccagccgaccactacgacgacctcgccaaccgcatcaacgactacaaccagaacatccgcgaccccatcggcatcatgctcacggcgacggtgaggtgctcctaccctgacccgaggatgaaggcggcgctggacaccaagctgttccggcgcatccacgttcgcttctacgacgacccgagctgctcctataaccacgccgggctcgccggcgtcatggcgcagtggaacaagtggtcggcgacgtaccccgacgggcagatcttcctgggggtcgtcgcggccaacttgacggggaagaacgacatggtcgccgtcggcgagctccgcgacaagctgctgccggcggtgcagaacacggatacgtacggaggagtgatgctctggaacagctactacgactcgctcactcactacggccgatacgtcaaggacttggcttgatataattaattaaactcaaatcaaccaataattacttgagcccgtgcatgcatgcatgcagctcaatcactatctcagtaattacggcgtcatgtgtttgatataggaaagtaatccctacgtaggccattctcaacccaatgactaagatggtgtctatagcattaaataaggtgccacctagaatgaaaaatgatgtgacaagtaaataaatgaggaaagagaaggaaatcatgtcttgcatgagacatggtttctacacaacatccaagacatcatgtgagataatgagtattaaatttaagtatggaatagtagtgtttgcattggaagagtggcgtctagtactagtttcttgatgatgtggagtttatgaaaatcatgttttgggttgggatgttgtttttcttttgacctagcttgctagcgaaagctagtgttaattacatttttaatttgtcataaatgcatgtgtgatcga

SEQ ID NO: 31329 - DNA, 416 bp, Oryza sativa
  Clone ID: PAT_MRT4530_35647C.1
accctttatcaaaaatctttggaatttcaaaaaaaaaaaatcaaaagcccgaatttggaaaaaatactggggacctaaaaataaatactggcagtagttagtcatgagttttgttgaccaaaaaataaaaaattcccttggggttgttgaataagttggatgggggggcatactctgccagctttcccttggccagcaccaaaacacgaacactgtcgatgatggggttgattctgtgccctttgggcaccactgtttgcttcgaaaactctgtcctgatgggcttctggatcaaaaagtctgtctcatagtcaacagccgctggggcttcgtccatgaccaaaactcgagagtttctcaaaagtgctcttcccaggcacaaaagttgccgctgtcccaaactcaagttctctccc

SEQ ID NO: 31330 - DNA, 293 bp, Oryza sativa
  Clone ID: PAT_MRT4530_35648C.1
gtttgccataggtaaatgatagataaaggtactagatgtaaagctcacgatgaacgatcaatatggtcgcgagaacgcacttgtgtttttgtagatcgacatcgacgaattcgacatgaaacacctgatgttggtctctcagagagccgtctgcaatgtgaacgtcgtggtgatcgccgccgcgttttttgagatctgcgccgacactgccgacacgggtgtagtgctggaatcatggggcaacgttgtatttaactctgtagcgctagaatctaatgtgggtgggatatgta

SEQ ID NO: 31331 - DNA, 452 bp, Oryza sativa
  unsure (1)..(452): unsure at all n locations
  Clone ID: PAT_MRT4530_35649C.1
ggggctgcaggaattcgggcacgnagccaaanccccgtcttcnncnanctcactggntggngcnggcncncgnnngngnggggggaganaaggnnatgnnggatgcnacgncntcggatctaaggaggcaaaaatccnatccaggttcctgctctgatcactcgctccctcgcattgcttctgctgcgtcacattggccccgtcccntcngtggcacnntctcctgtcatntaactatngtnctctgaggtctncngctangnntccctaatttngaanctcngattcaactnccangaaaatatcntatgtttcgtctcnggatantnanncacnttcagactatgcttgaatttacaatcaagggnatccccgaacnnccnnctaagacctncntccttanattccagacnatgaanccatntnctggngtatnncntnctnntttcnaa

SEQ ID NO: 31332 - DNA, 183 bp, Oryza sativa
  Clone ID: PAT_MRT4530_3564C.1
atggcatcttccggcacattcgacgatctatacaatggggaaggtgtcacaaaagagggcctagtttctgaagactgcagagccacagcaaaagaattccacatgatcaactactttggagaaggaaaataccaagttggcaaatccaaagtgccatgctggatccagcactccagctactga

SEQ ID NO: 31333 - DNA, 409 bp, Oryza sativa
  Clone ID: PAT_MRT4530_35650C.1
ttcttttatgtcgatccatcttcccgctctctgctgttgtgtttctcttcgttcgcaatgtgtggaggctgaggcggagctagggcgcggagactccggggaggagatgccgatgctcggtgtggacggtgctcctctgattccccacaccggggacggcgacggtgagcagggtttgagggaccgacctgcgaccttctcattcctggcttgtctgcctccatctggtgttggaaatatcataagtttttggacaagcaggagaggacatggtgctattatcacaacctgagccggtaattggtgttggtgttggccgatcacaagtgtacactgaattcctggctggaataacagtgcctacagctgctgttgtcattactgccggtttacagacagtactgttttt

SEQ ID NO: 31334 - DNA, 464 bp, Oryza sativa
  Clone ID: PAT_MRT4530_35651C.1
cccacgcgtccgaaaaaaaaaaaaaaaaaaaaaaaaaaaaaaaaaaaaaaaaaaaaaaaaaaaaaaaaaaaaaaaaaaaaaaaaaaaaaaaaaaaaaaaaaaaaaaaaaaaaaaaaaaaaaggggcggcccttttaaaaaatcaaattttacttacccttgcttgcaaagtaatattttttttttagggccacctaaattaaattcattggccgccttttaaaaacgtggaaattggaaaaaccttggctttaccaaatttaatccctttgaaaaaaatccccttttcccaatttgggttattaacaaaaaggcccccaccattcccctttccaaaaatttgcccaccttaattggaaaatggaaccccccttttaccggccctttaaccccgggggttttggtgtttacccccaggttaacctttaaatttgcaagccccttagccccctttctttttttttt

SEQ ID NO: 31335 - DNA, 335 bp, Oryza sativa
  Clone ID: PAT_MRT4530_35652C.1
atggtcggaaaacggcaaggtgcgaaacttgctcggagtcgatttacagcaaatccgaaacattatcaaatattccgtacttggggggcatgtgttaacaaccaaatttggtaatatcggcatcgggaaagaagattggatcgaagcaaagtcggaggcggagatcgagttcggaaacagagcaggaatcggctggagtccagatcggctacgagtaggatcggttgggtctgagtcgggctagagatatgtttgggcaaaagtctgccgcaaagacttatggtatcttagagtttgtgagagatagtagtcgtgtccataatggacatatcttg

SEQ ID NO: 31336 - DNA, 402 bp, Oryza sativa
  Clone ID: PAT_MRT4530_35653C.1
atggcaggagtggtaggcggcccaagaaagatatggagggttggggcggcgcgggccgtagctgggccggccgcccaaccccgcctaatgggtggtaccgcccctggtttcgtcaatgagtattttgagatccaaagcatgatttttaaggccgagaagccaaaccatagggacctccatgataggccacagcctccacaaatatcttatggagaacatcaggccatcgaggtaactccttgttggctgaatagctcagataagcacatagctgaaggtatatctattggccatttcttctttttcgggatcatcgttagcgaaggcgctggaactgcttctcattatagaaagggattttcacatcgcggtaaaggacgttttgagcaggagaagaagtag

SEQ ID NO: 31337 - DNA, 527 bp, Oryza sativa
  Clone ID: PAT_MRT4530_35654C.1
gatcagtctatctacctacggttggaaaaaaaaagggtgtatgatagttagcccaaatgtctctatctctcagctctgatagcaagaggcaaggaggtttaaatttttcactgccaaagaggagttcacatgtcagtgataagagtggtatgtcgccaccagcactaccaacatttaaaatagtatagaaaaatgaagcaacgatataagatggttgaaatgatcataaagttgaacttgagaaaaactatccataattgagggtagaaccacagaagtgaggccctagaggcctatgagcaggttgcctttgcatttcttaacagtgcactgggaccagaacgtaggctctgttcgttatgggaagataggggagattgattctcgttttccgcgtgcacgtttttcaaactactaaacggtgctttttttgcaaaaaatttctataggaaagttgctttaaaaaattatattaatccatttttaaatattaaaataagtaatactcaactaatcatgagctaatg

SEQ ID NO: 31338 - DNA, 2373 bp, Oryza sativa
  Clone ID: PAT_MRT4530_35655C.1
atgacggcgacgtccagggcgccgcggcggccccgcgtccgcgcccccgcgcgcgcgccgccgccgaccccgatccggacggcgcgcggcgcgcgctccgcggcggccgacgagctcgtcctcgccgagttcctcgaggcctccctccgcgtcccggacctcgccctgccgcccaagatgagcagcaggcgctcgttccgctaccccgcgccgcccccgaccccggacgtcctcgcgggggccctcctgtcgggccccgacccggacgccgcgcggacggctgtcggcgccgccgcggagtccggcgcgttccgcgtgggcggcgcggtcgatgccggcgaggtgcgcgcggccgtggaggcggcggaggcggtgttccgggcgcccgaggaggtgaagcgggagctcgggaggtggttccggaggagggatcgggtggccggtgaggagttctactggttccggccggcgacggcgagctcggatgacgaccgggtgctcgacgcggcgctgcccggctcgacgtaccaggtgttgaggtatacacgtacgccacattccgcctgcgctttttatgccgctatatgtagggccgcgtcaatactatgtctgacactatataactgtaacaagttgaaaactcattggagtgagtttggcagcaccaatcctccaaactcgtacgctttgagcatccacctctctggacgagaccaggaaatttgtctgcggaatcagagcgggtcaactttcttcagtttgccggcaggctctatgcttgttacaatcggcaagcagattcaggaatggtccaatggggagttcaagaatgctgttgcttttcttggacttagcttcctgtacttcttcattaatcgtgggggagagcaccgcacgggtggcggtgatgacagtttcttcgttgtgtcggtccagcatgtggtgaccacccctcccccccaccccaccccaacccacatactcgacctgtggagtttcatggtgatagatctccaaaaactcggactagtccgcagcagtaaaacgcggcaccgaaaaaaaggatcacgaagagatccacgagaggggagtaggaacggaacggggcctcgtgacaagaaaacgggggtccaactcgaattgaacggccacccgcagcgcgacgcaactgcaggcacacagtcgtcgccagtcgccgctcgtactctctccgcgaccatacgcaaagctctgcacgtaggtatagctcttgcgtttggcagcgacgacgaccaaagaacgcaaagttgcaaacgctgtgctctgcctcttcttctcgtcttcttcttcacgggttgtaggcacctgaaagatggacgtgcgaccaaccaaaacgccgtgctccgtgaccgcctcctcctcctccttcttcgtcgtcgtcgtgttgcccgcgtggtggcggtgaccaaggtggtggcaacaaggagaaggagaaagggctgtgggggggactggtgggctacaggccgtgatgccaatctctcaacctccaccgtcctgtgcgcgatcgatgttctagtgtacgtactactagtaagcagcaccggctgcctgcttttgcctgcatctcctgtttcaccaccgccatggcacgcactgtccctgtgcatgcacatacatgttgactcgagaaacacactgaagaatgggacgcgcgagctgcaccatgtcgtgcgtacgcatcgacgatggcgtgcaggttcaccctgctggtactggtacagtaggaccgacggccggacggccggcaagatgggtggacagtggtggacgcgctgttcccgggtattcacaagatgccaatatgctaagaattcagtggctgttatcatagttgcaagatgtgaacgccacggtggttgtttccaatcattcccgtatggccgtatcgtgctatgctgcaacatttgccaaggaaacgagctattagctagaggccatgcaaatggggacatcgtcatctgtggaaccctatgctgctcggggacaaacggagcggagctacagctcctggaaccatttcaggggtacgatccatatgtcatgatttcatcgaattgttcgtatgctaatactactatttttaacacaacaaagacatttgccttctactcctactgtggaaagcatcatgttttggagaaagaacatactactagcaagttcagacttcagactgcactacccacaagctgcgagctcaagaagatcgcaattcgcaagatggcgttggcgggtgaacgctctaggggccaggatctatcaaatgtgatcgttgacaaacgcagggtgatggaggatccgtttggaatgcttctcaagagcgtcttagtg

SEQ ID NO: 31339 - DNA, 261 bp, Oryza sativa
  Clone ID: PAT_MRT4530_35656C.1
atatgcaaagtcaaaaggttagggaagaacaaaaaaagaaccaccgtttcagaccacgagatgcactcgcatcgcctgctggtgtacctaataggcgctacaatgatggtgaagggccaattttttgccctatatctcactgacctcaacaaccgtgcagatcaactggactctatgtagtgggttttttagttagctggccttcaaagaatcccttaaccattcagcattgaggctaacgatccaacaccccccatattt

SEQ ID NO: 31340 - DNA, 1944 bp, Oryza sativa
  Clone ID: PAT_MRT4530_35657C.1
atggcccccgccgccgaagtctcctcgtcgtcggcggagaccaccggctcctccgccggtagcgcgccctcgaccgccgccgccgccgccacctccacctcccattcgtcgtaccggcgcacggctcccccgctcctgctcctagcctcgctcgccgcgctcctcatcatctccaccggcgatgacaccgcggccttcgattccgccgccgtggggcggtccatcaaagatgttagtctggaaaatccagaggtgacttttgttccttcatccctgggtggacagttttgcgagcgagttcgcttgtctggaataccgaagttacatattggaagctatgcaaatcaaatacgagtcaaaatgaatgtttcccaatcaatgcctgaaaagttccattggaaaatagaaatttgctttcatgggaatgcttctatgggattatgccaatgtgagacaggtgaatggcaaaatttgcaaaatggcatgtggaatgctgtaaagtctccatatggaaacaaatatgttgatgttaaagtggctgataagacatctactaggttcagtatttccattcaagaagagtttcagaaatggcgtctagcttgcctcggtattggatttattctgctattcctatcacccattgttagcaaatgggcgcctttttactatagcagttctatggctcttggggtcctgcttgttgttctgattgtccttttccaggggatgaaattgttaccaatgggcaggaaaagtttattttacctcacaatttatggatctgtggtaggggttggctcctatgctgtacattatttctccacattggttgcttctattctggaaaattttggtttgagtgaagagatgcacaaccctgtatcaatcttcctgctggtagcaattgtcttgactggcgctggttttggttattggatggtcagaagattcatcctttcaaaagatggtagtgttgatgctgggatagcacagtttgtgaagtgggctatgcgtgttgttgctatatgctttgttatgcagagcacacttgatcctcttctagcgttattcgcgctggccgctagttggtggatttgttctgtgttcacagcatatagagctccaaagtcaatgacactgaagcaaaagcaatcaaaggcttctactcagccaatgtataataaaggatcacctaaccctcgccaaatccaattcttaagcccatccaagagggatattggaagaaccacatcaaacagttcagccacacagtatggctggagcaatttagccaatggaggactggtgtctccaacacttacaaagagggtggtacccgataatcaagatgaagaccactactccaccttccacaatatccaaccaaggaaatattcaaaggaagaatgggatgacttcacccagaaatccaccagaaaggcacttatggagtgcacggcaaccccagagtttgctagatgggttgctgataatgctcaccggctacgagtagagcagcaagatgacgcctcggaggacgagctcatcgagagttcctcaaattcatccgaagaaacagcacaggaagctgataccgggctgttcaggtggtattgatcttggcatgctaagaggctatgccgaattgctgatgctgtgcacgctctgtagaagtaggaggcagtaagaaagctagttagcagtagggttagcatttctattatttccactattgttcccacggttcatgcttcttggtgactgtagttagttagcgatctcaagttaactaatggtagatttagcttagttcgtaacgggccatggatcggtagttagctagttgcctagagttgatcgacttaccagagggctcgaacttgtgtaaatgcagtctattcgatccatcataattgataaatcaatcctgttggaacgttg

SEQ ID NO: 31341 - DNA, 427 bp, Oryza sativa
  Clone ID: PAT_MRT4530_35658C.1
acttgctctgtgctttgtggtggttgttttttttttttccattttattatttttttccattctttcttgttagtgtttttatttttttttttttttttgctttaaattggccacatttgtgtatgtagcggtaacaacatgcctattttgccaactcaatttttatctttgaaccttgagccaccatgatataccaaaacaaaccttttaaaagttttttctaccttgtcaaacaatttgaacgcccattgcttaataacactaactggcctcacccctaaagtacctaggggagggcttgaaatgaattgcataggacaagatgtgcttgccttacaaaacttcttacgatcaacattggtttcaaccgacttatctggagcatttttcattttgctagcacatgtttcaacgaaaacagaaccac

SEQ ID NO: 31342 - DNA, 1374 bp, Oryza sativa
  Clone ID: PAT_MRT4530_35659C.1
tttttttttttttctctgtttcaaactcccaatctgtatggttactttgtcatatatacagaattacagatacaatgttcaagcgcatatggtaacacaacactacagaagaaaattataaggtacaaaagaaacatgaaagctgagaaggcctaaatggcatcccacataaagtgggaatgtaactaccttccacaaccagaggtgtatactccaagtagcggtatagcggctagatctttagggaccaatatggtatgctcacaagccaagtaactttggacaattgtattactagtcctatgccgtcgatctcaagctcagatgtgtcccagcacaggccatggggtcactccattcgcaggaagcagaggcttcatgatcggagctcggcgtgccattgggaaagattcattcaggcgtgatgcttgggccttgaactgggatgccttatgcttagccagtaatatcaggttcctgaagtaaaatggtttgtgtttggtttgagacttgagaactgcaccttttgttttcaatggatagggaagttgaaattttatgctgttttcacccttttcgtcgaggacgaggcggacgcgcgccacggccttgctctgccgccgcatgcggtacaggcgccgccccagcacggcgatgccgagcagcgcgacggcgacgggcaacgaccacacgctcctcgccgcccgcagcgcccacgcccggagcacgcccatcggcaggtgccaccaccgcaccacccccgccccagcccctccgcccttcgtcaccgcgccctcgcccgcctccacctccgccgctgccgcctccaccggcagcggctcggtggcctcggcctcctcccgcctctccccgtcgtccgacgagtccgaccacagcgccgcgcggtcagggccggggaagacgaggtcgtcggggtcgggctccacccagctcgcgttgccggacgccaccccctcctcctcttccccctccccctcctcctccaactccttcgagaaggaaaccctctccggatacttcacatccgaaccaagctcgaagtaatcgtacttgatcgcccccgcctcgtcatcgccgccgccatctctcgtctccgccgcagcggcctcatcggcggcggtgggggaggtgaggagaagctcccagtcgttgaggtccgccgcttcgccgtccatctcgaggcgaggttcgggtgaagcgagcggcggaggcggtgggcgcctgggcggtcggatttggggaggagagcgttgcgttgtgccgtgttgggtggggaagcgaagggaagattcgcgggtttgcaagggatacttggattctagcgttttgggtgggagggggaggaagaacctg

SEQ ID NO: 31343 - DNA, 268 bp, Oryza sativa
  Clone ID: PAT_MRT4530_3565C.1
tcagttagttcgaatcgaaaagcgagcactcgattcgactgagagggcaccccactctccccaatccccaaccccggcggcggttgcggcggcggcacgcggcggagatgctgcagttcccggcgctgatgcggcagtggccgtcgccgccgctgattccggtgtccacgctgcttcccgttcccgccaccacccaggaggacgagctcctcctcgtcatggtcgagtccgacctcgtggacatgctgatcgagatccgcatgaccaa

SEQ ID NO: 31344 - DNA, 595 bp, Oryza sativa
  Clone ID: PAT_MRT4530_35660C.1
atgactgcgccgccaccgaagccctcgccttgggcagagcgggcatgtggttctagagagccacgcattgacgcactccacgtagtgggcagctcccgcatcttctcgccgtccacgagctccgacggcacacgacgcagtcggcccgccgtcgtcgccgcgaactccaggccgccatcgccacgaactctgagccaccaccgccacgaccaccggggggtccataactccgccgccggcgcggccgggttcgcctcaccgtcgccatcccctcgccaaccccgccgccgtcgccatcctgccagatccaggctcggatctagcggtttcctccgccgccaccagtacctcgaaacgccgccgccaccaccaccagacgtcgtcgccgccccaccgctcagccccgccgccggctgacccaccgctagatctgcccgggcggttcccctgccccgagcagcccccaaaccgccgcccccccccccccccggccgagcgcgaggacgaagccccgccgccgctgtccttctggccgcacggccgctcgggcggcggcgaggcagaggaggaggtaatgggagacgggtaccggtga

SEQ ID NO: 31345 - DNA, 2424 bp, Oryza sativa
  Clone ID: PAT_MRT4530_35661C.1
atgactatcctccttgtcattcttgggcttcatctctgcagcctacacctccctgcaatctctgctgcagcagacacgctctctcccggccaatcgatcgccggcgacgacaggctcgtctccagcaacggcaagttcgcgctcggcttcttcaacaccggcagtaagtcctctggaaatgacactctcagctactggtacctaggcatatggttcaacaaagtcccaaacaaaacccatgtttggatagcaaacaggggtagcccggtcacagatgcaacctcatcacatctcacaatctcccccgatggcaacctcgccatcgtaagccgagccgatagctccatcgtttggtctagccaagccaacatcacaagcaacaacaccgttgccgtgctcttggacaccggaaaccttgtactacaaagctcctcaaactcatcacacattttgtgggagagtttcgaccatccgaccgatgttttcctccccagtgcgaagattggtctcaacaagatcaccggcctaaaccgccgtatcttttcgagaagggatctagtagaccaatccccaagtgtgtactctatggagtttggacccaagggtggttaccagttggtatggaactcatcggtagaatactggtctagcggcgaatggaacggccggtacttcagcaggataccggagatggtagtcaagtcaccccattataccccattcattttccaaatcgaatatgtgaacaatgatcaagaggtgtacttcacataccgcatacacgatgaaaccataccactgtacaccgtgctagaagtaactgggcaaagaaaggccttggcctggttaaatgacacacagggttggcaagcagtcttcacccatccaaatgatcagtgtgaagttgctgctacctgtgggcctttcacaatctgcaatgacaacacatttccatcttgtagctgcatggaaggcttctccatagaatcacctgacagctgggaactaggagacagaacaggtgggtgcaggaggaacattccattagattgtgttagcagcagaagtgacatcttcaacgctgtaccggccactagattgccctacaatgcccatgccgtagaatccgtcacgactgcgggcgaatgcgagagtatttgccttggcaagtgctcttgcacggcatattcatttggtaattacaatggttgctccatatggcatggtaaattggttaatgtgaaacaacaaactgatgacagcacctctgctaatggagaaacacttcacattcgccttgctgctagagagcttcaagctagaaaaagcaataaagggttagttgtaggggttgttgtatctgcaagcctctctgctttgggtatcttaacacttgtcttgctactgatcatgatcaggaggcacagaaagaagttgcactgtcaagcattgaacagcatttatgctggtactggagttataccattcagatatagtgatttgcaacgtgcaactaaaaatttttcggagcaaattggggcaggtggttttggttctgtgttcaaggggttgttaaacgggtcaaccgctatagcagtgaaaaggcttgtctcctattgtcaagtggagaagcaattcagggctgaggtgagttccattggagtcattcatcacaccaatttggtcaaactgattggtttctcttgcaagggtgatgagaggttgcttgtttacgaatacatgtcgaatggctcccttgatactcatttattcagaagcaataacagtgtaaccctgaattggagtactagatatcagatagctcttggagttgctcgaggactggcttacttgcacgagagttgtcgagattgcatcatacattgcgatatcaagccacaaaacatacttctcgatgatttgttcgttccaaaaattgctgactttggaatggcaaagcttctaggaagggattttagtcgggttatgactacagcaagaggaactattggatatctagcacctgaatggtttagcggagtggctgtcacgccaaaagttgatgtgtatgcttatggaatggtactcttggaaattatatctggaaagatgaactcgcatagagagtctaatagttatgctgatcacatcgtttgtttccctcttgaagttgcacataagcttcttgagggggatgttctaagcttggttgatggcaaattaaatggcgatgtcaatgtcgaggaggctgaaagagcttgcaagcttgcatgttggtgcattcaagagaatgaacttgaccggccgacaatgggtaaggtggtccaaattcttgaaggtctactcgaacttgatttgcccccgatgccaaggctacttcagtctatagtacagagctcatggaaaacagagacccaacactga

SEQ ID NO: 31346 - DNA, 1483 bp, Oryza sativa
  Clone ID: PAT_MRT4530_35662C.1
cagcgccgcgccgccgccgccggcgaccaaccgcctccgccgccgccgcaggccgacccggggctggctcctccgccgccgccgcctccgacgacgacgacgaacttccacgacgaccagcacttctgcttcccctccatgccgccgttccacgccggggtggggccaccgccgccgccggacgacgcgctaggaggagggtgtaataatttctcctcgccgccgttcgtctcgccggcctctccgccgccgcctcctcctccgccgtggtcgaccctgccgccgccgccggcgggttcgattccgccgcgattttccccccacttccaccactagactatttacgtcgccccgcctcggcctcggcctcgtcctccgcctcctctgcctccgccacgcccaccaccccgcgcccgcgcccgccgagacaccgccgcgccgcgccgtgtgccacgccacgccgcgccgcgctcaattccccaccgccaccgccaccgccgccgccgccctccccctcttctcccttccgggtttttgcctttttaccgccccgctctgccccccccttccccacgccgcgccgccctcctcctcctccgcctcgaaccggggccgcggcaccccggctggatctgggcccgaacccccgatggcgttcggcggactcgccctcgcgctcgcgctcctcgtcgtatcagtgaacttgctccaggttgcgagctccgatggcgaccacgcgcgctgcgagggggtcgtcaagggctgggcggcctcggttgcggggagcgagggcaaggatggggacaagctgagcctcagggatctgctcttcttccttcacattcctagaaccggtggccgtacctacttccactgcttcctgaaaaagctgtataccaatgctgaggagtgtccgcgatcctacgataagctgcggttcgaccccagccatcctgattgtaagctggttgttagtcatgatgactatagcttcatgtccaagctgccaagtgagaggacttctgttgtcacaatactaaggaacccagttgaccgagtattcagcacatatgagttctcggtcgaagttgcagccagatttcttgtgcatccaaacttaacatctgcaaagttaatgactagccgtgtgttaacaaaatctcgtgctgtaagtacattggatatatggccttggaaatacttggtcccgtggatgagagaagatctgtttgccaggagagatgctagggggattgataaagtgagaagtagccacagggttaatgcatatgatgtggaggatatggttatgccactacaccagtacattaatgatcctgttgcgcatgaaatcattcataatggagctacctttcagattactgggctaacaaacaattcttacctcagtggagcacatgaggttcggcactgtgtcagaaagcaccctgatcttggtcattttgtgcttcaagttgctaag

SEQ ID NO: 31347 - DNA, 975 bp, Oryza sativa
  unsure (1)..(975): unsure at all n locations
  Clone ID: PAT_MRT4530_35663C.1
atggccgccgacgcccgcctctcccctatcccctccaccttccggcgcgccgcgtcagcggtggcggagcgcggggaggacacggcggcagcgggcggcgccgaggagggggacgcggcagcaggggaggacgcggcggcggcggctacggcaggtgacgcaaaagcggcggcggtggcggcgggggacgaggaggacgacgaggatggcgacgaaggagtggagacgacgctcgggcgctggctgcggcggccatggcggagaggtaaaccgcggggaggaagcgggtancggggaagcggcgccgaggaggtggcggcggccgctcggcgcggtttccccccttccccccgccccaccgccgctgtcgtgcgcgccatcctcgtcgtagtcatcctcatgccccctcttcggcgccacccaccaccgccgcgtcacctgccgcagccgccgcccgctgccgcgtcacttgccgcagccaccgcccgcagccgcgtcacctgccgcggccgccgccctcatccctcctcctcggcgcaacccgtagccgccgcgtccttcccgcgccactcggcgccgcccaccaccgccgcatcctccctatgccgctcggcgccgcccgccgctgccgtgtcatcctctaccaccgcatccccctcctcggcgccgcttggcgccgcccgccgctgccgtgtcctcccttgccgccacgtcctccccgcgctccgccaccgcccacacgccgccgccgcgtcctctcctgccgcctccgctgatccgtttgagagagagagagaaaagagagaggatgaggagtatgacaggtccatgaatgcacggcaaaatggcaacatgccaggttttgtacacctggtaacttcagagtttgagtcagacagggctagccgatacagccgatttcaagaatacgacttggtgtacatcatcgggttgagttattatgcttcaagatga

SEQ ID NO: 31348 - DNA, 498 bp, Oryza sativa
  Clone ID: PAT_MRT4530_35664C.1
atggaatcagaactcacaactttagatattgccacagttgaggccgaatggcttcgtgagctcctgatggacttgccggtggttaaaaatttcagtaccagcgaagtttttggggagcgctacacgcgactgcttttgttcgtcttcctctgcatcgtctgcgccaacatgtcgaacaccggcgacaacagtaacattggagacaaggagaaggaggctcccgtcaacaccaacggaggcaatactgcttcaaactccaacggaggaccgttctcggggatataacgatttactattaccattcgttcttcatttcctactactatcagtcgcaatgttgttacgttgccttatctattctgatgcttattttatattaaacatgctaatgttgtacatatctagcactatcactagatctattcaaattgcaaatattaaaatatattgaattatgaccaaatttccaacagttaaaaaacgtctattttcttatac

SEQ ID NO: 31349 - DNA, 371 bp, Oryza sativa
  unsure (1)..(371): unsure at all n locations
  Clone ID: PAT_MRT4530_35665C.1
acgatagacacacgcactaccaccactgaccaccacgcacctggcacttcttaacttaccgtaccacccccaccaacgaccttggacgacggacacggacctaccactcactccgtaccaccccgnccactacgactgttctcacaaaccacttcttatacttcttacgcaccttactttacacctacggacttgacacttttctttcacgttctccacggttcttacgacttcaccacacacctccacgacggacaaccaccacaacgttaccacgtggaccaactacaccccactccacctttgtacacctgggatccacaacctacctacgccttacgcacgtacctacgggccctatcacacttctc

SEQ ID NO: 31350 - DNA, 354 bp, Oryza sativa
  Clone ID: PAT_MRT4530_35666C.1
atggcggccactgccatgccgtcgtcgatgccgcctccgcctccggcgatcgcgacgttcgcggcgccgctgcagccggactaccagggctccgtcaccgccgccgccgagggggcggcggcgcggggccacggcggcggggggtccatcggcacgttcttcgccgtgctcgcggcggtgctggtgctcaccctgctgtcctgcgtcctcggccgggtgtgcgcgcgccacgccgacgggcccgacgagcggtacgaaagatatcaacctcgaaatgggacgtgcggtgttgctatcaaaatcagtgtagtagaagtccagggtgaccagaaggcggcggtagttgacaaatga

SEQ ID NO: 31351 - DNA, 242 bp, Oryza sativa
  Clone ID: PAT_MRT4530_35667C.1
acagttcatagcattaacgcaattgcttgcattttatttttaatttattaactcattctttatccgaattgccaacttaagaggatggcgccgcattataaacttcttgcgcgcttttgtttcggccgggagcgaatgcaccgaactcatctcacatgttatgcttgggcctctgagcctctcctcttgcgaggcgaaatgcatttgctagaacatcattttggagagcacggaagacggaa

SEQ ID NO: 31352 - DNA, 462 bp, Oryza sativa
  Clone ID: PAT_MRT4530_35668C.1
atgggagccactgccaccaccggagcacacacactgcagttcctgccccacctgcgtgtggccttgccggccgatgaaatagtcgaggggaaagatgaaatagttgacgggaaagaccggaagaatataattaatccagccgagacgacaagtcaagatcctccaacggggcgtgcctcgggaagaggatgtagcctaggtgggcggcaacgacgccggtgtggtccggctcgtacacgtccatcaagccatgacagtgtaggtagaagtggagaggaacggcggggagtaactgctcttgggcgccgatctctgctagccgcatgcgcacagatcgcactggagtcaagtggagcgcgctgtttgatccataatttatccgcgcgtcgtcactccgaggcagggctgcagacgactgggttggtaacccgctgcccaggcaaggagaacggtggcgactaa

SEQ ID NO: 31353 - DNA, 682 bp, Oryza sativa
  Clone ID: PAT_MRT4530_35669C.1
gtgctgatacattcacggatacatatcgcggcaaccgcggttcaatcttgggagatggcctaggggtgggatggggagcagctggatctccatcgggttgcagctgcagatgcagagggaaaagaggtaattgactgtgatagatcgtgagtacctgttgtaactcatgttcctccatctgtggtttgtaaaggatcgaagtttctttaaagtgtgaaagtagctctgctctttagcttgttggcataatggaagaaacatcaccaaccaatatgaggcgcaaatattcatggtggtggaacagtcatatctgcccgaagaattcaaaatggcttcaagaaaatctgacagacatggatagcaaaatcaagatgatgatcaggatcattgaagaagatgctgaatcatttgcaaaaagagcagaaatgtactaccgaaggcgtcctgagctgatggccttgcttgaggagttgtaccgtgcataccgagctttagcagaaagatatgatcatgcagctggcgaactccgacaggcccatcgtaagatagcggaagtatttcctgagcaggttctggtggacttggatgatgatctcccagctgaaactgcttctatcgaaactgagatggacaatccagacatggctccatatttcctttctttcatcaatgctagtgattc

SEQ ID NO: 31354 - DNA, 2187 bp, Oryza sativa
  Clone ID: PAT_MRT4530_3566C.1
atggcggaggagagagaaagcttcgaaggtcaatgggctccttccgatgttacagaagagaacttgaaggagatggtggcgcacggtgttcttccggcaaaggaaatcatcggctggcgtccggcatgcggcgaagcattcccaaccccggacatgcacgagatcgtggtattttccaatttcttctatggtggtttctctcttccaacttcgaaattcttcagggggatccttgagttttatgggattagtttacatcatctcaaccccaattccatagtccacattgcaaacttcgtccacgcctgtgaagcttttctgggaattaggccgcatttcgccctattccgtcgcattttcttcctgaagccccagccaaataagaacaagccgtgcgtcgttgggggagccggttttcaactggggggcactctgagccaaaagtacttctccatgcctttcaaaacttccaataagggttggcatgcaaattggttttatgtgcaaaatcctgagccagcacttcccgagtactcctgtcttcctccaacatatcaagatacatggaactcgctttcaatgggagatgaagctgctcaagcccttactctcccagatcgcatgctgaagctcaaggaacaaggtctgcacggggagcaaattactcgacactttatcaagagccggttggcgcctatcaaggaaagataccgtactgcctttgaatttgatggcaagaatgatcccaatcgcgaagatccagaatctcttgaatttaagattatgaaagagaggatgtataagattttctcatccggcattgtagtcgactactcgcacatactgcagtggtgccttatcatgccttcaaccctcctcctccagatgaggaaactggtcctaagcgacgacgagggtgatgttgctgaaaaagctggtagcaaagaggcagctggaaaacagcccaaacaagctaacccaccaaagaagacgacatccagtcgtccgatacccaaaattagaaagtcgtccaggaagccatctgacatcgatccatctggaaaagacctcaatctgactaataatgaaactggttctgcaactgccaatgaagccgggacaacaaaagaaaaccgcccgactggtagtcagtcggcaactgacgatgtagagactggaaatgagcgcccgactggaaaccataaggacatcccggagacagaggaacaagcgagcagccctccactaaatgataccaatactggtccagaggctagttcttttgataaggttcaaggacctgctcgtcctccaccgaagattataacaggtaacaaccctctgaatacagatcgcaaaggcccgatgattggtgatgaagaagaagtccttcgaattcgatcagctgaagattctcgtctgcccatcttagttaaatggtgggatgatgagatgcaatcgcagggcattgtaatcaataagcagaaacaagacaaagaagtgtctttgttaacaaggacacttaaccaagccactcgtcttgtaaatagaatccatcttcgaaacgaggcaaagaccgcaaccctcgagaagctagttcctcaccttgggagtctggaagaaaccagagctaaactccgcgaaactagagagctggctaggaaaactgaacatgatctcagggaccgggttgccgagcttcaagaagcaaactttgaattaagtggttcatcaaaagtccaagctgctaagatcaccgagttggagaggcaaattaaagctctcgaaaaggataagggtgatcttacaaaagaaagagacttggccatcaaggatgttgaagatcgcaaaattaagtccgaggctcagtttgatgtcctgattaccaagattaaaaaacttgaaggggctagagatgaagtcgccaatgctgctacaccgctgatcgaagccatgttctacaataacaatggtccgagtacaatcgatgctgttgaagtcttcgacaaattgagaactgctccagacacatatttcaagaatatcaaggaggttggaagcatgggagctagcatggctctggcgatgactaaatccttgtatccgaagatcgacattgatgccgttgatggctttgcagacggaacaagcgaagaagatgcccttgaccttatcaatgatgcctag

SEQ ID NO: 31355 - DNA, 201 bp, Oryza sativa
  Clone ID: PAT_MRT4530_35670C.1
atgttggctgcggcgagcaggactacgatgctagggataccggacagtggacagctcgtggcggctctcactggacttggcgaagaagatgagcacatccgcgacgcgggcagagacgacgacatcgcctgggaggcggaaccggctgcggtgcgcaatggtagcggaggaggagaattcaacggcgccatcggaggatag

SEQ ID NO: 31356 - DNA, 360 bp, Oryza sativa
  Clone ID: PAT_MRT4530_35671C.1
gacgaaacgagggcccccgccccgtccccgcgcccgctcgtcctcgtcctctcgctgcgccgcacctgtcctctactgtcatctactccctcgtcggctcgtcgccgtcccccctgccaacctgccagtgccaggggatctcagcaccctcacttcctccccaccgcaaaaaacccccacgaaaccctcgtgctcccttccgtgccccaccacccctgcactgacgcgcctcgtcgccacccgatcgatcgatcgcctcgtgaagcgccccgcgcgcggcccctctctcgactgaaatcggaaatccccaccctttctccaatcttcacctctcccgtacgacatggaagccgccgcgct

SEQ ID NO: 31357 - DNA, 737 bp, Oryza sativa
  Clone ID: PAT_MRT4530_35672C.1
acgtggccgagctgcgcgacgccgccgacatctggggcaagagcgtgtgggagaccgaggagcacctcaagaccacgctgcaggacccgctcacgcgcatctccggcatcggccgcgcaggcgagaaccaggtactgttcgccgccgtggtcaatgacctgcaccgcgccgcgggccgctcgggcgtgggcgcggtcatgggcagcaagaacctcaaggccatcgccgtgcgcggcaccaagggcgtgggcaacatccgcgaccccaaggccttcatggccgagaccttcgcgcgcaagaagatcctgcacgacaacgccgtcaccggccagggcctgcccacctacggcacgcaggtgctgatgaacgtgatcaacgaggtgggcgccctgcccacgcgcaaccaccgcgacgtgcagttcgaaggcgccaaggacatctccgccgaggccatggccacgccgcgcgccagcgacggcaagaagcacctggtgaccaaccaggcgtgctttggctgcaccatcgcctgcgggcgcatcagcaagatcgacgagacgcacttcaccgtggtcaacaagccgcagtactggggcgccagcggcggcctggaatacgaggccgcctgggccctgggcgcggccaacggcgtgaacgacctggaatgcctgcagtacgtgaacctgctgtgcaacgagcaggggatcgaccccatcagcttcggcgccaccgtgggcgcg

SEQ ID NO: 31358 - DNA, 1029 bp, Oryza sativa
  Clone ID: PAT_MRT4530_35673C.1
atgtcggcggtcgagaggaagacggcgtgcgtcaccggcggcaacgggtacatcgcttctgcgctcatcaagatgctgttggagaagggatatgctgtcaacacgacggtcagaaaccccgatgacatggcgaagaactcccacctcaaggacttggaggcacttggccccttgaaggtcttccgcgccgacatggacgacgaaggcaacttcgacgatgccgttgccggctgcgactacgccttcctcgtcgccgctccgatgaacttcaattcagagaatcctgagaaagatttggttgaagccgccgtaaatggaaccctcaacgcgatgagatcgtgcgcgaaggcggggacggtgaagcgcgtgatcataacatcgtcggacgctgcgatctccagaaggccgctgcaaggcgacgggcatgtgctggacgaggagtcctggtctgacgtcgactacctcagaacagagaagccgccagcctgggcgtacagtgtctccaaggtgcttttggagaaggcagcatgcaagttcgcagaggagaacaacatgagcctcgtcaccgtgttcccggtgttcaccttgggcgcagcgccggctccggagaaaaaccaaatgatttataatatgaaattaagggagtacttctcaggtgatgagacgcacctcgaagtcctgaagcccctgcagtgggtcaccggctccgtgtcgatcgttcacgtcgacgacctctgccgcgccgagatattcctcgccgaaaaggagtcatcgtcattgtcgtcggcgaggtacatctgctgcagcttcaacaccaccgtcttggcgctcgcccgtttcatggccggaaggtacccgcagtacaacgtcaaaaccgaccgcttcgacgggatgcctgagaaaccgagagtctgctgttcgtcggagaagctgatcagggaagggttcgagttcaagtacacgaatatgggcgacatactcgatgaccttgtacagtacggcagggccctgggaattctaccacattga

SEQ ID NO: 31359 - DNA, 1212 bp, Oryza sativa
  Clone ID: PAT_MRT4530_35674C.1
tcaatgtggtagaattcccagggccctgccgtactctacaaggtcatcgagtatgtcgcccatattcgtgtacttgaactcgaacccttccctgatcagcttctccgacgaacagcagactctcggtttctcaggcatcccgtcgaagcggtcggttttgacgttgtactgcgggtaccttccggccatgaaacgggcaagcgccaagacggtggtgttgaagctgcagcagatgtacctcgccgacgactctgccgacgacaatgacgatgactccttctcggcgaggaatatctcggcgcggcagaggtcgtcgacgtgaacgatcgacacggagccggtgacccactgcaggggcttcaggacttcgagatgcgtctcatcaccggatagcaaggagaggatgccggggacgctcgtcctcgccaccggcgccggcgctgcgcccaaggtgaacaccgggaacacggtgacgaggctcatgttgttctcctccgcgaacttgcatgcggccttctccaaaagcaccttggacacactgtacgccctcatccaatagtatggaaagacaattttaccccctttaattttataccaggctggcggcttctctgttctcaggtagtcgacgtcagaccaggactcctcgtccagcacatacccgtcgccttgcagcggccttctggagatcgctgcgtccgacgatgttatgatcacgcgcttcaccgtccctactttcgcgcacgatctcatcgcgttgagcgttccattgacggcggcttcaaccagatctttctcaggattctctgaattgaagttcatcggagcggcgacgaggaaggcgtagtcgcagccggcgatggcatcgtcgaagcttccttcttcgtccatgtcggcgcggaagaccttcaaggggccaagtgcctgcaagtccttgaggtgggagttcttcgccatgtcatcggggtttctgaccgtcgtgttgacagcatatcccttctccaacagcatcttgatgagcgcagaagcgatgtacccgttgccgccggtgacgcacgccgtcttcctctcgaccgccgacatcgtcgtcgtcgatcggtcgctacaacaccccaccagcccagatgagacgaagaggacgaggaatttatttttgttgctgtactttgggaagaggttcaatttgtgtaagtgaggtggtctcccggccgg

SEQ ID NO: 31360 - DNA, 523 bp, Oryza sativa
  Clone ID: PAT_MRT4530_35675C.1
atgaagatcacggcgctgctggtgctcaaatcccccggcgacggcgactcgtcgtcgggtggcggtggcggcgagcaggagcaggagcagcaggcggcggtggtggtggcgaacgcgaccgacaatggcctctgcgccatcgccttcaccgacgaccactaccccgtcaggagcgccttctccctcctcaacacggtgctggaagagtaccacaagacttttggggagagatggaggacagcaaaaactgataacacccagccttggcaatacctggatgatgccttgacaaaataccaggatcctgcagaggctgacaagttgctgaaaattcagagggatttggatgaaactaagattattcttcacaagaccatcgatagtgtactttctagaggtgaaagattggatagcctagtggagaagagttcagatctaagtgctgcttcacagatgttctacaagcaggccaagaaaaccaactcttgttgtacaatcctgtaagttatgcagatgttctaca

SEQ ID NO: 31361 - DNA, 1530 bp, Oryza sativa
  Clone ID: PAT_MRT4530_35676C.1
ttagtttcgtttttttggacgaaaggatatgtcacatccagtcttagtttcgtttttttgacgaagggagtaggttgaaagtagagcagcatgagctgttcgttcaatgtggtagaattcccagggccctgccttactccacaaggtcatcaagtatgtcgcccaaattcgtgtacttgaactcgaacggtcgaacccttccctgatcagcttctccgacgaacagcagactctcggtttctcaggcatcccgtcgaagcggtcggttttgacgttgtactgcgggtaccttccggccatgaaacgggcaagcgccaagacggtggtgttgaagctgcagcagatgtacctcgccgacgactctgccgacgacaatgacgatgactccttctcggcgaggaatatctcggcgcggcagaggtcgtcgacgtgaacgatcgacacgtagccggtgaacgattgcaggggcttcaggacttcgagatgcgtctcatcaccggatagcagggagaggatgccggggacgctcgtcctcgccaccggcgccggcgctgcgcccaaggtgaacaccgggaatacggtgacgaggctcatgttgttctcctccgcgaacttgcatgctgccttctccaaaagcaccttggagacacagtacgcgccgttgccgggcggcttctccgtcaggtagtcaacgtcagaccacgactctgcgaggatcacgtgcttaacgttgcccagcggccctgctggagatcgcagcgttcgacgatgttaggatgacgcgcttcaccgtccctgccttcgcgcacgacctcatcaggttcagcgtaccctggacggcggcttggactaattctttctcaggatcctccgaattgaagttcatccggagcagcgacgaggaaggcgtaggcgcagccgcagcgtatcccttctgcagcagcatcttgatgagcgccgaagcgatatacccgctgccgccggtcacgcacgccgacatcgccgcggttagttggctactgcgacggcatcgtccaagctgccttcttcgccgatgtcagcacggaacaccttcaaggggtcaagtgcctgcaagtccttgagatgggagttcttcgccatgtcatctgaatacaaatcgcagcaattagtagaatctttgagaggtgaaactgaactctgaactgaatggaagaaacacggggtttctgaccgtcgtcttgacagcatatcccttctccaacagcatatcttgatgagcgcagatgcgatgtagccgttgccgccggtgacgcacgccgtcttcctctcaaccgccgacatcatcgtctctctctctctctccggtcagttaatacctctcctgtgacagagaaggtgacttgggtcctcgccccggttcctgccgcccggcgctccgctggtgaggtttcttttgctgattgcgctgttgtggcacttgccaggacaaatcccggagagcaggaacataatgcatttgacttagccaacactattttaccctcgtgc

SEQ ID NO: 31362 - DNA, 341 bp, Oryza sativa
  Clone ID: PAT_MRT4530_35677C.1
caaaaaaggttcaaaaggggccaaaacggaaaaatttcccatctttaaaaagacccctacaagtatgaaggcgaggcccgtcttatcggaagacgccctcaagaagttgattccaaaaccaacccatggtttgattccatcccgattaattaccagttttgggaatggcaaacaaatgggaaaaaaagccatatgagccccttttggatacctggttcgcccagaagggacccgccaatagattgaaatcctcatcaggggcggggggggccgtcgctctcaccccggatttggaggggacccgggttggcacggtgggacacaagttggcgcggccggac

SEQ ID NO: 31363 - DNA, 293 bp, Oryza sativa
  Clone ID: PAT_MRT4530_35678C.1
gggagccatttcttggcgttacgaatgtcaaaatctgatccatatagtagattacagcaaaaataaatgccaacagcatgtgctagacacatacattggttaagtccaactatagatcacagcattagggggaactaaatatagacactaaaatactttttctagctagaacaactctagatctggacagtaccatgcctccacagacctgtgatgaatatactataaacacgccgaaaattggtgctggggattccatcatataccatacaccatcacctggaaccgaatgc

SEQ ID NO: 31364 - DNA, 366 bp, Oryza sativa
  Clone ID: PAT_MRT4530_35679C.1
ttttttttggttgtttttttttttttgcgtactgcctacctgtttttttttttttttttatttttttttttgtccattggtgttttttttttctatgaaaaccaccgaaggttgtacaccacaaattttacttgtacagcaagctttggaaaaaaaaatgaaaggttgtgcaccaccaattcagaatctaaaatgcaacggaactctggattggggctcggctagggacaggaacccccccgcttttaggagatttcttaaaaaaccccatggtagcaaagggtgggggcccacataacggggtgtctagggccataaagggggccagaaaaaagggtcaacccaaaaaaaaggaaaggtttcccg

SEQ ID NO: 31365 - DNA, 738 bp, Oryza sativa
  Clone ID: PAT_MRT4530_3567C.1
ctacttgccattgtcggtgatgaactctttcagcacactaaaccgacagacaatggtttttcgcaagaatttctggactgctgccgaagtgatagtatggagtggttcagcttctaaccaccgagagaagtactcaatagcaacaatggcgaaccggtagccatttcgcgccatagggaacgggccaatgatgtcatgcccccactttgagtacggttgaccaatatacacttgccgaaactcttcggatgctacggtccttgctgcctgatgggctccacacaatccttggtggatttccttcaccacttcttcgcctccggctattgatatgcaccgaagcaaatgttcacacggagacattgccatcctcgcttctctaccactgccgccgtgctcttggaaggagaagcgtggcaccgacaaggttggtccgacgcaggggcaccctgcggcgccgtcgacctcatcgggtaggggagcgggaggaatgctggcgtcggtcaacgtcaaccacgtctcctgcgccacggcgccatcgccgtcctcgcccccatgccgccgctgctcattgagctgctcctgctcctctatgacgttgccacggtggaccgtctggggctcctcctcctcctcaaacttgttgattctctctgttgtgtcggttcggaaatccagcacctttagcgcttcccaaccggcaccaatgagcaaagcccgcgacgctgtcgacctcat

SEQ ID NO: 31366 - DNA, 408 bp, Oryza sativa
  Clone ID: PAT_MRT4530_35680C.1
atgaagatccaatatgaacttaattcggatagggatctgaataggagtcctacgggccttggaggcccaagtgatggatcctatatattcgtgaggggtgtgaccggcggaggcattgcatcaccgtggaagtacggcgaggagaacgcacgagtaggagaaggtcgagccggtgcgatcggctacttcctctacatcgacgcgcgctacttcgcgagagttccttcgacttctcagcgtcttcttccgctacacagcgcgtcgagtgtcggagctccgacgaccacgccacaggcggcgcaaagagctgatggcccagatcctggcatcgggagccacgacgcctcacccggcgacggcgaggaggaggaggccccgtcgccgcgtccatcctccacaggctgctag

SEQ ID NO: 31367 - DNA, 246 bp, Oryza sativa
  Clone ID: PAT_MRT4530_35681C.1
atggtcgtcattgttgcgttcttccgccgcagcgggctcatccactgcgtcgtcgcgtccttctgccagtgtcgccttgtccactgtggccgcggccgtcgtgtcgccgccattgtgttgtcgccatcttccaccgcaattggcgtcttcgtccgccccagccacctcagcactcagcagtggactttctcttcaaacccaattcacctcttcttccgcccgccgttggctgccccgcacgcgtag

SEQ ID NO: 31368 - DNA, 305 bp, Oryza sativa
  Clone ID: PAT_MRT4530_35682C.1
cgattcggatcaaatcctcaacgattctttttgattcttggggaaaaagaaagaggagaacgagaggaccaaaaccccttaaaaacccgaaggaatcggagtccgattggggcgaatttggaggtggaaggcagcggctcgggctcggccggcggctggaggtaggagatggatccgacaggtgggccccacctgtcggcctccacgaaaaaggggagcgggcggcgtcggcttgggccggcatgggccggttcggccgcgagagagagagaggatgttgggccgaaaacggcccaacggcttag

SEQ ID NO: 31369 - DNA, 324 bp, Oryza sativa
  Clone ID: PAT_MRT4530_35683C.1
ttgcgacccagccttggacccagctgagaccgccatggtgactacgcggacggggcgcagctacccgcacctgcccccggatgatgcgacacgattggaggccgacgcgctgggctacttccacagcatgacccgcaggcccccttccaagccggcgcggagcgacccgtcggacgccagctagggtggggcggaaggctacgccaactccaagctgaacgaacttaggaggctctgggaccttgaggtcaaaacccagaagttggtgctggaccgcggggattttaacggggaagatgttttgagaaccaaatacttcaaacg

SEQ ID NO: 31370 - DNA, 441 bp, Oryza sativa
  Clone ID: PAT_MRT4530_35684C.1
atggagatgggaagcaagctccagatggctcagctcaaccgagtgacaatggtgctaccgacggatctctcggaaatcaaggtgatggtgctcaaggattatagggaggagatcttaatcggaatagtgatgtggcacaagattgtttcaacaatttccaagaccgggttgactacgccttacaccaacagctcagccgacggcgccagcatcaactcccctacctgcgttgtcagcgatgacgccaggctagccgacgccgttaagacagcaagtcgttcagctgattcagcaccaaggttcaataagtgcatcggccgggtttgcaacgcctggcgcttgattggtattgggctgcagtttgcatcccctctgtttggagcatataagtcaaactccaggccctttcatgagtatctagagatcacccaaatctcatag

SEQ ID NO: 31371 - DNA, 732 bp, Oryza sativa
  Clone ID: PAT_MRT4530_35685C.1
ctactccttactgctgaaatctttgtcaatctccatcctatctgtaaaaacatttgcagaagaaacaacatttcctttctcattgttgtcaccatcccccaaattcttcttcacagataatagttcttttgcctcagttcccttgctgctctgaaaaggttctagagcatcttctggtctatatttctctgacataggatccctgttgtcataactctctctccttttcttcccattccttccttcttcgctagttgagagggcaacggatctttttctagttgtttcatgattctgccgttgatcacttggactcatttcataagcattatatggatcttccttagcagcactagaaccctgatccttgctacacggcttcaaggtatctgaagcaagcaaatcagcgaacctctcaaaacgagcttgcgacctttcgcaagcttctttttcatcgttcaattgtgattcaagatcagctattctgctagaaagtttggatgcttcattgatcttgccattcagtatcacctccagtgaagatttctcctcatgtaatgcttccatatccagttgaatgcgttgcagctgtgcttcattatcatgtttatcatcagctttgttgaatctatcatccttttttctatctcttcctgatgggagatcttgaatgactagagcctctatctcgagagcgcggtctgtgatcacggaacaaatgatccctggcat

SEQ ID NO: 31372 - DNA, 528 bp, Oryza sativa
  Clone ID: PAT_MRT4530_35686C.1
atgacgacgacgacgaacaccggcggggttcggtcgaaggggaggcgaggccgaggacgaccttgccgctgcgatgccgaaggaggagatggcgacgttggacggcgcacgggcacggcggaagggactgccggaggagacgtcgatgaggaggaaggagaggtcggcgcggcggcggcggtgttccggcgaatccgagggcaggccggggtggagggcgaatccgcgacgtcgacgaaggagacggcgacgtcggccgacgctctggcgcggcgactggggctactgaaggcggtacagtggcggcaacgccactattttgtcggtgaggacgcgtctccggtggtttccccgcgaaacggagggctgaccgggggagagaaggcggctgcgaggccgctggtggcgacggcgcgaccggacggcgctcgggcgaggagggagaggtggctggaggcggccggcgtgggggaaagagaagggcgacggcggggaggggttatacgaccacggggaggctcgggatga

SEQ ID NO: 31373 - DNA, 452 bp, Oryza sativa
  Clone ID: PAT_MRT4530_35687C.1
gatcaatgaagcatccaaactttctagcagaatagctgatcttgaatcacaattgaacgatgaaaaagaagcttgcgaaaggatggcctcaaaaacaaagaaactcatcaaagcacatgcacgctatgtgaaagctcaggatgatttaaagaggtcgcaagctcgttttgagaggttcgctgatttgcttgcttcagataccttgaagccgtgtagcaaggatcagggttctagtgctgctaaggaagatccatataatgcttatgaaatgagtccaagtgatcaacggcagaatcatgaaacaactagaaaaagatccgttgccctctcaactagcgaagaaggaaggaatgggaagaaaaggagagagagttatgacaaccagggatcctatgtcagagaaatatagaccagaagatgctctagaaccttttcagagcagcaagggaact

SEQ ID NO: 31374 - DNA, 124 bp, Oryza sativa
  Clone ID: PAT_MRT4530_35688C.1
cgcgagtgatcttagggcgcttctgcggggaggcctgctgacgtctcggttccgcgggcggttggtctcgcatcgctctgataggttgtggccgtcctctggtgcgtggcggcggtggcacggg

SEQ ID NO: 31375 - DNA, 212 bp, Oryza sativa
  Clone ID: PAT_MRT4530_35689C.1
gcgccagcttatgctgattgtggtcatgccgacctgctgctctccgtccctggatttcgcggcggtgagaacccaaaagcttcagctcggcaagaagaaaagacgattggatgaagtgtgccttgagagatttcaacagtatagcaggacgtacatccaatcatggattcttcagggtaaggtcctttgggatggaagggttgggatttaat

SEQ ID NO: 31376 - DNA, 852 bp, Oryza sativa
  Clone ID: PAT_MRT4530_3568C.1
atggggaacgacgacgatgacgtcagcggtagcgtcaccaccggcggcggctcgggcgtgcatgcttgccggcgaacgacggcacgacaacgcgaacggagggaaccaacatgtagagggcgacgcgacgaactcaccggtgaccaaaacaatggcggaagatcaacggacggcaacggcgtcgaggaagaagcggcggcgaccttcggcttgacgacggcgacggtgttccggcggagaggcggacgagatcggcgacggcttggtgaccacgacgcggcgacggcggcgcacggctgcacggtgctagggcgctacagacggcggcgggcaaaggcgagggtggcggcggcggctggtcctaccggcatcgtccatggggatggacctctgcacggaaggcgaggctatctgacggccaacacaacacatgcgcttcacgtcgtagccgtcgcgcagcaccggcgtggtcctcatgttgcagcaacgacgagcgtgggaatgatgcggagccacaggcccaggcgcgtgggccctcttgaacacccagagagctgccttgccaacaacggcagcgacagcggtggcagcgtcggagctgagcaccgacagtcgtgcggcggcagctgtcccggttgtggcagcggcgacgccaacgacgacgcacggcgatggcggctgtggcaactgcggcgcggtggtgactacgcctttgccgcgtggggcggcggtggcgagggtgaggaccacgacgaggaggcggcggcggatggcctcgagatcaagatcgtggcgcacggcggcgacagctgcggcggctttgacgacggcggtggcgctatgtgcaggtga

SEQ ID NO: 31377 - DNA, 495 bp, Oryza sativa
  Clone ID: PAT_MRT4530_35690C.1
atggcgctgacgtggcggccacatggcagccacgtgggtggcgaggcggacggccccgatctacccccgggtagatcggacagcggcgggaggatgcggccggcgcgcacggggctcggctcaagccggcccggcgccattgcgcacgacggcgcgacaccggcggtgaccggcgggcggcccggcggcagctatgcggtggcgctacgagaggaaaagacagggggaagaaggagggggtgtcctcaccgaagaggtccgactggcgtggagggagacgacggcgaacggcgacgagaaatgacggagagaggtcaacgagcggcggacggggtccgggacaacctaaggagcaaaatgggagaagttagagggggagagagagatcatagaaggcggggacgccggccgaaggcggcgaccatggccgaactcaccaacgctcggtgcggagtgggttccagccccggaatccgacggaggaggggtggatga

SEQ ID NO: 31378 - DNA, 894 bp, Oryza sativa
  Clone ID: PAT_MRT4530_35691C.1
atgtcagcctcactcctcccttcatccctctccctcggcttccttgacaccattgacctcaacggcggccgcgccgtctccctcgacacctccaacatctacggcttcctcgccaccatcgcccccgccgcagcgcacaccaccccacgcccgccgccgcgcctaccaccaccaccccaaatgcggcggcacggcggcggccaccccgtctcctcctcctcctcctccccaatgttgggatacatgtcacggcggccggaagggcaacacgacgagcaatggccggcggggaaaaaggacacagcgcgccgacctggaagatgccgccgccgccgctgccgcttggtgccaagatctggaggctggccgcccgtcgccattgggagcctggaggcctgctgcctggtgccctctgttcggcggacctcgctcctggggaagacgccaccgtgagccgatggtggggagctgagcaggcaacatcgggagtggaagatggctggcgggatggtgagctcgtgctcgccggctcccctcccctcttcctcacctccgtcttcctcatcggccgccacctaccgcgaccccctcctcggcaaccgcctcccacctgcctgtcgacgggatggtaagctcgagctccgcctctgctcctgcggcgcgggggcctcggccgagttggagccgcacatgggcaggaactcggcgccactccccgccgacgacgaggctggcgccctccgcttggctccgccgccccatcggcttcgggtgcaaccacttcgccctcgcgtccaccgccgctgcccactctgccccgtcggcttcacaccgtcgttcgcccgccgccaccccccactcgaccccgctgctctaccacccacgcgaagatag

SEQ ID NO: 31379 - DNA, 826 bp, Oryza sativa
  unsure (1)..(826): unsure at all n locations
  Clone ID: PAT_MRT4530_35692C.1
cccgcgtccggctgaagaaggaatatgatggaaagattgctgatgtgtggtcgtgtggagtaaccctctacgtaatgctggttggcccacgcgcttgcccacacgtccgtgagcctaagaatttcaggaagacaattcagagaatattgggtgtgcagtactctattccagattatgtccacatatctccagagtgccgagatcttattgcgaggatttttgtggccaacccagccactagaatctctatccccgagatcagaaatcatccatggttcttgaagaatctcccagctgaccttatggatgatagcaagatgagcagccagtacgaggagcccgaacagccaatgcagagcatggatgagatcatgcagatactggcagaggcgaccataccagcagctgggtctggtggaatcaaccagttcttgaatgatggccttgacctcgatgatgacatggaggaccttgattcagaccccgatcttgacgtggaaagcagtggggagatagtatacgctatgtgatgctgtgaattctagcaagcagacaggcagattgcttgtcagttgcccgcgaattggtttgttgtattacagtcacagatgacaaagatggccaagaaactgggaagtggatacatgtgtcaagagtacatcacaaaaaagttcggttgcctatgctgtttattatgcctgatgatccctgttgtctctgttttgtcgccgtgatttggtattggaggtcctagactcgtttgagactgtttgaaccntgtcttgctcccctaactgaggaagcgatgtatgtagtagtagtagag

SEQ ID NO: 31380 - DNA, 1043 bp, Oryza sativa
  Clone ID: PAT_MRT4530_35693C.1
ccggccgggcctcccacaccaaaacttcgaggcccccgtcgcggcaccctcctccgccgccggatctccaccggagtacggcgccggccaccccctcctcccccggatcttcaccgccggtgaagtactgaggtgatgactacatcagagtcagtacaagaaaccttgggattggatttccctcatcctagcaaacctcgggtcctccttgctgcctctggaagcgtcgctgctataaaatttgagagcctttgccgtagcttctcggaatgggcagaagtcagagccgtcgccaccaaggcttcattacattttattgatagaacgtctctgcctagcaatattattctttacactgatgatgatgaatggtctacctggaagaagataggggatgaagttttgcacattgaactgcgaaaatgggcagatatcatggtgattgcgccattatcagctaataccctagctaagattgctggtggtttatgtgacaacctcttgacatgcatagtgagagcatgggactacagcaaaccactctttgttgccccagctatgaacaccttcatgtggaacaacccgttcaccagtcgtcatcttgagacaatcaacctgctaggtatatctttggtccctcccattaccaaaaggctggcctgtggtgattatggtaatggtgcaatggctgagccttctgtgatcgattccaccgtcaggcttgcttgcaagagacagccacttaatacaaatagttcacctgtggttcctgccggcagaaacctcccatctagctgatgcggcaactattctgttcaagattaaactctggacctagttttctatggtaaagagtacttcgtgtcacaaaatgaaatgttaagtgatgtctatgtcggccaacatagcacctttattggccagttgttgtactactattagtgatatggtaggacgtggagattggagaaaggctattgtcccagcactttaatgttgcttttccaaatttcttgtgacataatgctaaggtgctgatgaat

SEQ ID NO: 31381 - DNA, 417 bp, Oryza sativa
  Clone ID: PAT_MRT4530_35694C.1
cctaaccgtgctgatacatacagaccaggagctggatggttacaaatctgaccgcccagaatttccccattcttagtctggtacagatgagtgcagtcaaagtaaatctataccagaatgcactctattaagcatttgggaacataaacgctcacagcgtgctgtatattactcaaggacgtgcccggcttcacgtagtcaacatcaatggatagacagtgttgaactgttagtcttggaggggacaggtgcttattataccacaacactatgcaagcgcgaagaatgcacatatagactgatgtgctgacatcgcattcaagaccaatgctaactgtatgcgaagccacatcgcacgaaagagttccatttttctagctctgccaaatgatgttgtatcaaatgcatatggcatct

SEQ ID NO: 31382 - DNA, 1593 bp, Oryza sativa
  Clone ID: PAT_MRT4530_35695C.1
atggatcgcacgctgagcctaggcaactgcccacctagccgggcgctcgacgccttcacaaatgggcgggcaccgctgcggctggtgctcctcctcttagccgctgctgctggcggcggctggctggcggctggtggggcgcagggaggtggtgacctcgccgcacggctgccgtggcggcggacgacgggctggtgctcgaggatcgggcgcgacgcgctccgcgacggcggtaacgccgtggacgccgccgtcgccgcgtcgctctgcctcggcgtcgtcagcccggcgtccagcggggtcggcgcggcgccttcatgctcgtccggctcgccgacggcaccgccctcgcgtctgtatgaggcatggaagcgccatggcaagcttccttggaagaggttagtgatgccagcagcaaagcttgcccgtgcattcagagtgtcaccttatctgaggaagcagatggaggcaaccagagatggaattctccaaaataagggaataagtggagtgtacacctcaaatggagatatccttaatgttggagatgtatgccgcaacattaggcttgcaagaacactggtggctgtcgcggagaaagggccggatgtgttctacaaaggcgcagttggtgatcagctggcgaaggatattcaggaagttggagggatcataacaatggaagatctgaagaaataccaagttaagatacgtcggccacttttagagaatgttctgaatatccttactcagtatggcctccctgctggtttttctggctcacttgggatccatcgtctaattgagtccttgaagcattactttgcaataaggatgaaccttggcgaccctgagtttgtaaatgttaacgaagtcgtctctgatatgatgtcccctaaatttgctgctgacctgaagaaaaccatctatgataacatgacatttgaccctaaacactatggtggcaggtggaacatccttcaggaccatggaacaagccacctgtccatcgtcgacagcgagaggaacgccgtttcgatgaccaccactgtcaacgcgtactttggatccctgatcctgtctccgagcacaggcattttgctcaacaacgagatggacgacttctccatgccggcgaacacgtcggccaactctccgccgcctgcccccgccaatttcgttaggcctctgaaacggcctctctcctcgatgactccgacgataatactcaaggatggcaatctgaaggctgcggttggagctagtggtgggagcatgatccctgctggaaccatggaagtgctcctcaaccatttcgtcaagaacatggacccgttgtcctctgtcatggcgccaagagtgtatcaccagctgatcccgaacgtggtccagtacgagaactggacgacggtgaccggcgaccacttcgagctggacgccgcgacgagagccgacctgcggaggaaaggccacgtcttggagccgctcgccggagggaccatcagccagctcgtcgtggacgacgtcgagcgccacggcggtctgaccgccgtcagcgaccccaggaaaggcggcttcccggccggctattag

SEQ ID NO: 31383 - DNA, 480 bp, Oryza sativa
  Clone ID: PAT_MRT4530_35696C.1
atggacattcgaacattccgaaataaggatgggacactcctaaggctagtcatcatctccatgagaggctcggtcacctttggatcagatgcaatcaacaacatcatcaaagtccctcaagcgagtgtagggctgaagaagtttgggcttgccctagcagagaagtactataggaccaacctggagaagattctccaaatttccaccaccatgatcaagcagcggcggctgcggagggcggtggcggcaggccgagcggcagcggagggccacggcggcgggttgagcggcggctggcggccggcggtggctggtggcgggccgagcggcgttggctgcggagggcagtggcggcgggccgagcggcggctggcagcgggcggcggcggcagggccggtgggcccgcgaccagcggcgagcacatatgctcgtccttccccaagaacccgctgcctactcctgtggcaatgaggaggtga

SEQ ID NO: 31384 - DNA, 2220 bp, Oryza sativa
  Clone ID: PAT_MRT4530_35697C.1
atgaacgctcgacgccttcacaaatgggcggccaccgcgcggctggtgctcctcctcttagccgctgctgcggcggcggcggcggcggcggcggggcgcagggaggtggtgacctcgccgcacggcgccgtggcggcggacgacgggcggtgctcgaggatcgggcgcgacgcgctccgcgacggcggtaacgccgtggacgccgccgtcgccgcgtcgctctgcctcggcgtcgtcagcccggcgtccagcggggtcggcggcggcgccttcatgctcgtccggctcgccgacggcaccgccctcgcgtacgactcccgcgagaccgcccccctcgccgcctcccaggatatgtatggtggcaacgaaacgctgaaagcaaggggagctctatccatagcagttccaggggaaattgcaggtctgtatgaggcatggaagcgccatggcaagcttccttggaagaggttagtgatgccagcagcaaagcttgcccgtgcattcagagtgtcaccttatctgaggaagcagatggaggcaaccagagatggaattctccaaaataagggaataagtggagtgtacacctcaaatggagatatccttaatgttggagatgtatgccgcaacattaggcttgcaagaacactggtggctgtcgcggagaaagggccggatgtgttctacaaaggcgcagttggtgatcagctggcgaaggatattcaggaagttggagggatcataacaatggaagatctgaagaaataccaagttaagatacgtcggccacttttagagaatgtattgggactgacagtattaagcatgcctcctccttcagctggtggtgctgggctaatgcttgttctgaatatccttactcagtatggcctccctgctggtttttctggctcacttgggatccatcgtctaattgagtccttgaagcattactttgcaataaggatgaaccttggcgaccctgagtttgtaaatgttaacgaagtcgtctctgatatgatgtcccctaaatttgctgctgacctgaagaaaaccatctatgataacatgacatttgaccctaaacactatggtggcaggtggaacatccttcaggaccatggaacaagccacctgtccatcgtcgacagcgagaggaacgccgtttcgatgaccaccactgtcaacgcgtactttggatccctgatcctgtctccgagcacaggcattttgctcaacaacgagatggacgacttctccatgccggcgaacacgtcggccaactctccgccgcctgcccccgccaatttcgttaggcctctgaaacggcctctctcctcgatgactccgacgataatactcaaggatggcaatctgaaggctgcggttggagctagtggtgggagcatgatccctgctggaaccatggaagtgctcctcaaccatttcgtcaagaacatggacccgttgtcctctgtcatggcgccaagagtgtatcaccagctgatcccgaacgtggtccagtacgagaactggacgacggtgaccggcgaccacttcgagctggacgccgcgacgagagccgacctgcggaggaaaggccacgtcttggagccgctcgccggagggaccatcagccagctcgtcgtggacgacgtcgagcgccacggcggtctgaccgccgtcagcgaccccaggaaaggcggcttcccggccggctattagaccggagtggctgagctatagctgcctagctttgatgcagcgatgattgcttgctgcgccattcatggacatatttgtacacgtcgttctgttctatgattctatcgaataaataatactccctcagcttataaaatgttttaactttgatcaaacttactctgcttcaaatttaactactccatccgttttacaatgtaagtcattctattatttcctatattcatattgatgctaatgaatctagacatatatacctatctagattcattagtatccatatgaatgtgaaaaatgctagaatgacttaccttgtgaaacggaaaaaatagtttatagaccaatatagaaatatttataaacttggtccaacttgaacccgtttgattttgattaaattcagaatattttataacttaaaacggatggagtaataactgcagtgaattttaaatttttgtttgaaattgttaaaaaaaaaaaaaaaaaaaaaaa

SEQ ID NO: 31385 - DNA, 371 bp, Oryza sativa
  Clone ID: PAT_MRT4530_35698C.1
gaaagcaaaagcaagcaacttaattaattaatataattttctccgtactccactagattgtgtgtgcaatgaggtgttgggcaccaccattaaacccgatttatgcaatgacctcctcacaacctaatcacccactaagagcacaagattagtgcttaatcagatgattaaatttaagctaagccatctctgacgtagggagtcgaggtggctcgcctgctcctcacgaatctcgaggccgtcaagagggctgcacgaatcacgacgcgcccttcgtcttgctttgcatggcgcgcgcgatggcggtggcgatggattgatcggtgcatcgccggcgagccggcgagtaggtggtggtggtggtcatagcc

SEQ ID NO: 31386 - DNA, 1998 bp, Oryza sativa
  Clone ID: PAT_MRT4530_35699C.1
acatggccccagctcgagcgttcgtgttggtgctgctcgcagtcgccagtgcatcgacggccgcggccaacacagcgacgacgacgcccacaaacccggtggctgcgccgacccagtggcagaaggcgcacgcgacgttctacggcggcgcggacgcgtcgggcaccatgggcggggcgtgcggatacggcaacctgtactcgcaggggtacggcacgcggaacgcggcgctgagcacggcgctgttcaacgacggcgcgtcgtgcgggcagtgctacaagatcgcctgcgaccgcaagagggcgccgcagtggtgcaagcccggcgtcaccgttaccatcaccgccaccaatttctgcccgcccaactggaaccttcccagtgataatggtggctggtgcaacccaccacggccgcactttgacatggcacagccggcctgggagaagatcggcgtctacagcgcaggcatcataccggtcatctatcaaagggttccttgcgtgaagaagggtggcctgcggttcaccattaacggtcacgactacttccagctagtactggtgaccaacgtcgcggcggcagggtcaatcaagtccatggaggttatgggttccaacacagcggattggatgccgatggcacgtaactggggcgcccaatggcactcactggcctacctcaccggtcaaggtctatcctttagggtcaccaacacagatgaccaaacgctcgtcttcaccaacgtcgtgccaccaggatggaagtttggccagacatttgcaagcaagctgcagttcaaatttgatagactacaagcatttgaaccacttcggagagtgaggtcagaagccggggttacagagtactttgatgagaagaatgaacaattccagtgcacaggtacatttgtcatccgacgtgtcattgagcctcaaggccttctggtacctcgatacagcaatactcctggcatggtctacatcatccaagggagaggttctatgggattaactttccccggctgcccagcaacctaccaacaacaattccaacaattcttgcctgaaggccaaagccagagccaaaaatttagggatgagcaccaaaagatccaccaatttagacaaggagatatcgttgcactgccagctggtgttgcgcattggttctacaatgaaggcgatgcaccagttgttgctctatatgtcttcgacttaaacaacaacgctaatcagcttgaaccaaggcagaaggaacaagcacaacagcaggaacaagcacaagctcaataccaagttcagtacagtgaagaacaacaaccatctacgcgttgcaacggtttagatgagaacttctgcacaatcaaggcaaggttgaacatcgaaaatcctagccatgctgatacttacaacccacgtgctggaaggatcacacgtctcaacagtcagaagttccccattcttaaccttgtacaattgagtgctactagagtaaatctataccaggtcgttagtaaccttggaaagacggtattcaatggcgttctacgtccaggtcaattgctgatcattccgcaacactacgttgtcttgaagaaagcagagcatgaaggatgccaatacatttcattcaagaccaatgcaaactccatggtgagccaccttgcagggaagaactcaatattccgtgccatgccagtggatgtgatcgctaatgcttaccgcatatcgagggagcaagcacgaagccttaagaataataggggagaagagctcggtgccttcactcctagatatcaacaacagacctacctaggcttctcaaatgagtcggagaacgaggcctcagagtgatgtactaatgaaatagtataggtgtatcaaaaaaaaataaatccacaagtaatgtgaaaacttggtgccgttctgttctaagtttatgaaccactaataaaagcctacacctgtttggttcaaaaaaaaaaaaaaaaaaaaa

SEQ ID NO: 31387 - DNA, 2652 bp, Oryza sativa
  Clone ID: PAT_MRT4530_3569C.1
atggagttcaaggcgatggagcgcatggagttcaaggtgatggtgctcaggagttgcaagggggaaatcttaatcagaatagtgatgcggcacaagattttagccgattgtagcgtcaatgctaacgttggcaccaccgagatgttggacctcggtgccaacaaccatggcaccgagaaaaggatccgttttgaaaataagtttttttacggtcatggtcccttccgttttaagaacacaatagctggcttgttagcatgtggcaccggcacgtgcactactcgcccccaggccccagggcggaagatccgggtctcactgcacgaatctggcaccaccaccaccggcaccgccacgcaccgcacaagattcacccagccgtttgcactgctttgctcgccatcgatctcgcgcggccgcgacgactgtctcgcactgtcggctctctcgtctctcccccttcctcctcttcctctcggtcccgcgcgcgtcaacttctccgctttgccgcattcctccgcgcccctcagatctccgctgactccgccgccgcccgccgacatgtcgtcccgcggcggcgaggacgacgaccacgcctcgctcctcagatcccaccccgcggccggcgccggcgccgggtccggctcatcgtcgccgtgcccatctccgcgggctgtcggtggccaccaccacaaccagcacgcggacgtcgaggcggtgggggaggccaccgtcaccgcctccccgaggcggagcggcggcgtgcgtggcctcctgcggcacctcgaccgccgcctctccgcgcgcggatccggggggcgtcgaagccagcagccgccgcagcagctcgatcgccccgagccgtccccgacgtcgtcgccgcagcagagggagagggtcggggaggagctcggggatggggcgccgccggagtgggcgctgctgctcatcggctgcctcctcgggctcgccaccggcatttgcgtcgccgcgtttaaccgtggggttcatgtcatccatgaatgggcttgggcaggtaccccaaatgaaggtgcagcttggctccgccttcagaggctagctgatacttggcacagaatactgctgatccctgtgacaggaggcgttgttgtaggaatgatgcatgggttgcttgagatatttgatcagctcaaactcgtgaaaccgcctcagaaacaaggaatcaatttccttgcggcaatctttccaactgtaaatgctgtccaggctgctgtaactctaggtactggttgctcactggggcctgaaggtcctagtgtggatattggcaaatcatgtgcaaatgggtgctcggaaatgatggagaataacagggagaggcggattgctcttgtagctgctggtgctgctgctggaattgcttcaggcttcaatgcagcagttgctgggtgtttctttgccattgaaactgtactgaggccactgaaagcagaaaattcacctccttttacaactgcaatgataatattggcttctgttatatcatctactgtgtcaaatgttctgcttggagaaaggccagcttttatagtgccagcgtatgagctaaaatctgctgccgtataccctgctttgggtggactgggagctggcctcatagctctcaaatatcctggcattctatactggggtttcacaaatgttgaagaaatactacatactgggaaaagtgcttctgctcctggtatatggttgttaactcagcttgcagctgcaaaggtagttgcaactgccctttgcaagggatctggccttgtgggtgggctatatgcaccaagcctaatgattggggctgctgttggagctgtttttggagggtcagctggatatttgataaattctgctgtacctggtaatgctgctgttgcacagccacaagcttatgctctagttggaatggctgctacactagcttcagtctgttcagtcccactgacctcagtgctgcttctctttgaactgacaaaggactacaggattttgcttcctctcatgggagcagttggtgtaaatgatcttgagctcactagcttacggactgataactatgacacctataatgaggaaatgcttctagatgatttgaaggtctcccaggccatgtcaaagagctatgttaaaattccaacatctgccatggtgacagaagctctcaagcttttgcatgataagcagcaaaattgcggccttgttgtggattgtgaagattttctcgaaggaattgttacattaggggatattcgccgtatgggatttgaattacatggggacagtttcacaagtggagaccagctcaagcccgctgaaaattcttcaaccatatcattgtgtcttactcgaggattccagtacgaggggaatgaacgtggattgctaacctgctttcctgatactgatttgaccactgcaaaaaaccttatggaggccagaggaataaagcagctgcctgtcgtgaagcgtggtgtcggccatagaactgaaggaaaacgcaagcttattgctcttctacattatgattctattggtcactgcttacgggaggaaattgagaactggaaggccatatatcaaataaaagaggacttccatctcatagcaaatgggcattga

SEQ ID NO: 31388 - DNA, 1832 bp, Oryza sativa
  Clone ID: PAT_MRT4530_356C.1
tcagatccgcaacattcttgatagccgatttgagtctggcttttttttatcttcgatagacttcgggagatcggctaactttttgtgctccatatctagctcggcgttgcattcttgaagttgtgccatgaggtcaatcttacgagcttcaagccgatcgatatttgacttgatcgggccctcagatagctgatcaagtttggatttctctacatgcacaagctgttgattgtgatggattgtagcttcaatatctttgcgctcccggcgatcggctaatctctgcctggccttctccagcttgaattggtgttgctcaagatagacggctggaataagggcgtcggctaattcatctgggagtagagcttggatatctgtgaaccttacccggatcgagccacagttggtcaccaagttgtctagtgatgcctctagccgatgagagatatattcaagcgttctcttcacatcatcagacagaggagctattgctttactggtggtgtcttcctctgtttcatcgagataatccttgatgtcgaaggagaacagatcagctaagattggaatagtaggagtagctggttgttcttcctcttcgacgttatgactgtctgccgccgaaggaataaggttgcctgattctagtctcgaaaaatgagctggggcagaaggagttggaggagtctgcttgggtgaagccgatggtgttctctctgtatcgctcacttcggctgcagcttgatcaacgtcctcttcaatctcttcctcgtctagcgcttgttcgatagatggatctagggcaggcagatcatcagttggcttggttttctttgacttggttttcttcttgagagccggacctgatgtgtccacagctgatgatctggttttccttttcttgcctgcatcggatggttccctgattaagccttagagaagagccgcaattttgggggcatcatagccgatgaatggaggagatggtccacctccatttggaattagtcctggggcatattcgatatctttgccactattgctctggtgtgggggggaagattctgttgtctgagggacaacatctggaaataggtctgtcatgtacattgaagccggttgatggaatagatgcagcttccattcaccccaccatctatcgaagtttctactcctgaatcttgccaactctatattttcaatactgcccaatgggggtccttgaagattaagcagccgattcatcattaaggtagatgagatttaccctcgcattggatcttatcggcaaagaataagccgattggaagttggcccattccaaactgcctagcagagctcattggatgataaaattcataggagacttggatgtttcttccttgatgaatgctgacagtaaggatacatgggctgattgcagttgagaagatttctctgggtttctaatatctgtcatggttgatatcttcgaatctaaagtccaaaggatgttctagaagtgttgaatcttcatagaggaaccagactcgagcttctttttggaatccttcatagaagctgcaaaaccaatctttgagcatttcggctgatagctttgctcctgcatcagttggtgtggatgcatattctccgaaggatgtgcatctccgatgagtgcgttcttctccgtcactgtcttcaattggctccagtcttgggaattcagcttgtgttacagatggccgattgacaaacttcatgactaccaaattcagccaggattgcagtagccaccatgttccaccagctccgactattgagccgacggctaacttagcccatgcgtt

SEQ ID NO: 31389 - DNA, 716 bp, Oryza sativa
  unsure (1)..(716): unsure at all n locations
  Clone ID: PAT_MRT4530_35700C.1
ccggccgggacatcaaccagcccaagtttccaataacatcctcaaatagctatggcgaccatagctttctctcggttatctatctacttttgtgttcttctcctatgccatggctctatggcccagctatttggtccgaacgtaaatccatggcacaaccctcggcaaggaggttttagggagtgtagatttgatagactacaagcatttgaaccaacaacaattccaacaattcttgcctgaaggccaaagccagagccaaaaatttagggatgagcaccaaaagatccaccaatttagacaaggagatatcgttgcactgccagctggtgttgcgcattggttctacaatgaaggcgatgcaccagttgttgctctatatgtcttcgacttaaacaacaacgctaatcagcttgaaccaaggcagaaggagttcttattggcgggtaacaacaacagggagcaacaaatgtatggtcgctcaatcgagcaacactctgggcaaaacatatttagcggtttcaacaatgagctactaagtgaggccttaggcgtcaatgcattggtagcaaagaggctacaaggccaaaacgaccaaagaggagagatcatacgggtaaagaatggnccttaactgttgagacctgcttttgcacacacacaggaacaagcacaacagcaggaacaagcacaagctcaataaccaagtcagtaca

SEQ ID NO: 31390 - DNA, 788 bp, Oryza sativa
  Clone ID: PAT_MRT4530_35701C.1
gactagtactagaacaaagacacaaacatctctgatacaaccacattttgtagcactcatctgctacacaccaaaaacatctctgagaccgccacattttgtagagccggcaacatgagtgtagaaatccttgacggcaagaccatcaggagcttcgtcgaggacgagggcgccttcaactcctccgtcgatggccggttcgccgccctcgacaccaaccgtgacggcctcctctcctactcggagatggcaaaggagctcatgagcctcagggtccttgagaagcatttcggtgttgatgaggccgccatgagctccgatgaactcgtggagatgtaccgtggcttgtatgcgcggttcgaccacgacggcaatggcacggtggacttggaggagttccgggccgagatgaaggaggtgatgctcgccgtcgccaatgggctcgggttcctgcctgttcagatggtggtggaggaaggcagcttcctcaaggtggctgtggacagggagctggccaaggcagcctgaagcacaacagttttgcagcaatatttttttttacatgtctactatttataattttgtcattgcattcttattctggattgagctatttcatttgctagttattattggcacacggcagaaaccaggaggttgtaatactgtactttacatatcacacaagctagctgaacaaatggaaatgttgtgcggaatgctcgtgaaatcctacatttgggaataaaactaacagttctggaaaaaaaaaaaaaaaaaaaaaaaaa

SEQ ID NO: 31391 - DNA, 1234 bp, Oryza sativa
  Clone ID: PAT_MRT4530_35702C.1
aacggtttagatgagaacttctgcacaatcaaggcaaggttgaacatcgaaaatcctaccaatgctgatacttacaacccacgtgctgggaaggatcacacgtctcacacagtcagaagttccccattcttaacccttgtacaatttgagtgcctactagagtaaatctataccacgaatgctattctctctccgttttggaacggtttaatgcccccataggccctggtgtatattcgttccaagggcatgcttcgagttcaggttcgtttagtaacccttgggaaagaccggtattgcaatgggcgttctacgtcacaggtcacaattgctgatcattccgccaatagctacgctgtcttgaagaaagcacgagcactgaaggatcgcccatacactttcattcaagaccaatgcaaactccatggtgagccacccttgcacgggaagaactcaatattccgtgcccatgccaagtcagatgtgatcgcctaatgcttaccgccatatcgagggagccaagcaccggaaaaggccccccttttaaaaaaggaataataggggagaagagctcggtgccttcacctcctagatatcaacaaacagacctacccaggctttctcaaatgagtcggagaacgaggcctcagagtgatgtactaatgaaatagtataggtggatcaaaaaaaaataaaatgccaccaagtatgtgaaactttgtggcggttctgttctaagtttatgaagcactaataaaatgctacaactgttttgttcaaaaaaaaaaaaaaagggcggccgccgagtccggcgagaccgcccacggctgcggctgcggctccagctgcaagtgcaacccttgcaactgctaagaagccatttatttggctattatcatctgtgtgatcgtgtgtccgtgcgtgtgatgaatgaataataaaggagccatatctgctctggcatatgcatagtgcatatgcagtttgtgtgatcaatctgctgtttctgtccctgtgctgatacgcacacgtagctcctgaaactgtctggtatattaatttactggtgtgtttgtgtgggtgggtgtgatcgtatctgtatcatatcaaaccatgcatgtatctatctagtacctatagcttgctggttcacgagctgctattttgtttgtctgtctctgtgacttgaacagactgtgaggaatatgcagttgaaagaaaaggggatttctgc

SEQ ID NO: 31392 - DNA, 540 bp, Oryza sativa
  unsure (1)..(540): unsure at all n locations
  Clone ID: PAT_MRT4530_35703C.1
acctattggtttccaccaaaatggaacctgaattctgttgccgaaaagcacaatgccaaaattggttgatggagtggatgggaaacagattgggctgacttgaggaattggtgcatggccgaggtgcctgaaggaaatgtcggcattgccagacccctggcacttttcgttggagattggacgttggaggctttggttatgagtgaccacctgctggtccagtcaggatggtggcttgctttggttccatttaagcatggccgtgggagtgatgcgaacagatgcaagcattgtggagtgttggaacacccgcatgtgaatgtggtgagaattcataatgtggcatatnttttttgttcgggaagaaatgagaaaatgggcgatgccccttttgttgcccaaaacagcccntggggttcattttacctggttccctggggtaatntaacaccattcngcacagttttttatttataaaagggatatctaaaaggattttnggaagaccgactttgtggagaccanctacacctaaaaaaa

SEQ ID NO: 31393 - DNA, 2343 bp, Oryza sativa
  Clone ID: PAT_MRT4530_35704C.1
atggccccagctcgagcgttcgtgttggtgctgctcgcagtcgccagtgcatcgacggccgcggccaacacagcgacgacgacgcccacaaacccggtggctgcgccgacccagtggcagaaggcgcacgcgacgttctacggcggcgcggacgcgtcgggcaccatgggcggggcgtgcggatacggcaacctgtactcgcaggggtacggcacgcggaacgcggcgctgagcacggcgctgttcaacgacggcgcgtcgtgcgggcagtgctacaagatcgcctgcgaccgcaagagggcgccgcagtggtgcaagcccggcgtcaccgttaccatcaccgccaccaatttctgcccgcccaactggaaccttcccagtgataatggtggctggtgcaacccaccacggccgcactttgacatggcacagccggcctgggagaagatcggcgtctacagcgcaggcatcataccggtcatctatcaaaggtaccaatacaaatactccaattattttggacattatggagagaacagtgcatatcctgaccgctgcttccatatgaaaatatcctactcttgcgatgatttctacagggttccttgcgtgaagaagggtggcctgcggttcaccattaacggtcacgactacttccagctagtactggtgaccaacgtcgcggcggcagggtcaatcaagtccatggaggttatgggttccaacacagcggattggatgccgatggcacgtaactggggcgcccaatggcactcactggcctacctcaccggtcaaggtctatcctttagggtcaccaacacagatgaccaaacgctcgtcttcaccaacgtcgtgccaccaggatggaagtttggccagacatttgcaagcaagctgcagttcaaatttgatagactacaagcatttgaaccacttcggagagtgaggtcagaagccggggttacagagtactttgatgagaagaatgaacaattccagtgcacaggtacatttgtcatccgacgtgtcattgagcctcaaggccttctggtacctcgatacagcaatactcctggcatggtctacatcatccaagggagaggttctatgggattaactttccccggctgcccagcaacctaccaacaacaattccaacaattcttgcctgaaggccaaagccagagccaaaaatttagggatgagcaccaaaagatccaccaatttagacaaggagatatcgttgcactgccagctggtgttgcgcattggttctacaatgaaggcgatgcaccagttgttgctctatatgtcttcgacttaaacaacaacgctaatcagcttgaaccaaggcagaaggagttcttattggcgggtaacaacaacagggagcaacaaatgtatggtcgctcaatcgagcaacactctgggcaaaacatatttagcggtttcaacaatgagctactaagtgaggccttaggcgtcaatgcattggtagcaaagaggctacaaggccaaaacgaccaaagaggagagatcatacgggtaaagaatggccttaaactgttgagacctgcttttgcacaacaacaggaacaagcacaacagcaggaacaagcacaagctcaataccaagttcagtacagtgaagaacaacaaccatctacgcgttgcaacggtttagatgagaacttctgcacaatcaaggcaaggttgaacatcgaaaatcctagccatgctgatacttacaacccacgtgctggaaggatcacacgtctcaacagtcagaagttccccattcttaaccttgtacaattgagtgctactagagtaaatctataccaggtcgttagtaaccttggaaagacggtattcaatggcgttctacgtccaggtcaattgctgatcattccacaacactacgttgtcttgaagaaagcagagcatgaaggatgccaatacatttcattcaagaccaatgcaaactccatggtgagccaccttgcagggaagaactcaatattccgtgccatgccagtggatgtgatcgctaatgcttaccgcatatcgagggagcaagcacgaagccttaagaataataggggagaagagctcggtgccttcactcctagatatcaacaacagacctacccaggcttctcaaatgagtcggagaacgaggcctcagagtgatgtactaatgaaatagtataggtgtttcaaaaaaaataaaatgcccccagtatgtgaaactttgtgccggtgtctgttgtctgaagtttgatgaaccacctgaatgaaaatggctgaccactgtttgtgttccaaaaaaaaaaaaaa

SEQ ID NO: 31394 - DNA, 632 bp, Oryza sativa
  unsure (1)..(632): unsure at all n locations
  Clone ID: PAT_MRT4530_35705C.1
tcaaattgaaggaagatgttgcccttagacatgacagcaaattgcagagaccatcagtgttgcaccctcttgctcctccagcaagttctcaatgctccatcgcacaacattccgcacaaccccaccatctgacctatccttgcattcgaatttctggtatatttgccccacctgcaggagggggagcctctcggcggcctcgaacagcacgcgcacgtccaacgccgaggtgtagcacagcctcctcgttccatcgagcgccgcgaggtccagcggcgacccctccccgggcgccgaggggggcacagtcacgnnaggcctcctcgatggacgcgcgctggtcggggctcgccgcgaatcccctccccgtctcctgcaccgcccgcagcagctcgtgcttccgccgctccgtgtccgccgccagcgaagccgttgccgccgccgcggcggcgcggcgcggttgcctgctgcgctgagggcgaaggcggacgccgttgacggagttacacgccaggagaggcggcggcgtctgcgccggcggtggggagggtggggagatcgggaggcggagcaggggagcagcggcgagcgccatttcagggtggagtcgagtggatggccgtcccggccgg

SEQ ID NO: 31395 - DNA, 3454 bp, Oryza sativa
  Clone ID: PAT_MRT4530_35706C.1
ttttttttttttttttttttattttttttttatttttttgttttttgttttttaagaaatttgtaacctttatttagtactgatatcgaatagaatcaccaccaaggtgtcatactgtgtggtgttttattttactctacgccgatactagttctcaattacattactctgaagtctcgctttcggactcattcgataatcctgggtagtattggttgttgaaatctaggagtgaaggcaccggtgctcttctccccgtgttgttcttgaggcttcgggcttgctcccttgagatgcgatacgcattagccactacatcaactggcagggccacggaatactgagtttttccctgcaagggtggctgacgaaggccgttagcgttggtctgtgatggcgatatatgggcatccttcacgctcgtgctttcttcaagacagcataagtgtgtggaatgatcaataatggtcctgggcgaaggacaccatcaaacacagtctttccaaagttactaacgacttgaactcgagatcgcccttgaatcatatagaccaaactatgagcattgagcgttccagaacggcgagagaatagcattctggtataggtttactctggtagcgctcatttggatgaggttaaggatggggaacttctgactattgacacttgttatccttccggcacgtgggttgtatgaatcagcacgactaggattttcaatgtttactctcaccttgatcgtgcaaaagttctcctccaatccgttccatcgagaagatgtttgctgtcgttcactgtattgaacttgttgatattgatcttgtgcttgtgcttgttcttgctgttgtgtcaaagtcggtttcaacaattgaaggccattcttcacatgtatgatctctcctctttgatcattttggctctgtagcctctttgctgctactgcgcggacgcgtgggcggacgcgtgggcggacgcgtgggcggacgcgtgggttccaataacatcctcaaatagctatggcgaccatagctttctctcggttatctatctacttttgtgttcttctcctatgccatggctctatggcccagctatttggtccgaacgtaaatccatggcacaaccctcggcaaggaggttttagggagtgtagatttgatagactacaagcatttgaaccacttcggagagtgaggtcagaagccggggttacagagtactttgatgagaagaatgaacaattccagtgcacaggtacatttgtcatccgacgtgtcattgagcctcaaggccttctggtacctcgatacagcaatactcctggcatggtctacatcatccaagggagaggttctatgggattaactttccccggctgcccagcaacctaccaacaacaattccaacaattcttgcctgaaggccaaagccagagccaaaaatttagggatgagcaccaaaagatccaccaatttagacaaggagatatcgttgcactgccagctggtgttgcgcattggttctacaatgaaggcgatgcaccagttgttgctctatatgtcttcgacttaaacaacaacgctaatcagcttgaaccaaggcagaaggagttcttattggcgggtaacaacaacagggagcaacaaatgtatggtcgctcaatcgagcaacactctgggcaaaacatatttagcggtttcaacaatgagctactaagtgaggccttaggcgtcaatgcattggtagcaaagaggctacaaggccaaaacgaccaaagaggagagatcatacgggtaaagaatggccttaaactgttgagacctgcttttgcacaacaacaggaacaagcacaacagcaggaacaagcacaagctcaataccaagttcagtacagtgaagaacaacaaccatctacgcgttgcaacggtttagatgagaacttctgcacaatcaaggcaaggttgaacatcgaaaatcctagccatgctgatacttacaacccacgtgctggaaggatcacacgtctcaacagtcagaagttccccattcttaaccttgtacaattgagtgctactagagtaaatctataccagaatgctattctctctccgttttggaacgttaatgcccatagcctggtgtatatcgttcaagggcatgctcgagttcaggtcgttagtaaccttggaaagacggtattcaatggcgttctacgtccaggtcaattgctgatcattccgcaacactacgttgtcttgaagaaagcagagcatgaaggatgccaatacatttcattcaagaccaatgcaaactccatggtgagccaccttgcagggaagaactcaatattccgtgccatgccagtggatgtgatcgctaatgcttaccgcatatcgagggagcaagcacgaagccttaagaataataggggagaagagctcggtgccttcactcctagatatcaacaacagacctacctaggcttctcaaatgagtcggagaacgaggcctcagagtgatgtactaatgaaatagtataggtgtatcaaaaaaaaataaaatgccacaagtatgtgaaactttgtggcggttctgttctaagtttatgaagcactaataaaatgctacaactgttttgttcaaaaaaaaaaaaaaaaaaaaggggcggccgcccctttttttttttttttttgccctggagctattaatgtcaatagtatagtaggatctttcaagcattccatgggtatcaaaaggatccagtcttgtaccgctttccgagataaagaatagcatacaacagaaaagaagcagatatttccaaaaatagctactcgtcctttcaaccgttaatccaacatgaaacatgaaagctgatcaaagggcgttgatcatccgcttcatttctgcggatctccttgggtcaggttctgctatggccctttcagtcaagacatgctttattcgacacattgacttcttcaccttggaaacacgttcagggtttggaaaacgcatattctctgaatgtagcatctggcgctgactcataagcatgttcttttccttcagaaggacataccatagcttctgaaggtcatcccaggattttaggcgtaactcggaagccttccaactacggccgtagtgcggagggggcttgtcttcctcggtgctcctctcgacctcgaagaactcctccagtgggttctgcgccttcctcaccaccgcggcggccgcggcggtggcatcagatgcggcggcggaggaggaggagaagagccgcctccccagcgccctcgacaaggacagcatcacgacggcgacgaccgacggatccgcagattgggacgcgcgaaaacttggtccgacgagaggaaaggtcagcgagataccggcggcggcggcgatgatccacgggaggggaggttcaggcccaaattttctcaaa

SEQ ID NO: 31396 - DNA, 379 bp, Oryza sativa
  Clone ID: PAT_MRT4530_35707C.1
tggacgagggctcgaactcctcctcctcctcatgccggagctcgctggcggcttcgtaagctccacatcgtccctcccgcgccagagacaaagggtcgtcggcgaaactatggcatcccggagcagcagcagccggagccgtgccgtcgccatgtggctcgtggcgctcatggtggtcttcctggtcgccggaccgcagccggcgtccgcggcgcggccgctccggccggccggctggaacgcgcctagcatcgacggggagggccactacgcgtccggcgtcgtcgacaagtacgcgccgcttctgctctccatgctgccgaggggccccgtgacgccgtccggccccagcggcggcaccaacggcgacggcaactga

SEQ ID NO: 31397 - DNA, 353 bp, Oryza sativa
  Clone ID: PAT_MRT4530_35708C.1
gccttgcctagcagggcagaattgactcctcacccttacacagatgcagccttcttttgcagttttgttttgctgcaggaaaattcggatttgttttgttgttggaaacattccggaaaatccggtgcatgaaaacggcgtggagtccggatcagatacgcacgacttatccggttcggcatggagtccggattagttacgcacgacttatccggttcggttacgcggagcggagatcgtgcgggcgccttgatcaagcgacctatctctatgtaaaccgagccgctggcttcacgcaacacacgcgaaatcaatctagggtttgcctcctcctctatgctgcgcgtcgctcg

SEQ ID NO: 31398 - DNA, 2217 bp, Oryza sativa
  Clone ID: PAT_MRT4530_35709C.1
gttctcttgccatttatggataacgctttcacttttgttttctttcagagaaaaacacccagaattcatgtttcatttttacccaatatttgcaatacagaatccctaaactcaaggatctgtagcttcctcacctagcctggtgcgatgccattagaattgtagaaatatgtcttaggtctcatcaaaattccaggttattaaatcatcacagcaaagcaaaatcgtatatcagttctttcctcatcacaaatcttccagggctactgagcaacttttgtgttgcccctttgcctcgccaggcgaacacatgcttcaaatctcttgactgcctcagcacacttgagtgggtcctgtgcattgctcacgtaacactggcggcagtttgacctctcctcagtgcatggcgtggggttttggtacggcagcttgaactccttgtcacgcaggtcttttgatttcttgatgagttcatcacgcatcccagcatgctgcttatccagcttctcctgaaccttttcgctctcttccagaacggcacggatggcttccagctctgaaaaagcaggtgggggtggtggaggagcaggggttacggggagatacatgggaggctgcagtggccagccaggaggagccttgggttcagaagctgggagttcccttgagttgtcctggggctcttgttgatgttgtttgacagtcttcttaggcttgggtttcctggttttctttttgatcttctcgtcatcacgagcaagctggtcgattagcttggtgctaataagctcgccgttctctggctcaagctgcaccccctcatagaaggcattcgcggcttcttcgaacctctgcagcaggcgcagtgccgcgccttccctgtagcaagctttcgcccagtctggcctcagcgctcgacatgctcttgcatcctccagagcacgttcagcttgccctgcccgtagccagcaaaggcttctgtttgaatgcaacgtggcgtcgtttggatttaactcaatagcctgtgtgtaggcatctactgctactaggtagtctttatttctgaaggcatcatcacctctcgattttgcctccaatgatctctcttttgcctcagatgacacctcaacaagttgtggtacttgtaatctgtctgctttctgagttgtagcttcctttacctgtgccttttcctcgactgatttagtgtattctataattccatcaatactccaactcgaaacacctggaattggtgatgtcaaaggtaaaagaagttccacaacttcacggttattcctcaaagcagcaacctgtattggctttagtccatcatcatcacatgcattggggtcacttccagctttaagtaaacaatttattatttccatgtttccaccatctgcagcaatatgtaatggggttgctccaccagctctgatattcggatgtgcacctgcctgaattagaatatccaagcatgggagggaacccgctgcaacagcagacaacaaaggcgtaataccatcatcgttttcagtatttggctgccaagcaataactagcttcagtaaaaaagttaaggaaaggccacatgaacggctgattgaaaggtggttgagtgctaaacaaagagaagccttagcatcgtgttgaagcaaaagtttgactgcctcttgctgtccatgaccagcagcccatatgaggggtgtgccggcatcgctttctgattcaacatcaacccccttggagagaaatagtttcataaggtccaggttcccatcgtcgtccttggggtcgacggggagggcgaggtcggagatgaggaagtgacagacgtgggtgcggccctcgcgggcggcgaagtgcagggcggtgcgcttgttggcgtccttgacggcagcagcgacggcggcgacgcccttgccctcctcgtcgagcgccgcagcgagcttcttgagggaggcgggatcgccggccatagccgcttcgaggaaagcttgcaccttgctccgagctgagagggcggcggtggcgtcggccatggatgatggaagggagctacccgacccgagcaggggggaattgaagccggaagggtgttccagaagcttctggagacgagacgggaggtggaggtggcggcgtcgagtctcgagtaggaggaggaggaggaagcctcccgtcccgtcgccccgcctgccgccctcctgcagc

SEQ ID NO: 31399 - DNA, 642 bp, Oryza sativa
  Clone ID: PAT_MRT4530_3570C.1
ctacccgtcgccaccctcgtcttcgtccgtcgccgcccgtagcgccctagccccgtgtagcttcgcgccgccgtcgccgccgcagctccaaccgtgcgtcgccgtcgctccggttgtcgttgccgctcgggaaagccaccgtcgtgatcgccaagccgtcgccgacctcgtctgcccctccgtcgtcactgtgggccgctggaacaccgtcgccgtcgtcaagccgaaggtcgccgccgcttcttcctcgacgctgtcaccatccgttgatcttccgccgttgctttggtcaccggtgagttcgccgcgtcgccctctacgtgttggtgtcctccgttcgcgtcgtcgcgccgtcgttcgccggcaaccttgcgcgcccgagccgccgccggtggtcccgctgacgtcatcgtcgtcgtttcccgtggcccggtcgtggaccgatggatcttggccgtccgttttggatgaatcgatctcggccgttcgtttccgtgagccgccgccgtgcacccggttcaccgcgaaccctagccgctgacgcaataaacccctttttccttttgtatagcatggttcattgcggggcaccagactgagaagtggcggagataagcccacgggggtcactggggagtccat

SEQ ID NO: 31400 - DNA, 252 bp, Oryza sativa
  Clone ID: PAT_MRT4530_35710C.1
aaattgtatgggtaatctccaccgacacatgaatacattggaagaataaatcgactacaagaattcatgtcatcatacaagattgagggcggcactcaaacggcagcggcctgaagatttcatatctacaacggagcgacacatgaaaaacttgaacaacgatactaacagagaacaactgtctgtttgacaaaagggcagcctctactgcgtggaaagatgaacaacgagctatgaaaaacgatggtcaac

SEQ ID NO: 31401 - DNA, 519 bp, Oryza sativa
  Clone ID: PAT_MRT4530_35711C.1
ctaaaatcccactttaaaaattcatcggtaacattcggaccaaaacatgggaacccaaaaaaacagccccaggaaaacccaacaaaaaccctaaatcccatcgggaagttcttcatcagaattattaaggggccaaaacataggattttataaaaagggacccagggacaaacattcctaaagcaaaccagggattgaaacaaggggttccttcaggggacaattcaccagaaatttttccccaagccattttagaatcacctttaaaaaaaaggttaatttggggaaaaacatcctttgccttggaaaatttcccacctttaaccaatccctaaaccaaaccctggacggcctaaaagggggggggggccttaatggaaaagaagtttttacaaatccatagagcataataaagcctttttttttccaccaagctccggaacagaaccacataggttgggaaaggcgctgacacacccaaggcattccaaccctccctccttttaataattttaatcc

SEQ ID NO: 31402 - DNA, 528 bp, Oryza sativa
  Clone ID: PAT_MRT4530_35712C.1
atggcggacgcggcggagcagcatcaccggcaggaagagactgcggcggcgacgacgacgccgcagcagatgatgatgcggcggcggcgggcgcgcgcgtcgagcgagtacctgggcgtgcggcggcggccgtgggggcggtacgcggcggagatccgcaacccgtacaccaaggagcgccactggctcggcaccttcgacaccgccgaggaggccgccgtcgcctacgacctctccgccatctccatctccggcgccgccgccgcgcgcaccaacttcctctaccccgacatgcaccaccaccacccttcgccgccgcagcacgcgctgtctccggcagtgccaccgccgccaccgccgccgccgccgtcgccgctgtacgatgatgattacctgtcgccggcggcggcggaggaggaagtggaggccggcgacgacgagtcgctgacgatcgcgaccatcctgcagagcttccagtatcagcagagcgtcccaccggcgtcatcgggttccatgttttattattag

SEQ ID NO: 31403 - DNA, 781 bp, Oryza sativa
  unsure (1)..(781): unsure at all n locations
  Clone ID: PAT_MRT4530_35713C.1
ttagacccagccggcggtcggctttgatgccgagcgcgcggcggccgcctttatcgccgcccgatccctccccttcctagccgccgttaggcagccgcctccgcatcgccttttgcgccgtcgccccgccgccggttgcgtcgccggcaaacggttcgcacgcgcgccgtcgccatcgccngcgcggtcggcggccttgagccgggcgagccgggtgccgccggccccttccttcccctcccgagccgctgaccagtgggcccgcgagccgccgcccctttctctctctcccgggccgctgaccggtgggccccgcttgtcggcgccgcacttcccccgtgctgacgtcagcccttcggggacgtcgggcccgagggtgaggtgtccgccctcctcctgatttccccgaggggggggtcgggttgctcctaaccgcatttattgcggtctggtcaagcgtgtcacgctgcatgcagcgcaatgcagcgcgctcttttatccggtctctcagagatgacacgttagccctggttagatgaataccaggcttcatcctaaccattaaaggcaagatgttgtgtgaagaagggcaaacctgcacgttgctaagctgacacgcgatggacaagaatgaccgatttgtgaccggtctgacactgctcatgtcgtcagcgcacagccacgttcccacgacgcgcctgcccccggtagaagtggaggtaggtatgtgccgtcccatcagaaggacgttcggagggcaaccgtgcaaatctccgtccat

SEQ ID NO: 31404 - DNA, 201 bp, Oryza sativa
  Clone ID: PAT_MRT4530_35714C.1
atggtgcggcagatgggctcgcagaggatgacatcatcgcaggcggagatctggccggggatggagtcgcctaggaatcaccttgcgcgtcggaggaatcgccggagagagagagagggtaaagtttcgcttaagcgcatcggagatgaagatgggatcgaagcggaatcgaagataagggttgttgcagaaacagagtaa

SEQ ID NO: 31405 - DNA, 1160 bp, Oryza sativa
  Clone ID: PAT_MRT4530_35715C.1
gaaaccgtggaaatctagggtttcgacggctcgcgagtggaggtcgccaggctcgtcgccccgtcctcgccggcgggagggccggtctcatcctccctctctttcgctcgtagccatcgctctcttccactggttcgctctctccgtcaaaccgtttggtttcgccgcctctctccgttgagctctctgatttttccccgtgcactactcgatctgctccgggcgggcgagcgacttgggggaggatatggtgttctacttcaaggtgcggcccgaggccggcgactacaccatcttcatgggtctcgacaagttcgagaacgaggacctcatcaagtacggcttccccgaggacatctggttccatgtagataagatgtcctctgcacacgtgtatttgagattaaataaaggtcagacaatggatgacataagtgaaggtgtgcttgaagattgtgcccagcttgtgaaagctaattccattcaaggtaataagactaataacattgatgtggtttatacaccatggtataatctaaagaagactccatccatggatgtgggtcaagttggttttcacaactctaaattggttcggattgtcaaagtagaaaaacggattaatgagattgtgaaccggctgaataagacaaaagtggagcgcaagcctgacttaaaggctgaaagagaagctgtgagtgcagcagaaaaggcagagagaaaggtgcagcttagagataaaaaacgtagggaagagatggagagggttgagaaggagaagcaggctgaaatcaggagctacaagaacctgatggtccaagagaagatgacttccaacaagcaggttgcatctggtagcaagaccttggaagaactagaggatgacttcatgtgagaagacaaaataacaaattcatactgccagggttctctaaactgtgtttctgtcaaagacaggacaagcatcgccgggttgcaagcttggacaagatgatttctgggcagggccgccttgacctgttatgctacatactctaattggcctgcattgaccttgtttgatgtgttgaaacaaagcattgtgtgatctaactgtggttgatgtattattgattagttaatcatcaacctgatacaagataataaaactcgctttcctt

SEQ ID NO: 31406 - DNA, 480 bp, Oryza sativa
  Clone ID: PAT_MRT4530_35716C.1
agacagttcgcagaatcgcagcagcttagcttaattacttttttcaccaactcaactttcagttaatttccggttaatcctcgattcctcatcatgcctggactcaccctcggcgacgtcgtccccgacctggagctcgacaccacccacggcaagatccgcctccacgacttcgtcggcgacgcctacgtcatcatcttctcccaccccgctgacttcacgccggtctgcacgacggagctgtcggagatggcgggctacgccggcgagttcgacaagaggggcgtcaagctcctcggcttctcctgcgacgacgtcgagtcgcacaaggactggatcaaggacatcgaggcctacaagcctggccggcgcgtcggcttcccgatcgtcgccgaccggacagggaggcgatcaggcagctcaacatgatcgacgccgacgagaaggacaccgtcggcggcgagctccccaaccgggcgc

SEQ ID NO: 31407 - DNA, 228 bp, Oryza sativa
  Clone ID: PAT_MRT4530_35717C.1
atgggtggcgccggcgacgatgacagggtcgagcttgtcgttgatggcagccacgaagatacacgtatgccaatgagtgatgacgaacgaggatacttccgtcttgtgggcgagatcacatcaccggcgtcgatgacaattatggagacactccggtcgtgcgggtctgagagtatgaccggcgatggcgacgagtcggaagttgtcccgacaacggtgtacatatga

SEQ ID NO: 31408 - DNA, 2103 bp, Oryza sativa
  Clone ID: PAT_MRT4530_35718C.1
gtcgactctagaggatcccccgagaaaactagaaaatatggcttgaagatgaacccgacaaagtgtgcttttggtgtatcagctggccagtttttgggatttcttatttatgaaagggggattgaggtgattcaaaggagtattaaagcaattaagaagatccagcctccagatgacaagaagaagctgcaggagttgatcggcaagataaattttatcaggaggtttatctctaatttatctggaagattggaaccgtttacacctttattgagattgagagccgatcgacaattcacttggggggtagagcaacagaaagctttggataatataaaggaatatcttagttcccctccagttttgattcctccacaaaagaggatatctttcagattatacctgtcagctgagtttgatcttcggtatgattcaccgaaggcgattaagggacaagctatagccgattttatagtggatcatcgtcatggctcaatcggctcagtttacattgtgccttggacattgttctttgatgggtcagtgtgcactcatggttgtggtataggcttggttataattcctcctcgggaggcaagtttcgtgttttcctatactattaaaccttatgcaactaataatcaggctgagtacgaagcggttctcaaagggttgcaattactcaaggaagttgaagccgatgctatcgagattatgggcgattttttgttggtgattagtcaattggcaggagaatataaatgcaagaatgatacattggtgatctataatgagaagtgccgaaagttgatggatgggtttcggctggtgactttaaaacatgtatctcgggagcaaaacgttgaagctaatgatttggctcaaggagcattggggtacaagccgatgatgaaagatgttaaaaatccgtctcaatcggcttcacgaaagttgtgttataaagctttgaaatataccttgctggatgatgaattgtattatcggacaattgatggagtgttgcttaaatgtttgagtgttgatcaagccaaggttgcaataggcgagggttgtgaagattgtcaaaagtttggagcaattcgaagggcaccagcatcggttatgaatcctatcatcaaaccttggccattcagaggttggggaattgacatgatcgggatgattaatccaccttcgagtaagggacataagtttatattggtagcaaccgattactttagcaagtgggtggaatcgattcctttgaagaaagttgattggggggatgctatacaatttgtccaagagcatattatttatcgatttggtattcctcagaccattacaaccgatcaaggctcgatttttgtgtccgatgagtttgttcaatttgccgatagcatgggtatcaaattgttgaattcttcatcatattatgcgcaagttaatgggcaagccaaggcatccaacaagagtttgattaaattgattaagaggaagatttctgattatcctcggcaatggcatactagactggccgaagcattgtggtcctatcggatgacttgtcatggatcaattcaagttcctccttataagctagtttatggacatgaagcagttttaccatgggagattagaatcagctcgagaagaacagacttacaaaatgaattgacagccagcgaatattataatctcatgcccgatgagagggaggatgtggttcagtcacgattgcgagctcttgcaaaagttaccaaggataaggagagggttgctcgacattataacaagaaagtagtgcccaagtctttttctgagggagagcttgtttggaagttaatcttgccggtaggaactcgtgataataaattcggcaagtggtcaccaaattggaaggaccgtttcaaatccacaaggttgtgtctaaaggagcttatatgttgcaaggacttgatggagaagtttatggatgagcacttaatggaaagtattaaaagaaatattaccctagtgtatgggttaactgatgatcggctgagtctgccgatgcgtgtaaagccgatgtgtgtttgcatcgccttgagatggccgatatag

SEQ ID NO: 31409 - DNA, 461 bp, Oryza sativa
  unsure (1)..(461): unsure at all n locations
  Clone ID: PAT_MRT4530_35719C.1
tttgtggctgtgcactccatggaagtgttgtatcaactcgacattcggcgaatgcccaattttatggtggtcccataaaggcatcagaaatccttcttggttcacgtgagcacggccacgctgctgccgctaccctctacacgagctctgtcccaattgtttgagaaggtcgaaaattactcctctcctctagatttctgacacacacttgtgtcccctggtgattaccccgtggtaactctaggtattgctttgtgctctctgcttactcctgggtgggtgatttatcaactgtaccgtttgccacttcgttgccatcaaatagatcatctctccagtgccaccaacagaaaaacccctctgtaaatgttgtatatataattgttacgtttgcgtgaatcntgataaatgaaaagaaaagaaaagaatcantttgttctgaaaaaaaaaaaaaaaaaaaa

SEQ ID NO: 31410 - DNA, 447 bp, Oryza sativa
  Clone ID: PAT_MRT4530_3571C.1
atgacgtcatcaccggcgacggctcggcctcgcgtgctcgccggcaaacgacggcacggcggcgcaaacggaggacatctacgcatagcggacggcacggcgaactcaccggtgaccaaaacgacggcggaagatcaacggatgacgacggcgacgaggaagagcggcggcgacgatcgggtcaacggcggcgacgatgctccggcggctgacagcgacggcgaaagggcggacgaggacggcgacgcgacggcgaccacggcggtgacctccccgagcgacgacgacgactggagcgactgcggcgcacggctggagcggcggcggcgatggcggcgcgaggcggcacgacgcttagagctctataggctacgagagactaaggcgagggtggcggcgggaattgagctccgaaaaatccgagaaaatttcagagagtataattaa

SEQ ID NO: 31411 - DNA, 255 bp, Oryza sativa
  Clone ID: PAT_MRT4530_35720C.1
aactagactgctcaacttatataaacttaagtggtgcgatgatcaaaggtgcaggaggaacaacatcgcaaacagtggagaacatgcttgttgaacatacatgttcatgtatctcctaacacacaagcttaaagaggacctctgaatactacagtaattggtttcagtccaaactttaaccgagaggtggacatgtaacggatggcgcttgcacgtcgataggtgtacgcagttcacgttgtggtaccagcggta

SEQ ID NO: 31412 - DNA, 174 bp, Oryza sativa
  Clone ID: PAT_MRT4530_35721C.1
atggcgttcgcgtgggttgggagggtggcccgtccgtccgcccgtgcctccgttcgtttggctcctggcggcgatgggggcggctccggcctccggctcgtctcggatagtcggatgcggtgggtgggatctcgggtgggtctcggcgccacgctgactgttgaacgaggttag

SEQ ID NO: 31413 - DNA, 2546 bp, Oryza sativa
  Clone ID: PAT_MRT4530_35722C.1
atggaaatgattctatgcagactgtcattgatgcaaaaaaatatgtctgaggtgattccagaaatgaattttgaagctcaagttgattctgtacaaccttggtctctagatttgttcaatctacaagaatctattgagcaacaaagttcaattcagtctagtgataaaggcgaaagtactattgaaatgatcctgatttgaatgaagaatttctaacagaagaagatattgaacagtttctagatgaagaacaacaggaagcatcaaaaggaaacaatgcaagcatagacagaaaatatattccagagttgaatcagaaattcaaatcaatagatgaggcacagaactacttcaatttttatgcatacatggctggattttctattgtcaatgctcacagtgctagaacagtaagtaaaaaaaagaaatggagaagttattagagtaacattcaaatgcaacaagtatgtgaagtcggattgcaataagaaggaagaaacagttacttctgaaaggaaaacaaatgaagtcatagggactgaatgcaaatgtgttctttacatgtcgacagaagaaaagattctaatcaggactttgaaagaatgccatattccaacaagaaataagattgtaatattatctgttctaagaggtggtctaacttctttgccttacactaaaaaggatataagcaatgtcagaacagcaataaacagagaaacaagcagtaatgatttgatgcaatgtttgaatttttttgaagaaaaagcaggaagaagatcccaatttcttctatgagtttgatcttaatgagaatagaaaagtgaagaattttttttggactgatggaagatctagggagtggtactacaaatttggcgattgtataagttttgacacaacttttttgacaaacagatataatctgccttttgcaccatttgttggagtatctggacatgggaacacaatactatttggttgtgcttttatacatgatgaaacaactaaaacttttgagtggctcttcagagcttttttgaaagcaatgaatggaaagcaaccaaagacaatcattactgatcaggatggtgctatgagggcaatcaaaaatatattcacagaagccaaacatcgaaattgtttcttccatatagtctcaaaagctctgaagagatctggttctctattcaagaagagacaaggtctttatgacatatacaatgatatcatacacaactcattgactgaagaagaatttgagtttctttgggaggatatgattcaagtttttaatttgcaagacatcaattttctgagaaacatgtgggaaatcagaaaaagatttattccagtgtatttcaaaacaaatttctgccctttcattcaatcaacagcactaagtgagggtacaaattccagattcaaaaagaatgtagggccacaatacagcattagaagtttcttgacagagtatgaaagagttatggacactattcaaaatctagagcaacatgatgatcatgaatcaaggacaaaaagaccaagtagaatgtggtcacactattgtattgaataccaagcagtgaggttgtataacaacaaaatattcaaaaaatttcagtttcagctcagcaagacaaatgaattggaaattgaggaaattgagagaatgaagtgttatgcagtgtttcaatcaaagaatgtgatcaacaaggaaataagacatagaaaataccttgtgatattggacttggactcagaggaattcacatgcatttgttgtatgtttcagaaggatggcattctttgctcacatgtattgaagattattcttcacctcaaaatcagcagaatactagaaaaatatattattcagagatggaggaagaaacaaatgacagcagataacatcaagagaaaaagtatcataccagtttctgagtcctcagttctccgattcaatatcctttcaaggaaattctgtgaaattacctcaagaggtgcaaaaacaattccagcatatgagttcttgatggaagaggcagataagattaatgaaaaattgaatgatttgattgataatgataatgaagttggagttgatgaagtgaacaatgatcaagatgcaaatatgaatgacaattcagaaaataatgtagttcaggatgagagattacctgaagaagacttcatagaagatccggacatagcaaattcaaaggggaggccaagacaaagatataaaacaattagagagcaaatagcagaacaagaaagttatcactgcagtcattgtggtaggacagaccacacctttccaacgtgtccattcaagcatattgaatttgatttgccaagaaaaaagaaaaggaaagtttaaaacataaatcaaaagaaaaggaaatctcaaaaaaaaagggcagacaattggaggcaaaaaacaagaagatggagggaaacagtcacgcaaaaagatggagggaaacagttcaagcagtttagtatgatgaatacaaaaggcaaaagaggtggaaaagatgaga

SEQ ID NO: 31414 - DNA, 480 bp, Oryza sativa
  Clone ID: PAT_MRT4530_35723C.1
gaagtatgatggagagcttcagcgttatttggaaatatcaacccaaacgtccgctcagttctacgcattccgggggattacgctactgttaacccaggagttcaactttgctgacactattcacatatgggacacactattaagtgatcctgatggtcctcaggagaccttgctcagaatctgctgtgcaatgctgattcttgtccgaaaacgcctattggctggtgatttcacttccaatctcaagctcctgcagaactaccccccaacaaacatcagccacctcctttacgtcgcaaacaagctgcactgaactcaactgaacctcgtctggaagacctgaaacacactacccctgctacaatgtattcggtaaaaactgtgactgcattgcagaaccacgtaccattacgaatgctaatcacagccagtccattaataaaataatttggatccctacctgcttgggattccagttgc

SEQ ID NO: 31415 - DNA, 2277 bp, Oryza sativa
  Clone ID: PAT_MRT4530_35724C.1
atgaaatcatcaagtgtactcatcaagtgtactgataatatgttctttgttttgattgctaaatgtttgataattaagtgtactgaaatatacttatgctttgttttcacaggtttgacagatgagaatttgaaaggttttgttggagaaacagcgaaaaaacaacagttgattgacttggatttaaacaaaaaaatttcacaatcaggtttacaattaattgagcaaaattacaataggacaagatcatttataatagatgcaaagaaaagtagtacacgatcaagtactgcacagtcaggtattttgaaggatttaagagagagagacaaaaacattgagaagaagacaatatcaaaagatgaaggacttgggttactggagcaaaattataatacgatgagatcatatatgcttgaagatggcaaaggtgatacaaaaactggaaacactcaaagagattcagaaattgacaagggaaagagaatagctgttatcgagaatgtaaaaacaatggaaaatgaaagaattcaatttgaagaagatatgttaggagaacaggatatgaactatgcagaagaaatacatcaaaccaatgttctatcactattggatcaagatttcattgatgataaatttacttcatacactagtctaatggaacatattatatcttcacaacctacaagatgcaatgatttggagaattcgatactgtcattgatgcaaaaaaatatgtctgaggtgattccagaaattaattttgaagctcaagttgattctgtacaaccttggtctctagatttgttcaatctacaagaatctattgagcaacagagttcaattcagtctagtgataaaggcgaaagtactactgaagttgatcctgatttgaatgaagaatttctaacagaagaagatattgaacagtttctagatgaagaacaacaggaagcatcaaaaggaaacaatgcaagcatagacagaaaatatattccagagttgaatcagaaattcaaatcaatagatgaggcacagaactacttcaatttttatgcatacatggctggattttctattgtcaatgctcacagtgctagaacattaagtaaaaaaagaaatggagaagttattagagaaacattcaaatacaacaagtatgtgaagtcggattgcaataagaaggaagaaacaattacttctgaaaggaaaacaaatgaagtcatagggactgaatgcaaatgtgttcttgtaatcagtgagaggaattcgatttgggttatatcgaggatagatttagatcacaatcatgagctcagtcctccagatgaggctagatttctaagatctcacaaatacatgtcgacagaagaaaagattctaatcaggactttgaaagaatgccatattccaacaagaaatatgattgtaatattatctgttctaagaggtggtctaacttctttgccttacactaaaaaggatataagcaatgtcagaacatcaataaacagagaaacaagcagtaatgatttgatgcaatgtttgaattttttgaagaaaaagcaggaagaagatcccaatttcttctatgagtttgatcttgatgagaatagaaaagtgaagaattttttttggactgatggaagatctagggagtggtactacaaatttggcgattgtataagttttgacacaacttttttgacaaacagatataatctgccttttgcaccatttgttagagtatctggacatgggaacacaatactatttggttgtgcttttatacatgatgaaacaactgaaacttttgagtggctcttcagagcttttttgaaagcaatgaatggaaagcaaccaaagacaataattactgatcaggatggtgctataagggcagcaatcaaaaatatattcacagaagccaaacatcgaaattgtttcttccatatagtctcaaaagctctgaagagatctggttctctattcaagaagagacaaggtctttatgacatatacaatgatatcatacacaactcattgactgaagaagaatttgagtttctttgggaggatatgattcaagtttttaatttgcaagacatcaattttctgagaaacatgtgggaaatcagaaaaagatttattccagtgtatttcaaaacaaatttctaccctttcattcaatcaacagcactaagtgagggtacacacttagtgctgttggcaattacacaaatcaaaaactgtaattacagagataaaaaactgtaa

SEQ ID NO: 31416 - DNA, 221 bp, Oryza sativa
  Clone ID: PAT_MRT4530_35725C.1
ccgcccgccgctctcggtcccatcccaccgtcgccatcacctgcctccggtggatccgcccgggctggatccgcgacctccggccgtcgagccctctcatggctgctcccgcccacgacatacctcttctgagcccactaccgccgctctcgaccgctctcgcccaccgagggcccaggccacccaccactcgcctctcacctctcactgtcgaccagtga

SEQ ID NO: 31417 - DNA, 369 bp, Oryza sativa
  Clone ID: PAT_MRT4530_35726C.1
atggagtggcaggggaagaattaccttcgtgtggagctccgggaggcgtcgcggtgcggggagtggagggtggcggcgcgggccgcgggacgccgggacagcgtggggaggcgccgagtcgacgacggcgcatcggcggtcgcccggtcgctctcctggctgtggcggctggatgggtggacaccttgtgccctcgtccgtcgttgctcccgtggtggcggcgtcggcaggcacggtgttgacgcccttggtgccgtggctgagcatggagagggccttgagggggacggcgccaacgtcattggcgccgtcatattggaccacggcgccaaagacattggcgccacgaaaaggatcattctagaataa

SEQ ID NO: 31418 - DNA, 135 bp, Oryza sativa
  Clone ID: PAT_MRT4530_35727C.1
taagggggttaactcacaaaaggggaagcacaaagcagaggaaagggactgcagaagaacacaaaccaagaggacaatggggcaacgaaagaaatggctaaagacaaaggtgaaagaatggaacctagagaaaaa

SEQ ID NO: 31419 - DNA, 278 bp, Oryza sativa
  Clone ID: PAT_MRT4530_35728C.1
tcgttcatcccaaccgccgtcgcatctcccgggggggaactttggcactatcgggggtgtaccaaaccaccagcttgctcggcaccgacccttgcctggatgagctcgtccgctcggtttgtaactccagtggccagattaccatggcgccgaccgatcaagagcgcgccccagagcatctggtatggacctgaccgatccaagtacctgaggccggtttcagagcatacaccatcggacctggacggagaggttccgggagactacgggggggacac

SEQ ID NO: 31420 - DNA, 501 bp, Oryza sativa
  Clone ID: PAT_MRT4530_35729C.1
atggcagtttttgtacttcagttcaaaattcactcgcgaccgttgcgcttcaaacggtatgctcgactacacgtcatctccgtggttctcgcgcctggaatgacaacgttctcgacacctgaagttgcaaatggtcgcgcgagttcatttttgagcagaagtcgggggctactgtcagggttacaggtcaggcataccctctacccctcgatatacgtcacgtatcaacatggtatatccacgcgtacacggatagttcctttgacatataaggaaactcttcgtgaagtcaatggacgaggagagaccttctcggataagaattgggttacccacgtatcatgcccggtctggtatattcgagtcctactcggacagcacctaatctgcggtataaaagggacccccgggaagggcatagatcatcgaatatcagagccaacacaacccacacagcctacaaagtcggagcctgcaaggagccaagtcgacgagagctag

SEQ ID NO: 31421 - DNA, 789 bp, Oryza sativa
  Clone ID: PAT_MRT4530_3572C.1
aatttttaaagattaaatcagattaaaacacttatatggattttaattgaattatgacgcaataatgaattatttttataaaggaaaaggggattattgcgtcagcggctagggttcgcggtgaaccgggtgcacggcggcggctcacggaaacgaacggccgagatcgattcatccaaaacggacggccaagatccatcggtccatgaccgggccacggggaacgatgacgatgacgtcagcggtggcgtcaccaccggcggcggctcgggagtgcatgctctccggcgaacgacgacacgacagcgcgaacggagggaaccaacacgtagagggcaacgcgacgaactcaccggtgaccaaaacaacggcggaagatcaacggacggtgacggcgtcgaggaagaagcggcggcgaccttcggcttgacgacgacggtgatgctccggcgacctacggcgacgacggaggggggcaaggaggtggcggcgaaggcccacggcgaccggcggcgcgatggaaggtttagggggcggccggatttggaaggagatggcggcgcggcgcggctagggtttcggcgcgaggaggacgacgagtccgacaggaacaatagagaggacaaggagacacttggagaaggacttagagccatggaggatcatcgaggatgtccaagtcaagggattagccttctcagcgaggtcatccgcgtttcaacacgggttataactagaggagacgtggtaacaacggggctcaagaacgtgttcgttcaagaagcctga

SEQ ID NO: 31422 - DNA, 300 bp, Oryza sativa
  Clone ID: PAT_MRT4530_35730C.1
atgacggcggatcaagcggcgccggtgacgggagtttccggattgaggtcacgacggaccggacagctgccatcgcgagtctcccttacatccttctcgtcaggtccaacattgagccgcctcctggccgtccccctccgcggtagccgtccacctcgacctcctcagcgccggccgccgtctgccgtcgcccacgccaaggccaccgccaacgccgccttctcccccggcgccaagcccgtttaccgcgccagcgcgctgtcttcccgcgtcccctcccgaccgccgccacgcgctgct

SEQ ID NO: 31423 - DNA, 143 bp, Oryza sativa
  Clone ID: PAT_MRT4530_35731C.1
gcggccaagcctgggccgggcctgtagcggctgcggctagcgtggtgtgccgggcggagggcggcaggcggcgaccttgccgtgtggagggcggcagggatcgcgtcaacgggcggatgggagatatgattggggatatgtag

SEQ ID NO: 31424 - DNA, 1047 bp, Oryza sativa
  Clone ID: PAT_MRT4530_35732C.1
ttagtggattttgagtaagctgccgatctggtagaagaagtatttgaagagcgagatacagctgagctggtcaggatgccggcttatcaccacctcatcgttcatacccatggcgatgacgaactcgacgcaggcttccctgagcccgcggcagccatggcggtcggccaatgccaatgtgctcgccaccgtctgcgccgtcaggctcctcgcgagcatgtccgcgcagatgagcttcagcctgcccatgtcgtaccggtcggcggcgacgagcaggtggcgggcgagctctcgcctgtcgtcctcgtcggcgtcgaggtcgtccatggcggcgagcgtgtcggtgtagatgaagccgagaaggaccttgaacacggcgggctgcatgtcgccgaccttgatggcgccgccggcgttgttgcgcatcgggccgaacagctcggcggcgaagacggcggagcgcatggcgagcaccacccggtgcgcggcgaactgcactccccgcacgtcgaacgtgacgtcggcgtgggacttgaggtcgaggagccggccgaggtgcgccgcgaggtccggcggcgggacgtcggccgccgtcagcggcgcggcggcggacacccgcggcttcccgacgacgcgcacggcgcagtcgatggtgaggcggtcgcggcggacgtagttggcctggagcgcctgtatcgcctccaccttgacgccgtacatggcggcggaggaggagcggagtacggtgctgaacgtcctcggcgcggcgagcggcgggtgcacggacagcgcccggccggagtcggcgcggacgaagcggaggtcgaaggtggcggcggcggcggcgcggtcggtcaggagctggacgtagacggcggcgtggtcgcggtcggcgtgcgtggcgccgcgcgggtagaagacgacggcccagtcgtagccgccgacggtgaaggcggccgaccggacgtactcgccggcggcgaggagcgccctcaggcggctgtacccgcggatcgcgaaccggtggtggccctccaccgtccccat

SEQ ID NO: 31425 - DNA, 393 bp, Oryza sativa
  Clone ID: PAT_MRT4530_35733C.1
gctttgatatatctattattacggggaattgttcagaaagttcaaagtttgaaaaattctagaaaattcatatttggcccaatcgagcttggaatgctctacgacacagttcagccttcagccttgagcagtctgatgggcggcttctccaaggaagaaacactctttgcaatcaggcagatggacagaaacaacgcccctggaccttatggcttcgggccaagtttttaccaagcaacgtggcatctcctcagcacagaagaagctgaggacaaatcgttggcggatgacttgaaccttggacccctctggcgctccctccaatctctcatcccgacggttcaagacctttcaagcgtccaggtgggggatggattccgcacgtccttctag

SEQ ID NO: 31426 - DNA, 2311 bp, Oryza sativa
  Clone ID: PAT_MRT4530_35734C.1
gctagttcaggggtgcaaatggggatggcattgcctatcaggtcttctcaggtgcatccagtgctgttttcgagctcaatgcaatgttctcacctgaatatttccgtgtcactcaggtctgccatggatttcacctccgacgagtcagagctaagtgatgcagatattgatgactatgctgacaagtgctacatggacctcaagtctgggaagccggtggtgagtctaggcaatgaaaagttcagatgcccattctgtctggggaagaagaagcaggactaccgttacaacgagctacttcagcatgccattggggttggcgcatccaatcgcgctccaaaggtgaaggcaaaccacatggccttggccaatcttctcaagaacgactatgctgatgcagcaggctcattgccatcacgacaggccattggaccaagtaatcctccaaggccattgcaagatcaggaagcgtatgtttggccatggatgggcatccttgcaaatgttccagctgagaaaacaaaggaggatggagctagtctgatgcagcagctagctaatttcaatcccttgcagtttactgctgtgctctgctccgagggtaggtatactggttatgcagttgtcggtttcagcaaagattggattgggttcacgaacgccttggcattccacaactacttcaaatcacaacgtctgggtaaaaaggattgggcagcacttggacaagagaagtacatctgtggatggatggcaaaagaagaggactacaaatctagtgacccagttggtaggtttttgtcagcaaatggtgatctgaagaccgtgtctggtctggaaaatgacctgtctcgcaagactgagactctcatagctaacttgtcacaccagattacagctaagagcaagtatttggtggaactggaatgcagatgcaatcaaatgaatctctctgttaaaagggcaatggaagaaactgacttgctgcacaaaagttacaatgaagaaatgcgaaatatgcaatctgctgctcgtgaacattcacagaaaatatttgaagagactgatcagctgaggaaacagttggatgataaagagaatgccatcgagaggagatccaagcaactaagcaagtttgttgctcaaactgacatagaaagaagaaaattggagagtgagatgaaaaagaactctgagcaaaacgactccatccacatggctagaatcgagcaacagaagtctgataaaaatgtgctaaagcttgttgagaaacacaagaaagagaaggagattgctctgaacaaaatcctgcagttagaaaagcaattggatgaaaagcaaaagctggaactggaaatacaacaacttagaggaagactgctggtggtccaacacatggagggagagggtgttgatgtgaagaaacgtactgacgagctgactgaggaactaaatgagaagattgaggagatggaatatatggaaggtctgaatcaaactctcattatcaaagaaaggaagacaaatgatgaactgcaagatgccaagaaagcgctgatttctggcttatcagaattgttaggccctcgtagcaccatcggactcaagagaatgggcgagctggatgagaaacccttccttgcagcttgcaagaaaaggtatggtactgctgacggtgaagctgaaataaaagctgctgaattttgctccgagtggcaagaaaatctgaaggatgccaattggcatccgttcaagattgttaccagaggaggaaagactgagcaaatcatcaatgaagatgatgagaagctagtgggcttgaaggagcagctcggtgacgaggtctacaaggccgtgaccacggcgctgctggagatcaacgagtacaatgccagcggcagctacgtggtgtcagagctgtggaacaacaaggaggacaggaaggccagcatgcaggaggccttgcagcacgtcctggagcagtggaagcttcggaggcgaaggagatgaagcacgcctttcactcacactggattgaactaaggctttttgttcatgcttcgtagtgctcagttattttttggatgggattatcttggcttagctgaaactggaagattatgcattgtgtgatcctggtttctcgctctgattgaaatcgctgggataaacacattaaggtcatgaactacattctgatagaattaactttctgatattcactacattctgatagaattgtgctgtcagagcataaatctttttgggacagtattataagaatctgtttcccatttctgagacacaccaa

SEQ ID NO: 31427 - DNA, 363 bp, Oryza sativa
  Clone ID: PAT_MRT4530_35735C.1
atgtcgggtgatcaagccgacaacgttgggtgcgacaactcagcatttttcgagaacgttctcgataatgcggtcgttttgggacatgacatcgccggcacccactccggcagcccctgccgccgtgcccgtgtgccggccaacgtcgccgtcttctccggcatcgcagcggcaaggccgatcgcgtatgtcgtccgtgtccgtcaagtgagccgctgcagccccgtcatcgtcttcgtccttggctccgcgtcgtcaagccctgtgccggccgcgtcttgccttcgtccaaggatcgccgccgaagtcgttccctcgccgttcgtctccgttgtccccgagccgtctccgccgcccgcctga

SEQ ID NO: 31428 - DNA, 360 bp, Oryza sativa
  Clone ID: PAT_MRT4530_35736C.1
ttatccctccacttcaatggcgactcgtgatgggacgaggtgaagcaggcgctcgtggcggcgcagccactcgcgggaatccggggctcggtcgggcggcgggcccacacgggcgtggcgtggcacacggcgcggcgcacggtgcaaggtgaccgggagggcacacctgtcgtgcgcgacacggtcgtggctcggaggtgtggcgctcggtgtgcggcttgggctagggctctggtcgagcacctggtggcccaggaacagtggcggcctatataactcggaggctctgatatttctgcgtgcacaggtgtacgggatgagcatgtgcttccggaactccgtccgcttgagaaactgcat

SEQ ID NO: 31429 - DNA, 483 bp, Oryza sativa
  Clone ID: PAT_MRT4530_35737C.1
atgacgcgagattggcagggcgggggcaggcagaaggcgaagcaggcaggggcagcgggcgagtgcagcggcgagcggcgcagtgagcaaagcaagaagggggcggggcgcatcacctgtggcccgtgcgacaaccatggcgcaatccagtgcggccgctcccactacacgaaggccatcctcgccgtgcaatccctcaagcgcctcacctcctctgaccgctcctcggccgcctcctcaagagcgacctcctcgccacatggccgagctccagcgtcatggctactggtccatcgtgccgaaccttggtaccacgccgacctggccatctatgccacgttcgtgtcctcctcgccgataatcgaggacggcgccgccgcccctgtggatgcgctcgtggaggcgttcctggaggagaatgagcaaggcggcaggttcgtggagggggaggaggacttgtacaagctgacgcgttggtggtga

SEQ ID NO: 31430 - DNA, 1424 bp, Oryza sativa
  Clone ID: PAT_MRT4530_35738C.1
aacatatggcaattagttcggcaacggtataaaaatgtaaagccacactacaacaagttatggcgtggccggaagttagtaattgctcaacttttcggaagttgggaaggatcatatgcactgctcactccattattggaggctattaaagcaactaatcctggaacaagatatcaaattttgtcacaaccgatgactcgtgaagggcatcgagcattcaagtgcgtggcttgggcttttggaccttgtattgaagcagtaccttatcttcgacctgtcattagtatagatgcttcctttttgtatggaagataccgaggtaggttgttgatagcatgtggatatgatgctgaaaacaaattattacctcttgcatttgcaatagtggagaaggaagacagtgataattgggaatggttcatgagatggttgcggaaagaggttattggttttggtaaatttgtgtgtgttatttctgatcgccacaaagctatcaaatgggtgttcaagcagccacatattggatggaatgaaagtgatggtgagtgtgtgcatcgattttgttcacaacatattgctgagaatctttacaagcaatgtaaagatgatgatgtggtaaaaacttttaagtgggttgtcaagaagaagaaaccacgtagattcaatgaagatgcaattgcttatcttggtaaggtgggaaaatatcggcaagaagataagaatgagccggaaaaatctgaaaaggttttccagtgcatggatggtggacatcgatgagggataatgacaagtaatggctccgagtctctaaataatgtgttcaagtactcaaggagattaccagtcatggcaatagtggaggaaacatttaacaagtgcttagaatggtttgttgatagaagaagatcttctcttgatcttgcaaactcagggaaaatgtggtctcgacgggttgagaagttattagtgaaacgaggggccaaggccggatccatgcatgttatatcatatggtgatgaaagaggagaatatgaggtgaaggttgaccgtgaacgagttgcattgcatcaaggagatcgtgttgtgtatgttcaaggggatttcaagtataagctagttatgtgcaacaatgctattccgacatgtgagtgccaaaagcccaaccttactagtattccttgtgctcatgtgcttgctgtttgcaaagatagaaaccttaatgagaattagtttatccatccttactactcttctacaacactcgcaaacacttgggctggtcagttccacccatatggaaatcaatcggagtggccaattattgagcctgatgctaggttgatacagttgggtcgacgaagatataaccgaaatcgccgccgctcgccggcgttctccagccgcgtgcctcagccgccgcctcc

SEQ ID NO: 31431 - DNA, 2553 bp, Oryza sativa
  Clone ID: PAT_MRT4530_35739C.1
atgataattgttcttgtatacactggaggtgaaattgtatatggagcgactggtgcagagtatagcattccacccaagattacttttcctgcttccgaagctacaactttcgaagatgtaaagaatgagatttatggagggctaaaatattctgaaactgaatattcacttgttatacaaggccgatatgatgtaggagcaccaagtccacattttttccagttgatcccattatataagaccagatcatggcaaatgatttttgacatgacattagcactaaacagttggcgtatggtggaattatatgttgagttcactccaacaaatagtggattcagccaaaaccacattgttagtgaaataataagagaaaacctagaaccaactatggctacagttgctgagaatattgtgtcagcatcacatcagtcgcctaagcatggtatatctcctaaaattcatgatgtgagtaattctgcaccaattgtgggcttgtcttctgataatatcataaatgaagcgcaagaaaattctcaagatgatggctatgtggacgaagagacagaacgtgagggtgatatgattgaggaagatgagagcgatggcgaagccgaagaggatgtgaatgataacacctatggtcagcctgtggtcaaattgatcaaatcgttgccactcgtgggcaggtctgacaagcaccctgtaagtgccttccatgatatatctgtgctacagaatacaacggccgatgagagattctttggttcgaggaaacattttaacagtccattagctaaaggccgaacttttgattccaaggagcatttgcagtttgctattaatgaatttcacattagtaccaatcaagaagtaaaggttaccacaagtaacaagtcaagactaagtatgaagtgcatagacaatacttgcttgtggaagctatatgggaaaccaacaaaaattggttcaagttggaagatacagacttgcccctatcctcacacatgtcgagctcccgctgatcgacttgatcgtgcacaattgacatctgcagttattgcagatgttatacgtgatgacttgaaagagaacttggagttgagcataatgaacatacggcaattagttcggcaacggtataaaaatgtaaagccacactacaacaagttatggcgtggccgggagttagcaattgctcaacttttcggaagttgggaaggatcatatgcactgctcactccattattggaggctattaaagcaactaatcctggaacaagatatcaaattttgtcacaaccgatgactcgtgaagggcatcgagcattcaagtgcgtggcttgggcttttggaccttgtattgaagcagtaccttatcttcgacctgtcattagtatagatgcttcttttttgtctggaaggtaccgaggtaggttgttgatagcatgtggatatgatgctgaacacaaattattacctcttgcatttgcaatagtggagaaggaagacagtgacaattggggatggttcatgagatggttgcggaaagaggttattggttttggtaaatttgtgtgtgttatttctgatcgccacaaagctatcaaatgggtgttcaagcagccacatattggatggaatgaaagtgctggtgagtgtgtgcatcgattttgttcacaacatattgctgagaatctttacaagcaatgtaaagatgatgatgtggtaaaaacttttaagtgggttgtcaagaagaagaaaccacgtagattcaatgaaggtatggaagctatttcaaaaacttgtccagatgcaattgcttatcttggtaaggtgggaaaatatcggcaagaagataagaatgagccggaaaaatctgaaaaggttttccagtgcatggatggtggacatcgatgggggataatgacaagtaatggctccgagtctctaaagaatgtgttcaagtactcaaggagattaccagtcatggcaatagtggaggaaacatttaacaagtgcttagaatggtttgttgatagaagaagatcttctcttgatcttgcaaactcagggaaaatgtggtctcgacgggttgagaagttattagtgaaacgaggggccaaggccggatccatgcatgttatatcatatggtgatgaaagaggagaatatgaggtgaaggttgaccgtgaacgagttgcattgcatcaaggagatcgtgttgtgtatgttcgaggggatttcaagtataagctagttatgcgcaacaatgctattccgacatgtgagtgccaaaagcccaaccttactagtattccttgtgctcatgtgcttgctgtttgcaaagatagaaaccttaatgagaatcagtttatccatccttactactcttctacaacactcgcaaacacttgggctggtcagtttcacccatatggaaatcaatcggagtggccaacttataatggtccaattattgagcctgatgctagtttagtctccaatgaaaaaaccaaaagagctcatcatgcaattaactaatacatggcc

SEQ ID NO: 31432 - DNA, 327 bp, Oryza sativa
  Clone ID: PAT_MRT4530_3573C.1
tattggtcggcctggatttctgtgccttcgggcgccggctgtatttagtcggagcggagttcccaagatggttgtctggtgctcccagtcccaggtcccacccgacggtcgccggcagagctgatccaactctggttgccaacaaacagacggtccacattcatgcaaagggtcgaaaaaacaaatgcaatccaacccatgcactagttgcccgcgctttattccactgaccgtagctggagcctcctttcgacaccggtcccaaaagccaagatgtccccgcgcggccgtgccgcgcgccacgtactcctaccggtaccgggacgg

SEQ ID NO: 31433 - DNA, 1251 bp, Oryza sativa
  Clone ID: PAT_MRT4530_35740C.1
ctagttgatcaacccgcaagaggccggcaatggcggcttcagcaccagcctgtagggaagagccggcccaaagtagtacctcctgtgaggcagcctgaacaacaccatggcctgaacgtcgagagcaaacacccattcagagccatagtgtttgagaaagtcgaagccctcgccggcgtccatgatcctcgcgacgtcgtcatcggcgtccacacagagctccatcacaccgtcgacgtgcgccagctccacccgcgactcccgcacccaccgccccctgctgctcctgctcttgtcgaggtgccagaattcgagccgcgccgctgcggccgcgaacgccacgacgcggagctcgccgtcgtcagacctgatgacgcgcatgttcccgtcgtagcgcgtccgcatgctgcttagcagtttgatgatggagaactgtttggtgcgggcgtcgagcgccaggaggtacgcgccgccgtcgccgccgtcgtcgatcagccagtagacgctcccgttggcgtgcatgtcgccgctgaaggcgctgagcattggcaacatggggatgtaggcgtgcacggtccactggccggagcgcgacgagaagacgtacagacgcggctcccacatgttgtagcaggtcacgaggatgatctcgaactcgaagctgcagacgacgccgccgccgtcgctgtcgtcggtgcgcagagcggcgccgagatacgcgctgttggtgaccggggcgacgtgcaagaggacagagcggccggacacggggtcgcagatggcgaagttgtccgggatgtccatgcggtcggcgaacttggtgcagaggaggaggaggccatcgtgggtgtccgcaagcgcccagtgctcgtcgtaagggagggagtcgagggagaagtcgatgcagcggttaacggcgccgaggaatcccctcggcgtgagcctcgggaggaaggttgggtcgaccacctcgccgacgagctcgctgtcggcaatcgacctcgagacggcgaacccattgttgcagacgaagaagccgaggagagggggcgggtggtggagctggcggaagaggcggaggaatgtcggcgacgacgcgacacggcgccagcggcggcagacggtcgcggcgcgcgcgagggcggccggggacgggaggcggagcaggatgtgggcgaggaggcggtagtccagcgccgccgccgtggcgtccgcggcgggaggcgcccgcgctttcctcttcccgcccat

SEQ ID NO: 31434 - DNA, 2079 bp, Oryza sativa
  Clone ID: PAT_MRT4530_35741C.1
ggattccaaccataagtgcttggtcatagtctggattgcagtttcatgtaaagcaaaaggattctacgaagcaaacgccatatatatgacagcagctatttacattagtggccataatgcagaggttctaaacaaatggcgttgcttctaagggtgggtgtgcatactggtgacatcctggacatataaccaaaagggacagtaatgtgctgcatgttgtttccttcttcatccgcttttcttatgtttctgctgactgtcatctttaaatagtttcttagcagctgaggctgaggctgaggctgcaggcctttttgggggaatgtttttggtaggcggtgatggggatgctgatggagtatcttctgctgctattgctagtgcctttgccttcttgtcctgagtagcagaagatagctcaacagacgatgcaatctgcggaggttctcccttaatttttgtctcagttgttgcatcatgtgagaatgagatctgtttatcttgagctggcttgggagagactgataggacatagcttttcttgcttggtgctggtgcattagctttgctagttggtgtctgatctgaagcagaactgatagtataccttgttggtgtcgatggactatccattggtaacatactttctgtcgtttgtgcttctatctttgatcctgtactgccttcacttgttgctggtgctagttggagagagctgcttgagtctgctggcataatagctaatgtctgttgtgaactgcttggtgagataggcagtaggccctgcacttcagcattggatgagataatgttgttaacctgtaaggtttcttgatttttcataatagtatcttgtgtgaagctgatgttccagataaaggtttggttgaaaagagctacaatctcatctggaatatattcactgtcaggtggattttggtcaatgagagtctcaaccggtttgcgtacgaggcgttgtgctattcttggcactggtatgcctacattggagcagctggtgcatttataggtggaaccatatggttttgaggtcctttcttttaactcaagcacttcaggcatatcaaggttaatctaccatttgcatggtgaacttccatttaaagttagtcctatccctttgtagttcttgacaactgttccaacaaaaacaataacctgaggtttcttttgaccagcattgtataattcttctgcattgaatgcagctgcagtatttccccatagtgtgataggcagtgtagaattgctagttttataaaatgattataaatttttggtgatcaatattagtaacttgttacaatagcttgcatcccaaatctgcattgttcttttcaaagtttctgtgtttcttgattttgggcgtagagtgtctgttgcaccaatttcagttatgacacccataatatcaacatagaaagcatttttgtccacaagagacgggacgtcttgaaaaggtgtcaatgaaaaagttatggcagggaaatcatcagaagcatcaatgcattcttctaaggttgtccatttagtgaatgagatcatcaaagggttcgtaactggcctatatgttcagtttgcatatctgacagagaaggagtcaaagtagtaaaccttcccttcctgtagaagagtcctaagcttaatcatggcaggtggatagatttgaacatggatgctattgccctgctcaagtgtttgtccttggctgttgttgatagtcattgcataacaaactcgaactgggaattgtctcctttgtaatgcaaaaggccatttcattttcgatgtgcttagtgtaattcttagtatataaactgtttcaccgatgtttgatccagttagtatagtacattgtaaaattgtttcgcctaaagcaataagtaatagtcttgttccattacaaaggcctattgattggttcaaatttcgtagaagcataacaacactaccttcctttaaaacaagtttgtgtgtaggaaagttagttgcagctatatttattttcacttcgcaggggctacaacattggaactcggttggttgatgagttcctgg

SEQ ID NO: 31435 - DNA, 2137 bp, Oryza sativa
  Clone ID: PAT_MRT4530_35742C.1
atccaaagaaaaaaaaagagtccgagcagcgagcaaaagaggaaaagcagggagcgagagaccgggggacggaaatggtcgtcgccgtcgcctcaccttcgtcggcgccggggccgggcgccgccggccgcccccacccgacctacaaggagatgatcctgcgggcgctcaaggagcttccagatccgatcatctccagccgccgtgccatcgccaagtacatctccgacaacttctccggcctcccttctcaccacgacgcgctcctcaccgttcacctccgccgcctcaggtcacagggccttctcctcatgtctggacactcgtaccttctctccacctccgccaccgccgctcgaggacggggacgaggacgaccgcccaagaaagcttcctcctccgcgccgcctcaaaagcgcggacccggccgaccccgcaagaatacagccctgtttccggttcctgtgcttgaggcgaagcctgggcgcgggcgaccccggaagaaccctctccctgtggcttcctccacctcctctgctgctgctgctgctacggcgttgagcctgagagtgaagcggggacctgggaggccgcgcaagaatgctgctgctaccccgttgagactgggagtgaagcggggacctgggaggccgcgcaagaatgctgctgctaccccgttgagactgggagcgaagcggggacctgggagaccgcgcaagaatgccactgctaccccgttgagcctgggagttaagcggggacctgggaggccgcgcaagaatgctgctgctgctgcctctcccgttgctccgccgcctgcatctccactgaagcggggtgttggacgcccaaggaagaacgccactcctctagtcaagcctggacctgggaggccgtctggattcaaacgtggaccaggccgccctcgcaagaatgccactcctcctgtgctgtcagtgccacccactgctgctgctgtgttgggagtgaagcgtggccgtgggcgccctagaaaggataaaccattgcaatcttggtctgtgctctctggcggtgctgcaatgactaagagagggcctgggaggccaagaaagaagaggccactggaagctggaggtgttgtggcagcacaggtagacactgcagatggaggtgaggctggagccgttcaaaatggaggtgaagttaggtgtctgctctctgatggtgcttcttcaatggggaacagagggcctgggagtcctaggaaggaggtgctattggaaaatgaacctacagtttctacattggtgggaaagagaggccgtggccgtccaaaaaaggagaaaccatcagcagcaaggcctgctgaaactggagatgctaaatcaatggggatcaagagaggtcgcggaagaccaagaaaggacagttcctttcaagctgtgtttgcagaagctgcaggtcaggtgtcaagagatgtcacagcagctcagcccgaaggagatgcagatttactggcaaggaaggaaccagagactgcagctgtagtttcggtggagaacaaagaaactaggcctgcagatgctgggggtgttgtggtttctgaagagaagacatcgattgatccggtggaggctggaagtgtaatgccatgtgttaatgcagaagttgatcgcatgaactctgacctgcgcactgctaatccatagtgtggctggcgtcagcactcagcacagaagggaggacctggatggctggcactacctgcaggtgtgaatgtgtattcactgatttagctggagacatactgtgaaaactgttaaatgttgcaaccaaaattattactgtcatgctgttaagtagtttctcaagatcaacattggagtatgcttttaatgatatccacttctcggataaatttttataataatccatagaaaaaaaaaataaaacctttaggaatgactggatatatcatatatgttgcttttagtgcacccagtggtgatgagatgcatcaatgtttacttccaatttgaacaaaaaaaaaaaaaaaattcaatcaatatctctgttttttccatgcctatatcttaagtaattttggtgaaaaaaaaaaaaaaaaaaaaaaaaaaaaaaaaaaaaaaaaaaaaaa

SEQ ID NO: 31436 - DNA, 147 bp, Oryza sativa
  unsure (1)..(147): unsure at all n locations
  Clone ID: PAT_MRT4530_35743C.1
ttcacctcaatgtcgcctggaccagtaccagcagagctgtcgacaggtgtgcgggcgccgtcgcgagggcgagctgtngcgccgcggcgaacggactcgccaccgcgtcgccggcgagggccgtgccggactacaccgacctgctcg

SEQ ID NO: 31437 - DNA, 173 bp, Oryza sativa
  Clone ID: PAT_MRT4530_35744C.1
gcaatcatgcagcgtgatgaaaactgccgtcagaaagaagcagtgtttttcatggacctgatgctctttctagcagcagtggcatgcgccctcatccctctagagaccaagggccggcaaatccatgttgcaacaactgaaatgcaccagctagctctcaattccatacaagg

SEQ ID NO: 31438 - DNA, 524 bp, Oryza sativa
  Clone ID: PAT_MRT4530_35745C.1
ctgaacaatcttatatgctcggctaccagatgaagccgtgcatgctcacgtccgatctacattagtgctgtgacagtgcgaatggcatataagaaacacaaataccgttgactagacggttcatagctctacagaaccacatgctctgctatagactggacccgcgacatgcccacccttctgataggggcatcattatatatgataactggctgtctcggacatgcggcgatgagacgaaaaccattgaaccactagacagaatcgcacgggacattcagccggcgacacatgcttgaaattggctgccctatgactttcatacgttgcgatacctgcctacagtaggagataacagtagactgagatactgggatcgaatacattgagagagacctacaaacaggctccacctgcaacgaaggcattcagtgcgctaaatacccaccactggcacggtgcaggatgcgacattgaagaacaatatccggacactctactgacaggtctttggactgaatgca

SEQ ID NO: 31439 - DNA, 360 bp, Oryza sativa
  Clone ID: PAT_MRT4530_35746C.1
ctccaaagacaaacgcagatgacagactcaactgcatccaatgtagtatcaatgtatgatcagtgataacatccatacgggagtcctaatgcccgcgaggggcttcatcacccgactctaccatgctaattctgacgctgctaaaaacatcatgcaacaacaacaggtcgtgtcgtctcctaatacaacagtctcaggttgaaaagtttatgtacaccatgcgactgacattacaggaagggactctcgtggtcgtgggtcacacacacttgccatgacaaataaatagcattacaccaacttgagaaggctttgtacatccaggtgtatctcgtcaatgaatctggggggcagtcacct

SEQ ID NO: 31440 - DNA, 3318 bp, Oryza sativa
  Clone ID: PAT_MRT4530_35747C.1
atggcagccgctgcggcggcggcggtggtggggagcgggtgcgaaggggagaagacgaaggcgccggcgatcaactcggagctgtggcacgcctgcgcggggccgctggtgtcgctgccgccggcgggcagcctcgtcgtctacttcccccagggccacagcgagcaggcggacccagaaacagatgaagtgtatgcacaaatgactcttcagccagttacttcatatgggaaggaggccctgcagttatcagagcttgcactcaaacaagcgagaccacagacagaattcttttgcaagacactgactgcaagtgatacaagtactcatggaggcttctctgtgcctcgtcgagctgcagaaaagatatttcctccactggacttctcaatgcaaccacctgcacaagaactacaggccagggatttgcatgataatgtgtggacattccgtcacatatatcggggtcagccaaaaaggcatctgcttaccactggctggagtctatttgtaagcggcaagaggttatttgctggagattctgtcatttttgtcagggatgaaaagcagcaacttctattaggaatcaggcgtgctaaccgacagccaactaacatatcatcatctgtcctttcaagtgacagcatgcacatagggattcttgctgctgcagcccatgctgctgccaacaatagcccatttaccatcttttataaccctagggccagtcctactgaatttgttatcccatttgctaagtatcagaaggcagtctatggtaatcaaatatctttagggatgcgctttcgcatgatgtttgagactgaggaattaggaacacgaagatacatgggaacaataactggcataagtgatctagatccagtaagatggaaaaactcgcagtggcgcaacttacaggttggttgggatgaatccgcagccggtgaaaggcgaaatagggtttctatctgggagattgaaccggtcgctgctccatttttcatatgtcctccaccattttttggtgcgaagcggcccaggcaattagatgacgagtcctcggaaatggagaatctcttaaagagggctatgccttggcttggtgaggaaatatgcataaaggatcctcagactcagaacaccataatgcctgggctgagcttggttcagtggatgaacatgaacatgcaacagagctcctcatttgcgaatacagccatgcagtctgagtaccttcgatcattgagcaaccccaacatgcaaaatcttggtgccgccgatctctctaggcaattatgcctgcagaaccagcttcttcaacagaacaatatacagtttaatactcccaaactttctcagcaaatgcagccagtcaatgagttagcaaaggcaggcattccgttgaatcagcttggtgtgagcaccaaacctcaggaacagattcatgatgctagcaaccttcagaggcaacaaccttccatgaaccatatgcttcctttgagccaagctcaaaccaatcttggccaagctcaggtccttgtccaaaatcaaatgcaacagcaacatgcatcttcaactcaaggtcaacaaccagctaccagccagcccttgcttctgccccagcagcagcaacagcagcagcagcagcagcaacaacaacaacaacagcaacaacaacaaaaattgctacaacagcagcagcaacagcttttgctccagcaacagcagcaattgagtaagatgcctgcacagttgtcaagtctggcgaatcagcagtttcagctaactgatcaacagcttcagctgcaactgttacaaaaactacagcaacaacagcagtcattgctttcacaacctgcagtcacccttgcacaattacctctgatccaagaacagcagaagttacttctggatatgcaacagcagctgtcaaactcccaaacactttcccaacaacaaatgatgcctcaacaaagtaccaaggttccatcacagaacacaccattgccactgcctgtgcaacaagagccacaacagaagcttctacagaagcaagcgatgctagcagacacttcagaagctgccgttccgccgaccacatcagtcaatgtcatttcaacaactggaagccctttgatgacaactggtgctactcattctgtacttacagaagaaatcccttcttgttcaacatcaccatccacagctaatggcaatcaccttctacaaccaatacttggtaggaacaaacattgtagcatgatcaacacagaaaaggttcctcagtctgctgctcctatgtcagttccaagctcccttgaagctgtcacagcaaccccgagaatgatgaaggattcaccaaagttgaaccataatgttaaacaaagtgtagtggcttcaaaattagcaaatgctgggactggttctcaaaattatgtgaacaatccacctccaacggactatctggaaactgcttcttccgcaacttcagtgtggctttcccagaatgatggacttctacatcaaaatttccctatgtccaacttcaaccagccacagatgttcaaagatgctcctcctgatgctgaaattcatgctgctaatacaagtaacaatgcattgtttggaatcaatggtgatggtccgctgggcttccctataggactaggaacagatgatttcctgtcgaatggaattgatgctgccaagtacgagaaccatatctcaacagaaattgataatagctacagaattccgaaggatgcccagcaagaaatatcatcctcaatggtttcacagtcatttggtgcatcagatatggcatttaattcaattgattccacgatcaacgatggtggctttttgaaccggagttcttggcctcctgccgctcccttaaagaggatgaggacattcaccaaggtatataagcgaggagctgtaggccggtccattgacatgagtcagttctctggatatgatgaattaaagcatgctctggcacggatgttcagtatagaggggcaacttgaggaacggcagagaattggttggaagctcgtttacaaggatcatgaagatgacatcctacttcttggcgacgacccatgggaggaatttgtcggttgcgtgaaatgcattaggatcctttcacctcaagaagttcagcagatgagcttggagggttgtgatctcgggaacaacattcccccgaatcaggcctgcagcagctcagacggagggaatgcatggagggctcgctgcgatcagaactccggtaacccttccaatggttcatatgaacaattcgaatga

SEQ ID NO: 31441 - DNA, 309 bp, Oryza sativa
  Clone ID: PAT_MRT4530_35748C.1
atggcggagccgcggccgagggccggcaagacctggggaaattattggagcggtgaccgaggtgctgcacggcgctgcgaggcgagaggtgaagacggagcgacgcggcagcggctaaggcgacggtggcacacggctagaggcggcgtatggtggaggtggctcgggatgcacggtggaagggtggttgcggtggtggaatggggaaacggagcggaggccgggtggctcggcctcgcgatgggaaggtggttccggcggtggaggagggagatggagtggatgccggggtgcggcgaggcgctgtga

SEQ ID NO: 31442 - DNA, 169 bp, Oryza sativa
  unsure (1)..(169): unsure at all n locations
  Clone ID: PAT_MRT4530_35749C.1
nnnnnnnnnnnnnnnnnnnnnnnnatgggcaatatggttacatataatttacatacagatctgtataaaagaactgcaacaaaagcttacagacgcagctaaaggtttgtggatacacagaatataaactgagtaacttaaatatacgagtttaatgaaaacaagaatt

SEQ ID NO: 31443 - DNA, 1223 bp, Oryza sativa
  Clone ID: PAT_MRT4530_3574C.1
atgcggcaaatccggcaacataacgtgttcccggtcgacgctcatacggggaaggcgggggtcggcagtagaagcggcgaaaggcggtggcaccaggcggttgtggaggagaaggatgaatgggtcacggcgtcgaggagttgggcggggcgagtaaggaggagcacggcacggcgtcggcttggcgtggtcggcaaggcggcggcagcggtggcaggactgttggcggaggcggcgcaaagccacgacggcgaaggcagcggcgcgtgcgcgtcctgggaggagaaggaagggcggcggctcagctggcggctagggttcgcggtgaaccgggtgcacggcggcggctcacggaaacgaacggccgagatcgattcatccaaaacggacggccaagatccatcggtccatgaccgggccacggggaacgacgacgatgaggtcagcggtgacgtcaccaccggcggccgctcgggcgtgcatgctcgccggcgaacgacggcacgacagcgcgaacggagggaaccaacacgtagagggcaacgcggcgaactcaccggtgaccaaaacaacggcggaagatcaacggacggcgacggcgacgaggaagagcggcggcgacgatcgggtcaacggcggcaacgatgctctggcagctgacagcgacggcgaaagggcggacgaggacggcgacgcgacagtgaccacggcagtgacctccccgagcgacgacgacgtctggagcgacggcggcgcacggctggagcggtggcgacgacggcggcgcgaggcggcacggcgctagagctctaccggctacgagagactaagacgagggtggaggcgggtagaggggagcttgggggtcaatttataggagctagggagcggcggcgaaggcccacggcgaccggcgacgggaatgaaggtttagggttcggaggagagaaatcgatccgaatcgaactcaaatccggcgatttccaaagcgatttagacgatgtttccaaaagggaaaaggtagagtggatcacagggatcctttcccctcaatcaatttcaccggaaacggaaagggacgatgggacctacctgtcagcggcggtcgcacgcgcgcgcgcgggcggctcggcttgggccgacttgggctgagggagagagagagcggtttgggccggcttttggcccaaaaccaaaagggacttttaaaaacctttttccct

SEQ ID NO: 31444 - DNA, 3372 bp, Oryza sativa
  Clone ID: PAT_MRT4530_35750C.1
ggggagaagacgaaggcgccggcgatcaactcggagctgtggcacgcctgcgcggggccgctggtgtcgctgccgccggcgggcagcctcgtcgtctacttcccccagggccacagcgagcaggttgcagcctctatgcaaaaggatgttgatgcacatgttccaagctacccaaatctgccttcaaagttgatttgccttctgcataacgtcactttacatgcggacccagaaacagatgaagtgtatgcacaaatgactcttcagccagttacttcatatgggaaggaggccctgcagttatcagagcttgcactcaaacaagcgagaccacagacagaattcttttgcaagacactgactgcaagtgatacaagtactcatggaggcttctctgtgcctcgtcgagctgcagaaaagatatttcctccactggacttctcaatgcaaccacctgcacaagaactacaggccagggatttgcatgataatgtgtggacattccgtcacatatatcggggtcagccaaaaaggcatctgcttaccactggctggagtctatttgtaagcggcaagaggttatttgctggagattctgtcatttttgtcagggatgaaaagcagcaacttctattaggaatcaggcgtgctaaccgacagccaactaacatatcatcatctgtcctttcaagtgacagcatgcacatagggattcttgctgctgcagcccatgctgctgccaacaatagcccatttaccatcttttataaccctagggccagtcctactgaatttgttatcccatttgctaagtatcagaaggcagtctatggtaatcaaatatctttagggatgcgctttcgcatgatgtttgagactgaggaattaggaacacgaagatacatgggaacaataactggcataagtgatctagatccagtaagatggaaaaactcgcagtggcgcaacttacaggttggttgggatgaatccgcagccggtgaaaggcgaaatagggtttctatctgggagattgaaccggtcgctgctccatttttcatatgtcctccaccattttttggtgcgaagcggcccaggcaattagatgacgagtcctcggaaatggagaatctcttaaagagggctatgccttggcttggtgaggaaatatgcataaaggatcctcagactcagaacaccataatgcctgggctgagcttggttcagtggatgaacatgaacatgcaacagagctcctcatttgcgaatacagccatgcagtctgagtaccttcgatcattgagcaaccccaacatgcaaaatcttggtgccgccgatctctctaggcaattatgcctgcagaaccagcttcttcaacagaacaatatacagtttaatactcccaaactttctcagcaaatgcagccagtcaatgagttagcaaaggcaggcattccgttgaatcagcttggtgtgagcaccaaacctcaggaacagattcatgatgctagcaaccttcagaggcaacaaccttccatgaaccatatgcttcctttgagccaagctcaaaccaatcttggccaagctcaggtccttgtccaaaatcaaatgcaacagcaacatgcatcttcaactcaaggtcaacaaccagctaccagccagcccttgcttctgccccagcagcagcaacagcagcagcagcagcagcaacaacaacaacaacagcaacaacaacaaaaattgctacaacagcagcagcaacagcttttgctccagcaacagcagcaattgagtaagatgcctgcacagttgtcaagtctggcgaatcagcagtttcagctaactgatcaacagcttcagctgcaactgttacaaaaactacagcaacaacagcagtcattgctttcacaacctgcagtcacccttgcacaattacctctgatccaagaacagcagaagttacttctggatatgcaacagcagctgtcaaactcccaaacactttcccaacaacaaatgatgcctcaacaaagtaccaaggttccatcacagaacacaccattgccactgcctgtgcaacaagagccacaacagaagcttctacagaagcaagcgatgctagcagacacttcagaagctgccgttccgccgaccacatcagtcaatgtcatttcaacaactggaagccctttgatgacaactggtgctactcattctgtacttacagaagaaatcccttcttgttcaacatcaccatccacagctaatggcaatcaccttctacaaccaatacttggtaggaacaaacattgtagcatgatcaacacagaaaaggttcctcagtctgctgctcctatgtcagttccaagctcccttgaagctgtcacagcaaccccgagaatgatgaaggattcaccaaagttgaaccataatgttaaacaaagtgtagtggcttcaaaattagcaaatgctgggactggttctcaaaattatgtgaacaatccacctccaacggactatctggaaactgcttcttccgcaacttcagtgtggctttcccagaatgatggacttctacatcaaaatttccctatgtccaacttcaaccagccacagatgttcaaagatgctcctcctgatgctgaaattcatgctgctaatacaagtaacaatgcattgtttggaatcaatggtgatggtccgctgggcttccctataggactaggaacagatgatttcctgtcgaatggaattgatgctgccaagtacgagaaccatatctcaacagaaattgataatagctacagaattccgaaggatgcccagcaagaaatatcatcctcaatggtttcacagtcatttggtgcatcagatatggcatttaattcaattgattccacgatcaacgatggtggctttttgaaccggagttcttggcctcctgccgctcccttaaagaggatgaggacattcaccaaggtatataagcgaggagctgtaggccggtccattgacatgagtcagttctctggatatgatgaattaaagcatgctctggcacggatgttcagtatagaggggcaacttgaggaacggcagagaattggttggaagctcgtttacaaggatcatgaagatgacatcctacttcttggcgacgacccatgggaggaatttgtcggttgcgtgaaatgcattaggatcctttcacctcaagaagttcagcagatgagcttggagggttgtgatctcgggaacaacattcccccgaatcaggcctgcagcagctcagacggagggaatgcatggagggctcgctgcgatcagaactccggtaacccttccaatggttcatatgaacaattcgaatga

SEQ ID NO: 31445 - DNA, 1998 bp, Oryza sativa
  Clone ID: PAT_MRT4530_35751C.1
atgggcgtggcgacggtgacagagctgaggcagagcttctccgggaagagggcattaagaccaaccctcaccagccgccatgccaatgaatggcctccgaccgacgtctccagcgacctcaccgtcgaggtcggcacgtccagcttcgccctgcacaagctgctcgcgcagttcccgctggtgtcccggagcggcaagatccggcgggcggtggccgaggccaaggacggcaagctggcgcgcctcgggctccacggcacgccgggcggcgcggcggcgttcgagctcgccgccaagttctgctacggcgtgggcgtggacgtcacggtgggcaacgtcgccatgctccggtgcgccgcgcactacctgcagatgacggaggacttctccgacaagaacctggagctccgcgccgaggcgttcctccgcgacgccgtgctccccagcatcgccggctccgtcgccgtgctccgcagctgcgaggcgctgctcccggccgccgaggacgtcaacctcgtcccgcgcctcatcgccgccatcgccaacaacgtctgcaaggagcagctcacctccgggctgtccaagctggaccagctcaagccgccgccgccgccgcaggcggtggtggtggccgccgccgccgccggcgacctcgactcgccgggggactggtggggcaagtcagtcgccggcctcgggctcgacttcttccagcggctgctctccgccgtcaagtccaaggggctcaagcaggagacggtcacccgcatcctcataaactacgcccagaactcgctccacgggctcatggcgagggacatcgcggccgccgccaaatgcggcggcggcggcggcgacaccgacgccgtcaagaagcagcgcgccgtggtggagaccatcgtggggttgctcccggcgcagtcgaagaagagccccgtgccgatggccttcctgtcggggctcctcaagacggcgatggcggcgtcggcgtcgagcatctgcagggccgacctggagaagcggatcgggatgcagctcgaccaggccatcctggaggacatcctcgtcgccgccgggcccgtctccgccgcggcggcggcggcggcggtggagcacacgctgtacgacacggacgtggtggcgaggatcttcgcggtgttcctcaacctcgacgacgacagcaacgacgaggacgccgtcgtcgtcggcggcgggtgcggcgcgttcgactacgacagcccgaggtcccccaagcagagcctcctcgtgaaggcgtcgaagctgctcgacagctacctcgccgagatcgccctcgactccaacctcctcccctccaagttcatctccctcgccgagctcctccccgaccacgcccgcctcgtcaccgacggcctctaccgcgccgtgcacccgaacatcaaggaagcggagaggtacaggatgtgcaaggcgatcgactgccagcgcctgaccccggacgcgtgcagccacgcggcgcagaacgagcgcctccccgtgcagatggccgtgcaggtgctctacttcgagcagctccgcctccgcagcgcgatccaggccaccggcaccaccaccacaaccactaacaccagcatcggcggcgcgcacgacgcggcgctcttcttcgggtgcgccgccgccgccgcggcgccgcggtcggggagcggggtgggtagcggggcgatgtcgccgcgggacagctacgcgtcggtgcggcgggagaaccgggagctgaagctggaggtggcgcggatgcggatgcggctgacggacctggagaaggaccaggtgagcatgcggcgggagctggtgcgcgtcggcccggcgaaccgcctcctccgcggcctcgcgcggcgactcggctcgctcttccacttccggggcgccgccgccgagccgggcctccagcagctcggcgccaaggccaccgccgacgccaaggtcctcttccagcgccgccgccgccactccatctcctga

SEQ ID NO: 31446 - DNA, 431 bp, Oryza sativa
  Clone ID: PAT_MRT4530_35752C.1
ctgggactctaatgcgaccccctatctacaccgttgtttgcggtattacgtctttcgacatatatacctcgcgcctgccacctaccgtgcgcctcgcacacgacgcgcgcgtcaccccggagcagcagatagggcgcgggcttggtaccaggaagttcacgtgcggccgcgtccccgctttgataagacgggccgaggcgatagccccaccgtggattgggatgctgtgcctcccgcgcttcaactctctctccttccccccgccccgtgccaattcacgcatggatagagtacgccaacagatgcgcgcagtttacatgggccctgttgtcgccagcccgcacgctcgcaccctcccaaccccctcccaacagcacggtccctactccaactcacaccccggctggaacttcacaaagaagtccatataa

SEQ ID NO: 31447 - DNA, 706 bp, Oryza sativa
  Clone ID: PAT_MRT4530_35753C.1
gtatggttattgcccgctccgttttgtgggggcccggttctgggtctcgccatcacggtttcgtctttttccgccttttgtgtccttcggccgggtttcttctgtgccgcatgagttctctgcgcgtgtgtgggttcatgtggggggtttgttcgccgcgtgttgttggtttttatgacatcgttctttggtgtatcctcatgcctctatttgcactaacccccttttgggggggtgttttcccgccctatgggaatgtctcgtccggcccgcaaacattcaccctgttacgagccccattcgcccgtctccggagcggagcgcggtgtctacgcccagcacgccggagccggagtttacgtgtgcgcgtctacgttgttggtgcccgccgccgttggtctacagcccagcccgtgaagcgcggttacgccggtgcggtggctacaggtgccagcccagtgtgccagcagctacaggtggtgctacagccaccagcagcgcagccaactccgacgggaactggaggaactgaccgtgggcccctcatgcccaagttatctatctatctaatcgagctaccatcatcatcatccgatcgttatcatctttatttttgtggaactaatttagtttgttaaactggtgtgtccccatctgtgttttggatcccaagaagaaagctcttctcgttgcttgaaaaaaaaaa

SEQ ID NO: 31448 - DNA, 279 bp, Oryza sativa
  Clone ID: PAT_MRT4530_35754C.1
atgcccagccatcgcgacgccggcgacccctcactccgatcgctccgccgccgatttccacctggggattccctgcgccacctcgcccgcgaggccttccacgcaacggcacccccctcagccctagcgccgtcgcacgccgtcgttcacctcgacatctgcagcggcagcggcagatgtaggcgacggtcgcaatccaccgcgaccaccttgctaccggacgcggaaggagtggagggagaggtcagaggaggtattctgctctgcaccaagatctag

SEQ ID NO: 31449 - DNA, 952 bp, Oryza sativa
  Clone ID: PAT_MRT4530_35755C.1
ttccttccccttccggccgccgtctctcgccctcgaccctatttaaaccctccccgagctcctcaccaccgtttccaccactcgccgccctctttccccctcggaaacgcgctcgcaccgctctcctctctctccgccatcgctgccgagctccggtccgtcgccatcgtcgccccggacctcctcccacctcggcgccgccaacctcggcttcgccgcgtcaccgccgacaccgtccaccgcctcgccgagctcgccgaccgccagaacgctgccgtccccgtcgaccctagccgcaccgccatctctctccgctccgaccgcctcctacgtcgccgtcatcgccaggggtgagccgtggaccgctgcctcctttccccccttccctttccctctctcgaggcgtggaccaccgtccaccacctcaccagtgaccataggggcacaggcgccgcctcccgccgaccgcgccgacgtggccgcctccgagcgcgccgtgtggccgcgtggggctcggccgtcagccataccgtgccctcgggtgcggctgacgcgtggggcccacggggccgaccggtgtgagcccgagtgcacccagtccaccgtggacccacctcggccactataaggaccggtcttcgggcctctgttgcaaagcactaccgtacttccacatgtctagtgggacaaatgaaggctacacaagctgtggcccgatagtcgagatgtcacggcacagggccggtgtcttgttgctaggggctcaaccttggttacctgtctcgggattccggccatagccagggttgggtcgatgtatacctctgatcagagtataatctattcgaatagccgcgcccttggttatgggcaagcctagcaatgtacccaagttagtggtttattttttaaaacttgcttaacaactacagggatgcctttggccattttg

SEQ ID NO: 31450 - DNA, 179 bp, Oryza sativa
  Clone ID: PAT_MRT4530_35756C.1
gaaaaaacgggccaatgtccctttgctaattgaaagggagggttttctggtggccttctggtttctatcttttcttgagtatatctggtcctgaggggaaatatctaactggctggaaactgggttatgctactgatcatgcccagggcaatgcaggggtgatcaacagcctcgtgcca

SEQ ID NO: 31451 - DNA, 1152 bp, Oryza sativa
  Clone ID: PAT_MRT4530_35757C.1
ataaataaatattatttttttcagaatttatcttctctgtctaggtctcctaaaaatcccaatgagcctatcttcttttaatttgccatgacctgggcccacctggcagccacttgggctttcccactccttgtccatctcctccaactaaccagagacagccgagagagagatcggtgccggcagagttcgacgcgtgccatagacgtgtcgccggccttaactccctccttctcgctttcttctccttccatacgcatcgtcctctcctccactccacacccacacagagaaaaccgagggggagcatccttgctgcccttctccactgtttctccattgccagccgtgagacgatggcctcctcattcgttgatgagcagcagtcgtttcctcctattttgagttcctcaatctactctcgataccatctctatttcatctaatttcgtcccattctatatagcggttaagcgggaacgccaccgtgcccacgaacgccctggagcgcacaccgacgaccgccatggggttctcgtcgtcgttccgactgaaccgaaccaccccaagccgaacccttgcgccaccaggatcgcctcgacgtcctcttcaagatgcctcaagaaccacaagaatcggtgaatcgaggagggagatcggcgtcatcttctccaactccggctaccggcaccttctcttaactccccaatccccatctaccggaccaagctgtcactgtgaagccgacatcatcctccgccgccgagccgttccgcgagccaccgccgacgatcaagctgcgccgatcctttcagactgcttggtaagcacccagggacctgtaagactcacatgcatgcatccttctagtcctactcaagctctagctccacatgcaccatcatcccgacacccaccgccgcttccaccgccgtcgccatcgattccggctacctaaaagctgtacaaactctccaaagtctaaaaactaatcgattagccgtgctcgcggttatgagcagcatgtggatatgtgttgagtatagacttgtgtttattcttctaaatgctgaatgttatcttcaaattatgatgagatttgagaatgatctccttgctgccatggatggcaatgaggtgtatatttataca

SEQ ID NO: 31452 - DNA, 218 bp, Oryza sativa
  unsure (1)..(218): unsure at all n locations
  Clone ID: PAT_MRT4530_35758C.1
gtgcagctctactcggcaatggcgctggngaagctgtcgctgcagtcgagccacctgacggccatcccggngccgcntcgccaccggggnggttcgggtgcgcgtgcttggggaggagacccgcggcggcggcggtgcccgcgggggtntgccgcgtgcacngcgggttctgctcgctgcggganacgttntncctggcgcaggcggacggcgggaag

SEQ ID NO: 31453 - DNA, 548 bp, Oryza sativa
  Clone ID: PAT_MRT4530_35759C.1
gtgttgttatcagggatgggtggatctcgccgacggatttctcgctcacgtacgcacggcttctggacgacgtgtcgaggctcgacgaaaacgccatcgacgatgccaacaagttggcagagaaggtgagcgagcaatccgcggcggggcagttcgccgcctcactgcagacgttcacgggccttatcgatctgatcgacaaaagtagtggcggcgttaatattttcaatttcttgtttaacaccagcggcgtagatctgcgagtgctagctgcagaggacaaacaaaaagaagtccgtggatcgccgttgatgaggtttgtcgggcaggacttgtcggggtcgtctggccccaacacgatcgagggcatcatgaacggtgtcatcaaggaaaagctcaagatcatccccaacaacctcgtgtggcaactggcgacggtcgctgttttcaacgcgctggagaacgaattcatgaagccagcaataaacgaggtagatgagctattatctctgggtgtcaacgtcacagtgtacaatgggcaagattaa

SEQ ID NO: 31454 - DNA, 803 bp, Oryza sativa
  unsure (1)..(803): unsure at all n locations
  Clone ID: PAT_MRT4530_3575C.1
gaaaggctgttagtaaggattttgaaggggaaagcgaggatatttcagctcgagcaactagtgttgcctatggtgtatacatggccgtttccagtaacctcaggtaccaaatcctggctggagtgattgaacagaggatgctctgagccattactacaccaccacaaactagtgttgagtgcactgtgctttgctgttcgaacagggaacacattcttgggttctctactgtgggttgactatgccaagtggataggcatacaataggttcgaactttgaatatagatctgaaattgcgagtcattagcaaataccatgcagactctgaacacttacgactcccgtttggcgcaagaaaatctaggacagatttcggtttttatggaactgaagcccgaaggaaaagggtaatttgtcgaattcccatgaacaagtgattggattgttagtggtggtttgtgcgttctgttttgttgaattggattcctttgaagcaataattttgccgtcatttatttggtgcgcacgttcttgtgcttgggaccattgcattctttgtttcgtaacgcacaagaagaggcctctcgtgttaaaaagaccttcangtatgatcctgcaggcatgaggtcaattttataagcagctggcaaaatttgaattaattatagaactgttgattttgagtttttttttcaccatagtttatttcgagcattggttttaaatcatcaagcacacgtgtataaaagtttatatatgaaattattttttgcttgctaataagccaaaaaaaaaaaaaaaa

SEQ ID NO: 31455 - DNA, 395 bp, Oryza sativa
  Clone ID: PAT_MRT4530_35760C.1
tcactttttccatccatcctcttcatttttcgtcttcttccgtccttctcccaccttccacgcgccacgagtcctggacgccaccgccgcggttggcgaggcagcagagtagcagaccgcggcgtggatggggccacgcgagaacaggtcaatgaggagcgtgcccgcctcggtgacgtcgaagaagacgacgcaggtggggccgaggtccgcgaccaactcgtcggggccattgcggccgcccaagccgccccgggagcccgtggcacccgtgacgagcatggtggtctccgacgacgctcgtgtccggaagggttgcgccgccgccaccgaagcagcaggcagtggctctactgatgacacaagtagaagatcaccacgacgggcactcttag

SEQ ID NO: 31456 - DNA, 312 bp, Oryza sativa
  Clone ID: PAT_MRT4530_35761C.1
atggaaataatgggtgataaggggcaaaccaaacgaatacccgttgggttaattttagtgagaatagggggggtgcattacataacaaaaattcttgcgttggtacacgcataggcgccgaagcgaccagttgtttaattaatagataacacacgggtttaatttaggattaattagcacacccacaaaccacacttatgtgggggggtttaatgggggacaaataaaggggggggattcgccggcggaaagggtttggtttctttgtgacttaacttgccggacttgcagggaatgcaggagcagtttttg

SEQ ID NO: 31457 - DNA, 250 bp, Oryza sativa
  Clone ID: PAT_MRT4530_35762C.1
gcgatcttcttgtcgatttatctttcttggatactcgatctagaactaattagcggacatgtgcggagaaacaatcatctccggggtcatcccgccgtcggccgttgtggcggcggaggctgccgtggccaataagcaacaaggcatgagggtcacggccgacgggctgtggccgacgatgctgcggaaggggaaggcggcggacgacgaggaggactttgaggccgacttgcgcgagatctagcgtggc

SEQ ID NO: 31458 - DNA, 513 bp, Oryza sativa
  Clone ID: PAT_MRT4530_35763C.1
atggcgcgcgcctccgtgggcaacgatggcgacctgtaccgctgcgcgctccggctctatcgggtgggtgggagtgaaagtcaccgtagggatcctagcggcaagattctcccggatccaaaacggcggcggagcatgggctgcagcttcaacggcgctggccgcggccactgcaacacttgcgactgccgaaaacgcgatggcccacgctgtcactggcacgacgttggccaagtacacgctcgcaaccccagcgtccacgacgacgacgacatcgatcgattacttgggcctgccgtcatcgacggcttcaacatgccgggtcgtcgcccgcggcggcgggctgtttgacgggcccgctggggcaaggctcttccgggccggccgtttgccgggccgggatgacacagaaccatccgggccggccgttggcccggttcaccgtacccgtcacctctggggcttccagcccgggacggaccccgggcccgaatgcgagggggtctccgcccg

SEQ ID NO: 31459 - DNA, 1590 bp, Oryza sativa
  Clone ID: PAT_MRT4530_35764C.1
atggccgcctccacctccgccgccgccgccggggacgagccgtgccgctgccatgtcgtggcggtgccgtttccggggcgcgggcacgtgaacgccatgatgaacctgagccggctcctcgccgcgcggggcgccgccacggtcaccttcgtagtcaccgaggagtggctcggcctcctctcctcctcctccgcgccgcccggcgtgcggctgcgcgccatccccaacgtcatcccctccgagaacggccgcgccgccgaccacgcgggcttcctcgacgccgtcggcgccaggatggaggcgcccttcgagcgactgctcgaccggctccggctcgaggaggaggaggagacagcggcgcccgtcgcggcgttcgtggccgacttctacgtgccgtgggtcgtggacgtcggcaaccggaggggcgtgcccgtctgctccctcttccccatggccgccgtgttcttctccgcctactaccacttcgacagcctcccgtcgtggctcgctaaaccgccgcaccagccggtcgccggtgccacaacagataaccctgatcagagacttgagcactatatctcaagcttggcttcaagttcaataatgttatctgatctcaagcctttaattcacagtgagagaacagtggagtatatcctagcatgtatctctagcatcagaaaagcacagtgcctcctattcaccaccatatatgagcttgaggccagtgtaatcgactctcttgaatcattagtcacctgcccagtgtacccaattgggccctgcattccgtatatgacccttgaaaacgagcataccaagtccaatggagaagctcctggacggatagattacttcgcgtggctggattgtcaacctgagaactcagtgctatatgtttctcttggcagttttgtctcggtgtcatcctctcagcttgatgagatcgccttgggccttgccacaagtgaggtcagattcttgtggattcttcgtgaacaatccactcgagtgcgagaacttgtcggtaacaccaacaagggcatgatacttccatggtgtgatcagctgaaggttctgtgccacccttcagtcgggggcttcctgacccattgtggaatgaactcgacgctggaagctgtctttgctggggtacctatgctcaccttaccattgttctttgatcaaccaattaatggccggctaattgtggaagagtggaagattggagtgaacttgagggactcgacagacaaggatcgcctgatcagaagggaggagattgcaagggctgttaagaggctgatggcatctgaagaagctgagatgaaagcaataaggaggcacgctcttgagtggaaagagatttctcatagagcagtcgacaagggtgtatcttcgcattgtaatctggcttcactgatggagatgatatgcccatcaagatgaacgccagtattttgaatgtgccgatgaaagtctaattaatgtatcatttgtttaaccttattcgaattactctactacaaccatatcttgctctaaaaaaaaaaaaaaaaaaaaaaaaaaaaaaaggggggggcctcgtgc

SEQ ID NO: 31460 - DNA, 501 bp, Oryza sativa
  Clone ID: PAT_MRT4530_35765C.1
gattatttttaattgtgtggtaatacataagcgccacccataacatgaaaacctttgcgaaacccgaaaacttaataaagccaaaataatttatactggggtggcatggatagaatatgggtggttctgaaaactggtagtctccgaccctgttcagttaaggaccgagtaaagaagctaagcaggaaacgaaccgagtacgaccacacttattgagcggggttagacccggtggactaagttattctcgtggtgtggcaccctagacatggtatgttctggacattggtatggaaatgtggaatgatgtggtttaatgacgctaaaactatatatatgtataatgcaatctctgatcttgggagcgccaggactcccctcacaaccggttcgagggaggaatgtggcgccggtggtgcaatggggattcatagtccttggagcgggtgccgccatgcaagggtaactgaaaattcgagccgtgacaagtcttatgtgctg

SEQ ID NO: 31461 - DNA, 915 bp, Oryza sativa
  Clone ID: PAT_MRT4530_35766C.1
atgcggccgccctcgtcgtcggcgacgcccgggacgggccgggtgtcggcgttcacgatgcgcgcggtggcgcgcatgtcgagggcgcggtggttcatcttcctgaggcgggtgtaccagtaccagaacggcccgaggtccgacctgggctccaaccccttcaactcgcccggctggctcgccctcgagctcggcgtgatcatggcgcagatggtcgtcaccaccgccgtcgtcgccacctcccccaaggagcgccccgcgtggccgctccgggtttgggtcgccgcctacaacgtgggcaacgtgctcagcctccccctcctctactggcgccaccggcattcctcctccggcgcccgcggcggcacgctctccgacgatcccgagatgcacggcgccaacgaccctctaaggaacaggtcgtatctgatgaacaaggcacgggcgttcctggagctgttcttcgcgatgtggttcgtgatgggcaacgtgtgggtgttcgacgcgcggctcgggtcgttccaccgcgcgccgaggctgtacgcgctctgcatcggcctcctcgcatggaacgccgtcgtctactcgctcccattcctcctcttcctcctgctctgctgcttcgtcccggccgtcggctacgcgctcgggtacaacatgaactccgcgtccgtcggccggggcgcctccgacgagcagctcgccgcgctgccgcagtggcggttcaaggagccggccgacgcgccgagagaccgcgaccacgacgatcaggagtgctgcatatgcctggctcagtacaaggagaaggaggaggtgaggcagctgccgtgcacgcacatgttccacctgaaatgcgtggacaggtggctcaggatcatctcctcttgccctctctgcaagcaagagctcagctag

SEQ ID NO: 31462 - DNA, 603 bp, Oryza sativa
  Clone ID: PAT_MRT4530_35767C.1
ctacatcctgtttatatgggattgatatagagaaccatctcggcgggtacaccatcgcttcattccatattcctttcgagatccatcaaccgttctcgagtaatcaagtaggcgtagagtctgcgacaaagccttgaaatctgacttgattgttctgatgtctgattttccaagatctggggcgccgtcgctgtgctcccgccgccttccacctccggcgtgcgcgtggccgccgccctgcgcctgccagccgctaccctgcgcctgccagccgccgccgctccgcgcccgtgagccgacgccacccctcgcttgccgccgttgccctgcgcccgcaatccgccaccggcacccctcaccagagccgctagtgccagccttgagcagccagccgctggcgcccctgaccagccgctgctgcccctgaccagccagccgccgccgccccttgccaaccggcgtcccagatccgccagcgccacccagcgccgccccttgccagccgctgccgccctgcggccgtgagccaccggcgcgcctcccttgccgccgctggtcgcccctgagcagcccgccgttgccgcccctcaccatctcccccat

SEQ ID NO: 31463 - DNA, 2481 bp, Oryza sativa
  Clone ID: PAT_MRT4530_35768C.1
atgaaaagaaagagtgttaatgagcggcctagaaattaccatgttaatgagaagggaatttatatcttttttgaggaaatcctatcctctacaaaccagatttatatgtttttgaacttgttcgtccattgtgaacaagggtcagcagtttccacatctcagctaaggactggaatggccaaacccaatggcaaagagaaaacgggtgacacgggattgtcgatggctcctccaaagatttccaaggatagatttgatgctgctatcagagccatggctgatattggtatcctaaaggaaactgctgcgcccgtgttgaataatctactaaacttattcgattacaactgggtgcatatagaagctgataattatctggctcttgctgatgctatattttgtgattcagatcccaaagaaggacagaaaaggcaagctaatgagacaaatcttgatgcagaccaatctaacaagaagcttaagacaaaaaagcgttctcaaaatcctacatccaagatgcatggcaatgacaatagagagtttgttgaagctccaccacagcagggacgaggcacactgtctgcccgaactgttaatgggaagaaagtcaccagggcccacttggagttgccttcttcacaattactgatcaaggaaccacatacatgccctagcattgcaaagaatacaacaattgttgaaaataattctgctgtattatgccatggtcaagaccttcaaacttttgaggtcccagtagcaactacttgtccgcaagttgtagcccccagtactcgcaaagatgcacgtaggacttctggtgctcgccatgatcagaagcatgaaggtgtatctggtgcgcatgaaaggaacagggctgttgcgtgtagcaaccaggaaattgtaagcagcaaggattctccatccaacattgaggtagttttgtcaaattatggagctgggaaactatcattcacatacaactcttccctggcaaaccgttctgattttcatctgcctgacattaaattaatttgcaagaaaatggaggctagatgccttaggaaatacaagagcctagaacccaatttctcttttaagaatcttattaaagatacttgccagtgtattgttgaatctagtggacctagacatgaaggcatcatacaaactgttcctgccctggacattctgtccaaaccttcagtgccgcaaatattgcagtcaaatcaagctaattccgcttttatgccacctaataatgtcatgagccttggtggtacttcttcctcttgcactgttgctggagttagccagaattctagtaatatgccggttgttccgcatcaactacatattggtgccaacagaccacctcatgatgtcaatgatatcacaaaaggtgaagaacgtttaaggattccaattattaatgaatatggcaatgggattcttcctcctccatttcactacataccacacaatatcacactccaagaagcctatgtaaacatctcccttgctagaatcggagatgacaattgctgttctgattgtttcagagattgtctggcacaatcacttccttgtgcgtgtgctgcagaaacaggaggagagtttgcttatacaacagatggccttcttaagggagcatttctagatagctgtatctcaatgattcgagaaccacttaaacatccccatttctactgcaagatttgcccaaacgaacgaatgaagatagaagtaaattctgattcatcaaacacagaaatgaatcctggtccttgtaaaggacaccttacaaggaaattcatcaaggagtgctggagaaaatgcggctgcactagaaattgtggaaaccgtgtggtgcagcgaggcatcacacgccatttacaggtgttcttaacccctgaaaaaaaaggatggggattgcgcagtactgagaaacttcctcgaggtgcttttgtttgtgagtatgttggtgaaatattaacgaacattgagttgtatgaccgtacaattcaaaagactggtaaagcaaagcacacatacccattgttacttgatgccgactggggtactgaaggtgttcttaaggatgaggaagccctttgtctagatgccacgttttatggtaacgtcgcaagatttataaaccacaggtgctttgatgctaatattataggaatacctgttgagatcgagacgcccgaccaccattattaccatctggcgttcttcacaacaaggataatagagccttttgaggaactcacatgggactatgggattgattttgatgatgtcgaccatcctgtgaaggcattcaaatgtcattgcggaagtgagttttgccgagacaaaacgcgcaatgagtggttctatgctgctgcactcgtctggttcatcaatgaaattgcattagctgacaaaagtttatatactgccacaggatctaaatcgagggcgcgggtttaa

SEQ ID NO: 31464 - DNA, 902 bp, Oryza sativa
  Clone ID: PAT_MRT4530_35769C.1
gtgagacaattcaaacggtatttttttttttttttttttttttcaaataaaaacttttgatgctattaagtgccagcatatctcccttgtcacgtactactatgttacaatgaattcatattcaaatgccgcaccgtcaaattgatttaacattcttgagatgtaatacagtaatcggttttttcccaccttaacacagtaattagagcttaatgatacagtctacaaccatcaattcatagctcaagagagattatgcgacgaggtcttctggctgcaggcctcccggtattcatctatttctttgggttcccaaagaatttagagagccgcacaggtccttcctcctcactatcactgcccctgtgcttggatcttgacctgtacttcttatccttttttgtcctcttcgatctggaccgtgacctggactttctcgaatccctatcctcatcatcactgcttgatgattccgacgatgaactggaacttgactctgatgaacttctatgctttctcctctttttactccgtttctttgcatctttatccttcttctctttcttagaagatgatgactttgaccttgagtggtttcttccaagagctagcttttgtgccctttcagcatccagttgagccctatattctctcatcattttatctttgtcagcttccatttcacccctctttaactcgtcttccttctgcttcttcttgaactcctcccacgtgacggtgtgcgtcttgttcaggctggccaaccgcgccgcatgccactctggagaatgaaatgaaccgtccgtcatgccgtcttcgggggagtcggtggcgcccggggcgccggacgaggagcccagccgcgcccgctgcatcgccttgtacgcctggttcttccccat

SEQ ID NO: 31465 - DNA, 675 bp, Oryza sativa
  Clone ID: PAT_MRT4530_3576C.1
atggaggagtcgatgctgccgctgaggagaatggagccaccactgaagagagaggatccactattgccaccagggagaatggagtctccgccactggggcttctccttcttctccacccttgccacaagctcccctctcgctgggccgctgccgcctcccctcccgttagatctggcggaggggagggtaccgccaccgtcattggaccgctcggctgccgccgcctcccctatcccttctcctcccagctgcatctccacacatcattctccacctctaagccaaagaaaccgagggaagaggctctcaacttctccgtcgccctcatccttgccgccggccgcgaagaagacgactatccgggcgactccattccacaggcatccttgacggcagcgacgaaaccaacctcttcgagacatcttcaactgagaaggacttcaactctggcaacgggcagcccccctttcgtgccgcggtgaatccggaagccgatcaaccggacaccccggccgacccaactccatcacgcccaccctcgcctggggctgacgtcagcaaggggtggggcggcgccgacatgcgggccccactgggcgagggcggcggcggcaagcggcctccgacggcggcggccggcgagaagacgacggcggccggcgacgcgggcgacg

SEQ ID NO: 31466 - DNA, 362 bp, Oryza sativa
  unsure (1)..(362): unsure at all n locations
  Clone ID: PAT_MRT4530_35770C.1
ttcctttccttcaacgggcgaggttttttgaaacccctcctcctcctccttccccaacacacaatcgaagccgccgcgccgcaacaccacccccagacgggcagccgcgcgcgcaggaggaggagaggagctcgctccctttgccctgcctagggtttcgtgccaccccatctctccttcncccacnccacccgcttcntcgattcgatccnaccgcttccccccgatctnggcggcggcggctttggcggcggaggtgttgatgaggcggtagatcaatgggcgcgatgccggcggtgaaggtggaggaggaggaggaggagcggaatccggtggcgtcgagccttcggtctcggagggga

SEQ ID NO: 31467 - DNA, 705 bp, Oryza sativa
  Clone ID: PAT_MRT4530_35771C.1
atgctccaccaccacacaagctttgccgacatgtgggacccctgcaccggcgtcccccgccagctagccttcgcgcaccgaaggccgcgtcacacccaccggcagctcctcacacctaggtctcctcctccaccgctggccgcgcctctctgcgccaagccggcctcctccactggacgcgcctctcacgccaatccggcctctctccatcggccgcgcctctcgcgccaagccgacctccatctccgccgcccgcgcctctcgcgccgagccggcctccggtgccatcggctgcacttctttgcaccaagccagtctccgacccctccaccgaacgatgccgtgccggccagatgcagccgtctcccatgccctcggctagtcaaccgaggccgccatgcctccggtgaccgcagacacgctcaccaccaccacagccgctgctgccgaatacccagccacctcaccgtcgccatcctcacctcgcacccgactccttccccgacgccgacatcaccaccgcttccacagtcatggccgccgtcgccactgccaccgacaccagccactgcctccacaaaccgccactgcgtcgtcaccctccaccaccgagcagctagcagccgcctcgacgccatgtcttccaccgccgtcgccagtcgacaccgcagccacctgccgcgactgccgctagccaccctctag

SEQ ID NO: 31468 - DNA, 1407 bp, Oryza sativa
  Clone ID: PAT_MRT4530_35772C.1
atggctgcggtgctcaggggagcagttgattggccacgatggcggcttggtggagccgctcagcgacggcagcaacggcagccccggcttggagcggcggcggccctggctagaaacgtcaaggcggtggccctggaaattggaacaagaccagggattggggtgtggggtggggcgcctgggggtgggtgggggtgcatactgatcctcactttaaaacaatacctggttgctgcacgggcatcttttatgcaagtggttgctcttcctgataagcagcattctcttgagatgaccactgtggggtgcctcttcctttcaacatggatccgttgtttcacggacgcattctcaaggggcatgagctggaagggagatttcacgctggatgatttcaagatcgtggatggccacgttcggaggatcaagaagcccaagcggtcttgctgcagggaggagatgcaggacgatgtgagcaagtttgtggaagagatagagcgtatcttcagaaacgatgacagtcgactcatctcaaagcacccaccctacttcagagacttcatctatcgtctcaggaacatggaaatcatctctgatgccctatcgcctcggcataagctactcatcgagtcacacatgtgctttatgacttctagctccagggtatcattcataattaaactctactgcaagtacgaaggtgccaatgaatctgatgaacccaagtgggcgactgcaatacaagatgctcgtagttcaagtgaatggcgctcaaccgtgtctcgagtgatcatctttaaggaccttattgttagagctgacaaagctgaatcaccatatggatcgacaaggtttgaagccttcaggcttgttagaaatgcagccatgcatgctgcagaatatcgattcgatggtagaaggaatgcaatagttgagaggtttccaaatgatagtggaattgaacttatgataccttgtcacttcgaagaatttattccccacattgttgcaaacataatcaaggagggagttgacatcactcaggagtatgatataattaataaacttagtagtagaaatagtgacttgaggtcagccttagtcaatggtgaggaccggggctatgctcagggaggagtagaggttactagagtctggattcttggaggacaacttcggtcaacggtggggatcgggactaaactcagggaggagttgaggtccagacgatcaaggataccgggtgacgaagttggatacaacatggcatacggtggatggacatcgtgtaggagagatcttcgtaacgggcttcacgaggtgtgcgtgcaagcgtcggtgttcgcgaaggtagcaatgcagtggctcggttggatacagaccgtgtcggcctggagggcaaggtag

SEQ ID NO: 31469 - DNA, 722 bp, Oryza sativa
  Clone ID: PAT_MRT4530_35773C.1
cctctgttccctattggtgctcgtacccaggatggtatacccttatgacccgtattgcttatgttctgctttcccccgttgtgctggggaacgtccaattgctgcataattttggtgctgatatgggattgcaaagggcgatgctgcgagttgcaaattcgtttgagtaactgttggggaaaagatctggtggtgtgtggatgggtggtgccttgcgcccaggtgactcattgatgtggatgcatgtgccaagcaaacaatgtgatggctgtgcttggaatgaaagcacgagcgtggaagggatgcccaatgatgatgcgcaatgcatagacatatagcgttgaacgccttcgtcaagccaacactgtgcagggaaaaactgcaagtattgccagtggccctgcacagttggatgtgagtgggctgaatgcgtgatgctgcatgctgcaagggagcaagccactgaagcctgcaaagaacaatacaggggagaagagcacggaagcctgtgcactgcctgagatgtgtcccacaacaatgactgacaccagggatgtgatgcgaatggagtccgaaagcgagacttcagagtaatgtaattgagaactagtatcggtcgtagagtaaaataaacccacaagtatgacacttggtggtgattctattcgatatcagtactccactcaaggttaccaatttcgtaaaaaaaaaaaaaaaaaaaa

SEQ ID NO: 31470 - DNA, 781 bp, Oryza sativa
  Clone ID: PAT_MRT4530_35774C.1
ctctcacgccggatcctcgctgccaccgtcgtcctccgagccctcgttgctggctgggagtggagggccccagaagctctcgcgctgctgccgtcgccctccgagccctcgttgcctcccgggagaggaggggccccgatgagctcccgcgccgccgccgtcgccccgtccccctacgccgccgccgtctcgcgccaccgccgtctcgcgtcgtcctccccccgccgtcactcgccgtccctgcccccggcgtctcgcccctctctgtgcttcaccgtcgccgtccacgccgctgacaccaatgcctcaacgccgatgcccactggcgactcttcctcaccaccaccaacaccgatgacgcctcgccgcctgacctcgccgcccgacgcccgggcgtcgtccccctgcctcgccgccgcccccctctcccacacctcccaacccaaatccgtcacccgccgccgccgacaaaaccctagacccgccccgccgccccccgccccccgcccccggccgtcgtcccatcccgccgctcccccaccgtcgtcgcatctcgccgcccccccaatccatcctccggactccccacatcgccgcgccggcgcccacatcgtcaccgtcgaccgttcgacaccgccgccctcctctctctcgcactcatcccgtcaccccgacgccgccgactcctccctcctccctcatcgcgccttcctctactcgtaccaccgccgaaaccctagacccgcaccgccctcgaccgccgcccgtcgcatcccgcctc

SEQ ID NO: 31471 - DNA, 228 bp, Oryza sativa
  Clone ID: PAT_MRT4530_35775C.1
atggctacaaaagttagaagaagattactaaactactactcgtcagggtgtgcattgagatcttcggtcaacgtaggtggagaccggagggacactgccatccacccatggggccgggtgactggaagccatgatgcattcggtatcaagcaggctgttggtaaagtaggaaccaaggtgcccaccaccgtctggtcaggggcgccgtctggtcagggcgcccaatga

SEQ ID NO: 31472 - DNA, 6465 bp, Oryza sativa
  Clone ID: PAT_MRT4530_35776C.1
atgtggggagtccggaggatggattgggggggcggcgagatgcgacgacggtgggggagcggcgggatgggacgacggccgggggcggggggcggggggcggcggggcgggtctagggttttgtcggcggcggcgggtgacggatttgggttgggagaatcggaatcgaaaaaggaaaccccggaaacaaatattatcgataccgaacaaaaacgaacaggcgcggatacggcagagaggggggcggcggcgaggcagggggacgacgcccgggcgtcgggcggcgaggtcaggcggcgaggcgtcatcggtgttggtggtggtgaggaagagtcgccagtgggcatcggcgttgaggcattggtgtcagcggcgtggacggcgacgggcgccgccgtctccatctccaggccctcccttgccgccatggcgcacgtctttcgcctttgtttgtcatccccgccatcgtgcccggaggccggagctgcactccatgccattgcgctcggcactaaacaccctcaatttcagaaacaaggatacaatttctccccttccatcattctctctattccccaaccaccacaactcgatgacggctggcagcacagcgagctccaacaaaggacggcggctccccaacctcctcccaaacagcggctcggagggcgacggcggaggcgcaagaactcgccgagacccctcctctccttgccggcgacgagcgctcgacgggcgacggcggcggcgcgggagctcatcggggcccctcctctcccgggaggcaacgagggctcggagggcgacggcagcagcgcgagagcttctggggccctccactcccagccagcaacgagggctcggaggacgacggtggcagcgaggatccggcgtgagagctcgtcggcgccctccacttccggccggcgacaaggagacggagcgccgagggcgacggtggcggcacggatccagagcgacggtgaccccgacggtggagagagaggtagcagagagagtagcagacagcctgtgaaagagagcaattgtatggcagaatcgctgcttctccccgtagtgcacggggtgatcggcaaggcgaccgacgcgcttgtccagaaagtcacccgcatgtatggcgtcgacggcgaccgccgcaagctggagcggcagctgctggccgtcgagcgcctgttggccgacgctgagtcgaagagcgagaccaaccccgccatcaagcgctggatgaaggacctcaacaccgccgatgacgaggccgatgacgtcctcgatgagttccagtacgaggtgctgcaccgcgaggccatgagcctcaagtcgctagggcacaaggtacggagctacatgacccccctagagttccattttaccatgagaaggaagcttgccaaagtgctcaagaagatcaacgagctggttgaagagatgaacacgtttggcctgttgctgcgagatgagccacaacaactttcttaccggcagacgtactcagtgctgccatcaaatgaattagatgatatctttggcagagacgacgacaaggagttgttgcaaaaggaactacagaaggccgttggccggagaaggtttctgctcgtgctggacgatgtatggaatgaagaaaagaagaagtgggaggaagacctgaagccactcctgtcttctgttggtggtggtgatggaagtgttatactagtgacaactcagagccagcgagtagcatctataatgggcaccctagaataccataacccagcatgtctgagtgatgatgattcatgggaattattctcaaagaaagcattcagtaaagaggtacaacagcaagctgaattggtaaccgctggcaaacttattgtcaagaaatgtaaggggcttcctcttgctttgaagacaatgggtgttttcccaaaggaccatgagatggacaaagaagtgttgatccaactgtggatggcaaatggtttcattcaggaagatgaaacaatgggtttggaacaaaagggggaatatgttttctgtaatttgaggatgccaccaaatattagcctactgaaaaatcttcgcactctaacaacatttgttttggacactgaacctggccgtggaatcgaggagctcaaggacttgaatcaccttgccaacagattggaactggagagctacggccaagctggaaccggtcggttgggctactcagagagttctctgataggggagagggggaaaatggctggggagcgagcgcccgacgccatgtcctgctgctcgtccagcaccgcatacagctgctcctacttctcgccagcgtccgccatccccgtccgctgcttcgggtcgcacgcgtcccggcctgctccgcctgccgactacagagtggttgggcgagctgaggaagaagctcatccgcgggacgtcgtcaagtcttccaaggagatggcaggttttcaaatctgcgcggctagggagcacgcctacatggagggttttcgagtcggcgagccggagctgcggctggggactggccgttgcgtgctgtcctggacggtgggcatggagcacaatgaagcttggctcaaccagcactcgctgttggccatggttctgaagacaagaccatcggtctcaccgggggagatgttagaagccatcgtccagcacaccggcatcaacgagagcaacgtccgtgtcgacgtgacacatacggaggattttctggtgttgttccgcatgctgcaagatcggaaccttgttctccattgctctcatgagattttcgtgaagggggttcccacgtccttcaagctgtggagccgccggagttgggcagacagctcggacttgaagttcttcaccaagatttcgctcgatgggctccctgctcacctgtgggagcgcgaagtggtgcgcaaccttgtcaacgagctcgagggggagctcatcgagagcatccctgccaacgacaccagatgtctgggcctcttcgcctggttcaagaatcctaacaagcttcctcaacggcttcaggtggaggtgaacgatcccatgctgctgcatgcccctgataaattctacaacgatgatggtgacgatgatgtgacaaggcgcaacaccttcgactgctgggctaagtggttcaacagcgcaggtctgtggccatcggaccggggaggcagcactcgctatggaggagcatcaggttcagccgggggtttggaatgccaagcgttcgatctcctgccgtcggtgatacagcaaccagtccgtcttttcaacacggaggaagctgtgtcggccatcgttcgtttcggttcgtcggctacgggggaggatctgctcccgtcttctccagacgctgctgctgtcgtcgggacgagggagctgggcacacaagtgccggtgatggtgctggtctcgcccgaagtggtggtcgacactgtcgaggtgatctcgccgtccctacctcgtgtgttcgagcttgctgtaccgggggcggttgaaggcagcagcccccaaggtgggaactcagcgggggaacattttcgagctggaggtccggctcctactgaagtcgtccgtgggttgtatttggcaattcctcaagtagcccaggaacaggtggtgccttttgaccgtgtctactctcgacgaaaggaggccggctctaaattgggcatgttgccaactcagatcgctgtgtcggcaacccaggaagtgcagagcgcagccgcagcggcccaggaagcaatcctcgttgcggccgatgagaacatgtgcgtacaagtcaacatcttcgtcgacgctatctccacgccgtcctcatcgtccgtcctcagcaagccgcctgcctccgtcccaatcaccaagagcagatgccgcccggtgatcccagttgatttcaagccttggagaagcccacggctggctctgcaaggctcaggcgcccgacaccactccatctccaaggcacagcgggtgactatgaagaatctgggaatcattgaagaagaagaggaagcaaacgatgaggcgatggaggaatatgttcaactcttcgacgaaccgctgccgcctcaccattttgaggccttggcggagctgcttcatcttgaactggcggagccggagttccaggcgctagcggatgagtctgttgtttcctccaatgcgttggttgtgtgtttccaagaatctaagttagaagttgttgatcgtgtcactgtctttgaactttgcggccctgattttgatcgttttgaatttcttcctgctcttcaaactagaggtggaatcattgtggcgtggaagggggatctattccagggcactcttgtccatgttggacaatggtcggtgacagttaatctggattggcgccagggagggagatcctgggctgtgacctcggtgtatggccctcaaagggatgatgagaagctgttgttttcggaggaattgtctgtcatcaagaattgttgtttgggggaatggatgatagccggtgatttcaacctcattacagcagccgaagacaagaataacacaaggatcaatcggcgcttgatgaatgcttttcgcagtaaggtgaacgatctagaattaaaggagatgtatctttttggtagaagatatacttggagcagtgagcaggcaatcccaactttggtgaaactcgacaaattgttcatttccactcagtgggaggatctcttccctgaagctcatctgcaggctctaagttcttcagtgcaggagtcttgggggagtgaggtcgatagctctgatcctttctgtattttgtatgtgaagatggcaagattaagcaaggcacttggtaaatggggacagcggaaaatcagctcgttcagattacaacttcagattgacatcaatggcactttaagtgaccccttcaagcctatgagggggctaagacaaggggatccgttatctcctcttccttttgtcctgaaagcaatgtcagccgggttgcttgataaagttaaccaccggagcagagcaccaaataattcgctctatgccgatgacgcagtcatcttctttaaaccggttcgtcatgaggccatgctagtcaaagccgtgcttgatctctttagtgaagccactgatcttcttcccaacttctccaagagtgcagtttcaccaattcgctacacagaggaacaaagctccttggttcaggatattttacattgcaaacttcagaaccttccaatcctctatttgggtcttccgctctccgtgaggaaaccaacaaaagcagagttacaacctctttttgatcgcttggctaaaaaggtggcaggctggaaatcaaagttcctttcacctgacgggcggctctgtctgatcaaatcaattttgatggccattccggttcactttctctctgtgatgcagctgccaaaatgggccatcaaggacatcgaacgccgctgcaggggtttcttgtggaaagttgcttggagagccgtcagtatgccagttgaatttggtggtttgggaatcagggatattgagcttttcgggaaggttttacgactgaaatgggagtttaacaggcttgaacatgaagataggccatggacaatggctaattgggaatctgataaggatgtccgcgacattttcagctcgattgcacagcacatggatgagctgcaacaagtgtctcttcaagacgggcagtcagattcggttttatggaggtttacagcaagcggcgccttctcggtttcctctgcatatgagttcttcttctacccttcggtgaagtgcccccacgctcggtctacagcttgcagaatggtggctgcaggtgcgtctctgttttcggtcaaggacaatgagcgtgtgagaatgtcgttgggctcatggccatctctcacgaaactagatgttagttcgtcatataacaaaatgtccactctggaggtcggtacaaaccaaggcccactagaaaaccttcggagtttaacgctatatcgcctcaactgcttcacagatgtatctggtttctcaaaaatacatcttgggctatgtaaatgctttgcctttgtggaggacttgtctattagtggatgcgacggccttgtgcgctggccaatagaggagctcatgagcttgattcaccttcgatccctgtctattgaaacttgtcgtaaccttgagggaaagggttcatcatcggaggatggtcaattacatatcccgatgctgcctgcatccctcgaaaagctatgtctagtatattgcccaagattggtggcgcttccttcgaagcttggaaatttggccaggctaaagattatgagtttgcagcactgttatgacctgaaagagttgcctgatgggatggatggcctcatttcacttgaagaattgaagatttggaactgcccagagatagagaaatttctgtag

SEQ ID NO: 31473 - DNA, 2111 bp, Oryza sativa
  Clone ID: PAT_MRT4530_35777C.1
atgggacctaactacactactaacaacaacggcggagcccaaacgcaagacatcattgccaagctaaacacaaaagtggcacaacagctccgacatcatagaagaggtgttatcgttgccgagctagccggccaagcaacccagcagcgccgacttcaccactgcagcgacattgaagccacggaagttgccaaagcgaaagcagctccgacatccacaatggacatcagccaagccatgaaagagccacttccttcacatggccagcaccaactctttggaagagaccgcaacacgtcatcgttgtcaagcgtcgccgcaccccagcagcgagcagctccgacttcctccgtagaaacaaccgaagagtgtgtcgcccaccacaagagcgaagcgaacccaagaggcttaggcctcgccaagcaccaaggaaagaaagcttttgaaccgaagagaccctcaatagtcatcgatgtaaaggaacttccccgaagcgacgcccccaaggaggacacgacgcgtaacgccgccgccgctcgtccgaagccggagcaaggttttcacttggagatttgtggggcaaatgggagagcgccatgataacgccttcaagaagggaaacggcgccaacggcgtcatcgtcatcgaaccggccaaaggcacggcaaggctttcgccagcaaccggccaaggcagccaagggaccggtcatcgaagctcggctagcaaccgtcgccacaagcgcccgcagccccgctgcaccgccgccaagacgccggtgggcgcagctggaggctgccaccgcgccaacaagggcctctcgcaaccgcctccgtcgcagcaccagcaccgccagccgcacatccacgcgccgtcgccagcctccacgctgccggccgcgcctctacgtgccgcaccggcctcccgctgtcggcagcatctccacgctgctccacaggccgcaccggcctccacgccatgccgccggccgcatctccacgggctgcaccggcctccacaccgccggcctcgcctccacgatcctccacgcgccaccaccaccagagccgcgcctgcatccccgccgccctcgccagcatccccgccacctgccgccgccactgcatccccgccgccacccgcctcctctcccgtacctggctccagatccggcgatggccgaggcagatccggtgatgcccgaggtcgcaggctctgtcgccgccgccttcaccaccgcggcccacaccccgccgcgtcgcctcccgtctccgcctgccgccgccaaccccgcgcccttgcgccgcctgtcgccaccatgtccacctgccggcgttgcccgcgcaccctgcacgcctccggcctcgacgacggcgcaactccggccggcctccaccctcagatccgcccgcgccagatctagggtggccgccgccgccatccccggaaaaaaattcaaaaaaaaatccaccggcaacgccaccgcctccttgtcgtcgtcgtcgtccgaagacgctgcccgcgccctcgtcgttgtcaccaccggcttccgcgccgcccgccgcctcctcgtcattgtcggccggggatgccgcccgcgccctcgtcgtcgtcgccgccggcctccgcgccacccgtcgccggcatccgcggtcccctccagccgcaccgccgctgaggcccctcccctccgccggatctggccagggaaggaaggggaggggaggggagctggatcccgaggggggggggaggggagggcagggcggccggccgctggatccgtgctcccgtcggcctccaggctcccctccggccacaccgccgccgacgccgctcccctccgccagatccttaggcttagaggatgtgcccttgaaactgaatttgttatccagacaagcatggaagtcagattccttttccttcaaacgaacatgatcatgaggccgcccaaaagcaggtgcgcacacacaaatgctaggcgagatgaggtcgggcggcagtgatggagctccatggggatcttgagccaccgagccacagcgcgccgccgcctcgccgagcctccagtcacccaccaccaccgcgcccgctaatgccgcgcccat

SEQ ID NO: 31474 - DNA, 2298 bp, Oryza sativa
  Clone ID: PAT_MRT4530_35778C.1
atggcgggcgggaggtggatccggcatggcatggctatgagcgtggtggcgacgggcaactgcgggcgcagcgttggcgggcaggaggcgcgacgtctccacctttactgccgagcggtggcgggcgcgacgtcggcggatccggcacagcacggttgtgggcccggcgacgacgggcgggtgcaaaagaagatggcatcaacatctacttattcgggtgtgcacctcagaggtgacataccgcccccttcgccgccagcaattgatgatgtgcttgatgtcttaccaatagcaggccaagatattcctgaagatgttgtccctttgattggcacgatgtttgaatcagaagatgctgcttacagcttttacaatagatatgcacggtatgcaggttttgggattaagaaaggcaagtttgacaatgcccgtcgtgcacgctttctgcattgcacgcgccaaggcaatcacacttacaaaggcgaggagttagcgtgttactgcaagaaggctgagaacaaggtggaggagaactcagatgatgtaaacaagctgctaatgtttttcaaagaaatgaaagtcaagaacaacaacttctattttgatatccaagctgatgagaaagatgctatccagaacatattttggtgcaatgcaagtagtagggcagcctaccaccattttggtgattgcatcacatttgacacaacataccgaacgaacatgtttaacatgccattggcggtgttcgttggatgcaatcaccacatgcaaagtgtgattctgagtgttgctctccttagggatgaaagagctgaatcatttgagtggttgtttaaaacttttctgaagtgcatggggggcaaagctcccatgtgtattctcacagacgaggacccagctatggcatcagctataagggaggtgctaaagaacaccattcataggctctgccgatggcatgtactaaagaagtacaaaaaacagttaggtgtgctctatgaaatgttcaagcatagaaatttcaaagagaagctgcactttgtgatcaaccatccgctgacaccaagtgaatttgtggctgcatggaaagatcttgttgaagagtttgaacttcaaggttgtgagtgtgagcccgtgttgagcacaagatatgcgttcgaggaacaactgagcaaattgtacacaagggcggtcttcaccttattcaaggaaacactgttcgatagcacggcgtttcttgtcaatgaggtttccaacgccatgggagcctacgtggtgacccatggtaagacaattcgaaagaacccgtggtcgcaacacgctttccaagttactgctgatgtggagtctgggctgtatgaatgcgagtgcaaaacgtggatacacacagaattgtctcttcactgcaataaacaatgcttgttactgcaactgcagtgtgagcccgtgttgagcacaagatatgcgttcgaggaacaactgagcaaattgtacacaagggcggtcttcaccttattcaaggaaacactgttcgatagcacggcgtttcttgtgaatgaggtttccaacgccatgggagcctacgtggtgacccatggtaagacaattcgaaagaacccgtggtcgcaacacgctttccaagttactgctgatgtggagtctgggctgtatgaatgcgagtgcaaaacgtggatacacacaggtcttttctgcccacatattgtgagggtgctcagccatctccaggtagaaaaaatactgcccagatatatattgaagaggtacacaagaagtgccaaggaagggggtgtctttgatgaccatgactatcggagatttggccttgacagcacaagtgagatttaccgccacacagtgttgataaatgaggctacgaaagttgccaaaaaggcatcaaaatcaacgcaatgctacgacagagccatggaggtatttaaggagttggatattgagattgatggaattccatgtgaacaattattgaataatgaagaaaataatattggagagatggaaacagatccagtgcaagcacctttgacggcgccaccaatttcaacaacaaaaggaaggaagaaagacaaagaaaaactagtatcgaaacaaacagagagcaagcagaggaaagaccacagcaggaggtgtagtgtatgtcacaagattgaagggcacaatgctaggacatgccctagtagaagcaaaagacaaaaaacaaccacccgccaagcaagagatgattatgacgaggaagacgaggaagacgaggaagaatag

SEQ ID NO: 31475 - DNA, 2103 bp, Oryza sativa
  Clone ID: PAT_MRT4530_35779C.1
atgggcaccctagaatcccataacctagcttgtctgagtgacgatgattcatgggaactattctcaaagaaagcattcaataaaggcgtacaacagcaagttgaattggtcaccgctggcaaacttattgtcaagaaatgtaaggggcttcctcttgctttgaagacaatgggtgatatgatgagttcaaagcaacaagtcaaggaatgggaaacaattgcaagaagcaatactggggacaatgacaggggtgaagatgatatactacctgtactaaaattgagctacagacacctaccacctgaaatgaagcaatgctttgccttttgttcagttttcccaaaggaccatgagatggacaaagaagtgttgatccaattgtggatggcaaatggtttcattcaggaagacgaaacaatgggtttggaacaaaagggggaatatgttttccgtaatttggtttggagatccttcctccaagacgtgaaacaggaaagccaggtcatcaatccaaagcatctacgatatcttgacctttctgggtctgacatggatgtgctgccaagttcaatatgcacgatgtataacttacaaacactaaggctgaaccgttgcaaaaaactgagatatttactggaagccaactctcagaatttggaaatgctgaacatagcgattattacgttgctgccaaagaaggaggcctctacccttttgaaggattatagacctattagcctcattcacggctttgccaaattggcaacgaagaaagcaatgtcagccgggttgcttgacaaagttaaccagtggagcagagcaccaaataattctctctatgccgacgacgccgtcatcttctttaaaccgggatgcaacgaggaagaagtgttggagtcgcttaaacctcatgctaagctcaaaattttggaactacacggatatagtggcctaaagatcccacaatggatggaagacccacaaatgttgcagtgcctaacaactctccacttttccaactgttcaggatgtaaggatctatcgactgtgtggtttttggtctcgattgagtgtatgtctttatctaaaatggagaatctaaccacattgtttatgaatgtcgttggtgtgaaagccgaaggatactacatccctctacaaattttcccaaggttaaaggatatgacactaagccagttatcgaacttggagaaatggacagaaagtactgctggagaggccaatactagcttagttacgtttccgaagctcgcaacgctatgtatctctgattgtccaaaacttgcaagtgttccagattgctcagttctaaaagaattgaaaacatatggatattgcagtcttgcaatgagcttacttgcacatctaaccactttgtctgaactcatttaccgggaaaatgagtctatgagaatgtcgttgggctcatggccatctctcacgaaactacatattagttcgtcatataaccaaatggccactctggaggtcgacacaaaccaaggcccactagaaaaccttaggattttgaggctatatggcctcaacttcttcacagctgcatccggtttatccaaaatgcatcttgggctatggaaatgctttgcctttgtggaggatttgtgtattggtgcatgcaacgaccttgtgcattggccaatggaggagctcatgagcttgattcaccttcgatccctgtctattgaacactgtgataaccttgaaggaaagggttcatcatcggaggaaatcatgccactctactatctagagaagtttcacatcaaagactgcaaaagtctattggatattccgacgatgcctgcatcccttgaggagctgtgtctgctactttgccccagattagtggcactgccttcgaaccttggaaatttggccaggctaaagactatgagttttgagcactgtcatgacctgaaagagttgcctgatgggatggatggccttatttcccttgaagaattgaagattatgggggtgcccagagatagagagatttccacagggtctcctccatcagattccgacccttcgatacctaatggtagcaggctgccctag

SEQ ID NO: 31476 - DNA, 154 bp, Oryza sativa
  Clone ID: PAT_MRT4530_3577C.1
aagaaagaattgcattacgtttcggggtactgcgatgctataagcaacagagttttgtaccagtctaaaagcaggctttttttactcttggcacataaacatattcagtttaaccacacttttaacaccctgtgttgaagtcatgggatgagag

SEQ ID NO: 31477 - DNA, 6156 bp, Oryza sativa
  Clone ID: PAT_MRT4530_35780C.1
atggcgcacgtctttcgcctttgtttgtcatccccgccatcgtgcccggaggccggagctgcactccatgccattgcgctcggcactaaacaccctcaatttcagaaacaaggatacaatttctccccttccatcattctctctattccccaaccaccacaactcgatgacggctggcagcacagcgagctccaacaaaggacggcggctccccaacctcctcccaaacagcggctcggagggcgacggcggaggcgcaagaactcgccgagacccctcctctccttgccggcgacgagcgctcgacgggcgacggcggcggcgcgggagctcatcggggcccctcctctcccgggaggcaacgagggctcggagggcgacggcagcagcgcgagagcttctggggccctccactcccagccagcaacgagggctcggaggacgacggtggcagcgaggatccggcgtgagagctcgtcggcgccctccacttccggccggcgacaaggagacggagcgccgagggcgacggtggcggcacggatccagagcgacggtgaccccgacggtggagagagaggtagcagagagagtagcagacagcctgtgaaagagagcaattgtatggcagaatcgctgcttctccccgtagtgcacggggtgatcggcaaggcgaccgacgcgcttgtccagaaagtcacccgcatgtatggcgtcgacggcgaccgccgcaagctggagcggcagctgctggccgtcgagcgcctgttggccgacgctgagtcgaagagcgagaccaaccccgccatcaagcgctggatgaaggacctcaacaccgccgatgacgaggccgatgacgtcctcgatgagttccagtacgaggtgctgcaccgcgaggccatgagcctcaagtcgctagggcacaaggtacggagctacatgacccccctagagttccattttaccatgagaaggaagcttgccaaagtgctcaagaagatcaacgagctggttgaagagatgaacacgtttggcctgttgctgcgagatgagccacaacaactttcttaccggcagacgtactcagtgctgccatcaaatgaattagatgatatctttggcagagacgacgacaaggagttgttgcaaaaggaactacagaaggccgttggccggagaaggtttctgctcgtgctggacgatgtatggaatgaagaaaagaagaagtgggaggaagacctgaagccactcctgtcttctgttggtggtggtgatggaagtgttatactagtgacaactcagagccagcgagtagcatctataatgggcaccctagaataccataacccagcatgtctgagtgatgatgattcatgggaattattctcaaagaaagcattcagtaaagaggtacaacagcaagctgaattggtaaccgctggcaaacttattgtcaagaaatgtaaggggcttcctcttgctttgaagacaatgggtgttttcccaaaggaccatgagatggacaaagaagtgttgatccaactgtggatggcaaatggtttcattcaggaagatgaaacaatgggtttggaacaaaagggggaatatgttttctgtaatttgaggatgccaccaaatattagcctactgaaaaatcttcgcactctaacaacatttgttttggacactgaacctggccgtggaatcgaggagctcaaggacttgaatcaccttgccaacagattggaactggagagctacggccaagctggaaccggtcggttgggctactcagagagttctctgataggggagagggggaaaatggctggggagcgagcgcccgacgccatgtcctgctgctcgtccagcaccgcatacagctgctcctacttctcgccagcgtccgccatccccgtccgctgcttcgggtcgcacgcgtcccggcctgctccgcctgccgactacagagtggttgggcgagctgaggaagaagctcatccgcgggacgtcgtcaagtcttccaaggagatggcaggttttcaaatctgcgcggctagggagcacgcctacatggagggttttcgagtcggcgagccggagctgcggctggggactggccgttgcgtgctgtcctggacggtgggcatggagcacaatgaagcttggctcaaccagcactcgctgttggccatggttctgaagacaagaccatcggtctcaccgggggagatgttagaagccatcgtccagcacaccggcatcaacgagagcaacgtccgtgtcgacgtgacacatacggaggattttctggtgttgttccgcatgctgcaagatcggaaccttgttctccattgctctcatgagattttcgtgaagggggttcccacgtccttcaagctgtggagccgccggagttgggcagacagctcggacttgaagttcttcaccaagatttcgctcgatgggctccctgctcacctgtgggagcgcgaagtggtgcgcaaccttgtcaacgagctcgagggggagctcatcgagagcatccctgccaacgacaccagatgtctgggcctcttcgcctggttcaagaatcctaacaagcttcctcaacggcttcaggtggagcgcctagagcacggccctcttttactgtatggcgtcttcctccacgttgaagaggtgaacgatcccatgctgctgcatgcccctgataaattctacaacgatgatggtgacgatgatgtgacaaggcgcaacaccttcgactgctgggctaagtggttcaacagcgcaggtctgtggccatcggaccggggaggcagcactcgctatggaggagcatcaggttcagccgggggtttggaatgccaagcgttcgatctcctgccgtcggtgatacagcaaccagtccgtcttttcaacacggaggaagctgtgtcggccatcgttcgtttcggttcgtcggctacgggggaggatctgctcccgtcttctccagacgctgctgctgtcgtcgggacgagggagctgggcacacaagtgccggtaacgcagggtttcgaggtagcggcgacggctgttggtgtggctgcttcggttacccctgaggtgatggtgctggtctcgcccgaagtggtggtcgacactgtcgaggtgatctcgccgtccctacctcgtgtgttcgagcttgctgtaccgggggcggttgaaggcagcagcccccaaggtgggaactcagcgggggaacattttcgagctggaggtccggctcctactgaagtcgtccgtgggttgtatttggcaattcctcaagtagcccaggaacaggtggtgccttttgaccgtgtctactctcgacgaaaggaggccggctctaaattgggcatgttgccaactcagatcgctgtgtcggcaacccaggaagtgcagagcgcagccgcagcggcccaggaagcaatcctcgttgcggccgatgagaacatgtgcgtacaagtcaacatcttcgtcgacgctatctccacgccgtcctcatcgtccgtcctcagcaagccgcctgcctccgtcccaatcaccaagagcagatgccgcccggtgatcccagttgatttcaagccttggagaagcccacggctggctctgcaaggctcaggcgcccgacaccactccatctccaaggcacagcgggtgactatgaagaatctgggaatcattgaagaagaagaggaagcaaacgatgaggcgatggaggaatatgttcaactcttcgacgaaccgctgccgcctcaccattttgaggccttggcggagctgcttcatcttgaactggcggagccggagttccaggcgctagcggatgagtctgttgtttcctccaatgcgttggttgtgtgtttccaagaatctaagttagaagttgttgatcgtgtcactgtctttgaactttgcggccctgattttgatcgttttgaatttcttcctgctcttcaaactagaggtggaatcattgtggcgtggaagggggatctattccagggcactcttgtccatgttggacaatggtcggtgacagttaatctggattggcgccagggagggagatcctgggctgtgacctcggtgtatggccctcaaagggatgatgagaagctgttgttttcggaggaattgtctgtcatcaagaattgttgtttgggggaatggatgatagccggtgatttcaacctcattacagcagccgaagacaagaataacacaaggatcaatcggcgcttgatgaatgcttttcgcagtaaggtgaacgatctagaattaaaggagatgtatctttttggtagaagatatacttggagcagtgagcaggcaatcccaactttggtgaaactcgacaaattgttcatttccactcagtgggaggatctcttccctgaagctcatctgcaggctctaagttcttcagtgcaggagtcttgggggagtgaggtcgatagctctgatcctttctgtattttgtatgtgaagatggcaagattaagcaaggcacttggtaaatggggacagcggaaaatcagctcgttcagattacaacttcagattgacatcaatggcactttaagtgaccccttcaagcctatgagggggctaagacaaggggatccgttatctcctcttccttttgtcctgaaagcaatgtcagccgggttgcttgataaagttaaccaccggagcagagcaccaaataattcgctctatgccgatgacgcagtcatcttctttaaaccggttcgtcatgaggccatgctagtcaaagccgtgcttgatctctttagtgaagccactgatcttcttcccaacttctccaagagtgcagtttcaccaattcgctacacagaggaacaaagctccttggttcaggatattttacattgcaaacttcagaaccttccaatcctctatttgggtcttccgctctccgtgaggaaaccaacaaaagcagagttacaacctctttttgatcgcttggctaaaaaggtggcaggctggaaatcaaagttcctttcacctgacgggcggctctgtctgatcaaatcaattttgatggccattccggttcactttctctctgtgatgcagctgccaaaatgggccatcaaggacatcgaacgccgctgcaggggtttcttgtggaaagttgcttggagagccgtcagtatgccagttgaatttggtggtttgggaatcagggatattgagcttttcgggaaggttttacgactgaaatgggagtttaacaggcttgaacatgaagataggccatggacaatggctaattgggaatctgataaggatgtccgcgacattttcagctcgattgcacagcacatggatgagctgcaacaagtgtctcttcaagacgggcagtcagattcggttttatggaggtttacagcaagcggcgccttctcggtttcctctgcatatgagttcttcttctacccttcggtgaagtgcccccacgctcggtctacagcttgcagaatggtggctgcaggtgcgtctctgttttcggtcaaggacaatgagcgtgtgagaatgtcgttgggctcatggccatctctcacgaaactagatgttagttcgtcatataacaaaatgtccactctggaggtcggtacaaaccaaggcccactagaaaaccttcggagtttaacgctatatcgcctcaactgcttcacagatgtatctggtttctcaaaaatacatcttgggctatgtaaatgctttgcctttgtggaggacttgtctattagtggatgcgacggccttgtgcgctggccaatagaggagctcatgagcttgattcaccttcgatccctgtctattgaaacttgtcgtaaccttgagggaaagggttcatcatcggaggatggtcaattacatatcccgatgctgcctgcatccctcgaaaagctatgtctagtatattgcccaagattggtggcgcttccttcgaagcttggaaatttggccaggctaaagattatgagtttgcagcactgttatgacctgaaagagttgcctgatgggatggatggcctcatttcacttgaagaattgaagatttggaactgcccagagatagagaaatttctgtag

SEQ ID NO: 31478 - DNA, 1416 bp, Oryza sativa
  Clone ID: PAT_MRT4530_35781C.1
atgtcgacctccgccagcccgtctgtcgcaccatcagccaagtatgctgagcatctctccaatctagtcacaattccaagtttgtcgcatgagagacactatttccttggtccgatcggtgatcttgaccccactgatttcattattgccaaaaccaatagaatccctgtcagattggccaaccctaatctaggtcattggaaaaacaccagaagtcttggccatctcttgagaaaaccacccctgagaaaagctgtaccacatgggccgatgaccctgactctgatcgacaacaccatgattactggattagatgtgacctcatcggctaaccctatgagtttgaacaccaagaatcaaatcgatttcaagaccaagagcataggtggttggtctagctatgtggctgcatatatgggcaaagggccaatcacctctcgagagcatgtagcttttctgctgatgtggctagagaaattcctcttctatggatcaagttgtgcccctacaaccaactggcaatttgtagccgaagccttagaatcgaaaaggcaattccccttaggcaaaatcctcctcggctatctgtaccaaatgttaaacaatgcatcggctaagatagctgtcggctcagttgttggagcagacaacagaatcttcccctccacaccaaagcaacagtggcagggacatagaatatgctccaggcctcttaccaaatggtggtggactagctcctccagtcatcggctaccatgcccccaagacctcaagcctacttcaagggcatatgagagaaccagccgatgctggcaggaaaaggaagaccaaggccaaaaagcaattgatccatcggctctggctcttaagaagaaggccaaaaagcataaacccaagccagccgatgatctgcctaccctagatccatctatcgagcaagctttggatgaagaggaaattgaagaggatgctgacaaagctgcagccgaattgcagaagaagatcgctgtgaagaagaaatcggcagcaacaacacttaaaccagctccaccagttttagtcgatctgttctcctttgatatcaaagattattttgatgaagagacagaagatgataccaccaacaaagctctagctcccttgaccgatgatgtgaagaaaatacttgaagacatttctcgtcggctagaggcatcatcactagatagcttggtagtagactatgggtcgatcagaactcggctacataaagttcaagctcttatcccagatgaactagtcaatgcccctactccggccgtttacctcgagcaatatcaattcaagctggagaatgccaagctaagactagccgagcatcgggagcgcaagaacattgaagccacaaatccaagccaatcggcagcttgttcataa

SEQ ID NO: 31479 - DNA, 1077 bp, Oryza sativa
  Clone ID: PAT_MRT4530_35782C.1
atggttaagatcgaagcgcccgccgccgccggcctggaagaaccggccgccgtcctcgcgattaaaatggacaagacgacgatcatcgtgtccgcggtggttgggtcccttgggttgctcagcgccatcctgggattcgccgccgagggtgcgaagcgcaccaaggcaacggtcgggctgggtgtctgcggggccatcttgctggtgataacacaggtcaccgtggctgccatcggcggctgctgcgggtgctgcaagtcccgcgccatcccgtccgagaccaagcggatcgtcggcgtcgtctgcgccgtcttctcctggataacggcggtgatcgcgttcgtgttgttcctggacggcgcgatcgtggagtccaactgcgtcctcgtcaggggcggcttctttgcttccgcgggcgtgctgaccctcatcaccacggccctcgggatgacatcctacttcatgctccgcgcacagccggacgagcccgcggcgccggcggcgcggcgaccgccaggtccggcgggcggcgatgaacccacgccgatcgtcggggtcccgacggcggtcccggccgggttcccgccaccagtgtcgtcgcctaatcctctgctggtgcctgtacctgctgctcaagcgccgccgaaccagcagtttgctcatccggctaccagccaggcgctgccgcacgcgcggttcgctgatgcagctgttcctgatcctgctcctgctgctgctcaaggctatggatcgcaggcgtctaaccagcagcacttcccggctaatcctcgagggcgttcagaggtcattggttcttcccctgccctctccgatgctgcggctggtgggcggcgggttgcggcaggcggcagcgggcagtgggtcgcgggctgcggcaccctcaactctgtgggatgtggtggccggcggcagcgcccgacgcagctgtcgcggagggcggcggccgaggctgcgggcgaaagcgtggccagggctggagagggcgcctcaatttgctacccgggactaaagggggttgcaaaccggggctacaaagggtttgtgcagcagttgtag

SEQ ID NO: 31480 - DNA, 1026 bp, Oryza sativa
  Clone ID: PAT_MRT4530_35783C.1
atggacagagatagcaatagctcgacaatgcaaacacaagtccctactaatactagggagggaccaactttcacacaactactactcggagacgaagattttgacctaccaccatatgttcccgaagccgaagagaacaatcaattctatcaacaaacaatgaatgagaacctaaacatgaaccaattgggcaacaatgggatagaaactgctgagttggaacctcaggagcatataatgacgtttgcatcaagttttggtgtaggttcacagcttttaggttctcaagcaatagaagtagttgatgttgtaggaggtttaacttcacagtggggaacacaactgcatgggggtcatcttgcacgtgtaatttcatatatccgtgcatttcatgacccagagcagcagatcctttccaacctcgtcacgcatcaatctattgagacaatgttgaaccactatgcccaaactgcagagatgtcatattccatgagatatccagaaaatgcagttactcgtggacctcaaaatgtttctgggtttcctcaaaccaatggacagatcaacacactgaacaacatgaattctgagttccatttcttgcttgaacaagcaaagaatccagagaacaattccatgcgactcatcaacatcaggggccatctatgtgctttcagcattgatccgtttggaagccgtttcatacaacataagcttgagagagcaacaccggcagagttagctatggtgtatgaagaaattgttcctcatgcccacatgttggctattgatgtttttgccaactacgcgcttcttgggtatggacctaccttctacagaagggaactcatcggtaaactaactggtcatgtggtagccttgagccttcacgtgtatggatgtcgagtgatgcagaaggctttcgaagtaagtgatatggatcagaggatagagatggccaacgaggtcgagaaggaaaaagagaagatgaaggtgatcaaaatagtgttttttctaaggttttga

SEQ ID NO: 31481 - DNA, 497 bp, Oryza sativa
  Clone ID: PAT_MRT4530_35784C.1
ctgcaaacttgggctggtgctatattcatatagaactcgacattactgatctgagaactcatatccggtccagaatcaaagcagatgaagcacctatgcaatacaatcaatagaatcaatggaagagaaagccaacttgcacagataatctaaagctagcggctaacatttctggtaatatagagcagctgcgataatataagtatgcctcttagaatttatattttcttcttgataatccttcagatttaatttaggcacaattgatcggtggctgcaagcaacatggtcccatactctgatattgatttgtcttccaactcttaaacttaagacgcactggaaggaatggcaggttatcctcaagatttgtctttccttgaaagatttgagaaacttctattgccacggaaagccagtgctggaaacaatgggtagcatactgagacacatcatgctgattttgtttgggaccacagaatgactgagacgaaaaa

SEQ ID NO: 31482 - DNA, 591 bp, Oryza sativa
  Clone ID: PAT_MRT4530_35785C.1
atgccgccgttcaggatatttgcgttggacgacgtagtgtctaggttgttaattttcggtgtttgctccgcatcccacagtaggtgtgaggtgagtgtagaggtggtaacaaccctcaatatcactgaagtcctccctgttcgggtgcgcaatagagcgatatctgggagcacttgggccaggtttacttcattagtacaatctggatcaaacttatctctacccgattataccctattgcaacatttccatacgggtctggataaggagtctgcactttacctcgacataactgccggagggtcgttcatgcacaaaagccccgtcgaaggcaaggaaattcttgatcgcatatcggaaaatacctcctttgtcgggcagtgtgttgagccccatccagaggcatttgaggcatttgtgtcaggaagggaggaaccttcttttgttgagcctgaactcgagccttcaacatctccgggtctgactaaagagtccttcctggagccatcgccggattccatagaaattcaagctccgggtttttgcgaggaggagcagcggcggcggttcggcgaggaggaggacgcgtga

SEQ ID NO: 31483 - DNA, 417 bp, Oryza sativa
  Clone ID: PAT_MRT4530_35786C.1
cccacgcgtccgcactaacgtgcgtgcaggtagttcgcacaacgatctggtggtgcttcgcgagatctaccgttaatgacgcacaattacaaactgcgctagactagtgtatgtagtagctgcacctgctgcggcggcattcaagcaggcgcacggagctatgatgcttgcactgaggatggacacgccacctaagcgttctgcgactgttaccagaccatcgaacgcgctagtggatcatgtgactttgcacgcgttattactatggtcggccatcagccactactaggaggctgtgtgcttcgaccatacattgctgtggcaggacatactgcaattgtagatcaatcgactgttaacttaccggcatcagatggactgggaggatggattaagatcattgatctgttgtgagag

SEQ ID NO: 31484 - DNA, 633 bp, Oryza sativa
  unsure (1)..(633): unsure at all n locations
  Clone ID: PAT_MRT4530_35787C.1
tttttttccggttctttcttaaaatatcactggggacacatttcaggttggtatttctgcaaacttgggctggtgctatattcatatagaactcgacattactgatctgagaactcatatccggtacagaatcaaagcagatgaagcacctatgcaatacaatcaatagaatcaatggaagagaaagccaacttgcacagataatctaaagctagcggctaacatttctggtaatatagagcagctgcgataatataagtatgcctcttagaatttatattttcttcctgataatccataacatcaatcagaaaaacaaactgttttgtacaatcaactaaccaccttcagatttaatttaggcacaattgatcggtggctgcaagcaacatggtcccatactctgatattgatttgtcttccaactcttaaacttaagacgcactggaaggaatggcaggttatcctcaagatttgtctttccttgaaagatttgagaaacttcagtaaaaaaaaaaatcccttttttagcttgaccaacttatacttttattattctcatcaacgtgcttcacaaggaatagataaccanaattgcatataacagccaatgaaaatttcattaccatattt

SEQ ID NO: 31485 - DNA, 331 bp, Oryza sativa
  unsure (1)..(331): unsure at all n locations
  Clone ID: PAT_MRT4530_35788C.1
ggtntgctgtttggcgggtgtaggataccaataggtggtggccccttgaatgggccaatgtagctgaatgccccaaggaatgccctattggacccccctgtggtgattgattggtgtgctgtgctggatgctagtgttggaactgtgtgtgctggtgaactnataaatgtggtgacctggaggatacgagcgcatgtgatgtgccctaaatggtgacattgatggtgaatgctgatgctgatgctatgctgatgctgatgctgcaatgaatntggtgctgttggaaaaaanaaggcgccgctctagagtatccctcgaggggcccaagctt

SEQ ID NO: 31486 - DNA, 195 bp, Oryza sativa
  Clone ID: PAT_MRT4530_35789C.1
atgatcgatgcatgggtaaggttctccaaaacggcgccccatggacgacacgacgtgaaagcgccaccaccgcttgtccggaaaccggatcaaggttttcacctagagattggtagcgacgaaggaaaacaccataacgacgccaaaggtgccgccttcgtcagccacccaaaggctaggcaaggctttcgctag

SEQ ID NO: 31487 - DNA, 1079 bp, Oryza sativa
  Clone ID: PAT_MRT4530_3578C.1
atggccaccatgccgctaaccttctccccgcctcgcctcctccaccgccaccgccgccgcgaagccaagccccaacgccgctccgccacccgagtctccctcctccctcgacggggagcggcctcggcgcggcggccgctgtactgcgcccccggtggcggcggcgaagtctccgcccctccagccaccgagcagcaggagcaagcggcgaaggaggaggaggaggagtacacgctcctcgccatcaccggtagcgacttcaacgaggtcatcatgactacctcagttcctagtgagatgagccccaaagtcaaacagtaggtacctggcgaacttgctttaggttgagaatgagtctggaccaactcatattgggatgagttcgtgagcctttgtgtggcccctctgttgatggctctctttctgtgtgttttaggcatatgcacctgatgaaacactgaaatgtacaaggattagaggtggaaggtaattggatcagagattgatcctaagataattgaactgtcaagggattattttggtttatctgatttagaaaaggcaacagaatcaggtggttcactttctgtgcgcattggtgatgcactttctccgtcagctacaattgaaggagggtttgctggtattgttgttgatttgtttgctgatgggaagatcatacctcagctacaagaagttgaaacctggttggttatcgcgaaaagctgtccacgtagctttcacatgacagaatactggttcgttagtagcgtttcacttgatagatgcaatggatggtacttccccttttatgagggctctgaagaaagcaaccatgctgtactgctgcttgtgtgattgagcagaatcaatgcaccaggaggagtaacatgcctccatgccggttgcgctctgcatacttttttctgttctagattgattgtgacgatatatcacatgcctggtaaatgttcagggtattaaccctacataagagaactaaagaaagcaaccatgctgtactgctgcttgtgtgattgacatgcggttaattgatggaaaaaaaaaaaaaaaaaaaa

SEQ ID NO: 31488 - DNA, 490 bp, Oryza sativa
  Clone ID: PAT_MRT4530_35790C.1
cttcttcttcttccttgctgctgttcctaaggcacttctccctttcccagctaaatcatccaagccatggctaccgatctaccattgctagtgtggatcagctctgctgcggctactgctgtggcggtggtggttgctgcagctacggctgcggctgtgtagggggaacagatgcttggttgctaggtgctaaaaaaaaaggaaagccaagtattgagggattcacctttgcctaggtgacaagttcgtccatggctgtgctcccgtgttcatcctcgccgatgcattggcctttcctcttccttgggtaaatcacattccctccttgctgatttctcttctcctcttcctagccgacatagtgatggtatgagtatttggccaagaactatttggctactaattataggggattcaagatttggtgcttgcaatggatggggcgcaatcttgcatttcactgatttgtttgctcctcactccctacttc

SEQ ID NO: 31489 - DNA, 813 bp, Oryza sativa
  Clone ID: PAT_MRT4530_35791C.1
accggacaaatgcaaagcacttgaatatattattcaacaaatgatatatcatcatacaatgaatataataataatcgaaatttaaaatacatgaagaaataaatgacatgtcacacagtatatatcaatggcattataaacaataatcaaactgctcaattaatccacgcagaaattaaactaattaatcaagcatacaacattgcaaacgcagccgacacgatcaccatcgcaacggacgccgccttgccgacgctctcgccggcggagctcgcgccggtggtcggcgtcgtcttcgacccggtccctgcagccggcggcgcattcggcgccgccgcgccccccggcgccggagacggaatcggagcaccgactttgctgcactcgctgggaggcggggtcttgacgccgcaggcggcggggagctcgagggcgcgggtggtgttgacggtgacgccgagcgaggaggcgccgccgccgagcaccgcgcacaggcactccggcctcgacttcaccacgctcgacagcgccgcgcagcacgacgccgtcggcctcgacgcgttcccctgcatgtagtccaggcacggcgccaggctcaccatctccgacgtgcacccgctctgcgccgccgcccccgccaccagcgcgccggcgacgacgaccacggcggcgaacatcaccgcgacgccattattgcgcgccattgctagcttagctgtagagtgtgttctagctaagcaagctagatatatacttaattagctggctaatgatgtaattaagatcggacccacgcgtccgcccacgcgtccg

SEQ ID NO: 31490 - DNA, 441 bp, Oryza sativa
  Clone ID: PAT_MRT4530_35792C.1
gcacgaggccggccaggagcatcggagcggccgtcatcttcaacaacgagaaggcgtggcacaaccatgtaagaagacacatacattctactactacaaattacctcaattgggcatggcctgatcatgattttcttttttttttgggttgtgtgaattgtgactgatcgtcttcccccgtctccggttgcagtggatcttctgggtcggcccgttcgtcggcgccgccatcgcggcgttctaccaccagtacatcctccgggccggcgccatcaaagccctcggctccttcaggagcaacgcgtgatatcaaaggagttcgagcagccattgttgggggataatggctggaaggcgttgatgaagcaattggccatgatgatgagttctaccgtgttatgattctccctttttcaaaaaaattaagttcgccgctggtcg

SEQ ID NO: 31491 - DNA, 211 bp, Oryza sativa
  Clone ID: PAT_MRT4530_35793C.1
gtgcgaactctgaggttaaaaagctgcgtgagaatgcgagaatataaatcctcccctgtgatgaccccggatatgtaccccccaacttggctcccattttgggtggatgtggtagttctgagcttggcgtggttgctctggaacctgttggatctttaataccgagagtatggcttttgttaaaaaaaaaaaaaaaaaaaaaaaaaaaaaa

SEQ ID NO: 31492 - DNA, 1098 bp, Oryza sativa
  Clone ID: PAT_MRT4530_35794C.1
ggaggaaattatagctgcattaaccatagctcattgtcatccagatgcaatttaaaacatgacttgcacaagacatgctgaatgtttgcacaagtcagtcgtaaggaaataaataagctctaggtttgttcgtcaattctgctactccgcaataaataagataggatttcgatcggtgtatcagggcatcacgccgtcactgactcactgtggtgggtcgtcgtcccataggttgtcccacctgaggggtccagcccgtccgccgtcgcctccagcatcatcaccgccgtcgtcatcagtcccgccgtcgcttcccacttcctcattctcgtcgtcactgacccccaggtagtaaagatcatcagcatccacctgcgcgttggcgtcctcttcatcggtggtggctggctcgaacatatccaagcctccatacacatagtgctcgtcgccgtcgtcgtcgtcgtcgtcgtcgtcgtcgtcgtcgtactcctccactataccaagctcatccagttcttcacctcttgtagcgcatatgcgcgctagatctgtttgactcgtgacaattgccaaaaacgcctggaatcttttgaattggtccacggattggacgcagttcaactccagaggaggaagacggcgacgaagttgtaggacgtcgttggcgggcatgcgatgaattctcagatccagaaattgcacagtgaccatctccgacatgtcgtactctacccaaacgtcgtaatctcgcccggcgaagtcatcagaaaagggaaaccggtccccaaactcgcggtggagtggcaccagaacctgatgctctgctaagtgcgagggaggggatgtcgacatatggagcaggcgaagaacttggcagtcgtctccacggcgggcttctctctcggtgtccctggtccggctcctcacgttccggtcgcctggggtcacggcagcctgcgaaagaggagagagagtcagggcatggatcggattggcctcgtcaagaccaaggcgacgatctccgccggcgatcttggtgcaccctttcttacccgctatggagcctgtttgcctgtcgtcactccttttaatcgtcat

SEQ ID NO: 31493 - DNA, 700 bp, Oryza sativa
  Clone ID: PAT_MRT4530_35795C.1
tacccaagctcatccagttcttcacctcttgtagcgcatatgcgcgctagatctgtttgactcgtgacaattgccaactggatacaagaacagtgtcaattcgtcacattataaacacacgcacatagcaaagttaatcagttagcaagaatcaacggtagaagaaagatcggtagggaagtgttgagctcggcctcttcttcatcccttttctccttctcctcattttttcttacaaacgcctggaatcttttgaattggtccacggattggacgcagttcaactccagaggaggaagacggcgacgaagttgtaggacgtcgttggcgggcatgcgatgaattctcagatccagaaattgcacagtgaccatctccgacatgtccgagggaggggatgtcgacatatggagcaggcgaagaacttggcagtcgtctccacggcgggcttctctctcggtgtccctggtccggctcctcacgttccggtcgcctggggtcacggcagcctcgtcaagaccaaggcgacgatctccgccggcgatcttggtgcaccctttcttacccgctatggagccgaaggagtcgccggccttgggtgtggggtggcgagacggagtagggttttccccctgactcccccaatccccaagctcttggtgtagttgggtttgcccgcacgcgtgggcggacgcgtggg

SEQ ID NO: 31494 - DNA, 522 bp, Oryza sativa
  Clone ID: PAT_MRT4530_35796C.1
atggagacggcgatggtaggggcgagctgcgccgcgcggcggggatggcgacggcgggccagattcgacgcaccggaggcggatctggccaccctgcggccagatcgggtggggcgagctcgcggtaggagcgctcgtcacggcggcaacggcagcgcgaggctcgtggcgacgacggcgatagcgggtggccagccagcggcagcagcacccggcaacggcggcgaccgctatcgagaggagtgtgccattccggtgcagcgaccagcacaacgaggtgacatggcgcagccagtggtggcatgcggaggctgcccggcacggggcaccggtgtagtggtgcccacacgctggcggaggttcagatggcagtggagcatcggtgtgtcaacagtggataggcaggcggtggatggcgggcgcatttatgggcagtgctccaaccgccccgtcgcatttaatgcaacgtggcaggacgtgcgccgcccactgatgggtgtgcgccaggcgaccggcttttga

SEQ ID NO: 31495 - DNA, 1411 bp, Oryza sativa
  Clone ID: PAT_MRT4530_35797C.1
cggacgcgtgggctctcatcttcttcatcgcaagctagtaagagtgaatcgaagatgatgaagaagctggtgaggttgctgatcatggtggaggtggtggccatggcggcggcgccgcggcgagcggcggcgctgagcatggactactacgggatgagctgcccgttcgcggagatggtggtgaggagcgtggtgagccaggcgctgatgggcgacccgtcgctcgccgccagcctcctccgcctccacttccatgactgcttcgtccagggctgcgacgcctccgtcctcctcgactccaccccggacaacaccgccgagaaggacgcgctcgccaacaagagcctccgcggcttcgaggtcatcgaccgcatcaaggacgccctcgagtcgcggtgccccggcgtcgtctcctgcgccgacgtcctcgccctcgccgcgcgcgacgccgtcatcatggcggggggcccgtactacggcgtggcgacggggaggagggacgggacgcggtctagcgcggccgacacggtggcgctgccgccgccgttcttgaacgcgacggcgctgatccagctgttcgggacgcacgggttcaccgcgcaggacatggtggcgctgtcgggggggcacacgctggggcgggcgcactgcgccaacttcaagaaccgggtggcgacggaggcggcgacgctggacgcggcgctggcgtcgtcgctgggcagcacgtgcgccgccggcggggacgccgcgacggcgacgttcgaccggacgagcaacgtgttcgacggggtctacttccgcgagctgcagcagcggcggggcctgctgacctccgaccagacgctgttcgagtcgccggagacgaagcggctggtgaacatgttcgccatgaaccaggcatacttcttctacgcgttccagcaggggatgctcaagatggggcagctcgacctcaaggagggcgacgccggcgaggtcaggacatcttgcagggtcgtcaactgacactccttgatcataccaacaatctatatgtcctgaattgcccgccttagctctttagcttaagcttttgagtttaactggttggtgcatgcaactcaataataacataccgtatactcgacgtctttcgtggccgcgtctttgtgaacttaaaattgcagctagctagtttgccggaaatgctacagtacccaaggtatacaagtagtgtcagtttgtattgtggcatggaggccatgtatgatagtagtaagtatagtaagcttgccagaaatgctacagttagcagctggtataattgtggtactgtataggaaagattgtaaaacaatcatgcatgtcactagtttagatatgtatgcatgtacaataatattgtgatgctccaaacaaagaacaaggagag

SEQ ID NO: 31496 - DNA, 384 bp, Oryza sativa
  Clone ID: PAT_MRT4530_35798C.1
atggagcaggcgaagaacttggcagtcgtctccacggcgggcttctctctcggtgtccctggtccggctcctcacgttccggtcgcctggggtcacggcagcctgcgaaagaggagagagagtcagggcatggatcggatctgcgccaactcaagaacaggaagggagaaagggctcactggcctcgtcaagaccaaggcgacgatctccgccggcgatcttggtgcaccctttcttacccgctatggagcctgcacggacaagacgacgacatcacaggtgcacagagaaagaaaggagaaactaccggtggagtttggcataccgaaggagtcgccggccttgggtgtggggtggcgagacggagtagggttttccccctga

SEQ ID NO: 31497 - DNA, 732 bp, Oryza sativa
  Clone ID: PAT_MRT4530_35799C.1
atgcaatcagcttgggcagtcttaaactccattttggagttggaggaagaaaagagattgctagccattgtcctaatgtatggttggtggaatgagagaaatcggaggagagagggggaaggaagaagagtagctagtgtgctggccttttcggtgcagaagcaagtcgatgaactcctaaatttggccctgcaacagcgaagggagcataaaaatagaacagttaagaagtggacacaacctgcagctgaggtgctgaagatcaatgtggatggagctttcaagcatcaactgctcctaggcggttggggttatgtaatccgggacgtgggagcacatgtgatacaggcgggagcaggaagttcatcgaggatgcaagatgcttttcacgccgaagttatggcaggagtaaagggtttacaggcagcggcgaacctgggaatggccaatatccagctggaatccgactccttgacgcttatccaggctctgagggaagaaaactttcgctatgctcctttgggcggcctgctgcttgaagcgaagaacattatcacttcgtcctttgtatcttgtcagttcagttactgtcctcgcgagtgtaataaggtagctgatgcaatcgcatccattggttgtaatagtcctctaaacactgatctcgtctgggatggtgtacctccgggtgttgaggatctggtggtcggcgattatgccgcttccttgggttaa

SEQ ID NO: 31498 - DNA, 2046 bp, Oryza sativa
  Clone ID: PAT_MRT4530_3579C.1
atggcgcggcatcctaggccccccaccccgtcaccgccgcgcgcgagctccgacaccgacgccgccttcgaccccgtcgtggagtggctcctcgacctcgaccaggcgcccatggcggacgaggtggccaagggcctcggtatcgccgaggagcccgcgagcttcgatgctggtaaggtttcgggtggttcggtgtccgagagccgcggggtcgaggagaaggggaacgccttgccagagcaatcgggcgcctcttttgacggcgaattggatgtcgagatggagcctaagacggggagcggaggattggttccgcaacttgtgcaggatcagcatccggcttcggatattggtgatttggctgtaagagaggatggttcagagataatggtggatgttgagaggagtactgtacctgttgatgctgacatgaacaatgtgtccttggccttggtgaaagaggaagcggaagggggaggagatagggaggacaagagcgacgaggaagagtccgagagtagcaaggaggagtcgtctgaggcttcgtcgagcagtgatgaggaggaagataagagggagtcaagcgaagcctcttcgagcagtgacgaggaagagcagatggccaagaaaactggcggtgctggtgacacggattccctctttgaagagggtgaattgatgcttgcaagtgatgacgatgatgaggaagcaccaaagggtcctatcaaatccaaacatgaagtagaggtccttcctccagtgccaaagattgatgtacagctggaaccacatcatcagaccctaccagtaggaacaatttcagctatcatgggtgagagagtgattgttgaagggtcagtgcaacacaatcccctgaatgagggttcgatactctggataacagaaagcaggatcccacttggtattgttgatgaattgtttggacctgtcaagaacccatactatcttgtacggtacaactctgcagaagaggtgcctgctgatatcagtgcaggaactgctgtctcttttgttgcagagtttgcagaccacatcctaaatatgaaggaactgtatgccaaaggctatgatggatctggagaaaatgacgaggaccagacagaccctgaattctctgatgatgagaaagaggctgagtacaaaagatcattacggctggcaaaaaggcagactgataggcagcatgagggtaagaaaacttcaggtgataagaagagagcacaacctaggggctctggatttcggaaagacatgccacccaggagccatgatggacctgcaccaggtcgccaatcgcaacctcattttcatcgccctgataaggctcctgtagttgatgcaatccgcccattgggttctcaagatggtcctatgagtgcaccaacaaagctgccaccaggcccagttcatcctgttatgcctgcagctaatcagcttacaaatcagatgggtggtcgcttcatgaatccgtctcagcagttcttaccacagcagcctaacgttgtctggccaggtggtctaacacctacaccacatccaaatatggggattgaaggagctgcttttgcagctaatatcatgcagaaccttctcattggagccaatcaataccagcaacagtttcagaaccataactttggtggcttcctgaaccaaatgcctgtacctccacctcagtttatgtcgcaaggtggaatgccttctaatccaatggcatttggtggaccaacgatggcacagatgaatcctccatttggtccacctcaattgcctatggatcaaggtaattttgggcaggctccacacatggctgggcatacagtgcaacaagggcctcctgcaggatttcccaatggccaaggatttgggcagtcagcatcgccgcagggagatggagagcagccacctatgcaattcagttctgggcagtttaatcaagggaactcatccttccatggcagaaggcagcaacaacggggaggccggcactcttctgggagaggcggtggccgtcaccgcagataa

SEQ ID NO: 31499 - DNA, 669 bp, Oryza sativa
  Clone ID: PAT_MRT4530_357C.1
ctaatccgtcgccgattccatccgttcccgagccgatctctccctcttccggctataaataacatcccctcggcctcctcttccgtttgcctcaagtcccaagccgagccgtcgcttgtagcgccgccgccgccttgccctagccgccgccgacgccggtgaccctccagccgcgtcgcgccgcctcctcggtcgaccccgacctgcgccgtcgcctccctcggcttcgcaagggtgagagctaccccggccacccgttcccttgcgccgaatctcgccggaatcgctctccccgcgctcgccttctctctccacctccggccgccgctccagcagccccgcgccgtcgctgtggtcgtcgcctttggtcgccgctgccgccgttgggttcgcgaggaggagaagaagaccggcctccacttccccgtcgtcgaagaccccgggaagcccgtcgtcaccgtgaagccgatctgttccatcttcagccgcgccgttcgtcgccgtccatcgccgccttcgttcaccgtcgccaccctcgggatcgcaggagcgaggtgaagaccgtccgcccctcggttgttgcctcgtggttcgctggtaactgccgttctcgtgcttgcggtcgtcgatcctgcgtggcagccatgtcatcgctgatatcagcgccat

SEQ ID NO: 31500 - DNA, 258 bp, Oryza sativa
  Clone ID: PAT_MRT4530_35800C.1
atgaggcgagcgctagctgcgcgcgcgcgcgatcgcggtcggcgtacgtccgtccgggcggggggagagagggagacagccggatcgcgacgtggatcgggctcgcgcgagaggggaggacgtgcatgcggtgtagcgggcgccgggcgggcggctcgatctgctgtgtcgcgcgcgggtgtgacgccgatcgatccggccgtcggtgtcgcggccgtggaacgcagccgcgcgatcgagctctcgtaccgtaacgta

SEQ ID NO: 31501 - DNA, 431 bp, Oryza sativa
  Clone ID: PAT_MRT4530_35801C.1
agcatgtgaggtggagagaagagggggaacacgcgcgcgcttgctcactcgcctcgcctggtaggcggcgcatgtgcacgacgtacacgtcgaatggtccgcaaaattggttcctcacccttgtgcagatgcagcctcacagatgcagcctcctttgctgcaggaaattcggatttgttttgttttggaaacattccgaaaaatccggtgcgtgaaaacgacgtggagtccggataagtttcgcgcgacttatccggttcagttacgcggagtggtgatcgtgcgggcacctctgtgctgccccgtcgctcgtagactactccctcccgttcgccggcgtgcaccggcgatcggaagagcaggtctccggaacctctgccttcgacatcttaagtggaccgcacgcgaaaatacagatttttttatcccat

SEQ ID NO: 31502 - DNA, 666 bp, Oryza sativa
  Clone ID: PAT_MRT4530_35802C.1
atggaggttggaggtggcaagatcttgcggcccctgatccccacgccgatggatccgctgtttacaattgaaccctgctatacacacgaagaatcttcgagacctaaggagtgtgggggccttggaatacataacttagaactgcaaaacaagtgtttgcttagtaaatgggtgtataagctcattaatgaagagggagtttggcagaacttacttatgaagaagtatttggctaagaaatgtattacccaagttgataagcaaccgggggactctcatttctggtcagggcttatggctgttaaggagtccttcttctcgtgtggatcctttgaggttcacaatgttccaaggaggactttcatttggaaccttagtattcctttgaaaattaagattttcctgtggtacttatggagagggattactctaaccaaagacaatcttgcaaaaaggaagtggaagggtagcattaaatgttgcttttgtaattctaatgaaacaatacaacacctcttttttgattgtcatttggtgatcttcaaggggacttattgggcacaacagtggtctttgttgcttaaggaagaggatggccacaaattgaatgaatattgcaagatgttggaggtaagggtcatagagttgtatgcaaaatatgggtag

SEQ ID NO: 31503 - DNA, 301 bp, Oryza sativa
  Clone ID: PAT_MRT4530_35803C.1
ataaaaaacatatacacttgtagtgattgtctgattgatcatcagtggctagcaaggtcgtcttcttcgcgggggcgctcatggcggccatggtggccatctgcggcgcgcagctgaacgagtcgaagatgaggttcatggacaggcagcgccagcgggaggtgcaggacagcccgctggacgcgtgccggcatgtgctctaccggcagctcaccggtcgagagaggttccattcgatgatccgccgaccgggcgcgctcggcctgcggatgcatggatgccatgagctgcatgacgtgag

SEQ ID NO: 31504 - DNA, 5355 bp, Oryza sativa
  Clone ID: PAT_MRT4530_35804C.1
atgaaagctaaggtggtcggaggcaagggtgctgatggtggtcgacggttaactttagctctaggagctagtgcaaatctgtggtcacagccggctgttccaaaggaaacctggggagttgcgcagggagaggaagaggatgaaaggaactggtggtcggaggtgttggcagcaacgccatgccgcacttcgccggaagtttcgacttgggataagaaggggtgttctagaggcgggttttctgctccgacaaaatgctatgctgtcgaaccgttgtgtgtgcccaagccacttgcgctggggtcacgcttctgggctctgggtgatgagagctcggaggatgaagttgaccgtgaggagcatcgatcagaggaggaggtgcaaggtggttcggtgctgccggaagagagcttcgtcaagaaggccatcgatcaaggcttcaccgtggatgaaatactcaaggcgggtgaacatttactttgtatgagttcgccgccaaaggtaagttcgtgctccatgaattctgatttcgtcggcaacagaaaactggcaaagaaaatggttgaaaaggtggtgaatcaaaaaacaactacctgtaaaccttggaaagggccgttaccaaaggctagggtttcacagcctttaacctttggggacgtcataggagttgctttgaaaaaaaagaaacgagcgtctgtggcttcgccggcgaggttcacgacagtaaacggtgttaattcgccagttgctgaggagaaccttgatagggccaacaaatctctttcctctatgaggcttcctgttgcgcatacatgcagcataatggagaaggctgcggcggcgccgccggcggcggcggtgaggtctagtttggacgacaatgctaagacattgaagtttctgatgaacctcgacaaaagagaaaaagaaggaaggatagttttgatgagtccagggggacagtgcacgtcggatatcgaggcgtcaaagcggtcggtcgagttgttgtcgaagggcggcagtgaacataaatttgtttcgtttggagtaaggtcgaatttggtccaattcaaatgttgccaaggactgggccgactactctcgcgtgcgggccaacatatgtgggctacagagggagcaactaggcaaaaacgaagcgacgtgactgtagggcttcgcaccacacagttagtgcagacctctcaaactcgcgagcgcaagcaatcggtaggcgaacagagtggcggcgcccagggagagcgaagcaggcgagaagtcaccatggcatggagaggtgaaggcagcggtcgctcggatggccatggtagggagaggggagatggcttctgggaggaggaagaagagttttttggtgcaaggtttgatgctggccggctaggttttgagccgggatatggttttgggcagcagggaaatcatggttgggggcagcaaaggagtggtttcaggccaaggggatcacgtagctttggtccacgccaaggaggttttgccggccgacccggaaggggaggctgggaaaacaatcgcttctcgatgaagcgctttggcgagaggccattgttgaagaatgagggcaggccaggaggaggaattaacaaggcaggaggtggttctaaatttgcagctaagggggaggttggtggaggagtttcagggggaggcggtggtgcaagtgctgggaaagggaaggtgaaggtgggtgatatggaggtagtggtgaaccagatggatggggctgcggtggtgacggacgatccggagacaaattcagaattggctatcttggattgtgatccatctttgtttgttgatcaacatgttcgtgaggacattagcaaaactcaagcaaagttgaaggtgtgttctagtgttgagcatgtcaatcatcgttgcctagtattgaagcaatcaagacctgctgcacatgctgtgggttattcagttgatgggttaggattttatcacattcctcacccacctctacaaaaaagtaagaaagggtccaagacagctttggtcagaattgaggggggctgcctaactaaagagaaggcagtatcacaacttcagagaattatttcgacgaaatggaaatgggagccagttgaacacgaagagaattcttttgttgttcctttcccatcaaagatagagttacaacgagctattgcgtatggcggggcaaatgtgaaagaaaatggagttcttacaggggctcgtctgaagttcgaggagtggaatgagaaggaggaggggtttctgctgccaaaggtgtgggtacgggtttttggactgagaaagaaactaagggagtaccttaatatttgggcggttggttctcttttaggcgccactcaaactatggacatgaaaatgacgagaaagaatgattttggaaggatctttgtggatgttttaaacccgaggattatcccaaaaaatttggatgtagtgattggcgatcatttttttgagctggaaatcgaggttgaaaagatgggttttgatgagaatgggaaggaggtagaaatagaacaacatgatagagatggtgatggtttggaggaaaataaggaagataagcatgatggtgatgggagggatggaagagtaactaaaagagcaaaaaatgatgacatgttagtagatggaaaggagaatggtacaacagaaggaaagtatgatgcagccttgaatgggaaccaatgtcagcacaagatgaaagaaagtgagatctctgctatagctttaggaattttggatgttgcagttggcaaagtgatgaatgaggtttgtgatatggtgatggaggagacagagcagccaatagaggaggaggagttgcctcttgattcaaatctgggagatgaggagaaaggagagcaagagcaagagcaggagcaagaggagttaacattagtagagaataatatagaagaggctttcaaggagagggtggttcgagcagcaaacgttaaggagacagttatgacaccgaaacgttctagtgcaaggctgggttgcaacagtggagtgcactctgtggaaaaggcatggaagaatttagagctgcaacaaggtaacgaagttaattcgtttttgtctttttctaattcctccattacttctagtttacaaaatttaggagttcttctaggtgcctctagtgatgaaattacagattcagtttgtagccttaaaaagacagaggttgaaaggattaatagtagtttaagtctagtaagggataatttagacaagttggatgatggggacagttcagaggaggaagatgatttgaattatcttgtccttggtcacttatgtggtgatctgatggatgaggttatggatgaggaaactagtcacctaagttgtgactctaaaacagttcttaaagcttataagtcaaaatcaagaaggatcttttggaatagcagaggtcttagggacttggctaaattcagatttctttcagacataaccaaggagcaaaagctagactttattgctctcttggagacatgcaaaagtgatttttcaaatgcatgccttaagaacatttgtggaggagacttctatgtaaagtttcatgtgcggaataaggaaaatgccttccaatggatccttgtagcagtttacagggctgcacaagaggagtataaggaggctttccttactgaactcgtcagatcttgtagaaaagagtctttgccgattctaattggaggggatttcaatataattcgaaaccctagcgagaaaaacaatgacaagtatagtgataagtggcctttcttgtttaacgctgtcatagatagcttagacttgagagagctggagctcactggacgaactggaacacatgcaaataaacaacccttgttcaagtttgagcttggatggttgttaagggatggtttttatgatctagtggcaaatgtatgggaaaaggaagctaaaggttcaacagggatggaaagatggcaaaataagatacgcagattgcggcaatttttaagaggatgggcgaaaaatattattggtgcatataaaaaagagaaagctagattaatagaaaaggctgatgagctagataaaaaagctgaggtccaaatactaactaagcaggagttggatcttaagaattttttgaaaaatagactagcgcatttgctaagacaggaagagatcaaatgctttaagatctttacaaaagtaatggccaatagaattgctctagtagctcaaaaggtcattcgtccctcacaaacgaccttcttacctggaaggaatattatggagggagtagtaatcctacatgagacaattcacgagatgcataggaaaagaaagaatagagttattttgaaattggactttgaaaaagcttatgataaggtggattgggggttcttgcaacaagctttaaggatgaaaggattttcaccaatgtggtgcaagtggattgatcaaattgtgaatggagggagtgtggctgtgaaagtcaatgatgatataggaaatttctttcaaacaaaaaaaggtttaaggcagggagacccactttcaccaattctatttaacctagtggcagatatgttagcaattttaattcagagagcgaatgaccaaggaaagtttgaaggggtaatacctcacctaattgacaacgggctctcaattttgcaacctaaggagtgtgggggccttggaatacataacttagaactgcaaaacaagtgtttgcttagtaaatgggtgtataagctcattaatgaagagggagtttggcagaacttacttaggaagaagtatttggctaagaaatgtattacccaagttgataagcaaccaggggactctcatttctggtcagggcttatggctgttaaggagtccttcttctcgtatggatcctttaaggttcacaatggtactcagttgaggttttgggaggattgttgggttggtgccacatcttttgttccaaggaggactttcatttggaaccttagtattcctttgaaaattaagattttcctgtggtacttatggagagggattactctaaccaaagacaatcttgcaaaaaggaagtggaagggtagcattaaatgttgcttttgtaattctaatgaaacaatacaacacctctttttttattgtcatttggtgatcttcaaggggacttattgggcacaacagtggtctttgttgcttaaggaagaggatagccacaaattgaatggatattgcaagatgttagaggcaagggtcatggagttgtatgcaaaatatgggtggaaccttagaaggagattggtgtag

SEQ ID NO: 31505 - DNA, 3186 bp, Oryza sativa
  unsure (1)..(3186): unsure at all n locations
  Clone ID: PAT_MRT4530_35805C.1
atgaaagctaaggtggtcggaggcaagggtgctgatggtggtcgacggttaactttagctctaggagctagtgcaaatctgtggtcacagccggctgttccaaaggaaacctggggagttgcgcagggagaggaagaggatgaaaggaactggtggtcggaggtgttggcagcaacgccatgccgcacttcgccggaagtttcgacttgggataagaaggggtgttctagaggcgggttttctgctccgacaaaatgctatgctgtcgaaccgttgtgtgtgcccaagccacttgcgctggggtcacgcttctgggctctgggtgatgagagctcggaggatgaagttgaccgtgaggagcatcgatcagaggaggaggtgcaaggtggttcggtgctgccggaagagagcttcgtcaagaaggccatcgatcaaggcttcaccgtggatgaaatactcaaggcgggtgaacatttactttgtatgagttcgccgccaaaggtaagttcgtgctccatgaattctgatttcgtcggcaacagaaaactggcaaagaaaatggttgaaaaggtggtgaatcaaaaaacaactacctgtaaaccttggaaagggccgttaccaaaggctagggtttcacagcctttaacctttggggacgtcataggagttgctttgaaaaaaaagaaacgagcgtctgtggcttcgccggcgaggttcacgacagtaaacggtgttaattcgccagttgctgaggagaaccttgatagggccaacaaatctctttcctctatgaggcttcctgttgcgcatacatgcagcataatggagaaggctgcggcggcgccgccggcggcggcggtgaggtctagtttggacgacaatgctaagacattgaagtttctgatgaacctcgacaaaagagaaaaagaaggaaggatagttttgatgagtccagggggacagtgcacgtcggatatcgaggcgtcaaagcggtcggtcgagttgttgtcgaagggcggcagtgaacataaatttgtttcgtttggagtaaggtcgaatttggtccaattcaaatgttgccaaggactgggccgactactctcgcgtgcgggccaacatatgtgggctacagagggagcaactaggcaaaaacgaagcgacgtgactgtagggcttcgcaccacacagttagtgcagacctctcaaactcgcgagcgcaagcaatcggtaggcgaacagagtggcggcgcccagggagagcgaagcaggcgagaagtcaccatggcatggagaggtgaaggcagcggtcgctcggatggccatggtagggagaggggagatggcttctgggaggaggaagaagagttttttggtgcaaggtttgatgctggccggctaggttttgagccgggatatggttttgggcagcagggaaatcatggttgggggcagcaaaggagtggtttcaggccaaggggatcacgtagctttggtccacgccaaggaggttttgccggccgacccggaaggggaggctgggaaaacaatcgcttctcgatgaagcgctttggcgagaggccattgttgaagaatgagggcaggccaggaggaggaattaacaaggcaggaggtggttctaaatttgcagctaagggggaggttggtggaggagtttcagggggaggcggtggtgcaagtgctgggaaagggaaggtgaaggtgggtgatatggaggtagtggtgaaccagatggatggggctgcggtggtgacggacgatccggagacaaattcagaattggctatcttggattgtgatccatctttgtttgttgatcaacatgttcgtgaggacattagcaaaactcaagcaaagttgaagcaatcaagacctgctgcacatgctgtgggttattcagttgatgggttaggattttatcacattcctcacccacctctacaaaaaagtaagaaagggtccaagacagctttggtcagaattgaggggggctgcctaattaaagagaaggcagtatcacaacttcagagaattatttcgacgaaatggaaatgggagccagttgaacacgaagagaattcttttgttgttcctttcccatcaaagatagagttacaacgagctattgcgtatggcggggcaaatgtgaaagaaaatggagttcttacaggggctcgtctgaagttcgaggagtggaatgagaaggaggaggggtttctgctgccacaaggtgtgggcgccactcaaactatggacatgaaaatgacgagaaagaatgattttggaaggatctttgtggatgttttaaacccgaggattatcccaaaaaatttggatgtagtgattggcgatcatttttttgagctggaaatcgaggttgaaaagatgggttttgatgagaatgggaaggaggtagaaatagaacaacatgatagagatggtgatggtttggaggaaaataaggaagataagcatgatggtgatgggagggatggaagagtaactaaaagagcaaanaatgatgacatgttagtagatggaaaggagaatggtacaacagaaggaaagtatgatgcagccttgaatgggaaccaatgtcagcacaagatgaaagaaagtgagatctctgctatagctttaggaattttggatgttgcagttggcaaagtgatgaatgaggtttgtgatatggtgatggaggagacagagcagccaatagaggaggaggagttgcctcttgattcaaatctgggagatgaggagaaaggagagcaagagcaagagcaggagcaagaggagttaacattagtagagaataatatagaagaggctttcaaggagagggtggttcgagcagcaaacgttaaggagacagttatgacaccgaaacgttctagtgcaaggctgggttgcaacagtggagtgcactctgtggaaaaggcatggaagaatttagagctgcaacaaggagttcttctaggtgcctctagtgatgaaattacagattcagtttgtagccttaaaaagacagaggttgaaaggattaatagtagtttaagtctagtaagggataatttagaaaagttggatgatggggacagttcagaggaggaagatgatttgaattatcttgtccttggtcacttatgtggtgatctgatggatgag

SEQ ID NO: 31506 - DNA, 701 bp, Oryza sativa
  Clone ID: PAT_MRT4530_35806C.1
ttcctgcagcccctcatttctggtcagggcttatggctgttaaggagtccttcttctcgtatggatcctttaaggttcacaatggtactcagttgaggttttgggaggattgttgggttggtgccacatcttttggtaagctatatccatcactttataatatagttaggaagaaaaatgttgttgttgctgatgtgttaaacacagagcctcttaatgtctcttttaggagggccatcgtaggggataatctagtggcttggcatgaccttgtgtcgaaagttgtgtcagttaacctttcagagcaaaatgatgtttttagatggagagctaataaaaatggaatcttcactgtaaattctatgtataatgctctcatgtattgtgatgtagttccaaggaggactttcatttggaaccttagtattcctttgaaaattaagattttcctgtggtacttatggagagggattactctaaccaaagacaatcttgcaaaaaggaagtggaagggtagcattaaatgttgcttttgtaattctaatgaaacaatacaacacctctttttttattgtcatttggtaagatctgtttggaacaccgtttttataacctttgggattcgaccacccactagtgttgctaatatgtttggtagttggttaaatggtgttcaatctagactaaagtaccaaattttt

SEQ ID NO: 31507 - DNA, 828 bp, Oryza sativa
  Clone ID: PAT_MRT4530_35807C.1
cagacctgaaactgtatgaacttatattgatgcactcttgtgatgaaatattttgtgctagctcatgtaataagtcgtgcattacataatattgcctcccggtcctatcatcaactttcttcacaagaaaaccattaccttctagagcaaaagctagactttattgctctcttggagacatgcaaaagtgattttttaaatgcatgccttaagaacatttgtggaggtaaagactttttgtggcattggactagaccaaaagggagatctgggggtattcttttgggagtaaatttggaattttttgacgtttctagtattgatgaaggagacttctatgtaaagtttcatgtgcggaataaggaaaatgccttccaatggatccttgtagcagtttacagggctgcgcaagaggagtataaggaggctttccttactgaactcgtcagatcttgtagaaaagagtctttgccgattctaattggaggggatttcaatataattcgaaaccctagcgagaaaaacaatgacaagtatagtgataagtggcctttcttgtttaacgctgtcatagatagcttagacttgagagagctggagctcactggacgtaaatttacgtgggcgaatgctctacaaaatcaaacttttgagaagttggatagggtgcttatgagcatggattgggaagtgaaattcctgttagcaacggtcagagctctgaatagagaattgtcagatcatacacctttattgcttgatgcgggatctgggacgcatgcaaataaacaacccttgtttattgagtgtttggtgctggacgtataa

SEQ ID NO: 31508 - DNA, 405 bp, Oryza sativa
  Clone ID: PAT_MRT4530_35808C.1
atggtttgtatatacgccatcgaatcatatcgtactccaatatgtatggagctagctcaatctatactactactaataatcgatcatcaactactccatcctcatcatgtcgtccatattgagctaaatatagttcatattttcttaattaagcgaatcacactcacacgtgagtataaccatcaaaaagagaatcacacgaagaatagtctactactaccagtccagtctaccgacaccgatggatcgggtgagagatcacatcaacgcacgtatatgctacacgagcgagtgaccggtcgatggctacgcatgcacatgatcgaaattcaagttcgcattttcaattttatagcaaaatttagcattgccatcattggcaccgttgaacataaattgtatggc

SEQ ID NO: 31509 - DNA, 311 bp, Oryza sativa
  Clone ID: PAT_MRT4530_35809C.1
gccctgggaccgagatcccggaggtccaaatgattttaattcggatgggatcgtcattcgagctggagctgcccaagaatcaatctttaattgatcccggagtgaggagaggatcatgtcgtgacatgtggcaagaaatttaattaagctgcttgctcgagcatttttgtgtattagtgtaatggtggtgtttcttctttataatccgtatatactatttaatttccctccctctcttcttcctctggacttgataatcccttgcttataaccacttgtattctttcttctaaaaaaaaaaaaaaaaaaaa

SEQ ID NO: 31510 - DNA, 757 bp, Oryza sativa
  Clone ID: PAT_MRT4530_3580C.1
atggtggtggattcgacgcggatgcagcttgtgatggcgaaggcgacgcggaatcgacctgagacgacggcagcggcgtggatctgttccgcggtggtggcggcggctcggatgcgacatgcggcagctacagcggctccgatgcagtttgtggtggcaatggcgactcggatatggtcagctgcggtggcggcctcacggatgcgacccgtggccggggcagacgcgcagatgcgacccgcggcggtggcggccgcgccgatgctgcccgcggcgacagcggccgcggcgatgctgcccgcggcggcggccgtgtggatgtggcccgcagcggcgacggccgcgccgttgctgcccgcgacggcgacggctgcgccgatgcaggccgcgacggtgtcggtggtgtggatgtgtcttgcaatggcggcgtggatgcggctcggatgatctcctcttcttcaaccttctctatcgagttaccaagacagcaagttcttcaccaccatcttcggattgagtctttggttggctggatttggagaaattcttcctctatgtctcttggcagtaataaccatgcagggtttatcgtttgggttgagcccagattggatttgcaaccttggtttgcaggtttacagtccgagctcctcagattcaacaatgaattcaattcccctaaatgctgtcatttaatcaagtgtgatgtgtatattttaaaaaaaaaaaacaacaacaaaaaaaaaactgagcggcc

SEQ ID NO: 31511 - DNA, 372 bp, Oryza sativa
  Clone ID: PAT_MRT4530_35810C.1
aaaaaaccaccttaactggctcgccatgtattatgttctcaggttcaaacaatacaatctaattgatcatactaatctgcatatttacatatgcactcaaatgtgcccgcatcaaaactcggtgctgcatttagttattagaaagctatatttcaccgatccaacaccgctacgacaacaatgtaattgtgacattttgacagtgtcgatgactcatgtgcctgttgcaaaagtctcctcgaaaccacttaagtagtccttggtcttaatattggaatactgcctcagacttttcttatagagcaccacctgccgtgccatctacagctctttctccggatccagcgcgtaaaacattaccaacaacactct

SEQ ID NO: 31512 - DNA, 533 bp, Oryza sativa
  unsure (1)..(533): unsure at all n locations
  Clone ID: PAT_MRT4530_35811C.1
gaaaaggaggtganctcgttcgggcatgctngccttcttgtcgccttcctttgttcctcttccttctgcgcagatacttttgatccactcctttcctgatgaccgcgccctctgcctattgacggtcgatacccagaaagtagtttccttgggagaagagcagttcacaaccagtatctaaataaggaaaaatgtgctgaatgctgcaaagtggatgaatntgcaagcagtgttacctcggctggttatgggcatatgcccctcagggatgatgcacatgatgatgcactggttncgaaatgatgcagagtgtgtgcacgcagagatgcctgcgcgtttacgtgaggctcttatgcttggcctaacaaccactggccaacagttggtttgcatgaaaaacggaacattatcatggcaaagcacgtgaattcagaataaccatcgtcgcattaatcagaatcttcaaaagcaagctcaaagtgatgcccctggcaccacgagctgaacttggtcaaaaaaaaaaaaaaaaaaaa

SEQ ID NO: 31513 - DNA, 753 bp, Oryza sativa
  Clone ID: PAT_MRT4530_35812C.1
ctgaaacaagagaacttaactattcaggagatcaaattcttaggcctgattctctcagtgatttagtatactagtgccatcgaagttcataatttgaagagagaatgcaagtgctgcccataataacagtcaaaattgacctatacaaaccatgacagctacataaattccatatagagttgccgaactacggaggttacaaggggtaaaagaaacttaaaaaggctaaccaccacttggcagcagtcttttcaagggagcactaacttattttctgatgcaacatggctaagctcagctaaaatccttcagccttctcttcaacacatccaaggacttctttcgagcactttgcactgtacttcggcctgaaaggctcccaaataagctttccggagcatctctaaacttgtcacagatgatagacaccttcttatgatccaaggatccaaaattcttctccctgattacagggttcatgaagttctctggctggttgctgagcagaagatcggtgagctgcctaatttcgaccaggcaatctctgaaagttgtttcttttctcagctctgacaacccagtgctgtggaatttatcatctgcaaattcctctaactttttcaggtcaatgtcaatacctgcggcagcattagcattgaaccttttcacccgatcactaagaaaaactgtcattatcgagtccgagatgtggctgaatgccccacaccactgtgtacgggttcctggaaaaca

SEQ ID NO: 31514 - DNA, 560 bp, Oryza sativa
  Clone ID: PAT_MRT4530_35813C.1
gcgcctctctctctcctccacgccctaatcctctctccttctcacacgccgccgccgatctccttcgacaaagcgccgccagtgctgcctccaccgcggccgagccgtagccacgctgccgtccctccgcctcgccgatctcccgcccccgcgcacctcacaaccacctccatcccgtggtcgccgactctccgccaccttcttcgcgccggcctccctccgccacccacctcacagctacgtccactccgcggcggcggcctccatcgccgactcccctttctccgcgcgcagcggcagtctgcaatcgacgaggcgtctggcttctggatccgtttgcctccgtcggtgacgtggcgtgtcgcctctccacggtggtcctctttgcgccagatcgcacgacgccgcactgatcccattcccctcttcatatgccctgttgtgaaggtttggatatcatgaaaggtcccctattggagatcacttggttttagcatacagtgaactgaccaaatgaactgaggttgatatgagaagctcataagaaagggacaagcttt

SEQ ID NO: 31515 - DNA, 648 bp, Oryza sativa
  Clone ID: PAT_MRT4530_35814C.1
atggcgtgggtgtgctcgccttcgcggccgtcacggggatgtgcgggcggctccggcctacgtgggcgtgccggttgtactgtgctcatcggcgccacacgtcgcggtgcatgccgttgcaataccccggagctgccacacgtcgccgaccgaccacccgccgcgcgcgcagccttacccggtccgccccggccgctgcgcggccaagcgcacacggacctcccgctccgccggcgcatccagcatcacgcgtacgactccgcgaggctcgtcggtttcctcgccctggctgtcaccctcgcggcgctccttgtcctcgcgggcgtcacgctcaccgtcgccttcgtcgcgcttgtcgtcctcagcccgctcctgctcctcaccagccctctctgggtgccgatggccgccgcggtcttcgtctccggggccgcctcgatcatcggctggtgcctcgccgtgggcgcggtggcggccggcacgtgggcgtaccggtacttcacggggcggcatcgtcgacccgtgggcgcacaccgggtggactacgacgtcggcgcgggcaccgcgagcggctggatgggctactacgcgcgggagtacggcgcgcgcccccgcgtccacgtgaaggacgccgctcccggggcgtag

SEQ ID NO: 31516 - DNA, 1632 bp, Oryza sativa
  Clone ID: PAT_MRT4530_35815C.1
gcgccctgcgcgcccgcggtgatcgggcgtccactgccagcgcgcgctcccgttccgccgctcccttcgccggttcgcccgccacgacgcatatggctcctcatgcccgctcccatcgcacctcccctctgccccctcgccttatccgcatccccaaccgccactacaggcagcggcgcagcaccagagagcggaggcggcgggaggagcgggattcggagggggagcgcggccacggaggggcacacgggggcgcaacagggtcgggcgctcggcgccatggatgctaagaagggctcgggggagccggagttcttcagcgagtacggcgatgcgagccggtacgaggtcaccgaggtggtcggcaagggcagctacggcgtggtggccgccgccgtcgacactcacaccggcgggcgcgtcgccatcaagaagatcaacgacgtcttcgagcacatctccgacgccacccgcatcctccgcgagatcaagctactccgcctcctgcgccacccggacatcgtcgagatcaagcacatcatgctcccaccctcccgccgcgagtttcgcgacatttacattatcttcgaactcatggagtccgatctccaccaggtcatcaaggccaacgacgacctcacccccgagcaccaccagttctttctctaccagctgcttcgtgggatgaagaccattcatgccgccagcgtcttccaccgggacctcaagcccaagaacattcttgccaatgctgattgcaaggtcaagatttgtgacttcggccttgctcgagtgtccttcgacgacactccgtccgcgatattctggacggattacgtggcaacaagatggtatcgcgctccagagttgtgcggctctttcttttcaaagtacactcctgcaattgatatttggagcgtcggttgtatatttgctgaaatgcttatgggaaagccactttttcctggaaagaatgtgattcggaatgagaaagctcgacgatatttgggcaacatgagaaaaaagcctcgagtgcctttttctcagaaatttcctggtgcagacccaatggctctccatttgcttgaacggttacttgcttttgatcccaaggatcggccaactgctgcagagttatgtgtcaaggccttaacagatccatactttactggattggcaaattcggaacgtgaacccatagcacaacccatctcaaaactcgagtttgagtttgagagaaggaagctagcaaaagatgatgtccgggaattaatttacagagagatattagagtaccatcctcagatgatgcagaaatatcttcgtggtggggatcagtcaaactttttgtaccccagggaaagagttgttaggaatggtgatgaacctgatccaactgcagattactgcataaagttgcatgtaggtgagcaaccggggcactcatcagtgacagatggactgaacaagccactcttaagtgctcgtaacttcctgaagagcgaaagcatcggtgcttcccagtgtgttgtcataaaagaaaagcgagaaaaagatgaagaatctatgtcagaatatatgaatgaagcagctgatggggtgccgcataagattgctcaattgaaaacataa

SEQ ID NO: 31517 - DNA, 942 bp, Oryza sativa
  Clone ID: PAT_MRT4530_35816C.1
atggtggtgaaaagtgaaaacataacttctccaactggtagggagatagatggcaagtaccttgatgctacagagaaggtttgcaggctactgcggcaagagtacccaactattgtgtggcaaccttgtgtagctcacacaattaacttgattcttaaggaggttggaaaaatgccagatcatgacatggtgattcagagtgctaggaaaatttgcagatggttatacaatcattcgaagcttcatgctatggtgacaacaactataggtggtgaattggttaagtggaatgctacacggttcggcacaaactacatgttccttcagagtttccttaggaagcgagatcagttcatgaagtgcatggcttcctctagcttcatgcaaagcgaattcagtggcacagcggaagctgcagcactaaaccctcggatgcactacgcgtacattgcaagtgcgaccgtcttccaagacctccgtcaggccttcgagcggatgacgaacattgaaatggttgctgccactttgctggaggttgagatgtatcgatataatgcaactatcaaaagtccgaatgctttcgacgtattcaaaattaaaatgacatgttactcggcatttgcagcacaatggcggtctatgtttacatcgggcatgccgaatttgaagaaacttgtgttgcgtttgattgatcagtgttgctcttcaagtggatgtgaatggaattggagcacacttgcatccatacatacaatgatccgtaacaaacttacacacaacaagctcaacaaacttgtctatgtcaactacaaccttcgccttcaaattcagcaaacaaatacccaagttaggaaggacgatgacgatccccttcaaaggccagcggacctatcattctacgacactaacaatcagattagctacacggtcaaggagtgttga

SEQ ID NO: 31518 - DNA, 255 bp, Oryza sativa
  Clone ID: PAT_MRT4530_35817C.1
atgaagcctggaatatatctgggcgggactgacgtgccaactccaggaggtagcacgccggctccggctagggacgagtgcctggaggctctcatcaatccgacgggacggggcgaggcggggtcggggcgcccctgccctcggggccgaaacgggagcggcccgacccctcggggagacaaaaggcggggaggtctcgtcaccctcgggcccgacccgggccacgtgggtgactgcggctaccctaacctctag

SEQ ID NO: 31519 - DNA, 264 bp, Oryza sativa
  Clone ID: PAT_MRT4530_35818C.1
atggcgcgccagatgacggagcgtggggctcctcaccgagagaccgcgcaggcccccctttgccgcaagctgcatgtctgcccttcttcatacaacgacttccttgcaatggttgcgatgaagcctggaatatatctgggcgggactaacgtgccaactccaggagctagcacgccggctccggctagggacgagtgcctggaggctctcatcaatccgacgggacggggcgaggcgtgtgtcaggccgcctgttgccacctaa

SEQ ID NO: 31520 - DNA, 1592 bp, Oryza sativa
  Clone ID: PAT_MRT4530_35819C.1
cggaattcccgggtcgacccacgcgtccgtaaaattatgcagcaccccttcacaccccattcctcatagccatctcctctcctcttgaccccatttcggtgcttaaccaaactcaccataatatcagttcatccacaacaatgtcggcctactgcggcaagtacaaagatgagctcataaagaatgctgcctacattggcaccccgggcaagggtatcctcgctgcggacgagtccactggcaccatcggcaagcgcttcgccagcatcaatgttgagaacgtcgaggataaccgccgtgccttccgcgagctcctcttctgcacccctggcgccctccagtacatcagcggcgtgatcctcttcgacgagaccctctaccagaagaccaaggatggcaagcccttcgtcgatgtcctcaaggagggccggtgccctccccggcatcaaggtggacaagggcaccatcgaggtcgccggcaccgacaaggagaccaccacccagggccacgatgacctcggcaagcaatgcgccaagtactacgaggccggtgcccgcttcgccaagtggcgtgccgtcctcaagatcggacccaaccagccctcccagcttgccattgatctgaacgcccagggccttgcttgctacgccatcatctgccaggagaacgggctggtgccgatcgtcgagccggagatcctcgtcgatggccctcacgacatcgatcgatgcgcgtacgtctccgaggtggtcctcgccgcgtgctacaaggcgctgaacgagcaccatgtcctcctcgagggcaccctcctgaagcccaacatggtcaccccgggttccgacgccaagaaggtggcgccggaggtcatcgcggagtacaccgtccgcaccctccagaggaccgtccctcccgccgtgccggccatcgtcttcctcttcggtggacagagcgaggaggaggcgacgctgaacctgaacgccatgaacaagctcagcgccaagaagcccgtggtcgctgtccttctcctttggccgtgccctgcagcagagcacgctcaaggcctgggctggcaagacggagaacgtagagaaggccagggcggccttcctcgtcaggtgcaaggccaactccgaggctaccctgggtacttacaagggtgatgctgtcctcggcgagggcgctgctgaaagcctgcacgtcaaggactacaagtactgatctgcatcaggcgctggcctgctatggcttggctacctgatcgatttcccattctggggccgttacataatgcggttttgatatctagaggctctaacaggattcacaatttcggatcggaatttcagaatttttccctttccgatagatcgaaccctggagcacaatatatctgtggttatctaaaagccttgtcttaataatccagaacctttttttttcttgtaaaatatttgctgatgaacatcagctggcccggagtttttatttttatcaatcactttgtaactgtctgatttgcccggtgctgtgtgattttgttgaatgaaattaacttcacttcaaaaaaaaaaaaaaaaaaaaaaaaacaaag

SEQ ID NO: 31521 - DNA, 478 bp, Oryza sativa
  Clone ID: PAT_MRT4530_3581C.1
cgctaatctggccgtttccatcccaggtcccagctgcacattggggttaattctaggattaagcacttacactttataccatgtgcagtgtttagctgtttcttgactcggaatatttttgaataattaaaaactgctggtctggtgatagttaacaactgctatataactttagattaacttcaagttaagttagctaataataactgggtaaaagtttatgggaatgattgggtttcaccattttgtctatattggtatattctgctgtcaaatctaattgttttccattctatgaaatagtacttctatgttgttaagtatgcaacctgacaaaggattgcttgagtgaaattccttacacagcccctaattttctgagtaatttgttactttgtaaatcttgctattatagcttctatcaggaacattacaacttacatcaagaagaattttttttttgctcgttctttgactt

SEQ ID NO: 31522 - DNA, 110 bp, Oryza sativa
  Clone ID: PAT_MRT4530_35820C.1
agggtcgatcgcggaccgctgtgcggtcatggcagcagggacgcgctggtagggcgggttacaaccaactggtgtgacggacctggccagcacaggtatactagctgggg

SEQ ID NO: 31523 - DNA, 1398 bp, Oryza sativa
  Clone ID: PAT_MRT4530_35821C.1
atgggcatgctcctgctgagccggctcatgcccacccggcggccgcgccgtcgccggccacacaaatcccgccgcagcggattgattgctaaatcggctaaaaggaagcgctcacactgccagcaagatgatgatgattctcagggtggtaaaaggatgagaaattcggtgccaacccttccagaggacatctggtgtcatatacattccctgatgccaatgcgagatgctgctcgtgttgcatgtgtgtctcgtgcctttcttagttcctggagatgtcatcccaacctcacctttaacgagcgtacactgggattagatgaatatgtttttgaaacagatttcatcagcaaagttgaccacattcttgaaaaacactctggcattggagtgaagacattcaaccttcaagtcccctatgagctagatgtgtgtgatcatgtcgatcattggcttcagtttgctattacaccacggattgaagaactcaatcttatgctgtatggaaccgtgcaagagtacaacttcccatgctcacttctatctgatgggattgcaaattatattcggtttcttgatcttggccattgcgccttccgtcccacagtcgagcttggttcatggagaagccttaaaaggctatgtttgtcttttgtgcatatcaccggggatgagttagggtgtgttctttctaatttgtttgctctggagtggttggaactcatatattgtgataagatagctagcctgaagataccttgcacactgcagcagctcagctaccttaaggtttcagaatgcagcaggatgcgagttatagagagcaaagctccaaaagtatccaatttttacttcactggatacaaggtggtcaacacaccaatgctaactaccaaattcctctacctgaagtacttgagtatttctctctctggattgactgtttcgccgtcttatgattatttttctctggtttcctttcttgatgcttctcctttcttggagactttcttcttggctatatctaaggaacaaatgaagcgtgaatcgaaattcagagattcctcacatatgaggcagattcaagaacaccgtcatgagcacctcaaaagcgtgacgattattggtttctgctccgcgaagagcttggttgagctaacatgtcatatcctcgagaacgcagtatcacttgagtgccttacactgaacacaacccttggctttgctagccgttctgaacacagtcctggtacatgctttccaatgggcaaggctgttctcatgggagtacctaaggctctctcagctatccagacatacattgtggggaaagttccctccacagttagattaaatgttatggaaccatgcaacctgtgcaatggtattgggcattag

SEQ ID NO: 31524 - DNA, 294 bp, Oryza sativa
  Clone ID: PAT_MRT4530_35822C.1
ttattctcaagcatgtgcatatcaacaaaataccaaataccaagtaacatttagcgatccatttctgaaactatgtcgatacaaagccattttgctcatcaaattgaaacagcaaatctctacgcggcggccggcgtccgccagcacggctagtgcacctacctagggagcgggcgccggcgcacgccctcggccgctacgcgcacggcgcgcccgcagccgccgccgcctcgcgcacggcacgctacgcgtaccgccgacgcagcctacgcgcgtagcgcccataggccgccg

SEQ ID NO: 31525 - DNA, 381 bp, Oryza sativa
  Clone ID: PAT_MRT4530_35823C.1
attcttaatttttattctgggaaaaaataccccccctttttaaatttaaaacctcaccgtttgagccacaaccccaaaattttcaggcccttaaaaccccgaatccccatcccccccccataacaaaaatggccaaacgccccaaatccaattaagctcttgaaaacttgggccccccgaaaagggggcccaataacaaccctggcccttaagcgaccccccccattttgcccttgccggcgttggcccccaacggcggcatttttgcctcagccttaaaaaactcgccctcacccattcttatgcccaccttttgcctcccggggaacctgccgcccaaagggttggggcccccaaggtttaaacccggggtccgggggg

SEQ ID NO: 31526 - DNA, 302 bp, Oryza sativa
  Clone ID: PAT_MRT4530_35824C.1
aacacacaaaggagctgtttttttttttttccccccacaaaattaacaacagggctgggagacttttacaaaacattttacagatcattagttaattaacaagcaaattaaagcagagccccaatccaaagacaagcatgcatgcagttatatatccagccaaagagctttcctacttaatgaaaccctgggccattttgaacagcccaccgggggggccgccgttgccggggtttttcttcccggcggctttttttttcattagggactgggcccccttaatgacgtggtggagaccgaac

SEQ ID NO: 31527 - DNA, 240 bp, Oryza sativa
  Clone ID: PAT_MRT4530_35825C.1
atggggaaggtggcggggccggagaagctcactggctcatcctaccgcccctacccccacctcgcttctcctccacccaacgctgccggagagaacagagcatcaccggagatgacgacagatctggtgttcagctcgccgcccctcctacctcgcaggggatgtggagctcggtgggacagtgtggaagagttcgacgacacagagggcgagctcaatggcgcggagaaggaaaggtga

SEQ ID NO: 31528 - DNA, 570 bp, Oryza sativa
  unsure (1)..(570): unsure at all n locations
  Clone ID: PAT_MRT4530_35826C.1
acagatatctaagcaggtgctccacgagaatgataacatccaaggcataggttcaagatccatcccataaatattgggcnagcacaaactcatgagatagtgacagtgaccactcaagaagctatggacatggcaagaaggttggcaagggaagaaggattgctcgttggaatatcttcaggagccaacgcagctgccatcttgaaggttgcagcaagggaggagaacaagggaaagatgatcgtgacgatgttctccagtggtggggagagatacctgaattcggagctatttgctcaggtgaaggaggaatgcatcaacatcaacaaggcattctgctgacatgtgtaggggtgatcatgcagtgtaatcttcaaggcttcattcttggtggttgttctactctaatattgtaagaagcttctgtacattggtgttattactcttagattagaatcaattgtatggatgttcagatatgcaaaatgttacctgttcctttgctgaaaaaaaaaaaaaaaaaaaaaaaaacaacaaaaaaaaaaaaaaaaaaaaaaaggggcctcgtgc

SEQ ID NO: 31529 - DNA, 1357 bp, Oryza sativa
  Clone ID: PAT_MRT4530_35827C.1
ccacgcgtccggattagtagtattagtagtcgggattaggcagtaatggcggcgacgagcgccaggagcgtggcgtggcaatggttggccgtggcggcggcggtggcggcggcgtctctgatcggcggcacgccggcggaggcgaggaggggagggaaggagtccatcggtttctacgagctgcgtcggggcgagttctccgtcgtcgtcaccaactggggcgccaccatcctcaccgtcaacctccccgacaagaacgggcacattgatgacgtcgttcttggctacaaagatattggatcttacgtgaatgacacgacctacttcggggcgctggtggggcgggtggcgaaccggatcgccggcgggaggttcacggtgaaggggcatgcgttccacacgtacaagaacgacggcaagaacacgctccacggcggccaccgcgggttcaaccaggtgttctggtcggtccgggagagggccaccggccacttcccctacatcaccttctactaccggagctacgacggcgagcagggcttcccgggcgccctcgacgtgctcgtcacctacaagatcgacggcgactactccttcagcgtcaccatgtacgcccgccccgtcgacgacggcaagcccacgccggtcaacctcgcccagcacacctactggaacctccgcggccacggcaacggcaccatcctcgaccactccgtccagatcttcgcgtcggcggtcacccccgtcggcgccggcctcatccccacgggagccgtctcgcccgtctccggcacgccgttcgacttccgcgcccccgcgccgcccggcgcgcgcatcgccgacgtccccggcggcgggtacgacatcaactacgtgctcgacggcgaggccgacgggcagggcgtgcgcaaggcggcggtggtgagcgagcccacctcggggcgcgtgctggagctgtggtccgaccagcccgggctgcagttctacacgggcaacttcctcaagggcgacgagggcaagggcggcgcgcgctacgtgaagcacggcggactctgcctcgagacgcaggactacccggacgccgtccacaacgccaagttccccaccgagatctaccgcaagggccaggagtacaagcactacatgctctacaagttctctctcgccaagaagtagattattaagacgttcgtcgtaatcaaatcaagaattcaagataattattagcctacatggtttttgtgagcgattatgtatcttagattatgctagtagtacacttaggtgatcggtatgaagcttacgtgattttagatgatgattaacgtgccaaataattcgcaaaaaaaaaaaaaaa

SEQ ID NO: 31530 - DNA, 2530 bp, Oryza sativa
  Clone ID: PAT_MRT4530_35828C.1
atggccacacaactttgcaatgaacaagaaagtgtagacaaaagttccacctttgacgggacaatctcgactgctggtgacggagggtgtgactctctctcgggcacgacattaacgcagtgggctgcagctttttcatgcgacaggaagccggccaggcactgtgagagaattgaagtgcccccatcgatttgcgagataattacggaaatgccactagctccggggccatcgatgggcccgccccggcccatccggcccacgcgacgcagcgccgagaccaacggccagccacgcagcctcctcgacccgtgtggcttccccttcgctttacgcgcgcggcgcgaggaggcgggggagggcgaggcgacgcgcgggaaaaggggggaggaggctggagggagcaaagcatccatctgcggcgtcggcgtcggcgtcggcgacgccatgggtggctgctcctccgccttcgcggtttccaccaggatgatccgcttcagccgcggccgcgtgccggcggccatcctccccgtcaccagcaacgacgagccctgctgcagctgctcccctgaaaacaacaacaaaaacaacgacggcggcggaggcggatgcgacggcggcgagcaccagaaggggaagtcgtggaggaggtggcagtacaggagatgcggcggcggtggcggtggcgggggcgggaggaagaacgccatcctcggggacgcggccgacgtgaagacggcggcggggttcgcggagaggtacaggctgggggcggagctggggcgcggggagttcggggtgacgcggcggtgctccgacgcggccaccggggaggccctggcctgcaagacgatccgccggaagcggctgcgccggtgccgcggcgacgccgaggacgtgcggcgggaggtggagatcctccgccgcatctccgccctcggcgccggcgccgactccgtggtgcgactccgcgacgcctgcgaggactccgacggcgtccacctcgtcatggagctctgcgagggcggcgagctcttcgaccgcatcttcgcccgcggccactacaccgagcgcgccgccgccaagctcgcccgcaccatcgtcggcgtcgtccagctgtgccacgagaacggggtgatgcacagagacctgaagccggagaacttcctgttcgccaacaagtcggaggactcacctctcaaggccatcgatttcggcctctcggtgttcttcaagccaggagaaagattcacccaggtggttgggagcacatactacatggcaccagaggttctcaacagaagctatggcccagaagcagatgtctggagcgccggcgtcatcctctacatcctgctctgcggagttcctcctttctggggagacaatgatgagaaaacggtgacggcgatactccagggtgggatcaacttccagagggagccatggcccaaggtgtccccgcatgcaaaggaccttgtcagcaagatgcttgaccccgatccttctacccggttgacagcaaaggaagtccttttgagattgtttctcctcctgcaaaaaacagagcatccttggctcaagaatgccgatagggctccaaacgtttcgctcggagagattgttcgatccagactgatgcaattctcagccatgaataagttcaaaaagaaggcacttggacatttgccgatgaaggtcgttgccaagaatttaccggtggaggagatggataaatatactcagatgttccacaagatggacaaagacaacagcggtaatttgacgcttgaggatctgaagttgggcctccagataaatggtcatcctgttccagagacagagatcgaaatgctgttagaagctggtgacatagatggaaatggaacattagattgcgaggagtttgtaacggtattacttcacataaagaagatgagtaatgaggagtacctacctaaagctttcaagttcttcgacaaagatggtaatggtttcattgaaatggaggagttgatggatgctttaggtgatgaactgggccctactgagcaagtggttaaagatattattcgagacattgacactgataaggatggtcgcattagctatcaggagtttgaatcaatgatgatatctggatcagactggagaaatgcttcccgacgatactcaaaagcaaatttcagctccctcagtcgtaagctgtgcaaaggaaattcatgaaacagaggaggatttgagcaacagttacttactgagtgcatcaagcaatcaactaaaaacaaagcatcagtgggcagcctaaaatataaaaccagattactgggtagaggacatcagcagggtgaaaggagattttgtatttcagttgcatagatgacaaggttcatcaagcagcgagccctatagcatcgtcccttgtaatggaatcaagacattccatatttaggaaatatattcatgacttagcataggcacatgtaagggaagcgccgacatgcaatccccttaccaaatgttgatgttt

SEQ ID NO: 31531 - DNA, 372 bp, Oryza sativa
  Clone ID: PAT_MRT4530_35829C.1
tttggtttttttttttttttggttttttttttttttgtcctttttttttttttttaaggagaggcgggggatggattttccttcaaacctggggtcaaaacacgctcgtccaaatcaggacactgtccattttaccagaccatgatgatgattgggttaagactggattcctaaaaccctacctaggatgaagtttgggttttacattcaaacccaaggggtccatgcgggggggaaaatttttctttttttttacctaggcaggcctgggggaacaccggcactaaaaatttgtgggggggggggacctggccaggaagagacaaaaactccttgggggccctaccatcagtgggcggaatcccagggggg

SEQ ID NO: 31532 - DNA, 249 bp, Oryza sativa
  Clone ID: PAT_MRT4530_3582C.1
atggaggccgaaggtgatgatgaagaggaaggcatgtcgattcagctccgggcatgtcaacgatcgatcgaggatgcactagtgagtgaagatcagagaagaagaacagatctagccatcaccacctacctattggcggtcggattcgacaaagtcaaggatagtggtgtagagtctccccgcttctcacctgagtatccaacacttgctgctgtgaaaaagtttgtccgcccgccactgttgtgctag

SEQ ID NO: 31533 - DNA, 414 bp, Oryza sativa
  Clone ID: PAT_MRT4530_35830C.1
acgccgccgtatattgacatcagagattagcctaggcatacaccatccggcacctataggggccggcaagagggatctagcaccatctctgatctcgccgagtacggattcaaggaggaagactaccttgtcgtcgactatgagttaatgaataaagagcaacaccggcttcggccaacaggatgtagggctattacctgtaagataaggggcccaaacctgtataaaaatccatgtctccatcttttttatctcaatctcgcatataccctggtaccaatgatccccataccatccaaatatcgtagtcgtgatatcaaacgtcgacaattggcggaggtattgcatcacgagcaaaaccctagccgtcactcccctccccgagcaaaaccctagtcacgcacgggtgctagc

SEQ ID NO: 31534 - DNA, 427 bp, Oryza sativa
  Clone ID: PAT_MRT4530_35831C.1
attaatccaccttccagcaaggggcatagatttatattggttgcaactgattatttgaccaagtgggtagaggctattcctttgaaaaaggttgatttaggatatgctatacaattcgtcaaggagcacataatctaccgatttggtatttcccagactattacaactgaccagggatcaatctttgtgtccaatgagtttgttcagtttgctgatagtatgggtatcaagttgttgaattcttcttcatattatgcacaagccaatggacaagccgaagcatctaataaaagtttgatcaaattgattaagagaaaaacatctgattatccttggcagtggcatacacgactgaccgaagcattatggtcttatcggatggcttgtcatggatcaattcaagttcctccttataagcttgcatgcc

SEQ ID NO: 31535 - DNA, 865 bp, Oryza sativa
  Clone ID: PAT_MRT4530_35832C.1
tttttcgcttttttcgctcttgatgtacagaagggcttcggcttcccctacccaggttctcgtggcgcacctgagcgcgaagcggtctgccttggagcggctggacgtgtaccgtcttcgacttccgaaggccgaagaggaccttcaccataaagaggacaaacgccgagtcgtgccggacgccctgaagaaggcgagcgcagagaacaagtcccttgtgggggaaaataaatctctctgcaccgacttggagggggtgaacaatagggccgccgaaagggagaggcagcttgctatggccgaagaaaaagtcaagtctcttgaggcccggcttggcccagccgaagctgctgctgaagctttggcgccgacgacagagtctgccaaacaggcttgctatactcttcggctggctctcaactaccttggggcgcatgtagaaggcgctctgggtgaagatggatcagcgttcgacttctctgagtggacgcaggatgcggccggctcagttgtcgaagcggctggcgcatacggcgactgctgcgcacgagttgccgtgggcttcatgctcagcattcttcacgaacatggttgttaccatgttgaggactttccccaaaccgtgaagaaggattggcccgaaagttcccaatccgtcacgtttgctttgaaggcctttcggaagaacttctgggaaagcggcggtaaggatggggcgaagacccggcttcgcgagcagctggagaaaatagcaagggccgaagatgccactgccgccaacactggcgaagaccccgagccgtcggggccggctgttggccgtgagggccaaggcactgaaagccgacaccaccctgaagtgtga

SEQ ID NO: 31536 - DNA, 138 bp, Oryza sativa
  Clone ID: PAT_MRT4530_35833C.1
gggaaatgtccaaagtgccctccaaccgtcattgggatgcaatccaggacatccacgccgaaccctagcctcaacggtggagatgggggttcgaccgaaccatgggctggcccaaaccagcccatcttcggctggtga

SEQ ID NO: 31537 - DNA, 344 bp, Oryza sativa
  Clone ID: PAT_MRT4530_35834C.1
ggcgacttgagcttggggatgttgctgagcgaagcgaacattcgggcctttctggccggcattaacctggtggaggccaagaaaggggggcttaacttggcattgatggtgccccttcacttggggaacgaacaaaaaggggtgggccccccccccaagtttcccgggccaataaccggaatcgggggctttccttgttgccccaagttggccgtcaagctctttggggggcccccccccctcggcctccttggccttgaggttttcgttttcctgacgaagggcctccatggggctttccttttccgcaacggggtcctgcagcttggagttttcgccggggg

SEQ ID NO: 31538 - DNA, 501 bp, Oryza sativa
  Clone ID: PAT_MRT4530_35835C.1
ggagtgtcactagctctccgattaccaaatctcaaagtcctcctgttgcgcgtgggccagcagagaataagaatattgttgataagcaaaggctagaagaagaaaagaaaaggtggggagtatctactttgctatgcggagtctgcataccatctacaaaccaaactgtttactatttattcgcttccctattcctcatttatgttgacagcatgctattcattaatcaacatttttaacatcctgttaaaattatattcatctaactgttgtttttaccagaatatatcttgaggtcagctctattggcaatctgtgctctaaatacattatttaagttcttttatgaagaataatgttttttttaaatgaccttcttgattatttaatctgcaaaacttttctttaatgaaacgactgcacgtcttgcttccaaattgttatggtctcttgttatccttgcatataactgttggcttaagatgttgaactctagctctg

SEQ ID NO: 31539 - DNA, 1720 bp, Oryza sativa
  Clone ID: PAT_MRT4530_35836C.1
aaaagcttgcagatgtagatcacggcaaatgatgacatcacatgtacatctcatctacctcacttccaaaaaacacacaagaagcttattgagcacgttgtacatctgaaaatgaaacgaaatggtaactattgcgattagcaaaccattaaacacatgtcatcgatcgatcgatcaccctgctgatggtgtcacgatgatacaggtggtccggtcccacctgcagtgactgtacaactgatagtacattggtttctttctcagtgtacatggctcttcttgcagtcagctgcttcctcctcgccgccgccgtcgcgcggcggcggcgcgacgaggtcgccgcagtcgaaccacatggtgtcggcgagcaaggggaagacgaagcggtagaagatccagtcgcggaacagcttgacggcggcggcgcgcacgccgggggcgctggtgctcccctgctggacgtagcccgacaggtacgcgccggcgacgatccacgcggcgcggccgcggcgctccgcgacgtacgccgccacgccgtcggccggcgacggcgacggcgaccgagacgacagcgcgcgggcgagcacgatggcgtcctccagcgcggcgcacccgccctgcgccatgtcgggggtcatcgggtggaacgcgtcgccggccaccgtgacgggcccgcgcgcggcccggcccgtgaggatggcccacggggcccggtagagcagaggggcccacgtgaggttgtccgggtccgagtggcgggccacgtccaggaactcctccggcaggtggcggcccaggttgtcagtcacctcgcgtaggatcttctccggatcgccggcagcttctctctttatcatcaaatttgaacaaatttttattcgaggcatttgggctggcttgcctgcggggacggtgttgttgacgacgaaccagtagatgtcggtgtcgctgatgggcaccatgccggccctgaggccatgggagaggaactgcctgagctccttcctcacgccgtggccgccggggtacacggcgaggccgcggacgcaggagcggccggagctcgccggctccgccatgcccagccaccgcgccaccgccgagtgcacgccgtcgcacccgaccagcaccctggaccggatcaccgtgccgtcgtcgagccccacgacagcgagctcctcgccgccgccgccgccgccggcgggctcggtgccgatggaggcgagcctggacgagaaccggatggtgcccggcggcagctcctccgccatcgcctccagcagctccctccggtgcaccggcctcaccctcacctcgccgctcctgctcttgtgcccaccaaaccgaaacacctgcgtcgctccggactcgaggttggtcaccacggatgtttcgtagggttggtagcgaggggtgagcttgtgcgcgatgccgagcgcgcggagcgcgaaccagccgttggggaagacggtgagcgcggcgcccgtggcgcgcagctcggcgtgccgctccagcaccacgacgccaccgccaccgccgccgtcccgcgccgcaaagcccgcccgccgcagcgccagcgccgtggcgagcccggcgatcccggcgcccacgaccaccgcctccacgtcgatgacgtccttcgtctcgccgccgccgcccaagtcgcccatgtcacctagctcctgaaaatttgtcacgcacactgatgctgcgaatgttg

SEQ ID NO: 31540 - DNA, 230 bp, Oryza sativa
  Clone ID: PAT_MRT4530_35837C.1
cacgcatgcacggcgcgacgtaaagtcaaggctatggcatctcttagttggccggccccccctttatttttttggggggtttttttttttaggggtataactgacctgacatagattaagctgaaccaagggaaccaattattattgcactaattaagcaaaaaaggaaataaaaacaggtacaaaattggtttgaccttaaaaaaacaaaatttcgaggcacggctagc

SEQ ID NO: 31541 - DNA, 409 bp, Oryza sativa
  unsure (1)..(409): unsure at all n locations
  Clone ID: PAT_MRT4530_35838C.1
aggctcaagaagatcaggtaaccatccgttgtgttctgaggcactactggggcactccgttgttgacgctgggcagacacaccatagaccaccggaaggaggggctaagaactgttgcgatgctgttccaagaagacgataagacctaagatacactacccgagtacttgatgaagacgtttcgcttgggctgaatgttttgaccctaggataatattttagccaagtctatggaacctttcgtaatcgtatcttgaagagtctctttgggaactaagataatttacttttcttcgcaaactattcactattgactccttgtttattncttttctccactttcttctacccacttaaaactattcagtatcgactcccttgtttaaaccaaaaaaaaaaaaaaaaaaaa

SEQ ID NO: 31542 - DNA, 525 bp, Oryza sativa
  Clone ID: PAT_MRT4530_35839C.1
tctcacctctctcatctgctgcctcgtgatctctgcgttgaaagctcgttggtttcttcttctccctatggcggtgcgtagccagctagccatgttcttgggttgtgaatttttattagcagggtaaattttaggatttgatttttaagtttgttccatcttgtttggagtagtgatctctttttgagatttatgacagctttgacaagggaaatgaaatcggagattttattagtatgtggtgctccaccacgaagtaaccagttggcccttattttgtctcggtctattggtccaagcggactaaaagacaaccaataactcaaagaaaattcccattcttttgggttagagaatattcatttctgtgaagtttcctggtgcttcttcagttgtgattcattgctgttctgaatgaaattgaattcttaaaaaagtttaaaccagtattattattaccaataacttactgacatgagggaaaagattggatttcttagcttcttgatttcaagaacgaattcc

SEQ ID NO: 31543 - DNA, 1380 bp, Oryza sativa
  Clone ID: PAT_MRT4530_3583C.1
atggcgtccaccgccgccggcgacgacttccgggattggtccgggctgccggaggacctcctgctcaccgccatggaggcgatgcaactccccgacctagtccactccggcgccgtctgcagatcgtggcactcggcgttcgccacgttccgccgcctcggcctccggtcgccgccgcacccgccctgcctgctgtacgccgccgccgccgccgccgacaatgccgtccgcctctactcgccgtcgtccaccggcgcccacttccgcgtgcccctcctcgacgaggaggcggccagcggcgtcgtcggttcggcgcacgggtggctgttcacaagcgacagggacgccaacccttacctcctcaacccgctcaccggcgcccgcgccgcgctcccgccggccacggcgctcgggcgcgtcaggggcaggaggttcgtcttctcccccggcgacggcggccgccggggcgtcgcgtacgacgtcgacttcggccggcggccgggcggctcccccgacgtcaggcaggtcatggcgcggcgggcgaggcggtggatgtaccgccgggtggcgatgtcggcgagcccttccgccgccaccggctgcgtcgtcctgctcctgcacatgccggagcgggagctgtccttcgccaggccgggcgacgagcgctggacgccgctcgtcgacggcggcgtctgggccagccacggcacctccttcctcgacgccgtccacaaccccggcgacggcctattctacgtgctgcaggactccagccccggcggcgacaccgtggtgcactccctcgacctcaccgcgccgccgccgccgccgtcctccccggtggccacgatgctcatgttcgcgacgccgccgcgtccgtgcaaccaccacctcaagaagaccatgtgcaggtacctcgccatcacgccgcagcacccgcagcacgtcgccggcggcctcgaattcctcgtcgtggagcggaggtggcgcaggtcggggagcgacgacgacgcgagcacgacggagatgtacgtcgtcatgctcaggcctctcgacctctacttctacgagcaggtgagcctgcccggcggcgtggggggcgacctcgcgctgttcgtcggccacgccggcgccgcctgcctccgcgtggaggactaccccatgtttcgcggcaactgcgcctacctcaccgacgaaagcgacggcgacggcgaccacgcgaacccgccgtcgtggaagcggctggaccttgctctgtgggagttcggcgggagcaactaccgcgggaggttgacgaagctgcgggacatgtggccactccaccatccatggcaagataattccccgcctcctatttggtttacgccatcgctagattag

SEQ ID NO: 31544 - DNA, 1755 bp, Oryza sativa
  Clone ID: PAT_MRT4530_35840C.1
atggggacgctgccggtcaccatgccgcctccgcagtcgccggagctgcggtcgctgcggtcgacgctggaccagcgcggcgagctgagggccccgctgctctcgttcgactggggcttccccggcgggatcgcccgctgggagggggaggagggtcgcctccggcgggcggcgggcgccgcgcgcgccgcggccacggagatgtgggcgttcgcgcggaaggacccgcggaagcccgtgttcgcggccaaggtggcgacggcgctcgcgctcatcacgctgctcgtgttcctccgcgagcccaccgacctcgccaaccacgccgtctgggccatcctcaccgtcgtcgtcgtcttcgagttcagcatcggtgcaaccttgagcaaagggctcaacaggggattgggaactcttactgcaggagggtttgctctagcagtttctgaattgtcctcaagcatgggaaattttggcaacgtgattctgatcatatgcacgtttgttgtcgcattcggtgcgaccttgacaaagctgcaccccaagatgaagccttacgagtatggatttcgtgtcttcttgctgacattctgctatgtcacggtctctggatacaacacggggaaattcatcgcaacggctataagcagatttttactgattgccattggcgccgctgtcagtcttgcgctcaatattggcatacatccaatctgggcaggggaggatctgcacaatttagtggcgaagaattttgatggcgtcgcaaaatcgttagaaggatgcgttgatggatatctgaaatgcatggagtatgaaagagttccatctacgatactgacgtaccaagcttctgatgatgatcatctgtatagcgggtgcagggcagctgttgaatcatcagctcaagaggaagccctgttaggatttgctatctgggaaccaccacatggcccttacaaaatgatgaaatatccttggatgaactacactaaagttggtggagcattgaggcattgctctttttctgtcatggcactacatgggtgcattctctcggagattcaggcgccaccggagagcagacaggttttcagcgcagagctccatagggttggccaagaaggcgccaaagtgttgcgcgagctggggcacagggttaaaacgatgacaagactaagctctcaaaacattctatcagaagtccacttcgcagctgaacagctgcagaagaagatcgaccagaagtcttacctcctcgtcaacacggagaaatggcaagctctcatcaggcgccatggaggaggagccaaggatggtgggcttgttccggggcgccgcgccattgccagccccggtgcagtgcacaagtccagcagcttcgcctcgagcacgtcccactccagcttaaattcggcacccaggaccgacgcatcgtacaagccgcagccgccatggccgatcaggcaaccgtccttccacccgagcttgccgttcgaagctgcggcggcggaggcgagaacctacgagagcgcgagcgcgctgtcgctggccacgttcgcgtctcttctgatcgagttcgttgctcggctcaggagcctcgttgatgcgttcgaagagctgagtgaaagcgccaacttcaaggaggaccccgtggaggagccctccgcgatcagcagggagaatggaggtgttttgtacagattacgcaggttttttgggcttgaagagttgaggcagagggcaggggagccctaa

SEQ ID NO: 31545 - DNA, 1558 bp, Oryza sativa
  Clone ID: PAT_MRT4530_35841C.1
atggcttcctactgctactacggcaacacctccaaccctaaccctaaccctaaccctagccctgctccctccgctccgccgctctaccccacgctcagcatggccgatctcgcgcccgtccagataggcccctcctccccctcgtcgccgaggtccccggcgtctccggccacccccgtcgacgcctacgccaatgccccgccaccgtcggaggacgtcctgctccggatcccgggggcgcagctccacctcatcgaccgccaccgcagctacccgctcgccgccggcgacctctcgctgctccgcatccgctccggcgacacctccctcgccgccatcgcgctcctccaccccatccagtggccgctcgcgcgcgacgtcgcctcggtgaagctcgacccctgccactattccttctccctcaccgtgccgccctccgccgacgaccccaaccccggccctctccattacggcctcacgctctcccaccccgacccgcgcctcgatggcatcctcgccacgtacaccagcttctccgtccagtccgtggtcggcggcgaggcgttggcgagcaaggttcgcgacgaggtggaggcggcggcgtactggacggcggtggcgcccaatgtggaggagtacggcgggaaggtggcaaatgcgatcgcgacgggggccgggcacctggccaaggggattctgtggtgcagtgaactgacggtggacaggctccggtggggaaacgaggtcctcaagaggaggatgcagcccggcgacgccgacgccgaggtcagccccgagatgttgaggcggatcaaaagggtcaagatggtgacaaaaatgtctgagaaagtggcaactggaatactatccggagttgtaaaggttactggctattttacaaactcaatagctaactcaaaagctggcaagaagttctttaatttgttacctggagagattgttcttgcttcgcttgatggattcgggaagatttgcgacgcagtcgaagtggctggaacgaatgttctgtccacatcatcaactgtgactaccggtcttgtatcccacaaatatggggagaaagccgcggctgcgaccaatgaagggatggatgcagcaggccacgcaatcgggacagcatgggcagtgttcaagattcggcaggccttgaacccgaagagcgtcctaaagccaacctcactcgccaagtctaccatcaaagcagcagctgctgactatcgtgcaaagcaaaagaaatagttcgtcctcaacgatcaacccggtgttggaacgttcctgactaatagaagctctgccccaatccatcccagctagtttttgcagatgtcttctcttgttttctttttttcacgagtcatgggtgtgctgcactactgctactgttgcttgtaatatatgtgctgaaaaaccaaaagcaactcctgaacgctgatgatgtactaccacttttgtgctgaatgatgcaatgtacggaaatctgtggtgttgcaaaaatcaaaaaaaaaaacaaaaaactcgagactagttctctctctcc

SEQ ID NO: 31546 - DNA, 852 bp, Oryza sativa
  Clone ID: PAT_MRT4530_35842C.1
ccggccgggaaaggcctatgctactggatctcttcgcgtcccatctcctagcccatcaaactccaaaatcaaccttcgttgagtgatttggttggatatcggaaggaaagagatgggtaaaacatgggcactcattagccacctccatgcttttgccgggccaaccctgacactaatataccctctgtacgcgtcgatctgcgcgatggagagcacgtccaaggtggacgacgagcaatggctggtgtactggatactgtactccctcatcaccctcatggaaatggcactccataaagtcttgtactggataccgttatggtacgaggcgaaggtcctgttcgtggcgtggctggtgctgcctcagttcaggggggcgtcgttcatctacgacaagttcgtcagggagcagctcaagaaggacagggtgaagctgcacgaacaccacgccgttggcggcggcgctgccgacgagcaccagtcgcacgtcgtcgttcacgcacgaacaccacggccatggccatggcacgccgacgagcaccagtcgcacgtcgtcagaggctgaggatggcgtgcaccgaggaacggatcgaatgtatgtttgttaattaatctgacgaaggacagaaccaagccggtgagggctcatgtcgttcacgaaactagaacctacggcgcgcttcgggcgcccttgctgtgtaaatgaggaaaataaataaggaggccctgaagagcctattcagtggattggctgtagcaccactagctatagcattcaggttatgaggaaaaccagtgatggattaagtagacataaaatacatagattgaatgttaaaaaaaaaaaaaaaa

SEQ ID NO: 31547 - DNA, 336 bp, Oryza sativa
  Clone ID: PAT_MRT4530_35843C.1
atggcaacactgctctcggatgcaaagcgtgtgcgcgtcctcgcggaatcgctgctcctcgggccaccgggcgttttcccaactcgaactcccaacctggtgtcgacagtaggttttgaggtgcatccttgggcctcgacggtttggcgcatcatggatggggtaaacggggcaacacaggctcgtgtagagttcagagttcagaccagccaagtccatttcacgcgctccgttcaggaaaagcaaaggaccgtcgagaagcagaggaatagggtgccaaccccaccatctggaatcaagacttcaggtgtagtagaagatgagtcgcaagaatag

SEQ ID NO: 31548 - DNA, 195 bp, Oryza sativa
  Clone ID: PAT_MRT4530_35844C.1
atggatgagcaggtcgatgacatcaggcccatgcatcgtgacttggctagttggatgtgggcctgtggcgctcggcgcatcgtccagagcgattccatcgagaaatcaaattggatcgcaagttatggcggctacgagtggcaagtcctccgcctggcggcatgtgttgatcccgccggcgaacgacacactccg

SEQ ID NO: 31549 - DNA, 1209 bp, Oryza sativa
  Clone ID: PAT_MRT4530_35845C.1
tgctcttgccgtgtcactggcttgctctgctcgatcacgagcttgaactgtgcttgtgatcagcgagcaatggctactcaatgggtgctcgtggtggttgctgtaatggccgtgctcttcgccggaggcgccgccggcgggcagctgtcgacgaggtactacgacggcaagtgcccgaacgtgcagagcatcgtgagggccgggatggcgcaggccgtggcggcggagccccggatgggcgcctccatcctccgcatgttcttccacgactgcttcgtcaacgggtgcgacgcgtccatcttgctcgacgacacggccaacttcaccggcgaaaagaacgccgggccgaacgccaactcggtgcgcgggtacgaggtgatcgacgccatcaagacccaggtcgaggcgtcctgcaacgccaccgtctcctgcgccgacatcctcgccctcgccgcgcgcgacgccgtcaacctgctgggcgggccgacgtggacggtgcagctgggtcgccgcgacgcgctgacggcgagccagagcgcggcgaacggcaacctgccggggccggggtccgacctcgccacgctcgtcaccatgttcggcaacaaggggctgtcgccgcgggacatgacggcgctgtcgggcgcgcacacgctggggcaggcccggtgcgccacgttccgcagccgcatcttcggcgacggcaacgtcgacgccgccttcgccgcgctccggcagcaggcgtgcccgcagtccggcggcgacacgacgctggcgcccatcgacgtgcagacgcccgacgcgttcgacaacgcctactacgcgaacctggtgaagaagcaggggctgttccactccgaccaggagctgttcaacggcgggtcgcaggacgcgctggtgaggaagtacgccggcaacgccggcatgttcgccgccgacttcgccaaggcgatggtgaggatgggcgccctcctgccggcggccgggacgccgaccgaggtccgtctgaactgtaggaaggtcaactaaagtcaacctgatgacgaacgtgtccaagaactacaagtgtagtgaacagtcaagatgtctgtttttgctcctttggatttatttttgtgatctggttaatatttttattatttgtggaattaataatgttgctgtaaacatcttttgatagctgccagtcagtcaataatcatctgtaagcat

SEQ ID NO: 31550 - DNA, 371 bp, Oryza sativa
  unsure (1)..(371): unsure at all n locations
  Clone ID: PAT_MRT4530_35846C.1
cggccgggnaaaaaaaaaaaaaagatccgccatccccctctctgtcntctcttgtttgcgtcctctgggtttctgtgcgcggattgtccggctngtggcggtggtcgacgggcgcgctcttgaggagcgctggctatcttgggtcctcctggcgcggttctgcttgctggagatggctgcgctgggagccttggcgtgggctgtggcgggttaggtgttgcgtacgttgaggagagccggggttctctccgggagttgctcttttgcaggcgtggtgtccttcgaggcctgtatggtgggatcctgttgggggagaccctgtggcagacgtccagggacgggatgacgttcgccggtgttctcagggaggg

SEQ ID NO: 31551 - DNA, 372 bp, Oryza sativa
  Clone ID: PAT_MRT4530_35847C.1
tttttgtcagtaaacaggaccataggcgcggagaattactaagtctatcggattactccggggatggggacataatacatatcacatcttgatcaacacatcatgtgttcctggaaatcttaggaccggatgagaattggcatactatccgggtcataacaaaccctgcaagcttaactaaaacaaactgtacaggggagctaacgctcccagttgcgaagagatgaacacattaggaaccaaactttgcaaatgttgaaatattaacaagaaacaaatggaaggtacatttatactaaaaacagcacgtgaggcgatcatgttttctgaaaccaagaaatgatatgcatacaagtgatttagtgattttga

SEQ ID NO: 31552 - DNA, 353 bp, Oryza sativa
  Clone ID: PAT_MRT4530_35848C.1
atgggaaggctggcgccaatgcaactgctcgtgctctgcttgatctccgtgacgacgtgcgccgccgcgcacggcctccggcgaggtctagaccagcaaggcatgcgcggccggatcctcgccgacgcgacggcggcgccgccaggaggcgcggtcgtgcccctgcactggtccggtgctcactacgtggcgaacttcaccatcggcacgccgccgcaggccgtgtcggggatcgtcgacctctccggcgagctcgtctggacgcagtgcgcggcgtgcaggagcagcgggtgcttcaagcaggaactccccgtgttcgacccgtccgcgtcgaacacctaccgggcggagca

SEQ ID NO: 31553 - DNA, 588 bp, Oryza sativa
  Clone ID: PAT_MRT4530_35849C.1
atgcgtcggcactacgccgtccttctccgccgcgccgcctccctgccgtctctccccctcgtggcgtccctccacgcggcggcgctccgccgaggcgccgtcctggccccgtccctcatccacgcctactccgcatgcggcgacctcgcctccgcgcgcaatctgttcgacgaattgcccccgcgggaccggacgctctccgcgcgcacggcgctggccagcgcgatgtccgctcacggccggtgccgggaggtcctcgacctcttcgccggccttgcggaggaggagatggacgacaaggcggtgaccgcggttctcgccgcgtgcgcgagggccgggatggtggacgaagggaggagggtgttcgcgacggtgaggaggaggccggctctgcagcactacacgtgcatggtggagatgctggggcgcgccggcgaggtcgaggaggcggagcgcctggtggcgcggatgggggcgcgcccggacagggtgatctgcgccgtgctcctcgccgcgtgccgggtgcacggccgcgtcgatgtggctgggagagtgcacgggttgatgcgccggtatggcattgcctga

SEQ ID NO: 31554 - DNA, 464 bp, Oryza sativa
  Clone ID: PAT_MRT4530_3584C.1
atggaaacgacaaggactacccggattgtatccatattggtctccctagttctacttggacaagggggcatctatgggtataaatacaagcccccctaggaggagaggggacataccaacaagccacaagacatactgatcaatataagccaacacacgccaagacaagccgccggatatcgatatcagagataagcctagacaaaccaaatatgatgtctgtggaggccaacaagagggatctagtgctatctctgatctcgcctagtgcggattcaaggaggaagactacccttttgtcgactacgagttggttatccatgccgccaagtcgacgacaactagataagttattccaattattgtactgtctcacgtataccctagtaccaatgatcccatactatgcaaaataccgtagtcatgatctcaaacgtcgacatagcatttagcaaacatttaag

SEQ ID NO: 31555 - DNA, 162 bp, Oryza sativa
  Clone ID: PAT_MRT4530_35850C.1
aagcttgccgtgttcgtccgcggcgagcggaggctcgccgtccccggacacggcggctacaggcattacttcaagttcgtggtgtacgtgcagagggacccctcccactatatggagtcgcggtggagagatgtcaaggtgtacaccaaaattgtagactga

SEQ ID NO: 31556 - DNA, 729 bp, Oryza sativa
  Clone ID: PAT_MRT4530_35851C.1
gttgctcgcttccgtcgccgcgcagttgcctccgccgccggtttttctcctcttaggcgagatcgggagagagagagagagagagagagagagttagggttagagttagagaagcaggcttcatttttagcccatttagcgaccgctcattcagcccgtttagcggctatgtcgggctaaatacagctaatagcggcccgcgaagcttagctgcaaaattgacttctcctagctgttgctcggcaaaaccgctatagcccgctaattagaacgctgactgtgatacatgtaaaaatgcttggtcattgggaacctctagattacccagtactgtagcatatggctgtggctgcatctctgtcacaggttgaagttctactacctcggctggggagtcatcattcttcttctttttcccgttctgagatgatttctctaagccaccaataggtctagctgaaccacaaatttcctttctcttgagctcaatgccttttggtttactagccatgatctgatttccttttgcaacttgtggggaaggggagctgtctaaatctggatcacctctaattttcaagaagttctctatatctttattttctgcatcaacatcaccgcagtagaatatgtcacaattcaaagactgcattacttcttccgcaaatatcttaagactgctagagtataaacttctgccatatctctcagtattctcaactctgcctt

SEQ ID NO: 31557 - DNA, 667 bp, Oryza sativa
  Clone ID: PAT_MRT4530_35852C.1
cccacgcgtccgcggtctcttgggggagttttggtatatatggagaagaagcttatgacttctataatgcttatgctggtgaaaaaggtttcaacattagaagaagcagctatcgatcatgtgggaaataccaaaattattaaaaacaagacattttgttgttcttatcaaggtactagaggtattgataaaagagcagaagctgcaggctatggtgatagttttagtaagccagaaactcaatgcaagtgtcaagcatgtatgaagataagtctcatagatggattatattctgtctaccactttgtgcctgaacatagtcataatcttgcaacaaaaagccaggctcatcagttaagatcacaaaggaagataaatgaagctcaggttgcaagtgttgaagtcgcaaaatctgtaggcatttctactaaagaagccattgatttgatggcaaaacaagcatgtggatttgagaatctcggctttactagtgttgacatgaagaacaagttatactcaaagagatcactgcagacaaaacaaggtgatgcaggaagagttttggaatatatggagaagaaagcatcagaagatggaagaagcaaaaacaattttgacaaatgaagatgcagccatggctaaagcaatcaaaatagtatttcaagga

SEQ ID NO: 31558 - DNA, 2398 bp, Oryza sativa
  Clone ID: PAT_MRT4530_35853C.1
atggagagaggggcggagcgcggcggggagagaggggcggctggggtcggcggcgacgtgaatcgcggcgggggcggcgtgatggtggagatcggtggcgggctggcggcgcgtgagagggagagaagagagattagggctggggaggcgtgggctgggatgggggagggggtgcggttgagaggtgcgagatcattcggtgctcaaagacgcttggcctcgagggctacaggaggtggggccagtaacggaaattttagtacgacgcaaaataggttggcaccgcaagatcgaggagttgacgacagtagcctcctcgacatcaacgtgaaggatcaaggaaaaaatggaacttctgatgcaaccaaatctatggaagacaaggtgccaaaggtcggaatgaaatttaactccgaacaagaagcttatgacttatacaatgcttatgctggtgaaaaaggtactagaggtattgataagagagcagaagctgcagggtatggtgatagttttagtaggccagaaactcgatgcaagtgtcaagcatgtatgaagataagtctcatagatggattatattctgtctaccactttatgcctgaacatagtcataatcttgcaacaaaaagccaggctcatcagttaagatcacaaaggaagataaatgaagctcaggttgcaagtgttgaagtcgcaaaatctgtagggatttctactaaagcagccattgatttgatggcaaaacaagcatgtggatttgagaatctcggctttactcgtgttgacatgaagaataagttatactcaaagagatcactgcagacaaaacaaggtgataccggaggagttttggaatatatggagaagaaagcatcagaagatgtcaagtttttctattctattcaggttgatgaggatgatttaataacaaacattttctgggctgactctaaaatggtttctgactatgaagatttttgtgatgttgtttgctttgacacaacatatagaaaattggatgatggacgtccttttggtttgcttgtaggagtgaataatcataagaagactactgtttttggtgctacgcttctatacgatgagaccgctaatagttttgtttggttatttaatacttttctaaatgttatgtcggggaagaagccaaaaacaatttttacagatgaagatgcagccatggctaaagcaatcaaaatagtatttaaaggaactcatcatcggatatgtgtgtggcatatgaatcagaatgcttgcaagcaccttgctgggtgtgttaaggactataagaaatttaatgctgactttcagaactgcatatatgatcaagaagaggaagaagaatttatacatgcatggaaccaactacttgacaaatatgagctgcagcaaaatacatggttgcgacggctttttgataaaaggcaccaatgggcactagtatatgggcgaaatacattttctgctgatatgagtaccacacaaaggaatgaaagcttgaataatgaattaaagggttacattagtgtaaagtatgacatgcttactttttttgagcactttgacagatacgaagaggtaagagaaatgaggaggtgatttcaaagcaacacagagtacactgaagctaaaggcggagttgagaatactaagagatgtggcagaagtttatactccagcagtctataagagatttgaggaagaagtaatgcagactttgaattgtgacatattctactgcggtgatgttgatgcagaaaaggtgtacaaaataaagttgcaagaagttcgaattcgtcggcatcctgtgctctcatgcactgaaaaatacttgacatcaacaatatcaaatcagtcccgcaacacttgtcgagctgcaaaatctgaagaaacatactccatgtctactaattgtgccgaaaaattggcagaagatatagagaacttcttgaaaatcagaggtgatccagatttagacagctccccttccccacaagttgcgaaagaaaatcagatggctagtaaaccaaaaggcattaagctcaagagaaaggaaattcgtggttcagctagacctatcggtggcttagagaaatcatctcagaaaaggaaaaagaagaagaatgaagactccccagccgaggtactagaacttcaacctgtgacagagatgcagccacagccatatgctacagtactgggtaatctagaggttcccaatgaccaagcatttttacatgtctcacggtactatgctgctttggatgcatcaacttcaaatcctactcatgtcttaatgactccagaaaatcaagggttgcaccagcaagggaggtcaattcaacaatttgacactgatttatacaatctgttcaattga

SEQ ID NO: 31559 - DNA, 363 bp, Oryza sativa
  Clone ID: PAT_MRT4530_35854C.1
atggcgaagacgtcgcgcgcgcgcctcgatccccgcccggtgctgcgcgaggtggcgccccaccgtggcttcccgcggcgcgcgccgctgtccgctgaccgttgtccgcttggtgctccgactccagcagctggcattgctgccagcggtgaggttgtcggcacatcctcctcatctgttgggctgccgcatcctcctactcctcatggcattgccgtccgcttggtgctcctactccgatgtgtgcaaaggttcaacaagggtctctcagccacagcccacagggagcaggatgacaagacattcgcgtcatgggtgagaatgaattacactgaaatgttcagaacttcatatgcatgttga

SEQ ID NO: 31560 - DNA, 607 bp, Oryza sativa
  Clone ID: PAT_MRT4530_35855C.1
ctatccgatgccctcctggtacttcgagaagccaccccttactgccgagttccttatgacagccggtggcgcggtgggaagtcggaggtgggcatgatctgggagggcggtgtagaaccagtcgttcttccggtcgtcccactttttgcgcagcatgcagttgatgtagcggtgcagcgtgtgggcgtgtggcagcggaagaggcccaatgaacatctcgcacagatgtgcgaagatggccagtatcatcatggtgttgggggtgtggtgcgccatctggataccatagaaatccaggacgtcgtagaaggaggagaagggcaggatcagccccgccatggcgaatgagaggaagaagactgactttccggggtagcacagagccgggcgcgccgcaccaaggatcaccgcctcccgcctgggcagtgttggcatggatttccgcggcagccccacctgcctctcgctgacgatgcgggagggaggcagtacgctgtcgtccagtggtgtggaaccacgcgccatcgcactggcggagcagggacaaagcgagcgagtgtgcgcggcgagagaaaggcgaagaaccgagaaggctagggcacggtaa

SEQ ID NO: 31561 - DNA, 1726 bp, Oryza sativa
  unsure (1)..(1726): unsure at all n locations
  Clone ID: PAT_MRT4530_35856C.1
agagaccggccggggttctcccgcaccagtccattgccgctggtggcaatcttcttcttgttggaccaaaccctagctagcagcagcaaccatggcaaaccctaggcctccctatgtgttgctggagagagtagtgtttttcggaggacgcgagttacccgacggcacatggaaagatgccgcaggcatagtcatcggatggagcagagcgcggctgctgagtcggcgagaggcgatggaggcgatggaaccccatcccttcctcgccgatcctccgcaagtgagctccctgcggatgatgtcgccgacgcccgcgcacgcgcagcagctgggatccatccgcgacggcgacatcgccagcacccacaagggcatcgtcgtcatctacgccggcttctaccgaccaggctgctccgatgacctcgggggatgctacctcctctacgacgcccccaccaacgccctcaccgccatccccccgctgcccgactcgcctcgcttccccaccttgctacacctcggccgcaccgccgtcctcgtcgacgcctcccgctctgccgatgattacatcctcgccgatatcgtcaccaactccggcctgggcctccccgaagccaccatcttcgcatggtcatcgctgaccatgaagaagagcggcggcgagtgggtcaagtcctccattccccgcctccctctccctgcacatctatgtggtccaaaacacttgttccagatcgacctcgccttctccctggacagcggccgcatctgctgggttgatctcctacagggcatcttgttctgcgaccgcatcttggcaccggatggccccaagttggggttcattccgttgcccactgggtattgcatcgatgtccatcacaggctccgccatcagatgatgccactagcccggcgttccatggcctgcgtctctggcgccgtcaagtttgtcgccttggttggcttggaagatattcattgcccccccaatgaggtgatgctcaagacatgggttctgtcccctgatttcaaggagtggaaggaggatagcaggtccttatctgtggaagagatgtgggcaagtgagagcttcaagcaaatggggttgccatgtgttgtaccagtttcccctgtcctcagcctgacccaagatggggtaatgtataccattctgaatgtcatcgagcaggtacctgcacaagttgatgaatttgggatcgtcgttgtcgatgatgacctggtgcccattgccaattatatgatccgcttcgacattcggcgaaacaaggtcctgtcctccacaaagatatctcaacatggtgaattgcagtggcttatacccaatctcattgccactgacttcactgcatacctacaggaccaccagagagctgaagaagcaggcaaggtaggagcaagcgccaaggggaagcgcaagcagatggagtactactgaatgatatgtagtatatttctgctatttatcatgcacataacatatcgctttttttagcttacatcctgtgactgtgagatgtaaggtcaaatgtgtttaggttaaccatcagagcttattttgtcactaccagaccttattttaatgactaagcctagcagttaaactgaatggtaaccagtatgtatgtgtaatcatcgtggatttatgtcatactactaatagtgttgggctcttcaaatccaacattgtaccaaaaaanaaaaa

SEQ ID NO: 31562 - DNA, 662 bp, Oryza sativa
  unsure (1)..(662): unsure at all n locations
  Clone ID: PAT_MRT4530_35857C.1
ggctgcaggatncggcacgngcggtcaccagcttcctttgcgccgcccgcgtccgacacgcggcggcggcggaagatgttgcggcggntgccanngatggcggacggggaccggcggtgggagctggacctggaaacaccngcgncnntagaaggcgcggcgcgccccgtcnccggcgncccgctgccgctcggcctctngcgggggcccgggtcacccgcacgnancnnctcgncttcctccnccgcttcatggcctcgccgcacgtccncncctacnccgccnccggcgccggcctctccgtccaccacgcccncctcgtccncntngcccncgncttgtcttnnncnntcttggngcancttcntgtacncnngctngttgctgttgtgnnagncnggttatcccntctgcnnnnggtctcctgntccnntgatatccaaagggtacctgccttantgttatgtctctnngtgttggcnccgngagcnnttgntnncccccantaccnctnnngcngntgggngctgtncaatctnanaaaagggggaatcngggcaaagtccatatttnnaccnngcttncccntctnnaanatnccntnngnnagctcttggccntggattattnttngnaaaagnnccgggttanctngggatttt

SEQ ID NO: 31563 - DNA, 387 bp, Oryza sativa
  Clone ID: PAT_MRT4530_35858C.1
atggctctcctgctccgttcgccgctgctgctagaggtgagcgccgccagctggctccccctcttcctgcggcggctgtcgtcgtcctcgcggccgacggcggaggagagtagagctgagggagaggagagggagggagccgcacatcccctccggctgcgctgccgccgacgcccttcccctccacccgcgccgccatcgacccctccgcctgcatctccaccgacgcccctctcctccaccgaatctgggaggagaggagaggggaggggtagcaatgcggccggcggtagtcgtcgtcgtcgcgtgcgcggcggaccacataaggttccgcctgcaaaaatcatactccctccgttcaagtttgatcgtcatattttggcttga

SEQ ID NO: 31564 - DNA, 472 bp, Oryza sativa
  unsure (1)..(472): unsure at all n locations
  Clone ID: PAT_MRT4530_35859C.1
agccagcncgggcncatgcaatgtacatccacaggtgtacgacgactggcgagccaagccnttccccaggcaatgcaactcaactcgcgtggcacattccatcggcactccaggctccagcgaccaggcgccagcctcactccacccttcaacactcacttcaggcaggcacaggcgcacaggcagcacagcacatcctcactcacttcaacactcactcaggccacacatgcagcacagcacaggctcaggcactccattggcacatccagcacatcaggcaggcggcaggcgggcatctggcagccaacactcactcccattggcaggctcaggcactcacaggctcaggcacaggcatcagggcatcaggcactcacattcaacactcctcacagccagcacggctcggcacgcagctggctccgcctccttggtctccgccacctcggcctcggcgggcagcacgcct

SEQ ID NO: 31565 - DNA, 439 bp, Oryza sativa
  Clone ID: PAT_MRT4530_3585C.1
aaaacacaaagatctagtgtcccgaagcattgaagatcattttcgactttgctatccttgctattgctgcgtgcatcgcactgtgcgcagaacgaagttctaggtcaaagctataggcaacatcagttgcatgagcctgtcctgctacagaaacaggcgcttatcccatataatgagtgcgcatggcactagtatgatatatcggatagcccctatttgcaatcagttgctgatcaactgagaaacacccaagtctggcaacagctcacgctggtggcgcatcaatctcactatcaggacaataacattgatcatgccatatcgcatcgagtacaactacagcaagatggtgatctctactctgatcggaatatgactcaagctcaagctctgttagctattaacgtgccatctatatatggtatctaccctaggtact

SEQ ID NO: 31566 - DNA, 850 bp, Oryza sativa
  Clone ID: PAT_MRT4530_35860C.1
ccccgggctgcaggaattcggcacgagggcagaatggcgtcactaggttccgattgttattctgctaggtcccagcagcactgacgatgagcacatcagtgtgctagctgcagaaaaaaccctataaattgtcccggtcgtcatacaaacgccccgcgagactctgttcgatttttgctttcatcaatccaccttgtttgatctctgctctgagttctgaagaaactgtggtcgatcggcgatcggatcgatcgggatcgatgtcgagcctggtagacatttggacggtggaacgggagaggatccgggtcagcggcgcgcaggcgttcaggacgacggtggcttcgaagcgaggctgcacggctcgttctgacgacggccagaacaagcctgacggcgcggccgtggaaacggctgccaagaagcagcaggccgctgccgttggtggcgcgccggcgagcgtgatccaagaagacgctttcttgtccatcctgatcgattgcttcggccagtagagtaggcttagcttggcgttacagggcactctctccatcgtaaaatagctactatacctttagctatgaatctgaacctggtgatttcgacggtctcgtgtgatttttgtgtaaatcttctgaaatatcactgcagtactgtctgaatcctggaagtctaaatagcgaaagcccacttttcttcaatcgagatatgatggtttagcgggttcgaagtacacgatcatgagacgattcgagtgaaggggattctataattcatcgccaccactcggttaaatcagatattttcatctttttcttgtaaaaaaaaaaaaaaaaaaaaaaaaaaaaaa

SEQ ID NO: 31567 - DNA, 357 bp, Oryza sativa
  Clone ID: PAT_MRT4530_35861C.1
agcgatgtccccatggtcaagcttgtgaccataaacaaagcactgccgggagatagcccagattactatggaaagtttttgttggtatttcttacaaccacagataagtccggaaacccacggaataccgctgtagcacttcaccttcgggtgacccctaaaggatatcgaactcagggaacgtgtgtaatctacctaaggctaagacgatccaaggacaacaactataggatttctgggacagaattcagggctgtcaccacctaccgactacctctgacaaatctgtgggatacacaacaaacaaaggaacttccttctctatccggagtcctagtactagagcacttagtataa

SEQ ID NO: 31568 - DNA, 2397 bp, Oryza sativa
  Clone ID: PAT_MRT4530_35862C.1
atggctggcgggggcagggctggcaccgagaagggggcggcggcggggcgcgggcagacggcgatccagtccaccatccagtctatcaaggaggtcgtcggcggccactccgacgccgacatatacgccgccctccgcgagtgcaacatggaccccaacgagaccacgcagaagctcctcaaccaagatccatttcatgaagtgaaaagaaaaagggacaagaaaagagagagtgctggacagaaaactgttcctgatgcttctgcacaagctgagcacaactcacagtggacgaagccacgcacacaaagggttgagaatgaccaaagaagagcttacagccatggtcaggcatctggtaacacagctgaatctcatggtcctaatcgggaatttcgggttgtgagagacagcaggcatggtgtggttgaaaacagaccagagctaggacacaaaggttcaccaaatgtaaaagtgtctgataggagtgtgcctgtagttcaaaccggtcggaaccatcctcctgctacaacttcagaaggccagataacacaaggtgcgaagcacagctacaactctgacgtgcatcaagtgaagagacaggctcagggcactgctcagaaatatgtgaagccacatttgaagaactcccaggatgagcaacaccctcctacttctgatccagctcacacccgaccaaatttgaaagctgctgaaggtgctgttggatccgttcgacgccatgttggagtagttaatgtgcaaaggcaaccatctggccgctcaagttctcacttgcatgtacaaagtggtggttctcacgtaaataatcagcggggaaactttgtcccaggtggaccatctggacgccattttatgtctaaaaacatgcagtccgttcatagaactgctttagattcagtacatcgtggcagatctggtggcagatcttttgttgcctctagtagtaaatatcagcagggtcctgccagcaaccagaaagtcacacagccggcaaaggagtggaagccaaaatcaacaaagaagtcttccaacattgatactgataataacaatggaacagatgtaataacaacttcagctagcaacactgaaaattctaatgtgttggatgagaatgctttgtgtgaaaaaacctctcaagcttgcatacatgaggtggagcatgttattatcccagaacatctccgtgtaccagagtatgagcagacaggattaagtgtacaagaaccagttcaacttgttgttgaagatgactcattgcgtgctggacatgatgaggtagatgtggaagcaagatcttcacaactcaatctttccacattgacagccgagatatccttgccaccatctgaggatagcgtagaaatgaatggcgaagaggttgagaacgatgatggtcttgggttggttcagagtgatactccacttgcacctgttgatggccaaaatatgcagagtgcctcaaatctgactgcgttttcaacatatggtcatgaagaccctaatatgcatccaagtaatgaggcacagttatacagactagtggaacctaatgtacatccacaagtaatggcatccccttctcaggggtacccttcggaaaatcctgaagcagataatgccgtgcaagtgttcagaataccagaatctaatgccattagttcacagatcgtgagcagcagccctgttgcaatctctcaacaactgcaacatatgtcccagccacaacaagcagcacagctctaccctcctgttcatatgcaacattatccaaatttcatgccataccgtcatcatatctattctccagtttatgtcccacccatggctatgccaaactttccaacaaatatcccctatccatcaaatggaaacaattatcttcagatgccaggaggaggttcacatttagcagcaggtggcatgaagtatggagtttcacaatataaacctgttccagctggtagcccttctggttatggaaattatactcatccagctggttttacatttagctctcctggtgttggtgttattggaggggctgttggtgtcgatgatgtcaataggatcaaatacaaggataacaacctttatgcaccatccccacaggtggagacatctgatatctggattcagacacctagagagatgccgactttgcagtgtcccccatatttcaatttatcaggtcaagcaacatctggtgcttttgtgccgaatcctgggaatgcatcattcaatgctacagctcaatcctcccatgcgcaattcccaggcttgtaccatgcacagcagccttcgtcaattaaatggttcagcaactttgatattggccctgctggtgtagtttactttgatatgaaattatga

SEQ ID NO: 31569 - DNA, 381 bp, Oryza sativa
  Clone ID: PAT_MRT4530_35863C.1
gagaagcataagacaacttacaattagatatggagggtttaaatacagcgtcatcgatctgtaccaattgattttcttggaaccaatggttaagccaacccatcaataacaaataccaccaaattataaaccaggttagctttacaatattacaatcttggtccctgcgccctgggaagaggttgtccgatgcgcacgtaaattaccatcctccgagcccaagaaaaattagccattccttcttccaattccacttaaaccaaggcaaaaattcgggccttagagaggcttcgtccaatgtggaacccctcatcttaccttgccctaaatataccataacagaccaaccgggttttcaggcatccaatctaaagcccttat

SEQ ID NO: 31570 - DNA, 3113 bp, Oryza sativa
  Clone ID: PAT_MRT4530_35864C.1
cgccggcggggcgtccgcgcgagccccccaaccactcacccactcctccccctcccgaccaaaacccacgccctagctcgcctcgggcgccgcgcgtcgtttgatgcgatttcggcggcgatcaccaccaccaccaccaccaccacgcgctcctccggcgtagcgttcgggcgatctcgcggcggcggcggcgatggctggcgggggcagggctggcaccgagaagggggcggcggcggggcgcgggcagacggcgatccagtccaccatccagtctatcaaggaggtcgtcggcggccactccgacgccgacatctacgccgccctccgcgagtgcaacatggaccccaacgagaccacgcagaagctcctcaaccaagatccatttcatgaagtgaaaagaaaaagggacaagaaaagagagagtgctggacagaaaactgttcctgatgcttctgcacaagctgagcacaactcacagtggacgaagccacgcacacaaagggttgagaatgaccaaagaagagcttacagccatggtcaggcatctggtcctaatcgggaatttcgggttgtgagagacagcaggcatggtgtggttgaaaacagaccagagctaggacacaaaggttcaccaaatgtaaaagtgtctgataggagtatgcctgtagttcaaaccggtcggaaccatcctcctgctacaacttcagaaggccagataacacaaggtgcgaagcacagctacaactctgacgtgcatcaagtgaagagacaggctcagggcactgctcagaaatatgtgaagccacatttgaagaactcccaggatgagcaacaccctcctacttgtgatccagcccacacccgaccaaatttgaaagctgctgaaggtgctgttggatccgttcgacgccatgttggagtagttaatgtgcaaaggcaaccatctggccgctcaagttctcacttgcatgtacaaagtggtggttctcacgtaaataatcagcggggaaactttgtcccaggtggaccatctggacgccattttatgtctaaaaacatgcagtccgttcatagaactgctttagattcagtacatcgtggcagatctggtggcagatcttttgttgcctctagtagtaaatatcagctagcaacactgaaggtcctgccagcaaccagaaagcacagccggcaaaggagtggaagccaaaatcaacaaagaagtcttccaacattgatactgataataacaatggaacagatgtgataacaacgacaggattaaggtttggcagttttttcctcctggattctggtgcagaccaagtatcaagctcagaaagtccatcggaatctgaagaacaagaacatgtacaagaaccagttcaacttgttgttgaagatgactcattgcgtgctggacatgatgaggtagatgtggaagcaagatcttcacaactcaatctttccacattgacagccgagatatccttgccaccatctgaggatagcgtagaaatgaatggcgaagaggttgagaacgatgatggtcttgggttggttcagagtgatactccacttgcacctgttgatggccaaaatatgcagagtgcctcaaatctgactgcgttttcaacatatggtcatgaagaccctaatatgcatccaagtaatgaggcacagttatacagactagtggaacctaatgtacatccacaagtaatggcatccccttctcaggggtacccttcggaaaatcctgaagcagataattccgttcaagtgttcagaataccacaatctaatgtataagttcacaagtcctgagcagcagccctgtccattagttcaaagaacttgagcagcagccccgtggcaatctctccacaactgcaccatatgcctgagccacagcaagcagcacaacactaccctcctgtccgtaagcaactctattcaaatttcttgccctcacccaatcatatctataattcactatcaaatatcccctatccatcaaatggaaacaattatcttcagatgccaggaggaggttcacatttagcagcaggtggcatgaagtatggagtttcacaatataaacctgttccagctggtagcccttctggttatggaaattatactcatccagctggttttacatttagctctcctggtgttggtgttattggaggggctgttggtgtcgatgatgtcaataggatcaaatacaaggataacaacctttatgcaccatccccacaggtggagacatctgatatctggattcagacacctagagagatgccgactttgcagtgtcccccatatttcaatttatcaggtcaagcaacatctggtgcttttgtgccgaatcctgggaatgcatcattcaatgctacagctcaatcctcccatgcgcaattcccaggcttgtaccatgcacagcagccttcgtcaattgtaagtccacatcccatggtgcatcaacaagtccaatcggcaattggtcccaacggtggagttggtgtggctacaccagcccctcaggtaggggcttatcagcaaccccagcttgacgactgtcattggagacctggcttttaaaggtttattaattatctgtaattagggggtcacaagagcctttatgtaacaaaagaggctacttttaacaggaagcacatttgtttttagtgcagctctttctgatctatttaaggtataacagggttttgttagctttcccccaaggtgaattcagtatcccatctgaactggtttggtgtacgaggcccgctgccctcgctgcctctgctcctcacccccaactccgccggagagggcgactgggccatcacctccgtgctccacgacgccaccgccgtggctggttcgggcgccggcgcgatgctcagtgcggtgcacgggtactgtaacatcttattatgccgcatcaagtgcctctcactatgcagtttcgcagattacccgccagatcgaaaggtcccatttgtcagacactaatgggaattccagatgagtttttctcactaaatattggcttagttctttccagagcacagaagttgaatgccgttttattcttt

SEQ ID NO: 31571 - DNA, 1071 bp, Oryza sativa
  Clone ID: PAT_MRT4530_35865C.1
ccccccggccccaccccaccacaatgccccctcactccaaccagccacccaccaccggctcccgcaccgagcccaatcgcccaacccaccaaccatctcctcacccgcgcccgggcccctcccccgcctcccagccgccctcacaccgtccccccccctcccccccccccccccccactcccccccccacccacccccccccccccgctgcgacgcccccgacaacacaaccaccacaaccccctgccccccctctcacccacacacccacccctccccaaccgcacgcagcccccaccaacatatgccacccccgaccccccgccgccccccgcgcccccaccccccccgccgctccgcgcccccccccccggcgcccccccccccccccccccccccccccccggcccggccgcgccgcgcccccccggcacccccccgcccgcgcgcccgacaacaccggccacaccccgcagttttcttggccgccgccggcgcccacatgtcatcctctctctccaacccttcttcctcctccctccccctctctctcccccctttctctcccccttcccccaccgcagtctccgcttccccgacatgtcgtccccaccgccgcagcggccggcagctacggccgcgcccccatcccctcctccggtgcgcgacatccccgcccgcgccagccgcggccgcctcccccagccgatccctcgtgccttcctcgccgccgcggcctcctcgccccaatgcgcccccacgtccccgacaccggcaccgccgctcccgccgtcaacaccgccacgtcagcaaaaccgccctccaataccgctgagggagtcaaattgcaccggtttcaatagttcggggagtcgttctatccagttttctggttgaggggtacgaattagatttggcgtacaattaagggagtcaaagtggactttttcccccaaattaccgtgcgccacgagcccacaacccaacatatggtgggccctatgatcctccaactttgttatgcaaaactagtggaaataactcgattggcttatttagaagctattgtag

SEQ ID NO: 31572 - DNA, 1555 bp, Oryza sativa
  Clone ID: PAT_MRT4530_35866C.1
gcatacatgcgttgcactgtagtcgttgcatcattagtcgagcaaagtccagacgatgtgcaatattgccagcattttcttggaagaacagaatagttggacctggtggggaagtgccacggatgaaccagcgtaagggggttagcatgataccagccatagctaaaaaattactgccggtgaagacatggcctattgatattgcaacagttttggtataacaggcttaagaagcaggcaaccagatctataacaccaataataaaaaacacaaaaccaaattgctgaaccagagcctaaaaacctatgcattacactgttatacaccgaggccagattatgacatggtaatgcgctacagtatattgtaaaaaacttcaacaaagcaacatcacagattaaatcaagggggggagggggaatcatcagttcaaaggctaggtcttctcagaaatctatatatagctccagagacaaatgtagtgctaggatggagagcaacctcaaggtattcacaactttgccttcttcaggttgaatggagaataattgcctgaattaattgtttgcagtgagcttcagttcatcaggatttaaatcgcatcacaccagaaaactggagcctggaagaaaaaaaaaaagaaggccgctccagatgttctggtcactcttcagcttcatcatcattagcaatttcacttttgcagctggtattacaactctgtacttctggagcatattggtccagaaacagttggattgtcctccagtaacggtctcctccagaattccaggtatccatatgcatgccattgggaaaatcaacaaatctacaattcttattatgctcaaaagctttttcatatagtaacctcatgtgtgaagggggaactaattcatcttgtaatccagaaaggaaaataatgggttgtttgacctctgcaatgatatcaagtgtactccatggggagcgaacaacacagttcagaagttttggaccttttgaagaactgccacctatgaaccatcgtaagaagggtagcatgataccagccatatccaatatagatgtaaaggtgttttccagtattagagctgacaccttgccaggattgtttttcgcaagcactgctccaacagcacctcctaacgatctcccaaaaacaactatcctggatgtgtcaatatccttcctctgaactagatgatcaagtgcagcctgtgcatcatttatgatgcccttctgagaaggataaccatcactctcaccataccaggagtggaggcggacgccgtcggcggcgcggagccagacgtcctcgtagatgaggcggaggcggtcgggggtgatggggtacgcccgcgcgatccccgggagcacgggcacgtagacgaggcgctcctgcagcgccacgagcgccgcgagccccaccaccgccatgccccccgcgccgtagcacagcgccttcagccagcccaccatccccgcccccgccgccgtcggtgcggtcgccggtgagagagacaaaaaaaggccctcgcttccgtcgggcgt

SEQ ID NO: 31573 - DNA, 408 bp, Oryza sativa
  Clone ID: PAT_MRT4530_35867C.1
acggccggaacacaattaaccaacaggaggttggatgcaagggccggagatgcatcacagggaacaggttcacacccccccaggcggggcagggtcatattcggcccgggaccaaatttttggggtcaacaacaaacattccaaacaaggggggggggggattattacaggggggggccaaacaaaacaaaacccttagttggggccaggcgggggaccacacctggcggccccttcattgaacaggggggccttttattattccaaaaacccccctcacttaaatggagggatagacagatagatttgatttgaccaccagggaacaattttccagggggggggggaaacttgggaacatttccagagcaccagggggggtccgtcgggcacgccggggggggcctt

SEQ ID NO: 31574 - DNA, 1239 bp, Oryza sativa
  Clone ID: PAT_MRT4530_35868C.1
atggcacatggggagcttaagaagaaagtattgcctagtgtcacaccatcttcaccaaatcccacatatgtagttgcacaaagtaaaaagatcagggagtgcttcaattgtggtgagatgggacaccttatgcgtgattgtcgtgctccacacaagcctagttatgggagaggaagatatggtgataagggcggggcaagaggtggaagaggtcatgcgggtagaggtaacagaggtagaggctatgagtatagaggtgatcacaaagctaatgtagtcactcttgaagagggttcttctagacctacaaatgttgatgttgccaaccttgttcattccacttcacataactcaaaccaagcatttatgtccatcaatagatctctttcaaattggatactagactcgggtgtatccagacatgtcacggctgcacttgctttgttagagatcatagaccttctgttggaaaacttgatcctcgagctgtcaaatgcttctttatatgctattcatctggccagaaggggtataagtgttggagtccatcagaacgacgaaccttttggtcatgatagtcaacaaatggaaggtgaaatcttgggtccaaagggacataaactatcaaagaaagaaaagtttgtggttggttcaattccatgtcctatgagtagtcctattgcacaagagcaagaatggagtaagccatatgaagaggaaaatcttcaagtttacacaagtataacaaggtctccaataatccaacaagttgaagaggataatcaggtagtggaagatgtaagtcatgatgactccattctaaggtcatacaacttttcggtgctttctgtcttgccaatctattcgaagctcatcaaagcaggactcagaatttggctctacagtggagatgccgacggtagggtcccagtgatcgggtcaaggtactgcgtggaagcgcttgggctgcatatcaagagggactggcaaccttggtacctgaacagacaggttgcaggaagatttgtggagtacgatggcatgaccatggtgacgattagaggtgctggacatttggtaccccttaataaacctgaagaagggctcactctgattgacacatttcttcttggcctgaagctcttggtaacttttgttggtaaagcatctcaagtctcaagcaattacattgataagattgtgctaaacattcaaagaattaacaagggcaagttctag

SEQ ID NO: 31575 - DNA, 585 bp, Oryza sativa
  Clone ID: PAT_MRT4530_35869C.1
atggcgatggaggcggaggaggaacgtgacacgcttctgcgccgggtgctgatcagggcggcgcgagcggcgagagccgcggttcgcatcgctgctactactaccgcatcgtctccttcttccccggcactggcggcggcgctgtcacggacgccgagcctgctcgactgcatggacggcgacgacgacagcatcttctacacgccggcctcctcaccggtggtcgtccactacccgaggcgcgtgcaggtgcagcagcagcagcagccgtcgttgagcccgtcgccggtggccgcggcggcggcggcggcggacgacatcgataggcgcgcggcggagttcatcgagaggttccggcggaacgagtcgctggagctgcggtactgcgcggtgtactcgccgctgacgcccgccaagccgcccatttcgccggacacgtacttcaagctctccggggctcatcaccatggcgcggtggcggccggtggctcgccggcgccggcgccgagctcgctgaggcccagaaggcccagtggcatgtccatcaagtggcccacggccggaaggcccactgtccgagtctag

SEQ ID NO: 31576 - DNA, 459 bp, Oryza sativa
  Clone ID: PAT_MRT4530_3586C.1
tttgtttttttttttttttttttttttttttttttttttttttttttttttttttttttttttttaaaaaaaaccaaaccattaatcctacttaaaggggctttccaccttctttacatttgggaacccacataataattcattattacccccatcatttttttttcactaggggcgcacaagaacaccaccaccttcaagaaataaaacctacctcggcggggactaggcggggataggaaattccgggggggggggggggcacagggggggatcataacataactgggttagctgggcctcgacggggcagtaggggggagtttggaacctgaagccgctggcgccgggggggccattgccgccgggggggaccaggaaggccgggcaggtgacaaaaagggggtaggggccggagatccaggtggcgacctttcaccggacgcgggcggtgatttt

SEQ ID NO: 31577 - DNA, 164 bp, Oryza sativa
  Clone ID: PAT_MRT4530_35870C.1
gtaccaaatcgaaggtgcagttaaagtataagtgctgtgtaagtaacagcggatcatacacacatgtcatgcctgaacattatttgttcgcacatcttcagaacacaactcatcagggacttacattcaggacacagtaacagtgcatctctgaacctacatca

SEQ ID NO: 31578 - DNA, 325 bp, Oryza sativa
  Clone ID: PAT_MRT4530_35871C.1
tacgaggtgctgcagctggaggaggacgagatcctggcgccgcacacgcacttctgcggcatctgcggcaaggggttcaagcgcgacgcgaactgcggatgcacatgcgcgggcacggcgacgagtacaagaagcgcggcggcgctggcgaagccgccgccgccgccggagggggaggagcagccgccgcagccggagaggaggtactcgtgcccgcacgccgggtgcaagcggaaccggatgcacgcgagcttccagccgctgaagacgatcctgtgcgtgaagaaccactacaagcggagccactgcgagaagcgccatgtct

SEQ ID NO: 31579 - DNA, 387 bp, Oryza sativa
  Clone ID: PAT_MRT4530_35872C.1
acgagccagtagtagccaatggcttccctcctgctgctgctgcgagcaatcgtcatcggcgtcgacgtcgaggtagaggcagctcgttcagcggcgcgagggaggcggcggaggaggcggagaggtcttgttcgaagcatccggcgatgccccggcgatgcggcttcttctccgacaacgatgtggaggaagaacggtggctggtctcatgcctgcggtggcctggagtcgatcgccaggcagcttggatgcaaacgatctgatcaaacttatccagacaagcatatttttcaggataatatatatagccgtgtgcttgcctatcgaatggagatttgctggaccttccctattaatgtaattctgtgtgaaaaaaaaaaaaaaaaa

SEQ ID NO: 31580 - DNA, 1809 bp, Oryza sativa
  Clone ID: PAT_MRT4530_35873C.1
ctagcccggccaatttccatcgcagccatttttacccctagccccctccgcttcctcctttttacatccaaacccctcttccactcccctcgccgccgccgcctccgccgtcggggaggatgggaggggcgcacttccccggtgagggcgaggtggtggccggggagggcgacgccgtcgtccccctccgcgacgtgggcaagatggagcacgggtgcgagcattacaggaggagatgcaagatcgtggcgccctgctgcggcgaggtgttcgcttgccgccattgccacaacgatgccacggcttcaggtgatcggcataccatttgccgccaggatgttgaaaaagtagtatgtctactctgtgatactgaacagccggtgtcacaagtgtgcataaactgtggtgtcaatatgggagagtacttttgtgatgtatgcaagttttatgatgatgatacagagaaagggcagtttcattgctacgattgtggcatatgcagggttggtggcaaggaaaactacttccactgcgcaaagtgcgggtcttgttatgctgttgctctgcgtgataaccatcagtgtgtggagaactcaatgaggcagaattgcccaatttgttatgagtatctatttgattcattaaaaggaacacgagttctcgactgtggacacacgatgcacatggaatgcttttctgagatggtggaacataacaaatacacttgtccaatatgctccaagacagctcttgatatgacacatcactgggcattgttagatcaagagattgaagcaacaatcatgcctcccgtctaccgttacaagatttgtcttcgttttacacagccgagagagccggcgcattgggaggggattcaaggtgttcgacgatttgctcaagagggcatcgggtgcagggattttattccgttccacatgatttttgggctggccatgggagaatactgcagttcgtcatcgaatcaatccaaggtacccatcatcctcctcttttcagcatcaacgatcgtacaatctagtatagtgaattggttctctgtacacagctctagtggcaccatactgatgataatgacgtgcatgcatcctttcgtgtcagctatgcgtttgaagattgagaaatgcttgctatcctttgaacaaattgtggttctgaaataccatggctctttctccgaaaacattacgcgtcttggaagaacaaaagttaggtcttgtgttgcacatgttaaagaatcatgggtacagtgttggaatgcaatcacaagcacagtgctgaaatgcattctcacacagccgcaagcccgcaatactatggaagataatgaaaatacaaaggtgagagctgtcaatgcagatataaaggataaggatatcattctcttgtcctgctggatgtttgcgtcatgtaatgactgcaacaaggtctcagaagtggacttccatgtgattggccacaagtgcagccactgcaactcgtacaatactcgatcgacatcacggcctgcggatttatcaggaagcagttctccctcgacgtcagattcgtccgaaaacaatccgtagataacatgccatgttggtgcccaacaagatctacagtttagacaatcaagtcccagattcatacatatacaagtagtagaaggaacattgttttgcggctagcctatccaagtgcctacccaattcttcaagattcaattgattccttgaatcttcatgtgttggaactgctactagacaaaagctattgtgatgataccatatgttgtgttgaatcttt

SEQ ID NO: 31581 - DNA, 256 bp, Oryza sativa
  Clone ID: PAT_MRT4530_35874C.1
caaacagaagtgcaattgatcaccatctgcagtacaggacaggtatttcactcctctgctcaaaacgacgtcaactacttctagacagtaggtccatcagttaagcgtgttaatattcattcccagtagcttctgttttacggattggttttctctctttctgaattcatccatcaaatatcacatttttctttagtttactaaaagtctcaaggggtgtaagctctgttagggaaattttcagctatctgtttag

SEQ ID NO: 31582 - DNA, 4373 bp, Oryza sativa
  Clone ID: PAT_MRT4530_35875C.1
atggccacggtggaacggcgcgggagcgccacggaagacgaggaaacagctgccaccggcgggcgcaacgctgccggccgtgacgccgctggctgcgacactgctagccgtgacgccaccgggcaaggggctgcaggtacaggcaccggcgggcgaggcgccgctgccgggagaggcgctggcgggcgacgcgacgccgccgggagaggcgcaggcgagcgcggagaatcgccgggcgggagcatttcgtcttcgcacgggaacgagaggagagagaggcaggagtgtgagattgggagcgatattcgcgagaatactcgccccctcggtggcgtcgacggcgagggcgcgccatgcgcgccgcccccctcccccatccctgctggccccgcttcgtcgacggtctccgcggcgtcgagcgcgcccgctacccgcgactacctcggcgggatcactggccaccgcctcggccaggaggacgactccggcggccacgagtacacatccgtctccggcatccacgtccccagcagcagcggcgtcgccttcgtgtcgttcggccagtgtcctcaggaggtgatctccaccgacctctgcctcggcttggggcccatcgccgccaccgcaccgctgcaacctcctccacctccagcggcggcagcggcagcggggtctccgtctgctacgacgccggagccaggacatggggaagcgacaccgacgacaagttcctccgcgcagtttcagacgcaggcgcagcaggttacgcgcgacatgtggatggcctgcgctgcacccaagtccggccgtctccccaccgttggatcattggtctactacttcccggacgggcacgccgagcagtgcctgtcacgtccgcaggagccgcttccaggcagaattttcctatgcaaagtcacggacgtccgcctcggcgcagcagcaacaaacgaagccttggcaaccatctctctcgtcccgatcgccgccgacgaccatgccttccagcttcaggctcccgctgatccagaccctgctccagcccagtcccagagtctcgtttcattcgtcaagcctctcacctataccgatgtcaccaagaatcggttcatggtgcccaaggacgatgccgctgcgggagttcttcctcacatacagttgaacgatgatgtgcctctccgaatcaaggacttgagcggaaaggagtgggcgtttaactacacctggaaagctcacacccgcatgtttcgcaatggttggatggagttttctaatgccaacggcctcgtcactggcgacaatgccgtgttcatgcgtcgcggcaacggcgagatgttcatggcggtgcggcgcacgcgcaacaggccggcgcccttctcagtggaggaggtcatcgaggccgtgtggcgggcagcgcgccgcgagccgtttgaggtcagctattgcttgcgccaggatggggacgagttcgttgtaccacgtgacatcgtcgatgatggcttacgcgccaggtttgctccaggcatggctgtgaacttcgtatgggctgttgaggatggcaagctgccaaccatcgggccacagggggaggatgtatgcaacgcttgtttcagtgagcttgaagaccagctggttgcgtgctttccagagaccgtgcgaacaagcagcaaagcatgcagggcatcccggtttctggtgttctggtaaggtgtccaggattgattccacaaaatcttgtatgttagagctgcgcacggctgtctcatataggttgagtttcttccagacttcccctgctaatttgcaacgaagaatgatgtgatttgctgtttcaatagctgggcaggacatacagtgcgggttggaatcccattttttattaaccctgtttgcattggtgttgagcctgtcccggaatgctaaccacaaaaagatcctgcaagtgttggggatagccttgttccagataagtgttgccggctgccaaaggatgccatgataagtcaacaagttgtagtttgctgatgttgtgatatctgtggaaccaagcagcagtgttcttttgtcggggacattctgttgtatgtgttggtccaacaatatatccatgagggactgtaactcggtttgagcccgggaagagagaaccgggtgtagatcaattgtccaggtgccgttagtgtgttgggaggagactgtacagttgatatttgttgcgtaggaagctagtgtcggatatatgaggttgaatcgtcctgctgctgtccagtggtctcgccaaaactgcactagctggccgttcccaatcgttaccttagtggaggcaataattggctcgataacggaacaaactgtcttccaaatcggtgtttctgttggttttgctttaatagggatctcatttgccatgtgttgcgtgcgcaaccattgaaaacatggttctgatgagtctgataacaacctgcatcctatcctcataagtagagccaggttgtgagctctcaagtcaccgattcccaatcctccttgttccttgttgagagtgacagttggccaggccactaaacattgacctccttttactttcttatcccctttccaaaggaatgccctccttaggcgatcaactgcttcgatggttttgtctggccacttgatgcaggacatgaaataatttggtattgccgacataactgagttgatcatgatgagtctttcaccccaactgagaaggcctgggatccatcctgctatagccttcgatctattttgtcaatgactggtgcaagcaacttgtgtgagattttggacgtagagagtggaagacctagatagttacaaggaagcgggctgatggggcattgcaaaagctcagcgatggcccttgcctcgggttcattcatgtgtatgggtacaaaggtactcttgctgaaattgatctgtagccctgagaatgcagcaaattcctcaagaatgccgttaattatttcagcctgctcaagcgatccttgacagtagtaaccgaaattgggaacaagccagatcggcaatggccaagtcagccatggtagagatggccggaacggcgagaagctgccgtcggcgacgctgtagacgccgatgtccctgggcgcctccgggtagagcagcgcgtagtcctcatcgttgtccgtgtagtagatgtggttgggcagcacgccgcccgccgggcactcgccgtcgccgccgccggccggcacccagaacggctggttgcacccgatgaacagcgcgtggctgtcgccgccgtcgcccagcgtcgccgtctcctgcagcctctgcgcggcgaggtccacgcgggacaccttgatccagatcgtcgtcttcctatacaccgccgtcgtcggcgtcgtgtcgccgtgggtgtcggcagcgcggcgcacgggcttcagcatcctccacacctgcagccactcgccgccgtcgggggcgcggacgaggtacttggtctcgaggtcgatgacgccgtgcaactggtcggctaggacgatcgtccggcgcacggcggagggcccgccggacaagtcgtaggcgtggatggcggcctggtgcctgacagcgtagaacatgccgtcgccgtcgttgtagacgacgtcggtgtagaagtccgagtcgggcaggttgacccaagcccagcgctcgtcgacgcccacccgcgcgaacgagagctggtactttggccggtggagcaggacaacgatgcagccgccgccgccgccgggtggcttcgccactgtgtccgacgatggatcagacgacaggaacgcgcgcatgaggaggtactcggcgagctcaccggccttcgcctgggtcggtggccggtcgtcgcgctgctccatggtccagtcgtactggacgatctcgtagtcgtagtcatcttcgtcgtcgtcgtcggcggcggcggcgctctggctgcggtgcctgacgtgctcgatggtgtcgaccggcgggagcgagtcgatctgctggccggtgacggggttgacgaggcggagctcggcggagtcggcgtcggcggtgacgatccatccatgggagctgcccaaccatgacctgtcgcggatggggggctcagccggcagcgtgacctcgaacgtcctcccgccgccggcgaggggaaagatggtggcggcgcgggtgttgtcgtcgccgtcgcccgaggcagcagccgtgtagactaggcacggcggcggcgggcggcgggagaagagcgggtggcggtcgcggacggaggcggcggcggcgtgccaggagcagcagacggcggcgcagcgaaggaggtcggcggggtcgctgaaggtgtggaagacggtggcgaggaggtcgaacaccat

SEQ ID NO: 31583 - DNA, 450 bp, Oryza sativa
  Clone ID: PAT_MRT4530_35876C.1
atggccgtgctcgtaagtggggactgcgacatcttccacggcagtgggtgcctgccgcccccgccgacgatagcgatgcgccgaactacacgaaccggagttgcgacgagatcgggcccagttgctcgaatgctcggttgctgtgatgttgctcgaggatgggaggccgaaggccgcgaggcgcgcaggcggccgtcgggcgcggggcactgccgcgccggccaggcgcgaggtgcggaggcggcgagcggcgagccgagcagccagcgagccggctgtggcctgtgggcggccggcgaggcgacgccgcggccgcgaccgccgaccgggcattcgggcgtccggcgacggcgaggcgcgcgccggcgcgcgcaggcggctagcgggctgggcagcgcgaccggtgacggtgaggcgcgcgggcaggcgttcgtcgtggagttgcgatga

SEQ ID NO: 31584 - DNA, 318 bp, Oryza sativa
  Clone ID: PAT_MRT4530_35877C.1
atggatgacatcttcaatcagtatgggatgcaattggcaaagtgtatggaggtaattgacaatttggctgctaggtttgaggcgaggaagacccaaccagacaccaatggcatggtcacaaagtccagctacacttgtgagataattcgtattgtgttatggtgtgcactaaacaattgtgaaccaaatagcaaggtgctggacccaggctttggtatcttcaaaaccgatcgtgttccttatatcctttgtgctgacaacatcatccccaacaccatctgtactgctcctatcaaggagatggaactcaaaccatag

SEQ ID NO: 31585 - DNA, 2799 bp, Oryza sativa
  Clone ID: PAT_MRT4530_35878C.1
cacgagggaagtagaagagaggagagaagctcctctctctctctcttgccttttttttttcttctctttttcatattgttatcttgggatctgatttttgtccccatactgggagggaaagaggagaggagggattgattttctttctcctcctcttcttgttcttcttcttgttgttccactcttattgttcatcatcctcctcctcatagctgaccaaatctctgctgtgacagcaatctctgctgcttggttctgcctcccatgaggagcacaccatcagtgtgattacaaagcaaggaaccctcctaccgcgtcgctgagctgatgaaggagctctgacgactcggatgcatgcttctgccatcaatcaattgatccaacaaggcaactcgatcggaatttgagtttggtgaactctgtaattgattccctgcaagtatccatgcctttgcagcaatcttgctaattgagttgtcaaagctgcatacatggctacttactactcgagccctggcaatgaaagggactcgcaagctatgtacccagcggattcaggcaattcatcatatcctgtgccatcagcaataggaaacatgttatatcctggcaatgggtcttctgggccatacacggaattcagtggcattatccagcatcagcagaatttcatggagctgcctggccatccaactgcgatctctcaagattcatcgtcacgggaacctaacatggtcgcgtcgtacatggatcagcgctcttttggacctgccaaagatatgagaaatgagatgttgatgcatctgatggatggagcacataatgctggtgctgatctcatccacaatgacactcatagcagcgcgcagattgagtttggcctattgaacaaccacaattcgatgagcgttgcaccagcaccaggccaaggattgtctctgagcctcaacacgcatatcctggcgccttcgtatccatactggtctgcgaaaacagagttgctaacaccacactcttaccatggtgatgacaacagaatgaagaatatgcaatctgaggcctcacaggcaatcagaaactcaaagtatctgaaagcagcacaagaattgcttgatgaggtcgtcagtgtttggaagagtataaagcagaaggctcagaaagaccaggctgaagcaggaaaatcagataacaaagaagccgaggggggttcgaaaggtgagggggtatcttccaacccacaggagtctactgccaatgctgcaccagagatttctgctgctgagaaacaagagctccagaataagatggcaaaacttatggccatgttggatgaggtggaccgaaagtacaaacactattatcatcaaatgcaaattgtagtctcatcttttgatatggttgctgggtctggagctgccaagccttatactgcagtggcccttcagacaatctcaaaacatttcagatgtctgaaagatgctatcaacgatcagatcaatgttatccggaagaaacttggagaggaggagagttcatctggcaaagagggaaaattaacgcgcctccgttatattgaccagcaattaagacaacagcgcgctttccagcagtatggtttgttacagcaaaatgcttggaggccacagaggggactgcccgaaaactcagtttcaattcttcgtgcttggctttttgaacacttccttcacccgtatccaaaagattcagaaaagctgatgctagcgagacaaactggcttaacaagaagtcagatttcaaattggttcataaatgcccgtgtccgcctgtggaaaccgatgatcgaagacatgtataaagaagagattggggaggcggatctcgactcgaactcctcctccgacaacgtaccaaggagcaaggacaaaatagcaacatctgaagataaggaagatctgaaaagctctatgagccagacttatcaaccaagccaattaggtgaatccaaagccaacatcgggatgatgagccttggtggggcaccagccggcttccacaacgaaggcaaccaggatgacagcttcatgaacctaatgctgaaggaccaaaggccgggcgaagccgaaggcagcctcctccatgatgccgtcgcccatcattccgatgagaacgctcggttcatggcttaccatttgtcggggctcggaagatacgggaacagcaatgtgtcattgacacttggcttacagcatcctgacaacaggctttcggtacagaacactcatcagccaggtttcgccggtgctggagaagaaatttacaactccaccgcttctctcggtgtcgctgcagcttcctcttcggactacgaatccacgaaccaaatagatcaaaggcaacggttcgaaccatcgcctctaatgcatgattttgtggcctaagatgctcaaaataccaaaaatacatggaggcaagatttgcctggggggagcatttgtaatttgtagtgccagaataacatgcctcagaaagcatggaaattgttagctgtagttgcatttggtacagaagaggggggtatagcatgaaatgtaatataattaagtttagcaggtgggggtttatagggggtaaagaatcctgtaaaaatggaatacatcatacatgtaaaagattatgattttcagaaccattctgtaaaaaaaaacacacctgtaatgactacttatcatccaggtatatgttgttcagcctattgacaaaataaaaaaaaaaaaaaaaaaaaaaaaaaaaaaaaaaaaaacgcgcccccgcgcgccg

SEQ ID NO: 31586 - DNA, 1096 bp, Oryza sativa
  Clone ID: PAT_MRT4530_35879C.1
gtgggccccacaaatccctctcggctctcccttgtccttgcggtggagcgaaggggcggaatggcggcggcggaggtggccagagaaggaggaagccggcgagcgcggcagctccactctccggacggcgtaggggccggccaaaagggtccgggagacgccagatcctagccactctaggtcagtctggagggagcttcacccctcatgtcatcatcgtaggcacaggggaggatgtggcggggcgcataatgtccttctctcagaagggtccacgctcgatttgcatcctctctgccaatgggaccatctccaatgtggcattgagccagcctggctcgtccggtagcaccttcaccaacaaatcgaaggggcggttcgtcgcgccccaacttaatccacccaccagtttggcggaaaaatcaggtgaggggataatgcgtaggtgcaggttaccccccggggcgggggagggaagaagggtagggggaagggtccgatcccggagacgcggcgtccccacaacgcgaggcacttcgaggggaagctggaggagcaagggttccaccgcctggagcgccacccggcgaacgggcccgcgcgggccggcatcggcgcgccgccgcccaagtccggccgcggcggcaagttcacctgggaggggcccgacggccccgtcgacgcccaactccagcccgccccgcccgccgtcgatcccaacgaccccaactacgacgagggcgacggcgccggagtcgacgaggaggttgccaaggaggtcgtcatcggcgaggtggaggtcgccaaggtcgccgaggccagggacggcgtcgacgtcgtcgcgccggcgccgctgctccagcaagagcagcagtagtcgagtctcgcgccgcgccgcgcccgccattagccatttcggagctgatgtctaatggtcgttgtgcgttgtgtgtgactgcgtgtgttttgggttctaaactgctataattactagtctcctcagtcctcagtggtttgcatgcatgtaaaaaatcgtgtctcgtttaatcaataacggtaaacatggattaactaaaaaaaaaaaaaaaaaaaaaaa

SEQ ID NO: 31587 - DNA, 409 bp, Oryza sativa
  Clone ID: PAT_MRT4530_3587C.1
ctcgtccgctccaccaaccggaggggccttccctaccgactcagcatcaaccgtctcgcggacatgagctgagaggagttccaggcgagccggctcaccacggcgcataactgctcggcgacgctcgccatcgaccaccggatgctcgacgccaccgctgtccctgagaccaaatactggacggcggatgggaccgcgagccccagtacagacccaggtgactctggtccgtctgggaccgcgaccaccgatggctctattgagccgagctctcctcacggcacagggacccccgtctttagttcacagcaaaaaccagccgtatgagcgacggcatacagtaatctgagatgcgctggatgcctcccatctgatgcctattgattcatcaaatgcaagggtgggctac

SEQ ID NO: 31588 - DNA, 399 bp, Oryza sativa
  Clone ID: PAT_MRT4530_35880C.1
tcagccatctttagtcccggttggtgtcaccaaccgggactgggggctgtgaaccgatgcagcggacgctgtgacgaagcagaacgaggcatcggtgacgtccgtccgcctgtggtggtggtggtggaggatagcatcgccatgcttcggatgccatgccgagaggttgcccagccccttctgcatcctatcaatttcttcggtgcttcggattctactgaaaactccgctgccacctacgtccctcccatcgcccacaccggtgtcggtgcggcagcgcaacctgcgtctctcccatcgccattgtcggtgaggacccgttgccatcttcctcttccccaggttggacatggcgctaacgaccagattaatggcactcaccggcttgccgctagacat

SEQ ID NO: 31589 - DNA, 833 bp, Oryza sativa
  Clone ID: PAT_MRT4530_35881C.1
gcacgaggcttttcgtctctctgccttccttcttcttcctcttcttcttccttgtgatcgaaagcttccaacccaaaccccccaccaaatcgcaaacccacgcgtccgcccacgcgtccgcccacgctctcggatcccccccggcgaatcccgatcgcgcgtcggcggcggcggtggtcgactggcgaagtggagtggtgcgggttttgaggaggcgcgggcggggggcattggtgggatttttcggcgcgcgtcgcgacggaattaaaggagatacgaagtttgttgcatttagatgacataagacagagatgaaagtcggcgctcttttgacctcagctggaatcaacattagcctctgtatactttttttgtcactgtattccgttctgaggaagcaaccgcaaaatgttaaggtctattttggaagaaggattgctgaggagaatagtaggctcagggaggcttttattttggagagatttgttccatccgctagctggattttgagaagtcttcgatgcacggaggatgaactcttagctactgctgggttggatgcagttgtcttcaataggattcttgtatttagcatacgcatattctccttagccgctttcctttgtgtacttggagttcttccactgaattattttggacaagatatgctccatgtacggattccttcagcatcattggagacatttacaattggaaatatgcaagagagatcaagatggtgagctatggagcctctcttacatgattatgttcgaactttaagagttcaaatgttaaatacaacatcttatgtatttatcttcagtccgtaa

SEQ ID NO: 31590 - DNA, 390 bp, Oryza sativa
  Clone ID: PAT_MRT4530_35882C.1
atgggcttcggcacgttcttcgccacgctcagcgtcgccgccgccggcgccgccgccgccgccggcgggtgcgagctccggtgggagttcgagtgcgagcccgtggccggcacggccaaggaggcgctcgccgcgcggctgcaggacgggatcgacggcatggcgcgtagggtgcaggaggcgctcgccggccgccgtggcgacgccgccgccgccgccgcggtggcgatggaggccgccaactccggcgacgtgaacaagcttggaaccatgtcatatgtggagataaatggcatgtcatacttggagaaatctgtaaacatttcagtcaaatttaatgatggtactatggtagacatagctttggacatgtacaatgatagagcctag

SEQ ID NO: 31591 - DNA, 330 bp, Oryza sativa
  Clone ID: PAT_MRT4530_35883C.1
acaggcacaaccaaaatgcataattaacgataccattgttggatacattcttgtctagtagaaaattaatatgctaaagattaaaaacaaacttcgatgttcagaacttgaaacaaaactttcaactttgcagcgatatggcaagaggcttagtcgaagaggctcatgcccaggtcaccatcggactcctcctcgggctcctccgagtctgctctgcttgccaagcttggtatccgccccttctcatattgggctggttattaccaatgtctatgacagggggtcagtcttcagccctgaggtgcttgacctccctgaggaggacctgaa

SEQ ID NO: 31592 - DNA, 159 bp, Oryza sativa
  Clone ID: PAT_MRT4530_35884C.1
tcttacgcgtcagtataccttgcagccgccactagcaacagtaacacggaaccctagccggtccgagctgtctgtatcgcccgacacgaagacgacgacgacgaacgcgggagctcccgtgtggaacgacaacgaggcgctgacagtgggggccagggg

SEQ ID NO: 31593 - DNA, 2208 bp, Oryza sativa
  Clone ID: PAT_MRT4530_35885C.1
atggtaattgggaggaatatatatcgaaacaagggtcactggaggagctactacaggcatgtgctgctgctggcgtaccagagctgcggcgtggtgtacggcgacctgagcacgtcgccgctgtacgtgtacaagagcaccttcatcatcgggtcgctccggcggttccaggacgaggagatcgtgttcggcgtcttctccctagtgttctggacgctgaccctcatcccgctcctcaagtacgtcttcatcgtgctcgccgccgacgacaacggcgagggcggcacgttcgcgctctactcgctgcatgggtggcgccacgccaagaagacccccatcctcaccgcgctccgtcggttcctcgagaaccaccgcaagtcccgcaccttcctcctcgtcaccgtcctcttcggcgcctccctcgtcatcggcgacggcgtcctcacgccgcccatgtccgtgctgtcgtccttctctgggctgcaagtgcactcgaccgcgctgacgagcggggaggtggagatcctgtcgtgcacggtgctggtgtgcctgttcatggtgcagcactggggcacgcacagggtggcgttcctgttcgcgccggtggtcatcgtctggctcctcctcctcggggcgctcggcgtctacaacatcgtggtgtggaaccccagggtgctgcgcgccctctccccttactacctcgtcagggaccgaagccatgttgcgttcgtggggctcatctacccgtgcttggtgctgcagtacatggggcaggcggccttcctgtccaaatcaccccactgcgacatccacttcgtattcttcgagtccattccaacgggcatcttctggccggtgctggtgatcgcgacgctggcggcgatcgtgggcagccaggcggtgatatcggcgaccttctccatcgtgcggcagtgcacggcgctgggctgcttcccgcgcgtgaagatcgtgcacacgtcgcggcggatccacgggcagatctacagcccggagatcaactggatcctgatgctgctgtgcatcgccgtcaccatggggctccgcgacaccaccctcatcggcaacgcctacgggatggcgtgcgcgggggtgatgctggtcaccacgctgctcatggcgctcgtcatcgtcttcgtctggcagtacagctgcctggtggcggcgctcttcctggtggcgttcggcgtcgtcgaggcggtgtacctgtcggcggcgctgatgaaggtgccccagggcgggtggctgccgctggtgctgtcgctggtgttcgtcgccgtcatgtacgtgtggcactacggcacgcggcggaagcaccagttcgacgtgcagaacaaggtgtcgctcaggtggatccacgcgctcggccccagcctgggcatcgtgcgcgtcccggggatcggcatcatctactccgagctggccaccggcgtgccggccatcttctcgcacttcgtcaccaacctgccggcgttccaccaggtgctcgtcttcatctgcgtcaaggccgtgccggtgccgcacgtccgcgacgaggagcgccacctcgtcggccgcatcggcccgcgggagttccgcatgtaccgctgcgtcgttcggcacggctacaaggacgtgctcgccgaggacaccgacttcgagaacgacctcgtgctgcggatcgccgagttcgtgcagatggaggccgacttcgaccagcgctgcagcatcagcgacgatggggtcgtcgcctccgtggaggtggagggccgcatggccgtggtcccgcggcccagcgaccttgccaggacggggctcctcatgcgggagcccggcgaggaggagagcgtggtggcgcgcgccgccgcggccgccaagccggagtcgctcatccactcgatgcacacgatgcacgaggcggagtcgccggggttcgcgagccggcggcgcgtgcggttcgaggtggcgaaccagcacacggaccccagggtgaaggaggagctgagcgcgctggtggaggccaagcacgccggcgtcgcctacatcatgggccactcgtacatcaaggcgaggaagagctcgtcggtgttcaagaagttcgccgtcaacgtcgcctacgctttcctccgcaagaattgcagaggccccggcctcgtgctcaacatcccgcacatcagccttatcgaagtcggcatgatctactacgtctag

SEQ ID NO: 31594 - DNA, 2421 bp, Oryza sativa
  Clone ID: PAT_MRT4530_35886C.1
atgccggtggccgactgcgaaagcggtctctcgccggcagatgtcaccggtgcaggtgccgcaaacgggaacccgggtcactggaggagctactacaggcatgtgctgctgctggcgtaccagagctgcggcgtggtgtacggcgacctgagcacgtcgccgctgtacgtgtacaagagcaccttcatcatcgggtcgctccggcggttccaggacgaggagatcgtgttcggcgtcttctccctagtgttctggacgctgaccctcatcccgctcctcaagtacgtcttcatcgtgctcgccgccgacgacaacggcgagggcggcacgttcgcgctctactcgctgctggtgcgccacgccaagttcagcctcatgccaaaccaggaggccgccgacgaggagctcacctcctactaccgccccggctacgccccccaggagacccccatcctcaccgcgctccgtcggttcctcgagaaccaccgcaagtcccgcaccttcctcctcgtcaccgtcctcttcggcgcctccctcgtcatcggcgacggcgtcctcacgccgcccatgtccggtgagcgcgcgtaccgtaatactactactacttggtgtgtggtttgggttgctgatgtgatcgatgatcgatcttttgtcctggctgctggctgggcagtgctgtcgtccttctctgggctgcaagtgcactcgaccgcgctgacgagcggggaggtggagatcctgtcgtgcacggtgctggtgtgcctgttcatggtgcagcactggggcacgcacagggtggcgttcctgttcgcgccggtggtcatcgtctggctcctcctcctcggggcgctcggcgtctacaacatcgtggtgtggaaccccagggtgctgcgcgccctctccccttactacctcgtcagggaccgaagccatgttgcgttcgtggggctcatctacccgtgcttggtgctgcagtacatggggcaggcggccttcctgtccaaatcaccccactgcgacatccacttcgtattcttcgagtccattccaacgggcatcttctggccggtgctggtgatcgcgacgctggcggcgatcgtgggcagccaggcggtgatatcggcgaccttctccatcgtgcggcagtgcacggcgctgggctgcttcccgcgcgtgaagatcgtgcacacgtcgcggcggatccacgggcagatctacagcccggagatcaactggatcctgatgctgctgtgcatcgccgtcaccatggggctccgcgacaccaccctcatcggcaacgcctacgggatggcgtgcgcgggggtgatgctggtcaccacgctgctcatggcgctcgtcatcgtcttcgtctggcagtacagctgcctggtggcggcgctcttcctggtggcgttcggcgtcgtcgaggcggtgtacctgtcggcggcgctgatgaaggtgccccagggcgggtggctgccgctggtgctgtcgctggtgttcgtcgccgtcatgtacgtgtggcactacggcacgcggcggaagcaccagttcgacgtgcagaacaaggtgtcgctcaggtggatccacgcgctcggccccagcctgggcatcgtgcgcgtcccggggatcggcatcatctactccgagctggccaccggcgtgccggccatcttctcgcacttcgtcaccaacctgccggcgttccaccaggtgctcgtcttcatctgcgtcaaggccgtgccggtgccgcacgtccgcgacgaggagcgccacctcgtcggccgcatcggcccgcgggagttccgcatgtaccgctgcgtcgttcggcacggctacaaggacgtgctcgccgaggacaccgacttcgagaacgacctcgtgctgcggatcgccgagttcgtgcagatggaggccgacttcgaccagcgctgcagcatcagcgacgatggggtcgtcgcctccgtggaggtggagggccgcatggccgtggtcccgcggcccagcgaccttgccaggacggggctcctcatgcgggagcccggcgaggaggagagcgtggtggcgcgcgccgccgcggccgccaagccggagtcgctcatccactcgatgcacacgatgcacgaggcggagtcgccggggttcgcgagccggcggcgcgtgcggttcgaggtggcgaaccagcacacggaccccagggtgaaggaggagctgagcgcgctggtggaggccaagcacgccggcgtcgcctacatcatgggccactcgtacatcaaggcgaggaagagctcgtcggtgttcaagaagttcgccgtcaacgtcgcctacgctttcctccgcaagaattgcagaggccccggcctcgtgctcaacatcccgcacatcagccttatcgaagtcggcatgatctactacgtctag

SEQ ID NO: 31595 - DNA, 643 bp, Oryza sativa
  Clone ID: PAT_MRT4530_35887C.1
ggtaccaagaaaggtatgatatagccgagatagcgacgaaggcaaaatacaagggtaatattctcttgagccacgcattataaaggatcaactaagagcaaagaggcgtatccggatagaagagaagacaacggggactaatattgaccggtctatgtaagaatctacttgggttttcttataatcacgaaaccggacaattcttatataactagagggttcatgtcatgcaaagaatttctaagtccttaagacaacgggactgcaagaggtaatacacgctacgtaagagccaaccagctgacatgaaatttgtggcttttgttgccgtggtggtagagagatacgactccgttgagaacgggtcggtataaacatgttatggagaagcagatgactctggaaactttgacgctgggaacttcaggagtggcttgactactgcattccatgaacagtgtacaggatcaaaacctatcacacgaacaatcaatgtacagcagggcactgctgtgcggattgaaagcatctgatgacaattatagggcacggtcgaacctcaccgtatgacccaaaaatgcactatcgaaggagaggtgcttaattcctgttgagacatcaaaccggatggctagcgcaacat

SEQ ID NO: 31596 - DNA, 140 bp, Oryza sativa
  Clone ID: PAT_MRT4530_35888C.1
ctacgaacagcaaactagctaacgataagtaagtaataatacattgtaacatacatagcataatacatatgcctagacaatagttatacgtagttcgtactaagtaaatgatatacataccaggttaattgttactaagt

SEQ ID NO: 31597 - DNA, 299 bp, Oryza sativa
  Clone ID: PAT_MRT4530_35889C.1
atggggagcagcagccgccggatttgctgttgcaccggaccactgtcagatgcacatgcggtcgccgccgatgccgccgccgccgttagatccaccgcgggagggagccgagaggggtcggcgggaaccgccgccgccggatccgtcctcgaccgccaccaccgcggtcggatccatccgcggtcaacgtcgtcggatccgtcgtgcgatggaggaccgtccatcaaatcggatggctccagcttctctcgcgtcgggccgggcgccgttcccaggccgcccacactattgggctgcgt

SEQ ID NO: 31598 - DNA, 315 bp, Oryza sativa
  Clone ID: PAT_MRT4530_3588C.1
atgaccgacgatggcggatccgcctatcctaaggccgccgccactggatccggctatcacaagggcgtcgtagctggatccgtcatcacgaggccgcacatgtcggatatgccgcctcctccaccatcattgaggggatatggcgagactgccacccatcacggcctccggctcgctggcagggaggaggtctcccctagaggcggcaagccccgagtggacaacggtggacgtgggcagccaatgaaggtggaggcacaaccaagtagcaggacaggggagggcatagctcgtgcggggacgaggcgacggtaa

SEQ ID NO: 31599 - DNA, 294 bp, Oryza sativa
  Clone ID: PAT_MRT4530_35890C.1
ggtttttcttttttttagggatgggttatcgttataccagtctaatagctagagcaggctttctaattgacatgacccattgccgacaataggtgacacattaagccgacagcttgatgactgggaaaaaaaaaaaaccactcccgtgtgggggtttgtgttacttcaagaaaaaaatccaagccgccgaaaaatacatggctaccgcctaaaccagagagggtgtggtagtgaaaaaaaaatgtacccgatttctccaaataaattaaacacgggggggggaactaaccaaaa

SEQ ID NO: 31600 - DNA, 624 bp, Oryza sativa
  Clone ID: PAT_MRT4530_35891C.1
atggcggcagaatcttcaacgcagcggggaggagggccagcgactggcagggcgcaggggaggagcgcggcggcggcgggcgagcgccgggaggtcgccggttgcagaggggggagcaacggcgggattcaaggtggcaggcgccggttcagtaatgaagatagtaaacaccgagtgaaactgctcgggccacgtagtcggcacctgacgagggccgctgccgccgacgaatgccaccgccgcggcctcggattcgtcagcgggcggcggcggcggcggcggcagcggcatcagcgattcctccggcttaggctgattttattggagtgggccgcaagaggctgtcccgggttcatgggcggcacggcggtcgtgatcatgctgcagcagctcaagggattcctcggcaggacgtacttcaccaccaggaagtctccgcgttcgtcgtcggggccgtcgcgctcatcaccgcgccgttcgccgtccctcccgcgtcgttcgcccatgacatcgggcgcgccgttgccaagcgcgcggagcatgacggcggccatggacgaggggaggcggaggcagccgggggagaagtgggaccccgcggcggcggcgaggacgtggaggtga

SEQ ID NO: 31601 - DNA, 273 bp, Oryza sativa
  Clone ID: PAT_MRT4530_35892C.1
ctcgaatcgccgcggccccgagatcacgcgggccgagccagccgcgcggcttgacggatcagatcccggggccatttctagggttcagggaggaggaggaggagacccgtaccggcgacgacgatgcggtcgcaggaggacttgatggtctggaactgcgcgaggtagttcgccatcgccaccgcgcccgcccttcacctcacgcagcctccgctccgtcccctactgctccatgcggcgtcccactcgccccgccgccgccgccggtgaggg

SEQ ID NO: 31602 - DNA, 232 bp, Oryza sativa
  Clone ID: PAT_MRT4530_35893C.1
cccacgcgtgcggccacgcgtcacggatataccgctctggcgccgacaagaaggcgacgcagaggatctccggagggcgggctgcattttcccgtcggcaggattgccaggttcctcaaggccggcaagtacgcggagcgcgtcggcgccggcgcccccgtctacctcgccgccgtcctcgagtacctggccggtgaggtcctcgagcttgcgggaaactcctgtgaggcac

SEQ ID NO: 31603 - DNA, 1599 bp, Oryza sativa
  Clone ID: PAT_MRT4530_35894C.1
atggcagtcgactgcgcgtggcacagtggcagaggctcaatcgtggttacggcccaatcagccagcgttcatttctccaacatgctgaccaatgcgaggttggacaatgagcctctccgagctcgaggaagagataggatagaaagagatggcgatggttcccatggcgggggttcaccttggctcccacggcatggaagcttagcgatagcatgctctttgaggctcgccggggatgacggtcgaagtctcaaagagcttgtaggtggtggcaacgacatggaggtggtcaacggggaggacgagcgcagaacggcaaagcacgatgacagggttgaatgggaagcggtcggtgttggcagcagcatgggcaaaggtcggcgggtgggatgagggaagagaggtgggacgcctcttcgtcccctcatcgagcttgtggccttcacttcccatgaagtcgagcacgtctagcccgttctcgttgcactcggggcacctcctgaacgcgccgccgtcctcgtcgtcgtcgacgaacaccttgcagctgccggagcacgcgtcgcacggcacgaaccgcaccccgccgcagccgccgcacggctccgacggcggcgcgagctggcgccctcccttgcccacggcggcgacggcggccgccgccgtgtcgcaggccttgaggagggtgcccgtcagctccccggactcgtgcatgcggcggacgtcctcggcgccgcccacgtggcagccgtcgacgaacacctgcgggagcggcctgccttgcccgggcacgccgccgcctccgccggcgccgtcgccgagcgcggcacggagctcgtccttgtagccggcgtgcagcgacaggtcgcgctcgtcgacgcgcacgccgtagctgcggaggatggaggccgtggcgcagcagtcctcgtacgtctggcggatgccgcggaggctggtgaggtacaccacgacccgccgcgcgctctccggcggcggcggcggcggcgccttcttggccagcttcgcgtcgatctctttctggaacaagatgatccgcgcgcgcaccacgccggggaacttctggatttcacccttcttgttgtcgtcgtcgtcggcggcggcggcggcatcccgaggaggtgactccggcggcagctcctcgaccgccttcctgaaggccgccaggacgtcgggatcgaacgccggcgatccgggcgccgacttcacttgccgctccccgccatggccatccaccaccacctcctcctcctcctcctcctcctcgtcgtcgtaatcgagcccagccatgagctcccacacattaatctcctcgggcgcacgcagcggcgtcttggtcggcgtccgcggcggcgcccgcctgcacctcttctcctgccccaccgtcgccgacgtataccccacaccaccaccaccaccgcccttcaccaacatcaccccgtccccgacgccggcggcgaaggagaccgccgccgacctcaccgcgacggatcgccgcgaggagcacatccgcctctccgccgccgccgccgccgccgccggcacccctccgtgcagcgcgtgcttcgaccccttgcaccccat

SEQ ID NO: 31604 - DNA, 159 bp, Oryza sativa
  Clone ID: PAT_MRT4530_35895C.1
ccaacccttccgggggagcacgagcttgaggaccgcggcgtcgtggcggtgtttgggtttctgtgaaacaggacggggagcacgagcttgagctaggtccttcttttgatctttggatgaccgaaagatgcaagatgcccccgacctgtttatttgggg

SEQ ID NO: 31605 - DNA, 1287 bp, Oryza sativa
  Clone ID: PAT_MRT4530_35896C.1
atggaggacactgaagagatagtggagagggaagttgctgcatggttagaggagcacaaggatgaagaggagcaggagcaagcagccacggagaatgaacatgcagccgcggaggaagaggaaaagaagagaaaggctattgttccaagatctgatgtatggggcagcttcagcaagcaatatgagaaggcatttgaaaggtacagtgatgaagacccatattacaagctagatttagaaggtcatgatgggccaggagttcctgaaaaatcagattgggataaagctaggaagatggctgaatttcttgaacatttctatgaactgactcttcgtgtttcagcaacaagtcgtccaacatctcacacattcttccatgaaattgctggtgtagttgttttgctgagacagtggtgcaacagtgaggatttgttgtgtgcagagatggcattggatccaaggtataaacttaatagttacattaagatggcaactatggtcatgtttggtgatgaaataggagagcaattgtggacaacagtgggatcactatcaacaagcaagaggctcatgaggtctatagttgcacaacaaatgagcaacaatggagcttcaaggagcattgccaaatctgaactagacaagtacttttcagaagacaatgaggaggatacaaaaggatttgacatccttaagtattggaaggacaactcaactaggcttccattgctatctcgtatggcccgtgatctcctagcaatccccatctcatccgtcgcttctgagtcagcctttagtgcaggtggaagaacactagatgactttaggagctcactaacaccaacaatggttgagcgcctaatttgtgcaaatgactggcttcgtggttgcaactctattagtgttgaagaaaatgccaaagatttgtccaagcttgaagaagagatatggaaagtcgggaatggatgtatcattggccgaggtttttgtctccatatcgagacatctactcagaagaccgtgaagccttacatgcgcacggacagtgtgggcaaaaatgccgccaaattttttcgccgccacacgcctccgccgtcatccggcctcgcccgcctgcgaccatcgccctccgaccgtcgtcctccgccgctgccgaccgtcgtcctccgcgcgccgccaaccttcgagctcgcgccggccgctccaccgcgccaaaatcgatccagctacaccatcggccgctccaccgccgccagccgcatcgccgccgcgttatgcaggcactga

SEQ ID NO: 31606 - DNA, 2379 bp, Oryza sativa
  Clone ID: PAT_MRT4530_35897C.1
atgggacagcgacgcggtggcgacgggcgacgcgacggcgacggctcacagcagcggcgcggggcgcgaggcggcaggctcgcgtcgcggcgatggaacgggcgagcggcgcgcgggcgcgaggcgcgaggcgacgcgacgtcggtgcggcgcggcagcggcgatggtgacggcgggtgttacagcgggtatggtcttcgaagccaaaatcccaccggcgaagacgatacccagggtggagggggcgatatggaggacactgaagagatagtggagagggaagttgctgcatggttagaggagcacaaggatgaagaggagcaggagcaagcagccacggagaatgaacatgcagccacggaggaagaggaaaagaaaagaaaggctattgttccaagatctgatgtatggggcagcttcagcaaggtaaaaatttccaatggagaggagagagctaagtgtaaatactgtcaaaagttgtttcgttgtgaccctaggacaaatggtacatcatctttgaaaaatcacttgaaaatctgcaaaaagaatcctaacaagccagtaattgataaccaacgcactttgcaaattactcctggaagtggtggtagtagtgttggtacttgttccacatggaaatttgatattgaagacttgaggaatagttttgctgaaatgataattgaagatgaacaaccttttgtcttaagtgaacgtccaggtcttaggaagtttttggctaaagcatgtccacggtttactttgccatctagaagaactaccactagagcatgtgtcaaagtgtatgatgtgcaaagattgaagcttaagaaatttttgaaggaaaattgtgagagggttagcctcacaacagacacatggactgctaacaccaaccaaaactacatgtgtgtcactgcacattttattgacaatgattggaagctccataaaaaaatcataggcttcttcctagtaaaggggcatagaggggaggatattgggaaatctttagacaattgcttatctgagtggagaattgatatagttttgtcaataacggttgacaatgctagtgctaacaataatgcaattaaatacatgaagagggtattgaatgaatcaaaaggatgcattgctgaaggggagttccttcatatgagatgtgttgcacatattatcaacttgatagtggctgatggtttaaaagaaatcaataaatccatttgccgtgttcgtgctgctattaagtttgtcaaggccggaccagctaggttggcaaaatttaagaaatgtgctgagttggcaaaagtacaaaccaaagcatttttgacactagatgtttgcactatgtggaactcaacctaccatatgcttaatattgcccagcaatatgagaaggcatttgaaaggtacagtgatgaagacccatattacaagctagatttagaaggtcatgatgggccaggagttcctgaaaaatcagattgggataaagctaggaagatggctgaatttcttgaacatttctatgaactgactcttcgtgtttcagcaacaagtcgtccaacatctcacacattcttccatgaaattgctggtgtagttgttttgctgagacagtggtgcaacagtgaggatttgttgtgtgcagagatgggtaagagaatgctactgaagtaccaaaaatattggggagagatagggccgggggttcaaaatctgaatttaattgttttcttctgtgtagcattggatccaaggtataaacttaatagttacattaagatggcaactatggtcatgtttggtgatgaaataggagagcaattgtggacaacagtggtcaattcctttcattccctatttcatgaatacaaagaaatatatactcctaatgagccggtagcagcacctaatgatattcagggatcactatcaacaagcaagaggctcatgaggtctatagttgcacaacaaatgagcaacaatggagcttcaaggagcattgccaaatctgaactagacaagtacttttcagaagacaatgaggaggatacaaaaggatttgacatccttaagtattggaaggacaactcaactaggcttccattgctatctcgtatggcccgtgatctcctagcaatccccatctcatccgtcgcttctgagtcagcctttagtgcaggtggaagaacactagatgactttaggagctcactaacaccaacaatggttgagcgcctaatttgtgcaaatgactggcttcgtggttgcaactctattagtgttgaagaaaatgccaaagatttgtccaagcttgaagaagaacttgttggccaagacattacagaggacactaatgctaccaaggcctaa

SEQ ID NO: 31607 - DNA, 218 bp, Oryza sativa
  Clone ID: PAT_MRT4530_35898C.1
ttgaatgctctacctgcgtctccccaccaaaggggggttttaattctcctccgcagccgttactaccggcaccaacgccgacgaggagaggaggagatgggaaggcgagagggaggtaggtaggtaggcacatcagacattttctcagatgttccattgagtgaggacagcttgtacagggcgaggttttcggtgcaggccgcccgttactaggtgat

SEQ ID NO: 31608 - DNA, 405 bp, Oryza sativa
  Clone ID: PAT_MRT4530_35899C.1
tcgcggacgcgtggggggatgtcctaatggtgtgaaagggcggcataaagaaggatacatgcttattgtgctagaatgctgaagatcacctagagtacagaattgacgacgattaatctgacgaagcgttcaagaaaggataatatgatgttcactcaagctgaactaataatacattgtgagagtgctttacagtattacatactaacagcctaagattattagaatgccacatgaatgaactcaaagttatgacctattactataggtgctgttttattaataaaaaactgcattatagtcttgctcgctgcacttctccatggtagatgatcggcacagtgaccttacttaccatgatgcaggttgagcatagtctgatgctgacagtaccgcagaataaat

SEQ ID NO: 31609 - DNA, 1287 bp, Oryza sativa
  Clone ID: PAT_MRT4530_3589C.1
atgcgtggcaatcatcttgaagcacatcaacctgagcacgacgtcgcgcacaagttgtatcgcggccctagcccttttaccgagctaaatgagttcggcgaagggtgtgcggctgcggagagcctactcattcgggctcttgcggcgcattgcagcgcgaagaaattcaccctggttcggctggacgggtatcggcttcgccttcggaaagccgaggaggaccttcgcgacaaggaggacgagcgccgcgtcatggcagatgccctcaagaaggcaaacgcggagagcaaatccctttctggggagaacaagtctctttgcaccgacttggagaagtcgaagaagaatgccgccgaacgggaagggcggctcgccgtagtagaggagaagattaggtcccttgaggcccggcttagttcggcagaaactgctgccaaagctctggcgccggcgatggagtctactaagcaggcctgctacacgcttcgcctagcccttaccgacgttggcgcgtgcgcgaacagtgctcctggcgaagacgggcttacgacttctctgagtggacgcaggacgcggctgggtcagttgtcgaagtggctggactttcctcggattgtgaagaaggactggcccgagaactcccaatccgcttcagtggctttgaaggcctttcggaagggcttttgggagtgcgacgggtggtccaacgcgaagactcggctaggagagcagctggagaggatcgtgaaggccgagcgtgccgccgcggcggccaccactgacgagccaaagccttccggtgctgcagctgacaatgagggcgaaggcaacgaaggccaagaccaccctgagggtgttaggcgaaagtcgtgcgtttggccccctttcggggattggcgaaataagaacgagaaatttgtagcagtgaaaggcctgccgaaggttagatgtccgtttcggcctgtttaccgcgaaatgcaaataaacggaaacggttacaaggttttgaaggtggcgggatggatgcgggcgcacacaggtcgtaccctggaggattacgaccgctaccacgttgcgcgtcgcgaagatagtaccaactcttggcgaaacttcaagaggtcgagccgccaagaggcgatcacccgtcgctgttatagtttagtatgtgcttgtcctccgtcccctttaagggttgtgtacaatattagtagtgacgacaaaccttgttcgccggactgtactataggtgtggatgaatgtgcagatgatgatgtaatctttttgtga

SEQ ID NO: 31610 - DNA, 243 bp, Oryza sativa
  Clone ID: PAT_MRT4530_358C.1
ctgcgggtcagaatgaatcgatgattgtttgccatgctcgaataggtttattgggggtcatgtttttgcaagatcttgaatccccactttgtgtatgtgtaagactgtaattaggtttcgtgtaaagagcctgactggatgggcaattttaggagatgtatgatgcattttgtgggtgatgagtatcactggggatagggcttcgttagcctgcaaacataatataaatcaataatcgattta

SEQ ID NO: 31611 - DNA, 615 bp, Oryza sativa
  Clone ID: PAT_MRT4530_35900C.1
atggcgtgcctacatgatgtagatccaccttccatgttcgaggagtcaaccgccaacccgccagtgacacccagcccactgtcacccctagggcaccacctctaccagagtcctctgccgcctccactgaggatatatatcttcttcctcccggactccgaggcctctggtgcccctagagccaccgccaccaacgggatccgactcctcctcgccgagatccttgcaccggcacttagaccgccgccgtcccgggccaccgctgcccctagggtcgttgctgcctatggaacacctccgtcggatccgccttctccttgccgaggactgcggcgcggccgacgaggaggcaccgagtccggcgccgcccagcgtgggacggtgggcgcggactccggcggtggaggccctccctcgcccccgatcttgtggccgccgccctcccctaccccgatctgccggcaaaaggaggaggacaagacggcagtgacggtgatgggaggaggacaacggcgacagcgacaggagacaggaggacgatggtggcggctagaggatgaggacgacggcggcggctggaggatgaggatgacgtcggcggtggctggaggatga

SEQ ID NO: 31612 - DNA, 507 bp, Oryza sativa
  Clone ID: PAT_MRT4530_35901C.1
atggccgtggcggcgaggtgctcggcggcgacggtggcggtgtcccccagatccgcgccacctcggccgaatctggagggtggccggcggtggtggtcgtggcaactggcagtgtcggctggtgacggcggcggagggcatggcggcggcgtcggggcggttgctggctgctttggcggcggagggcgacgaggcagcggctgcattggcggtggcgacgatttgcgaaggcggcggctggcgttggcgactggtgacaacgacagcagtgacggcgaccggcttgcggtggccatgactgaggaggcgacaacgatgtcggtggatgcgactgtggctggcgacgtcgtgcagacggtcgccggagacagcaagtggaggcggggaaggagtcgggtgcgaggtgaggatggcgacagtgaggtggctggccgttcggcagcaacggctgcggtggcggtgaccatgactgcggtgggaggaggcatggcggcctcggacggctag

SEQ ID NO: 31613 - DNA, 388 bp, Oryza sativa
  Clone ID: PAT_MRT4530_35902C.1
caaagtttcttggaaggagcccgttccggggcgcccggaggaacggagggactcacggtggcttctacccaaggttgggtgcggctaccctcaaaggtggtttcgaggaatgcccgcccgctggttcggtgggtaggataggcccgtatgggtagcagccttagttgaatgggtacctacgaaccgttggtaacgcccttctagaagaccgaagtatatgtaccccggggtagttatgaacgtccctttaccagagtaggtataggtataggtaggcttcgggtctctatcgtgccccaagggagacggtgcatgctccacaaggagagcctatgcgcgccgaactgctggaccaccaccacccctgcccttggctgcctgagcgctg

SEQ ID NO: 31614 - DNA, 1792 bp, Oryza sativa
  unsure (1)..(1792): unsure at all n locations
  Clone ID: PAT_MRT4530_35903C.1
gcacgaggtgcgaggatagtggagagaggtgaaagagacacggaggagagggaaaccaaggcggcgaggcctccgcctcactccggtggcgacacggcgggctcgccgccatgacaggagctctggcgatgatgccatccacgtcctccccctaccctctcctcgctccgccgacctgctcctcccgcctcccgcctctccgctgcttcgtcggcctccggtggtccgctccccgcatccaggtcagggagtatccggatgcggttgcagggattgccaagggtgcgggtggacgcggtggtcgattcagagcacctgcttcaagtatctcccaaccttgctctagaaccatcatcatcacaaatgaacatgttcaaaatgctgattttccacctaattactcgaaaagagagaagaaaccatttccaataccagtattggagttaagacgccgagcaaaagagagggcaaagaaagctgaagggaaacccaaacgatctttaccacctccaaaaaatgggatgctgatcaaaagactgataccagttgcatacaaggtgtataatgcaagaattttgctgatcaacaacttgaagaggcttatgaaagtaattccagtgaaaggatgcaaacattgcagtgagatacatgttggatctgttggacaccctttccgaacatgcaaaggaatgtcttcagataaacgtagggggcaacatgactggggaggtactttggttgaagctgtttttgtgccggttgaagcctaccatctagaggatcgcttagggaagcgtatccctcatgatcagaggtttgctgtacctcgcatccctgctcttgtggagttatgcattcaagctggagttaatcttcctgaataccccacaaagcggcgaagaaagcccattattaaaatcggaaagaacgagtttgttgatgcaaatgaggatgacctaccagacccagagccttacaaacttgagcatccaattcttgaagaactaaatgataacgagattattgccccagcaagcccagaggagattgttgctctagctgaggaaacactcgaagcatgggaggtagtcagggatggtgccttgaagcttatgaagggctacgcggtgcgggtttgtggatactgcccagaggttcatataggagcaagtggccacaaagcacggaattgtggtgccttcaaacaccagcagaggaatgggcagcatggatggcaagcagcagtgctcgatgacttaatacctcctagatatgtgtggcacctgccagaatccggggaggacttgcagagggatctaaagagtttctatgggcaggcacctgcgattgtggagatatgtgttcaggctggtgcaaaggtgccggagaagtacaaagccacaatgagactagatataggaattccaacaagtttgagagaggccgaaatggtcgtctgaacaaagacgtttctattgtcacctcaagctccagtttgtctgaccagaggttcacagttttactcatgtatataccaggaaggcaggaaattagctcaaacagaatttgtctaggtctgtattgtttgtaccatatgctcgctatcatttaccaaattcttctttgtatgaggcatggatgtttcttacagcagttcgagatgcatttgctaatgctgatatggtttatatggtgagctgtgttttgtgtgaaaagtgaacaccaataaaatatcctggtattaacacagtcagcaattcttgccaaaaaaaacaaaaaaaaaacccaanac

SEQ ID NO: 31615 - DNA, 647 bp, Oryza sativa
  Clone ID: PAT_MRT4530_35904C.1
ggcccctgttaggtcctctcctaatctgatctgggagaacacttcggattgcaattccctttacaaccaatggcatgtctgaagtgggacaacatttcttttctatattttttttaagaaaaaagtggaaccatatcaattgttcactatcaatgcagtgataatggtgaagcaaggcatggaatgattaatttgaactattagatggatcttggactgctaacactctgacgtaattaaaatcagaaatgaagttaggaaggtcagctgtttttttccttacctgactagctgacatttccatgattgcagtcatgacaccatcagttttgcacgctgtcagtaattctagaacaaaactgggctgaatggctgatgacctatatatgagtccgtttgctgaccagttcttgttgtattgcacttgacaataaattcatctgctgacccattcaagttgtattgcacttgacaacaaacaaatttaaaacaaaggttgatgcctttttggtagagaaattgactgaatactgatgtggttaatgcttctttgctcatgtcatgttctgaattgaggtctaggtgagtgcatcttttcaagccacttttgactaaatatgcattgcttgcatcatttgtcatgtgca

SEQ ID NO: 31616 - DNA, 278 bp, Oryza sativa
  Clone ID: PAT_MRT4530_35905C.1
gcatatgacatgcgttcagttcctttggcacatatacatacatatacaagtgggcacaccaagattctatactcactccaatggtggtggcattgaacctaccacccctcctacttcgttaatattacaataacaaattgaatctaaatggatagccctattcaagtcaaaaaaaatggatagcccggtatcctataggaaaattgtgggtaacacatttcatgtacaatatgattgatttattttagaaaatatttgtaaaaaaaaaaaaaaaaaaa

SEQ ID NO: 31617 - DNA, 1464 bp, Oryza sativa
  Clone ID: PAT_MRT4530_35906C.1
cccacgcgtccgcccacgcgtccgctcacaacgtggtgttcgacgaggacgcggttccgagcggcgtcgacgtgtccaagatatcgccgcgggtgcgacgcctaccctggtcccccccgcgcccgggcggggctgaacgataggggcacgacgcagacgcagacgcagacgcagaccaagaagaaatacaatacactagctaccatggccgctctttcctctgccgccgtcaccatcccttccatggccccctccgctcccgggcggaggaggatgagatcttcgctggtcgtgcgcgcctcgctcggcaaggcagccggcgcggccgcagtggccgtggccgccagcgccatgctcgcgggcggcgccatggcgcaggaggtgcttctcggcgccaatggcggcgtgctggtgttcgagccgaacgacttcaccgtcaagtccggcgagaccatcacgttcaagaacaacgccggcttccctcacaacgtggtgttcgacgaggacgcggttccgagcggcgtcgacgtgtccaagatatcgcaggaggagtacctcaacgcccccggcgagaccttctccgtcacgctcaccgtccccggcacatacggcttctactgcgagccgcacgccggagctgggatggtcggcaaggtcaccgtcaactaattattctttcttctcaatctaaatatgcctcctacggctctatcctatatatatatatatcgatttgtccatcgcgaatatactacgtaccgatgatctgttcctcagttttctcttgtgtgtatgcaagtgtgtatcaattatcaatagcaatgagacgaacaattcaacgataacccaccgcgacccccctggccccgcccgcctcccggccccggccccctccgccgccggcccccgccgcccgccccggcccgccgcccgcgggcgcggcccgccgggggcggcgcgccgtggcccgcgcgccgcccccgccccgcgcccgcggcggccgcgggcggccggccccggccggccccggccccccggcccggctggcggcggggcccgccgccaggccccgccgcgccccccccgcggccgccgggcgcgcgcgcgccccggcggtccgcggcgagcggccctcccggccacgccggccggcgggcgcgcggccgccgcgcgccggccggcgtcgccccgcacgcgccccgccgccgggggcggcgccccccacgacccccccgcccgggcgggccccccacccccccgcggaccccgcctaccccgctctccctcctcctcctcgccccgcctccgcctccacccccaatgcctatttcggttcgccccccctagctgccttgattatcaagatctgtctataccaattttttttccatagttgcacttatacccccacaggatctatcctatatatatatatatatatatatatatatatatatatatata

SEQ ID NO: 31618 - DNA, 531 bp, Oryza sativa
  Clone ID: PAT_MRT4530_35907C.1
atgcaggggaaggaggaggaagaggcgacgcaggagaaggaggacgacgttggagcagcagcggccgggcggcgacggggacgacgggtccgtctgaggcttccccaatgtcggctcttcctccgccccgtcgtccttgccgccctgtcctcttcccccgtcatccccgcggccgttggcgccagcaccatgccggagcaagccgtgacggaggtcggaggcatggacttccccggcggcgaggtcggaggcgtggcgcgtgcggccgcgagtgggggaggtgtggcgtctgtggccgcaagggcggaggcgagatcgtccgtgtcggtgagggcagaggtgtggactctcgtgacggcgagggaggacgcgtggactcccatggcgacgagggtggacgagtactccacagcggcaacatcggagacgtggacgcctgcggtcacgagggcggaggcgaagtcatccgtggcgatgaggggtggaggtgtggattcctgtgacggcgctgtcgacgggggatacctgtag

SEQ ID NO: 31619 - DNA, 1074 bp, Oryza sativa
  Clone ID: PAT_MRT4530_35908C.1
cggcttagcttcctgggggtatttggatgtttcgggctacaaatgctagaaagcaaagctccaaatctatgcagttttcactttgaaggtaaacaagcgcaattctcactagaggaacctgtgcgattgaagaatctggaagtggttttccccaacagtgtctgttatgctcgtgttgagcttccgtttagtatgccagatattgaaactcttaatgtcattttgtcttgtgagatggtggatacaccaactggccctggcaaattcctccaccttagatacttgaggattacttttgcaacatggagattttcctgggcttatgattatttttctcttgcatcttttcttgatgcttctccttccttggagactttcatcctatgtatttcacagaaagagaagcatgacttgacatttaaggatcccatatgtctaaggcaaatccccgaacaccggcacgacaagcttaagaatgtgaagatcactggtttcagtgccacaagaagcttggctgagctaatatgtcatattatggaaaatacaacgtcccttgagtgccttacattggacactctttgcactcaacttcggtgttctgacggcaacatcgatgtctgcctcccattggatcaggatgttatcaagggagtgcataattcgctcttggctatccgaacatacatcgaggggaaaattccctctacagtcaagttcaatgtccgggagccttgcagccgttgccatggttggtctgtgcctccattaatttatttggagttattaataacagacttgtgtaacttgaggaaagctgaaaacaggtggtattttacctgtctcccactggcttggttaagatttggaggattggagcaaggtacactggctggctccgccccttcatcggcgccaggcgagaacaggggacggtggtcattggtgacagggtcggctgacggtgtgattgttgtcagctcgcctaatgcagatgaggctggtggcagtgtcctagaggcatcacttgccaagcgagcgtcgacaccaaatctgattgctaagaggtgtggatga

SEQ ID NO: 31620 - DNA, 361 bp, Oryza sativa
  Clone ID: PAT_MRT4530_35909C.1
ttgttgtttggttcgtctcagtgtgctccaataaaccgcctgtaacgccccgcctctcccaggccgggcccgcttacatctggcagctttcataggtcatagactgccctcacagaccaacacaagtcttttctgcacactttgtccccactcgtgcgcactcaggatcccggatcccggtcagtcacccatcccaaattgctccaaaccaagcacgcttaaccctggagttctttagagattggcttccggaaaagaagttgcaacttgttgatatgagtattctagtaatcctattaagccctaggccgggatgtcccccgggggttcccttttatatcgcaggtcaggcggtctccaa

SEQ ID NO: 31621 - DNA, 852 bp, Oryza sativa
  Clone ID: PAT_MRT4530_3590C.1
gagagatgcaaaacatctgaaacaaaggatgtgattctcgcagaatctatggaggatcctctcattgagaagaaaataacaagaaagatggacgagatgaagcgtcggaaggtggccgctttcagcataggatctgtttgtgttggagttatggttctcacatccgcagcttctgccacatggctgccttttcttcctatgtgtattggctgcatcgttggcgctctgttgcttgtagccggtcttggcctcctctgctggatcgaccaagatgatggcaggcattctttcggccaatctggaggatttacatgccctttcgttccacttctgccagtcttgtctatcctcgtaaacacatacctgttgataaatctgggtggagaggcatggatgagagtaggcatatggctggctgataggcgtcttggtgtacattttgtacggacgaactaacagctccttgaaggatgtcatctacgtccccgtagcgcaggccgatgagatatacaagagttcatctggatatgtgtcctagaaaaaaatattttttagtttgcactattcttcagtgacaacatgcctcacctgtctgcaattggaagattagcctggacagaggagatgctaaatcattcatacttggggaaaaaacatggatgcaatattatatttaggatgtgcataggtgtatatataaacccaattggacagtggaatacatgattttgtgtatataagccctttgtactaaatggtaaactgaaaagcagttatcgatgaaaaaaaagtgcaatagacgaagtactactatacttatatccctaaaaaaaaaaaaaaaaaaaaaaaaaa

SEQ ID NO: 31622 - DNA, 495 bp, Oryza sativa
  Clone ID: PAT_MRT4530_35910C.1
ggcgggcgcgaggcgggagggtggtgcagcgacggccgccggcggagacggcgtctttgttgatgcgggtgtggctgccattgacattgaaacaaaaaagaggaaagaagaaatgaaagcaagagaagctaagagtcgggcagctgcagagcatggagatttggctcttattacagttgaaggtcccaagactaccacttctgaaaaaatagtttaagacctccaatgttgcaggcagttcgtttatcttcctctccgcattctccatctataccccagtttatagtgcaagaaatccaagctcttacccgaaggatcagtgtttcagaaagaattggatgattgaaaatatgctggagttgctcttgctggacaaggggtatatgtggcagtaacccgcttgccgcttccctcctgagcagaaacgacctgtggaccctggttagttctctggcttattggcaggtggtatgtgtctaccttcttaactgtcac

SEQ ID NO: 31623 - DNA, 1935 bp, Oryza sativa
  Clone ID: PAT_MRT4530_35911C.1
atgggcacgattgcagccaagattctgccgtgggaagcgccatctcgtgagaccctactgaggacaatcaatgctgctctcgatgacggcaatgtcgacgacgtgctgcaagcatttgccaattacaagaccctgcatggccttcctgagccgcgggtgttggacaggatgatcgtgtcgctgtcctatgcgtctagcaggagatggcttcagagggcattcgacatggtcttgtcagtttaccaatgcaatggcaaccttcttaattgtggctcgctgatgaagctagctctggcgcttgccagagatcagatgccgattccagcctccacagtggtgaggatcatattggagagcggcaagcttcctgatgttgatatgctgaccatggtgtacttgcatatggtgaagtcacaagtaggatcctatcttgctgctgatgttttgtgtgagacctgcgagtgtttcttggagcagattggagatagaaggcagctgaaaaaactggatccaataaagagtaatgttaccttgtttaatatggttttgaagtcatgtgtcgatttcaaatgcatgatcaaggcccaaagaataatggagcttatgtcgctggttggggttgtggccgatgtaaatacagtggctatcgctagccttgtctttgagatggttgggcagcaagttgaattggtgaacatgaaaagaagtatcgattcttttgcatctttgccgttcattcagcactatctatatttttatggaagtctgctgaacctgcatttcaaatataatgacatggatgccgctgctcagcttttggttgatctgtatcgacaacaaaagcctcgtgcttttgttggtgatagtgtccataaacaaggtgtaatacagataggctctggcaacctgaaaactggattcagaataatgtttgaccccataaaagtggacaaaggtttcgttttagatacagaaagtcaatttggccttcttgctgttattgatggaaatattcgtcctagtgagaaggctcttgctaaattcattgttggctgtttgaaagcaagtaaagtgcgtgcattgtctagctttcttattacattacacaaggaagatctaaaggggccatctcattcagatgtaattagtgcatgcattctgatgggatggttgcatgctgctcatgatatcctggatgatttagagtcagctgagattcctgttctaatctgtacttacatgtctcttttgagagcatatgagaaggagaataaaccggaagaagttaataggtttctccaacagatacaaaagaaagcatatacaatggctgattttcataccaatccatcctttaccataaaggatgttgccaaaatagtcaaggatgagatgcccctcagaaattcgtctttgctttccagtttggttcaagaaatagaacattatagctctcgagagcacttaacttttgagttcaataattcaattcttttcttctgcaaggcaaatatgatggacgatgctttgagcacatataagcggatgagagagcagaatgtaagacccagtctgcataccttttgccacatactgtgtggatattcttcactaggcatgcatagggagattgccatgctgtggggagaaataaagcgcagactcgaatatggagagctaactgtggatagagacttgcttgactgcttgattttgaatttcctaaacgctggctattttgcaagagtcatggaggttttaagttacatggcaaaccgtaaaatgtactgtgacaagtggaaatacaagcaagtttttctaaagctacacaagaatctgtatagaaatttgaatttgctgcatgaaaaaacagaacaacagagtaaaagaatagaagatgtcagagctttcagatcctgggcaggcgtcaaatag

SEQ ID NO: 31624 - DNA, 477 bp, Oryza sativa
  Clone ID: PAT_MRT4530_35912C.1
gcttgtatccccatcgacaaagctagctaagcccagtcatggccgcctgtcacgcagtgccgacactccttctcctcctactcctagccgaactcgtcgcggcggacgatgcctacgactgcgccggcagcgccacccgcaacgccggcgccatccccgaccacaacatcttggacatggaggccatgtgccccaagacgacagacgtgcatgcgtgccagcgactggtgaagaacatgccaggcaacatgcgacgagagaagaaggacgccaggagcatcccccggggaggcatcgacaccggctgactcgtggagagggacggccccaaggactgcaccgacgccgtggacgagtgcaagaacaaggtggaccagtgcctcgacagctgccgtcacgctcttcccgacgagaacgacgccctggagccccagggcacggaccacgactccgttaaggtccccgaggacgagaagc

SEQ ID NO: 31625 - DNA, 2064 bp, Oryza sativa
  Clone ID: PAT_MRT4530_35913C.1
atgccgcccatgctccacgccatcctcctcctcgccgtcgccgtcgccgccacctcggcgtccgcggcgacggcgcctgcggccgcgcgaaacagcacctccaactgcaccgtgccgctccctgacgccggcatcgtcaccgccgcgttcaagaacgtcgccaacttccccctgccgcggcggccgtcgtgccggcccgtgcggaggctcgcgtactcgtcgcggaacctcgccggcgtcgtcgggtgggcggcgctggggaacctgtccgggctgctcaccgtcgacctctccgggaactccctcgagggcgacgacggcttcggcggcggcgcgctctggcgcgcgccgctgctccgggccgtcgacgtgtcgcgcaaccggctcggcggcgcgctgcggctcggggcgagcgcgcggatggcgtcgctcaacgcgtcccgcaacgggttcacctccgtcgtcggcgtcgacgggctcgccgccggcctggtggttctcgacgtgtccgggaacaggatcgccgccgtgccggaggggttgcggcggctgacgcgggttcggcggctcgacatgtcgcagaactcgatggccgggaagttccccgacgacctaccaccgctcgacggcgtagagttcttggacatatcggataacaacttctccggcgtcgtgaactccacctgggtcaccaagttcggccgctccgccttcctcagagccggcaatgcgacgtcactagtgatcgaggacaacccgccggcgtcggctccggctccggcgccggcgacgatgacgccgtccagtggcgggaagaagcacaagcgtgtcgttctcatcgtcgtcgtcgtggtctgcggcgtggtggccgtgtccgccgcggtggcgttcatggcactggcagggtgcgtggcgtgtggcttcagccgccggaggaagagagggaagaaggcggcggcggcgtgggaggacgacgaggtcgccgtgggcgcggtgaaggtggcggccaccgcgccggtggtgctggtcgagcggccgctgatggagctgacgctggccgacctcgccgcggcgacgtcggggttcgggcgcgagtcgcagctcgccgacgtcggcggccgcagcggcgccgcgtaccgcgccgtgctcccgggggacctgcacgtcgtcgtgcgcgtcgtcgatggcgcggtggccggggtcggcggcgacgacggcgacgtcgcggcggcggctgccgggctccgggaacttgcaaggctcaggcacccaaacattcttccgctccttggctattgcattgcaggaaaggagaaactcctcctatacgagtacatagagaagggcaacctctaccggtggctccacgagctaccggcaagtagtatggacatggaagaaaccggtgctgatatgtgggacaccacggagcaggacaagaaatccatagatgattggcctacccggtaccacatcatactaggaatcgcacgagggctcgcgttcttgcaccagggatgggcaggatcatcgggacgtccaattgtgcacggcaatctggtcccaaccaacatcctcctcgacgatgacctagagcctaggatatcggactacatacaccccgtggatagtaacaatggagagctgaccccagagagtgacgtgtacagctttggcgtgctggtgttcgagcttgtgacaggacaggtgagatgggatgattcgacggtgagctgggcccgaggtgtgatccggaaccgaaagagcctcaacatcgtcgacgcgaggctaagagaggaagaggaggagggcggcaccagtggagcagcaaagacaacgatgacggtggcggagcgggagatggtggagtgcctgcaggtggggttcctctgcacggcgcactcgccggagaagaggccttcgatgcagcaggtagtgggggtgctcaaggacatcagggccggcgcctcctcctcccgctggaggcgccggcgagacgccatgatggagacgacgatgacggtgcacgcgagagaacacgcacagtttctccatcgtggatag

SEQ ID NO: 31626 - DNA, 648 bp, Oryza sativa
  Clone ID: PAT_MRT4530_35914C.1
cgggctgcgcgcgtcggctcctccaaataagccagtgatattatcaggtactaaggtgggagttatttgagtggtgcgcctgtaggtatttaggtcaatcatctcctcgcctcagcctaccaccctattttgagcttaaagattgaatttcaatccatgtgacattggcttcaaggtaaacatgattttatttttaagattgcattttagtttgcagggggcatacatattctaactatatttttacttttagttcatgcatgcttcttacagctcaatttatgtataatccatatttttgaggtttctgcaaacacatgattatattatcgttgtaattaaactttggatgtgattatatactttttcagggcatgtatctcaattaattttgataggagcaatgctgattggaaatatatttctatcggagcaatactgatgagatacaatttttttagagcaatttggaaaggatttgatcataataatactgattgcaaaggtgtacaaagtctaatttattcataacatgcgcagtgtcttatcacactgcaattcaatagttgcattttatattttgcttaacgaagaataaataatctttatgatacaggttccacttaactttattgcaacccttttgct

SEQ ID NO: 31627 - DNA, 526 bp, Oryza sativa
  Clone ID: PAT_MRT4530_35915C.1
gcacgaggctttggaagtccaataatctgcaatgatcgaaggctctgtagcccatccatggcctcctcgtggatgcatcaaatcaagctccgggcagttgtcgatgagcatttcgcggagagcggagaggttcttcatgctggctgggagagaagggagctttgggcagtcactgatccacagcatttctagggaagttaagtagccaattccttcagtcagtgaggtcagttcactgcatgagtgcagctgcagggatgttaaggaagcccaaccacgaagtcctgtttctggcaaatgcttcagtttacatgtcaagctcaggtacttgaggctgattaacttttttacatctcttggcaacttgactagatggtcgctccggtaaagatcaagtgtctgaaggtttatcagcttgcagagagaatttggaaggaattttaaggttctgttccaggtgagatcaagataccttaggtgcttcagatttcctattgaatctgggagttcttcaatgctaacctcc

SEQ ID NO: 31628 - DNA, 1905 bp, Oryza sativa
  Clone ID: PAT_MRT4530_35916C.1
atggcgcgcgcggggcgcctcgccgaggcatccgcgctcctcgacgccgcgccgggccccgacgccggcgcgtacacggccctcgtctccgcgttctcccgggccggccggttccgggacgcggtcgccgtgttcaggcgcatggtggacagcggagtccagcccgccatcgtcacctacaacgtcgtgctccacgtgtactccaagatggccgttccatggaaggaggtggtggagctcgtcgcctctatgaaggaacacggcgtcgcgccggataggtatacgtataacacgctcatcagctgttgccgccgtagggcgctttacaaggaggcagcacaggtgttcgatgaaatgaaggcttctgggttcgaacctgacaaggtcacattcaattcgctgctcgatgtatatggtaaggcgcgaaggcacgacgaagcaattgaggtgatccaggagatggagcgtgtgggctgcccacccagtgtggtgacctacaactcactcatttcgtcgtatgtgaaggatgggttgttggaacaggcagttgcgctcaagcaggagatggaggtgaagggaatgaagccagatgtggtgacatacacgacattgatctctggccttgacagagctggcaaaattgatgcagcaattgtggaatatgatgaaatggtgaggaacggatgcaagccaaacctgtgcacatacaatgcattgatcaagatgcatggggtgagggggaagttcccagagatgatggctgtctttgatgagttcaggtctgctggttttgtgccggatattgtgacctggaacacgctcttagctgtgtttgggcagaatggtttggattctgaagtgtctggggtgttcaaggagatgaagaaagctggttacatccctgagagggatacgtatgtttcacttattagttcgtatagtcgatgtggtttgtttgacctagcaatgcagatatacaagaggatgatggaagccggtatataccctgatgtttcaacttataatgctgttctgtctgccctggctcgtggtgggcgttgggaacaagcagaaaagttgtttgctgagatggaggagcgagattgtaagccagatgagtatagttattcttcattgcttcatgcgtatgcaaatgcaaagaggttagacaaaatgaaagctttatcagatgatatatattcagagaggatagaaccacataattggctagtgaaaacattggtcttggtcaacagcaaagttaataatttagctgaggccgaaaaggctttcctggaactaagacagaagcggtgttcattggatattaatgttcttaatgccatggtttccatatatgggaaaaacaggatggtcaggaaggttgagaagattctttcactgatgaaggaaagtgctatcaacctcagtgctgctacctacaatagcttgatgcatatgtattctcgtttaggtgattgtgaaaagtgtgaaaatattctcactgagatcaagtcaagtggtgtgcgccctgatagatattcttataacactgtgatctatgcatatggaagaaaaggacagatgaaagaagcatcaagattgttctctgagatgaaatgttcaggtctgaaaccagatgttgtaacatacaatatttttgtcaagagttatgtctccaactcaatgtttgaggaagctattgagttagtacgctatatggtcactcaaggttgcaagcccaatgagagaacttacaattcaatagtggagggctattgtaggaatggaaagttgactgatgccaaaatatttgttagcaaccttcctcagcttcatcctggatattctaaacaagaacagcaaaatttgtttgaagttatagcaaagtacactcaaagatag

SEQ ID NO: 31629 - DNA, 1854 bp, Oryza sativa
  Clone ID: PAT_MRT4530_35917C.1
atggtcagggtggtagtgggcagcaggagagtgcatgttcagttgctgattctgcagctgctggccgcgatggtggctgcggcggaagaacccgcggtgccaaccgcgaagaaaatcaagagctgcaccaccagctgcggtaacatcagcatcgagtacccgttcggggtggagcccggctgctaccacacagtcggcttcaacctcacctgcgaccactcataccacccgcccaggctgttcctcggtgatggcacggtgcaggtgctcgacatctccatccccaatggaaccgtgcgcatcaacagcggccgaatcaatctggagtacgatggccgtggaagcgcaaacgggacatggggcggtggcctcccagatggcgggccgttcttcctgtcggagtcggggagtagcctagtgttgatgggccacgatagccaggtcgacgtctgggggctgggaggggacaacccgatcgcctcctgcagtgtcatctgcccaaggatcccatcagcaattttcgggataagtgcgtgctcgggcatttgttgttgtcaaacaaacatcattttaggctactcatcctatctcatccagattcacggtgatgcaaactttttaaatatctacatggtggaccagggattcaactataccaatttcattaattccaatgtcgatctcattatttttgattccgacagagatccgcaagcgctcccagccttgctggaatgggtaatcagtaattcgacaagttattgtcctagaaattcatctgcccccgagtgtcgcagtgcccatagctcttgccaagacactgatgcttgggcaaacaacgggtatcggtgcaagtactcttatggttatcaaggcaatccatacatcattgatggatgcaaagggctaagcatagctctaatagtttctggtggatcaattgttcttattctggtacttgctactcccctagtagcacgtgtggtcaagcaacgcagggagaaaaaactgaaagaaaagttctttaagcaaaatcatggattgctactgcagcagttaatatcaagaaacacagattttggtgagcgaatgataattaccttagaggagctccaaaaggccacaaacaattttgatagatcttgccaagtcggagatggagggcatggagtcgtgttcaaggggattctagacctgaatgttgtggccataaaaaaatcaaagattatagttcaaagagaaatagcttcttcaatgccaatttatcatagagatattaagtcctccaatatacttcttgatgatagtttaacagcgaaggtatcagattttggggcttcaaagtacaccccgatagatcgatctgaaataactacaactgttcaaggaacaattggctacttagatcccatgtactattatattggtcgactaactgacaagagcgatgtttttagttttggagttcttcttgtggagttgcttactcgaaagaaacctgttgttgacacgttcgatggtgatggccttgtttcacattttattttgctgctctcagaaggaaaccttattaacataatagatcctcaagtcaaggaggaggaagatggagaagtccatgaagtagctgcactgtgtactaaattgaaaggaggagaacggccttcaatgagagaagtagagatggcactggaaaacatattatcaaaaaagggccccttccataagggaaatagggaatcaagtagacccagtaaaaatcaaatttcagcactatacatgtcaattgaaggagttgccacagaagcaagtagtcaatccatggaagaggaaatgctatcgtttcctcgataa

SEQ ID NO: 31630 - DNA, 250 bp, Oryza sativa
  unsure (1)..(250): unsure at all n locations
  Clone ID: PAT_MRT4530_35918C.1
gacgatctcaatngcgctcgtctccncctcctcctccaccaccnccgtcgcgntntancccngcgctatgggcctcctccttcctcggcggcgctcaggagcggcaggctgctgctgaggcaggccgagtcgtcgtccgcgngggcgtcgttngccntggcgccgggcgcctgacaggccaatctggttccccggcagcaccccgncgccgtggctcgacggcagcctccccggcgacttcggcttcgan

SEQ ID NO: 31631 - DNA, 296 bp, Oryza sativa
  Clone ID: PAT_MRT4530_35919C.1
tctttttttttttttttttgtttgtatgttatcttttcttttctttttttcacacatttgttctttgttaagtaatcgggagcagatagcagtgaatcttgcagaacgagcacttactcacgctggaagctctatttaggattatacaaacagcaaacttccgactggagaagaacccatttacatcgtgctttagcggagtacaaaaaaagcaccctgcttatctggtacagctgtctatacattgctgcatagcatgacgattggaagattgtttttctactcacgacctgctt

SEQ ID NO: 31632 - DNA, 440 bp, Oryza sativa
  Clone ID: PAT_MRT4530_3591C.1
aaatccttggggtttttaaaaaaaaactttttcctttcaaaaaggattttaacttttcattttcaaagcccactttaacttccacccaatcttcattaccagaagggaatctacaaccacttcagttttaacatacttaggcccccccaaacaccggaccccccatcccacaaaaaaaaacgcggcgcccccccccccgggaccctcggtaagcccccattaaccccccacagggcccacaaacccgcaaatctcttctcctggaaccccaaagccacctcaagacccctcgtccccttcttttatcccccaatgccaaaacccccccttaagtgtccctttttttcggcacaccacaccacatttttttttttaaaaaaaaaaaccccaaacccgtggccccccacctttataaaccaaaagaaaaccccttcttaaaa

SEQ ID NO: 31633 - DNA, 339 bp, Oryza sativa
  Clone ID: PAT_MRT4530_35920C.1
atggggaaagcaggccagcaacaaaaaggaaaatggacctctgcgatgcaggtttgttgccagagttttggaacaagcaaatgcattttagagagagaaggagaaaaaggccttggcatctatggtaggaaatggcgaggttgtgttgcttgcatcctcctccttggccttcgatatcttgaagagggcttcatctatcatgaggccttacgcttcctactttcttcaaattccatccttctagatccctcattcaatgagaatgacattgttaagaagttcaaccatgtccagatgtccttatcagcaaagtttgtattcgtcatatgcactagataa

SEQ ID NO: 31634 - DNA, 224 bp, Oryza sativa
  Clone ID: PAT_MRT4530_35921C.1
tggccttctcaagctttcgctcagcggacggagacatagcaaagcgactgggactttttagcctcgctttgctatcacctccggctgcgcgaatagcgagaccatacacagtgagccaggactagaaacctgagtttgcgccatactttgtaatgccaggcggcttaaaaacaacctgccaaaccactcgactcaagtcacttgtgaaggctgcaactccatct

SEQ ID NO: 31635 - DNA, 415 bp, Oryza sativa
  Clone ID: PAT_MRT4530_35922C.1
gttggctgcaaaccaatatctgactttgtcaaaattttgtcagtaccccgatttagcatacaaatgttttggtaaggttttacattgatcgtaaaccaaaccagaccttactttgtcaaacgtaaaaacaaaagctagaacctaacccttcattttaatcattactcctttttcttgattctgagcagcacttagcagttgaagagagaaggccaaattttaactatgaatctaacacaaatcattcacatataacttcagggaggcacaccctcttcacagcaaatgtattgcgggtaaatgcgtactctttttggctacatgaatcaacttagggcatttttccttcaaaagaaggaaaattgctcgctagggcttttaggacattctgatatttacaagagctggttgatga

SEQ ID NO: 31636 - DNA, 315 bp, Oryza sativa
  Clone ID: PAT_MRT4530_35923C.1
atgaggagccgatgcggaggcagcacggggaggggccgaaggcgggacggcggtggaaataggcgatgggagtcctcttgcacagactgcagcacgacaagccactcaatgtcgtggatgacgtcattggggcgcactatcgtagtcgatgaaggcgggtggcactggagagtgcaagatagacggacagcaccacaggtgaagcgggaggcactggggaggggccgatggggaaagtggatgggtggcaggatccgcttagttagcaatgatggctcgggaggtggtgttagcaacgacggtggtgctaggtag

SEQ ID NO: 31637 - DNA, 618 bp, Oryza sativa
  Clone ID: PAT_MRT4530_35924C.1
atggggtcgggcatggccggcatcgaggccggagcggggaagacggcggagacggcatcgtcgacgtgcccagttaccaaaggtgaccttcgcaccgacgaccttgtccccaaccatgccctccgccgcgtcatccaggcatggtgcgtcgccaacaacctccctcctcgccgccttcccgcatcacccctccctgcgccgcaatattgctcgtctccggcaccggagacagcaagcccggtggacagggaggagctgaaagcatcgccggcggcggcgtgtcctctcctggcgacgacgttcaccaatcctgttgatttcagatgcaagagttgtttgttgcatttgtcgttcgccgcggcgagtgagtcgagtgactcgtcggcgtcgtcggtcctgctcaacaacgtcctggcggtgctggtgctcgtcatgccgctcgacgaggaggccatcgtggccatcggctcgtcgatcaccacgtcggtggcgctgctcgccaacgttgccaagcacggcgacctgcagaggaggctccaggcggtggtcgtcattatggagatcgtttgtgttgtcctcgtgctgctcacgcaacggcggcgctaccaccgccattga

SEQ ID NO: 31638 - DNA, 744 bp, Oryza sativa
  Clone ID: PAT_MRT4530_35925C.1
ctaggccggcatcgaggccggagcggggaagacggcggagacggcatcgtcgacgtgcccagttaccaaaggtgaccttcgcaccgacgaccttgtccccaaccatgccctccgccgcgtcatccaggcatggtgcgtcgccaacaacctccctcctcgccgccttcccgcatcacccctccctgcgccgcaatattgctcgtctccggcaccggagacagcaagcccggtggacagggaggagctgaaagcatcgccggcggcggcgtgtcctctcctggcgacggtgagatgttcgtgttcgactagaatacactggatggaagcgacggcagccaccacctgtggtggccagagagcgtccgtattgtgtactgatttaactttgtactgagttttgtgtactgatttaactttgtcattcagacgttcaccaatcctgttgatttcagatgcaagagttgtttgttgcatttgtcgttcgccgcggcgagtgagtcgagtgactcgtcggcgtcgtcggtcctgctcaacaacgtcctggcggtgctggtgctcgtcatgccgctcgacgaggaggccatcgtggccatcggctcgtcgatcaccacgtcggtggcgctgctcgccaacgttgccaagcacggcgacctgcagaggaggctccaggcggtggtcgtcattatggagatcgtttgtgttgtcctcgtgctgctcacgcaacggcggcgctaccaccgccat

SEQ ID NO: 31639 - DNA, 1410 bp, Oryza sativa
  Clone ID: PAT_MRT4530_35926C.1
cgaccacctttcatcccaacgcacatacgcacctacgcatcactcaatcgatcaacaatggcgtcgtctccactgccggcgttcacggtgcggcgaggcgagccggtgctggtgacaccggcggcgccgacgccgcgggaggtgaaggcgctgtccgacatcgacgacggcgagggcatgcggttctacagctcgggcatccacctgtaccgcaacaacccggccaagaaggggcaggacccggccatggtgatccgggaggcgctggccagggcgctcgtcccgtactaccccctcgccggccgcctccgcgaggaggccggccggaagctcgtcgtcgagtgcgccggccagggcgtcatgttcgccgaggccgatgccgacctcaccgccgacgacttcggcgacgtgcagagcccgccgttcccttgcttcgagcggttcatcctcgagagcaccaccgtcgccggcgtcgagccggtggtcggccgcccgctgctctacatccaggtgacgaggctgcggtgcggcggcttcatcttcgggcagaggttctgccactgcgtggtggacgcgccgggcgggatgcagttcgagaaggccgtgtgcgagctcgcgcgcggcgccgccgcgccgtcggtgtcgccgtcgtgggggagggagatgttcatggcgagggacccgccgcggccgtcgtacccgcacctcgagtaccgcgagccggcgggcggcgcggaccggctgctggcgacgccgccggaggacatggtgcgcgtgcccttcttcttcgggccgcgcgagatcgccgggctgcgccagcacgcgccggcgagcgtccgcggcgcatgctcccggttcgagctcgtcgcggcgtgcatctggcgcagccgcacggcggcgctcgggtacgcccccggcgaggaggtgcggctctccttcatcgtgaacgcccggggccgcgccgacgtgccgctcccggaggggttctacgggaacgcgttcgcctactccgttgcggcgacgaccgccggcgagctctgcggcggcgacctcgggtacgcgctggggctggtgaagaaggccaagtcggcggtgacgtacgagtacctgcagtcggtggcggacctgatggtggtcgccgggcggccgctgttcgcgctgtcgcggacgtacatcgtctccgacgtgagccacgccgggttcaagagcgtcgacttcgggtggggggaggccgtctacggcggtccggcgaagggcggcgaagggccgctcctcggcgtcaccaactacttctcgaggtccaagaatggcaagggcgagcagagcgtcgtcgtgcccatctgcttgcccaaggacgccatggacaagttccagctcgaggtccaagctctcaccgccgagctcagctag

SEQ ID NO: 31640 - DNA, 378 bp, Oryza sativa
  Clone ID: PAT_MRT4530_35927C.1
agagatggctaaagtcgggtgatggatatctctgagacaaatgaaggttatcgggcgagtatttcgataatcaaggtgtcgtggcataggacgggcatctcggtggccactcctgagggatgttctgatgttgtggggctcaaccctaacctacctgtcccgggataccggccgtaggcggagttgcgtcggtacttttgttcacaactaggatgggtgaagggttatgccacgtttttatgatgggttccaattgcaatagaatgcagagtaaaggtgtttcttcttggttggcctaggttgacttgggacgagctggggcctggctataaggctgccagttcggtctaactcatcgtaggcccttgggttaaggca

SEQ ID NO: 31641 - DNA, 1014 bp, Oryza sativa
  Clone ID: PAT_MRT4530_35928C.1
atggccctcaagtgcgctatcgacctcggaatccccagcgccatccaccgcaacggcggctctgcctccctgcccgacctgctcgccaccctcccaatcgcagagaacaagaggccattcctgcatcggctcatgagattcctaactgtgtccgggatcttcacctcggctgatgatggcgtgtaccagctcacgagggtgtctcgacttctggtcgatagcatcccgctcaacctgctgccgttcgcgagaggggccgtcaatgaaaacagtcggaaaatatcggaaacgtcgggaaatttccataccgttttcacccgtaatttcaggtcatttctctgcttgggcgagtggtttcgagatggcggtgataccacgccgttcgcaatggcgcatggcatagatgtatggggcgctatgagcctcgatcgagctcttgcagcgggtttcagcgcgtccatggcagccgacagcaagttcttggcggagatagccatccgcaggcacgttgaagcgttcatgaatgttagctcgctggtcgatgtcggtggcggggatggctcgatggcgagggccattgtcaaggccttcccacacatcaagtgcctggttctagacctaccacatgttgtccgtggcattcccgctgatggttttgttgagtatgttgcgggtgatatgatggattttgttccaccagctaatgttgtgctactcaaacttgtattacatgattggagtgatgaggattgtgtaagaatcctgtcaagatgcagagaggctatttcaaatagggaaggaggcaaagtgataattatagacacagtgattggatcacaatctcaacagatatatgaagctcaacttttcttggatctatgcatgatgacagtgacaacaggcaaagagcgagaagagaaagagtggcatatgatatttctgaaagcaggctttacacaatacaagattttacccatcttggggattaaatcactcatagaggtatatccataa

SEQ ID NO: 31642 - DNA, 255 bp, Oryza sativa
  Clone ID: PAT_MRT4530_35929C.1
atgtttggtttggccgaacctggatctagccccctcggcaccctattcaaccgtgcactcgccttcactgaggaggatacaaagggggccggtgtgaacgagcggtggctataccgaatggtgtggcctcggtctcgcaagaccgaggcgccagtgccgtcaccggtggctgccgtgtcttttgtgtggccttggcctatcaagactaagccgatgagagccgatgttggtgtgaccgagctgaaggcattctga

SEQ ID NO: 31643 - DNA, 360 bp, Oryza sativa
  Clone ID: PAT_MRT4530_3592C.1
gcccacctgtcagtgggcctctctgacctcaccttcccttctttacggccggcgaccgaagcggtgacggccggggtggccggcgagaaaggagcagcgcgtgggcgccagccgacagcaggagaggagcggcacatgtgcacgggcggcggctggagaggagaggagcggcgtgtgtgcgcggccgatggccggcgagaaaggagcggcgcgcgggagccggggggaggcgtcaccgaccacgcccgagaggagaggtcgccgaccatggccacgtgtgtggggggaggcgttggccatagagcgcgcgagctcgacggcgttgatgaagccgttgccgccggcggcctccccgcccca

SEQ ID NO: 31644 - DNA, 3455 bp, Oryza sativa
  Clone ID: PAT_MRT4530_35930C.1
agcagactaccaatgatttccagagattatttagaaaggaacaacacacacacacacacacacacacacactctgactgctgatacagaatcttacagatgtcaccagcaagagttcagtcacaagaacagaaccactagtacgtagataacaagtgcagcgacatgcatggtaacaattgaattgccaactctcagataacaccaggactccactcaggcaaccatggataccttcttcatgcatcatccctgaaccttgtcacaggtgtctctcaggcgtatcttgggacctcaggatccagtacttatacatgggatgatgggaatgacctactgagcctacagaattttgtgcaagagcactaggatagaagtgggatgtattccttaccatcgaaaccaggcgctagcaacgtatcagctggacaattcagagtccatctccattggtcgatctcccctgtaaactctcggcttgttaggatgcttcttgcacacagctaccatgctctccaccacggagtcgacgatgacatggccaaagaactcaacctccttgagccttgggagcttgtcaatgccggagatgccatctgcaggctccttgaggacggcgagcgtgagcctctcaagctcgggggcgcctccttggaagctaagctcatcaaggttgggcatattgtccacgatcagctgcttgagcctcgggaatagcttctcccggaagtggagctctctccccatatatgactggtagtagagcttgagggagaggaggctagggagcttgcctagctgctcgatgacctccttgccatcaaggaagttctctcggagcgagaggtcgaccagattgccgaggtgtgagacccaaggaggcaacatgctaagcttgccccagaggaagaacttctcgaggaagatgggtggcgagtctagatctaggagttcctcgaggccagcgtcctcatttaaccagtggaggatagacaagctgcggagggagtagctgagtttgttgagggacacaatgaatggcttccatttgttaggccccttttcacagttcatgacgcagagcttggttaggctaggtaggtcacccaactcgcccatggcgatgccgctcgacgtgacgttggcatgggcaatggtttggagggactccatggcgctcaagccaggtggtattgtcatggcctcaaatggctcaaagagcttgacacggtggctccttgtgtagtatctgtacctgcctgatagaagatgcctcatgtgtcctagccgggtgatcgtctccggcaactccctcacatcggtttccctgacgtccagtgtcatgagctgtttcagtctcccgaccgaccgtggcagccgctgcacgcctgtgtccctaaggcttaggtacctcaagagggagagcttgcagatgtcgtccaattcacggctgcttagccaacgacaaccttcgagatccagcaccctgaggagctttaggcgcttgaagctaattgatggcagtggtttctcgatgcaccggagcatcaacagcgagcgggcgcaagacaagtctacggacgacaagacgtcgtcctgaccctcgccctcgcccttcttccttctcctcctaaacctaaagatatcctcatcaccaccaccactcctagattgttgcccctgcggcatgtgggagccatggacagatagccgccggatcttgtcatgcccagtcgtcgtagccgcggtatgttggtgacgcccgtagctggtcacgctccccaacaaggagatgaagttctcctccacgcacttggccgtcatcacctccagcatgatgtcgtgcaccttacaacacctaaccacgccattggtggcgacccgagtgggtgtgacgatgctcctgccaacgaactcgtctatgtacttgccggcggcctcctcgggggtccactcccgcccaccgccaacgaacccctcggcggcccatcgccgcaccaggggcccccgcttgatctcgtacccctcgcggaagacgctgaggtagaggaagcaagccttgaggtggtagggcaggtcgtggtagctcagcgacagtatccgcctcatccccctcaccgccgcgctcgtgctcagcccggagcccagcttgccgcacaccttcgtccactccaccggcgtcttgttctccgcctgggccagcattcctcccacactgactatggccagcggcaggccgccgcatttggtcaagatgtcaccggagatgccctccaggcttcggtactccgacgggcaatgctccttctggaacaccgtcttgaagaacagctctctggactgatcgtttggcagaacatccatgaagtgaacgcgatcgccgggaagcgagcagcagctctcagcaacctgacggttccttgcactgattattattcgactatgcttgtcattgtcgggaaaggctggcttcaagcttgcccagtcctccagactccataagtcgtcaacaacaataaagtatctcttgtcgctcagatgagtactgcaatgggcgaggagttggggaatgtccttggtttcgatgcctctgagtatttcatccttttccatggccatgatctccttcctggagcagcgtggatctcgcgccggcgcgaacagctgctccagcagcgactccagcatggcgcgaaggttgcagctccgggtcaccgtcacgaacgccctgtgatggatcccctgcaccgccgggctcttgtacaccatcgccgccagcgtcgtcttgcccaggccgccgaagccgacgacggcgaccaccttccggcgagccaagccgtcgtcgtcgccgtcgtccttgtgttccagcagcttgaggatggctctggtcttgctgcggacgccgacgaggcgggactcgtcgacgctgagcgccggaaggcgacggtcgaggtcgtcgtagcagcggggcgcgtactcgccggagctcgacgccgcggcgggcggctccagcctgtacctgagcctccgctcgctgaccttgagcgcgcgggccttgaggctctggacctccacggccagcttgtacatcgcccgcagcgtcgtcagcggccggagcgccgtcctgcgcagccagccggcgacgacgaggaggccctcgtcgtggttccggtcgccgccgacgtggtaccggaaactgtcgatgcagtcctccgcgtcgtacgccacctccctcacctgcttcatccacgtcctagtctgctgggactggtggtagtcgccgacggcggcgaggtcgcggaggcaggcgttcatgctctcgaggtcgtccttgagctcctggatctcgtggcggacgccgctgaggaggacgtacttgtcggagaggaattcgccgagcttggccaggaggatgcgcaccacgccctcggtcgagctcaccacggcggcttccat

SEQ ID NO: 31645 - DNA, 452 bp, Oryza sativa
  Clone ID: PAT_MRT4530_35931C.1
ggaagctgaaagcattattggacccggatttcacaaatgttgtacacctgcgtacaatatgcaaactaacattaccaaacattcctgtgaagaaaacaaacaacaaacatgttgattcccataaccaaatgcatgcagtgttgaaagctacactggttactaccaccaggagagtaactagatggcatttcacttggccattataaccttcacgaatttttcgtaattgatctgaccattaccattgacatgagcctcagggatcatctcatccaccttctgtgttgtaagcttatcaccaagtgttggtatgacatgactgagttcaggtgcctagatgaagccattctggtgcttggaaaatacacgggaaggcttcttgagctcctccacagaatcagtgtcctatatcttgcgtgccatcatgtggggaaacttagggaagggaatcg

SEQ ID NO: 31646 - DNA, 936 bp, Oryza sativa
  Clone ID: PAT_MRT4530_35932C.1
cactcgagcagagcaaatacagttcaggaatcaggagcaagcagaaacacacacacaaatccgaagatgtgcgggatcaagcaggagatgagcggcgagtcgtcggggtcgccgtgcagctcggcgtcggcggagcggcagcaccagacggtgtggacggcgccgccgaagaggccggcggggcggaccaagttcagggagacgaggcacccggtgttccgcggcgtgcggcggaggggcaatgccgggaggtgggtgtgcgaggtgcgggtgcccgggcggcgcggctgcaggctctggctcggcacgttcgacaccgccgagggcgcggcgcgcgcgcacgacgccgccatgctcgccatcaacgccggcggcggcggcggcgggggagcatgctgcctcaacttcgccgactccgcgtggctcctcgccgtgccgcgctcctaccgcaccctcgccgacgtccgccacgccgtcgccgaggccgtcgaggacttcttccggcgccgcctcgccgacgacgcgctgtccgccacgtcgtcgtcctcgacgacgccgtccaccccacgcaccgacgacgacgaggagtccgccgccaccgacggcgacgagtcctcctccccggccagcgacctggcgttcgaactggacgtcctgagtgacatgggctgggacctgtactacgcgagcttggcgcaggggatgctcatggagccaccatcggcggcgctcggcgacgacggtgacgccatcctcgccgacgtcccactctggagctactagagctcaatcaactgtacaattttgcctcttttttctctcttttctggcttccgatgccaaaattttggtactgtacggacactactttcggtaatgtgatggaacaagttgcaaacacagagcatcttcatttgagtcaaaaaaaaaaaaaaa

SEQ ID NO: 31647 - DNA, 582 bp, Oryza sativa
  Clone ID: PAT_MRT4530_35933C.1
atggagtggagtggtgcggaggcgacatggtgcgaggaggcatcggcgttggcgacggaggccgccgcagcgcgagcaggtgcacgaggccggcgcggtgaggtggcggaggtcggcgcgacatggttgaagcggtcggcaatggtggaggtcggtgcgacgaggcacggccggccacagcagaggacggcgcggcgcatgtgggaacgaccgacggcggtggtggactggaggcgcattgcccggcgacggtggtccctggtgccgaggcatattcgaaaggcggcggggtgctcactcagggcggtgactgaggttgacctggccgatgggctcagtggcggcgaggctgccgcggtggaggacgaaggcgacgatgatgcgaccggcggctcgttgacacgcgacggcttgccaccgcaagatggccagactggacgagtggacgggctagtgtggggagagttgatccatttttcactctcacgaaagtcacagtcccaccctttccctctccaacccaaccacgtggatagagttgaagccctcgaaggacgagactccactttgatggccgactag

SEQ ID NO: 31648 - DNA, 1180 bp, Oryza sativa
  Clone ID: PAT_MRT4530_35934C.1
ctgaaattgattttatctgtttttgaaaaattatatggcttaaaattaaattttcataaaagttaattattttgttttgatcaggctaaggattattatgaccaatattctaatatgtttagttgtaagctgggttcttttcctgggttcttttcctgtcagatatcttggtattaactatgcattttagaaagcttagtaacaaagattggcaaactattgataaaagaattgagaagaaacttagtcgttggaaaggaaaacatatgtttgttgggggaatattagttttgattaattctgcactttcaagtttagttatttttatgatttctttttttaatattccaaaaggggttctttaaaaaatgattattataggtcacggttcttttagcaagaagatgatcataagaaaaagtacatactcacatgatgagatatcatttgccaacccaaagatcgagggtgtgggggtttgggtgttcataacctggaaattcaaaacagatgtctcttgagtacatgattgtttaagttaattaataagcaaggggtttggcaggacttattgaaaatgaagtgtctttctaatctttctatattccaagttgataggaaatagagagattctcatttttggtagggtctcatggaagttaagattactttttaaaacatgggttcttagattgtgaataatggggaacaagttagattctgggaggataaatgattacgtaacttgcattttaaagataaatacccgtccttatatgctataattcgaaggagaaactcttctatccgctgaatgtttcttttaggagagctttagttggtcagaatctagcaaattggaatgaattgtgtgcttcaattgtgcatattcagttgacacaatagaattactgttttagatggaattttcatcacaatggtcagttttttttgttcgatcgatgtatttagctctaataaacaatggttattaagcttaaattacctctgaagattaagatctttatgtggcacatgcttaaaggggttgtgttaaccaatgataatctggcaagaaggaattggaatgatagtttaatgtgttctttctgcacgaaaaatgaaactattcatcatcttttttttggaatgtcattatgcaaagtttctttggagcaat

SEQ ID NO: 31649 - DNA, 372 bp, Oryza sativa
  Clone ID: PAT_MRT4530_35935C.1
atgcggtttgcgacccctgaacgacgcccactactcttccacgcctcggcgtctcgtgagcacacagcgggaaagtcgggtgggtgtaaagaccgccagtaggcggagctcaccatgtgtcctcactcccaggtcaagtggatgtagtgccgatgagaccggagcacaaggggcgcacctcggggaggactgacagatccggcgccgttgaattcggatccggccctcccttggccggatctgggctggacgcgcaagtcggcggcgaaagcggcagccgcggcggcgaccgcggcgcgagggcctcgcggaggaggcgacggcggtggcgaccgcaacgcgaggggcgcacggaggacgaagcggtggctg

SEQ ID NO: 31650 - DNA, 855 bp, Oryza sativa
  Clone ID: PAT_MRT4530_35936C.1
atggcgcgggcgaaaaacggggaagattgggaggggaaaaaggaagggagggcgcctgggtttatagggcggcaatgtgcggcagaggctgacggcggcggcaaccaggcggtcggccaccacggcgtgcgcgcgcgggaagcaacgggcggcacggcgatttgggcggcgcggctcgggcacgcggcagggcagcggggccgggcagcgcagacggcgcaggcgcggcacgggtggcgaccacgcgggcgcgtgcgcgaagcaacggcgcgcggggccgatttcgcgggcggggagctcgcggggatggaggcggggagagggagagcgagggggaggcgctcggcgtggctcgggcagagcggggagagagggagaccgattcttgctctgttctcggatagatctctgcctccgactccacttcgatctaatctccttttccgatgccgatgttaccaaatttggttgttaacaccccccccccaccttgccggcaacgacgacaaccacatcgacgcgagcacaaggtatgtgagcacctgcttcccctccgccctgggcgccgccgccatcgccaccacagccgcctccgccgtcgcccacagcttcccctcggcctcctcctgtcgcccacaatcctgctccacaagcttgctgtgtgccgcctccagcgcacgcgccgcgccgatgacggtgtgcacctgctgccacagccccttcctctcccgcagcgcgagctctcaacgccgcctcccgtcgctgccgtcacacataatgatagagcagaccactaagggtgtgtttgaggagaaggagattggggagattggaaagacacgtaaaacgaggtga

SEQ ID NO: 31651 - DNA, 1947 bp, Oryza sativa
  Clone ID: PAT_MRT4530_35937C.1
atggcgatgagctccatccccatccttctcgaagacgatggtgacggcggcgcgaacaagacttggagacctgccgccgtcctcctcgagctgccgtgcacggcccggtctcagcaggagagaagcggcggtggcattcttgagctcatggagcaggagatcggtggcggtggagcaggggacttgttgcggcgacaaagctcaagcacatccctagccttcccttctgtgcgaaccgccggcgagcccaagctcaaggtccgcctctcctgccgccttcaggagctctatcttctccacgaaatcgagcttgccagtgagctagagctgcttggggatgtagagtttggcggagtccagccgggcaccggcggggcgccgcctggatcccgaaaccgaagcatgcggcctctcccgccggccgtggcggcgcgcctcgccgccgtccgcgccgacccagccgccgtcccgctcccgttcttcaactccctcctctccgcgctcgcctcctcccacgcccacctcccgctccacctcttccgccgcctcctcctcccgcgccgccgccccgacgccttcacgctctcctccctcgccgcctctctcctcccgccggcccactctccctccgcctccgtcaccgccgccgccgccgccgccgggtgcctccacgccttctccctccgcctcggcctcctccgcgccgaccccgtcctcgccaactccttcctcctcctctacctccgcgccgcgtcgccaggcctcgcgcgcaggctgttcgacgaaatgcccgcgcgcaccgcctccacctacaacaccctcatctcgcactcgcccccgggtgtcgacgtctggcccgtcgtgcggcacatggtcgaggacgggtgcgtgccggaccggttcacggtctcgtcgatcctgccagcgtgcgagtccgaactccggggcagggagcttcattgcttcgctctgaagagtgggatgtgcggggcaggcgatttccatgttgggagcagcctcgtgtcaatgtacttcagggttggccaaccaggacatgcacgccgggttttcgatgggatggagcagaggaatgtggtttcttggactgcaatggttggagggttcacagagagcgggatgtttgaggatgccgtggatgctttccgggcaatgtgggtgatcggtgctgttctgccaaacaggattgcgctgattagtgtgctctcagctgtggaggccctcacagatttggctgctgggaaacaggtgcatggctttgcggtcaggatgggattgtctggggaagtatccctgaacaatgctttgattgttatgtacgtcaaatgcggggtcttgtggtatgcacggcagatctttgatgatggtagatggtgcaaagatgtgatctcgtggtgttcgatgattcaggggtatggccttcatgggaagggtgcagaagcagttgccctgtttgatcagatgcatatttctggggttaagccagacagcataactggcttgggtgtgctttcagcttgttctagggcagggttggtttttaagggccttgagatatacaactctctggtgaaggattatggagttcatccaactgaggagatgtctgcttgcatagttgatttacttggtcgatcggggatgattaatcaggccttggactttataaagtcaatgagtatagagccaggccctagtgtctggggagcacttctggatgcctccattgttcacaataacaaagaaattcaagatttgtcctgcagataccttcttagactggaagaagggaacccatctaatcttgtctcagtatctaatctgcatgcctttgatggaagctggaatattgtcgaacatgtgagggctaagattaaacaaggggcattgaagaagatccctggttttagttggataaatccaacataa

SEQ ID NO: 31652 - DNA, 301 bp, Oryza sativa
  Clone ID: PAT_MRT4530_35938C.1
ctaccccatgtcctggcccagcctaggcagcccggctccagccgagcctctgcaggccgacgccatccagggccgctctcgcgctttgtccccttctttccttgcttctatcgggttcctatcgtgctcctgtccaccaccatggctgccaccgaggtcggcatggccgacgctgcccgcgttcgccaccggagctgccacttccatgcccggtgtcaccatagctcccgatctggaactcgcgttccggttagctctgttgtcttccagcccagtgtccacgtcctgtgggggtgtcagc

SEQ ID NO: 31653 - DNA, 989 bp, Oryza sativa
  Clone ID: PAT_MRT4530_35939C.1
ttttttttttttttttttttttaatttcagtactatctctctgcattataattaatcaatttcacttttacttctggtacaaaagtggctactacaattagtaccaccaacttacaaatttcctctcattcatctttgaacagtacgaatcttgattactctccaccactcttccacttctatttctccgggcacttctgcacttgcttatcaagtgtgatcagggacataaatctgatcaccctcttggatatttctccaatatctgcaacacatcttgctcctcttttcagaatcacatcctcctatctagcatgggttctccgtttcaccagagatctgaaccgtccgttccttcaattgtgcaagcccactggatctccgcgccacggcggctctcgagacgcggcggagcacgtcgacctgggcgtgcagatgaacgacgtaatccatggcctcgtgcagcagcgagatctcgtcggcgatgagctcgcctccgggtatcatcctcctcagcaccttgtccctcttcttcaccagtctcctcgcaacctcactactactactcatcaatggcgtcctcctcctcacgatgctcttgcacctcctcctcaccttcccttgcatcatcttgcatggaaatgtagttctcggcatcgacgatgacgatgaagatgaagatgaagatgaagaagacgatgatgatgatgccaagatggcatgtggccaccgtgctgctccggcgatgccggtgcgggcggtggccatggcgatgtcggcggaggacttgatggcacgcttcctctcactcagggtcgacatggcggccttgtttttgctggagcttttgaggctcgagaggaggttcttgaggaagctttgcttgaaggtggccatggtggtggtgctagggcctctcatggtggcttctggtgaggagagaagctaagaaatggagatgactcctctaggctctagctaagctaggt

SEQ ID NO: 31654 - DNA, 267 bp, Oryza sativa
  Clone ID: PAT_MRT4530_3593C.1
atggcgaggaagaggaggtcggctgctgctccacgccgctgcccgtcgccgctcaaggggagggggaggggggctcgccagtcgctgctccgtgtcgcctcagccactcggggggcgccgctcgccggtcgccactccatgccgccgcagctgctcggggggagggggaggggggtgccactcgccgttgctcccgcgtcgggccaccggcctattgggccaccaaatagaggacgcaaaatggacttcaacggagaaaggaaatag

SEQ ID NO: 31655 - DNA, 402 bp, Oryza sativa
  Clone ID: PAT_MRT4530_35940C.1
ttgttttttagttaaggatgcacatagctatatttatagtcattggaactggaacactgatggatgaaatcctgcaccgatgactaccatcccactaatggtgccagtcaacctaagggtaaaccactgacactcagaacttcagctaatgtagctaattattcatcacaccgagaaacacgtaatatcacatagttttcacatgattgagcaaacgttaggatcttccgtcatttgtagtggatagtactctacatagtccaactccggtgcattataggtagggtgcttattgtaatcaggtaccgatgcacctttctttccagccagctgggtcttctctttcttaactgactccaccaaccaagatcttggcgaggccacattttttgcgcaggagag

SEQ ID NO: 31656 - DNA, 609 bp, Oryza sativa
  Clone ID: PAT_MRT4530_35941C.1
atggccaccttcaagcaaagcttcctcaagaacctcctctcgagcctcaaaagctccagcaaaaacaaggccgccatgtcgaccctgagtgagaggaagcgtgccatcaagtcctccgccgacatcgccatggccaccgcccgcaccggcatcgccggagcagcacggtggccacatgccatcttggcatcatcatcatcgtcttcttcatcttcatcttcatcttcatcgtcatcgtcgatgccgagaactacatttccatgcaagatgatgcaagggaaggtgaggaggaggtgcaagagcatcgtgaggaggaggacgccattgatgagtagtagtagtgaggttgcgaggagactggtgaagaagagggacaaggtgctgaggaggatgatacccggaggcgagctcatcgccgacgagatctcgctgctgcacgaggccatggattacgtcgttcatctgcacgcccaggtcgacgtgctccgccgcgtctcgagagccgccgtggcgcggagatccagtgcgtcttcttcttcttcaggtgggcttgcacaattgaaggaacggacggttcagatctctggtgaaacggagaacccatgctag

SEQ ID NO: 31657 - DNA, 148 bp, Oryza sativa
  Clone ID: PAT_MRT4530_35942C.1
aaagcggaaaaggaaaaaaaaacccggggtctggttgcccctcttgattcgggggcaaagagcaacccagcaaagttacataaatattggcagctccctaaccatctgattaaaaaaaagaggctatcgagggcgttcaaagtggaat

SEQ ID NO: 31658 - DNA, 276 bp, Oryza sativa
  Clone ID: PAT_MRT4530_35943C.1
atggtgtttcagaactatgaagcacgcggcggccgcgccgaagatgacagttggggcggtggtagcggcgacggcaatggcggggacggcggagtcagtgacggcaacagtggcggtggagtccgcggcagtgacagtgaaagcggaattgagggcaatgcatacatcgtttggtggccacgtagattggtttcggtgaatttggcgtcagcgtcggcgttgtttatgagccttggtattcgacgagttctgcaatggatggaaagtgattcttga

SEQ ID NO: 31659 - DNA, 171 bp, Oryza sativa
  Clone ID: PAT_MRT4530_35944C.1
atgtggtttttcacccagagaaactcgccaagggagagaggtatcctcgacagcgcccaaaggggggtttgcgacgcccaaaggtgtagcccctaccggcctgatgaaccactaggtgaggctttcgcctggaaccccttcaaccttgctttgaagctcgtcacccattag

SEQ ID NO: 31660 - DNA, 432 bp, Oryza sativa
  Clone ID: PAT_MRT4530_35945C.1
aaagtcccttaccattttcattttcatatctctttttctttaaaatggagtcggaacggtagacccgaaaacggtaatgatgtcggtaatattggtatattggaaacggaaccatcggaacagggtctaccgatattggacggaagtcgaaaattcatgttgaaaacaatggagtgtggcataatcacacatttaactatgcatgaagatgactttgtaacttcattcttgcatcataacgctccacataacaccgttatatgatgattattgatatgataataagtttgacgaacaatataaacaaagttcaacaatacttcaaaatcgataagttgagaaaatcaaagttcagcaaagtccacatgctatgccttagagttaacaacgttttcctctgaccacttccctttcctctgcaagcctactagg

SEQ ID NO: 31661 - DNA, 3696 bp, Oryza sativa
  Clone ID: PAT_MRT4530_35946C.1
atggacgctggcaaagatgtgcaagttagggggctgatagatggaagaacgggggttggcgagaacgatgagatcggattgctggccggcgagctgggtgcaactattgaccaaactttgaaagggcaacggtacaatgtgaagggtttgtttgaggagatgagtacggcatggggtttacatgagacaagaagaacccgagacttaggagaaaacaaattcttgattgagttcggctgtgaagctgatttgaagagggttattaatgggggcccttggaagcacaagggggatgcattgatagtagttccctatgatggtattgttcttcgatctctcggaggtaatgatgaccacaggtttttgggcgagaaactgggtgcggtgattgaagtgcaaggggcgatgtttaactttttgcgagtcaaagtgcagttttcacttgctaatgctctaaaaacctgcattaagatgagaatcaaaggaagaggtattatatcgtgcccaataaagcgcattggccatgctgaaagggagtgtccagaggaaggaatgtctgataatcctgtaagtcgtgctcgaggtggtacgcccgcaaacttgggggttcggaaggatgacgaagctgttactgagttagtaaaggatgatatgtgtggagcagatgagattttgggcaaaagtgtgcagcagatgcaggtggaagatattggtcccagtctgaatttggttgctcgtgggccttgcagtagagagagagtttctatgagttctgactatggtctatcggatgataaagctgatgagccggatgctaaggatacaagtgaggattctagtgaggcacatgcaatgctgaaggaagcattggtgccagacctggatgaggggaagctgcagcaactgagatggaggctaggattgaaacacttcctatcaatgaaaggggaaggatcgggtggtggtatagcgctgttttgggatgagactataaccgttgatctcttgtcgatgagtaacatgtatattgatgtgctaatcagaaatccgggagatggttttttatggagatgtacctttgtttacggtgagccgaagaccacggataggcatcttatgtgggagctgatccgtcgcataaaaccagtctcaaatgccctgtggttgatgatgggcgatttcaatgaaactctttggtctttcgagcagttctcggcgagaaggagaccagaaaaacagatgatggattttagagagcaggatttgttggcagcagatctaggtgaagtggctgtgaagctgaggaaggttatgtcctccctacgtgagtggagcataaaggttttcgattcggtctcaaaggaactgaaagatcttcgtcagaaggttgaagctctcttgctggatccttcagctgatcattccgacgaaatcagtacgatttatagacggatggacgagctcctatatcgagaagagatgatgtggctccaacgatcaaggatttcttggctgaaggagggtgaccgcaatactaaatattttcatagacatgcggcatggagagctaagaagaataaaatcatccgtttaaaagatgaagatagcaagtatgtggagaacaaggaacaattagaacaaatggctacagcttttttccagaagttgtacacgaaagatcattccgttaccccagcagaagtggtggatctgctcaagagcttggttgacgaacccatgaacttggagttatgcaagcccttttccgatgaggaaatctcagatgcgttgtttcagatcggtcctatcaaggccccaggacctgatggcttcccagctcgtttctttcaaagaaattgggacacgcttaaaggggagataatggcagcagttagaaagttttttgcagattgtgctatgccagatgaggtaaataacacatccattgtccttattccaaaggtgaaacagccagaaaatctaaaggagttccgtccaataagcctgtgtaatgtgatctacaaggtaatctctaagtgtttggttaatagacttcgtcctttgctatcggatatcatttcatccacccagagtgcatttattcctgaaagaatgattacggataatgtgttaattgcctttgaaagcatccacgctatccaaaggaacaacagcccggataatagcttctgtgcttacaaacttgacctcagcaaggcatatgatcgagtagattgggacttcctggaaagagctctcttgaaggttggcttctgcagacaatgggttgattggataatggaatgtgtaacgactgttaagttctctgtgaatttcaatgggtctcttctagaggccttctcccctactcgcgggttgagacaaggggatcctctgtccccataccttttcctgtttgtggctgagggtttgtcatctgtgcttaaccgggaggtggaggcagggcgcttaacggagcttaaagtatgccgtcggagccctggtatctcacatttgttgtttgcagacgatagcctgctcttcttccgtgcctgcctgcaacaagctactgtagtccagaatgccctaacctgcttccaagcctgtactggccagctcttaagtcccggaaaatgctctctcttggttgggagaagttgccctgatgcgactgtggaagtggtgaaggagattctgcaagtggaaacaccggcgtttgaaagtaagtatctcggacttccaacaccggaaggtagaatgcatgcgggacgatttaaacctactgaagagagactggcaaaaagaatggatagctgggctgagaaacatatgtcatcaggggctaaagatgttctaattaagtcggtggtgcaagctataccgacatatttgatgggagtgttcaagctgccagcttctacctgcgaggcttatacgatgatgattcgagatttctggtggggtgatgaggagaataaaaggaagatccactgtttatgtgtgtgggttttaaaggctaagtatttccctaattgtgagctagtagatgcggtcttcccagctgaagtgtctccgacatggaaagggattgaacatgggctgcaattgctgaagacaggacttatatggcgaattggtgatgggaccaaggatgaggatttcctagcttggcactacgaaaaatctgggattttctcagtgaggtctgcttatcgtttagcgtggttgaacaagttccatccggatggagaaggcagtagtagagaagcggacagtgatcgctccatttggcgaagaatttggagtacgcctgtgccaccaaagaagctgatcaggaactgcgcatcggccgaatttgccgaagcagctgcgtgcagggaaggaatatggcttgcaaatgagtgggtcaaggagccatgcattctagaaacggattgtgccggtgttgatagctatctgaggttggcagcggctaataggtcccagatttggccactaatcagggaagtgagagcgggtatgcgtgctgctcctgaagctcgtacggctctgattcgcaggggtgctaataaggtggctcatgagcttgctcagctagccattcggaatagggaggcagtggtcttgcgcctgcaggcgccggtgtgtgttgctgagcaactggctcaggattgtaatccttattctgaagtttaa

SEQ ID NO: 31662 - DNA, 522 bp, Oryza sativa
  Clone ID: PAT_MRT4530_35947C.1
atgcccaagcacacaattgcacatgataagcatctttctggaggtttaatcggtggcgggaggggcggcgacgcctcccctctgccagattgggtgagagaggaggtgcagcggcagcggcgccagatccggcggcgtggagacaactgcggcccggatggcgtgaaggcggcaggccagacctcacctccgccagatccgacggcatggaggcgacagcggcccagcagggacaggaggggcggcggcaccgcctctctccctctgctgcggcgaatggcatggaggcggcgaaggttcatttgtgacggctccggcagcgggaaggacagcagctcggctgagcccggcggggagggcaacagtttgacatgggaggagcagcgatccgatacacggggagcagtggaggctgtggcggggctcgatagtggcggctgcgatgacgatggtcaggctctagtacgccctccaccccctcccctctcccagatccggcggctctggggtggtggggcctag

SEQ ID NO: 31663 - DNA, 411 bp, Oryza sativa
  unsure (1)..(411): unsure at all n locations
  Clone ID: PAT_MRT4530_35948C.1
ctgtgctgattgcttggatgcaatcacggggcacagggcacncgcccacgcagatcaacacgctgtgttggctcnngcgcctatgtacgggatgngattgcagcggcacaggggaattgggaatgataagaaggggtgagtgagctgcggcaccgaatgaaaaggatgtggggaaagatggcaaaagtgtgcttgatgaatntgtgtggggatgggatggctggcgtgcaatggtgtactgtgttggttganatgtgtgtgcggagtggatgtgatgcaacactggtgacactgaattgaaatgggttgtgatgtgggattgatgtgggcggtgttgatgactgaaacgatacaaaattgaataccatacggtntntttgngattgcaaataaaaaaaaaaaaaaaaaaaa

SEQ ID NO: 31664 - DNA, 446 bp, Oryza sativa
  Clone ID: PAT_MRT4530_35949C.1
tcataaacaaaggcgcacaacgaacccgcaggcagccaaccgcagcagtggtactatgttgttagccatgggcaaaggcaaggtgatgaccagcaagtagatcgtgaatcatgtagtctactctcgaggtggggctagtccggttgactgattcttgaggacgggtagttgctgacgcttacactgtagaggacttgcggttcagggtttcagtccaagtacgagtacctctactgtaagattgatatgcagttaaagctcgttctcgggaactccgtcggcactgtcaccgaacctattttactacttatgggcctgcgcatgatgagattgactttcagtttctggggaatgtgaccggggagctcgacacgctgcacaccaacgtgttcactcatgggcagggtcagcgcgagatgcaattctgcctttggaacgaccccacc

SEQ ID NO: 31665 - DNA, 249 bp, Oryza sativa
  unsure (1)..(249): unsure at all n locations
  Clone ID: PAT_MRT4530_3594C.1
gcngagacnnatangcgnccagcgananancgaaagatnaataactntccnccccagggggtntgatccaccncgatngntggtgtanncggtaaaatcccatnctgtcgacccaatngactatngtcgcttgtctggtcnggtctgtccatccattntgtaccattncctgtgnatgtatccaaaatcnggnctgacgtntctnanctntgctgtgtcaacncctgacaccntcgannaatgacccnc

SEQ ID NO: 31666 - DNA, 268 bp, Oryza sativa
  Clone ID: PAT_MRT4530_35950C.1
ccttgcttcctatttcttttctttccgttggtttgcaccaagcagtccaaacaccttacccaaagcaaactaaattcatggtatcttcacggacaaagaccacctaacactgactggttggattgagggcttctcgactcaaaaaagccactggccacaaataacacctcaactcattaattgaatcaattctgacacggatcgctaaggttaactggcccctacgggccccaccaatcatttcctccatttccctccgaagtccccg

SEQ ID NO: 31667 - DNA, 876 bp, Oryza sativa
  Clone ID: PAT_MRT4530_35951C.1
atggcgtcggcgacgtcgacgacgcccgacctgtcgctgcacatcagcctgccgagcggtggcgcggcggtggggacgacggcgccgccggggctggggaacggcggtgcggttggtggtgccggcggcggcaaggcggcgggtggtggtgacccgtggcggaggctggatggctccacagcgtcgacggagctgtcgctgtcgacgccgcagcagcagcaggagggcagtacatcggcggccgatgtgctgccgtggcggctgcggcagccgacggcggcggcggcgtccgtgccggtgacactgccgacgataccgatggatggagcgacgcccaaatcggtgctagagctgatggacgtcaaggatctgaccctagctcatgtgaagagccatctgcagatgtataggaccgtgaagagcactgacaagccagcagcagcctcagggccgatggacggcagcggctccggctccggctccggcgacgacgagctcctggccggcgatggaaggcaggcgacgtcatcgggcgccgatgcggaccggcggatgtcgttcaccgagcaccggtcctcctccgagggcgcggcgagccatgccggcggtggcggcgacggcgactgctcctcctctgccgtcaactccgacaccatcagagcgcgcagcaattcgccgagggggctgtgggctttgacctcagacctgatactagctgacatcctagaaatgtgtaaccaagggcctcttcctgtgttgctttgtcctttactttccttgccattactcccagtgtctactgatactgtagcagatatactgaggttcaataataggagaaatttatgtattgggcatcaaacattgtttttttaa

SEQ ID NO: 31668 - DNA, 4292 bp, Oryza sativa
  Clone ID: PAT_MRT4530_35952C.1
agggagggagcagcagcaagaggaggcggctgccatggcggatgacgatgagcctggcgtaccagagcctcggggtggtgtacggcgacctgagcacgtcgccgctgtacgtgtacaaggcggcgttcgcggaggacatccagcactcggagaccaacgaggagatcctcggcgtgctctccttcgtcttctggacgctcaccctcgtcccgctcctcaagtacgtctgcgtcgtcctccgcgccgacgacaacggcgagggcggcaccttcgccctctactccctcctctgccgccacgcccgcgccgcgctcctcccgcctggcggcggcggcggcggcggcgagccgggcgacgaggaccagttcttggacgcgggcgccgacaagaaagccgcggcgaacggcaatgcgctggcgctgagcgggcgcggcggcgaaggcggcgccgccgccggcgtgaggaggctgctggagcggcacaaggtgctgcagcgcgtgctcctcgtgctggcgctggtgggcacgtgcatggtcatcggcgacggcgtgctcacgccggccatctccgatggcgtgttctgtttttgcagtgttctcggcggtatccgggctggaattgtccatggaaaagcatcagcacaaatttcatattctcttgggctttggcagaggatagagttcactctgggcagaaatatgatgtggaggttcctattgcttgttttgtactggtttgcctgttttgtctgcaacactatggttctgaagcaatgtttgcagatctggggcattttaatcagctgtcgatacagttttccatcctcagagaaaattaggtggccagttctggcaattgccattcttgcagcagttgtcgggagccaagctgttatcactggcacattctcaatgatcaagcagtgcaccgctctcggctgctttcctcgggtgaagatagttcacacatctgacaaagtacacgggcaaatttacatccctgagatcaattggatcctgatgatactgtgcttagctattaccattggtttcagagacacaaaacacctgggcaatgcgtcaggattggcggttataaccgttatgctggtcacgacatgtctgatgtccctggtgatagttctgtgttggcacaagagcatcttcctcgcattcggcttcatcatcttcttcggcaccattgaggcactctacttctcagcatcactcatcaagttcagagaaggagcctgggtcccaattgtgctggccttcatcttcatggcgataatgtgcatctggcactatggcaccatcaagaagtatgagttcgatctccagaacaaggtctccatcaactggctccttggcctcagccccaacctcggcattgtccgagtccgcggcatcggcctcatccacaccgagctcgactctgggatcccggcaatcttctcgcatttcgtcaccaacctacctgcatttcatcaagtgctcatcttcctctgcatcaagaacgtcccgataccgcatgtctcgccggaggagaggttcctcgtcggaagaattggccccaaggagtacagaatctaccggtgcattgtcaggtacggctaccacgacgtgcacaaggacgatcaggagttcgagaaggagctcgtctgcagcgtcgcggagttcatccgctccggcgccgccgccgcggccgacgccgcggcctctttcaagcccaagaacgtctgcggcggcggcgcggaggagtcggagaaagaggaggaggagcggatgtccgtcatcccctccggcagcattcggatgatggaggaggacggcggcgcgggggcgccgtcgtcggaggacaccgtcggcggcagcggcagcggcagcggcagaggcagctcgcgcggcggcggcggcgcaagggagatcatgtcgccgtcgccgtcgccgccgccggtggtggtggcgccgaggaagagggtgcggttcgtgctgccggcggcgagcccgcggccggacgccggcgtgcgggaggagctgcaggagctgatggacgcgcgcgaggccggcatggcgttcatcctcggccactcctacgtcaaggccaagagcggctccagcttcttccggcggctggtcatcaacttctgctacgacttcctccgccgcaacagccgcggccccaactacgccgtcaccatccctcacgcctccaccctcgagagatgcgacgccattagagcgagctcgaattcggatagaagagagttgggcagctggatcatgggctccgttggcttggcgcgaatgctgaggtcgctgtgcgtcgccggcgatctcgctagggcggtgggtctcctgtggcggagtacggtgtgccccggtgaggggacctacgcgcttctgctgcaggaatgcgtgaaccggcgggacgcgaggatggggaagaggatccacgcgcgcatggtgtcggtggtttggcggcggcgtctacatcgtcaccaagctgctgatcttttacgtcaagatcggtgagcttggtgttgcgcggaaggtgttcgacggaatgccgcagaggagcgtcgtggcgtggaacgccatgatatccgggtgcgcgcgcggcggcgcggaggcgcgggcggtggagatgtttgggtcgatgcgggcggaggggatgaggccggaccagttcacgttcgcgtcggtgctctgcgcgtgcgcgaggctggccgcgctggagcacggccggcgcgtgcacggcgtcatggtcaagtcgcgcgtcggcggcggcaacgtcttcgtcgacagcgcgctcgtcgacatgtacctcaagtgcagcagccccgaggaggcgcgccgggcgttcgcggcggcgccggcgcggaacgtcaccatgtggaccgccgtcatctccgggcacggccagcacgggcgcgccgcggaggcgctggcgctgttcgaccggatgacgcgggtggacgggctccggccgaacgacgtcacgttcctcgccgtgctctcggcgtgcgcgcacgccgggctcgtcggcgagggtctgcgccacctctcgtccatgtcgtcgggctacggcctcacgccgaggggcgagcactacgcggcggcggtcgacatgctcgccagggtcggccggctcggcgacgcctacgagctcgtcaagaacctgccggactgccaggagcactcggtggtctggggcgcgctgctcggcgccggcaggaagcacggcgacgtgaggctggtcgagctcgccgcgcgccgcttcttccggctgcagccggggaacgccggcaagtacgtcgtcctggcgaacgcgtacgccgcgcgcgagatgtgggccagcgtcgccggcgcgcacgaggcgatgcggtcgctgggaatcaagaaggatccggcctggagcgccgtcgaggtccggggcaaaaggcacaccttcctcgccggcgactcgtaccacgacgagcgctcggcgatatacgcggcctgcaacgcgttggccgccgccgtcgccgagcagtccgtgcctccggttatggatggagatgatgccagccattgcagctgagctgattggtgatgtgaagtggcattgcattttcatcatttgagatgttgcttctatgaagcaacaagcctgctaaatgatcgattgtcagttgtcagttgtcactcgctcaatttcatgaacatttgcaaattttgcatcctctttcaaagagggttcaaagagatcacagggcctgtagattttttgcaacttgagaactgttgtgcccttgttctagacccactgcgtcttcaaatgaaggcgaagagcgggtctagtttcataaagcgaatcgtgataaacttcttctacgagttcttgaggagaaacagccgcggaccatcttatgctgctaccatacctcatgcctccacactggaggtgggaatggtctaccaagtctgatagtagcagcagctgtataaagctagagatgagatctccatctgtacatatcacttcatgccgacaccgctaacctgaaggtggcagttgatgttggagcacctcatggccagccagccagttgcaaatcttgggagagccaacagggagtgtgcatttttgtctgtaaagccttctgttgagctgctccgtgttgttttttcccttgtgaagaaacctttcgctgttgtggataccactgcgaaactggggaagtgtaagtctgtaagagtgaccagcaaatgatagcatttttgttgctttagcaacttggtaacttgtct

SEQ ID NO: 31669 - DNA, 2729 bp, Oryza sativa
  Clone ID: PAT_MRT4530_35953C.1
atgaagagcccgtctcccgtggatcctgagtcgccgagttctcccgattgcaagggagggagcagcagcaagaggaggcggctgccatggcggatgacgatgagcctggcgtaccagagcctcggggtggtgtacggcgacctgagcacgtcgccgctgtacgtgtacaaggcggcgttcgcggaggacatccagcactcggagaccaacgaggagatcctcggcgtgctctccttcgtcttctggacgctcaccctcgtcccgctcctcaagtacgtctgcgtcgtcctccgcgccgacgacaacggcgagggcggcaccttcgccctctactccctcctctgccgccacgcccgcgccgcgctcctcccgcctggcggcggcggcggcggcggcgagccgggcgacgaggaccagttcttggacgcgggcgccgacaagaaagccgcggcgaacggcaatgcgctggcgctgagcgggcgcggcggcggaggcggcgccgccgccggcgtgaggaggctgctggagcggcacaaggtgctgcagcgcgtgctcctcgtgctggcgctggtgggcacgtgcatggtcatcggcgacggcgtgctcacgccggccatctccgtgttctcggcggtatccgggctggaattgtccatggaaaagcatcagcacaaatatgtggaggttcctattgcttgttttgtactggtttgcctgttttgtctgcaacactatggtacacaccgggtggggttcctttttgcaccaattgtgattacatggcttctatgtataagcatgattggtgtttacaatatcgtgcattgggagcccaatgtctatcgagcgttatctccatattatatgtacaagtttttgaagaagacgcagagaggaggttggatgtcactgggaggaatattgttatgtatcactggttctgaagcaatgtttgcagatctggggcattttaatcagctgtcgatacagattgcttttacttgcatggtttacccatccttgatccttgcatacatggggcaagctgcttatctgtgtaagcatcacatcattgaaagtgactacaggatcgggttctatgtgtctgtgcctgagaaaattaggtggccagttctggcaattgccattcttgcagcagttgtcgggagccaagctgttatcactggcacattctcaatgatcaagcagtgcaccgctctcggctgctttcctcgggtgaagatagttcacacatctgacaaagtacacgggcaaatttacatccctgagatcaattggatcctgatgatactgtgcttagctattaccattggtttcagagacacaaaacacctgggcaatgcgtcaggattggcggttataaccgttatgctggtcacgacatgtctgatgtccctggtgatagttctgtgttggcacaagagcatcttcctcgcattcggcttcatcatcttcttcggcaccattgaggcactctacttctcagcatcactcatcaagttcagagaaggagcctgggtcccaattgtgctggccttcatcttcatggcgataatgtgcatctggcactatggcaccatcaagaagtatgagttcgatctccagaacaaggtctccatcaactggctccttggcctcagccccaacctcggcattgtccgagtccgcggcatcggcctcatccacaccgagctcgactctgggatcccggcaatcttctcgcatttcgtcaccaacctacctgcatttcatcaagtgctcatcttcctctgcatcaagaacgtcccgataccgcatgtctcgccggaggagaggttcctcgtcggaagaattggccccaaggagtacagaatctaccggtgcattgtcaggtacggctaccacgacgtgcacaaggacgatcaggagttcgagaaggagctcgtctgcagcgtcgcggagttcatccgctccggcgccgccgccgcggccgacgccgcggcctcttccaagcccaagaacgtctgcggcggcggcgcggaggagtcggagaaagaggaggaggagcggatgtccgtcatcccctccggcagcattcggatgatggaggaggacggcggcgcgggggcgccgtcgtcggaggacaccgtcggcggcagcggcagcggcagcggcagaggcagctcgcgcggcggcggcggcgcaagggagatcatgtcgccgtcgccgtcgccgccgccggtggtggtggcgccgaggaagagggtgcggttcgtgctgccggcggcgagcccgcggccggacgccggcgtgcgggaggagctgcaggagctgatggacgcgcgcgaggccggcatggcgttcatcctcggccactcctacgtcaaggccaagagcggctccagcttcttccggcggctggtcatcaacttctgctacgacttcctccgccgcaacagccgcggccccaactacgccgtcaccatccctcacgcctccaccctcgaggtcggcatgatttactatgtctaatacaaaaaaaaaatcaaaccaccatagatagatagaagaacaagaagagagacaaaacaggagacgaatcgaaacaaaaatgaagtttcgcttgtatatcctcgatcttgtaattgacccgagagtttttgttgtaaatgtagtagcctgatttctcctaaaaaaaaacaaaaacaaaaaaactatctactctaaat

SEQ ID NO: 31670 - DNA, 156 bp, Oryza sativa
  Clone ID: PAT_MRT4530_35954C.1
atgaaaaaatatcaggatcactgacctcctgaggggttaaattttcatgtagccactcaaataaaaaacgaggacaaacaaaacctttcccttaatcatgaatcatctggtgtggtttttcggcagagagaataacaattgctcatgtcaggagca

SEQ ID NO: 31671 - DNA, 3127 bp, Oryza sativa
  Clone ID: PAT_MRT4530_35955C.1
cttgttcacagtcgcagcagcagcagcaccgggccggtgctttctccctccaaagtgccccctgttttgcttccgctttgaccctcttaaaaacctcaataactccaaattttcccaccgcctaataatccccattaccgtctcctctgaatcgttggatttgatacccccagggattcagagagagagagagagagagagccaagaaaccctgtagctgctgtaggaggagtaggagtaggagtggttttgcttcctctgttcttgggttgggattgaggaatgaagagcccgtctcccatggatcctgagttcgggagttttgcaaggcatggagcctcgaaagaggaggccatggcggacgacgctgaggctggcgtaccagagcctcggggtggtgtacggcgacctgagcatctcgcccctgtacgtgtacaagagcaccttcgcggaggacatcacccactcggagtccaacgaggagatcttcggcgtcctctccttcgtcttctggaccctcaccctcatccccctcatcaagtacgtctccatcgtcctccgcgccgacgacaacggcgaaggagggacgtttgcgctctactctctgatctgcaggcacgccaatgtgagcctcctcccaaacaggcaggtcgccgacgaggagctctccacgtacaagctggagtacccgcctgaagtggctaacaggtctcgaatcaaggagtggcttgagaagcacaagactctgcagactgctctgctgatcatggtgatgattggaacctgtatggtcatcggggatggcgtcctcacgcccgcgatatctgtattctcagcggtttcagggcttgaactctccttgtccagggatcagcatgaatatgccgtcattccgataacatgtgtcatattagtgttcctgtttgcactccagcattacggtacccatcgtgtcggatttctctttgcaccaatagtcctagcctggttgatttgcatgagcatgcttggcttgtacaatatcatccactggaaccctcaagtttatcgcgctcttaatccctattacatgctcaaattcttgaggaagactaagaagtctgggtggatgtccctggggggaattttgctctgcatgacaggatctgaagcaatgtttgctgatcttggccatttctcctacagtgcaatccagcttgctttcactacattagtataccctgcactgattttgggatacatgggccaagctgcgtatttatcgaaacatcacactctgaactcaacctaccaaattggttactatatatcggttccagagagtgtaaggtggcctgtgcttgtgctggcaattttggcatcggtcgtcggaagccaagcaatcatcagtggaacattctccatcatcaaccagagccagtcactcagttgcttcccaagagtgaaagtggtgcacacatctgagaatatccatggccagatttacatccctgagatcaactggctgctcatggtcctctgcattgctgtgactgtcggttttcgcgataccaagcatatgggaaatgcatccggattggcagtgatcacggtgatgctggtgacgacatgcctgacatccttggtgatcatgctgtgttggcaccggagtccggcgctggcactcgtcttcttcctcttcttcggctccatcgaggtgctctacttctcggcgtcgctgatcaagttccgggagggggcgtggctgccgatcatgctggcgctcatcctcatggccgtcatgttcatctggcaccacaccaccatcaagaagtacgagttcgacctgcacaacaaggtgaccctggagtggctgctcgccctgggcgacaagctgggcatggtgcgcgtcccgggcatcggcctcgtctacaccgacctcacctccggcgtgccggccaacttctcccgcttcgtcaccaacctcccggcgttccaccgcgtgctggtgttcgtctgcgtcaagtccgtcccggtaccgcacgtgcttcccgccgagcgctacctcgtcggccgcgtcggcccggcggggcaccggtcgtaccggtgcatcgtgcggtacggctaccgcgacgtgcaccaggacgtggactcgttcgaggcggagctcgtcgagagcctcgccaccttcatcaagctggacgcgctgtaccaccgctgcagcgacgccggcagcgggagcgagcagctcgacgacggccgctacgagcgcgagaacgcgctcacggtgatcgggacgaaccctctccggcgatgcctcagctacgaggcctcccacgacggcgtgtcctcggtggacgccgcgcgcagcccgaacgggatagtggaggtcccggcggcggcggcggcggcgccggtgacgaagaaggtgaggttcgtggtggaggcggcgagcccggaggtggagaagggcgtggtggaggagctgcaggagctgtgcgaggcgagggaggccggcacggcgttcatcctggggcactcgcacgtgcagaccaagccgggctcgtcgctgctgaagaagctcgccgtcggcgtcgggtacaacttcctccggcgaaactgccgcggcccggacgtggtgctgcgcgtgccgccggcgtcgctgctcgaggtcggcatggtctacgtcctatgacgtcaccacgagatctcatcgatcaataccctgtaaaaaaaattcaaaatcaaatctctctgcttgtataagaattaagaagcagattggaagaaaattgggcatttgatagtagcagcagctgtataaagctagagatgagatctccatctgtacatatcacttcatgccgacaccgctaacctgaaggtggcagttgatgttggagcacctcatggccagccagccagttgcaaatcttgggagagccaacagggagtgtgcatttttgtctgtaaagccttctgttgagctgctccgtgttgttttttcccttgtgaagaaacctttcgctgttgtggataccactgcgaaactggggaagtgtaagtctgtaagagtgaccagcaaatgatagcatttttgttgctttagcaacttggtaacttgtctaaaatggcagtgcatcgccac

SEQ ID NO: 31672 - DNA, 384 bp, Oryza sativa
  Clone ID: PAT_MRT4530_35956C.1
atgaaaataaacactgatggagcttttgatcctttcaccagaacaggaggctggggttttgctatcagagatcactcaggcaaggttgttaaatcgggagcgggtaaagttcagattctgatgaatgctttccacgctgaagccctagcatgtgcagctggtataagagccgccagtgaatgcgggatgcaaagggtgacggctgaaactgattcaacgatgttgaagtcggctttggagaagaacacttttgcttcgtcagctcttggcgggatcatttgtgagataaagaactttgtaaattttgctttcctgtctttcaatctctgggttgtaaatcggaagtccaggacattcttgggtgggatgaatgtcacaccctga

SEQ ID NO: 31673 - DNA, 203 bp, Oryza sativa
  unsure (1)..(203): unsure at all n locations
  Clone ID: PAT_MRT4530_35957C.1
cccangngtccgccgcctcacnnggcgacgtgccggagggcatctnccacctgccgtacctccagaacttcacctactcctacaacttnatcaccggcgagccgccgtgtngcatgcacgtnaaggcgttcgacgatcgccggaactgcatccnggccgncccgaccanagggcggcggananttgcaattccaaaaaaacca

SEQ ID NO: 31674 - DNA, 437 bp, Oryza sativa
  Clone ID: PAT_MRT4530_35958C.1
ccggccgggagaccgaggtcccaagctcgcgccgccgccgccgaaccgagccgcttcttctccagaccttggagctcgccgtcagggagggagaggaaggacagaggtgagcggcgcgccgccgcgatgagggccaagtggaagaagaagaggatgaggcggctcaagaggaagcgccgaaagatgaggcagagatccaagtaatcccataggcgatcgactgatggaggaggagaaagcgtctttggctctcactgctgtcatctcatctatttaagttgtttagtttcctttagtaagagagaaaaaaaactaatcaatgtacttctcttgatctttgtcatgggagtaattgattgtactggacagcaatgtttccataattctattacctggagttatctgtcagcaaaaaaaaaaaaaaaaaagcggccaaa

SEQ ID NO: 31675 - DNA, 333 bp, Oryza sativa
  Clone ID: PAT_MRT4530_35959C.1
atggagaggagagagaaggagctcggagaactcgatggtgtggagggaaaagaggcgacctcgccagtatttataggcgtcggaggtcggttcttcaagcggttcgcagaggagaaagatgaggaggatacggcgccggtggagtggagaagaaggagacggcgccggctgtggcctgtgattggtcggcgacggtggcggcactactttgcggcgacggcaaggcagcggcttggcgtgggcggcaagttgacgcaagaggaggaagggcggctcggctggaggctgggccgtcctaggccgaagaaggagatgggccaaaaggaacaatga

SEQ ID NO: 31676 - DNA, 276 bp, Oryza sativa
  Clone ID: PAT_MRT4530_3595C.1
tgagtttttttatgtattgggggcttaacctgttccattttttttttttaaagtaatgtatcatttttccttctttcaccattacataagctgaagcattaacagataacaaaccctcctactcctatagggaaaagattcaaacacaatacccttataaggacgtattattaggaaagtatctgcgccgggcccccaaggggggaccccgggtggcaccgtttaagagaggacacttgctgagcatgcgaggaatcaaaacgaccatatatggga

SEQ ID NO: 31677 - DNA, 837 bp, Oryza sativa
  Clone ID: PAT_MRT4530_35960C.1
aatcaataatagctcatccttctgtaatgtgagttagtgcatagaggtcataccaaactgatgtacacaattatcctcataaataataatggtattttcacataaagttcttctttttcccgggtacaaataacatcgctacatcacctgcaagatcgtcatcaaaaagagagggagaaatgtgccgctactcaaaggaacacaccatccatacaattgtacatacacaattctaactcgccattctccactggccctcatgtactctccttgctactggacgcctcgagctccttctcctcgccaccgtcgctaaccgccgtctcggttggaggcgggggctggtcgccaccatcatcagactctttcttcagctccgtttcgaactccttggctgcctgctggaagctcttgacggtcttgccgatgctgcggccgatctcgggcagctgcttggggccgaacaccagcgcggcgacgcccgcgatgacgaccagctccgggacgccgagcccgaacaggcacttgcaccccatcgcgcctcccccacgcgaccccgcccccgaccccgccctcgtccgcgcggccaccgccacggcgagcccccccgcccctcccgtgacgaaggaggacgccctcgaggacatcccggccgccgcgacgcgtgcccggcccgccgccgccgccctccccgcagccgcacacggaggccgcgcgagggtggaggaggaggaggaggacgggtaggtcgcgaccggagccatccccatggcggtggcggcgagcttagcttagctgcggaggcggagaaggggattgcggcgaagccccggccgg

SEQ ID NO: 31678 - DNA, 730 bp, Oryza sativa
  Clone ID: PAT_MRT4530_35961C.1
caccaccccagatttccccagtttcttaatctgtgacagatgagtcagtcaaagtaaatctataccagaacgcactcctttcaccattttggaacatcaacgctcacagcgtcgtgtatattactcaagccgtgcaccagggttcaagttgtcaaacaacaatggaaagacagtgttcaacggcagagcttcagcacgcaggacagctgctttatttattaccaccacacttaatgcacgtttgtaaaagaaaggccaccaaaagaaggaaaggaatggtgcctttaccattgccaattccaaaggacccattccctgtatcttcttattggtgtaaacccaccatattgccagggtataaggagtgcccattctgtcccggtgcttcttcccccaattgaatgtgttcttaagccaaaattgccaatattcgccattcttccctaagaaggaagaagcttcacagaagcttccctaaccatttaccagaagaaatatgaatttccgggcatatgccaaccgtcccatacgccaataccaagagacttcccaaagcacggttatatatatgcccgccagatacctctccttaagttcgctcttcgggtataaggatatacttaattgaatataagtgccaaccaatggtttgccgctaagtgccggcccagtcttccggattataggaggataaccctctcttaaccctgaaaaaaaaaaaaaaaaaaaa

SEQ ID NO: 31679 - DNA, 348 bp, Oryza sativa
  Clone ID: PAT_MRT4530_35962C.1
ttggtttttttaaaagttggtaattaacaaaaaaataagttacggaagcaaaatatataacataaactgtgtccactggatacttgagctggacacaataagacatacacagccttaaattaatgattccaaatataaattgaaactagaacatgttatgaaccaaaaatacagcaagaaactaaaaaaatggactaataaataaactttaggacaaataaagggccctgtcattcacgatgctatgtttccttgatctggagagcaccatcctcagcattgttagaggtacatagaggaagattgtcaacaacaacttgaatgatcaaggggctgacattcgaagac

SEQ ID NO: 31680 - DNA, 609 bp, Oryza sativa
  Clone ID: PAT_MRT4530_35963C.1
aagggcgtcggtgttagctgacaccggtaggaacaccgtagatctgcccctgtcggggagagggaggagagggatgcgagggaatgcagggcgttgccgatctccaaccatcaccatcagtaccggatctacccctcatcgccatcgttatcgacacctcaaggctggaggcagctcgatccagagcttgcgcccctcccgtggccaaaaccgctgcccatggccctgtggcagtcgcatcgtcgtcgtagcggcctcccccgttgtcgtggcgatggatctggccacccctgtcatcacggtggcagacccggcctccctcatcatcacggcggcatatctggtcgcccccatcgtcgcggcaaaggatccggccccgagctcgtggcggccagcggccgagaagaggaggccacgccccgccgcggcggagaggtggtagaagcgatggcagctagcagcggtggtggcgacggaagccgacgacagtggtggcattggcagtgatcgcaacggtagctggtgacagtgaagaagggacgaagaagcagagaccgtgggagaagggagcgaggcggcggagagacggaggtagaagggagctgtggg

SEQ ID NO: 31681 - DNA, 516 bp, Oryza sativa
  Clone ID: PAT_MRT4530_35964C.1
cgcgcgttgaccacgcctcgctcctctcacgctgctcctcctcgctgattccaatagcgacggcgattccaccgattccgccgtcgaccagcgctgagccaccaccgcacaatcgcatccccttccgccggtgccacgcctgggacctcccgtcgccggatcccctcccatcatcggctgccacccggcgtctatcgccgtcgctgttggatgcaggtcgttgtccggcgtttgactgccctcgctattggatcaaggctgtcgcccatcgtcgggcatcatccactgtcaccgccgctcgccggctcgccgtccgatcgagcaggccagcacccatctccagcgcccaccaggtgagttcccacccttgcactgcagccaccctagccaccatgttcaattaccatgaaacattctctttcttccctctttcatgttctttgtaggtgaaccaggcatagaggatgtggtggaggcgtgggggcctatcaccatcagcttgaatttccgggatcg

SEQ ID NO: 31682 - DNA, 400 bp, Oryza sativa
  unsure (1)..(400): unsure at all n locations
  Clone ID: PAT_MRT4530_35965C.1
ggaggcttcaccttcccaaccaaacccaacctcgagcacaagcgganagatgccgccgccgccgccgccgcgcgcgccggcggccgccgggtagctcagcgcaaaaaagccacagccgcccgcccgcccgatccgttgcagcatggggngcggcggctcgcgcgcggcgtgcgcgcgggcgcgccgtggcactcgctcccggacgaggtctgggagacgcttctccttcctcccgcgcgggacaggggcgcggcgggggcgtnantcgtggtccggcgaggcggtcggcgcgctcgcgtgcantgtacgcgcggcggggacgcgtgagcgttccgtcgtcggcgcgagtaaaggaagccatttgcgaatttgcttntccccgcttggcgcccggggcctt

SEQ ID NO: 31683 - DNA, 2019 bp, Oryza sativa
  Clone ID: PAT_MRT4530_35966C.1
atgccgccgacctcagtgagcccaccaagaacagcgccggggccggcgaacccgagcccggcacacccgtcccgcgtgcgggtgatccacccgggcggcgggaagcccggtgggccggtggtgtactggatgctgcgggaccagcggctcgccgacaactgggcgctcctccacgccgccggcctcgccgccgcctccgcgtccccgctcgccgtcgcgttcgcgctgttcccgaggcccttcctcctctccgcccgccgccgccagctcgggttcctcctccgcggcctccgccgcctcgccgccgacgccgccgcccgccacctccccttcttcctcttcaccggtgggcccgcggagatcccggcgctggtgcggcgccttggtgcgtcgacgctggtcgccgacttctcgccgctgcggccggtgagggaggcgctcgacgcggtggtcggcgacctgcggcgggaggcgcccggcgtggccgtgcaccaggtggacgcgcacaacgtggtgcctgtgtggacggcgtcggcgaagatggagtattcagccaagaccttcagaggcaaggtgagcaaggtgatggatgagtaccttgtggagttccctgaattgccggcggtggtgccatgggacagggagcagccggagggggtcgactgggacgcactcatcgccagggtttgcagcactgaggcggagaatgtgccggagattgactggtgtgagcctggagaggaagcagccatagaggcgcttctcggcagcaaggatggattcctgacgaagaggatcaagagctatgaaactgaccggaatgatcccacgaaaccacgggcattgtctgggctttcaccataccttcattttgggcacatttcggcacagcggtgtgcgctcgaggcaaagaaatgccgacatcttagtcccaagatgtttgaagtaacatgtgttctgaaacagtccgtcgatgctttcttggaggaattggttgtaaggagggaattagctgacaacttctgctattaccaacctcaatatgattcgctgtctggtgcatgggaatgggcaaggaagacactgatggatcatgctgctgataaaagagagcatatctatacgagggaacagcttgagaatgccaaaacacatgatcctttgtggaatgcatcgcagttggagatggttcaccatggaaaaatgcatggattcatgagcaagcctttggtgcacataattctctttgattctgggcaaaccttttacactatttttgttcaacttttgttttggatctggaaagaaagaaaagtaacagtgcctgtaaggactttttcctttcctaatgtagtagttgtctgtagaatgtactgggccaaaaagattctagaatggactagtggaccagaagaagcactttcaactgcaatttatttaaatgacaagtatgagatagatggcagggaccccagtggttacgtcggatgtatgtggtccatatgtggcctccatgatcagggttggaaggagcgtccagtatttggaaagatacgttacatgaattacgctggctgcaagagaaaattcgatgttgacgcttacatttcttatgtcaagagattagctggtcaatccaagaagaggaacgctgaggagtctccaaatcctgtagtcaagctttccaagtctcagcactaaatccgactaggaaaatatgaacatttctttgtgtggtataccccgagctcggaaaattgaagaacagtgctaacttgaggtagatcatgtagggtataccctgtagatctgtttgtctgatatccttgtaggcttctaatcattcaaaatttgctagcattgttaagactttaagacatacagtgtccccccagttgaattcaagtgtacccattgatctaacactgaactaaagtactgcttactgcctaacaaacagtacttggcaaacgatgcctactgtgtaatgagaaagataaaagaaaatgtcttgcaggt

SEQ ID NO: 31684 - DNA, 663 bp, Oryza sativa
  Clone ID: PAT_MRT4530_35967C.1
atggatggatggatggctgggctggccttggccatggaccttggctgcatgattctccggccctttgtagctgggctagttgacccaccctacccagtggccatcatccgccgccgctgcacgtccgcgccgcgccgtcgtccgccgcggcccgccgtcgtccgcgccaccgccgcaaggccacggcccgccgtcgtcaacgcggatctgggagggaggggcggccgggagccgccgccgccccacacagccacggcccgccgtcgtcactccagatctgggaggaaggggcagccaggagccgctgccgcacggccacggcccgccgttgtcactccagatctaggagggaggggcggccaggagccgccgccgccaccgcacggccacgacccgccatcgttcgcgccgccgccgcacggccacggcccgccgtcgttactccagttctgggagggaggggcggccgggagccgccgccgccgcctcaactgccctcgccgccgtggccgtgccgccgcctcgaccctcctcgccgccaccgcccgccgccgtgctgcccctgcccccttccggccagatctgggagggaggggccgggagcgcgccgccgctgccctccgccgccaccgcccgccgccgccgccgggagaggaggagagg

SEQ ID NO: 31685 - DNA, 495 bp, Oryza sativa
  Clone ID: PAT_MRT4530_35968C.1
atggcggcgttcatggcgagcggcagtgcaggtcgcgagctgaaatgctgctacaaggccaccgtggacggcttcagcgcgacggacttccatcgccggtgcgacttcaagggcccctgcgtagtcgtcggccgcaccggcggcggggtcaggttcggcgggttcagcccggaggggtaccggagcacagacgactactacgacacgctcgacgccttcctcttctattggccggagacggacacggacgcagcggcgaaggaggcggcggtggtggtgctgccgaaggtgggcgggagcggggcggcgctgttcgactacgcgcggggcgggccgcagttctgtcgaaacatgaattcggcaataataaaaggaggtagcgcacgagacctaaaagtggatggatgcagagacaaaggatttagacaggttcaggccctctcgatgagaggtaataccctactcctgtttggggatttgaatccgccggtgtag

SEQ ID NO: 31686 - DNA, 217 bp, Oryza sativa
  Clone ID: PAT_MRT4530_35969C.1
tatccgatactagaacgcgagcgggcggcacggaccgggtttcttttaaagcggattcggcttgacgacccagccaacgtacccccatggacgccttcgccggatccggcaatgcctccagaggcgccggcgccggcgcgtacgagggcagctactactccctgctcggcattcggaagaacgcgatcaacaccgacgtgcgcgccgactacaagag

SEQ ID NO: 31687 - DNA, 741 bp, Oryza sativa
  unsure (1)..(741): unsure at all n locations
  Clone ID: PAT_MRT4530_3596C.1
tgctaatttgcccacattgaaacgtgaagacatactggcatcattcttcaataaatttgaagttctttttgagatctttacaaatgaaggatttcaggcgcttgaggaacagtactacaattcatggcttcatagtggacagaaggtcgttgtgcaggatgggcctgaagcccagcatgcagacagtgtggttactattcaggggttgacaccagctgggtacttgtatgctattggcgaggatggcaaaagctatgagttgcaccctgatggaaacagggttagtgcgaaggaagatggaaacgtagttctacatgaatacatacataggtagaagagcagtgtacaataatggatagaaggctgctaaaatccacatacttgtaaacatgaggggttgaaatgttttcaactatgtaaattaactttgagaaactgctnccccctttgggtttgctactgctaacatggcnccatcaggcacaagatcaaaataagccttccaattcaaggtgggattaaagaaaagaaaaggagttgncctgttaagtcctgtagagactcaaggnccagaaggagccatgctttgagtgaaatgtttctggctttctgctacccttttgtaagttgtaactttcttgaaacagtgtaacaatgattgatgcaataatatatcatctgagcttgttaaaaaaaaaaaaaaaaaaaaaaaaaaaaaaaaaaaaaaaaaaaaaaaaaaaa

SEQ ID NO: 31688 - DNA, 249 bp, Oryza sativa
  Clone ID: PAT_MRT4530_35970C.1
atggactccccagcgacccccacggacttctcgccgcttctcagtctggtcacggcggcgagaacagagggcaccaacgcgacgagcgcgacgcggggaactcaccggtgcaagaaacaacaacggacgacgacgaacgacgaccggcgacgagctccgaacggcggcgaaggctctccggtgaccggtggcgacggcgaaggggcgcccgagcttcccctcttccacgcgcacccgacggcgacgtga

SEQ ID NO: 31689 - DNA, 447 bp, Oryza sativa
  Clone ID: PAT_MRT4530_35971C.1
cccacgcgtccggccggttcacctgggagtgtatctagtgcagctgactccttttcaggggtaaacttgggggaagatgatgcttcatcacctatgaaaaattcagcgtttcacagtgcacctgctgttattgagtgcaaatgtggaatgcctttgtgtatatgcgaggctccgaaaccagaacctgtgcctgtaaagagtatcagcacaacttcctcaagtgcacagtcgaatcctaggccaaaaaaatcttctaccaatcaacaatctgctgaaatcaagtgtcaagaaggcttcggccacttcaagcagcaactcaagctcattcttaaatcttggcctgatgagcaatgatactaatgataagggtccttctgaatatgatgttactggggagggactgagggaagcaattaagagtgggggatattaaagctgtcaagaaac

SEQ ID NO: 31690 - DNA, 1293 bp, Oryza sativa
  Clone ID: PAT_MRT4530_35972C.1
atggccacaaaacaaattctccatatgaatccagggcagggcgaaacaagctatgctcgcaactccacaattcagaacacactcttcagtaaaacaagcataatatctaagaaagaattacacttgcagaaaacagcgcaagataggatgaaacctctcatagaggatgccatcaaagccttttgcggagcagctctccccaagagcatggtaatcgcagacttgggttgctcctccggccccaacgcactcactctcgtttcagctatggtcaacgccatccaccgttattgcatggaacacaagcagccacaaccagaaatgtgcattttcttgaacgatcttccatgcaatgacttcaacaccgttgcaaaaagtttgggagaattcaagcatggccaggacagttcctcccatcacatcattgtcaccagcatggtacctgggtcattttatgataggcttttcacatcgacctcagtgcatttcttctgctcctccatcagcctgcattggttatcagaggtaggcatgcaactagattcagttaactatatgtatgtgaacagcataagaatcccccatatatgttgccatggaataattggtcaatattcaccacttgtgcctttttacaagcaggcacctgaagagcttgtgaagagtaaaatcccaatgtacgatagtgacgataaattgaggctattgaaccgtgaaattgttgacaatgcttatgctcgacagttcagaaaggatttcacgctgttcttgtccttgagggctcaagaactagttcttggaggtcagctgattttctcattggttggcagatgctcaagcaaccatgcgtccaagtcaactcaagtatggaagctgctagccgtagccttgaacgacatggcatcgagagaacttcatgaattaattattggaatcaaggtttctttccagggtatgataagcaaagagaagtttgacacattccacatacctatctatgcacctttggacaaggaattagattcgatcattgaagatgagggttcatttcgaatcaacaagacgatggtctatgatgctttccatgccacagatggaatgttgcctagtccaaacataatggcttcaatgacaagagcagtgttcgagcctgtaatagtgcagcattttggattttcaggtgaaactatggctgatttctctagtgcagtggagcgtctctcgagttctagttttttggaagctgaattcccattagtctgcttgtgtttgtcgctcactagagcacgttga

SEQ ID NO: 31691 - DNA, 1358 bp, Oryza sativa
  Clone ID: PAT_MRT4530_35973C.1
gcacgaggcttcctctcgtcgattccgcctcagatcggggaggaatcgcggcgagatcggccgctccgaatccgatccgcgcacgtggtctcgccggcggggtcaggttggttcgcgggagccgccgccgccgccgccgacgacgacgatggccatggagacgccgccgccgttccaggagtccgcccactgcgacgtctgccgctgcaccttcaccaccttccgccgccgccatcactgccgcaactgcgggaggacgctctgccacgagcactcgtcgtaccatatggctctcccacagtacgggatatacacggacgtcagagtctgctatgattgcttcaacaaatcctccagtcgtggtggtgttggcaatgccggttcacctgggagtgtatctagtgcagctgactccttttcagggttaaacttgggggaagatgatgcttcatcacctatgaaaaattcagcgtttcacagtgcacctgctgttattgagtgcaaatgtggaatgcctttgtgtatatgcgaggctccgaaaccagaacctgtgcctgtaaagttttgtgtgcctccgcctaacgagcatatgcagcagagtatcagcacaacttcctcaagtgcacagtcgaatcctaggccaaaaaaatcttctaccaatcaacaatctgctgaatcaagtgtcaagaaggcttcggccacttcaagcagcaactcaagctcattcttaaatcttggcctgatgagcaatgatactaatgataagggtccttctgaatatgatgttactggggagggactgagggaagcaattaagagtggggatattaaagctgtcaagaaacttctcagccagggagtggattctaattactgcgataagcaaggatttgctttgctacatttggctgcactatttaaccagacagagattgctcttattctcatggataatggagcaaatattcagagcaaaaatggacaaggggaaactcctttggattgtgctccagccatgctgcaatacaagatgcgccagaggatggaagaacttgcggcatcacaacgaccctagtgatatttttctcctcttgttcatgtgccaaagatggtgcccccccttgcatggcccagaataaaaccatttttaccaaccgaggggcctctttgctgtgggtatagtagtatttctgttggcaccatcgcctacaaaatgtcaaaacaacaccagctcataaactgcatgtttcgccagctaaaaaaataattcattgtgcttaatcttgccatgtcatcgtgcatacatatgttcatgtatatgtaatcatatgtcctggtttattattagcattggtctg

SEQ ID NO: 31692 - DNA, 466 bp, Oryza sativa
  Clone ID: PAT_MRT4530_35974C.1
ctcaccgtgcgccgtcgacgatgtggcaagattctgccattgatcaaagatccataggccagacaccatatgaagcaacaagagcagagggaagaagtagcgccagcagcgccgatcagggacccagcactccgagatcaaagcattcagcaactgagcagagaaggaggaccaagataaatgacaggcaagctagtagaggcttgaaatacttcgtgaactcctgccacacactgatcagaagagagacaaagcttctttcctttcggaggtaaacagaatatcaattttggcactgtagtcagcaggctatattgcaatttctcccttgtgaagcattttgtttgcaggttattgaatacataaggtttttgcaagagaaagtccaaaagtatgaggaagccgatccagaaaggaatcacgaggattccaaatccatgccatgggcaaaagtctactatagatc

SEQ ID NO: 31693 - DNA, 251 bp, Oryza sativa
  unsure (1)..(251): unsure at all n locations
  Clone ID: PAT_MRT4530_35975C.1
acatacacaaatcactttttatatttttntgcgcatatttacctatagttagaaaccacatggattcccagcctctattattgacacaacatacacacaggtgtgacacaaacacacacgcacactgatggatacaggcacactcacacaggcatgagccatcacactgtatggactctctacttattcatcatgaagacaggctgctccattgtcaaatcagtcatacgttgtcttggccttagaaattg

SEQ ID NO: 31694 - DNA, 403 bp, Oryza sativa
  Clone ID: PAT_MRT4530_35976C.1
actggctacgatctatctccaacaatgatcaataaaggttcccaccaaccggagctggcttttcttttcatagggggtcgtgatgtctttctacggaatcacatgcctatttattagatcctacttgtggggcactattttgtggaatataggtagtgcttatgaccgatttgatagaaaagtgggagtagtgtgcatttttcgttgggtcttccttcgattccttatgcaggatatccaatcaattagaattcaggttaaagaaggtttttttcctcgccgtatcctttatatggaaatctgggccaggggccattcccttgagaagttttttactgtacgagaaattgagctttatgcaagacctgtgttttacctacacagtgtgcctagcttaacatca

SEQ ID NO: 31695 - DNA, 466 bp, Oryza sativa
  Clone ID: PAT_MRT4530_35977C.1
tccccaccccaacggcccgacctgcgccccctcccccagccctaatccctcctcatcgcgaagccgccgccgcctccatcccctgtcgtccctccacgccgcctccatccaacgacgccgctccgaccttcgactcgtgacgaatctgccgcaacctcgcccccgcaaccccgcctccatccctcaacgctgccctgaccttcggctctcgacgaatttgccgcaccccatccaccccgccacgccaaacacccagacctccatccccgacgccgcccctgccaccacgcagcccgtttgtttgtttctgcccgtttgctgcagatcgtgccgtgctgaagatcacgtaggagttcttgagtccgcctatggatgtgatgatgcaattgctcctggggttggccttatgcatgtgggcaggtcttgctgttccagcgaagttcctttcggtgctccctcactctga

SEQ ID NO: 31696 - DNA, 300 bp, Oryza sativa
  unsure (1)..(300): unsure at all n locations
  Clone ID: PAT_MRT4530_35978C.1
ctggtacgccgcggtaccgtccggatcccggtcgccacgcgtccgttctgtcgcggcgccgcccccctcgggttttgnctgaacaacactcatatatgcacttctctccaaatatacacaattttgtggccgcgggctagatagctagctgcacacttacggatcgtcgtcgtcgtcttcttcgtcacagcatcgccggagaagcagcagcaaggtcgaccacaagcaccactacatgttctgaataaactttttcanagcaaattagtactctaatttggtatgcccagaatgatgcat

SEQ ID NO: 31697 - DNA, 259 bp, Oryza sativa
  Clone ID: PAT_MRT4530_35979C.1
ccggccgggtcctctatctctatcctaccgaagccttggggggtcccctctctttctatttccgccgccgccgacgccgacgatggcctacaaccggtgggtccgaccggaggggcacccgctgttcgcggcgatgggcgtggacagcccaatctgaaggatgcagatcttacacaccatcaccgaaaacgggggagagggggggtagcaaagctaagagagcagactagagggagatacgaagcagggaggaagagga

SEQ ID NO: 31698 - DNA, 474 bp, Oryza sativa
  Clone ID: PAT_MRT4530_3597C.1
atgtccagcacccgccgcctgctccatgtccagcacccgccgcccagctccacgtccggcgcccgccgccccattccaagtctgacgccggtgccccgctccatgtccgatgcccgcctccccatgcctgggtcacgtcgtccctcgatccgcgccggctacgctagcgtcgatctgcgcccgccaccgagacccgccttggggtcctccgccgacgacgagggaaggaggggccatagcatggagctctgtttggttgcttgtcccccatctggacgacgagttatctcatcaaaaacgagggcgcgtgttgccgttccttgtgctgtggaggtcgttccctcgctcggcatcttgctcccactgccgctcggccctgaggaagccgccgcctcggccaccgtgccgctcgagattgctatgtacaccgcgccggccggagacaagcccgaggacgccgcgccactgctctag

SEQ ID NO: 31699 - DNA, 120 bp, Oryza sativa
  Clone ID: PAT_MRT4530_35980C.1
atggatctgacaatgctgagggacaaaagtctcaggagaggcactcgcgtgtgggtttggcaaaaaggaaagctgaaaggagttgatattactcaaggttgggagcaaaaactgaagtaa

SEQ ID NO: 31700 - DNA, 348 bp, Oryza sativa
  unsure (1)..(348): unsure at all n locations
  Clone ID: PAT_MRT4530_35981C.1
attncaaaaacagcancgttttaaaaataatattagcccacacaacaccaacttnatcattattttgtcncactaaacccatttttcccaacccaaaaacaacgaactcgcttgccacaaatccattcaaccacaattaaccactgctaatctaccgtcccccacttcacttaccgttgacgaaattagtgacgtacgcccaatcattattctttaccggttcagccaaattatcatcaaaattctttaaagagcccttgcccattactatatcctctacgaaaaagcccaacatttataacatatcgaagcatccgttctttatctccttcaccttaagctaccaaa

SEQ ID NO: 31701 - DNA, 259 bp, Oryza sativa
  Clone ID: PAT_MRT4530_35982C.1
aataagcggttttttcttcttttcttaatagagcggacatttcatggacttgaattatttggtctgtatttataaacataaccaccctataggaaacgcccgtactaaaaaccttattgtcgccctaaaaaaacaagaggaggttttttattgttatggaacgaatgaataagcctcagccgcaaagaaatgcgcgtggacaagaaacattgatttctttaaccaaacacaagccagacaaaaaaagatttaatcttat

SEQ ID NO: 31702 - DNA, 413 bp, Oryza sativa
  Clone ID: PAT_MRT4530_35983C.1
agaacgccccatcaccagctcccccctcgcaacccgacctgtgcatccagctgatcagtgcagcaaaggtgaagctggagtgctccctggctagcaagtcacaggggatcgaagatgggaatagcaatttaaaattagctggttaattaattacatacgttaggaaagaaaagccaggattgaactctgcaaattggattcttgattcttggaggagcctaagctaattgcttgctatgatcaagttagatgttgtttggttgcaagtattttcttgcagaaacactccgtgtattctccaatccatatttgaatgtcttatacatactttcgcaagaaattggaccaaaacgcccaccatttggggaagggaaatatggattcttttggaccaaaaaaaaaaaaaaaaaaaa

SEQ ID NO: 31703 - DNA, 284 bp, Oryza sativa
  Clone ID: PAT_MRT4530_35984C.1
ttcgtgatgatgctgctccgacggagacggcggcggcagcggcggcggtgatggtggtgaaggtgtgcgaccacgacggggcccaaggaacggttctttcgacggccgccggcacggcggccgcacacgcctcaggcgagtcctgcaactgccgctacgtcggctgcctcgccacgtcctcgccgccctgccattgcttctcgtcgcggtctgcggtctgcccctgggacttctccagcagagacagcgaggcgggagcgaggtcacacatggagccgaactag

SEQ ID NO: 31704 - DNA, 348 bp, Oryza sativa
  Clone ID: PAT_MRT4530_35985C.1
atggcttccccctccgcctctcgccgtcgccgcgaccacggcaagcggaccaggcggggcggctgccggtcatcatcctcaagcgctaatctgagcctcccccgcgcgccgccgctctctggaaaccctaacccttccccctcctccaccaccagaggtccagcaccacctccggtcgccgtctcggcgggcacgggaggaaggaggcggaggaggtggagggactgggcggagctgccgatggacgcgatcctggcagtcttccacaagcacgaccacatcggcatcctgacgggggctggcgccgcgccgcgtcgcgtcgaggccgagctctggcgacgcatctga

SEQ ID NO: 31705 - DNA, 3514 bp, Oryza sativa
  unsure (1)..(3514): unsure at all n locations
  Clone ID: PAT_MRT4530_35986C.1
ttttcctcccctttctctctccttcccgatctgtctctctctctctctcctcgagctctcgccgcacgctcccaaaagcggcgccgcgccgagctcgagctcgagctcgcggcgggcgacgagctccggcgagcgcgcgcgcgcacgctgaccagcgggggtttccccgtccgagctcgcgcgggcgtcgtctcgtcgggcccccttttcacctttctatcggtcattgaggggtgttctctctccccccaggccaccgcttcgcctggccgctcgggcgctcgccgcggattttcctggcccgccgagtggcgggatcgcggccaaccgcggaatggcgcagagcaactgggaagcagataagatgcttgatgtgtatatctatgactatctgctgaagaggaacttgcagtcgacggccaaggctttcatggcggagggaaaggtcgccgctgatccagtcggtaatcatctcatatccgctgcttctctagttgctgccccttttgtttttttgccgggtttttctctcgtttcaatctccaaaggagtaattttcagccaaattagaacagagaactcggaaaattggaagaggtggggaagctctccccctggtgatttagtcaaaaaaaagaaagaaagggcaattgatgctcctggagggtttctctttgagtggtggtctgttttttgggatatatttattgcaagaacaaatgagaagcattctgaggttgcagcggcatacctagaggcacagcaaatcaaagcgagagagcaccaacagcagatgcagatgcagcagttgcaactaatacaacacagacatgctcaactgcagcgaactaatgcaagtcatccttcacttaatggtccaataaacaccctaaattctgatggcattctggggcattcaacagctagtgttttggctgccaagatgtatgaagagcgcttgaagcaccctcaatccttggactctgagggatcacagcttcttgatgctagtaggatggctcttctcaagtcagctgcaacaaatcatgcagggcaattagttcccggaactcccggaaatgtgtctacaacgctgcaacaaatccagtctaggaatcaacaaactatggatataaaaagtgaaggtaatatgggtgttgcccaaagatctttgcccatggacccatcatccttatatggacagggtattattcagccaaaacctggattgggcggtgcaggactaaaccaaggagtaagcggtctaccattgaaagggtggccattaactggaattgaccaattgcgaccaaatttaggtgctcaaatgcagaagccatttctttcaacacagtcacagtttcaacttatgtcaccacagcagcagcaacaattcttagcacaggcccaagcacaaggcaatcttagcaactcaagtaactatggggatttggatccccggagatatacagcactaaccaggggtggcttgaatggtaaggatggacagcctgctggaactgatgggtgtattagttccccaatgcaatccagttcacccaaagttaggtcagaccaagagtatctcataaaggtacaacagacatcttcccagcaaccgcaggaacagcagcagcagcagagccagcaacaacagcagcagcaaagccagcaacagcaaatgcaacagagcaatagaaaaagaaagcaacctacatcttcaggagcagcaaatagtactggaacagggaatacagttggcccttcaaccaattctccaccatctactccatccacgcataccccaggagatggacttgggatgcctggcaatatgcgccacgtcccgaaaaatttagtgatgtatggtgctgacggaacaggactagcatcctcttcaaaccaaatggatgatctcgagccatttggtgatgttggctctttggaagataatgttgaatcattcttagccaatgatgatggagatgcaagggatatttttgctgcacttaaaagaagtcctgcagagcctaacccagcggcttcaaaaggttttaccttcaatgaggttaattgtttgcgcacgaacaatagcaaagttgtctgttgccatttttcttcagatggcaagatattggctagcgctggacatgaaaagaaggctgtactttggaacatggacaccttccagagccagtatacatcagaagaacacagcctcataattactgatgtccgtttccggcctaattcttcccagctggcaacatcatcctttgatagaactattaagctgtggaatgctgcagatcctggattctgtttgcatacgtttgttgggcataatgtccaagtcacatctttagattttcatccaaagaagacggaccttttgtgctcttgtgatggcaatggtgaaatccggtactggaatctgacccagcttagctgcatgcgtgccatgaagggaggtactgcccaagttcgattccaacctaacactggacagtttctcgcagctgctgcggagactatggttgccatttttgatgttgaaacgcacagcaaaaaatacacactacagggccataacacagatgtgcaatcagtgtgttgggacagcagtggggagtaccttgcctctgtcagtcaggacttggttaaggtctggtcaatatcatcaggagagtgcattcatgaggttagctccaatggaaacaagttccactcttgtgtgttccacccaagctatgccaatctccttgttattggaggctaccagtccctggagctatggaacatggtaaagaaccagagcatgacgatacaagcccatgaaggtctaattgcggccttggcgcaatcgccagtgaacgggacggtggcttctgcgagccacgacaactctgtcaagttgtggaagtaatatggaacatggtaaagaaccagagcatgacagtgcaggctcatgaaggtctaatcgcggcgttggcgcaatcaccaattacagggatggtggcttccgcgagccacgacaactctgtcaagctgtggaagtaacaatggctgcacttcggtaacatagtttcttatagttagttgaaagtttcttcagccgaggcatagaatgggtcacagccgaaagatgctgttgttgttgtactgtatcgggaggcaataaaaggatgtcgaatttgaaccgttcagtgctcattgcagcgagattgtgggagttgcatttattatttatttatttatattaataggtgttggtgtcgcccaaaatgatcaaagaagaggaaaaggaacgaaggccatagtaggggctctgttttattttatttatttatgttatatgaaatgtaaatggtaacgtggtattcccaatatgtatggcgattgatgataacaccagaaaaaaaaacctcgtgccgcctcccccccgcccgggaaatgtttagggcttgtttagttcgcgaaataaaaattttttagtatcaaaaaaaaanaaaaa

SEQ ID NO: 31706 - DNA, 2710 bp, Oryza sativa
  Clone ID: PAT_MRT4530_35987C.1
cctctttctctctctctctctctctcctcgagctctcgccgcacgctcccaaaagcggcgccgcgccgagctcgagctcgagctcgcggcgggcgacgagctccggcgagcgcgcgcgcgcacgctgaccagcgggggtttccccgtccgagctcgcgcgggcgtcgtctcgtcgggcccccttttcacctttttttcattggtgaggggtgttctctctccccccaggccaccgcttcgcctggccgctcggccgctcgccgcggattttcctggcccgccgagtggcgggatcgcggccaaccgcggaatggcgcagagcaactgggaagcggataagatgcttgatgtgtatatctatgactatttgctgaagcggaatttgcaggcgacggccaagtcgttcatggcggaggggaaggtctccgccgatccagttgcaattgatgctcctggagggtttctctttgagtggtggtctgttttttgggatatatttattgcaagaactaacgagaagcattctgagatcgcagcagcatacctagaggcacagcaaacaaaagcaagagagcatcaacagcagatgcaaatgcaacagttgcagctaatacaacaaagacatgctcaactgcagcgaactaatgccactcatccttcacttaatggtccaataagtggcctaaactctgatggcattctgggaccatctacggctagtgttttagctgccaagatgtatgaagagcgcttaaagcactctcatcccatggactctgatgggtcacagcttcttgatgctagtaggttggctcttctcaagtcggcgtcaacaaatcactcagggcaatcagtacctgggactcctggaagtgtgtctacgacgcttcaacaaatccaagctcggaatcagcaaaatattgatataaaaagtgaaggtaacatgagtgtagcacaaagatctatgcccatggacccatcatcattatatggtcagggaataatccagccaaagcctggattgggtggtggagttttaaaccaaggagtgagtggtctaccattgaagggctggccgctaactggaattgaccaactgcggccaaatttaggtggtcaaatgcagaagccatttctttcaacacagtcgcagtttcaacttatgtcgccacagcagcagcagcaattcttagcacaagcccaagcacagggaaatcttggcaactctaccaatttaggggatatggatccccgaagattgtcagcgctaaccaggagcgtgttgaatggtaaagatggacaacctgctggaactgatgggtgcattacttccccaatgcaatccagttcacccaaagtcagaccagaccaagaatatctcatgaagttatacctaaaaggtacccacatgcagcagacatcttctcagcaaacacaggaacaacttcagcagcagcataatcagcaacagcaacagcaaacacaacagggcaatagaaaaagaaagcaacctacatcttcaggagcagcaaatagtaccggaacagcaaatacagttggtccttcgaccaattcaccaccatctactccgtctactcatacgcctggagatggacttggaatgactggcaatatgcgccatgttccgaaaaacttaatgatatatataagcaaggctgtcgtttacttacaggatgatcttgaacaatttggtgacatgggctctttggatgataatgttgaatcattcttagccaatggagatggagatgcaagggatatttttgctgcacctgaaaaaagtcctgcagagcctaatccagtggcttcaaaaggtttcaccttcagtgaggtaaattgttggcgaacaaacaatagcaaagtagtttgctgccatttttcatcagatggcaagatactggctagtgctggacatgaaaagaaggctgtactttggaacatggagactttccagacacagtatactgctgaagagcatgctgtcattatcactgatgtccgtttcagacctaactctaatcagctggcaacatcatctttcgatagaactattaaactgtggaatgctgcagatcctggcttctccctgcatacatttgctggtcattgctctggaatcacatcactagattttcatccaaagaagacggaccttttgtgctcttgtgatagcaatggtgaaatccggtactggaatgtgtctcagcttagctgtatgcgtgccatgaagggaggtactgcccaagttcgatttcaacctaacactggacagtttctcgcagctgctaccgagaatgtggtttccatatttgatgttgaaacaaatgggaaaaaatataccctacagggccataactcagaagtgcaatcagtgtgctgggacagcagtgggcaataccttgcttctgtcagtcaggacctagttaaggtctggtcaatctcatcaggagactgtactcatgaggttagctctaatggaaacaagtttcattcttgtgtgttccacccgggctacaccgatctccttgttattggaggctaccagtctctggagctatggaacatggtaaagaaccagagcatgacagtgcaggctcatgaaggtctaatcgcggcgttggcgcaatcaccaattacagggatggtggcttccgcgagccacgacaactctgtcaagctgtggaagtaa

SEQ ID NO: 31707 - DNA, 297 bp, Oryza sativa
  Clone ID: PAT_MRT4530_35988C.1
atgagctctccggcgaggtcgaccgtgtcggcggccagcgcgggcgcgatctcggcctccgacgacgtcgccgactccatcgacgcgctctaccgcaaggatgaggccatggcagagctcaagtcggaggtgatggaggcgctgcaaaaggaggtcaggtcgctcgatgacgacagctggatgttcgccgcgccccgctcccgcatcaacctcgtctctatgtctggtggttacctacgcaagcagcaggaaaaattggctgacctcggtcaagcatccaagaagacgaggaatttc

SEQ ID NO: 31708 - DNA, 1404 bp, Oryza sativa
  Clone ID: PAT_MRT4530_35989C.1
tttgttttttaggtaaacaagcaattgatttattagtatccatccaattaaaactgtgtgttacactcgaaataaaattttctgttcgtaacacctctgaaaacaaaaaatgattcctacacaaggaaaagaatcaacgaaacaatccttagcaaatgctacaggagcaacatctcctggggaaccccctctgtggttggactgctggaaagtagcttgaagtagaaaaaccttcaacctttcatcagctctagtcccatcttattattcagttttatcatggtgaaattgcaccacgatgcatgtaatgttgtcagcgctgcctcgagaataggctatttccgtgagtttcctagccaccgactcaggcaggtcttctgttttcgcaagggaaacacattgctcattttccacgacatcccaaagtccatcgctagcaagaacgaggcattccaagtcttcattgacaagttcttcctgaatttcaggctctgccaccacaaatggcttcagtagacgattgccaaatgcacgcgacattgccagtacacctcctaccctccaagtaccagcccaaatgacaactcctcctgcattttcaattctcttccgctcatcactcctgttaggtttgtgatcttctgacagtgccatagctttaccagcttttgaaacaacagcacgggaatcaccaacatttgctacatatagatggccacccaccaaaactgcagtggaagctgttgaaccatcatccctcgcccacccgccgctggcgtaccctgcggcaccaccgtcctgcgcgctgcaggcgacggcccccgccgcacgctgctgcggctgcatctgccccgcagcggcggcggagtcgaaggagtcgagcatcatcctggcggccacccggagcccgcgccacccgctgtgcccacggagaagcgcgcgcgcatccaccgccgccccgccgccaacgccgccggagagggccctggggagaaggaagcggggggtggtggtggtggtggcgcgcagcagcagaggcagagccctcctcaggctagcgaagcataccatctcatggctgggcaggcggtgcgctcccctccccaccgccaccgcggcgatcgaggcgagatccagtggcgcgcgcggggggcggtgggttaataatggggttgggggatctgggggggcgtggggcggtggaggggaggaggaagcggcgggggcggggtgaaggaggaaggggacggtggtgtgggtgtgggcagattcccctgtggcgtatgggtggaccccggggaccctgtcaaataaggggcctggacgataggcaaggtcgagctggagtccacctcccgtcccctccctacggcgtacggcaatcaccgccaccacccgcatcat

SEQ ID NO: 31709 - DNA, 395 bp, Oryza sativa
  Clone ID: PAT_MRT4530_3598C.1
ggggaattgaagaggaaggaattacggagaaattactcaacgtcgccgcctctgcctcgccgtcggccgtcttccgtcttccgtcgtcgtccatcgtcgcgccacacctcggtgagttccccacgtcgtgctcttgtcttcatataagatgcagtgccgcgacggcgacggccgcgggcagcatggcctcgacgtgggccacgttggccgccgccgaggcgccgacaggatcacaggaacgtgacacgcaccccacggacggtaaggaggctacgggccagctgcacgaacgggttgatgtggccgaacgcaaggaacgggaacaacgctacgtgcaacgtttcgccggcctcgtcgccggcggcggccgtggcatccacaccggccattcttag

SEQ ID NO: 31710 - DNA, 817 bp, Oryza sativa
  Clone ID: PAT_MRT4530_35990C.1
aagttaaaccgtaatttcactgtgaaatgcattgctttgaggtggaaaatgaaaatccgcctacatttttcatttagataaacggtttataaggattgcatggtactgagctttaagcctagctgaacatgctggtgaagtgttttgatttttttcttgtctacattacaatggcatgaaaggattactcataccaaatttgggtgcaggacacaaccgcaatggattgacaccgggtcacagttccttgattcccttcaaacagatgcctggtagaattctggacttgtaaacttgcagaggcttccctggaagacacctagttcctagaaattcctcgtcttcttggatgcttgaccgaggtcagccaatttttcctgctgcttgcgtaggtaaccacctgaaattcttaagatcctgaatcaaccactaattcgcagcgggcgatggctctaactccaattaaataagggcaaagtaagctggtggtcaactactagacagtaagctatatcttattcgtaaaccacaagtaaactgagtgagctgagagctgtagtttcgtcgatgttaccagacatagagacgaggttgatgcgggagcggggcgcggcgaacatccagctgtcgtcatcgagcgacctgacctccttttgcagcgcctccatcacctccgacttgagctctgccatggcctcatccttgcggtagagcgcgtcgatggagtcggcgacgtcgtcggaggccgagatcgcgcccgcgctggccgccgacacggtcgacctcgccggagagctcatcggaatcacgcgatgct
